United States Patent Application Publication US 2007/0054278 A1 - sequence listing, part 127

SEQ ID NO: 291323 - DNA, 201 bp, Homo sapiens
agttttcagcatggctaaactagaaaatagtgacaccaccaaatgccgacaaggctgtggggaaactgggttgttcagacactgccactggggctgtagcrtactatagccactttcataaacagtttgtcagtttcttaaaaaactaaacctgcaactaccatatgacccagcaattacacccctgggcacctacccaag

SEQ ID NO: 291324 - DNA, 201 bp, Homo sapiens
catgactgctcctgattaaagcccggaaggcaacaaagtaatgctgagggtgcatttatgtttcagaaccaccgggaggaactgggccattctaacacccrttgctaccatgctggccacccgcctctccagacccctgtcacggctcccaggaaaaaccctaagtgcctgtgatagagaaaatggagcaaggtaagcaac

SEQ ID NO: 291325 - DNA, 201 bp, Homo sapiens
gatcgatgtgagctgcttgtgggcaggactccacagtgtgtcatcactgagttgtttccagcctcttatgcatctcagcttctctctccagaggtctatgwcctctgagagggctcaaaatgccaggtgatcagcccttatatgcatttcctggatgacccatttttaaaattaaatttttctggggatttccctgcaggg

SEQ ID NO: 291326 - DNA, 201 bp, Homo sapiens
catcccagccaaaactataaaacttttagaaaagaacatagaagaaaatctttgggtcctgggggcaaagagctctgagacttgacatcaaaagcatgccrcataataggaaaatactagactttatttaggggttaagagtttagactctggactctctcagccttggtttcactagttagctctatcactaactacatt

SEQ ID NO: 291327 - DNA, 201 bp, Homo sapiens
gaacacgttttcacatctcactgcagtggtgcaatatacaaccctcatgactgcacatggtggccctggattactgccacagatcctaatgggtctccctkcttctgctctagtccatcctcaacttattaacccagtgagagttacctttttaaaaatgtaagtctgataatggcactcctcttcttaaaactcttcttt

SEQ ID NO: 291328 - DNA, 201 bp, Homo sapiens
caagtaggtgagagacaaatggttacattcttttgagtttctgattagcctttccaaagaaggcaatcagatacacatttatctcagtgagcagggggatractgaatagaatgggaggctgggttgccctaagctgttcccagcttgactttccctttagcttagtgatgtgggggccccaagatattttcctttcacac

SEQ ID NO: 291329 - DNA, 201 bp, Homo sapiens
taaacatgaaaagatgttcaacatcattagccattagggaaatgcagattaaaaccacagcgaaatatcatgatacagttttcagcatggctaaactagaraatagtgacaccaccaaatgccgacaaggctgtggggaaactgggttgttcagacactgccactggggctgtagcgtactatagccactttcataaacag

SEQ ID NO: 291330 - DNA, 201 bp, Homo sapiens
ttaaaattaaatttttctggggatttccctgcagggccactgcatgttgcagggggtcaactccccagacgctcccacgaggcccctggtcacccagggaygcctttcgctggaaagagcaaatgtcctttctctttggagctcagaaaactcagtttctcatttgcctatgaaaacaacagttcagttcctcagacaaat

SEQ ID NO: 291331 - DNA, 201 bp, Homo sapiens
gaaaaataacagcagacttaaagcatggcagaaaggaaaatagagaaaaacggactaggaactctagaatttgcaggttgaccttagggctctttttcctyaatgtaaatttgcacaaagactgtattacttccattttactctggcaaatagaggtgccataaaaccaataaggtgctctaaagggggtcattctccttg

SEQ ID NO: 291332 - DNA, 201 bp, Homo sapiens
ttattagaactctgatgacatttatttgtccctcttttagaagacttacaggacttctaatgattcatttagcttacatacatgcttcatttccctccatraacccccaaaatctcaggtgcctcatttccctccatgaacccccaaaatctcagacaggtctctcagttaattcagaaagtttattttgcgaaggttgag

SEQ ID NO: 291333 - DNA, 201 bp, Homo sapiens
aacaacagttcagttcctcagacaaatgcacacagacaaacacaattgagattaattatgggagaaaaagcaatagataagaccctttagaatgcatctcygaactagaattaggatccttaaacaacaatttcctaggagagaagagaaaagaaaagaaaccagccaagaccacttcctgtaaactgtgctcagccaccc

SEQ ID NO: 291334 - DNA, 201 bp, Homo sapiens
gtggtgcaatatacaaccctcatgactgcacatggtggccctggattactgccacagatcctaatgggtctccctgcttctgctctagtccatcctcaacwtattaacccagtgagagttacctttttaaaaatgtaagtctgataatggcactcctcttcttaaaactcttctttttttttttttttttttgagacagag

SEQ ID NO: 291335 - DNA, 201 bp, Homo sapiens
agaacgagattccatctcaatgaatcaatcaatcaatattgtgtgtctgttgtgtgcagggcactgctgtacatgttggagatacaacagtgaacaaaacagacaaaaattcctgttctcaaagagcttatattctaatgagactgaacaacaacaaacaagataaatatgtacaacatgtagaatgctataatgtaataa

SEQ ID NO: 291336 - DNA, 201 bp, Homo sapiens
cttcctagatacaatggaggtacaggcattggataaatatacccattccaaatgggagaaatgggtcaaaacgaaggggccaaaggttccatgaaagtccraaatccagcagggcagccaaatcttaaagctcctttgactccatgtctcacatccaggtcatgctgatgcaagaggtgggttcccatggtcttgggcagc

SEQ ID NO: 291337 - DNA, 201 bp, Homo sapiens
gaacgagattccatctcaatgaatcaatcaatcaatattgtgtgtctgttgtgtgcagggcactgctgtacatgttggagatacaacagtgaacaaaacagacaaaaattcctgttctcaaagagcttatattctaatgagactgaacaacaacaaacaagataaatatgtacaacatgtagaatgctataatgtaataaa

SEQ ID NO: 291338 - DNA, 201 bp, Homo sapiens
gggtcaaaactgagaattaatacacctcatatgctgttggtgggaatgtaaattagtacaaccactacagagaatagtttgtaggttcctccaaaaacaamaaatagagctaccataggatccagcagtgccactgctgggtatatacccaaaaggaaggaaatcagtatattgaagagatatctgcactcccatgttggt

SEQ ID NO: 291339 - DNA, 201 bp, Homo sapiens
tccagcccagagctggtgatgcggaaaatcagggcagatggcagcaggatctaaaatagggagggaagaagtcctcagttacgtaacagcgaggagactcycagcctacgcacagtagcaaccatggggtcctgccactcgagccagaccctccttcccttcccgttttgggctctaagtgctgccgcctgtgagagaatg

SEQ ID NO: 291340 - DNA, 201 bp, Homo sapiens
ccaaaatctcagacaggtctctcagttaattcagaaagtttattttgcgaaggttgaggatgtgcacctgtaacactgcctcaagcggtcctgacgacatrtgcccaaggtggtcagagcacagcttggttttatacattttagagagacatgagaagcaatcaacatatgtaaaatgaacattggtttggcccagaaagg

SEQ ID NO: 291341 - DNA, 201 bp, Homo sapiens
gcctattggccagaggcaggtcacgtgaccactaggtgggtggtaatctggaaagcgttgggcgcactgctgtccctggacaaaatccagattcttgttartgaggcagatgagaagaacggatgctggcaggcaaagagcagtgtctgtcacagctcagctgggctgtggcctccagctgttcacagggatattggggct

SEQ ID NO: 291342 - DNA, 201 bp, Homo sapiens
tctttatcgctgtattatttatttgaaatataatgccatttatttgtgatctgttttccttgttgttgattcttgttgatgtaatttaatttctgaatatrtaaactgttaacaaggctgtaaaggcaaaaattatacaaattggtaaaatcaaagtagcgttattccctcacccctatctgttccactccattccttcat

SEQ ID NO: 291343 - DNA, 201 bp, Homo sapiens
aaaaaaaaaaccccacaaaactttaataaaattcaattgcatcaaaacaaacagaagactgtggggtttggggcagtagacagtgtttttattccctatcrcccagcagaactcagcaaagcaggctgcacgctggctctgtgaggacttggaggtggctgcctaagggcaggatttaacctgcactgtcctgaattaaca

SEQ ID NO: 291344 - DNA, 201 bp, Homo sapiens
ccccctggggataggtctttgtttttcttttcctgtagggcagtggtattgaaccttggttgtgggttagaatcacctagagaacagtgagggaaaaagtrtctgtgcctcacctctgggtcaggagtgaggctaggcaaaggaatactttaaagaacttccctgtgattaaaaagaaaaaaaaaatcattctatggagaa

SEQ ID NO: 291345 - DNA, 201 bp, Homo sapiens
tggtcacttgcctggagaggatcctgcatgctgatagtgctgaggcacctgccagctaaggtgagagacagctgaacttgaacatgtgggctgtcactgaragcggtcagcagaagaaaatttgagccatgggtaaggcctggtagaaagggaggaggttggggaggcgtgaataggcctttggaaagaggtgctgttaac

SEQ ID NO: 291346 - DNA, 201 bp, Homo sapiens
taattttttaaaagcttaatatgttgaataggtaatatatttacatggtacaaaatttgaatggcaggccgggcgccgtggctcatgcctgtgatcccagyactttgggaggccgaggcaggcggatcacctgaggtcaggagttcgagaccagtgtggccaacatggtgaacccccgtctctactaaaaatacaaaaatt

SEQ ID NO: 291347 - DNA, 201 bp, Homo sapiens
tccctggtagcaatagggataaataaaaagtaatatgtattcattgggaaaataattggaaaaagaattaggcaaaataagcatgtggttttgtatcttgttttttaaaacagcttgttgtaatacattagatattctttgaaaaaaatagaatttgaagttcagaaaatcaaatcagttttagggattgagaatctcact

SEQ ID NO: 291348 - DNA, 201 bp, Homo sapiens
aaatctcaggaaaaatagacatagagggggattttcctgaacttgataaagggtaaacaccataagccttcagctaacatacttaagggtgagactgaatkctttgtccctaagatggggaacaaaccaaggatattagttctcaccgcttatccaacatagtgctgtaatttctagccagtgcaataaggtaagaaatgg

SEQ ID NO: 291349 - DNA, 201 bp, Homo sapiens
gtcctggtcagtgtccttctttctacaagaggcgttggagccgggctctgcatagggcgtatatatccctggccgccaaggaagctgacccttgaaatttktgaagctttcatattcactcaatacacatttacagagcctctacttcctgtcaggcgtcacacaataaatattcggaggagcaagaagagagtgattcaa

SEQ ID NO: 291350 - DNA, 201 bp, Homo sapiens
cccaaaaaactattagacccaaacagtggttttatctcagtggaaaaataacagcagacttaaagcatggcagaaaggaaaatagagaaaaacggactagraactctagaatttgcaggttgaccttagggctctttttcctcaatgtaaatttgcacaaagactgtattacttccattttactctggcaaatagaggtgc

SEQ ID NO: 291351 - DNA, 201 bp, Homo sapiens
cctcatggatgggattagtgtctttataaaagagacctttgccatgtgaggttacagtgagaagacatctgtctatgaagaaagtgggccctcaccaaacrcagtctgctggcactttgcacttcaactccccagcttccagaactgtaaggaatataagtctgttgttggtaagccacccggtctatgatattttgttat

SEQ ID NO: 291352 - DNA, 201 bp, Homo sapiens
tttgcattctcctcaaattcctgtgttgaaatcctaacccccaaggtattggtattaggaggcaggggccctgggaagtgattaggtcataaaggtggagycctcatggatgggattagtgtctttataaaagagacctttgccatgtgaggttacagtgagaagacatctgtctatgaagaaagtgggccctcaccaaac

SEQ ID NO: 291353 - DNA, 201 bp, Homo sapiens
gtcggcctgaggggggatggagaccatagagcaggaagtgactgatgggtctgcctgaggggtggggtgaagacggaggtggaggagtgagtgagacaaasagacccaggaggcttctccagcagcccaggagacaggcagcgaggacccaagggaatgctagtggaaacaggaaggaagaactgacccagcagaggaaac

SEQ ID NO: 291354 - DNA, 201 bp, Homo sapiens
tcagggaagttaatgaatgtaaagggcttgattaggggtctgccagctgtcatgttgatcttgagctgtaatattagcagtactgggtgactcagtaggtrggggaggggtggaggagctggaggagtcacagacaaaagtaaaatcattaacaaagaggaggagcaggcttgggcagcttggaaacttgacgtgttggtt

SEQ ID NO: 291355 - DNA, 201 bp, Homo sapiens
aaactgtgttgatataggagccgacatgagcaagcagaggctcccctggctcaggcagccccaggttgggttggccagacagcaaccaggcacaggggccragtgcaggtcctgctacccagccaccacagcttcctctcacctgattctcacagcaacccaggcaggataggcagggtggggttatcttattttgcagaa

SEQ ID NO: 291356 - DNA, 201 bp, Homo sapiens
gtgaatgaagctttaatttgggtaacacggaaggaaagcagctagagaccaattactctgtcatttacacaaactcatttccatgattaacttggaaaatraagcagcgccgagttcccacaggcaggggagggccccaggatgggagctctgctctgaggctgtgccttgggaaggagcacggggctatcggcccgggag

SEQ ID NO: 291357 - DNA, 201 bp, Homo sapiens
cctatggtctggtgactccagccagcacaaacccatcccctgatggttggaggctgggcgagggcttcttgcaagatgcgcctgacagtgccttgttacasagcacctgctgtgcttagcattccacccggggccaagaggctgtgtgagcaggtgacagccagcctggccccgcctgtcacaagctgctaggtctgcacc

SEQ ID NO: 291358 - DNA, 201 bp, Homo sapiens
cagcgccgagttcccacaggcaggggagggccccaggatgggagctctgctctgaggctgtgccttgggaaggagcacggggctatcggcccgggagaccraacactgagggtttccacaacaaagaggcagggcccagctctgtcctgaggctctgacccatccagcctttgcaccccaacaaactgaactcagagaggt

SEQ ID NO: 291359 - DNA, 201 bp, Homo sapiens
atcgcgccactgcactctagcctgggtgacaagagtggaactttatctcaaaaaaatataactcatctcaaatataactccatctcaaaaaaacacaactrtaaactaagttcctcccaaagctagctcagcccacagccaggaatgaaaaaggacggcttggaggttagaagcaagatggagttggttaggtcagctctc

SEQ ID NO: 291360 - DNA, 201 bp, Homo sapiens; identical to SEQ ID NO: 60172

SEQ ID NO: 291361 - DNA, 201 bp, Homo sapiens; identical to SEQ ID NO: 60163

SEQ ID NO: 291362 - DNA, 201 bp, Homo sapiens
cctattgactgagaaggctcctgggtggctcagaagtggttccagccaagcctctagagacatgccagacttctgcccgctgtgtcatagggcagtaacgscttagcaggtacctctgtctccctctgtaggccgcgtcgtcaatatcagcagcatgctgggccgcatggccaacccggcccgctccccgtactgcatcac

SEQ ID NO: 291363 - DNA, 201 bp, Homo sapiens
tgcccctgcctgctgctctgtttgccaggcggtcctggtctccacccaggctccaccctaccagggtggaatggagttggggagttgggcctaacagcacrggtcctgtcctctttcagggctgtcccggggctccctcccagctgcagccccaggtacttcctcgtctgcactccaacccccatcgccagggctgctgtc

SEQ ID NO: 291364 - DNA, 201 bp, Homo sapiens
ctatcactagctacattgagcgttttaaaaagacctctgtttctcacatgtagcatgggggattgtagatgagatcctgaaggcagaagtaattttcccargcaacattgctggttggtagccgagtctgggttagaacctggcctttccactataccatggtgcttctccagacaacaagaacaaggtagggagggccag

SEQ ID NO: 291365 - DNA, 201 bp, Homo sapiens
agtcaggttcagaaatcctgcccctgcccctgcctgctgctctgtttgccaggcggtcctggtctccacccaggctccaccctaccagggtggaatggagytggggagttgggcctaacagcacgggtcctgtcctctttcagggctgtcccggggctccctcccagctgcagccccaggtacttcctcgtctgcactcca

SEQ ID NO: 291366 - DNA, 201 bp, Homo sapiens
cccctggtttcctgattccgagtccaagtgaaatacttttgcccctgcagtagaccctgctacagaggataaaaaggcacgtcataggctaggagaaaaawtttgcctaccacatatgtaaccaaggactagcagctaggacatctgaagaattctcaacattcaacggggtagaagaatgaacgattcaatagaatatgg

SEQ ID NO: 291367 - DNA, 201 bp, Homo sapiens
ttaatctccacatatacctctagccctgagcagccactgatttctatttctttaggtttgcattttctggacttttcatctacatgaaatcatacaatacrtggccttttgtgccacacttcttgaacacttagtgtgatgtttttgagagtcatccatgttgcagaatgcatcagtagctcattcctttgtattgctgag

SEQ ID NO: 291368 - DNA, 201 bp, Homo sapiens
taccaccctggagaccctggagactgcgtggtcaggacagctgagggctgggacccagtgtggtatggaagggagatggagaggatagagcgcgcgcgcgygtgtgtgtgtgtgtgtgtgtgtgcgtgctctgtcacccaggctggagtgccgtggcatgatccggctcattgcaacctctgcctcctgggttcaagagat

SEQ ID NO: 291369 - DNA, 201 bp, Homo sapiens
gcaacagcagacattagccagcctcagacgactacagtcttgcccctaatttgctgccccggatccaaccttggaagggtcagaagttaagaataggaggsgagaggagctagaaaacagtgagaaagacaacctccaccagcacctacttcccacagccctcagggctgggcaggggaaagctttacctcgcatacaagt

SEQ ID NO: 291370 - DNA, 201 bp, Homo sapiens
ttgagattacaggcatgaactactatgcttggccatctttcaaagtttatatgtgtattcatccatttccttattgctgataaaggcatacccaagaatgrgtaatttataaagaaaaagaggtttaatggactcacagttccacatggctggagaggcctcacaattatggcagaaggcaaaaggcacatcttacatggt

SEQ ID NO: 291371 - DNA, 201 bp, Homo sapiens
gcaggtgaaagaaaggtgtcagggaagatgcaggagatgcctgggtatcactaatgctgagggagaggtgagcctcaaggagtactggcagtactcatatygtagcgagcctgaggagagtgaagactgggggtgaggtccttggtgtaccaccctggagaccctggagactgcgtggtcaggacagctgagggctgggac

SEQ ID NO: 291372 - DNA, 201 bp, Homo sapiens
tgacataccctggagacattttctctatcatcttggcaatctggctcttcattacttatgcaaatttctgcagccagcttgaatttctcctcagaaaatgygtttttcttttgtattgcgtcaggctgcaaattttccaaacttttatgttctgtttcccttttaaaactgaatgcttttaacagcacccaagtcacactt

SEQ ID NO: 291373 - DNA, 201 bp, Homo sapiens
tctaagaccacctcagcctggatttcattgtccatatcattgtcagaattttggccaaagccatttaacaagtctctaggaagttccaaactttttcacatttttcctgtcttcttctgagccctccaaactgttctaacctctgcctgttacccagttccaaagttgcttccacattttcaggtaccctgacagcagtgc

SEQ ID NO: 291374 - DNA, 201 bp, Homo sapiens
agccattccagcttctgttggattatccacatgaatgatgcccagctgattataaaaaattctgtactccatgctgagttcctgtaactctagaaaaaggaaaaaaaaaactgtactccaaatagctacagaaactgggattttaaaaatccctttcttcaaagaaagaacctcagaacaattggtggtgtgcttaaccca

SEQ ID NO: 291375 - DNA, 201 bp, Homo sapiens
ttttttttgtttttttttgttatttttgtttttgagacggagccttgctctgtcacccaggctggagtgcagtggcgtgatctcagctcactgcaacctcygcctcctgggttcaagcgattctcctgccccagcctcccgagtagctgggactgtgggcgcccgccaccacgcctggctattttttgtatttttagtaga

SEQ ID NO: 291376 - DNA, 201 bp, Homo sapiens
atactgggcttctttcctttgctgtcaattccagaaaaagctactcaatacctataaaattctacagattaagggtatgatttccagccaaaaaaaaaaamcccacaaaactttaataaaattcaattgcatcaaaacaaacagaagactgtggggtttggggcagtagacagtgtttttattccctatcgcccagcagaa

SEQ ID NO: 291377 - DNA, 201 bp, Homo sapiens
ctggcctgcaggctgatgggcaatgtctgggccaagcccatgtggtaaatgcacatctatccctctcctgtccaggcatgtggggcctcgttaacaatgcyggcatctcaacgttcggggaggtggagttcaccagcctggagacctacaagcaggtggcagaagtgaacctttggggcacagtgcggatgacgaaatcct

SEQ ID NO: 291378 - DNA, 201 bp, Homo sapiens
gtgccctcccgggggcacacctggatgggctgagtgccctcccgggggcacacctggatgggctgagggccctcccgggggcacacctggatgggctgagkgccctcccgggggcacacctggatgggctgagtgccctcccggggacacacctggatgggctgagtgccctccccgggacacacctggatgggctgagtt

SEQ ID NO: 291379 - DNA, 201 bp, Homo sapiens
gcctggagacctacaagcaggtggcagaagtgaacctttggggcacagtgcggatgacgaaatcctttctccccctcatccgaagggccaaaggtgagtgrgaaagggagctccctcctgcccctgaacctgccccacgtgttcatctttgctcagaatggaaatacctgtcccagcagctccaatgtccacaactcagca

SEQ ID NO: 291380 - DNA, 201 bp, Homo sapiens
cacaggaaagaagcagagaggaggctggcctgcaggctgatgggcaatgtctgggccaagcccatgtggtaaatgcacatctatccctctcctgtccaggsatgtggggcctcgttaacaatgccggcatctcaacgttcggggaggtggagttcaccagcctggagacctacaagcaggtggcagaagtgaacctttggg

SEQ ID NO: 291381 - DNA, 201 bp, Homo sapiens
atgcagtggcgtgtcccccatctcctgctctcgctttcttcccgtctccctctcctccctctccctgcttcccctccacactctgccactctgccatgtcytggccttgccttggcaattccccctcaggcaatgccggctgtgaactccagggagcaccctcccagagcgttccgacccgcagtggccgccaccgaccca

SEQ ID NO: 291382 - DNA, 201 bp, Homo sapiens
gccactgaaggggtcatcctgagggaatggcctggtcattgtgagacttgtgaatctccctctgaggatggcagtggcaatgtgaaggtggattcaaagcrggagttaaacatgggttctggactccggaactagggtggtaggtgttgggaaacaggaagggtcaggtgcgaggagtgttgagaaggcgaagctgcctgg

SEQ ID NO: 291383 - DNA, 201 bp, Homo sapiens
attttcacatcgagtgtagctcatccctattgtgaaagaaaccatgtttcatagaataggatgaaatgtgacaatgcagcctgcctggtgacacgagggtkcacgtgacaaagcacatcagcacttagcacagtgctcaggacagtggacactcgggaaatgctgtctacttagaggaaagccccccagcagctcggcagt

SEQ ID NO: 291384 - DNA, 201 bp, Homo sapiens
ccggggtgactacgtccagcacctccggccccattgggcagtcccttcaccatttcctcctgtgccctctgaaattgcatgatgtgatttctccattcccrgggttggggttcttctggttgaaagcattcagaaggctcagcctaaccagcggaggactttccacccctgacaagtgctgaccgtcctgggctttccacc

SEQ ID NO: 291385 - DNA, 201 bp, Homo sapiens
tggtcctggctctgttctctgtggctgcatggaacaagctggctccctcagtcatgttccactcaagtcttctctccggggtgactacgtccagcacctcyggccccattgggcagtcccttcaccatttcctcctgtgccctctgaaattgcatgatgtgatttctccattcccggggttggggttcttctggttgaaag

SEQ ID NO: 291386 - DNA, 201 bp, Homo sapiens
gtcacagaaaccaaggaggtgcgggagggagtgtcacagaaatccaggggaagaggggacagtgcagtacagagctccaggagggagtgtgcagggtgcayctgagaaacagcatgaagcctctgtggctgaagcagaatgaggggggagtagagtgaagtgaggggcacgggagcagatcttgtatcagcatagggaagg

SEQ ID NO: 291387 - DNA, 201 bp, Homo sapiens
agtagctgggactgtgggcgcccgccaccacgcctggctattttttgtatttttagtagagacagggtttcaccatgtcagccaggctggtctcgaactcrtgacctcaggtgatccacctgcctcagcctcccaaagtgctgggattacaggcgtgagccaccacgcctggccaagggactgagtttttatgcactttta

SEQ ID NO: 291388 - DNA, 201 bp, Homo sapiens
ggcacacctggatgggctgagggccctcccgggggcacacctggatgggctgagtgccctcccgggggcacacctggatgggctgagtgccctcccggggrcacacctggatgggctgagtgccctccccgggacacacctggatgggctgagttccctcccaggaaaactggtcccagatccgcctcggcttcccgggct

SEQ ID NO: 291389 - DNA, 201 bp, Homo sapiens
tactcggtttggttcggcctcacgtgttcctttagctccgaagccgggatacgggtggggaaggggggctcgcgccctacaggccgagccctgcggccgcrgcggggtaagggtaggatggccgatcgcgcccagaccccagggagtctccctctcggcttttctgccggcgtctccagcagcatgatctggcatttatta

SEQ ID NO: 291390 - DNA, 201 bp, Homo sapiens
gatccatccagtgcagggtctgcaaagtatcccaagcgctgatcttaggagcagtgtagggagggtcagaatcttgtagcctctagctgcatggctataaattatggtttataatttgtaatctggtgcctaatttgttagtcctacaaagacagtctgatccccaggcaagaaggaggtttgttttgggaaagggctgcc

SEQ ID NO: 291391 - DNA, 201 bp, Homo sapiens
acgaagggcagggtttcaccacattggccaggctggtctcaaactcctggcctaaagtgatccacccgcctcagcctcctacagtgctgggattataggcrtgagccaccgcacccggtctacagttttctttaaatcttcatcatgccagtacttccctcctcctgttttcatcttcctgtatttgcaagtttcattcat

SEQ ID NO: 291392 - DNA, 201 bp, Homo sapiens
acggggagggtagcgggggctgttggtcaagtggtgggattagccggcacctcaatatgagtcatgggtcaggtcacgcagagggggtggcagcaaaggakgttggggagggaggtcttggatcccaggcgagggaacatggctggtctcccaatggcactggggagccactgaaggggtcatcctgagggaatggcctgg

SEQ ID NO: 291393 - DNA, 201 bp, Homo sapiens
ccttccactcctgcaacagtgattctagaattggttgactggtattttgaagaaagtaccagacaagctcattggcaggttatatctgttggtatctaccycttgacccattccatctgctatctgagatcagtcaggcaagtcagaaagcagttagcaccaccagaggctttggataaggcaccgtgggggttgaaaggg

SEQ ID NO: 291394 - DNA, 201 bp, Homo sapiens
cctagactgaccactaaccccggaaggggacaaacatgtcccctccctgggcctcagtttcctcttacttaccctaataggattggactggtgatcttagrtccttccactcctgcaacagtgattctagaattggttgactggtattttgaagaaagtaccagacaagctcattggcaggttatatctgttggtatctac

SEQ ID NO: 291395 - DNA, 201 bp, Homo sapiens
cagaatgcatcagtagctcattcctttgtattgctgagtggtattctgttgtgtgcctatgctatatatatatacatatatgtatatatatatatacacayatatatatatatatatatattttaatttatgtttttgagacagagtcttactttgtctcccaggctggagtgcagtgggtgcaatcttggctcactgcaa

SEQ ID NO: 291396 - DNA, 201 bp, Homo sapiens
cccaatctcttgctccaaggcagcttaaatgcaggtgtatacattatttgtgagttttgctattacaggtcgagtatctcttatctgaaatgcttgggacyagatgtgttttggattttggatttttccagattttggaatatttgcattatacttgctcagcatctctgatctgaaaatccaaaatccaaagtgctccaa

SEQ ID NO: 291397 - DNA, 201 bp, Homo sapiens
ctcattcctttgtattgctgagtggtattctgttgtgtgcctatgctatatatatatacatatatgtatatatatatatacacacatatatatatatatatatattttaatttatgtttttgagacagagtcttactttgtctcccaggctggagtgcagtgggtgcaatcttggctcactgcaacctctgcctcccgggt

SEQ ID NO: 291398 - DNA, 201 bp, Homo sapiens
gagccaccatgcccacctaatttttgtatttttattagagatggggtttcaccatgttggccagactggtctcaaactcctgtcctcaggtgatccactcrccttggcctcccaaagtgctgggattacaggcgtgagccaccacgtctggcccaaagcactatttttaaaagctacttgtattaatttttgttttttctt

SEQ ID NO: 291399 - DNA, 201 bp, Homo sapiens
agattactctaaaatttatatggaaaggcaaaggaaatagaatagctaaaagaattttgaagaagaaaaataaagtagcagcacatatatcaatgaatcaraatagaaaatccagaaataggcccacccaaatatgcccaaccaatttttgacaaaagtgcaaaagcaattcaatagaggaaagataacgttttcaaaaaa

SEQ ID NO: 291400 - DNA, 201 bp, Homo sapiens
ctcccgggttcaagtgattcccctgcctcagcctcccgagtagctgggactacaggcatgagccaccatgcccacctaatttttgtatttttattagagayggggtttcaccatgttggccagactggtctcaaactcctgtcctcaggtgatccactcgccttggcctcccaaagtgctgggattacaggcgtgagccac

SEQ ID NO: 291401 - DNA, 201 bp, Homo sapiens
ttaggggaaatgaggtaagacctggcatctctctgtattatttcttaattgcatgtgaatctacaattatttcaaaataaaaagtatgattgaagtaactmtcaggaagcttagcctactgtggattaagacatcaaaattgcagcaggctttaacaaagctatactactacaaggatagttcacacttgaattagcttga

SEQ ID NO: 291402 - DNA, 201 bp, Homo sapiens
agctgcaaattgagggaagaggaattagagtaggatgaggcaatcccagcagtggccaagaaggaaaggccgagaagtccagcagtgctcaggaggcactstcatgctagctggagctgcccgcccaggagtattcacagccccaccttacccaccttgtcagggtattgctgtggggggggcaggtgagtcgagatagaa

SEQ ID NO: 291403 - DNA, 201 bp, Homo sapiens
aatacacactattttatgtgctggttttgggcctaacgcctcatgggcattcttagccctgggagaccagtgtatgagctgggattgcctcacactaagartagcaggaacccctagaagtctagggccattgtggctttggggagcccaggctccttgtttttttctgctgtgttattctgaaggcagctcaggatccca

SEQ ID NO: 291404 - DNA, 201 bp, Homo sapiens
ctgaggtcgggagtttgagaccaacctgtccaacatggagaagccccgtctctaataaaaatacaaaattagccgggcctgtggcgtgtgcctgtaatccyagctacttgggaggctgaggcgggagaatcgcttgaacccgggaggaagaggttgcggtgagccgagatcgtgccattgcactccagcctgggcgacaag

SEQ ID NO: 291405 - DNA, 201 bp, Homo sapiens
agtgtgttgaccggtgggggcgcggtggctcacacgtgtaatcccagcactttgggaggctgaggcgggcggatcacctgaggtcgggagtttgagaccamcctgtccaacatggagaagccccgtctctaataaaaatacaaaattagccgggcctgtggcgtgtgcctgtaatcctagctacttgggaggctgaggcgg

SEQ ID NO: 291406 - DNA, 201 bp, Homo sapiens
gggacgcctttcgctggaaagagcaaatgtcctttctctttggagctcagaaaactcagtttctcatttgcctatgaaaacaacagttcagttcctcagamaaatgcacacagacaaacacaattgagattaattatgggagaaaaagcaatagataagaccctttagaatgcatctccgaactagaattaggatccttaa

SEQ ID NO: 291407 - DNA, 201 bp, Homo sapiens
ccgcaagatccagaccccacaagatccagaccccgcaagatccagacccctcaagatatagaccctgcaagatccagacctcacaagatccagaccccacragatccagacctcggctatctggcttctcttttttttgcgacagagtctcaatctgtcacccaggctggagcgcagtggtgtgatctcagctcactgcaa

SEQ ID NO: 291408 - DNA, 201 bp, Homo sapiens
atttgcccaaaatcacagagccaggaaacgagagagccaagatccagaccccgcaagatccagaccccacaagatccagaccccgcaagatccagacccckcaagatatagaccctgcaagatccagacctcacaagatccagaccccacaagatccagacctcggctatctggcttctcttttttttgcgacagagtctc

SEQ ID NO: 291409 - DNA, 201 bp, Homo sapiens
tcattcctttgtattgctgagtggtattctgttgtgtgcctatgctatatatatatacatatatgtatatatatatatacacacatatatatatatatatwtattttaatttatgtttttgagacagagtcttactttgtctcccaggctggagtgcagtgggtgcaatcttggctcactgcaacctctgcctcccgggtt

SEQ ID NO: 291410 - DNA, 201 bp, Homo sapiens
attcctttgtattgctgagtggtattctgttgtgtgcctatgctatatatatatacatatatgtatatatatatatacacacatatatatatatatatatwttttaatttatgtttttgagacagagtcttactttgtctcccaggctggagtgcagtgggtgcaatcttggctcactgcaacctctgcctcccgggttca

SEQ ID NO: 291411 - DNA, 201 bp, Homo sapiens
cagaaaatggaactttattggagtgggacactggatggccagggtttagcagagcctgcccaacaaaagtagcttcagaattggctttattctcaggaagsctcttcctggacagtggcaaacatagccatagcaaatactggctcactttctatcagccagcaaccctggtggaaagagggcctcttactcagttgtacc

SEQ ID NO: 291412 - DNA, 201 bp, Homo sapiens
acatctccttattgaggagaaatcttttctcctgttaatgccactccttgttcttgggtctgcccctgcattcacactgagcgagttattcccttctcccmaggggcactgtgccacctcaatacccacccacttgtctactcttactccacccacatggtttctccttgtttatctctcatggtttccccactatcatcc

SEQ ID NO: 291413 - DNA, 201 bp, Homo sapiens
tgtgttgaatgggagccactttagtgagggagacagaggactcagcatccaggatgagggcagagcaggagccggtactctgaggcaggaacgccctcacrtgggcaaggagttcttggagtcagtggtggctgcgacgcagtgagcaaagaggagggtggcccagtgagctaggggcctccagggagggagaggccagcc

SEQ ID NO: 291414 - DNA, 201 bp, Homo sapiens
agtagagacagggtttcaccatgtcagccaggctggtctcgaactcatgacctcaggtgatccacctgcctcagcctcccaaagtgctgggattacaggcrtgagccaccacgcctggccaagggactgagtttttatgcacttttaattattttggctttagtacttttagatatggctgacttcaaggaaaacaaaatg

SEQ ID NO: 291415 - DNA, 201 bp, Homo sapiens
gttcaagggactgagttttttgtgttttttttgtttttttttgttatttttgtttttgagacggagccttgctctgtcacccaggctggagtgcagtggcrtgatctcagctcactgcaacctccgcctcctgggttcaagcgattctcctgccccagcctcccgagtagctgggactgtgggcgcccgccaccacgcctg

SEQ ID NO: 291416 - DNA, 201 bp, Homo sapiens
cgaggtgggcagatcatttgaggttaggagtttgagaccagccgggccaacatggtgaaactccgtctctactaaaaatacaaaaattagccaggcatggyggtgcatgcttgtaaccccagttacttgggaggctgaggcaggaggattgcttgaacctgagaggtggaggttgcagtgagccaagattgcacccctgca

SEQ ID NO: 291417 - DNA, 201 bp, Homo sapiens
gccagggtgggagtccaggcggcgcacccgcgcgaggacaagggggctttggctgggcggtgctgtctcaaccaatgggaagcgtggctctggccgagccyccctctctccccgccctccggccggccgttggggagcgctgctctgggattggctgcgccgccgtctcgggcgttctcgcgctctgcttacgtgctgacg

SEQ ID NO: 291418 - DNA, 201 bp, Homo sapiens
actactttctaggagaggttctcgggagggacagcttgactaatacaatggagatccatgaagatacgtgaggtctcttgctgctagagagcggtgccagygttgtgagacaaggcttcaaaaacagcttcaaggcttccagagagtggcctcgccacatcctaagctctccaagcgtctgtcaaaatcctgggtttctat

SEQ ID NO: 291419 - DNA, 201 bp, Homo sapiens
agggggtcaactccccagacgctcccacgaggcccctggtcacccagggacgcctttcgctggaaagagcaaatgtcctttctctttggagctcagaaaaytcagtttctcatttgcctatgaaaacaacagttcagttcctcagacaaatgcacacagacaaacacaattgagattaattatgggagaaaaagcaataga

SEQ ID NO: 291420 - DNA, 201 bp, Homo sapiens
agttccaatttcatttagagtccaattattaaagttcagttgaagctgagcatggtggctcatgcctgtaatcccagcactttgggaggctgaggtgggcrgatcatctgaggtcaggagttcaagaccaccctggccaacatggtgaaaccccatctctactaaaaatacaaaaattagctgggcgtggtggcgggcacc

SEQ ID NO: 291421 - DNA, 201 bp, Homo sapiens
atttgaatggcaggccgggcgccgtggctcatgcctgtgatcccagtactttgggaggccgaggcaggcggatcacctgaggtcaggagttcgagaccagygtggccaacatggtgaacccccgtctctactaaaaatacaaaaattggccaggtgtggtgatgcaagcctgtagtcccggctactcaggaggctgaggca

SEQ ID NO: 291422 - DNA, 201 bp, Homo sapiens
acctgtgccactgatatgtgttcctcctaagccccgtcttgttagattcaaatggactcatggctcctctcagcagaaagctgggttactggttattgttkctgattcctgatggggacaataaaaggcacagacacacagactggtaagatagagaagaagccagaatgaacgccctggccagcatagggagcgctctca

SEQ ID NO: 291423 - DNA, 201 bp, Homo sapiens
cccggggagccagccacgggggcgagatgaaggagattgtctggtgagagccacagagccatctgccaccggccccgacccccgcaggacgctgagggacrggacatctggagcctgggaccagccctccctgtccccaccccaggggacaccgagccagtgggcccgagagcaggccgtgggcatggcctgatcttggca

SEQ ID NO: 291424 - DNA, 201 bp, Homo sapiens
gctcagctgggctgtggcctccagctgttcacagggatattggggctttggcattcaaggggctcaaaggggaaccccctggggataggtctttgtttttyttttcctgtagggcagtggtattgaaccttggttgtgggttagaatcacctagagaacagtgagggaaaaagtgtctgtgcctcacctctgggtcaggag

SEQ ID NO: 291425 - DNA, 201 bp, Homo sapiens
gccttggcaattccccctcaggcaatgccggctgtgaactccagggagcaccctcccagagcgttccgacccgcagtggccgccaccgacccacaccccaygcaggacatgtcagaagggtcctcttccccttctccaccgggggggcacatttggttggcgagtttgacgccctgcagcctggctctgtggaacagttgc

SEQ ID NO: 291426 - DNA, 201 bp, Homo sapiens
ttttgggaaagggctgccatctttgttttaaactataaactatagtctgggcgtggtggctcacacctgtaatcccagcactttgggaggctgaggtgggyggaacacctgaggtcaggagttcgagaccagcctggccaacatggcaaaaccctgtctctactgaaaatacaaaacttagccaggcgtggtggtgggtgc

SEQ ID NO: 291427 - DNA, 201 bp, Homo sapiens
acagtcttgcccctaatttgctgccccggatccaaccttggaagggtcagaagttaagaataggaggggagaggagctagaaaacagtgagaaagacaacytccaccagcacctacttcccacagccctcagggctgggcaggggaaagctttacctcgcatacaagtttgggagtttgggttctcaaaccaggctgggct

SEQ ID NO: 291428 - DNA, 201 bp, Homo sapiens
gcgttctactgctatagaagaaggatgaagggaagagtgggcattcaggacaacttgctttctctgctcggtgggtgagacatttttctttattttcaagscagtaggaacccaggggaggaatttcccatactatgttgatatctttgtaatatttgatacccaacgtaaaatttcaataatataaacaagtaaaagaaa

SEQ ID NO: 291429 - DNA, 201 bp, Homo sapiens; identical to SEQ ID NO: 60168

SEQ ID NO: 291430 - DNA, 201 bp, Homo sapiens
ggagggaggaggtagagatgtgtgtgcttagccagctggtcagtacttagatggtgggagggggtgcctcatgaaaaagtctgagccaacgtgggcctgtrccttccataaaaccataaaaagccagtctgggctccattctgctgctctctgcaaggagctttccatggaaacttcttttgtggccacaggccgactttc

SEQ ID NO: 291431 - DNA, 201 bp, Homo sapiens
ctaatctggtgactggaatgtctctcaggacgatcaaggtgtctgcattgggtgtgcctaatgttagacccttggcttttattgaaggtccctgtgaaacragccatgtgagtgtcatctctgcatgtatgatacagtggtggtgagaacactgtctactatatcacttgatgttcctgtgtaattatttctgacttttgt

SEQ ID NO: 291432 - DNA, 201 bp, Homo sapiens
ggggtggccagagaatgtcttagtaaacattttagtaaaggactgtggatattgagggaagagtgttctaggtagagggaacagtaaggacaaaggccctraagcaggagctggcttgctatgttccaaagacagcaagaaagccactgtgaccaaagtgcagtgaaccaggtaggaatgaggtcagagggacaatggaga

SEQ ID NO: 291433 - DNA, 201 bp, Homo sapiens
gctccagcagatgtctgccacctcctacgtcactggctccacgctctctcctgggtcatttcagcacatgcacacacacacacacacacacacacacactyactcactcactcatacagacctacaccaccacaccctgtgtacattacctccccacggctctgctccttgttgcagaaaagcacccccagagggggtgca

SEQ ID NO: 291434 - DNA, 201 bp, Homo sapiens
gcctgggatgtttgcttcagtagcagctgtgtgtgccatgggcaagcccttggctggcgagtgggcatttctctacccctttactcttggctgctagtccwgtcctcttacaagaggtgtcactatgccatgcaccattcaggaaaattgctgccaattaagtcatttatgaccaactatgtttaattttcacatcgagtg

SEQ ID NO: 291435 - DNA, 201 bp, Homo sapiens
ggttcaagtcattagaagccttctctagatttttttggtactgcagatggcaaagggggaaggaggtatagggtagaagaaaagtaaatgaaataaatatwttttttttaagacaggaagcaaacacagaaagcaagtgcatgtttttgttgttgttgttgttgttttgtttgtttgttttagctgtgagaaattttggcc

SEQ ID NO: 291436 - DNA, 201 bp, Homo sapiens; identical to SEQ ID NO: 60164

SEQ ID NO: 291437 - DNA, 201 bp, Homo sapiens
gggccaggcccatgggcagttgccagtatgcctgaggctttggctgggacttgaggccagctcctgccttgacaggagtcctcagggtctgcctcagggtrggaaggaaggaggtagaagcagctcttctctcctccccaggacaaaggccatgatggggtcaaggagctggacagcctaaacagtgaccgattgagaacc

SEQ ID NO: 291438 - DNA, 201 bp, Homo sapiens
ttgaatgacttgaatttttggccctgtgtttcaggaatgcagtttattttgattggcattttctaccgagactaaagatgggattttaattgctgtcagtrtttaaactttagcaggacttggtatcttttttacacccaggagtcaaagccctgtaactaaatgtcacaagtactttaaaacctcatacagagagacata

SEQ ID NO: 291439 - DNA, 201 bp, Homo sapiens
gaatactattaactagtctacagaccttattccagtgttgccaagtggctgctgatggacctttttctggtccaggatcgaatcccaaatcccacatggcwcggaggtgtcatgtgtttttagtttcttcctgccggggacaggtcttcagtctttttcgctcacgaccttgacactctggctggttatgttgtacaatgt

SEQ ID NO: 291440 - DNA, 201 bp, Homo sapiens
ctttgacattaatgattaatttatagagaaactgaacttattttatctctcaacattggctcttacaatctcacatgcccctttcctgagaaagttgaatracttgaatttttggccctgtgtttcaggaatgcagtttattttgattggcattttctaccgagactaaagatgggattttaattgctgtcagtgtttaaa

SEQ ID NO: 291441 - DNA, 201 bp, Homo sapiens
atctataaaattttaatcttgaccataagctataacttccataagcctttcataacctttataacctttacttaggagttggttaatatttcataaaaacmttgttaatttgacatgggctcatatgctggtcttgcatcagtgtgcctttgacattaatgattaatttatagagaaactgaacttattttatctctcaac

SEQ ID NO: 291442 - DNA, 201 bp, Homo sapiens
gaatcccaaatcccacatggcacggaggtgtcatgtgtttttagtttcttcctgccggggacaggtcttcagtctttttcgctcacgaccttgacactctsgctggttatgttgtacaatgtctctcagtttgggtttgtgtggcaagacgcctgcggcagtgaagcggtgcttttctcagcccgtcgtgccaggaggtac

SEQ ID NO: 291443 - DNA, 201 bp, Homo sapiens
ccacatgaatgatgcccagctgattataaaaaattctgtactccatgctgagttcctgtaactctagaaaaaggaaaaaaaaaactgtactccaaatagcyacagaaactgggattttaaaaatccctttcttcaaagaaagaacctcagaacaattggtggtgtgcttaacccaaagcatttggagtaggacagacttgg

SEQ ID NO: 291444 - DNA, 201 bp, Homo sapiens
cagttcaagatgatatttgggtagggacacagccaaaacatatcaatataatcaaccagaacctataacttttcctcattgaagacatcagaaattgccayctgtattgtactaattgaatgaaatttctgtgtaacaaagccattccagcttctgttggattatccacatgaatgatgcccagctgattataaaaaattc

SEQ ID NO: 291445 - DNA, 201 bp, Homo sapiens
ttagtctgttttcttgctgctgataaaggcatacccaagactgagtaatttataaagaaaaagaggtttaatggactcacagttccacatggctggggagkcctcacaatcatggcagaaggcaaaaggcacgtcttacatggtggcagacaagagagaggatgaaagccaagcaaaaggggtttccccttgtaaaaccat

SEQ ID NO: 291446 - DNA, 201 bp, Homo sapiens
tcagttcctgggtcggggccacaagagcagatgagccagtttgtccacctgggtggtgccagctgatccatccagtgcagggtctgcaaagtatcccaagygctgatcttaggagcagtgtagggagggtcagaatcttgtagcctctagctgcatggctataaattatggtttataatttgtaatctggtgcctaatttg

SEQ ID NO: 291447 - DNA, 201 bp, Homo sapiens
tctagttccactagggatgtaactgcccaatggcttcaccttgctcactgcctagacagaaccggtttatcaagacagaggacttgcagtagacaaagagyaattcacgcagagccggctgtgcaagagaccagagttttattattactcaaatcagtctctccaaacattcaggaatcaagagtttttaaggataatttg

SEQ ID NO: 291448 - DNA, 201 bp, Homo sapiens
aaacgcagtctgctggcactttgcacttcaactccccagcttccagaactgtaaggaatataagtctgttgttggtaagccacccggtctatgatattttkttatagcagcccaaacagactaagacaggtgacaaataaacatgaaaagatgttcaacatcattagccattagggaaatgcagattaaaaccacagcgaa

SEQ ID NO: 291449 - DNA, 201 bp, Homo sapiens
gcagtgttgggagtgacctgatttccacagactgtctgtgttcaacctcacagccgaatgtttctccagttccaaagtcaacaaccagaacggtagaaggwggggaaaggttgaaggtggggctgagaatggctttgtctgaccccttaacccagtcccaactcctcagttggccctttctcctgggagtctcttgctact

SEQ ID NO: 291450 - DNA, 201 bp, Homo sapiens
cagattttaagaatgttagcacaggtctttgaataaattttgcttctaagagaagttactatttattcctaattagaggggaggaaagtctttgaagactyacctctactttacttttcacacctccttgaaggcagggactaaggactgtttccctcccaaaactaacgtgctaatttgcaaacagtacctccctgggtt

SEQ ID NO: 291451 - DNA, 201 bp, Homo sapiens
aaatagcttaaaagacgttttcttgtatctgaaaaacaaaacaaaggatcagcaacattttaagcaaaaagtttaaaagattactttagtcttttattagwtcagctcacgcagttagcttttgttctgacattcatgaacatttcagttctccatgagagtcctgaaagtttttttctctattctaatgttccaatctcc

SEQ ID NO: 291452 - DNA, 201 bp, Homo sapiens
ccacccgccttggcctcccaaagtgctaggtttacaggcatgagccactgtgcctggccataaccacttcttaaaaccctttttattttgaaataactttrgacttatacaaaagttgcaaaaatcgttggaaagggtttctggatccccttcagctaacttccctaaatgttaacatcttacaaaaccatactgcaatga

SEQ ID NO: 291453 - DNA, 201 bp, Homo sapiens
cctgttacaaatgaaaacagattcttattgcacttatgcaaataactgtattgtcataagaatactcacacatagttcccaaattttggagaaatcaggtwgacagaaacaaatatggtctaaattttgttcatagaagtatacttcactcaattgttaaaagctgtaaatagcttaaaagacgttttcttgtatctgaaa

SEQ ID NO: 291454 - DNA, 201 bp, Homo sapiens; identical to SEQ ID NO: 60169

SEQ ID NO: 291455 - DNA, 201 bp, Homo sapiens
ttctttacttatgacacatcaggaaccctttacaatggctgtgtagacaaaggtatcacagcagtttatccaatgggcttttattgcctccataagtcaaktttgaatccttaaaggaaagcacaccattccagtcaaaactttagtaaaataaccagtttctccaattgtgtcctgttacaaatgaaaacagattcttat

SEQ ID NO: 291456 - DNA, 201 bp, Homo sapiens
agaattctcaacattcaacggggtagaagaatgaacgattcaatagaatatgggcaaaagacatgaagaggcattttaccaaacatagggtgctatggtcygaatgtttgcattctcctcaaattcctgtgttgaaatcctaacccccaaggtattggtattaggaggcaggggccctgggaagtgattaggtcataaagg

SEQ ID NO: 291457 - DNA, 201 bp, Homo sapiens
aaaatcatggtaggactggtttgctttactatacttggcctaattatttgtatacaatgcagccagagtaattatttttttacataggcttttaaattggytttgatggaactttgttccatagaaggaatctcagataagacatttttttaaagctgagcccagctatggatttgtgccatcaggtacctatgagttgag

SEQ ID NO: 291458 - DNA, 201 bp, Homo sapiens
gcagagtctgggttacaacccctggtttcctgattccgagtccaagtgaaatacttttgcccctgcagtagaccctgctacagaggataaaaaggcacgtyataggctaggagaaaaattttgcctaccacatatgtaaccaaggactagcagctaggacatctgaagaattctcaacattcaacggggtagaagaatgaa

SEQ ID NO: 291459 - DNA, 201 bp, Homo sapiens
gagggggcttccaggtcacgggtagatgagagacaaacaattgcactcttttgagtttctgattagcctttccaaaggaggcaattagatatgcatttttstcagtgagcagagggatgactttgaacagaacgggaggcaggttggccctaagcagttcccagcttgactcttcccttagcttagtgattttgggacccc

SEQ ID NO: 291460 - DNA, 201 bp, Homo sapiens
tggcagagtctgggttacaacccctggtttcctgattccgagtccaagtgaaatacttttgcccctgcagtagaccctgctacagaggataaaaaggcacrtcataggctaggagaaaaattttgcctaccacatatgtaaccaaggactagcagctaggacatctgaagaattctcaacattcaacggggtagaagaatg

SEQ ID NO: 291461 - DNA, 201 bp, Homo sapiens
acctcagaacaattggtggtgtgcttaacccaaagcatttggagtaggacagacttgggtgggatctgtctttgccacttcctggttgtattgttgtgggmaagttatttgaacctgctaactgtcaatgtgttcagttgcaaatgggaataatcttaggctacttttagaattgttgcaaaagtaagtgaaataatgcat

SEQ ID NO: 291462 - DNA, 201 bp, Homo sapiens
ctttatcccgattggccgtcggacttatgccagtgcggcggagccggtgagtggaagcccagctacccgggagccagttggatggtcagaaccctttcttytgggcccctaggccctgagctaccctcagagtggggccttagtgtttccaggacactgggagccactttctcacttaaccctcccccaaagcccctcatc

SEQ ID NO: 291463 - DNA, 201 bp, Homo sapiens
ccccactctaccagtaccaatttactgtattagtctgttttcttgctgctgataaaggcatacccaagactgagtaatttataaagaaaaagaggtttaayggactcacagttccacatggctggggaggcctcacaatcatggcagaaggcaaaaggcacgtcttacatggtggcagacaagagagaggatgaaagccaa

SEQ ID NO: 291464 - DNA, 201 bp, Homo sapiens
agggcaggggcaaaatgctgccagtctctttgctaaaacataacaagagtcacctttactccagttcccaagtgcctcatctccatctaagaccacctcarcctggatttcattgtccatatcattgtcagaattttggccaaagccatttaacaagtctctaggaagttccaaactttttcacatttttcctgtcttctt

SEQ ID NO: 291465 - DNA, 201 bp, Homo sapiens
tcattacttatgcaaatttctgcagccagcttgaatttctcctcagaaaatgcgtttttcttttgtattgcgtcaggctgcaaattttccaaacttttatkttctgtttcccttttaaaactgaatgcttttaacagcacccaagtcacactttgaatgctttgctacttagaaatttcttctgccagatatcctaaacca

SEQ ID NO: 291466 - DNA, 201 bp, Homo sapiens
gtgatgggagggggctgccacaaaggtctttgacataccctggagacattttctctatcatcttggcaatctggctcttcattacttatgcaaatttctgmagccagcttgaatttctcctcagaaaatgcgtttttcttttgtattgcgtcaggctgcaaattttccaaacttttatgttctgtttcccttttaaaactg

SEQ ID NO: 291467 - DNA, 201 bp, Homo sapiens
ggctagagcagctgggacgtagggtgccaagtccctaagatgcacacagcagggggcccctgggcccaggccacgcaaacattttctccttctaggcctayaggcctgtgatgggagggggctgccacaaaggtctttgacataccctggagacattttctctatcatcttggcaatctggctcttcattacttatgcaaa

SEQ ID NO: 291468 - DNA, 201 bp, Homo sapiens
aatttttgtagaaacaaggtcttgctgtttgcctaggctggtcttgaactcctagggtcaagtgatcctcccatcttgttctcccaaagtgttgagattayaggcatgaactactatgcttggccatctttcaaagtttatatgtgtattcatccatttccttattgctgataaaggcatacccaagaatgagtaatttat

SEQ ID NO: 291469 - DNA, 201 bp, Homo sapiens
ctaaatgggtcctgttaagaattccttcattattttgtcatgctttaaggcccaggaaaggcctaggcaaaactcttggtgggcttttgttacattcaagsctttgtatagggcactgatgctatcagcttttaatatttaacctaaccactcagtcagtgctgaaacagttgttatggaggcctacctgttcagccatta

SEQ ID NO: 291470 - DNA, 201 bp, Homo sapiens
tcactgagagcggtcagcagaagaaaatttgagccatgggtaaggcctggtagaaagggaggaggttggggaggcgtgaataggcctttggaaagaggtgmtgttaacccaaaacagagaggcagcagctttgcaattagattttctttttgaaatagcaggctctgtccctggtagcaatagggataaataaaaagtaat

SEQ ID NO: 291471 - DNA, 201 bp, Homo sapiens
gtggctgagggtctgtctagtctgtccttgtactcacggcttccttttctcttgcagacgcccactattgcttggttctacttcctttatcccgattggcygtcggacttatgccagtgcggcggagccggtgagtggaagcccagctacccgggagccagttggatggtcagaaccctttcttctgggcccctaggccct

SEQ ID NO: 291472 - DNA, 201 bp, Homo sapiens
tgatctgggccaacctgctcacattatgaatgggtgatgacttgcccagggttgcccagtgtgtttggtggcacagctagagccagaacccaggcttccargcaccctggctcctgactctttccattgtgaagctgcagcttgagagaggaaccagagtggactacctggtggtaccaggactggagctgggtggaacag

SEQ ID NO: 291473 - DNA, 201 bp, Homo sapiens
tagaggaataggacttaccgagtcagaatccctgaggggttaggtccccgagtctcccagtggttggcgggtttgaggatcactgatctgggccaacctgytcacattatgaatgggtgatgacttgcccagggttgcccagtgtgtttggtggcacagctagagccagaacccaggcttccaggcaccctggctcctgac

SEQ ID NO: 291474 - DNA, 201 bp, Homo sapiens
tttgtatcagtcaggtgtggttagtaaaatctggcatattcattctatgggttatttatatcgtagtttaaaaaatgagatcattgtggtattagggaacratagtaaaaatcaagattagaaatttggaaaaccaacaaaacacccaaaccatgtgggtggccaaatgtgagcaaaccactttagaagtcattgacttgg

SEQ ID NO: 291475 - DNA, 201 bp, Homo sapiens
aggggaggagcctcccaggcagtaccttattaccaggaacagtatgacagactacagccaggtaggcaaaggagaggctggaacccatttaccagcccgcmttccttcccttaggcctggaggaatcactattaacagaacaggagggcaacgcatgcccgtgctgatcagcggtcaataatgctgaagagtcgtggtgcc

SEQ ID NO: 291476 - DNA, 201 bp, Homo sapiens; identical to SEQ ID NO: 60167

SEQ ID NO: 291477 - DNA, 201 bp, Homo sapiens
gaccggtgttaaaaaggtttcttgggctgctgtgctgagaatgggggtgtggcaaataggggcaggagtacaagcgagagtttactgtagttctggaaagrtaacaccagagaggtttctgcctgctttcctttcctgaggattaaacagattaaacgcctccacctgcttccagcagagtgcatggcagtggttgctcag

SEQ ID NO: 291478 - DNA, 201 bp, Homo sapiens
agaagctaatcagcaactcaaaagaatgcaaccatttgtctcttatctacctatgacctggaagccccctccctgcttcaagttattctgcctttccggasggaaccaatgttcatcttacatatgttgattgatgtttcatgtctccctaaaatgtataaaagcaagctgtgctccaaccaccttgggcacacgtcgtca

SEQ ID NO: 291479 - DNA, 201 bp, Homo sapiens
atagcttacaggtgaggttgaaagggacagtaagataaagaagtgggtttatcaataagccagttgcacacgcaccaacacagcggaactaaaagcttgtycctgagcagccagacagaggtggacagagactccagagacctgcagagggagcacggagaccagcagagggagcacacagacctgcagagggagcacgga

SEQ ID NO: 291480 - DNA, 201 bp, Homo sapiens
cattgcaacctctgcctcctgggctcagttgatcttcctgcctcagccttccaagtagctgggacttaaaggcgtgagccaccacacctgactaattttcrtattttttgtagagatggggtttcgccatgttgcccgggctgttctcgaactcctgagctcaagcaatctgcccacctcagcctcccaaagcgctgggat

SEQ ID NO: 291481 - DNA, 201 bp, Homo sapiens
agggcaagacaccatctccaaaaaaaaaagcttcactgtgagttatgatatgggaagaaaagtcttggcctggccaccacaaggaatccctcaggcctggyggtgggaagcagaggagggcgcagtctctttagggcagaaagtgaagaacatttctatgacaatggggaaatcagttcacctttgtgttggtaaacaaaa

SEQ ID NO: 291482 - DNA, 201 bp, Homo sapiens
atgttgcagcaggcgtcagaattctcttccttttttttttttttttttttattttttgtgagatggagtttcgctcttgttgcccaggctggagcgcaatrgcacaatctcagctcactgcaacctccgcctcccaggttcaagcgatcctcctacctcagcctcccgagtagctgggattacaaacatgcaccaccacgc

SEQ ID NO: 291483 - DNA, 201 bp, Homo sapiens
gaatcgcttgtgcccgggaggcagaggttgcagtgagccgagatcatgccgctgtactccagcctgtgcgacagggcaagacaccatctccaaaaaaaaaagcttcactgtgagttatgatatgggaagaaaagtcttggcctggccaccacaaggaatccctcaggcctggcggtgggaagcagaggagggcgcagtctc

SEQ ID NO: 291484 - DNA, 201 bp, Homo sapiens
tagagtacattgtccatacagttcccacatagctgtagggttttatgaacccatattttaaagggccttctaatgaagtgaggatgttaatgctttttttwaaaaaaaaaaaaaaaaaaagagagagagagattggtgattactttaaaatctgagtcctggccaggactcacgcctgtaatcccagcactttgggaggct

SEQ ID NO: 291485 - DNA, 201 bp, Homo sapiens
atggagtttctccatgttagccaggctagtctcaaattcctgacctcaggcgatccactcacccctgcctcccaaagtgtagagattatagctgtgcaccrctgcacccagcctaggggacagttttataatcagtcttcttggccttcagaggactctgctggtggctatacccagctagtggcttgttctctctttcca

SEQ ID NO: 291486 - DNA, 201 bp, Homo sapiens
agcaaggaaacaaaagacaaaaccaaaacacaggcattcatggaggagtcccttaatctgacatatgagggactgcattggcagatttcccatgctaacargtaattcccattaaccacacgtatacctataatcggagacagcaatctcttctttcactcttatcatcagctttggatcaaactcaaaagagttatttta

SEQ ID NO: 291487 - DNA, 201 bp, Homo sapiens
gttttgtatttttagtagagatggagtttctccatgttagccaggctagtctcaaattcctgacctcaggcgatccactcacccctgcctcccaaagtgtmgagattatagctgtgcaccactgcacccagcctaggggacagttttataatcagtcttcttggccttcagaggactctgctggtggctatacccagctag

SEQ ID NO: 291488 - DNA, 201 bp, Homo sapiens
accaccatgcccggctagttttgtatttttagtagagatggagtttctccatgttagccaggctagtctcaaattcctgacctcaggcgatccactcaccyctgcctcccaaagtgtagagattatagctgtgcaccactgcacccagcctaggggacagttttataatcagtcttcttggccttcagaggactctgctgg

SEQ ID NO: 291489 - DNA, 201 bp, Homo sapiens
aatcccagcattttgggaggccagggcaggcagatcacttgagctcaggagttcgagaccagcctaggcaaggtgatgaaaccctgtctcctctaaaaatmcaaaaaaaaaaaaaaaacattagctgggcacggtggcacacacctgtagtcccagctatttgggaggctgaggtgggagaatcacttgaactgggtggca

SEQ ID NO: 291490 - DNA, 201 bp, Homo sapiens
ggaggccgaggtgggtggatcacttgaggtcaggagttcgagactagcctgaccaacatggtgaaaccctgtctctgctgaaaatacaaaattagccgagygtggttgtgggccctgtaatcccagctacttgggagggtgaggcaggagaatcgcttgaacctgggaggcagaggctgcagtgagctgagattgtgccat

SEQ ID NO: 291491 - DNA, 201 bp, Homo sapiens
ttgggaggccgaggtgggtggatcacttgaggtcaggagttcgagactagcctgaccaacatggtgaaaccctgtctctgctgaaaatacaaaattagccragcgtggttgtgggccctgtaatcccagctacttgggagggtgaggcaggagaatcgcttgaacctgggaggcagaggctgcagtgagctgagattgtgc

SEQ ID NO: 291492 - DNA, 201 bp, Homo sapiens
ccagaggcacctggatttgtcctgctagccatactggccaacccctgctctataacttgatatttttgtgcaacataacagttttgcatttctctatgtcrctgtgatccaaaaagcctcattttgcctgcagtttagccttctgtgcgtgcatgtagcacgtgcatttgtgcattatttgtcaaggggctttcagattgc

SEQ ID NO: 291493 - DNA, 201 bp, Homo sapiens
tcctgtaatcctagcactttgggaggccgaggtgggtggatcacttgaggtcaggagttcgagactagcctgaccaacatggtgaaaccctgtctctgctraaaatacaaaattagccgagcgtggttgtgggccctgtaatcccagctacttgggagggtgaggcaggagaatcgcttgaacctgggaggcagaggctgc

SEQ ID NO: 291494 - DNA, 201 bp, Homo sapiens
taggatttagaaatcagaatgaatcgacttagcagttccaagacaaattgaatgggattgggaaacaaagccttgttaatattttcattaaaaacgccccygtttctgagccattcctgagcattagaccggtgctgagactatcatataccttctcactcaatccttaaaaccgtctgtgggatcagtgttactatcctc

SEQ ID NO: 291495 - DNA, 201 bp, Homo sapiens
attaaaacacagggtgatctttgcctcagacatttcaggattaggatttagaaatcagaatgaatcgacttagcagttccaagacaaattgaatgggattkggaaacaaagccttgttaatattttcattaaaaacgcccccgtttctgagccattcctgagcattagaccggtgctgagactatcatataccttctcact

SEQ ID NO: 291496 - DNA, 201 bp, Homo sapiens
gcctgtgtacaaaatctgatgattgtttcatctttttttttgagacagagtctcactctcttgccaggctggagtgcagtgtgcgatctcggctcaccgcracctccaactccctggatcaagcaattatcctgcctcagcctcccgagtagctgggactacaggcatgcgccaccatgcccagctaatttttgtattttt

SEQ ID NO: 291497 - DNA, 201 bp, Homo sapiens
cagcagaggagaaatatgagacaagtgcccaattaaaacacagggtgatctttgcctcagacatttcaggattaggatttagaaatcagaatgaatcgacwtagcagttccaagacaaattgaatgggattgggaaacaaagccttgttaatattttcattaaaaacgcccccgtttctgagccattcctgagcattagac

SEQ ID NO: 291498 - DNA, 201 bp, Homo sapiens
ttttttggatgattttatttatagttgttataaaatacacgtaacatgaaagttaccatcttcaccatttttgagtgtacgttcattagtgaagtacaccytcattgttgtgcaaccaagctgcagaaccgaagtcccatgcccattaaatattcctcattctccagcccctggcagtgcccttctactttctgtctcaat

SEQ ID NO: 291499 - DNA, 201 bp, Homo sapiens
atggcagaatactttcaaagatataaactgatgatgtatgcaaagcaaacgagccctctgtgtgaccttgaacaagccattagcctctctgggtgtgtccyctgtagacattctcatctgaaaaatgagaagttggaccagatgaggagttggatgtggatgtgtagccgtggactcagagttagacactgtggaattgga

SEQ ID NO: 291500 - DNA, 201 bp, Homo sapiens; identical to SEQ ID NO: 60204

SEQ ID NO: 291501 - DNA, 201 bp, Homo sapiens
aacaaaagacaaaaccaaaacacaggcattcatggaggagtcccttaatctgacatatgagggactgcattggcagatttcccatgctaacaagtaattcmcattaaccacacgtatacctataatcggagacagcaatctcttctttcactcttatcatcagctttggatcaaactcaaaagagttattttattagaaga

SEQ ID NO: 291502 - DNA, 201 bp, Homo sapiens; identical to SEQ ID NO: 60207

SEQ ID NO: 291503 - DNA, 201 bp, Homo sapiens
atatttttttctcaccaactccatactgggagttttaaaaccagagccctaatcttgacttaattattaatttcctccgtggccctgaagaattcccttascctctctgggccttaaatttctggataaagaagttggctgcttcgtgctctcaacattatctgattctgtgatttctagctaaagctacatttatacaaa

SEQ ID NO: 291504 - DNA, 201 bp, Homo sapiens
agaactcctcaacctaaacaaagtatgaaggtacatagacaagtttcttgtaagtcggaaaacagagaaatccacagtaactataatacatcccttaaagrataagcatgcatttgtaggaagcaaacaaagctttccatagagaaaccacttccaccagatgattatatggacttgggttttgtttctgcatctgtcact

SEQ ID NO: 291505 - DNA, 201 bp, Homo sapiens
gggcgacagattgagacataaaatagactgagaccctgcctcaaaaaaaaaaaaaaagagtcctcaaactgttcatatacaggactgggcttgctagggawagaagggggaattcttcagactactttacaaggacacaagaactcctcaacctaaacaaagtatgaaggtacatagacaagtttcttgtaagtcggaaaa

SEQ ID NO: 291506 - DNA, 201 bp, Homo sapiens
aaacccagaggcacctggatttgtcctgctagccatactggccaacccctgctctataacttgatatttttgtgcaacataacagttttgcatttctctaygtcactgtgatccaaaaagcctcattttgcctgcagtttagccttctgtgcgtgcatgtagcacgtgcatttgtgcattatttgtcaaggggctttcaga

SEQ ID NO: 291507 - DNA, 201 bp, Homo sapiens
ctagctacttgggagtctgaggcaggaggatcaattatgcccagcagtttaattctcctgggcaacagagtgagaccctgtctctaaaaaaaaaaaaaaaagaaagaaagaaaagaaaagagagaagagaagaaatcagatattagagacacagttgaagttcccgtggaccctcctgatcccgttcttttttctgcttct

SEQ ID NO: 291508 - DNA, 201 bp, Homo sapiens
aagctgtaattctcccagaccttgccctgtttacattatttaaaaacactgatctcagcctgggctccacttttgttattatgatgcttccaggttttttrtctttagtaaatttattcataattaaatcaaggttgagaagtgctggcttattagagactctggctgaaggtcatgtgcgaactcaggaaactgctaatc

SEQ ID NO: 291509 - DNA, 201 bp, Homo sapiens
tctctttccacttttattgccctgaaattctaaatattccatcattttggtagaagaaaaccagaccaaactaaacattctcatgatttcatccacctttwaaaaaaaaaaaaaatctgacgtcaagtgatcctgcagctctaagctgtaattctcccagaccttgccctgtttacattatttaaaaacactgatctcagc

SEQ ID NO: 291510 - DNA, 201 bp, Homo sapiens
tgatattccttcataacacttctccctcaaagatgaatacttattattagggataatcattttctttattgttgttgtttgttttgttttgttttgttttktttttttgagacggagtctctccctgtcgcccagcctggagtgcaatggtgggatctcggctcactgcaacctctgcctcccaggttcaagcgattctct

SEQ ID NO: 291511 - DNA, 201 bp, Homo sapiens
ggcttaattgacccgagtagaaacttagaaagtcaatgtctgaggccaggcgcggtggctcatgcctgtaatcccagcactttgggaggccgaggtgggcrgatcatgaggtcaggagttcaagaccggcctgaccaatatggtgaaaccccatctctactaaaaatacaaaaaaattagccgggcattgtggcacacacc

SEQ ID NO: 291512 - DNA, 201 bp, Homo sapiens
aaattttaagtgtattcatagcttctttaatataagtcatgtcttggcttaattgacccgagtagaaacttagaaagtcaatgtctgaggccaggcgcggyggctcatgcctgtaatcccagcactttgggaggccgaggtgggcagatcatgaggtcaggagttcaagaccggcctgaccaatatggtgaaaccccatct

SEQ ID NO: 291513 - DNA, 201 bp, Homo sapiens
ggttcagtcagaagacctgagcttcccagggctcactctcctcctcagatcgtctgtctttgcacccgtctgacatctccattctgaattttgtggttccrattctggctgatggatttgtcttcaggggtagtgcatgattgtggagtgcccaggcttcaagctgattgctgcttctcctgttccttcatccctcacata

SEQ ID NO: 291514 - DNA, 201 bp, Homo sapiens
gccagcaccatcctttggcatgtgagcaaattgacaccaatttgaggcccgaaacaaaagtgagacaaaaagacgttcatttcaacatccttctacagaarttaaatagagtaggcacatctgaggtgtatctgaagtctgagcaggaattcatgttcttcaaaaagttgtcgtttatagtagactatctttatgacctca

SEQ ID NO: 291515 - DNA, 201 bp, Homo sapiens
aatgaacactagggttggagcgagaaagccaaggttttggtcacagctgtgtttcctaccgccatgtgacccttggccacttgagccagtcacaacctctyggagccgcatctctaaaagtccaaaatgctgagagcggcaccaggctcacccagttgttgtgaggatcaaatgagaaagcacgtaaagaacgagggctac

SEQ ID NO: 291516 - DNA, 201 bp, Homo sapiens
ttctcaccctgttcagataggaacacttaaggaaaacttggtaggatgtgttgtctgtttatgaaggaagaatcctgcagcagattttcttatccagtccytgtgctttactccattttgggcttgtcaataaaatcagaaatccagatatggatggctctgaccttagcttggaacacaaaactgatacttctaaaacaa

SEQ ID NO: 291517 - DNA, 201 bp, Homo sapiens
catcttttctatgtatgtttatttcattttctttttttcatgtatgtttccaattgtgtttccaggaagagccactcagggtattctttgaatataaattsttacttattttattgggaaccatccaggtaatactacatctgcataactgataaatgaaaatctcagacacattactcaaatttcatatatcaaagaaca

SEQ ID NO: 291518 - DNA, 201 bp, Homo sapiens
atgttaattaactaggtttaatcattccacagcatatacttcaaaacatcatgttatacacaataaatacatacagttttatctgtcaatttgaagttaaraaaatagattggattttcttacaccttttaaatgattaaatattataaaaatagaaaccaatcacatgagagaaacatttactactgttgttgataaaag

SEQ ID NO: 291519 - DNA, 201 bp, Homo sapiens
tgtctaaatacattgctctgtattttattaatttgtatggcaataaatatgtgtcaggaacagttttaaaacttaatcctcaaatactgcttccttaaatytatttatttatttttatttatttattttgtttttgagatggagtttcgctcttgttgcccaggctggagtacaatgccgtgatcttggctcactgcaacc

SEQ ID NO: 291520 - DNA, 201 bp, Homo sapiens
catactataataaccaatccttacgccaaatagacttgtgaccttttgaagtgtcttgaattaaaaagtgaatgtaggtattggattaagaagagaaacttaagttcgtggacctcgtctcctcccagtcctgtaacttacacacacacacaaacagatttcaaatatccatgctagcaaactggaatcattgccatgaag

SEQ ID NO: 291521 - DNA, 201 bp, Homo sapiens
gaacatgggtgtacagatatctgagtgtctccttttggttctttcgggtaatgccaagaagggaagttgctggttgggtttttttttttttttttttttttagagggggtctcactctgtcgcccaggctggagtgcagtggtgcaatctcagctcactgcaacctccgcctcccaggttcaagtaattctcctgcctcag

SEQ ID NO: 291522 - DNA, 201 bp, Homo sapiens
tgaacatgggtgtacagatatctgagtgtctccttttggttctttcgggtaatgccaagaagggaagttgctggttgggtttttttttttttttttttttttagagggggtctcactctgtcgcccaggctggagtgcagtggtgcaatctcagctcactgcaacctccgcctcccaggttcaagtaattctcctgcctca

SEQ ID NO: 291523 - DNA, 201 bp, Homo sapiens
taaagtcaaacaagttgcagtgctttatcttttgtttctcatattatgttgttattacccctgcccctccttgactttttgaatttcatttttcattataraaatcaaaataggaattgaaagtaaactattttgaactgagcagtttgttttgtgcgttctacttgaaatattttcgtggaaaaggtacagataatcata

SEQ ID NO: 291524 - DNA, 201 bp, Homo sapiens
atgaacatgggtgtacagatatctgagtgtctccttttggttctttcgggtaatgccaagaagggaagttgctggttgggtttttttttttttttttttttttagagggggtctcactctgtcgcccaggctggagtgcagtggtgcaatctcagctcactgcaacctccgcctcccaggttcaagtaattctcctgcctc

SEQ ID NO: 291525 - DNA, 201 bp, Homo sapiens
tatgaacatgggtgtacagatatctgagtgtctccttttggttctttcgggtaatgccaagaagggaagttgctggttgggtttttttttttttttttttttttagagggggtctcactctgtcgcccaggctggagtgcagtggtgcaatctcagctcactgcaacctccgcctcccaggttcaagtaattctcctgcct

SEQ ID NO: 291526 - DNA, 201 bp, Homo sapiens
ctatgaacatgggtgtacagatatctgagtgtctccttttggttctttcgggtaatgccaagaagggaagttgctggttgggtttttttttttttttttttttttagagggggtctcactctgtcgcccaggctggagtgcagtggtgcaatctcagctcactgcaacctccgcctcccaggttcaagtaattctcctgcc

SEQ ID NO: 291527 - DNA, 201 bp, Homo sapiens
gtgagctgtgattgtgccactgccctccagcctggacaacagaactttatggcaattaccgtaaaatgatttcgaatggtgatgtactctgtataaatcargtattaaacatattattagttttatgttctaatttgaaccaatgtttgagaagtttcatactgttccattggctcaaattagaatcatccagggagattt

SEQ ID NO: 291528 - DNA, 201 bp, Homo sapiens
gctaccaagagaaattctaaagcaagaagagaaaagcatttcaatttgggacatttatttgcacctggaaatggggaatgggctatcagaccagacttctrtcctgtccaacctgccttcattcagtccttccacattgttattctgggtttggactgtgctggaaagacaactgtcttatacaggctgcagttcaatgaa

SEQ ID NO: 291529 - DNA, 201 bp, Homo sapiens
catctcatggaacttgaatctgatctctacacactggggagccacggtagggtgggttttttgtttgtttgtttcttggttttttgtttttttggttttamataaggaggagaagaatgtggtctgatgtgtattttagaaaaatagctctggcagcaatatggagaatgtttagtgaaaagagaaccaggcccagagagg

SEQ ID NO: 291530 - DNA, 201 bp, Homo sapiens
tccctgattcttcctggattattcttctcatacttgtgccctcatttacctctttatgctcacatttggaacatatttatcagatgcgcattttatagcagttcccgactaatagattatcttgcttccgtttccatcccccagttcagagggttcacattaacagagatatcccgttgtgatcagaggcctccagtggct

SEQ ID NO: 291531 - DNA, 201 bp, Homo sapiens
tactttaagcattttattgagaagcctacatattttctttgaaaattttttttataactaggaagatttattattaaaatgtcatcatgtccaaaatgtaytgtcatctttttttttttcaaagcatttgtgattttgtgttactcttcaaaacttttttggaggtttactgatgataggaaaatcaggaaggtggaaatt

SEQ ID NO: 291532 - DNA, 201 bp, Homo sapiens
agtttctccatgttggtcaggctggtctcgaactcctgacctcaggtgatctgcccacctccgcctcccaaagcgctgggattacaggcgtgagccaccaygcccagcttagttttgatttttgttttttggtttttttggagacagagtcttgctctgtcactcaggctggagtgcagtggcaggatctcagctcattgc

SEQ ID NO: 291533 - DNA, 201 bp, Homo sapiens
ttgtttttttttgagacggagtttcactcttgttgcccaggctggagtgcaatggcgcaatcttggctcactgcaacttctgcctcccaggttaaagcgaytctcctgcctcagcctcccaagtagctgggattacaggcatgtgccaccacgccaggctaattttgtatttttagtagagacggagtttctccatgttgg

SEQ ID NO: 291534 - DNA, 201 bp, Homo sapiens
ggattgcttgagcccaggagttcatgaccagcccaggcaacatagcaagacccccgtctctacaaaaaatttaaaaattggctgggcattaaaagttttawtttttttttttctcctccataaattaggaataacttactttgaaacataggaataaacttaacttgaattactggtatttgtatttgaaaaactaaagaa

SEQ ID NO: 291535 - DNA, 201 bp, Homo sapiens
ttaattacatcaggctatactcactggtataaaatcagggagcaagtataaagtaggtgtagggaaataatttatgttggattaaatgatccaatgaaggrattttattaagcccctagaagtcccagaatgaaaatgtataactgcatgactaacccctaagaatttgctggggtttctgcattaagtacgcttcccagg

SEQ ID NO: 291536 - DNA, 201 bp, Homo sapiens
ttgcttgagccaaggagttcaaggtttatagtgcaccatgatggcccctgtgaatagccactgcatgccagcctgagcaacacagcgagagcccatctctyaaaaaaaaataacaaattagaatttttggtgagtccttctctttctaaagtgaaatatttttatgaaatttgttaaatttctaggaaattataggataac

SEQ ID NO: 291537 - DNA, 201 bp, Homo sapiens
tttgcttgagccaaggagttcaaggtttatagtgcaccatgatggcccctgtgaatagccactgcatgccagcctgagcaacacagcgagagcccatctcwtaaaaaaaaataacaaattagaatttttggtgagtccttctctttctaaagtgaaatatttttatgaaatttgttaaatttctaggaaattataggataa

SEQ ID NO: 291538 - DNA, 201 bp, Homo sapiens
tgagctgagatcacgctgctgcagtccagcctgggcgacagagccagaggccatctcaaaaataaataaataaataaataaataaataaataaataaatawtaaaattgtgatgtagttaactggtataatcttttcagttatttttaaatttttgaaacaacacgctgtatatcagccatccatcagagaaggaaagaaa

SEQ ID NO: 291539 - DNA, 201 bp, Homo sapiens
ctgatgtgagaggtttgcttgagccaaggagttcaaggtttatagtgcaccatgatggcccctgtgaatagccactgcatgccagcctgagcaacacagcragagcccatctcttaaaaaaaaataacaaattagaatttttggtgagtccttctctttctaaagtgaaatatttttatgaaatttgttaaatttctagga

SEQ ID NO: 291540 - DNA, 201 bp, Homo sapiens
ttgaacctgggaggcggaggttgcattgagctgagatcatgccactgcacaccagcctaggtgaaagagcgaaactccgtctcaaaaaaaaataaataaartaaaaatacttcatccctttcaaaaagcaatttggtgatattatcaagatcccaagggctgggcgtggtggctcatgcctggaatcctagcactttgggg

SEQ ID NO: 291541 - DNA, 201 bp, Homo sapiens
ttatttcagatcttgtcagttttatgaaaatgacagaatttaagtcaacattgtttatattagcccacaaattttaatagggtcttttatctaaatagttyggttataaatgcaatgaatttttgtcatatcctgtgaattgtccaagttcatggacaactaacttttgtgtggtctcatttttgttttgtgtttttaggc

SEQ ID NO: 291542 - DNA, 201 bp, Homo sapiens
agttgctaacaaacaagacttgaggaactcattgtctctttcagaaattgagaaattgttagcaatgggtgaactgagctcatcagctccttggcatttgyagcctacctgtgcaatcataggagatggcctaaaggaaggacttgagaaactacatgatatgatcattaaaagaaaaattttgcggcaacagaaaaagaa

SEQ ID NO: 291543 - DNA, 201 bp, Homo sapiens
  misc_feature (1)...(201): n = A,T,C or G
tctagaacaaaacagaggtatttagaagaaaccacttcccacagggcctttgaaccgtttacctaagtcaagtgtaatgagaaacataaccaaatgcaccntggggtttattgttagataataaaaggcttaaaaagcccctagaccctaaagatgcctgggatggatgatttatgttcatatgctacttgagcatgtagt

SEQ ID NO: 291544 - DNA, 201 bp, Homo sapiens
cattacaagcaaatgtgcttaactcttctgtccttatcccttttctcactcggtgcactgtccttgggtgatcttacccattccatgctttaaatggctawagttatgatttccatccatggagaacctggttaagtcagatggctggctttgcctcccagctctactgcttactagctgtgtgactgtcggcaagttgct

SEQ ID NO: 291545 - DNA, 201 bp, Homo sapiens
ttgaacccgggaggtggagcttgcagtgagccgagatcgcgccactgcactccagcctgggtgacagagtgagactccatctcaaagaaaaaaaaaaaaaatatatatatatatatatgtatatatttatatatgtatatacacacacacacacattagataagcacattgtttatataggaatcaaaaattacctgtgag

SEQ ID NO: 291546 - DNA, 201 bp, Homo sapiens
cttgaacccgggaggtggagcttgcagtgagccgagatcgcgccactgcactccagcctgggtgacagagtgagactccatctcaaagaaaaaaaaaaaawatatatatatatatatatgtatatatttatatatgtatatacacacacacacacattagataagcacattgtttatataggaatcaaaaattacctgtga

SEQ ID NO: 291547 - DNA, 201 bp, Homo sapiens
cttcatctcatttgaattttgaaatgactccataatatattgttatactcatgctgtagttatagataaagaacgagggctgacctttgacaatcacaatmaaaaaaaacaaaacaaaagaagtgaaggctgagcgaagtaactcacccagcaagatgcaattcgtatagggtagagtcccctgtctcccgataatgcttt

SEQ ID NO: 291548 - DNA, 201 bp, Homo sapiens
tttttattttttttttaaagttagtgtcaagtatgtggttgcaatgaattagcaaagcctctaaaggaacactgtgtgccatttaatcagaaccaggcttmgaggacactgtgctttttgtgagacaccacatgtgacttcctgctctttcacctttggaactctgggtcagacatagactttggtccttaaaaacaagaa

SEQ ID NO: 291549 - DNA, 201 bp, Homo sapiens
gagtggcttactcttttctgtaaatagactttgatttgctggcagcagtacctcttagctcctacaggtggcgccagggatctgagccaggaatacctggwcagagctcctcacccacctggggccttgtgcctgtcaggcctcaacctgcagagcatgggcgcattgcatagaccctgcagcctgtcctcagcagggtga

SEQ ID NO: 291550 - DNA, 201 bp, Homo sapiens
ggcaacatagcaaaacctccatctctatttttattttttttttaaagttagtgtcaagtatgtggttgcaatgaattagcaaagcctctaaaggaacactrtgtgccatttaatcagaaccaggctttgaggacactgtgctttttgtgagacaccacatgtgacttcctgctctttcacctttggaactctgggtcagac

SEQ ID NO: 291551 - DNA, 201 bp, Homo sapiens
attagattaccttaaggaaagaaggaaggaaggaaggaaggaaaagagagaaagaaagagaaattagattaccttggtgctcattctttcgtatatccccrttgatgatttggaatctgagctaaagatactggggggaaaactaaaccaaattttgataccaaatacaggaaggaggtgaaataagcttttttattgtag

SEQ ID NO: 291552 - DNA, 201 bp, Homo sapiens
cagctcgggccagaggcaatcaaggtccgcactttggccacagaagtagatacagagagtgggggtgaattgcagacatactctaaaagtatcctcctacmgtgggggccgggggaagggaccgttctagcttggtgactctggctagtgatgccatcggtcatggaaaggacacgggagaaggcagattggcagagccag

SEQ ID NO: 291553 - DNA, 201 bp, Homo sapiens
ccgttctagcttggtgactctggctagtgatgccatcggtcatggaaaggacacgggagaaggcagattggcagagccagaaatgagcctggcttgaacakagagagctcagagggttaataggatctaaggaatagtctgtgtctccactggaaatacagacacagtgcttcaaagaaagaggcaggaaggtcaccctgg

SEQ ID NO: 291554 - DNA, 201 bp, Homo sapiens
gcttcgtgaacagcagcacaggcggtggagacttcactgcttgaaacttcagcctctctcccctgtgccaaggtaacactggtgttttatttacactgatrtcagctcagcacagtgccttagccctagttagtcatgggggagaagcacaactcatggtactgtggttttgatggtagataagtttctctattcattaaa

SEQ ID NO: 291555 - DNA, 201 bp, Homo sapiens
ttccagatcactttgcgtcaactctaaaatacagccgcaaatgaaataaatgttgtttataatcctaccaagtctagtaggtgtgtatgtgcttgaggttraacttttgtgtaagctccagacttactttaggtttatagaaaattacatcgcaattgatacaatggttgtgttgggtgatggagatagaaagagggagaa

SEQ ID NO: 291556 - DNA, 201 bp, Homo sapiens
aagttttaatttttttttttctcctccataaattaggaataacttactttgaaacataggaataaacttaacttgaattactggtatttgtatttgaaaaactaaagaactgcggcatcaattatatggacagacagcagtttatgtctcttctgagcagcgtacatggtggccacatagagcagcccaaggagcccctgg

SEQ ID NO: 291557 - DNA, 201 bp, Homo sapiens
cctctttctttccctgtggaaatcccctctgcctacagggaggagaagcaactggtttggaagctgccagccagtccgtttatttagaaaattctaagccsagttccagatcactttgcgtcaactctaaaatacagccgcaaatgaaataaatgttgtttataatcctaccaagtctagtaggtgtgtatgtgcttgagg

SEQ ID NO: 291558 - DNA, 201 bp, Homo sapiens
taaaataaacataccaaaccatctcaggaatccctaaccttttcctcattgggaactattttcccagtatccccaagtactggtgggaatgagataaaaasggccaggcatgccattccctaaagcagatagccaaccctctttctttccctgtggaaatcccctctgcctacagggaggagaagcaactggtttggaagc

SEQ ID NO: 291559 - DNA, 201 bp, Homo sapiens
tcattacaagcaaatgtgcttaactcttctgtccttatcccttttctcactcggtgcactgtccttgggtgatcttacccattccatgctttaaatggctatagttatgatttccatccatggagaacctggttaagtcagatggctggctttgcctcccagctctactgcttactagctgtgtgactgtcggcaagttgc

SEQ ID NO: 291560 - DNA, 201 bp, Homo sapiens
ttactgtttagtttttgttgtctttagggaaagttgtaaaatacccacattcttctcaagttcttcaagtcttttggtttttagtaaacccttttgtgacmttgtctttgagaacagaggtcaacaaacatttccttaatggactagatagtagatatatcaggacttgcagaccacatggtctctgtcctaactactcaa

SEQ ID NO: 291561 - DNA, 201 bp, Homo sapiens
aagcatgaaccactgcacacagccgggttctcttattttatactacgccttcttagtttccttttggactctcttcttctgacaactcattacaagcaaakgtgcttaactcttctgtccttatcccttttctcactcggtgcactgtccttgggtgatcttacccattccatgctttaaatggctatagttatgatttcc

SEQ ID NO: 291562 - DNA, 201 bp, Homo sapiens
cacgtctccaagaactcgggtgtttttctgatcatggagaattagattccacatatagcttgtatttaggatctgcagattaggttttataaattatgttyggcaaatgataatccacaaagtagattctaagttaaaatactataaagtactataatttatgtttaaatgtctttcaacctgagagttactctcccttag

SEQ ID NO: 291563 - DNA, 201 bp, Homo sapiens
aaaaagcagcccaaactgatctgggaatagactgaatttcacattaaagaaaaatttgaatcattcacatcatttcatctttttttttttttttttttttttctgcagagggccaaatacccgattggattttttaaaaatgtttcaaccctttatttcggtacaatgttaaaataatctgacttttctatgatttggctt

SEQ ID NO: 291564 - DNA, 201 bp, Homo sapiens
ccaaatgaactctgatgtgtctcacgtaatgcatgtggacttctggtgcatgtaaacagagggtggttattcttgattgcacatttgtgatttttagtgakgctctaagggagaagcaagaggacttgaataacagatttattctcgggcactgctacatgaaagagatgagtaatgccaaacaaataacacaattctgat

SEQ ID NO: 291565 - DNA, 201 bp, Homo sapiens
aaaaaagcagcccaaactgatctgggaatagactgaatttcacattaaagaaaaatttgaatcattcacatcatttcatctttttttttttttttttttttttctgcagagggccaaatacccgattggattttttaaaaatgtttcaaccctttatttcggtacaatgttaaaataatctgacttttctatgatttggct

SEQ ID NO: 291566 - DNA, 201 bp, Homo sapiens
gcctcctgagtagctgggattataggcgtgcaccaccacgcctggctaatttttgtatttttagtagaaacggggtttcaccacgttggtcaggctggtcwtgaactcctgacctcatgagccaccgctcccggccatcgatttgattattataaaatcaggttatattggtttgaccagttaaaaacatcacaggttatt

SEQ ID NO: 291567 - DNA, 201 bp, Homo sapiens
agcccagcctggacaacatagggaggagactctgtgtctacaataaaagaaaaagaaaattagccagttgtggtggcctgtagtctagctgctcacttggraggatgaggtgggaggattgcttgagcccaggttgaggctgtagtaagctgtgattgcaccactgcactccagcctgcaagacagagcaagaccctgtcc

SEQ ID NO: 291568 - DNA, 201 bp, Homo sapiens
taaaaaagcagcccaaactgatctgggaatagactgaatttcacattaaagaaaaatttgaatcattcacatcatttcatctttttttttttttttttttttttctgcagagggccaaatacccgattggattttttaaaaatgtttcaaccctttatttcggtacaatgttaaaataatctgacttttctatgatttggc

SEQ ID NO: 291569 - DNA, 201 bp, Homo sapiens
cactgcaacctctgcctcccgggtttaagggattctcctgcctcagcctcctgagtagctgggattataggcgtgcaccaccacgcctggctaatttttgyatttttagtagaaacggggtttcaccacgttggtcaggctggtcatgaactcctgacctcatgagccaccgctcccggccatcgatttgattattataaa

SEQ ID NO: 291570 - DNA, 201 bp, Homo sapiens
agccacggcttcattccaaagtgaccacagtcataaggcccaaaactatcttctctctctttctctctctctctctctctctctctctctctctctctccctccctctctctgtcatagggacctccctaatcctccaggttgtacagccaggaagggtaaggtattgtcaaaaacaagtgaggtacccccttgatagctc

SEQ ID NO: 291571 - DNA, 201 bp, Homo sapiens
ctaaaaaagcagcccaaactgatctgggaatagactgaatttcacattaaagaaaaatttgaatcattcacatcatttcatctttttttttttttttttttttttctgcagagggccaaatacccgattggattttttaaaaatgtttcaaccctttatttcggtacaatgttaaaataatctgacttttctatgatttgg

SEQ ID NO: 291572 - DNA, 201 bp, Homo sapiens
atggcgtgaatccggggggcagagcttgcagtgagccaagatcgcgccactgcactccagcctggagaacagagactccatctcaaaaaaaaagacctttygctcctctttgctcttgtgtctgtttaacagatttttatgttaacaggcactctgtttgccactaggaataaaaagataaatgggacaaagtctttgccc

SEQ ID NO: 291573 - DNA, 201 bp, Homo sapiens
atcaatttgattttttttttttttttgagacagagtcttgctctgtagcccaggctggagtgcagtgttgcaatcatggctcactgcaacctctgcctccygggtttaagggattctcctgcctcagcctcctgagtagctgggattataggcgtgcaccaccacgcctggctaatttttgtatttttagtagaaacgggg

SEQ ID NO: 291574 - DNA, 201 bp, Homo sapiens
gttttttaatgatgttttaaaattaatttatattaatttaatttcaatgatgtttcctatatttaatggcagtgttttccccccccaccctttttttttttttgagatggagtcttgctctgttgcccaggctagagtgcaatggcgcgatctcggctcactgcaacctctacctcccaggttcaagcgattctcctgcct

SEQ ID NO: 291575 - DNA, 201 bp, Homo sapiens
aggccgggtgcggtggctcacgcctgtaatcccagcactttggaaggccgaggcgagcggatcacgaggtcaggagatcgagaccattctagctaatacgrtgaaaccccgtctctactaaaaatacaaaaaaaattagccaggcttggtggcgtgcacctgtagtcccagctactcgggaggctgaggtaggagaatggc

SEQ ID NO: 291576 - DNA, 201 bp, Homo sapiens
ctaacatggtgaaaccctgtctctactaaaaatacaaaaaaatcagcctggcgtggtggcaggcacctgtagtcccagctattcaggaggctgaggcaggrgaatggtgtgaacccaggaggcagagcttgcaagtgagctgagatcatgccactgcactccagcctgggcgacagagcaagactccatctcaaaaaaaaa

SEQ ID NO: 291577 - DNA, 201 bp, Homo sapiens
tcagctcactgcagcctccacctcccaggttcaagtgattctcctgcctcagcctcctgggtagctgggattacaggcacatgccaccacacccagctaattttttttttttttttttttttttttttgagacagagtttagctcttgttgcccaggctagagtgtaatgtcgcaaactcggctcactgcaacctccatct

SEQ ID NO: 291578 - DNA, 201 bp, Homo sapiens
aaggccgggtgcggtggctcacgcctgtaatcccagcactttggaaggccgaggcgagcggatcacgaggtcaggagatcgagaccattctagctaatacratgaaaccccgtctctactaaaaatacaaaaaaaattagccaggcttggtggcgtgcacctgtagtcccagctactcgggaggctgaggtaggagaatgg

SEQ ID NO: 291579 - DNA, 201 bp, Homo sapiens
acccataatagcacatttctaaatagtctacaagttttaattttagcaactttgtttagtatgaaaatttgatctaggaataatggagaaaggttttttttcccctctttttttcataatcccactactgtaaagaaatgaataaactttttgaaatattaaaaagaaaagagctcttatttaaacttaagatgagaagaa

SEQ ID NO: 291580 - DNA, 201 bp, Homo sapiens
atcattaagacctttctctccaaggccgggtgcggtggctcacgcctgtaatcccagcactttggaaggccgaggcgagcggatcacgaggtcaggagatygagaccattctagctaatacgatgaaaccccgtctctactaaaaatacaaaaaaaattagccaggcttggtggcgtgcacctgtagtcccagctactcgg

SEQ ID NO: 291581 - DNA, 201 bp, Homo sapiens
tggctcccttccccctgaggtgggatgatgttctccagggccttttagctccaggctgctacagttctaaactggtggtggtggtggtggtggtggtggttgtggtggttgttttagatgcagtctcactcttttccccaggctgggatgcagtggcatgatctcggctcactgcaaccttcgcctcctgggttcaagcga

SEQ ID NO: 291582 - DNA, 201 bp, Homo sapiens
agtggctcccttccccctgaggtgggatgatgttctccagggccttttagctccaggctgctacagttctaaactggtggtggtggtggtggtggtggtggttgtggtggttgttttagatgcagtctcactcttttccccaggctgggatgcagtggcatgatctcggctcactgcaaccttcgcctcctgggttcaagc

SEQ ID NO: 291583 - DNA, 201 bp, Homo sapiens
acattattttctgggacttaagtgttgttttgtttcttttttttttttttaatgtagtttatttctctttctaagagattacaggattcaagaatggcaaygaatcttaatagcctttgggagaaagcagcaaagctttaatactaagttccaggaccatgaacttccatgttgtcctaaatgcatttttcaaacattgct

SEQ ID NO: 291584 - DNA, 201 bp, Homo sapiens
gagtggctcccttccccctgaggtgggatgatgttctccagggccttttagctccaggctgctacagttctaaactggtggtggtggtggtggtggtggtggttgtggtggttgttttagatgcagtctcactcttttccccaggctgggatgcagtggcatgatctcggctcactgcaaccttcgcctcctgggttcaag

SEQ ID NO: 291585 - DNA, 201 bp, Homo sapiens
ttgaacccgggagacggaggttgcagtgagccgagatctcgccactacactccagcctgggcgacaaagtgagactctgtctcaaaaaattaaaaaaaaawttttttaaatcctaaatattctcattccacaggatcctgcaaactgtagatcccaaacttggaagttctgggaattctgccagtatccccaagtaaatct

SEQ ID NO: 291586 - DNA, 201 bp, Homo sapiens
  misc_feature (1)...(201): n = A,T,C or G
tctatttttcagactcctgaaacagactactctttgcctttttgctgcagttggagaagaaactgaatttgaaaaatgtctgttatgcaatgctggagacntggtgaaataggccaaagatttcttcttcgttcaagatgaattctgttcacagtggagtatggtgttcggcaaaaggacctccaccaagactgaaagaaa

SEQ ID NO: 291587 - DNA, 201 bp, Homo sapiens; identical to SEQ ID NO: 60208

SEQ ID NO: 291588 - DNA, 201 bp, Homo sapiens
tacgtaaaagttaaaacaaaaccaaggattcaggaagaaacaagcagtgattgtcctctaggcagcgtaaggaaaatagtcaccataaatatcttagatgycccccaggcacatcctgcaggatcttttctgcatcctcttgtcctacaccctccagtgaccctgctcagccattgctcagcccataatgcacctttatgc

SEQ ID NO: 291589 - DNA, 201 bp, Homo sapiens
ctgaaacataagcatcctttccagacccaaaagctctgcccacacgatcatcagaagtcactgtggtgatagctgtattgagtagagttttttgtttgttrttattttgagacagagtctcacttgccctgtcacctaggctgaagtgcagtggtgcgatctaggctcactgcaacctctgcatcactggctcagtcgatt

SEQ ID NO: 291590 - DNA, 201 bp, Homo sapiens
cacaaaccatgaggtagagagacaaagaccagagactgagcgttggctctgcggtttatgggctgcacaactttggacagactgctcactcagtttcctcrtctttaaaatggaatcataattccagctgccttgctgggaggcttcactgaaacataagcatcctttccagacccaaaagctctgcccacacgatcatca

SEQ ID NO: 291591 - DNA, 201 bp, Homo sapiens
gctctggacgctggagtgcctaagccttggttagcaactccacccccgagccagcccctgagctcccaccccaccctgatctaaggccaggcttctgcacrtggttttagatgctgcccagcaatggagttctcacctgacctggttcctccccgtagctcacacagggccacagcttgcatattggtggtcagatgccat

SEQ ID NO: 291592 - DNA, 201 bp, Homo sapiens
attttcatgttgataggattctgcccccatgggaattaattttcttcatcaaaagtgatctccatactcacaaacactgaatagctttgggcttttaaaamcaatgttttggctttaaaagaaccacaggaggctgggcgcggtggcttacgcctgtaatcccagcactttgggaggccgaggcgggcggatcatgaggtc

SEQ ID NO: 291593 - DNA, 201 bp, Homo sapiens
ggaggcagcaagtccgcagcatgaaggcaggagagaacattgctgtaagcctttaccatggccactgcatggggaggaaacaggagatttggaatgagctrtgacactgggcaggaaagcaagacccaggtcttgtgaggccttgagcgtcaagcttaggagtcaggacctggggattttaagtacagcaatatcataatt

SEQ ID NO: 291594 - DNA, 201 bp, Homo sapiens
gtggcttggcctggcctggccatgtgagtcttgtggacacgtgcacatcagtcagggacccctgtggtatggaccaaagggttgttttttactgttttaasttatttaatagcatctcatcagtattacaggcatgtgccgccacgccaggctaattttttttgtatttttaatagagacggggtttcaccatattggcca

SEQ ID NO: 291595 - DNA, 201 bp, Homo sapiens
atttttactgctattcagagaacctgtggcttatccatggagggcttaagctttgccttttctcttgctcatttccatacctagcaagagcttaagctggwttattgcactgacattctaatgaaatataaatagcttctcaacagagagataagaaagaggagtatctagtacagcaagaccctctgggtgggtcagggc

SEQ ID NO: 291596 - DNA, 201 bp, Homo sapiens
gctctggtaattgtaggcttgctggacccagtgcctgccttctaactgaatcttgactctgctccattatgtattttccatgatcctgatttctgtcaatstaatttttaaatttcattctaaggcaaacctgctcatgttcttcgctgaaatcaacctcccctttctggaatggacatatggaaaattggaggcaaaata

SEQ ID NO: 291597 - DNA, 201 bp, Homo sapiens
gaccctcaaaactggtattcacagaaggaaaaaatataggtctttcacctttgaaggatcaaagtgtctagggttttttgtggttttttttttttttttttgaacaaagctgaactattacaaagtccttttcagtttaaatttagtgcatggcatggctcatgaaagacttttaaaagtgaattggaaaattctaaatgt

SEQ ID NO: 291598 - DNA, 201 bp, Homo sapiens
agtttttactttgggcctgaaaatacttataggtcaggtctcctagttgggtccatgctgttgttggtgttccctcccaagtaaatacatactgaatttarcaaattattcatttgtgatcctctgtgccatctaaaaatatatatagtttaaaacgctggccaggcgcagtggctcatgcctataatctcagcactttgg

SEQ ID NO: 291599 - DNA, 201 bp, Homo sapiens
agatcacaccattgtactccagcctgggcaacaagaacgaaactccgtctcaaaaaaataataataaaaagtgtatatatatgtgtgtgtgtatatatatrtataatagacaaaacttgcccatatatatacaaaggtgtgtttacaaatggtcagagcagcatgtttatagtgcaaaaagttttgtttgtttgtttaaga

SEQ ID NO: 291600 - DNA, 201 bp, Homo sapiens
cttcctgccaagttggccatcagacagttagaaatcaattttggagttcaggagagaggccagagctgaaaattggggagttgtttacattgggagtgatrtacagtctctacatttccatccagttcaaaacattcttgcgtgtctgctatgcactgtgcactgaggttaccaagactggaaagacccaatccctgtcct

SEQ ID NO: 291601 - DNA, 201 bp, Homo sapiens
atcgcttgaacccgggaggcaggggttgcagtgagccgcgatcgtgccactgcactccagcctgcgcgacagagtgagactccgtctcaaaaaaaaaaaaagctaaaacattaactattaaaaatggtgctgacttaactagttatgtatatgagtctagcataggattactaacctgccactacatataaaaatcacttc

SEQ ID NO: 291602 - DNA, 201 bp, Homo sapiens
aaggagctccttatgaatagagcaaaatcacccctatcagaaatttcaagagttttaggaaacctgtgactggaaccaaggacaaagatgaaatatatttygtatgatagcacacccaccagattggatcgtggggccatatggcctttagtgtggaagctgcttgaccacattttccgcccatgcactgccattctcatt

SEQ ID NO: 291603 - DNA, 201 bp, Homo sapiens
aatcgcttgaacccgggaggcaggggttgcagtgagccgcgatcgtgccactgcactccagcctgcgcgacagagtgagactccgtctcaaaaaaaaaaaaagctaaaacattaactattaaaaatggtgctgacttaactagttatgtatatgagtctagcataggattactaacctgccactacatataaaaatcactt

SEQ ID NO: 291604 - DNA, 201 bp, Homo sapiens
gaatcgcttgaacccgggaggcaggggttgcagtgagccgcgatcgtgccactgcactccagcctgcgcgacagagtgagactccgtctcaaaaaaaaaaaaagctaaaacattaactattaaaaatggtgctgacttaactagttatgtatatgagtctagcataggattactaacctgccactacatataaaaatcact

SEQ ID NO: 291605 - DNA, 201 bp, Homo sapiens
agaatcgcttgaacccgggaggcaggggttgcagtgagccgcgatcgtgccactgcactccagcctgcgcgacagagtgagactccgtctcaaaaaaaaaaaaagctaaaacattaactattaaaaatggtgctgacttaactagttatgtatatgagtctagcataggattactaacctgccactacatataaaaatcac

SEQ ID NO: 291606 - DNA, 201 bp, Homo sapiens
ctaagtcttatgaaaatttaactaaagatttcattccctttatctctatcaaggaaatattccttaaaagtgatgtcaaccgggcacggtgctcacacctstaatcccagcactttgtggggtcaaggcagaggatcagttgaagccaggagtttgagaccactctgggcaacatagcaaaacctccatctctatttttat

SEQ ID NO: 291607 - DNA, 201 bp, Homo sapiens
tttttaacgatgcttgagagctaagctggaaggacgtggggtgcttatccctcgtagaaatgcctgccaatgctttctcatttggacccaaactccagatygggagcagtcttatagctggatcagctaccaagagaaattctaaagcaagaagagaaaagcatttcaatttgggacatttatttgcacctggaaatgggg

SEQ ID NO: 291608 - DNA, 201 bp, Homo sapiens
ctcacaaggcgggaacaggagcagagagtgagggatggtgctatatacttttaaatgaccagatctcatgagaactcattcactatcacaaggacgctacsgagggagatgatgctaaaccatcatgagaaactagcccctgtgatcccatcaccctccaccaggccccacctctaacactggggattacatttcaagatg

SEQ ID NO: 291609 - DNA, 201 bp, Homo sapiens
ctggtgtctgctgcttggtgtatggggaaaccccatacacatttggtcacagaagtcttctatgttgatgactgttgtggtgcgacagcagaggaaaacayggtttgaggagagcttttcccaacacgcttatgtgtgccagtttattatagaagacacagatgaacaccagatgaagagatgcatagggcatggtctgtg

SEQ ID NO: 291610 - DNA, 201 bp, Homo sapiens
ctgttagctgctccagcaaattaatcaaacccaaagaggggagtcctaggaactccaatttgaaaccagttggtcagaagttccagaggcccagacttgcractggtatggtggggggcactcggccctgtgggatctgacactatctctgggtagacagggtcggaactgaactggaagccaccccacctggtgtctgct

SEQ ID NO: 291611 - DNA, 201 bp, Homo sapiens
cccaccgcaaggaggcagaccacaacaaaaataagtgttctggggtgagtgaaggaatagctgtcctctctgatgcaacctttaagggtagtcccccgccrcgtggtctcccggggttagtcttgctgctgggggaacaggtgtgccttccatctctcactctcagacacatgaagggcctgactgcccagcaaagaaatg

SEQ ID NO: 291612 - DNA, 201 bp, Homo sapiens
cacttcaggcactaattgcaaatccaggccatgcatacttctctgactgcctggctaaaaaccgcgttcacagccgggcacggtggctcatgcctgtaatsccaacactttgggagaccaaggtaggtggatcacttgaggtcggaggttcgagaccagcctggccaacatggtgaaaccccatctctattaaaaatacaa

SEQ ID NO: 291613 - DNA, 201 bp, Homo sapiens
tcccagcactttgtggagccaagatgggaggattgcttgagcccaggagtttgagaccagcttggggaacatagggagactccatctctaccaaaaaaaawtttttttttaattagccaggtgtggtgacttgtgcctgtagtcccggctacttgggaggctgaggtaggagaatggctggagcctgggaggtcaaggctt

SEQ ID NO: 291614 - DNA, 201 bp, Homo sapiens
tgcccaggctggactcaaactcctgggctcaagcaatcctcccacctcagcttcccaagtagctgtgactacaggctcatgccactgtgccgggcctgtgyataatttaattatacctcagttaacaaaaatgggtgctgaagagcttgctttatattcgttagaatggcctcagtcagccgggtgcggtggctcacgcct

SEQ ID NO: 291615 - DNA, 201 bp, Homo sapiens
atcatttctttgtggtgatagctttcaagatcttttctagctgtctggaaatatacaatacattgtcattagctttagtcactctactatgtaagagaacrctggaatttattcctcctatctaagtgtaactttatacctactgatggaccaacctctccccatttcccctcccccatccctctccagcctctggtaacc

SEQ ID NO: 291616 - DNA, 201 bp, Homo sapiens
gttgttcaccaaacagtaaatccactaattgcatcatgcatatgctttctttttttttttttttgagacagagtcttgctctgtcacccaggcttgaagtrcagtggcgcgatcttggctcactgcaacctctgcctcccagggtcaagcgattctcctgcctcagcctcctgagtagctgggattacagaagtgcgctgc

SEQ ID NO: 291617 - DNA, 201 bp, Homo sapiens
tttgggaggccgaggcaagcggatcacctgaggtcaggagtttgagaccagcctgaccaacatggtgaaaccctgtctctactaaaaatacaaaattagcygggcgtggtggcacatgcctgtaatcccagctacttgggaggctgaggcaggagaatcacttgaacccaggaggcagaggttgcagtcagccaagatctc

SEQ ID NO: 291618 - DNA, 201 bp, Homo sapiens
ggcctcccaaactgctgggattacaggtgtgagccactgtgcctgcctaactactgtaatcttataaatcctttgttgtcattttattttattttaatttwattttattttattttaatttaattttattttattttattttttgagacagtctcactctttcacccaggctggagtgcagtggcgcgatctctgctcact

SEQ ID NO: 291619 - DNA, 201 bp, Homo sapiens
attatgtgagaggacacatgcaaaatacatagcccaggactgtcacatacaagacaagtccctcaacaaatggtggctattaattttttttttttttttttgagacggaatctcactctgtcgcacaggttggagtgcagtggcgggatctcggctcactgcaacctccgcctcccgggttcaagcgattcccctgcctca

SEQ ID NO: 291620 - DNA, 201 bp, Homo sapiens
agagtatttccgtttctgaaatacatgtttaagaagtttggaaaggaattagtgtagagtatgagaagggttacatttttggtgaatatgaagatttaacrtaatgttagttcaaaaatgaccaaagacacaagtgtagacaccaggcttttgaagtagctaatatgttaagcagctgtgcattatatagacagaatattc

SEQ ID NO: 291621 - DNA, 201 bp, Homo sapiens
aaatcaaccagaatttggctgaggaggtgaggactgctgcttttaaaaaattcactataacttttaacaatacattctcttatagtgacgaataaccttgygttcctttttcaggctggtctgaacatcactcacatttgcctccctccagatagcagtgaagccgaggtaataatggcagagctctaaactcttgcttct

SEQ ID NO: 291622 - DNA, 201 bp, Homo sapiens
tgaattctttttcaaagtgtccggattgtttttcagctgcttttgaagaaatgaatctaactcatctcagaagtcttgtcaagtaaattcaatagatcaaygtatgtcgcagcctatggaatacttagtataaaaattgaagagaaaaccctcaggttgctataaaagtgctgctttattaaaattaccaaaatctcacta

SEQ ID NO: 291623 - DNA, 201 bp, Homo sapiens
ggcagagctctaaactcttgcttcttctttcctcttgagacttaataggcccattggcgtctcttagtggtggctgggacagatctaagatttgcttgtgrctgaatgttagagggaagacttcacttcttttctctagggtaaatgcttcatgatatccttgtttcttgtcatttgtatgtttctaccgaagacttgagt

SEQ ID NO: 291624 - DNA, 201 bp, Homo sapiens
gatttgcttgtgactgaatgttagagggaagacttcacttcttttctctagggtaaatgcttcatgatatccttgtttcttgtcatttgtatgtttctacygaagacttgagttgcgacttgttgagttcggttgtgtttcttcagctgcggtggcagcgtcatctagtggaaattgtcaggccgaggcgaggaaactgga

SEQ ID NO: 291625 - DNA, 201 bp, Homo sapiens
accagcctggccaacatggcaaaaccccatctctactaaaaattcaaaaattacctggccatggtggtgggtgcctgtaatcccagctactcgggaggctraagcaggagaatcacttgaggccaggaggcagaggttgcagtgagcagagattgtgctactacacttcagcctgggcgacagagcgagactctgtctcaa

SEQ ID NO: 291626 - DNA, 201 bp, Homo sapiens
gaattctcttccttttttttttttttttttttattttttgtgagatggagtttcgctcttgttgcccaggctggagcgcaatggcacaatctcagctcacygcaacctccgcctcccaggttcaagcgatcctcctacctcagcctcccgagtagctgggattacaaacatgcaccaccacgcccagctaatttttgtatt

SEQ ID NO: 291627 - DNA, 201 bp, Homo sapiens
ggcgtcagaattctcttccttttttttttttttttttttattttttgtgagatggagtttcgctcttgttgcccaggctggagcgcaatggcacaatctcrgctcactgcaacctccgcctcccaggttcaagcgatcctcctacctcagcctcccgagtagctgggattacaaacatgcaccaccacgcccagctaattt

SEQ ID NO: 291628 - DNA, 201 bp, Homo sapiens
tgtagtctgcccctctacaagcagggaccaggtcttggtcacctggtgtccttgtagtaagctcttagcagggactgggtcctggtcacctgggtgtcctkgtagtaagctcttagcagggactgggtcctggtcacctgggtgtccttgtagtaagctcttagcaaaggttgctgagtcgaatgaacttcaccgtttcgg

SEQ ID NO: 291629 - DNA, 201 bp, Homo sapiens
cctggtcacctgggtgtcctggtagtaagctcttagcagggactgggtcctggtcacctgggtgtccttgtagtaagctcttagcaaaggttgctgagtcraatgaacttcaccgtttcggtcctttggtacagtaacaggcactcaagagagtccacgctgtagggttgatcagccaccatgagagagaagtatactcta

SEQ ID NO: 291630 - DNA, 201 bp, Homo sapiens
agctcttagcagggactgggtcctggtcacctgggtgtccttgtagtaagctcttagcaaaggttgctgagtcgaatgaacttcaccgtttcggtcctttsgtacagtaacaggcactcaagagagtccacgctgtagggttgatcagccaccatgagagagaagtatactctaagagcacacaccatcaaccccagagca

SEQ ID NO: 291631 - DNA, 201 bp, Homo sapiens
acaggcactcaagagagtccacgctgtagggttgatcagccaccatgagagagaagtatactctaagagcacacaccatcaaccccagagcatccctgccraccaggaatgtagttacagcggtgcaggttcccagctaccccaaagaaatcccaggagagtccatctctactaagtcaagcaaatagaaattgcaactgt

SEQ ID NO: 291632 - DNA, 201 bp, Homo sapiens
atgagagagaagtatactctaagagcacacaccatcaaccccagagcatccctgccgaccaggaatgtagttacagcggtgcaggttcccagctaccccaragaaatcccaggagagtccatctctactaagtcaagcaaatagaaattgcaactgtagcagcacaatctattttcattatatagtgtgtgtctctctctc

SEQ ID NO: 291633 - DNA, 201 bp, Homo sapiens
tagcagcacaatctattttcattatatagtgtgtgtctctctctcccctcatctctctctctctctcctttcccctcggtcacttgacattgatactgggmcatttatcctcgtgcatcatcttagagttacatttgtataattatcaacatggccatttgatataaacaattccgtccctcacatccaaagaaaagggaa

SEQ ID NO: 291634 - DNA, 201 bp, Homo sapiens
caccgtggtgaaaccttgtctctaccaaaaatacaaaaattagccaggcatggcggcgggcacctgtaatcccagctatttgggaggctgagacaggagarttgcttgaacccacgaggcggaggctgcagtgagctgagatcacgctgctgcagtccagcctgggcgacagagccagaggccatctcaaaaataaataaa

SEQ ID NO: 291635 - DNA, 201 bp, Homo sapiens
tatgattctatcactttatgaaacagaatctttaataatttttcagcttataccaaggatattcttttatttcttaatgactagttttaaatatatgactrttctctctgtacagatttttaattaatgctcataaaggctattgatagaactcattctttctccaaaatggagttaacccgaaatgggtagagattcaga

SEQ ID NO: 291636 - DNA, 201 bp, Homo sapiens
ccatcttcagctagacactttcaaagagtttgttttgttaattatatcttcttacatggctcattatgcttgttgaaatttgcaagatgctttaaaccaakcctgtccaaaccacagcctgtgggccgcatgtagcccaggatagctttgaatgcagcccaacacaaattcataaactttcttaaaacacgaaattttttt

SEQ ID NO: 291637 - DNA, 201 bp, Homo sapiens
tttattttttttatttttattttttgagacagagtctcgctctgtcatccaggcaggaatgcagtggcgcaactgcaggcccactgcatcctgagctcaascgatcctcctgccccagcccccaggtagctgggactacagacatatgccaccatgcccaactaatttttttttttgaggcagagtctcgctccctccccc

SEQ ID NO: 291638 - DNA, 201 bp, Homo sapiens
ccttggagccccagagtcatctcagaacagtatgaaaatcaccactagatgcagaaactgttgtaggattggtcctgctatttgatggcattttgccaagktatccaggaatactcaagaccacaccaggcccactttgggggcagcccaagcagtgcccgcaacagggcagccagcagccccgggtccagcaggagccgg

SEQ ID NO: 291639 - DNA, 201 bp, Homo sapiens
gcccctctgtctgtttgaccccagagactctgtggttagttgcaggacatcaaaatacgcaggaaagacagtgggggaagagaccatcagtcgccctcttkctgcctaggttcactagaatctctaagactgaattcactaggagacacaggacataccgtagagctgtttatgtcttgagagccccagtttcctagtctg

SEQ ID NO: 291640 - DNA, 201 bp, Homo sapiens
atcgcccaggctggagtgcagtggtgcaatcttggcttcactgcaacctctgcctcccaggttcaagtgattctcatttggctgcaaagttcttagtgagktttagtggtattttggccctgtggcacagaagaatggttatttagcaaatgtgttttgcttttgattttgttttgtttttgagacagggtcttgccctgt

SEQ ID NO: 291641 - DNA, 201 bp, Homo sapiens
tgccaccacagctggctaacttttttttgtatttttagtagagacagggtttcaccttgttggccaggctggtcttgaactcctgacctcaagtgatccayccacctcggcctcccaaagtgctgggattacaggcgtgagccaccgcacccggatgctttttctcatttctccatcgcttaaagatagaggattgagaga

SEQ ID NO: 291642 - DNA, 201 bp, Homo sapiens
gtgtcttgaattaaaaagtgaatgtaggtattggattaagaagagaaacttaagttcgtggacctcgtctcctcccagtcctgtaacttacacacacacamaaacagatttcaaatatccatgctagcaaactggaatcattgccatgaagttttagatagttctgaaaaataggaagatggaattagattgatgattaaa

SEQ ID NO: 291643 - DNA, 201 bp, Homo sapiens
tgcactgtttataatagaatggtagtatagagaaccctaaatttcatacaatgaaaaaccacttatgtttggaatgagttatattgagaatgtaataattkaatatagttgtatttgactttcaggtaatattttttcactaaatcagtgactaatgcaatctcaaccaggaagtagccagaaagctccttatttccttcc

SEQ ID NO: 291644 - DNA, 201 bp, Homo sapiens
aatatacatttatatttgaaaaatcaaacccaagaaaggaagaagtccaatgaaattctgaacatgtaagaaaagtcagctttagagaaattggacatccrtgtaattttcattatgccaaagcaattgatataaaattaggatctttgcttgtgactcttgaactttagtaattccaaaatccattgtacctatcactgt

SEQ ID NO: 291645 - DNA, 201 bp, Homo sapiens
ttcgtgcatagatatttttaagtaaaaaggggttatagtgtatttaagagatttaactgctttttatgtatcataagactgtagggaagacatctttttakgtcgataaaggtagacctgtatcttcatttttaatgaccacatcatatctcatagaggtaccatagtagattcagccatttccctgttaatgaacatgta

SEQ ID NO: 291646 - DNA, 201 bp, Homo sapiens
ttatatcttgtgttgcttcgtgcatagatatttttaagtaaaaaggggttatagtgtatttaagagatttaactgctttttatgtatcataagactgtagkgaagacatctttttaggtcgataaaggtagacctgtatcttcatttttaatgaccacatcatatctcatagaggtaccatagtagattcagccatttccc

SEQ ID NO: 291647 - DNA, 201 bp, Homo sapiens
aataaattagctgggcatggtggcacgtgcctgaaatcccagctccttgggaggctgaggcaggagaatcacttgaacaggaggcgaagattacagtgaastgagattgcaccactgcactccagcctgggcgacagagtgagcctcttatcttttaaaaaaagggaatagaaaaaaatggggggaccatttctgaaggtg

SEQ ID NO: 291648 - DNA, 201 bp, Homo sapiens
aaaaaacttgcccaaggttatatcttgtgttgcttcgtgcatagatatttttaagtaaaaaggggttatagtgtatttaagagatttaactgctttttatktatcataagactgtagggaagacatctttttaggtcgataaaggtagacctgtatcttcatttttaatgaccacatcatatctcatagaggtaccatagt

SEQ ID NO: 291649 - DNA, 201 bp, Homo sapiens
gggcaccaatttattactttgaaaatagataaataaaagaatcaagacaaaagaaaaaggtgctaccaaagaagacattctgtcttacactggatcacacragatgtggatatttggcccggaactgctcacatgggtcagcaagcctgagaatgaccgtggagagaaatggctggggctgcaggactcagccaagcctgg

SEQ ID NO: 291650 - DNA, 201 bp, Homo sapiens
ctgtgtattaaactctaaactagggtccttcatctcatttgaattttgaaatgactccataatatattgttatactcatgctgtagttatagataaagaaygagggctgacctttgacaatcacaataaaaaaaaacaaaacaaaagaagtgaaggctgagcgaagtaactcacccagcaagatgcaattcgtatagggta

SEQ ID NO: 291651 - DNA, 201 bp, Homo sapiens
ttccttcctgcttcctcctcttcccatctcctccagcttctccttaaagggactaccgaatgatgatttccttgccagtaggaccttgacataaaacccarcccacaacatcacagttgattttcaagggatgagcttctcagaaaccagaatttaattacttaattttgagtttccaaacaataaaatatattattaaat

SEQ ID NO: 291652 - DNA, 201 bp, Homo sapiens
aaagcaaaagggaaatgctaaatgacatggcacagcaagcaaggtctaggcagctgcgcctttgataacaagctgcttgaagagaaagaccagatcggctragtgaaagcactgtccatcctccccaccccttccttcctgcttcctcctcttcccatctcctccagcttctccttaaagggactaccgaatgatgatttc

SEQ ID NO: 291653 - DNA, 201 bp, Homo sapiens
cttatccctcgtagaaatgcctgccaatgctttctcatttggacccaaactccagatcgggagcagtcttatagctggatcagctaccaagagaaattctraagcaagaagagaaaagcatttcaatttgggacatttatttgcacctggaaatggggaatgggctatcagaccagacttctatcctgtccaacctgcctt

SEQ ID NO: 291654 - DNA, 201 bp, Homo sapiens
taccccatcaccattcacatcttagtgtgactgacatccgttctcagctctggtggggagaggtggacagagacagcagcactgtcccctgtggcccaggkttgcctgtggggacgcccacccaagaagcaggctggagagaagtgccaaggggttaaccattgcctggatgatattttgtcaggaatctaatgtttttct

SEQ ID NO: 291655 - DNA, 201 bp, Homo sapiens
gggtcagacatagactttggtccttaaaaacaagaagcttaaatagtgacctcatcttagttcttataatgtaattgcagatcaaatagccatgattcatraaccaacacaaaggaaccctttgcttcctgactgactccagaatgagtgaacaacatgagtaagagcctcgtcgcagagcctttctccagactaccttgc

SEQ ID NO: 291656 - DNA, 201 bp, Homo sapiens
cctccaccttctgggttcaggtgattctcctacctcagcctcccaagtagctaggattacaggtccctgtcaccacgcctggccaatttttttttttttttgtatttttagtagaagtgtggatgcaccatgtttgccaggttggtttcgaactcctgacctcaagtgatccacccacctcggcctcccagagtgctagga

SEQ ID NO: 291657 - DNA, 201 bp, Homo sapiens
caagcgattctctgcttcagcctccctagtagctgggatcacaggtgtgcaccaccacgcccagctaattttttttttttttttttttttttttttttttkggtatttttagtagagatggggttgcaccatgttggccaggctggtctcaaactcctgacctcaggtgatccaccctactcggcctcctagagtcctggg

SEQ ID NO: 291658 - DNA, 201 bp, Homo sapiens
agcaattgcattttatatgacaccatgtgtgtgcaaaaactgaatcaaaatcttgtgaaacagtgctactttcacttactatatatgatgtagtctaatamttttctatcctattttatttcctttttttaaatgctggttgaaattctgtaaatttatataatgacaaactactgggactctatcttggttcaaaagtcc

SEQ ID NO: 291659 - DNA, 201 bp, Homo sapiens
agtaagtgtattagtctgctagggctgccgtaacaaaagaccatagactgggtggcttcaacaacagaagtttattttattttctcacagttctggaggcrggaagtccaagatcagggtgctggcagggctggtttctgctgaggcctctcttcttggcttgcagacagctgtcttccctgtatgtcgtcttctctgtac

SEQ ID NO: 291660 - DNA, 201 bp, Homo sapiens
cccagccactcgggaggctgaggcaggagaattgcttgaacctgggaggtggagatttcagtgagccgagattgcgccattgcactccagcctggatgacrgagtgagactctggcccaaaaaagaaaaaaataatcctattggtctcatagtgtttctctgtatttttaatatactgtgtatgtgcttatgagaaaccga

SEQ ID NO: 291661 - DNA, 201 bp, Homo sapiens
ggtgggtgctggggagatgccagcaggctgatggccaggtggggaggcgtgttcgagccgaagcgcttaaattcagaaacttacagtttgatcctgtccartgatcttcccagcctgtgcttcatattcccaccatttatttcagttactattatcgtaccaccctcccttatccttgcctccaattaaaacaaaaattct

SEQ ID NO: 291662 - DNA, 201 bp, Homo sapiens
ttagtttagagtagttatactattattttaacattcctatttaatgatatgttttaatactgcaggggaaaggtagatacagattcatagctacaaagcartactcttatgatcaatgttcatttaatttcaaatacaaagttagacattcagagttaaaaaaaattaatgcataggctgggtgcagtggctcacgcctgt

SEQ ID NO: 291663 - DNA, 201 bp, Homo sapiens
tactattacctggaactctagctgtttttcagatctgtagagatcataggtggcttaagggactagattgctggtgatattggctgcaaaattcttttttytttttttttttttttttttttgagacagagtcttgctccatcgcccaggctggagtgcagtggtgcaatcttggcttcactgcaacctctgcctcccagg

SEQ ID NO: 291664 - DNA, 201 bp, Homo sapiens
gaacaaagctgaactattacaaagtccttttcagtttaaatttagtgcatggcatggctcatgaaagacttttaaaagtgaattggaaaattctaaatgtrcttgtattatacatgtgaaaggatgacttcttaaaaaaagaataatgtctgtcccaaacgggagaaggaaggaactctagcttttaaactgcactacatt

SEQ ID NO: 291665 - DNA, 201 bp, Homo sapiens
ctccatgagttggtgaaagcggtatctagccaggttcaagggagacaggggcaggatttcgccttcactgatgggcaggccagcggtcccctgtggaacggtgactattgaatattgagaggacagtatccctccctgagcatcttctggagcttgatgaccactagggaatgtatctgagtcacgcgcaccaaatatgtt

SEQ ID NO: 291666 - DNA, 201 bp, Homo sapiens
agtgtttaagcatataataacagagcatcaacataaatgaagaaaaaaaaagataaaattatagggaaaaatagaaaatccacaaatatagtcagaatttkttaaacccctctcagaacaagtagagtaaaaatcaataaggatttagaagacttaaacaatgctacaattcagcttgactccacccaacaacagcagatt

SEQ ID NO: 291667 - DNA, 201 bp, Homo sapiens
tataaatgtcctaaatacactaattaaaatgcaaagaatgtcagattggctaaaaatgcaagagccgactattactgtcaacaagaaaccctttttaaatmtaaagacataagtaggttaaaggtaaaaggatggaaaagcgctaatactaatcaaaagaaaattgaattggtatatcaatatcaaagtagaactagagca

SEQ ID NO: 291668 - DNA, 201 bp, Homo sapiens
ccagtaattgatgatgtgctgtgagagacaagaacttcaatggtaagtacaatgcacttgattaagtactatattagttaaggttcttaactaagaatttyaagggatgatgggcatctcttagatagaactgtctccatattactggttttgctgatttagtctaatttttgttctaacaaaaagcacacacaaggaagg

SEQ ID NO: 291669 - DNA, 201 bp, Homo sapiens
ccaccacacccagctaatttttgtatttctggtagagacggggtttcaccatattggccacggtggtcttgaactcctgaccttgtgatccacccgcctcrgcttcccaaagtgctgggattacaggcgtgagccaccgctcctggactttttttttttttctttttttaaaaagaaattgagtcttgctctgccacccag

SEQ ID NO: 291670 - DNA, 201 bp, Homo sapiens
ataccatctaggtttgcaagtacactgtatgatgttcacacagtgacaaaatcacccagtgatgcgtttctcagaatgtacccgtctttaagcaacacagkactgtgctgtaaatgcaaggtaaccatttcagtaattcaacaacgttatagttaaagagttgtaaccttgttatagttaacaaagttaatatatagttat

SEQ ID NO: 291671 - DNA, 201 bp, Homo sapiens
tttagacacgtaaaagctgaaaaaattcatcactagctaacctgaagtacaaaaagtgttacagaaattcctgctggcagaaagaaaatgataccagttgsaaacctgaatctacccaaaggaatgaagaacaccaaaaatagtaaccgcatggatagaaagacttgttcttactgtttatcttaaaagctattactgtat

SEQ ID NO: 291672 - DNA, 201 bp, Homo sapiens
cattttaaaaagagaggataaatgacacattatgtagagaggaacaaagataaattggctgatgatttcttgttggaaacaacacaaactagaaggtggtrggtcaatatttttaaagcagtgaaagaaaattcacagcctagagttttttacctggttaaaatatctttccaaaacaaagctgaaataaagactatttta

SEQ ID NO: 291673 - DNA, 201 bp, Homo sapiens
agaacattttaaaaagagaggataaatgacacattatgtagagaggaacaaagataaattggctgatgatttcttgttggaaacaacacaaactagaaggyggtaggtcaatatttttaaagcagtgaaagaaaattcacagcctagagttttttacctggttaaaatatctttccaaaacaaagctgaaataaagactat

SEQ ID NO: 291674 - DNA, 201 bp, Homo sapiens
gtgcctgcctcccacacagtagccaagaagaggtgcctgttgccaacagctagagtgaaaacctctgaatgcaggggcactggttagaatactaagaaggktcttgccagacatccaatccaaaattagcaggcatgcaaagatctaggaaaataccacctaaaatgagaaaagtcaatcaaaactaacccattatacaga

SEQ ID NO: 291675 - DNA, 201 bp, Homo sapiens
gattggttctgggttttgagtggactgcaggaccatgcttctgtgtaactctagggatgctagtccattggggtccattgaaaggagctccctggagttgygaagtgaagccctgtatggctttaggctgtgtcctggtatattggcagaaccggaacacccaatgtcagggccagggtgaagtttcctaaggtactgcct

SEQ ID NO: 291676 - DNA, 201 bp, Homo sapiens
accaaggcagctagtttgcagaggtggaggaccggagaggagagaactgcatagagagagctttgcggatgtacagagtcctccttgagcatgcaagtgcrtactgatcaaagtgtggttgtgagaaaactacccatcaccagagaaaggatcacccgaaagaatgagggaacagtgcctgcctcccacacagtagccaag

SEQ ID NO: 291677 - DNA, 201 bp, Homo sapiens
aacggtgactattgaatattgagaggacagtatccctccctgagcatcttctggagcttgatgaccactagggaatgtatctgagtcacgcgcaccaaatrtgttaccggtggcagctattcgagttatcccgagttcgtgctggtgtatccgtacagttctgcagcaacttcagctcttgcctcctcggaagaaagaatt

SEQ ID NO: 291678 - DNA, 201 bp, Homo sapiens
gagagtgtctccagctctctgtctgtgaggtctcccagccgaatattggccaagggagtgaaaccagaagcaagactaccatgagacaacgttccagagaraggagggactaaccagagcaggtgcccagctttggccagtcaggctcatcttccagtcctcagtagattattatcaactttaagtgatgtcacagactcc

SEQ ID NO: 291679 - DNA, 201 bp, Homo sapiens
ttctagagaaggtagagtaacagggtcttactttaccctcccacttgaaacaagtaaaaaactggacaaagtatatgaaaaatacatcactcagggcattrgacaccaggcagcaaaaaacagtggcccctgagaaattggaaacaaagtgagtcctataattgtccttatctagaaaaagtttcctggctactgtgtaga

SEQ ID NO: 291680 - DNA, 201 bp, Homo sapiens
gctgatgtgcttcaactttttctctctttgtttttttccagttcatatcctttttttgtcattttttttttctgataccacagaagtgatctgataaatcmtttccttcctttgttactcaaattcctaccaaatgattttccgtgactggagttcactcctgggtgtggctgtgagttacatgctcagatgctcagtaca

SEQ ID NO: 291681 - DNA, 201 bp, Homo sapiens
ctctgaccataacagaactctgtaaactcattgttcttttccaggattaaaaccagcgtctgttataattttaaaagagtaacttcctaccttcctgccaygtatctcttggtacagagctagaatcatgtgaaagaggaatcttggtgtatccgtttcctggggctgccatgacaaagtatcgcaaactgggtggcttaa

SEQ ID NO: 291682 - DNA, 201 bp, Homo sapiens
gaaagtaggccacttgatgacttcgggtttgcacagtctcaggttgggctttgactctgagctgtcttaggcagcccagacctggggactctcggtcttawtcatgtccacgccacagcactgcagccatacctgctggcttctatcctgactccccatcgtgaagaaaaatgaccacattcctaaacctcttccctggga

SEQ ID NO: 291683 - DNA, 201 bp, Homo sapiens
ctctcctatctaactaaaatggaatgttttaaagcttaggtaacaattctgaaattcttaattccccccaaaacaaactttttctgagcacattttgattkcttattcccatgccagaatagactgttttgtatatggtatcttccaagatattttcccactgagttaacttctgaaattgcttcttccaacgcataagca

SEQ ID NO: 291684 - DNA, 201 bp, Homo sapiens
taaaatgtgggaccacaggccaggcacggtagctcgcatctgtaatcccagcaatttgggaggccgaggcaggcggatcacctgaggtcaggagttcaagrccagcctggccaacatggtgaaaccccatctctactaaaaatacaaaaattagtcgggcatggtggcgggtacctgtaatcccagctacttgggaagctg

SEQ ID NO: 291685 - DNA, 201 bp, Homo sapiens
ttcacctttgtgttggtaaacaaaaggaatgtaagctgtcctttgagctcgaatcatagtggtgattgccaaaacctacctttgtttttagaagataatarcacatattccacttgcttccccacagtgaccgaagctggctttggtgctgacatcggaatggagaaattcttcaacatcaagtgccgagcttccggcttg

SEQ ID NO: 291686 - DNA, 201 bp, Homo sapiens
tgtttattcccctgacttgaaccagatgttaggggagtatttgaagctcctcgttccctctcttcatcaatatcttctgtctagaaactaaccaagcaccytatctggctccagacctctcagtgatctgtgggaggccaactcgcaggatttcagcagagtttgcactttctaggcctaaaagataagtccttccatgtg

SEQ ID NO: 291687 - DNA, 201 bp, Homo sapiens
caacctgatgaaaccccatctctattaatagtacaaaaattagcttatttcttaaaagccagcaagggggatggttttttccttgggctggtggcacgcayctgtaatcctagctactcgggaagctgaggcatgagaattgcttgaacttgggaggtagaggttgcagtgagccaagatcgtgccactatactctagcct

SEQ ID NO: 291688 - DNA, 201 bp, Homo sapiens
agaacagtagagtcaaaaagaggatactaaaagctttcagagggggaaaaaacaaaacatgcaaataatctggaacccgaatggcatcagacttttcaacrgtaatactgggctgggtgcagtggctcacgcctgtaatcccagcactttgggaggccaaggcaggtgaatcacctgaggtcaggaattcaagaccagcct

SEQ ID NO: 291689 - DNA, 201 bp, Homo sapiens
cccaaagtgctaggattacaggtgtgagccactgcgcccagctggaatttgcttttctttaggttgttttgccactggtgtttttttttttttttttttttctgagacggagtctcactctgtcacccaggctagagtccaatggcgcaatctcctctcactgcaacttccacctcccatgttcaagtgattctccctgct

SEQ ID NO: 291690 - DNA, 201 bp, Homo sapiens
aagcaagaggacttgaataacagatttattctcgggcactgctacatgaaagagatgagtaatgccaaacaaataacacaattctgattcacgccattggyaatggaggagacttctgggtaaacaaaccaaagtaacagctagaatgcagatctgatcacagcagtgtgttttgattcagtctaaagatgacaaagaaaa

SEQ ID NO: 291691 - DNA, 201 bp, Homo sapiens
agaacaaacaacaacaacataggcctggaccttgcacttgcagagttcacaggctagagaggcacacaagttaaatatagagacagctgaaagagctgacrtctgggacagagggagccccctgctccaggagccagggagcagatgccatggggggctggcagggatagggaagtcaggccaggaatggggttacctaag

SEQ ID NO: 291692 - DNA, 201 bp, Homo sapiens
aatggtagaggtggcaaaacagcctgtgtttttaacactgtcccatgtcagctcttattccagatcatcacataaagtctaatctctaatcttgaaaaccraaaagcacctgccacctcagataagagagaccaagaccctagacattcgacttgtgttgaattcactcttattttgttttgatgtttgtaatcccagagc

SEQ ID NO: 291693 - DNA, 201 bp, Homo sapiens
ataacctataacaatgaagcaccttataagtgtgtggagatttccttttcatggcttttcatatatgcctcgcactcacccagcaaccctgcaaactggaygttatactcaccagagagccttgaccctgattgtcactggcaaggagcagtgtctggacttgaacgcaggtcgcaggactccactcatggtgctctcccc

SEQ ID NO: 291694 - DNA, 201 bp, Homo sapiens
catttttccttttatcatctgtcatgacttttttaagtgtgaagcttacttccagaggaattgtcttttctagcattttggacacaactaaatatctttgrtattttcttctcatatgttgagcagtaaattaagttgaatggtgaagtcagaggtgaacttaggaacatttagaaaaaggaaggtcatttattatttttc

SEQ ID NO: 291695 - DNA, 201 bp, Homo sapiens
atcaaaatgtgacacaaattgagcagatgccattggaaaaatgactcccatagacttaaaacacaggttgccacaaactttcaatttgtagaaaaacacartatctgtaaattgcagtaaagcaaagcacaaaaaatgatgtatgcctgtatttttttttctatccacatccaccccccaactttttttttttttttggta

SEQ ID NO: 291696 - DNA, 201 bp, Homo sapiens
accagcctgggcaacatggtgaaaccctgtctctacaaaaaatatttaaaaaacaaaatgaactgagcatggtgaagcacatctatagtcccagctacttrgaggctgaggtaggaggatcgcttaagcccagaagtcagggctgcagtgagctgagactgcagtgccactgcattccagcctagaggacagagtgagacc

SEQ ID NO: 291697 - DNA, 201 bp, Homo sapiens
cctagacatcagtctcctgtttgactcattccaaccccaagaatatgttgtagagtgtaggacccatgaaagttacttactgtgcttccctgtaccttccrtcatccagttcccagacatatctgtgtttcttctctgaatgcctagttacttgggatcccatgctgtattggtctgttctcacactgctgtaaagaacta

SEQ ID NO: 291698 - DNA, 201 bp, Homo sapiens
tgctcattctttcgtatatccccgttgatgatttggaatctgagctaaagatactggggggaaaactaaaccaaattttgataccaaatacaggaaggagrtgaaataagcttttttattgtagctctccttttattgctcacaataaatacttcctactttgtgattttcccgaactgtattagttggcagaaagctgag

SEQ ID NO: 291699 - DNA, 201 bp, Homo sapiens
tgcatattttaaaaactggattgccgcattttaccttgtgttagtgtcttgatttcattgttacgccgcctaccccctccacagtgtacacttggagtgcrtccttctgtggtctagttattttcacttggaggaaggaactttcacagaaaatgtgttgtgtcagtcctttctactcattaaccaagaaatcacaatgtt

SEQ ID NO: 291700 - DNA, 201 bp, Homo sapiens
ctaaatatactattacctggaactctagctgtttttcagatctgtagagatcataggtggcttaagggactagattgctggtgatattggctgcaaaattyttttttttttttttttttttttttttttgagacagagtcttgctccatcgcccaggctggagtgcagtggtgcaatcttggcttcactgcaacctctgcc

SEQ ID NO: 291701 - DNA, 201 bp, Homo sapiens
ttttttttttttttttggagacagagtcttgctctgtcaccctggctttagtgcagtgggtgtgatcttggctcactgcaacctccaccttctgggttcargtgattctcctacctcagcctcccaagtagctaggattacaggtccctgtcaccacgcctggccaatttttttttttttttgtatttttagtagaagtgt

SEQ ID NO: 291702 - DNA, 201 bp, Homo sapiens
gtgtttctaattaagaattggatggttagctggagttttgaggaggtcatctctgggcgtgtctgcttttggctttcttgggcagctatgctagcatatcyttgggaatgaaaatgtaatccttcatgtgacacagtttaggtaaaccacttagtcctttgcaaacaccaaatgctcagtgcggtacttaaatgacaccat

SEQ ID NO: 291703 - DNA, 201 bp, Homo sapiens
aacagagggtggttattcttgattgcacatttgtgatttttagtgaggctctaagggagaagcaagaggacttgaataacagatttattctcgggcactgstacatgaaagagatgagtaatgccaaacaaataacacaattctgattcacgccattggcaatggaggagacttctgggtaaacaaaccaaagtaacagct

SEQ ID NO: 291704 - DNA, 201 bp, Homo sapiens
tcttcaaggagtctgctgccagtgaaactcaccagtactagaatcccaggctccaaagaagtctagaaaagtacatcttttaaggaggtaataagaggctyaagtgcccacaaatcctatctgctcttggcctagttcttttgggatcaatgtgctagtctctcttgtcgaaccagttactgaccagcaagactaaaaaac

SEQ ID NO: 291705 - DNA, 201 bp, Homo sapiens
taaggagattcattattaaatgcatcagaatgttttgccttaacctgaggatggaagaatttatgatctgagtaattgctcaaaggttctttgttgtcacrtggaaggctttgaccttgattttctgatttaggcattcctatagactcagctcattataaggatatgtaatttgcatgctattttatttattcagtcctt

SEQ ID NO: 291706 - DNA, 201 bp, Homo sapiens
ttcccaccatttatttcagttactattatcgtaccaccctcccttatccttgcctccaattaaaacaaaaattctgtccagggtcaatcccatctactccygtgtcttctaaatttccaaggaaaattacctaattttctcttctgtttctctctcctttggcctcttgtatctatattaagaaaaaaaaaaagaaacttt

SEQ ID NO: 291707 - DNA, 201 bp, Homo sapiens
aaatgttagcagtcgtcaacattaatatatagggtaggaaacttagactgtgggctacctgatagaaccatgctgttgagcaaagagagaccaagatggcrgttgaggtgtctgctcccacagtgaagtgccccctactggcctctagcagtcaggtcagttgtgacctcaagtagatgatttgtatgtgtgtgaggtaaa

SEQ ID NO: 291708 - DNA, 201 bp, Homo sapiens
taggaggtacaggtgcagactatgttgtggattctcagaggactgagaagctctctgtctctctctctaggaggctttgatagtgttatcaaagtgggtcyccagtgtttctggaactttcctccccttccttccttacctaattccttctttaaattccaggacctggaatttatcctgtctcgacacttcttgtccaac

SEQ ID NO: 291709 - DNA, 201 bp, Homo sapiens
cagggcttcctctgttcagcatcccagtcagattaggaaaatcagttccaacatttgtttcttgtaaatgaatgctgctttgctgtaatatttacttgctrtgttttattaaagttttcatgtaggacagttttggcagtcatggctggagataggagtctactttgatgttctggaatctctttgagctctgtggttata

SEQ ID NO: 291710 - DNA, 201 bp, Homo sapiens
gaaaaggttaactttcttcatcctacggatgcctatagtaccaaatacgtaatttccatcaccattttcataagtgctgtatcgtatacattgagtaaagyggatctaaattgtcaatgtggacagcttgttatttgaagctgcataaattaacaaagtcagtgtactggctttgttttgttgcattggtattcactaaac

SEQ ID NO: 291711 - DNA, 201 bp, Homo sapiens
gatataaggatttgtatatggaatactaaaactcaaaactcaatgagaaaataacgcttttaaaagatgactgaaagatttgaacacatatttcacccaakaaaatacatgaaaatatgcttaccatcacaggcattagggaaatggaaatttaaaccacagtgaataccgctgcatagctattagaatgtctacaattaa

SEQ ID NO: 291712 - DNA, 201 bp, Homo sapiens
tagcttaatggatgcatcactgtgcaaccacgcaaatgcctcatttctgattcactcatttaatatttattgaggagtgctgggtactaggccattagaaraacaaacaacaacaacataggcctggaccttgcacttgcagagttcacaggctagagaggcacacaagttaaatatagagacagctgaaagagctgacgt

SEQ ID NO: 291713 - DNA, 201 bp, Homo sapiens
cgagagccaccgcacctggcctttgtgctgattctatagtcttattttcacatcctatcagttactgtaagtaactcttgattccaagaactgtataatargaaagggtagcttccaattatctactcttgcttgataatgcattaattccacatagcctttaaaagtttagtaaattttaggataaattttcgaactgtt

SEQ ID NO: 291714 - DNA, 201 bp, Homo sapiens
tacaggcgagagccaccgcacctggcctttgtgctgattctatagtcttattttcacatcctatcagttactgtaagtaactcttgattccaagaactgtmtaataggaaagggtagcttccaattatctactcttgcttgataatgcattaattccacatagcctttaaaagtttagtaaattttaggataaattttcga

SEQ ID NO: 291715 - DNA, 201 bp, Homo sapiens
taaaaccatacaggcacagaatgcggcgggctttataacaaaggcagaaagcccctcttgtgtcctcaagggaggcagagaagctcccctctggctctagytggagaatcccaacccaagcaagtccatccttaaacaataaacatctccagcattgctggctttggaagaccccatggtgagatgctggagcttttttcc

SEQ ID NO: 291716 - DNA, 201 bp, Homo sapiens
tttcttcttttccgttgattaatttgtctatacttgtgccagtacccatggaatttattagcatagttttgtggtatgattgatagctagtagaaaagtcytctttctttgttcttttggttttgttttatttttaaagttatctgactatttatgccattaccctgtgttagttcactctcgagttgctataaaggcatc

SEQ ID NO: 291717 - DNA, 201 bp, Homo sapiens
actggctttgttttgttgcattggtattcactaaaccaaacctaattttcacaaaatgtaaataactgcaattcttgttttgttttgttttgagacagggycttggctgggtgcagtggctcacgctagttatcccagcactttgggaggccgaggcaggtggatcacatgaggtcaggagttcaagaccagcctggccaa

SEQ ID NO: 291718 - DNA, 201 bp, Homo sapiens
ttgggtggggacacagccaaaccatatcagaggaggaggtgcatactacatacttttaaaaaccagatctcaggataactcactcactatcatgagaacascaccaatgggatggcgctaagcctttcatgaagggccacccccatgatcctgtcacctcccaccaggccccacccccaacactggggattacaattgaac

SEQ ID NO: 291719 - DNA, 201 bp, Homo sapiens
tcttttctatgtatgtttatttcattttctttttttcatgtatgtttccaattgtgtttccaggaagagccactcagggtattctttgaatataaattctyacttattttattgggaaccatccaggtaatactacatctgcataactgataaatgaaaatctcagacacattactcaaatttcatatatcaaagaacaaa

SEQ ID NO: 291720 - DNA, 201 bp, Homo sapiens
gtttttttttcttttgaattgattataaactgtacatttaagaacagttttagatttctgtcctttatgttaagtttttattagtgaaaaaagagtcaccwtactataataaccaatccttacgccaaatagacttgtgaccttttgaagtgtcttgaattaaaaagtgaatgtaggtattggattaagaagagaaactta

SEQ ID NO: 291721 - DNA, 201 bp, Homo sapiens
  misc_feature (1)...(201): n = A,T,C or G
tctagctcagtgcctggtacatagcagtacttgacaaatatttgctgaatgaatgactcatggaattgtagggtatgatgacgcctctaaagacattcttnctttgtggttacatccttaggttttgtagatcagaaaactctattagattggttgtggttgagtatccttgacaacatggctgacagtaactcatggaag

SEQ ID NO: 291722 - DNA, 201 bp, Homo sapiens
ctcagcccaccctttgctgagcagagcatggcaaagagcacattccgcctgggaggccaccctagggagcaccaggcacaaaccctgcatggtccagacaygcagaaaactgatgggattgcatgcatggccttttgagggtagactctctgggcctgtggttgcttcatggctgaagtccagctccttgtgggaatggcc

SEQ ID NO: 291723 - DNA, 201 bp, Homo sapiens
ctcctggatgaactcacagattgagagcttctcaaaatgtaaaatcaaattgtcttttaaaatatgctattttaaagttctggagaatcaatgaactttamatgaaaatcggccaatacttggcaaaaagtcaatttgaagagttgtctctttataatctctgatttcacttatagagcttgcttccaaaaaaagtactac

SEQ ID NO: 291724 - DNA, 201 bp, Homo sapiens
aaaagaacaagaaaatgtgtaacgtacaggaaaaaattctgtgtattaggatatttgttgtgccattatttgcagtggtgaaaattggaaacaatccaaaygtccaacagtagagatggttgcatatatttggtccgccattttgtcccatgggagagttgaaattaataaatgtgcgtatgggtgtcttgacatgagtag

SEQ ID NO: 291725 - DNA, 201 bp, Homo sapiens
ggtgaaaattggaaacaatccaaatgtccaacagtagagatggttgcatatatttggtccgccattttgtcccatgggagagttgaaattaataaatgtgygtatgggtgtcttgacatgagtagagagctctcatacaccattggaaaggttgtaaaaaccattttaaaactttgaagtaaaatactgatattgtaaacc

SEQ ID NO: 291726 - DNA, 201 bp, Homo sapiens
gagagctctcatacaccattggaaaggttgtaaaaaccattttaaaactttgaagtaaaatactgatattgtaaacctgtttatgttaagaaaaacccagygtgtttacttacattataggcacttacaacttatttgtgtatataagtgcctagaatgaaaagtagaaagatgtataccaactgttggcattagttgcct

SEQ ID NO: 291727 - DNA, 201 bp, Homo sapiens
tgtttatgttaagaaaaacccagcgtgtttacttacattataggcacttacaacttatttgtgtatataagtgcctagaatgaaaagtagaaagatgtatrccaactgttggcattagttgcctgtgtaataaaagcgagtattgaaaaggccctttctctgcatagttttttactgtttaggtactggagagatggaaga

SEQ ID NO: 291728 - DNA, 201 bp, Homo sapiens
cttacattataggcacttacaacttatttgtgtatataagtgcctagaatgaaaagtagaaagatgtataccaactgttggcattagttgcctgtgtaatraaagcgagtattgaaaaggccctttctctgcatagttttttactgtttaggtactggagagatggaagattcacagtggccttgatttcagtgcctactc

SEQ ID NO: 291729 - DNA, 201 bp, Homo sapiens
attcacagtggccttgatttcagtgcctactctgtgcattgtattgatagttccattacatatattagcacagttcatttgtaaagctgatttgcaaatgrggaaattgggatgttatgttaaaaaaacttgcccaaggttatatcttgtgttgcttcgtgcatagatatttttaagtaaaaaggggttatagtgtattta

SEQ ID NO: 291730 - DNA, 201 bp, Homo sapiens
tgcttttcaatgtcagaaatgcccaacacgtatatatccgcctggtgttaagggccatataggtttctactctggggataaaggaccgtccaaaccaaacwttattccacgtgggaactgagctcagctttcttcagaacgatctgatagaatagtctgtgctcgtcaaggtggatattttcctcagagtgctctctgatg

SEQ ID NO: 291731 - DNA, 201 bp, Homo sapiens
gggtcagctatcactgtgtttccttcctgacatcttgtctctgctcccatccacacaggcccacagaccctcatccataatcccaaagtcattaaggctcygaaaccccaaaatgtttgcataactcatgcagtgacaaaccctagtatttactgtgatgagctataattatatggattttgtacgtgctacttggcgtga

SEQ ID NO: 291732 - DNA, 201 bp, Homo sapiens
attatttttgattaacaggtgctgacctagcccctgcttggggtgttttacaaataaactacatgtaaatcacactgccttcctaaacttcaaaaaattcrgaatcttgaaaccctgctggccttgcgggtctggatgagagaatgtgggtctgtgcctcccttgatcatctgctgtactgccaagttcacgaagacttga

SEQ ID NO: 291733 - DNA, 201 bp, Homo sapiens
gatctcagctcactgcagcctccacctcccaggttcaagtgattctcctgcctcagcctcctgggtagctgggattacaggcacatgccaccacacccagmtaattttttttttttttttttttttttttttgagacagagtttagctcttgttgcccaggctagagtgtaatgtcgcaaactcggctcactgcaacctcc

SEQ ID NO: 291734 - DNA, 201 bp, Homo sapiens
cgtgattttttaagaatattgcatttgtattactgttaaacatattaataacgtatctcataaagtactgataacgcacagagtgtcatgcatcgtgtagyggaatgaacactagggttggagcgagaaagccaaggttttggtcacagctgtgtttcctaccgccatgtgacccttggccacttgagccagtcacaacct

SEQ ID NO: 291735 - DNA, 201 bp, Homo sapiens
ctttgcctgcttgaggcagccttcccaaggaccgacgtttggagtgaaaggtactgtctttaacaactagtgtacttttcagggcaaagttggggggagaraattgtaaaaagaacattgtcaacagataaagagttaagacttttcaggggacttggtacatttcttcactgcacactcagtacatagtggtcgccccat

SEQ ID NO: 291736 - DNA, 201 bp, Homo sapiens
aactcctttgcctgcttgaggcagccttcccaaggaccgacgtttggagtgaaaggtactgtctttaacaactagtgtacttttcagggcaaagttggggrgagagaattgtaaaaagaacattgtcaacagataaagagttaagacttttcaggggacttggtacatttcttcactgcacactcagtacatagtggtcgc

SEQ ID NO: 291737 - DNA, 201 bp, Homo sapiens
cttatgcctgtcctgtgtgatgtgagtagaccataatagcccgagaaaattaaattatggagtgcattttgaaatgagcaccctcagatttgattctggtrtcttcggctggttttgcataggttgtctgggaaatattataaaattcactttctccccccgaactcaggatcacacccacccctcttggagaagggaaga

SEQ ID NO: 291738 - DNA, 201 bp, Homo sapiens
gaactctggtaaactaacaattacttgaaattacttgaaatattaatcttatgaaatgtttgaaagggccattatggagaatattcatagcaagatagttyctgccttattttcctgagtgttctgcatgtaaaataaaacccagaactcaagataaatgtgtgtatgcctttgagttagtcatagaattttttaagcaac

SEQ ID NO: 291739 - DNA, 201 bp, Homo sapiens
actcctggatgaactcacagattgagagcttctcaaaatgtaaaatcaaattgtcttttaaaatatgctattttaaagttctggagaatcaatgaactttraatgaaaatcggccaatacttggcaaaaagtcaatttgaagagttgtctctttataatctctgatttcacttatagagcttgcttccaaaaaaagtacta

SEQ ID NO: 291740 - DNA, 201 bp, Homo sapiens
gccactcctggatgaactcacagattgagagcttctcaaaatgtaaaatcaaattgtcttttaaaatatgctattttaaagttctggagaatcaatgaacwttaaatgaaaatcggccaatacttggcaaaaagtcaatttgaagagttgtctctttataatctctgatttcacttatagagcttgcttccaaaaaaagta

SEQ ID NO: 291741 - DNA, 201 bp, Homo sapiens
ggtgctgggggaaaaagtggcactttgtttcaatggacacagatgctagatgaaacatggatatttggtaatctttttactctatcttttaaaacctgccrtaaacttaatgggacaaaagtcattaccctgtcaaaagggctttgcattccacatacttcttttggctgcaggctctggttctgagccacagttggcccc

SEQ ID NO: 291742 - DNA, 201 bp, Homo sapiens
cttaggatattattccagatgtgtgattgcagagtccaagaggatacaaatttccaatgttgacatatgttttgacattaacttccaggaaattcataccrattcacatccttgccaatatcccatattggcctttgtttaaatgtgtgctaaatccctcatttgccctatcatgattattacacattgcatacctgtatc

SEQ ID NO: 291743 - DNA, 201 bp, Homo sapiens
tgacattaacttccaggaaattcataccgattcacatccttgccaatatcccatattggcctttgtttaaatgtgtgctaaatccctcatttgccctatcrtgattattacacattgcatacctgtatcagaatagttcatgcaatccacaaatatatacacctactatatacctaaaaaaatgaaaaggtaaatactaaa

SEQ ID NO: 291744 - DNA, 201 bp, Homo sapiens
tcccacctcagcctcccgagtagctgggattataggtgcgcatcaccacacctggattttttaatagtgtattttctcacattttcctgtttttctttttwaaatttaacaaaaacaatgaacatagtcagaagttctggcctgtgacttgaaataaccctggatgtacatttttaaaaacattctcagattcattgctgt

SEQ ID NO: 291745 - DNA, 201 bp, Homo sapiens
tgtttcattttttttatgctcaagatgtgaaattttgtaattgtaacaattacaaatgaagagcttgaatatcgattatatattattcttatttacacagytaatatttcaagaatgtttctagtctcatgttttgtacagaaaatctccatattttttagtcattttctcatatgcactgtttataatagaatggtagta

SEQ ID NO: 291746 - DNA, 201 bp, Homo sapiens
tccttctagccttctttcttagtcattgcctgcttgcctttctctctgcctttccttcctccctctgctctcccattttcctccccactccccttctcccrtctcagtaaaatacgtttcctaggctctttattatgtggcggatgattttaaggggccatttatttagtttttcttgttctctgtcttctttttctttta

SEQ ID NO: 291747 - DNA, 201 bp, Homo sapiens
gagctcaagcgatcctcctgccccagcccccaggtagctgggactacagacatatgccaccatgcccaactaatttttttttttgaggcagagtctcgctscctcccccaggctggagtgcagtggcatgagctcggctcactgcaagctccgcctcccgggttcacgccattctcctgcttcagcctcccgagtatctgg

SEQ ID NO: 291748 - DNA, 201 bp, Homo sapiens
taaacagcagatttcatcataagcaaaatcattttgtaccctaaatattaggacttatttactgatgtaacaaatgggaccaaggagaagctggtcttccrtcttaggctcagaaaacagtatcaaaacagcaactctgtggctcagagtaatttatagcatcattttaagctaatgtaattctatttagtgtggaagagg

SEQ ID NO: 291749 - DNA, 201 bp, Homo sapiens
ggctccagcaatcctccctcctcagctaattaaaacaattttttttgttgttgttgaggcagggttctcactgtgttgcccaggctggtcttgaactcccsgcctcaaatagtcctcccgcctccacctccaaaaagtgctgagattactggtgtaaaccaccatgtctggcctaaaaaaattatttcaaatgaaaaaact

SEQ ID NO: 291750 - DNA, 201 bp, Homo sapiens
gcatgagtccaatgtttagattttaaaacaaggaaatttcaacattctgttttctagctgtaagagtaactactttaaaaaaaaaaaaaaagacaaccaamaaaacctatttcttagaaaaagtcttgctctgttgcccaggctagagtacagtggcacgatcacagcctcaaactcctgggctccagcaatcctccctcc

SEQ ID NO: 291751 - DNA, 201 bp, Homo sapiens
ctacaagttttaattttagcaactttgtttagtatgaaaatttgatctaggaataatggagaaaggttttttttcccctctttttttcataatcccactaytgtaaagaaatgaataaactttttgaaatattaaaaagaaaagagctcttatttaaacttaagatgagaagaacttttaataaacttgtggctgggtgaa

SEQ ID NO: 291752 - DNA, 201 bp, Homo sapiens
cagttgcagatgagcacagcccactttagagttgtgtgtaggtatggagttgaggggtcggaatgagatttccaagatttataggtaatgaaaagaacagrttgtatcaaagacaccacgtgtaggaaactaactgttcttaggggacttgtgtgaacctgtgatccttggctttctccaaaatgaacatttcagccttgt

SEQ ID NO: 291753 - DNA, 201 bp, Homo sapiens
aatgattctataagtagaatttatttgaaatttatctggcccaactgtaatagttttcttgttggtttttgaatgcccagtgtccagaatagtacctgacrcttagtaaccgctctgtgaaattttttttttttttttggagacagagtcttgctctgtcaccctggctttagtgcagtgggtgtgatcttggctcactgc

SEQ ID NO: 291754 - DNA, 201 bp, Homo sapiens
aaaaatagtaagtgaaaaggttgtaaatcagggatggtctgtgtatttcaaaatgattctataagtagaatttatttgaaatttatctggcccaactgtartagttttcttgttggtttttgaatgcccagtgtccagaatagtacctgacgcttagtaaccgctctgtgaaattttttttttttttttggagacagagtc

SEQ ID NO: 291755 - DNA, 201 bp, Homo sapiens
cctgtttgactcattccaaccccaagaatatgttgtagagtgtaggacccatgaaagttacttactgtgcttccctgtaccttccatcatccagttcccaracatatctgtgtttcttctctgaatgcctagttacttgggatcccatgctgtattggtctgttctcacactgctgtaaagaactacctgagactggatag

SEQ ID NO: 291756 - DNA, 201 bp, Homo sapiens
gggaacaaaaagagccaattccatcctagacatcagtctcctgtttgactcattccaaccccaagaatatgttgtagagtgtaggacccatgaaagttacytactgtgcttccctgtaccttccatcatccagttcccagacatatctgtgtttcttctctgaatgcctagttacttgggatcccatgctgtattggtctg

SEQ ID NO: 291757 - DNA, 201 bp, Homo sapiens
ggccactcctggatgaactcacagattgagagcttctcaaaatgtaaaatcaaattgtcttttaaaatatgctattttaaagttctggagaatcaatgaamtttaaatgaaaatcggccaatacttggcaaaaagtcaatttgaagagttgtctctttataatctctgatttcacttatagagcttgcttccaaaaaaagt

SEQ ID NO: 291758 - DNA, 201 bp, Homo sapiens
tccactttccctactacttttccactcccacacccacaaataaacaaagaaaccttgagcttattttacaaaagtctttgaaatggccctcgtctctccartgctcctgggtcctggtttggccccatctgtgcaatctctctgatgagtgtgaaataagccaggtttggctcatgctctgccggtgagcttgccctcccc

SEQ ID NO: 291759 - DNA, 201 bp, Homo sapiens
ccccttgggggctggagagggtggaatggaacagagtccaaggaaagaggcattaagagctgtggccctaatggctctttttaacaaacagaaagcatgtrctaaataacattttaaaaatatgtgtaatttattcatataactttttttcccctgaaaaaaaaaaaaaacaaagcctaacctattaatagtggacagggc

SEQ ID NO: 291760 - DNA, 201 bp, Homo sapiens
tactacttttccactcccacacccacaaataaacaaagaaaccttgagcttattttacaaaagtctttgaaatggccctcgtctctccaatgctcctgggycctggtttggccccatctgtgcaatctctctgatgagtgtgaaataagccaggtttggctcatgctctgccggtgagcttgccctccccatgagcctgtc

SEQ ID NO: 291761 - DNA, 201 bp, Homo sapiens
attgaccgatcagattaaaaaccccttgggggctggagagggtggaatggaacagagtccaaggaaagaggcattaagagctgtggccctaatggctcttyttaacaaacagaaagcatgtgctaaataacattttaaaaatatgtgtaatttattcatataactttttttcccctgaaaaaaaaaaaaaacaaagcctaa

SEQ ID NO: 291762 - DNA, 201 bp, Homo sapiens
cacagattgacggctcagtcccatgagaccagccccacttcaggcactaattgcaaatccaggccatgcatacttctctgactgcctggctaaaaaccgcrttcacagccgggcacggtggctcatgcctgtaatgccaacactttgggagaccaaggtaggtggatcacttgaggtcggaggttcgagaccagcctggcc

SEQ ID NO: 291763 - DNA, 201 bp, Homo sapiens
tggtgtaatacttacaacatctagctgacctgtacaattatagctattctcttctgcaagtctaatattcctattcacccctccctctgcatagggatccrgtttgaaatcatcagttgctcagtagggcctggggagctagctggtcattctttggttaaagtcaaagccaacctctttgcctacctttttgtcttaatg

SEQ ID NO: 291764 - DNA, 201 bp, Homo sapiens
tcctcctctgtcaggggacttggatctgtccttgatcttggcttttctgttcataaaccaggtaggactgtcatgggtttgctcccattaccatctcttgycccaagatttctaaaaggcatcacctgatgcacccttttgcccaaatagtgttaaaagtcctcaggctgaggagctgtcctggttcttctacaggatctt

SEQ ID NO: 291765 - DNA, 201 bp, Homo sapiens
gttttgtacagaaaatctccatattttttagtcattttctcatatgcactgtttataatagaatggtagtatagagaaccctaaatttcatacaatgaaaraccacttatgtttggaatgagttatattgagaatgtaataatttaatatagttgtatttgactttcaggtaatattttttcactaaatcagtgactaatg

SEQ ID NO: 291766 - DNA, 201 bp, Homo sapiens
acaggcgtgagcctctgcagcctgccaaaagcttacacattgttcaagattaagctcttcaatttaggagattgtgggaagagagagacagaaaaaaactrtggccaggaaggcaaaacaaagtaggaggctagaaaggaaaggtcggataggtggaggcctggaaaggaatactcagcggtacttgaggggggtaacctg

SEQ ID NO: 291767 - DNA, 201 bp, Homo sapiens
actccccttgggaagaagagaattaagctggggcgtaatgaagtggttctgtccagagaaacattcctagtggctgaattatgaggaggaggaagtacacrttcctgtgtcccttttattccatgttggacttcgtacaacgtggagccacagccaagagatgggaataggaagtcctagaactttttgcaaaaagtctgt

SEQ ID NO: 291768 - DNA, 201 bp, Homo sapiens
tgaaatctatggcaaaagcaaagccaaagtacgtttgtccgtgctagaaaggttaaaggatcaagcagatggaaaatacgtcttagttgctgggtaagacrccatctaacatctacttgatcaagcagacatatttacaaaactcttccctatttatctctctcctcgtacccctcaatccatcctattctcacatttgac

SEQ ID NO: 291769 - DNA, 201 bp, Homo sapiens
caggaggcagaggttgcagcgagctgagattgcaccactgcactccagcctgggccacagagtgagattccatctcaaaaaaaaatagatatatatatatwttttatattatattatatattatatatttatatttttatatatataaatgaataaacaaggcatctgcttatgaaacagtctgcctgaatgaaatctcca

SEQ ID NO: 291770 - DNA, 201 bp, Homo sapiens
ggaatctttgcatggcaggtggatccaatttatgtaatgcttgggttaagacagctcaggaaggcagccttgcaatgaaacgtgaacctgtgtgcgttttyagcagtcaccacatggtggcagcctatccaagaaaattcaagggcaatagtttgcacttgagagcccagaaattttgatttggaagctcagtggaagagg

SEQ ID NO: 291771 - DNA, 201 bp, Homo sapiens
cgtaatgaagtggttctgtccagagaaacattcctagtggctgaattatgaggaggaggaagtacacattcctgtgtcccttttattccatgttggacttygtacaacgtggagccacagccaagagatgggaataggaagtcctagaactttttgcaaaaagtctgtgctctctagctttcactactgaaagcttcaaga

SEQ ID NO: 291772 - DNA, 201 bp, Homo sapiens
ttcagtgcagagcaaactagtcgactctacacaagataaagtcaaacaagttgcagtgctttatcttttgtttctcatattatgttgttattacccctgcycctccttgactttttgaatttcatttttcattataaaaatcaaaataggaattgaaagtaaactattttgaactgagcagtttgttttgtgcgttctact

SEQ ID NO: 291773 - DNA, 201 bp, Homo sapiens
cctctttctccttctctttgtgtagcttttcttttttttttttgagatgaagtcacccaggctggagtgcactggtgcgattttggctcgctgcaacctcygccccctgggttcaagcaattcttgtgcctcagcttcccaagtagctgggattccaggcatgcacccccacgcctggctaactgtttttgtatttttata

SEQ ID NO: 291774 - DNA, 201 bp, Homo sapiens
gtgagactccatctcaaaaaaaaaaaaaaaaaaaaaaaaagcatcattccattgtcaacccttttttgctgttctgtgccctgaacaggtgatgtgatagyggtgcaaagagggtgagcattgtcctttacctcaacaagtgtgtggcctggtaggcgagacaggcatgtcagaatgcttatcatgaagccatctgaaaaa

SEQ ID NO: 291775 - DNA, 201 bp, Homo sapiens
tgcagtaaattgcttttgagagaattggttatcacactcttctctgggtatcattgaaaattcagaatgtttaattacatcaggctatactcactggtatraaatcagggagcaagtataaagtaggtgtagggaaataatttatgttggattaaatgatccaatgaagggattttattaagcccctagaagtcccagaat

SEQ ID NO: 291776 - DNA, 201 bp, Homo sapiens
acatagctctgataaatcctgatctaaccaaaagtcatgacagctcgatatttgggagctggagggggtggggagtaggggtagtaggatatgaaggagctaagtccccattgttgatattagaaatccagtgggtaacatctgaacggcaagaccaggacagcagcgaaaggcaaaaagacaccactgagtgttgacagt

SEQ ID NO: 291777 - DNA, 201 bp, Homo sapiens
ctgcagaagaacaggagtgtaatcaataaatcagatggccttgctgtgaacggttacatagctctgataaatcctgatctaaccaaaagtcatgacagctygatatttgggagctggagggggtggggagtaggggtagtaggatatgaaggagctaagtccccattgttgatattagaaatccagtgggtaacatctgaa

SEQ ID NO: 291778 - DNA, 201 bp, Homo sapiens
atggtcaagaaagagcccactaagtgttttgttcagtaggcctgcaggatgaagggtgccaggaggatggctccatgaaagactgagcctatacgtgaacrtactgaaagctgacttacagttcagccagtgtggtggtatgtgattgacagcgccctagcaagatgagcaacaaagatacaagactccagcagaaacaag

SEQ ID NO: 291779 - DNA, 201 bp, Homo sapiens
tgaaaatatgcttaccatcacaggcattagggaaatggaaatttaaaccacagtgaataccgctgcatagctattagaatgtctacaattaaaaagattgrccagctaagcacagtagctcatgcctgtaatcccaacactttgacaggcagaggcaggaggatggcttgagcccagcctggacaacatagggaggagact

SEQ ID NO: 291780 - DNA, 201 bp, Homo sapiens
aaagatttgaacacatatttcacccaagaaaatacatgaaaatatgcttaccatcacaggcattagggaaatggaaatttaaaccacagtgaataccgctrcatagctattagaatgtctacaattaaaaagattgaccagctaagcacagtagctcatgcctgtaatcccaacactttgacaggcagaggcaggaggatg

SEQ ID NO: 291781 - DNA, 201 bp, Homo sapiens
ggcagcagtctggaaggtggagtggaaaacggagaaattagtcatgaagacctatttagaaagtagtaggcaagaaatacccagggcctaacctgaggtgkaggcaggggatgggaatgagagcaattaccgaactagaatgaactaaactcaatgaacaggagcggggaagagggaatgcagaaatggctctcagatttc

SEQ ID NO: 291782 - DNA, 201 bp, Homo sapiens
tctgcattaagtacgcttcccaggccatttgtaatgaaggtaccgtgatctgttaaggaagagacctacagctgggaacaaaaagagccaattccatcctrgacatcagtctcctgtttgactcattccaaccccaagaatatgttgtagagtgtaggacccatgaaagttacttactgtgcttccctgtaccttccatca

SEQ ID NO: 291783 - DNA, 201 bp, Homo sapiens
agaatttgctggggtttctgcattaagtacgcttcccaggccatttgtaatgaaggtaccgtgatctgttaaggaagagacctacagctgggaacaaaaasagccaattccatcctagacatcagtctcctgtttgactcattccaaccccaagaatatgttgtagagtgtaggacccatgaaagttacttactgtgcttc

SEQ ID NO: 291784 - DNA, 201 bp, Homo sapiens
ttgctggcgggagtttaaatttgaaataggcatttcggaaagcagtttaatggagtttgagctactctttgacccaggaatttcactctaaatatatatgrtatggccaggcatgatagctcacccctgtaattccagcactttgggaggctgaggcaggcagaccacctgaggttggggtttcaagaccagcccgaccaa

SEQ ID NO: 291785 - DNA, 201 bp, Homo sapiens
ttaaaaaccccaaagtttttctttctgaaaagaagttcttaaaaaagtgaaaagacagctatagtgtagaagatatttacaacaaacatttagccaataaktagtgtcttataaaagattcctacaaatcagtgagacaaagacaatctgttagaaaaatggacacatgacagaccactaacaggtgaggaacccgaggtt

SEQ ID NO: 291786 - DNA, 201 bp, Homo sapiens
tgagcccaggagtttgagaccagcttggggaacatagggagactccatctctaccaaaaaaaattttttttttaattagccaggtgtggtgacttgtgccygtagtcccggctacttgggaggctgaggtaggagaatggctggagcctgggaggtcaaggcttcagtgagctgtgatcacaccgcagcattccatcctgg

SEQ ID NO: 291787 - DNA, 201 bp, Homo sapiens
cccgaaggtggtgtgtccatgctgtggctctgttggaatgctggtggcaaagccagtgtattgcacagtgggaacggggtgtggtcaggagacagtgttcyttgcccattgcttggtcaagcctgcactgtggggctcgttcattccttgcccttggatgaagtttataatagttccctctcattctcagttaatatctag

SEQ ID NO: 291788 - DNA, 201 bp, Homo sapiens
attagccctgttttaaacatgctcaatttctctcatgaaacagtcaaaataaccacagtaaaatatgcttccagtttcagcttactaaatctatcaatatrtagccttagataagacttacgttgaagacttaaatgaggccaggcacagcggctcatgcctataatctcagtgctaggcgaggccaaggccagaggatca

SEQ ID NO: 291789 - DNA, 201 bp, Homo sapiens
gataaacgattagccctgttttaaacatgctcaatttctctcatgaaacagtcaaaataaccacagtaaaatatgcttccagtttcagcttactaaatctrtcaatatgtagccttagataagacttacgttgaagacttaaatgaggccaggcacagcggctcatgcctataatctcagtgctaggcgaggccaaggcca

SEQ ID NO: 291790 - DNA, 201 bp, Homo sapiens
cagcctcgcagacatgaaggcacggctgggaaggatggtggtggccagtgacaaaagcgggcagcctgtgacagcagatgatttggtgagtgtttccaacycggaagcttcagggagtggacggtcctcgttcttcgttaccagaaaaagaaaggttttcttccttttatcagtgagtgtaatgaggatacagaaaaagtt

SEQ ID NO: 291791 - DNA, 201 bp, Homo sapiens
ccagaaaaagaaaggttttcttccttttatcagtgagtgtaatgaggatacagaaaaagtttccacacacacatttcttccccgacaagcatgtttgcctractgcttcctaatgttctcatagtcatatatgacgtgcttatgcctggctgcaacaaaaacatgtgaaatttatttcaggagctttccaccatccttgcc

SEQ ID NO: 291792 - DNA, 201 bp, Homo sapiens
taagtgacatcctatgatatttgcctttctgcacctggcttatttcacttcatgttatgtcctccaggttcatccatgttgccacaaatgacaggatttcrttcctttttatggttgaatgatactccattgtgtatacacaccacactttctttatcctccattaatgggcatttggattggttccatctcttggctact

SEQ ID NO: 291793 - DNA, 201 bp, Homo sapiens
aaggaacagaaggaagtggctctgcttccatgaacaggaagataaagttaaaattggcacatttctggcaccagcctggcttattatttaatttggggccytagatttgggttttgtattataaaagcaaatctctgcctcaatcagtcttgcttttctagttcccctttgagtagttgtggtgctttctgtaaagcttcc

SEQ ID NO: 291794 - DNA, 201 bp, Homo sapiens
taccattttacttgtcaaattggcaaaattggatttttcaaaatagttatgataccaaattttggcaaagaaattgaaatggactcccacacactgctggraagtgtatgttgataaaaacacttcaggaagaagagtagaaatacatattaagtgttttaccgtgcatatcctttggcccaaataaattcatttttagtg

SEQ ID NO: 291795 - DNA, 201 bp, Homo sapiens
taaaagttactttatttctgaagtaactgatctactactagtgttttgcagatgacacttcatctctttcaaaaagcaatttggtgatattatcaagatcycaaaggccggatgtggtggctcatgcctgtaatcccagcactttgggagtctgaggtgggcagatcacaaggtcaggagtttgagaccagcctggccaac

SEQ ID NO: 291796 - DNA, 201 bp, Homo sapiens
taaggacttaccgtatatgaaaatatttgcagtaaattgcttttgagagaattggttatcacactcttctctgggtatcattgaaaattcagaatgtttarttacatcaggctatactcactggtataaaatcagggagcaagtataaagtaggtgtagggaaataatttatgttggattaaatgatccaatgaagggatt

SEQ ID NO: 291797 - DNA, 201 bp, Homo sapiens
gtaactcatggaagaccaaactgtaaaccctaatgacagcctttaaattttttaacgatgcttgagagctaagctggaaggacgtggggtgcttatccctygtagaaatgcctgccaatgctttctcatttggacccaaactccagatcgggagcagtcttatagctggatcagctaccaagagaaattctaaagcaagaa

SEQ ID NO: 291798 - DNA, 201 bp, Homo sapiens
ctgacagtaactcatggaagaccaaactgtaaaccctaatgacagcctttaaattttttaacgatgcttgagagctaagctggaaggacgtggggtgcttwtccctcgtagaaatgcctgccaatgctttctcatttggacccaaactccagatcgggagcagtcttatagctggatcagctaccaagagaaattctaaag

SEQ ID NO: 291799 - DNA, 201 bp, Homo sapiens
cattagcaattaatttttttaataaaaggaaaagctatttgtgtatattctttataactgtggcctttcttgtaaaagtgaacatttggtagtagcgtatrtatccagcctgaaacttttggtacatctaccgtatacagcttctataaactatacaaaagattattatagaaaaagttttgtgaaaaacgaaacttggaa

SEQ ID NO: 291800 - DNA, 201 bp, Homo sapiens
cctaagaatttgctggggtttctgcattaagtacgcttcccaggccatttgtaatgaaggtaccgtgatctgttaaggaagagacctacagctgggaacawaaagagccaattccatcctagacatcagtctcctgtttgactcattccaaccccaagaatatgttgtagagtgtaggacccatgaaagttacttactgtg

SEQ ID NO: 291801 - DNA, 201 bp, Homo sapiens
atgactaacccctaagaatttgctggggtttctgcattaagtacgcttcccaggccatttgtaatgaaggtaccgtgatctgttaaggaagagacctacasctgggaacaaaaagagccaattccatcctagacatcagtctcctgtttgactcattccaaccccaagaatatgttgtagagtgtaggacccatgaaagtt

SEQ ID NO: 291802 - DNA, 201 bp, Homo sapiens
aggtaaagttcgttgtcaccaagaagaaaaaggaaggacaaagacaggcccctgctgtctttaaagacatttcctgaaagtcacagttctacatccatccygttgtcccctacttagttgcctggccaactgcaaaggaggctgggaagtgtagtttttataccaggaagccttagatcatttattagcaagctaaaaacc

SEQ ID NO: 291803 - DNA, 201 bp, Homo sapiens
tggctcaccgtagctttgaccttctgggctcaagtgatcctcccacctcagcctcctgagtagctaggactgcaggcatgcaccatcacgccgggctaatktttgtattttttgtagagatggggtttcaccatgttgcccaggctggtctcgaactcctgggctcaagcaatccaccgcctcagccttctgcagtgctgg

SEQ ID NO: 291804 - DNA, 201 bp, Homo sapiens
gttgggctgctaccgcagggcttggcatgcccttagcgtatcaaaatagcagcctctggttccaccgtgctgcgtatttcaggattacagagctgtgctcragttacttacattctctgggatctgtagccacatcttgttacaaagaaagacaagttagaacaatagaaagaaaattagattagggctcgggcctcctgg

SEQ ID NO: 291805 - DNA, 201 bp, Homo sapiens
tgccgggtctcacctaagatgttacttcctacaggaaacattcccagatgttcaaatctagttagatcctttttccatgtaccctcataattcagtctgastgccctatttccctgtcttagtgtttgtcacatttatcgtaattgctgatatattcagatcagctggaagctcgtgaggatagagatgaagtctgactgg

SEQ ID NO: 291806 - DNA, 201 bp, Homo sapiens
tcttgatttcattgttacgccgcctaccccctccacagtgtacacttggagtgcgtccttctgtggtctagttattttcacttggaggaaggaactttcasagaaaatgtgttgtgtcagtcctttctactcattaaccaagaaatcacaatgttgttttctttctcaatgtagagaagtcattcagaattcaaaagaagt

SEQ ID NO: 291807 - DNA, 201 bp, Homo sapiens
gttatcaaagtgggtctccagtgtttctggaactttcctccccttccttccttacctaattccttctttaaattccaggacctggaatttatcctgtctcracacttcttgtccaacagtgagccccctgtcttcacccccctaatcccctgtcttcacatccctcttcccactttatttgctttccccatggacccatac

SEQ ID NO: 291808 - DNA, 201 bp, Homo sapiens
gtagcacttttaaatttcttcaatagcttttcctttgcattcacagcttggctaactgtttggctcaagaggcctagcttttgacctatcttggctttcartacaccctcctcactaagtttaattatttctcggtttttatttaaagtgagagacctgcaactcttcacttgaacacttagaggccactgtagttactaa

SEQ ID NO: 291809 - DNA, 201 bp, Homo sapiens
aaataaaaatacttcatccctttcaaaaagcaatttggtgatattatcaagatcccaagggctgggcgtggtggctcatgcctggaatcctagcactttgsggggctgaagcgagaggatcacttgagtccaggaatctgagaccaacctgtgcaacatagtgagactgtgtctctacagaaaaaaaaagaaaaaaaagaa

SEQ ID NO: 291810 - DNA, 201 bp, Homo sapiens
gaagagtagaaatacatattaagtgttttaccgtgcatatcctttggcccaaataaattcatttttagtgtaccctaaggaaaaaatgaatgtatgggaawatagatcattttaaattaaatataccctcacatagtttataacattaaaaaatggggggataataataggacatcaggttaactgtattttgaagaatct

SEQ ID NO: 291811 - DNA, 201 bp, Homo sapiens
ctcaacccagtacttcctaggattggaaggaagctgccttatttcatgtataagtggcaccagcttgactgtaggaagagagatagcgtgaagcctttcasatctaaactagaaagcttttaaacgtggtagtttgttgagttattctctctctgtggaatgaatgatgtagagatggtgagaaatcagagtgggtgattt

SEQ ID NO: 291812 - DNA, 201 bp, Homo sapiens
ctgcactccagcccaggcaacaagagcgagactccgtctccaaataaataaataaataaaaataaaaccactatcagttaccattttacttgtcaaattgrcaaaattggatttttcaaaatagttatgataccaaattttggcaaagaaattgaaatggactcccacacactgctgggaagtgtatgttgataaaaacac

SEQ ID NO: 291813 - DNA, 201 bp, Homo sapiens
cgtcccggtccccgcccctgggctccagccttccccgccctcgcccagaggggcgcacgggtctcgggccttgcagggcgagcccttcgggacaacttggrggtggcaagaaagccccttccgcctccctcggaactgggattaggaacgagttccaggatgcggtttccccggccagcggaccacctcctccattcacat

SEQ ID NO: 291814 - DNA, 201 bp, Homo sapiens
tcattaaggctctgaaaccccaaaatgtttgcataactcatgcagtgacaaaccctagtatttactgtgatgagctataattatatggattttgtacgtgstacttggcgtgaatattcatatacattgctgtggaaaaattatttttgattaacaggtgctgacctagcccctgcttggggtgttttacaaataaactac

SEQ ID NO: 291815 - DNA, 201 bp, Homo sapiens
gttctgcttggatataaccattagtgtctctcactgccttttgttacttcatcttgggtgtgacgcctctctgttgggtttggggagctgtgtcccttggsctgtgtccatcgtggcagctgtacttggtgacccgtttgaaatgcctcttgctctgttgtttaggaggagccgcgggtggtggatatgcccaggtcatcc

SEQ ID NO: 291816 - DNA, 201 bp, Homo sapiens
cacctgaatgtcaactcctttgcctgcttgaggcagccttcccaaggaccgacgtttggagtgaaaggtactgtctttaacaactagtgtacttttcaggkcaaagttggggggagagaattgtaaaaagaacattgtcaacagataaagagttaagacttttcaggggacttggtacatttcttcactgcacactcagta

SEQ ID NO: 291817 - DNA, 201 bp, Homo sapiens
ggtacatttcttcactgcacactcagtacatagtggtcgccccatgttggttcccccgggcatgaaaaagagcagtgggagccgccagggcttcactggaygcctcaggagcctgttcctggggctgcgttgctcaaggctcccgcctcgagtgcggtctcccatttcatcagggccttctttgccaagtgatcttgaaac

SEQ ID NO: 291818 - DNA, 201 bp, Homo sapiens
cagtcttcacgttgaccccactgcagatctgctgtttagacagatgcagaggtgactgataagccggggtcatgtggcttcaggagtcttaggtttctccwtgcagcggtgtcaggataggctcaccagctcctggccacagtgggtaccagcgacctccttgttgctgaatccaccgaccactctcggtcctcatcctgc

SEQ ID NO: 291819 - DNA, 201 bp, Homo sapiens
tacttgaggggggtaacctgaactcctagtttctctggtgccctttggagaagtctgggtggaggtgtgtttgctgttgcctcttacccccgggtcaggcycctacaggatcctggaggagagtctagggtggtctgaacactgagggtagattacctgcagtagctacagaaacagtcagggccaaggggctgactaaag

SEQ ID NO: 291820 - DNA, 201 bp, Homo sapiens
tttaaatcctaaatattctcattccacaggatcctgcaaactgtagatcccaaacttggaagttctgggaattctgccagtatccccaagtaaatctccttgggaagtttagaatgctgcatggcgtagctgtgcctgctcttatagagtggtgcagactctgcttctccacgtctgctaagtaaaatattccaaacacag

SEQ ID NO: 291821 - DNA, 201 bp, Homo sapiens
tttttaaatcctaaatattctcattccacaggatcctgcaaactgtagatcccaaacttggaagttctgggaattctgccagtatccccaagtaaatctccttgggaagtttagaatgctgcatggcgtagctgtgcctgctcttatagagtggtgcagactctgcttctccacgtctgctaagtaaaatattccaaacac

SEQ ID NO: 291822 - DNA, 201 bp, Homo sapiens
acagggtcttactttaccctcccacttgaaacaagtaaaaaactggacaaagtatatgaaaaatacatcactcagggcattggacaccaggcagcaaaaaacagtggcccctgagaaattggaaacaaagtgagtcctataattgtccttatctagaaaaagtttcctggctactgtgtagagagaaggaacccaggagaa

SEQ ID NO: 291823 - DNA, 201 bp, Homo sapiens
cttggacccaggaggcgaaggttgcagtgagctgatatcgcatcgctgcactccagtgtgggcaacagagcaagactccatctcaaaaaaaaaaaaaaaaagtgggaccacatactctaagcacctttagacaaaaccacaggatacaaatgtaatgtggctaatcagctggtcttccaccacccacctctggagcatgga

SEQ ID NO: 291824 - DNA, 201 bp, Homo sapiens
ttaatatgcctactgacaaaatttttacattagcaaacctgtattagttcatagaaattacttcaatatttaaccatgtctgaaatttaaaattctggcaycatttctgaaagacagttgtgattgtcactcagcaaaattcttatcggtatagaagagtggagatttcaaaaagaaaatggccccaagtccaagtcctcc

SEQ ID NO: 291825 - DNA, 201 bp, Homo sapiens
cttttctcctttcagtgttaaaatggtatttcttttatgaagtaatctggtgagagtatatggcatattggttggtttttttctttttaatatgcctactracaaaatttttacattagcaaacctgtattagttcatagaaattacttcaatatttaaccatgtctgaaatttaaaattctggcaccatttctgaaagac

SEQ ID NO: 291826 - DNA, 201 bp, Homo sapiens
tccgtgagtttttaataatgatatttaagactatcatttattctaatattaagtcttttctcctttcagtgttaaaatggtatttcttttatgaagtaatstggtgagagtatatggcatattggttggtttttttctttttaatatgcctactgacaaaatttttacattagcaaacctgtattagttcatagaaattac

SEQ ID NO: 291827 - DNA, 201 bp, Homo sapiens
ctgctctgtgcacaggcattgtggtgaaattttcattcatgtgcaatgaaccaagtaaaataaggtcattctcataaggttggtttgtttttttttccgtyagtttttaataatgatatttaagactatcatttattctaatattaagtcttttctcctttcagtgttaaaatggtatttcttttatgaagtaatctggtg

SEQ ID NO: 291828 - DNA, 201 bp, Homo sapiens
ccaagcactgctctgtgcacaggcattgtggtgaaattttcattcatgtgcaatgaaccaagtaaaataaggtcattctcataaggttggtttgttttttwttccgtgagtttttaataatgatatttaagactatcatttattctaatattaagtcttttctcctttcagtgttaaaatggtatttcttttatgaagtaa

SEQ ID NO: 291829 - DNA, 201 bp, Homo sapiens
gggattaattacacgtcaggtcattaggttttaacctgcacgttgctgagactcatcttaccggttagagtctgaagccaggataggcggcaaaaaaactyctcccgtcatgctgttttattttctaggtaaactgattattacctgaaacttccttctttgctcatttcttgtctgtctcacccacctggaatatgagct

SEQ ID NO: 291830 - DNA, 201 bp, Homo sapiens
cattttcctccccactccccttctcccgtctcagtaaaatacgtttcctaggctctttattatgtggcggatgattttaaggggccatttatttagttttycttgttctctgtcttctttttcttttagaaatggagtctcgctttgttgctcaggctggagttcagtggtgccatctcggctcaatgcagcctccgcctc

SEQ ID NO: 291831 - DNA, 201 bp, Homo sapiens
ttcccaagcactgctctgtgcacaggcattgtggtgaaattttcattcatgtgcaatgaaccaagtaaaataaggtcattctcataaggttggtttgtttktttttccgtgagtttttaataatgatatttaagactatcatttattctaatattaagtcttttctcctttcagtgttaaaatggtatttcttttatgaag

SEQ ID NO: 291832 - DNA, 201 bp, Homo sapiens
ccattttcctccccactccccttctcccgtctcagtaaaatacgtttcctaggctctttattatgtggcggatgattttaaggggccatttatttagtttktcttgttctctgtcttctttttcttttagaaatggagtctcgctttgttgctcaggctggagttcagtggtgccatctcggctcaatgcagcctccgcct

SEQ ID NO: 291833 - DNA, 201 bp, Homo sapiens
ttacaaaaaggattcccaagcactgctctgtgcacaggcattgtggtgaaattttcattcatgtgcaatgaaccaagtaaaataaggtcattctcataagrttggtttgtttttttttccgtgagtttttaataatgatatttaagactatcatttattctaatattaagtcttttctcctttcagtgttaaaatggtatt

SEQ ID NO: 291834 - DNA, 201 bp, Homo sapiens
ggctaaagaacttcatgatgggtagcgttgaccttttctttaaaaaaaatctccaactccttattcttttttgtaaacccatttgaaattttgttaaatgytgccgttgccagccagggtatttgttctcctaggtttggtaaaatagtcagcaactcaggaagttctaaattcttagaattttccctgtatgttcttggc

SEQ ID NO: 291835 - DNA, 201 bp, Homo sapiens
atagcagtcagaacactttaagagcctgctggctaaagaacttcatgatgggtagcgttgaccttttctttaaaaaaaatctccaactccttattcttttytgtaaacccatttgaaattttgttaaatgctgccgttgccagccagggtatttgttctcctaggtttggtaaaatagtcagcaactcaggaagttctaaa

SEQ ID NO: 291836 - DNA, 201 bp, Homo sapiens
cggatagatagcagtcagaacactttaagagcctgctggctaaagaacttcatgatgggtagcgttgaccttttctttaaaaaaaatctccaactccttaytcttttttgtaaacccatttgaaattttgttaaatgctgccgttgccagccagggtatttgttctcctaggtttggtaaaatagtcagcaactcaggaag

SEQ ID NO: 291837 - DNA, 201 bp, Homo sapiens
gtcatgttctatttaattattgctttaattggcattggtgaccacaaataataataaatactattaactggtgtaacagcttcactagtctatttcactgycccatgctgttgtaactgaagcccccagcacaagcattcccagctcgtggtcatctaagacctttgaggtcattcttacatgcattgctagtgttttcca

SEQ ID NO: 291838 - DNA, 201 bp, Homo sapiens
acagctgctgctttgcctgaaaatagccatgctttccccaaacatgcacataacactgccttctcttaaagagagcctccaaaataaacaatagtcacccytgacctgctaaacagtcatcacatggagatgagtttttatcctcaccttcttgcttcttcagtgaacaagtagtaacaagcagctcctgcgtgtgcctcg

SEQ ID NO: 291839 - DNA, 201 bp, Homo sapiens
tttctccagactaccttgctgggtcccggatattaatagtcttggaaagtggtttctacagctgctgctttgcctgaaaatagccatgctttccccaaacwtgcacataacactgccttctcttaaagagagcctccaaaataaacaatagtcacccttgacctgctaaacagtcatcacatggagatgagtttttatcct

SEQ ID NO: 291840 - DNA, 201 bp, Homo sapiens
caccacatgtgacttcctgctctttcacctttggaactctgggtcagacatagactttggtccttaaaaacaagaagcttaaatagtgacctcatcttagytcttataatgtaattgcagatcaaatagccatgattcataaaccaacacaaaggaaccctttgcttcctgactgactccagaatgagtgaacaacatgag

SEQ ID NO: 291841 - DNA, 201 bp, Homo sapiens
ctcccccaagaagaatttactttgaaatcattgatttctagacccactgggcaaagagaagcaggctgagtagtttataaatcaccccaaaaatcggatgrtgtctctgtgactagctagtaaagagaaaaccttacaggtgtttgttttgttttgtttttgagacagagccttgctctgttgcccaggctggagtgcagt

SEQ ID NO: 291842 - DNA, 201 bp, Homo sapiens
ctgtctttgaaatattttatgcattaaatatgcagtattcataaaagctttcctaccccatttgccccaaattgatcttggtttccatgcttctgtttgtyttttgggattttgatttgctttttcacttctctaggggacacctgtgttcgtgcatgcgggcccttttgctaacattgctcacggcaactcttcagtgtt

SEQ ID NO: 291843 - DNA, 201 bp, Homo sapiens
ttaatcagaaccaggctttgaggacactgtgctttttgtgagacaccacatgtgacttcctgctctttcacctttggaactctgggtcagacatagacttyggtccttaaaaacaagaagcttaaatagtgacctcatcttagttcttataatgtaattgcagatcaaatagccatgattcataaaccaacacaaaggaac

SEQ ID NO: 291844 - DNA, 201 bp, Homo sapiens
agaccactctgggcaacatagcaaaacctccatctctatttttattttttttttaaagttagtgtcaagtatgtggttgcaatgaattagcaaagcctctraaggaacactgtgtgccatttaatcagaaccaggctttgaggacactgtgctttttgtgagacaccacatgtgacttcctgctctttcacctttggaact

SEQ ID NO: 291845 - DNA, 201 bp, Homo sapiens
ccccgggggaggggtgcaggatgcacaggtgccaaggccacacccttctgcggcaggttgtccttcccgtctttcctctcccctgatcattctgccagcakgcacgtgtcctcagaggtaggccatcttaaaaagcaaacaaaaacatttcaaaaacctcctgccccccctgcatcctcatctagcttctgcccagctctt

SEQ ID NO: 291846 - DNA, 201 bp, Homo sapiens
ggaggggtgcaggatgcacaggtgccaaggccacacccttctgcggcaggttgtccttcccgtctttcctctcccctgatcattctgccagcaggcacgtrtcctcagaggtaggccatcttaaaaagcaaacaaaaacatttcaaaaacctcctgccccccctgcatcctcatctagcttctgcccagctcttgtctgtc

SEQ ID NO: 291847 - DNA, 201 bp, Homo sapiens
caggagccacgtgggtggggaaaagccatttcaaactgatacataaaccaggacccacctcctacctacttccttccagctcgctgcttccctgaaacctwcccagtcattcaaggcagaaacccgaggatgatcctagaggcctgttttcccttcccctcttcctgtgtccatccctgcagagttgtccttggttacatg

SEQ ID NO: 291848 - DNA, 201 bp, Homo sapiens
ttagtagagatggggtttccccatgttggccaggctagtctcgaactcctgactcacctcagcctcccaaagtgctgagattacaggcgtgagccaccacrcccggctagtacagaattttttatggccccttttaaagactgcaaacctttttataccaaaaaaaattatttttcctgtatttattttacacattagtaa

SEQ ID NO: 291849 - DNA, 201 bp, Homo sapiens
tttggttaatttttgtatttttagtagagatggggtttccccatgttggccaggctagtctcgaactcctgactcacctcagcctcccaaagtgctgagaktacaggcgtgagccaccacacccggctagtacagaattttttatggccccttttaaagactgcaaacctttttataccaaaaaaaattatttttcctgta

SEQ ID NO: 291850 - DNA, 201 bp, Homo sapiens
gtgttcccttaatctctcataatcattgagttgtggattttttggtttgcttttttattgttgtttgtttgtttccaagcaaaatacaataaatgccaagrctttccaggaaagcatttgccaaaggcaagtcaataaacacacagcatgttagttggtggtaaggtctggagaagaaaaatcagaggtcatgaggggcag

SEQ ID NO: 291851 - DNA, 201 bp, Homo sapiens
taattgacccgagtagaaacttagaaagtcaatgtctgaggccaggcgcggtggctcatgcctgtaatcccagcactttgggaggccgaggtgggcagatyatgaggtcaggagttcaagaccggcctgaccaatatggtgaaaccccatctctactaaaaatacaaaaaaattagccgggcattgtggcacacacctgta

SEQ ID NO: 291852 - DNA, 201 bp, Homo sapiens
aactttcttttaaaacattctaaatattaagcaacattataagtacagatttttttttttttttttttttttgagttggagtctcactccgatcatccagmctggagtgcaatggcgcgatcttggctcactgcaacctctgcctcctgggttcaagcagttctcctgcctcggcctcctgagtagctgggattacaggca

SEQ ID NO: 291853 - DNA, 201 bp, Homo sapiens
atataagtcatgtcttggcttaattgacccgagtagaaacttagaaagtcaatgtctgaggccaggcgcggtggctcatgcctgtaatcccagcactttgkgaggccgaggtgggcagatcatgaggtcaggagttcaagaccggcctgaccaatatggtgaaaccccatctctactaaaaatacaaaaaaattagccggg

SEQ ID NO: 291854 - DNA, 201 bp, Homo sapiens
catggcaaaaccctgtccctactaaaaatagaaaaattagccaggcgtcatggcacgcacctgtaatctcagctactcaggaggctgaggcaggcaaatckcttgaacccaggaggtggaggctgcagtgagctgagatcatgccactgcactctagcctgggtgacagagcaagactcggtctcaaaaatatatataatg

SEQ ID NO: 291855 - DNA, 201 bp, Homo sapiens
ctcaatttataaacctaaacagaaaatgtgtgttgccttatttcctcttcttttctacagataactttcttttaaaacattctaaatattaagcaacattrtaagtacagatttttttttttttttttttttttgagttggagtctcactccgatcatccagcctggagtgcaatggcgcgatcttggctcactgcaacct

SEQ ID NO: 291856 - DNA, 201 bp, Homo sapiens
tccgagtgggtggatcacttgagcccaggaattcgagaccagcctgggaaacatggcaaaaccctgtccctactaaaaatagaaaaattagccaggcgtcrtggcacgcacctgtaatctcagctactcaggaggctgaggcaggcaaatctcttgaacccaggaggtggaggctgcagtgagctgagatcatgccactgc

SEQ ID NO: 291857 - DNA, 201 bp, Homo sapiens
ggaggctcagccaccttcaccaaaaggaccgtatgcctcgagtgtccctcctactttggtgtagtcggatagatagcagtcagaacactttaagagcctgytggctaaagaacttcatgatgggtagcgttgaccttttctttaaaaaaaatctccaactccttattcttttttgtaaacccatttgaaattttgttaaat

SEQ ID NO: 291858 - DNA, 201 bp, Homo sapiens
aggtggctgtgatctgacagcatgcatcaccatctagtccagtgacagtcatgatcaatcaactccactacaggaggctcagccaccttcaccaaaaggaycgtatgcctcgagtgtccctcctactttggtgtagtcggatagatagcagtcagaacactttaagagcctgctggctaaagaacttcatgatgggtagcg

SEQ ID NO: 291859 - DNA, 201 bp, Homo sapiens
ggcaaacagctgggaaggtggctgtgatctgacagcatgcatcaccatctagtccagtgacagtcatgatcaatcaactccactacaggaggctcagccamcttcaccaaaaggaccgtatgcctcgagtgtccctcctactttggtgtagtcggatagatagcagtcagaacactttaagagcctgctggctaaagaact

SEQ ID NO: 291860 - DNA, 201 bp, Homo sapiens
aggcaaacagctgggaaggtggctgtgatctgacagcatgcatcaccatctagtccagtgacagtcatgatcaatcaactccactacaggaggctcagccmccttcaccaaaaggaccgtatgcctcgagtgtccctcctactttggtgtagtcggatagatagcagtcagaacactttaagagcctgctggctaaagaac

SEQ ID NO: 291861 - DNA, 201 bp, Homo sapiens
tgacaaaggcaagtaggcaaacagctgggaaggtggctgtgatctgacagcatgcatcaccatctagtccagtgacagtcatgatcaatcaactccactayaggaggctcagccaccttcaccaaaaggaccgtatgcctcgagtgtccctcctactttggtgtagtcggatagatagcagtcagaacactttaagagcct

SEQ ID NO: 291862 - DNA, 201 bp, Homo sapiens
catcatcttctacctctagccactgacaaaggcaagtaggcaaacagctgggaaggtggctgtgatctgacagcatgcatcaccatctagtccagtgacaktcatgatcaatcaactccactacaggaggctcagccaccttcaccaaaaggaccgtatgcctcgagtgtccctcctactttggtgtagtcggatagatag

SEQ ID NO: 291863 - DNA, 201 bp, Homo sapiens
catagtggtcgccccatgttggttcccccgggcatgaaaaagagcagtgggagccgccagggcttcactggatgcctcaggagcctgttcctggggctgcrttgctcaaggctcccgcctcgagtgcggtctcccatttcatcagggccttctttgccaagtgatcttgaaacacggccatccatatcggtgtttgatcat

SEQ ID NO: 291864 - DNA, 201 bp, Homo sapiens
ggttcactggctttttactgagcttgtccgctgagattgaaggctccatcatcttctacctctagccactgacaaaggcaagtaggcaaacagctgggaargtggctgtgatctgacagcatgcatcaccatctagtccagtgacagtcatgatcaatcaactccactacaggaggctcagccaccttcaccaaaaggacc

SEQ ID NO: 291865 - DNA, 201 bp, Homo sapiens
gacctcctgagaactcagagtgagaactcactcattatcgtgaggacagtaccaagccattcatgagggatccgcccccgtgatccaaacacctcccacckggccccacctccaacattgaggattacatttcaccatgagatttggaggggaccaccatccaaaccacatcaaccctttattgtaagtttcagaactaat

SEQ ID NO: 291866 - DNA, 201 bp, Homo sapiens
cctcttacttactaccttaaaaatgctagcgtggtgccagggtaggcagataggagtgcagcctataaagatgggaatgtttgctgttcttcttatgcaarcggttcactggctttttactgagcttgtccgctgagattgaaggctccatcatcttctacctctagccactgacaaaggcaagtaggcaaacagctggga

SEQ ID NO: 291867 - DNA, 201 bp, Homo sapiens
aactgctttgcaaaccctcccaggtcagccagcaccatcctttggcatgtgagcaaattgacaccaatttgaggcccgaaacaaaagtgagacaaaaagaygttcatttcaacatccttctacagaagttaaatagagtaggcacatctgaggtgtatctgaagtctgagcaggaattcatgttcttcaaaaagttgtcgt

SEQ ID NO: 291868 - DNA, 201 bp, Homo sapiens
ggccactgtggaagtcatataccagatgcacagatggcattgtatttgttgtggactctgttgatgtcgaaaggatggaagaagccaaaactgaacttcayaaaataactaggatatcagaaaatcaaggagtccctgtacttatagttgctaacaaacaagacttgaggaactcattgtctctttcagaaattgagaaat

SEQ ID NO: 291869 - DNA, 201 bp, Homo sapiens
cagcttgacttgaggatttgtacatatcgcaccagctaacctttgcttaatctattgtatggttaacaaagatgaaggtaatatcctcgggtagagtgtaractatatttagaactttatggtgaggcatatatcctctgatccatgcatcatttacttctgtgactataaatgtgtctgatatgggtggtatccctgttt

SEQ ID NO: 291870 - DNA, 201 bp, Homo sapiens
agcacagagctgagtaaaccaagggggtgagccatgcacgtgtcttgaagaacatttggacagagggttacctttagtgcaggggccttgggcagcaaggkgttttgcaatttcagacagcaagagcgaggatctggttaggaacctgtattagtttgttctcgcattgccgtaaggaactacctgagactgggtaattta

SEQ ID NO: 291871 - DNA, 201 bp, Homo sapiens
ctcagcttgacttgaggatttgtacatatcgcaccagctaacctttgcttaatctattgtatggttaacaaagatgaaggtaatatcctcgggtagagtgyagactatatttagaactttatggtgaggcatatatcctctgatccatgcatcatttacttctgtgactataaatgtgtctgatatgggtggtatccctgt

SEQ ID NO: 291872 - DNA, 201 bp, Homo sapiens
catgctgcccagtggcttccggaagttcctggtccacaacgtcaaggagctggaagtgctgctgatgtgcaacaatcgtacttgtgccgagatcgctcacratgtttcctccaagaaccgcaaagccatcgtggaaagagctgcccaactggccatcacagtcaccaaccccaatgccaggctgtgcagcgaagaaaatga

SEQ ID NO: 291873 - DNA, 201 bp, Homo sapiens
aacaatggctcacatttcttacaccttagcatgggttgtcccattctgttgtcaccacaaccctacagataagaaaactaaagatagaagagtttaggccmggtgcagtggctcacgcctgtaatcccaacactttgggaggctagggcgggcagatcacttgaggtcaggagttcgagaccagcctggccaacatagaga

SEQ ID NO: 291874 - DNA, 201 bp, Homo sapiens
ttagtgaaatttcattgacttaagatgagttggatcctcaaaattaatatattctaaacaaagttctatttttaagctgcagtaataatgccgaatttctyttatagttaattgaatgatttatcctggtgttgtctcctggtagtcactgaaaaagtcattacaatcctcactttctcccctttaattcaagttcagaat

SEQ ID NO: 291875 - DNA, 201 bp, Homo sapiens
caaaatactctctcctcagcagccacagagactgaaacctaatgaagccctgttgccttcctacttagagttcttccatgatttacccatgtttccacccyggtctgaaaagccctagggatctggctctcaccccttcccgctccttgtcccttatcctcatctctcatcctctgggggacctttgcacggctaacacca

SEQ ID NO: 291876 - DNA, 201 bp, Homo sapiens
ctgtattagtccattttgacattgctacaaggaactacctgagactgggtaatttatgaagaagcatcagaataacttcttggccaaccaaaaaaaaaaawttttaagtgtattcatagcttctttaatataagtcatgtcttggcttaattgacccgagtagaaacttagaaagtcaatgtctgaggccaggcgcggtgg

SEQ ID NO: 291877 - DNA, 201 bp, Homo sapiens
cagttttgatgaaagatgcaataaaaccaaacctgatgcagaccctggaagtaagtggttttcttcttatagtaattgtttgcattaactggattgccacmcaatgtgaacatttttagccaatatgaggcaggcatagagcatgcctggggcagcagtgtgctttgcaatctcaggcagaaagagtgaggatctggttag

SEQ ID NO: 291878 - DNA, 201 bp, Homo sapiens
gtagtcccagctactggggaggctgaggcagaagaatcgcttgaaccctggaggcagaggttgcagtgagcctccagcctgggcaacagagagagattccrttctcaaaaaaagaaagaaaagaatgtgaatagtgacatcacattaaaaaataataacaaactttagccttgtggcctttttttggcacatgttttccgc

SEQ ID NO: 291879 - DNA, 201 bp, Homo sapiens
tttcctcatctatcaagtgagcgtacaaataattaaccccataaatatgaagcatagcacctctcctattaactgccccaatccactctcagttttatctrgttaacatttattaatttgccgggtctcacctaagatgttacttcctacaggaaacattcccagatgttcaaatctagttagatcctttttccatgtacc

SEQ ID NO: 291880 - DNA, 201 bp, Homo sapiens
ccagttacgtaggaatatagttagtaatagtgtattcctgaaaattgctaagagagtggttataaagtattctcaccaccaaaatgataactgtgaggtartgcatatgttaattaactaggtttaatcattccacagcatatacttcaaaacatcatgttatacacaataaatacatacagttttatctgtcaatttgaa

SEQ ID NO: 291881 - DNA, 201 bp, Homo sapiens
tttatttatttttatttatttattttgtttttgagatggagtttcgctcttgttgcccaggctggagtacaatgccgtgatcttggctcactgcaacctcygcctcccagattcaagtgattctcctgcctcagcctcccaagtagctgggattatgggtgcccactgccacacccggctaatttttgtatttttagtaga

SEQ ID NO: 291882 - DNA, 201 bp, Homo sapiens
atgtctcctccaagcgactgggtgcagcatcgctccatgtgactgggtgcagcatcgccccatgcgactgggtgcagcattgccccatgcgactgggtgcmgcatcgttccatgcgactgggtgcagcatcgttccatgcgactgggtgcagcatcgccccatgcgactgggtgcagcatcgttccatgcgactgggtgca

SEQ ID NO: 291883 - DNA, 201 bp, Homo sapiens
attactccaaatttaagtttactttcccatatactgaatctcctacaataatggaacttaaaatgcacactggtgattggtaagcagttgtgaacagagaraggcaaagtcatattttattaatttcaagggcttagggtataatttgaattctttttcaaagtgtccggattgtttttcagctgcttttgaagaaatgaa

SEQ ID NO: 291884 - DNA, 201 bp, Homo sapiens
tttttaaatcacaatttgtgttacgttcatgagtaatgggtgccagaaataatgttgtgtgttaaacataaatgtagatgggtaaccatgtatacaaatgyatatctcctcaacccagagagtgaaatttccccaccccagtgaccctgcctcgctgtatggttcattcttctccaggaattgaaacatggtggcagcctg

SEQ ID NO: 291885 - DNA, 201 bp, Homo sapiens
gcaggcacagtagaacctgaatgtctcctccaagcgactgggtgcagcatcgctccatgtgactgggtgcagcatcgccccatgcgactgggtgcagcatygccccatgcgactgggtgcagcatcgttccatgcgactgggtgcagcatcgttccatgcgactgggtgcagcatcgccccatgcgactgggtgcagcatc

SEQ ID NO: 291886 - DNA, 201 bp, Homo sapiens
ctgtggaggttctacatgatatggcattaaccctcgggagagcaggcacagtagaacctgaatgtctcctccaagcgactgggtgcagcatcgctccatgygactgggtgcagcatcgccccatgcgactgggtgcagcattgccccatgcgactgggtgcagcatcgttccatgcgactgggtgcagcatcgttccatgc

SEQ ID NO: 291887 - DNA, 201 bp, Homo sapiens
cagggcctgtggaggttctacatgatatggcattaaccctcgggagagcaggcacagtagaacctgaatgtctcctccaagcgactgggtgcagcatcgcyccatgtgactgggtgcagcatcgccccatgcgactgggtgcagcattgccccatgcgactgggtgcagcatcgttccatgcgactgggtgcagcatcgtt

SEQ ID NO: 291888 - DNA, 201 bp, Homo sapiens
caccttaggctctcagaatactcagcttgacttgaggatttgtacatatcgcaccagctaacctttgcttaatctattgtatggttaacaaagatgaaggyaatatcctcgggtagagtgtagactatatttagaactttatggtgaggcatatatcctctgatccatgcatcatttacttctgtgactataaatgtgtct

SEQ ID NO: 291889 - DNA, 201 bp, Homo sapiens
cattgctcaggctgtctatggagccaaagatattgaactctctcctgaggcacaagccaaaatagatcgttacactcaacaggtaaaagttctacttttargggaaaagaaaaaattcaccttaggctctcagaatactcagcttgacttgaggatttgtacatatcgcaccagctaacctttgcttaatctattgtatgg

SEQ ID NO: 291890 - DNA, 201 bp, Homo sapiens
aaaaatctttaaccagattaaacttatacaattttgttataatttgtgtttctccaggttccaattgtggacaagataaggaccattgctcaggctgtctrtggagccaaagatattgaactctctcctgaggcacaagccaaaatagatcgttacactcaacaggtaaaagttctacttttaggggaaaagaaaaaattc

SEQ ID NO: 291891 - DNA, 201 bp, Homo sapiens
ccacctggacacaattctaggatctttgtgagttttttggagttgcatttctaaaatgatacaccattttctcatacacgttaattattagcagttgtgcktattactgcctgggagaaaggaccccaaagtaattgcattgatttcatcgttggcgtgatgtgtggctgttttcactccagttgtgaccacctaagctga

SEQ ID NO: 291892 - DNA, 201 bp, Homo sapiens
ttgctgagggggtactctgataagggaattttaagcaattacagaacatctcactaaagtttttaaaaaatctttaaccagattaaacttatacaattttkttataatttgtgtttctccaggttccaattgtggacaagataaggaccattgctcaggctgtctatggagccaaagatattgaactctctcctgaggcac

SEQ ID NO: 291893 - DNA, 201 bp, Homo sapiens
taaaaggaaaaaagagggtttgctaggaatcctgcagttgctgagggggtactctgataagggaattttaagcaattacagaacatctcactaaagttttwaaaaaatctttaaccagattaaacttatacaattttgttataatttgtgtttctccaggttccaattgtggacaagataaggaccattgctcaggctgtc

SEQ ID NO: 291894 - DNA, 201 bp, Homo sapiens
agatggtgaaaccccgtctctactaaaaatacgaaaattagctgggcgtgttggtgggcacctgtaatcccagctactcgggaggctgaggcagagaattrcttgaacccgggaggcggaggttgcagtgagctgagattgcgccactgcactccagcctgggcgacagagcaagactctccttctaaaaaaaaaaaaatc

SEQ ID NO: 291895 - DNA, 201 bp, Homo sapiens
gcatgtagaactatccaatttctgtatataactatagaaatatatattagacgggccgggcgtggtggctcatgcctgtaatcccagcactttgggaggcygaggcgggcagatcacgaggtcaggagatcgagaccatcctggctaacacacggtgaaaccccgtctctactaaaaatacaaaaaattagccaggcgtgg

SEQ ID NO: 291896 - DNA, 201 bp, Homo sapiens
gccaagatcgtgccactatactctagcctgggcggcagagtgaaactgtgtcttaaaagaaaaaaataaataaaagttatcaaaaaacaaaaacaaaaccrtaatactggaggctagattacaatagagcaatatcttcaaaattcaaggaaaatggccaggcgcggtggctcacgcttgtaatcccagcactttggaagg

SEQ ID NO: 291897 - DNA, 201 bp, Homo sapiens
atccagcctggagtgcaatggcgcgatcttggctcactgcaacctctgcctcctgggttcaagcagttctcctgcctcggcctcctgagtagctgggattmcaggcacccaccaccacatttggttaatttttgtatttttagtagagatggggtttccccatgttggccaggctagtctcgaactcctgactcacctcag

SEQ ID NO: 291898 - DNA, 201 bp, Homo sapiens
ttgtaccactgcactccagcccggcgacggagtgagattctgtctcaaaaaaaaaaaaggctttttcaagaaccatgatggatgattaaactaattgtaartatcagaacaagataaccctatagcaaaacagttaatagcagaggaataccctggagtgtcctgagatagatttcttccagtagtaatttgataagatga

SEQ ID NO: 291899 - DNA, 201 bp, Homo sapiens
aattagccaggcttggtggcgtgcacctgtagtcccagctactcgggaggctgaggtaggagaatggcgtgaatccggggggcagagcttgcagtgagccragatcgcgccactgcactccagcctggagaacagagactccatctcaaaaaaaaagaccttttgctcctctttgctcttgtgtctgtttaacagattttt

SEQ ID NO: 291900 - DNA, 201 bp, Homo sapiens
tcacccccatgatccagtcacctcccaccaggcccctcctccaacactgaagatcataattcatcatgagatttggctggggatacagcgccaaaccatakcacatgcctttcccaggactggtgatggaggaacggtgcccttgtcacacctaccagaatatactcacccacctccagacactccatttctctttcaagc

SEQ ID NO: 291901 - DNA, 201 bp, Homo sapiens
aagtagaatttatttgaaatttatctggcccaactgtaatagttttcttgttggtttttgaatgcccagtgtccagaatagtacctgacgcttagtaaccrctctgtgaaattttttttttttttttggagacagagtcttgctctgtcaccctggctttagtgcagtgggtgtgatcttggctcactgcaacctccacct

SEQ ID NO: 291902 - DNA, 201 bp, Homo sapiens
gctccttatttccttcctttccttacttgtcagtgacggaaatggataataaaatgtctcataaggtgatcccaccagggcacagccattctctctctgcrtaagcttgaacttgtctggctcacactccccttgggaagaagagaattaagctggggcgtaatgaagtggttctgtccagagaaacattcctagtggctg

SEQ ID NO: 291903 - DNA, 201 bp, Homo sapiens
ttcaggtaatattttttcactaaatcagtgactaatgcaatctcaaccaggaagtagccagaaagctccttatttccttcctttccttacttgtcagtgayggaaatggataataaaatgtctcataaggtgatcccaccagggcacagccattctctctctgcgtaagcttgaacttgtctggctcacactccccttggg

SEQ ID NO: 291904 - DNA, 201 bp, Homo sapiens
tgttttcattggcatctttatatgattttgaaatattttatttgcaaaacagaaatgagcagccttccgctatgcgtgtcatttagtcattaaagtgaatracagtgatactttaattgacccagtgtgtttcattttttttatgctcaagatgtgaaattttgtaattgtaacaattacaaatgaagagcttgaatatcg

SEQ ID NO: 291905 - DNA, 201 bp, Homo sapiens
gtgtgataagctgatgaacaataatgttttcattggcatctttatatgattttgaaatattttatttgcaaaacagaaatgagcagccttccgctatgcgygtcatttagtcattaaagtgaataacagtgatactttaattgacccagtgtgtttcattttttttatgctcaagatgtgaaattttgtaattgtaacaat

SEQ ID NO: 291906 - DNA, 201 bp, Homo sapiens
aggtggcagccatctcctcctcggcatcttggccgccctcagaccccttgtgaagcccaagatcgtcaaaaagagaaccaagaagttcatccggcaccagycagaccattatgtcaaaattaagcgtaactggtggaaacccagaggcattgacaacagggttcgtagaagattcagggtccagatcttgatgcccaacac

SEQ ID NO: 291907 - DNA, 201 bp, Homo sapiens
tgtgtgataagctgatgaacaataatgttttcattggcatctttatatgattttgaaatattttatttgcaaaacagaaatgagcagccttccgctatgcrtgtcatttagtcattaaagtgaataacagtgatactttaattgacccagtgtgtttcattttttttatgctcaagatgtgaaattttgtaattgtaacaa

SEQ ID NO: 291908 - DNA, 201 bp, Homo sapiens
gtgaggctggccgtgtctctgaaatattttctttttttttttttgcccttctctcttcctcggcgctgcctatggaggtggcagccatctcctcctcggcrtcttggccgccctcagaccccttgtgaagcccaagatcgtcaaaaagagaaccaagaagttcatccggcaccagtcagaccattatgtcaaaattaagcg

SEQ ID NO: 291909 - DNA, 201 bp, Homo sapiens
agcattcttgcttttcatgttcttagcctctcctgctaaagtgggagctttataaaagcagaggttattcccctttttatttgctgctgtgttccctatgytcagaacagaactttgttacatatagtcgtaagtgttcagtaaatatctgttgaacaaatgagtagaataagtaaaagacaatttatggatacagaacta

SEQ ID NO: 291910 - DNA, 201 bp, Homo sapiens
atttcaaatatccatgctagcaaactggaatcattgccatgaagttttagatagttctgaaaaataggaagatggaattagattgatgattaaaaggacarcccaaaatatggtggacttccatccttaacaagcattcttgcttttcatgttcttagcctctcctgctaaagtgggagctttataaaagcagaggttatt

SEQ ID NO: 291911 - DNA, 201 bp, Homo sapiens
cacagtatgctgaggtaagaggatcacttgagcccaggaagttgaggctgcagtgagccgtgatcacatcaccgaactccagaatgagaccctgggtcacraaaaaagaaaagaagatggtaaattatatgttatgtgtacgttaccaaaattaaagttcttaaaaatatatattttaggccagacacagtggctcacacc

SEQ ID NO: 291912 - DNA, 201 bp, Homo sapiens
ctctgtcgcacaggttggagtgcagtggcgggatctcggctcactgcaacctccgcctcccgggttcaagcgattcccctgcctcagcctcctgagtagcwgggattacaggctcgcactaccacgcctggcttattttgtgtttttagtagagacggggtttcaccatgttggccaggctggtctcaaactcctgacctc

SEQ ID NO: 291913 - DNA, 201 bp, Homo sapiens
ttttattttttttttaaagttagtgtcaagtatgtggttgcaatgaattagcaaagcctctaaaggaacactgtgtgccatttaatcagaaccaggctttkaggacactgtgctttttgtgagacaccacatgtgacttcctgctctttcacctttggaactctgggtcagacatagactttggtccttaaaaacaagaag

SEQ ID NO: 291914 - DNA, 201 bp, Homo sapiens
acttacctcaaggggttatggaaacaattatgtgagaggacacatgcaaaatacatagcccaggactgtcacatacaagacaagtccctcaacaaatggtsgctattaattttttttttttttttttgagacggaatctcactctgtcgcacaggttggagtgcagtggcgggatctcggctcactgcaacctccgcctcc

SEQ ID NO: 291915 - DNA, 201 bp, Homo sapiens
acagttctggaggctagaagtccaaagtcaaggtgtcagccaggccatacgccacctcgagactctgggtggaatccttgctggcctcttcctagcatccrgtggtggctgtcactccctggcgttcccaccttgcagctgcgtcactcccgtctcagcctctgtggtcccaccacgttctccctgtgtctgtgtcttcac

SEQ ID NO: 291916 - DNA, 201 bp, Homo sapiens
aacaacaagggggaaattcacccccatgatccagtcacctcccaccaggcccctcctccaacactgaagatcataattcatcatgagatttggctggggayacagcgccaaaccatagcacatgcctttcccaggactggtgatggaggaacggtgcccttgtcacacctaccagaatatactcacccacctccagacact

SEQ ID NO: 291917 - DNA, 201 bp, Homo sapiens
gagaactcactatcacgagaacaacaagggggaaattcacccccatgatccagtcacctcccaccaggcccctcctccaacactgaagatcataattcatyatgagatttggctggggatacagcgccaaaccatagcacatgcctttcccaggactggtgatggaggaacggtgcccttgtcacacctaccagaatatac

SEQ ID NO: 291918 - DNA, 201 bp, Homo sapiens
tttaattgactcagttttacaggctatacgggaagcatggctggggaggcctcaggaaacttacaatcatggtggaaggcaaaggggaagcaagcacatcktcacatggcggcaggaaagagagagagtgaaggggcagtgccacacacttttaaacaaccagatctcatgagaactcactatcacgagaacaacaagggg

SEQ ID NO: 291919 - DNA, 201 bp, Homo sapiens
agaggtttaattgactcagttttacaggctatacgggaagcatggctggggaggcctcaggaaacttacaatcatggtggaaggcaaaggggaagcaagcmcatcttcacatggcggcaggaaagagagagagtgaaggggcagtgccacacacttttaaacaaccagatctcatgagaactcactatcacgagaacaaca

SEQ ID NO: 291920 - DNA, 201 bp, Homo sapiens
tttctcagtagtctctgtatttgcaaatgagtcagttaggattagttttacccacaaataacaacaacagtaaaaaaaaaaaaaaaagaaagaaagaaagwaagtgacccagcactataatacaagtttatttctctctcacatcaaggaagttcagggtagccagtctgggctggtttagcaactccttgatcatcatgg

SEQ ID NO: 291921 - DNA, 201 bp, Homo sapiens
ccacgcccagctaatttttgtatttttagcagagacagggtttcaccatgttcgtcaggctggtctcaaactcctgaccttgtgatccacccacctcggcytcccaaagtgctgggattacaggtgtgagccaccgcgcccggccagaatttcctttatttttcgggctgaatacgctcccattctttggatatcccacat

SEQ ID NO: 291922 - DNA, 201 bp, Homo sapiens
tctctgtatttgcaaatgagtcagttaggattagttttacccacaaataacaacaacagtaaaaaaaaaaaaaaaagaaagaaagaaagaaagtgacccarcactataatacaagtttatttctctctcacatcaaggaagttcagggtagccagtctgggctggtttagcaactccttgatcatcatgggttctgtgcta

SEQ ID NO: 291923 - DNA, 201 bp, Homo sapiens
tagctgggattacaggcacctgccaacacgtctggctaagtttttgtatttttagtagagacggggtttcaccatcttgggcaggctggtctcaaactccygatctcatggttcacccacctcggcctcccaaagtgctgggattataggcatgagccaccacacctggcctctgcttgttcatttctgttatggttcttt

SEQ ID NO: 291924 - DNA, 201 bp, Homo sapiens
ggaggaaggaaagtaaccagcgtcgttctcaatttccagaaactgtttatcatattgacaagaagaagaaagctttgtgactcatgagaatgatgttttcytctctggtacataaggttatctaggtccaatccatttgtgtagaggatcttctctcccctagtgtgatatgcacttatttttagcacaagtataaaacta

SEQ ID NO: 291925 - DNA, 201 bp, Homo sapiens
aagctacgtgtgtgtctgtcccatagggaaggagtcatccctgtctcctcagtgtggtgtgttcaggaggaaggaaagtaaccagcgtcgttctcaatttmcagaaactgtttatcatattgacaagaagaagaaagctttgtgactcatgagaatgatgttttcctctctggtacataaggttatctaggtccaatccat

SEQ ID NO: 291926 - DNA, 201 bp, Homo sapiens
cccggcccgtggactcactgccattctgctctttctcacgtttcagttcagctcggtttgttttccgtccccctccctctactgtaaaagtatgtactcaktgtttcgtttcctgctggatctgattcaggtcagtgatgaagttatttgtgaactcagtggggaggtgtttcctcccctttgtaccggccctacttaggg

SEQ ID NO: 291927 - DNA, 201 bp, Homo sapiens
aagattactctttttagttacctttttaaataaactctttatttatctttttaataaactctttttagttatcttttgtgtttcttgtttgcaaaaagtamctaatttattaaattgtgcttcatccagtgggagctattgagagttggccacccatagaaaattgagggaggattttaggaactgctgaaggtttctgcc

SEQ ID NO: 291928 - DNA, 201 bp, Homo sapiens
cacatggttttgatattgtctttaagtttctataatttacaagggctgtttaatcagttggcataaatttcatgacaaaaatactaatatgtaagcaaagwatatgaaacaatattattgagaagtaaattacattccatgtagaaaaagactagaaagacaacaccaaaaccttaaattagacagtgttattatgagtag

SEQ ID NO: 291929 - DNA, 201 bp, Homo sapiens
ctgccacatctttacccaggtgcaccactgacatcatcgcttggctggactctggaaagcaggaaactgctggagcgtgtttggggcatcagtgatgtcayccgctacgaatgctgggtggggttactggactgagggccatgaaaaaagaaagctgcggccccggcccgtggactcactgccattctgctctttctcacg

SEQ ID NO: 291930 - DNA, 201 bp, Homo sapiens
gtgcagtggtgcaatctcagctcactgcaacctccgcctcccaggttcaagtaattctcctgcctcagcctcctgagtagctgggactacaggcacacacwaccatgcctggcaaatttttatatttttagtagagatggggtttcaccatgttggccaggctggtctggaactcctgacctcaaacgatccgcccacctc

SEQ ID NO: 291931 - DNA, 201 bp, Homo sapiens
ttgcccaggctgttctcaaattcctaggtgaccctcccgcctcagcctcccaaagtgctgggaggtgtgtgccaccacacccagccaataactgaaattcwaataagccagtgaagaaaataaagagaactggtacttgctctattcaccattcacccccgccaccccccacaattctactttatttacttttgcttttta

SEQ ID NO: 291932 - DNA, 201 bp, Homo sapiens
cccatctcttctaaaaatacaaaaaattagccaggcatggtggcaggcgcctgtaatcccagctacttgggaggctgagacaggagaatcgcttgatcccmggaggcgaaggttgtagtgagccaagatcacgccactgcactccagcctgcatgacaaaaaaaaaaagagagacaaggtctcacttccatctcccaaatg

SEQ ID NO: 291933 - DNA, 201 bp, Homo sapiens
ctttccatgatccaaccccaaatctccagataccccctgctttttttatgtttttttgtttgttggttggttggttggtttttgggtttttttttttttttgaggcagagtctcgctctgtcacccaggctggagtgcattggcacgatctcggctcactgcaacctccacctcccggtttcaagcaattcttctgcctca

SEQ ID NO: 291934 - DNA, 201 bp, Homo sapiens
ggcctttcattttgtatatgctctgcttatagctgaaaaactcataaagaaggtttctgtgtgtttatatgagtgtcagttggtgtttgtgtgagggtgtsagtgtgtctgagagagagggagcttgttataaagactaacaacagccgagtcagggaacagccataggccaagagggcaagctggcctgctggtgctttg

SEQ ID NO: 291935 - DNA, 201 bp, Homo sapiens
ccattttggatcactaacttagggttactttctagtatctttcttgtgggctggaatttaaccttcacatttcttatgtatcactgatgcatcacttaccrggccatgttaaaggcagaggtgggctttggaggccactgattctagttgatcttgccagacatttttttttcttgttttctctttgctagataaaaaaca

SEQ ID NO: 291936 - DNA, 201 bp, Homo sapiens
agcagaagaaaatatagacatacagccattttgttacagagcataattttgcacagatgagcctctgcctgtccgagccccggggcctcacaggcttgccrtctctccatctccctcgcatgcccaactcctggccatggaccaagggcccacaagcctccctcagcctcagggaatcaaccatcaagtggctggttcctt

SEQ ID NO: 291937 - DNA, 201 bp, Homo sapiens
gtcagaggaatttggaatgacatttgataagtagtttggctcttatgaccatgaattaataacagaaataggactcttcatcaaaagaattgagaacattygctagtagggttttttggcttaaacctagaactaatgtaacccttgtgatgaaattggatccttatttgatttgacaactagagcaggacagtcagggtg

SEQ ID NO: 291938 - DNA, 201 bp, Homo sapiens
ttttcttcactaggaccgacacccgcgctgagattgacttggtgtgtgagcttgcaaagcgggctggtgcctttgatgcagtcccctgctatcactggtcsgttggtggaaaaggatcggtggacttggctcgggctgtgagagaggctgcgagtaaaagaagccgattccagttcctgtatgatgttcaggtaagatcta

SEQ ID NO: 291939 - DNA, 201 bp, Homo sapiens
gtttcattttagcaaatgtgttctcacaatgttattaaggaagtgaaatttatatatagtgagttactatctccttggcttttttttttttttttttttttaattctacccagcatttttgtctgaaacaaactgtgaatgatcaaagggatatgttatggaattttcttgataacacccttaacgacttgaaatatttga

SEQ ID NO: 291940 - DNA, 201 bp, Homo sapiens
gagaattgcttgaacccaggaggtggaggctgcagtgagccaagatcgagatcacaccactgcactccagcctgggcgacagagtgagaccctgtctcaamcaaacaaacaaaaaggtagaagagtttaagccatatgacaaagtcacatttccaagtacagaccctagctccttgtcccaaagcctgtgcttttgaagac

SEQ ID NO: 291941 - DNA, 201 bp, Homo sapiens
gccgggtgtggtggtgggttcctgtaatcccagctacttgggaagctgaggcaggagaatcgcttgaacccgggaggcggaggttgcagtgagctgagatygtgccattgcactccagcctgggggacaagagcgaaactccatctcaaaaaaaaaaaaaaaaaaaagagtaagaaaggatcttccattgtaatcatacta

SEQ ID NO: 291942 - DNA, 201 bp, Homo sapiens
tggtgattactttaaaatctgagtcctggccaggactcacgcctgtaatcccagcactttgggaggctgagacgggcagatcatttgaggtcaggagttcragaccagcctggccaacatggtgaaatcctgtctctactaaatacaaaaatcacgctcctgtaatcccagttacttgggaggctgaggcagaagaatcac

SEQ ID NO: 291943 - DNA, 201 bp, Homo sapiens
ccgggtttcaagcgattctcctgcctcagcctcccgagtagctgggattacaggtggccgccactacgccccgctagttttttgtatttttaatagagatrgcatttcactatgttgttcaggctggtctcaaactcctgacctcgtgattcacctgcctcagcctcccaaagtgctgggattacaggagtgagccactgc

SEQ ID NO: 291944 - DNA, 201 bp, Homo sapiens
atattgaggtttgggctgggtgtggtggctcatgcctgtaatcccagaattttgggaagccgaggcaggtggatcacgaggtcaagacattgagaccatcytggccacatggtgaaaccccgtctctactaaaaatacaaaaattagctgagtgtgatggtgcacaactgtagtcccagctactcgggaggctgaggcagg

SEQ ID NO: 291945 - DNA, 201 bp, Homo sapiens
gtgagaacacacacgcagcctgtgggagcgggctccatgccatcacctggccggtcctggctgtgttgctgtgttttcgcacctcaaaagttgggacagcraagaaaggccataagagctagaacgtttccataagaagtgtattcagtatgatttgtctagctctgactaatgtgtgcaaaccccacattccactaagca

SEQ ID NO: 291946 - DNA, 201 bp, Homo sapiens
ctcccaggttcaagtgatttctcctgcctcagcctcccaagtagctgggattacctgccaccacatcaggctaattttttgtatttttagtagagacgggrtttcaccatgttggccaggctggttttgaactcctgactttgtgatccacctgccttggcctcccaaagtgctgggattacaggcgtgagccacggtgcc

SEQ ID NO: 291947 - DNA, 201 bp, Homo sapiens
gctcaggaggctgaggtgggaggatcacctgagccctggagatcaaggctgaagtgagttatgatcgtaccactgcactccagcctgtctcaaaaaacaaracaaaaaaaatacatacactgactaataacaccagcaatattgtttcatgggagctgcctctgctgtttgtaccaaaactgagcagattctttaggccag

SEQ ID NO: 291948 - DNA, 201 bp, Homo sapiens
ttactttccatgttcacttataggccagggtttttttttcctaccattgaattatttcgtcatgttctatttaattattgctttaattggcattggtgacsacaaataataataaatactattaactggtgtaacagcttcactagtctatttcactgtcccatgctgttgtaactgaagcccccagcacaagcattccca

SEQ ID NO: 291949 - DNA, 201 bp, Homo sapiens
cctttagtgaatggtgtcagagaattttcagaaattcagcttgctcggctaaaagtaagtttccagttagcaattctttaaaaagaaaatatcatagaaaygcatcagaaagattgtcaaagcctgaaattttcaacttggtttgattttggttttcagatatccttttgggtattaaactctatagagaccgaacactgg

SEQ ID NO: 291950 - DNA, 201 bp, Homo sapiens
caggcgtggtggcacatgcctgtaatcccagctactaggaagggtgaggcaggagaatcacttgaacctgggaggcggaggtggcggtgagctgagatcaygccattgcattccagcctgggcaacaagagcgaaactccgtctcaaaaaaaaaaaaaaaaatgcttaccgggacatctcaaggacatcattcctttgtca

SEQ ID NO: 291951 - DNA, 201 bp, Homo sapiens
atttagatcacatgagaccattgcagtggagagagtgtccactttctcaatctaaaagcaagctcgtgaagaccattaaatatgatcacaggaacaaacaytaaaggtaccacacgtaatggaccacttaagacagaaaactacgatcttagggtttaggggaaaaaaacactcaaacagcacaggcttccagtctcccca

SEQ ID NO: 291952 - DNA, 201 bp, Homo sapiens
cgcttctaaatatttacttttactttccatgttcacttataggccagggtttttttttcctaccattgaattatttcgtcatgttctatttaattattgcyttaattggcattggtgaccacaaataataataaatactattaactggtgtaacagcttcactagtctatttcactgtcccatgctgttgtaactgaagcc

SEQ ID NO: 291953 - DNA, 201 bp, Homo sapiens
gatttttgttactttttgtcctgtaaaatatgcttaccaggccgggcacggtggctcacgcctgtatcccagcactttgggaggccgaggcaggcagatcrcctgaggtcgggagttcgagaccagcctgaccaacatggagaaacactgtctctactaaaaatacaaaattagccaggcgtggtggcacatgcctgtaat

SEQ ID NO: 291954 - DNA, 201 bp, Homo sapiens
tggagaatcccaacccaagcaagtccatccttaaacaataaacatctccagcattgctggctttggaagaccccatggtgagatgctggagcttttttccrctccagatttcgcttctaaatatttacttttactttccatgttcacttataggccagggtttttttttcctaccattgaattatttcgtcatgttctatt

SEQ ID NO: 291955 - DNA, 201 bp, Homo sapiens
ctgagtagctgggattacaggcacatgccaccatgcctggctaatttttgtatttttagtagagacggagtttcgccatgttgtccaggctgctcttgaaytcgtgacctcaggtgatccatctgcctctgcttcccaaagtgctgggattacaggcatgagctgccatgccctgccaaaatataaaccatagagctttgt

SEQ ID NO: 291956 - DNA, 201 bp, Homo sapiens
tcagtccttccctcacaggccttatgatagactccagtaaataaaaccatacaggcacagaatgcggcgggctttataacaaaggcagaaagcccctcttktgtcctcaagggaggcagagaagctcccctctggctctagctggagaatcccaacccaagcaagtccatccttaaacaataaacatctccagcattgctg

SEQ ID NO: 291957 - DNA, 201 bp, Homo sapiens
cagcctccctgagtagctgggattacaggcacatgccaccatgcctggctaatttttgtatttttagtagagacggagtttcgccatgttgtccaggctgstcttgaactcgtgacctcaggtgatccatctgcctctgcttcccaaagtgctgggattacaggcatgagctgccatgccctgccaaaatataaaccatag

SEQ ID NO: 291958 - DNA, 201 bp, Homo sapiens
gtgctgctgaaatacatattcatctatcaactccagaaagatagtccaaactgagacctcaagatcagaaagcctcccattctcctgcagggttcattcayttactcagtgaattattaaatgcctacagcacgcagggccatcagccccacagctatgagaaagattcagtccttccctcacaggccttatgatagactc

SEQ ID NO: 291959 - DNA, 201 bp, Homo sapiens
tcactcttctgcttagtcacccaatgtgcacttattagggtgctgctgaaatacatattcatctatcaactccagaaagatagtccaaactgagacctcargatcagaaagcctcccattctcctgcagggttcattcatttactcagtgaattattaaatgcctacagcacgcagggccatcagccccacagctatgaga

SEQ ID NO: 291960 - DNA, 201 bp, Homo sapiens
cctgcaggtgggaaaattctagcaaaatgaatcactcttctgcttagtcacccaatgtgcacttattagggtgctgctgaaatacatattcatctatcaaytccagaaagatagtccaaactgagacctcaagatcagaaagcctcccattctcctgcagggttcattcatttactcagtgaattattaaatgcctacagc

SEQ ID NO: 291961 - DNA, 201 bp, Homo sapiens
tcattatctggtcttctcagccctcagccgagttcctcctgtggccacacacggggtcgcagtgagcgtcagtgcacagtgatgaaatctcctggaacagycgggtgtggggcatgaggaagggagtggtgcctgactacagaagttcctggaggtcaggaaactctcactggaggcggtggccctagagggctgctttct

SEQ ID NO: 291962 - DNA, 201 bp, Homo sapiens
cttttgaagcctcaatgggctaaggcatacaaaatctatttcaaactgctttgcaaaccctcccaggtcagccagcaccatcctttggcatgtgagcaaaytgacaccaatttgaggcccgaaacaaaagtgagacaaaaagacgttcatttcaacatccttctacagaagttaaatagagtaggcacatctgaggtgtat

SEQ ID NO: 291963 - DNA, 201 bp, Homo sapiens
ttagctctttgttgtaatggccattttaaatactctagaatattcctttgtggatgaaccacaacttacttaagcaaggctcagttcttgaaaacaccaayagcattttaaataatggacatgaatactttaagcattttattgagaagcctacatattttctttgaaaattttttttataactaggaagatttattatta

SEQ ID NO: 291964 - DNA, 201 bp, Homo sapiens
cttcactgggagctgggaggggagctggatgtggcacactgataactttctttgaagaaattctttcccaggttctaacccgtcaacccttttgaagcctsaatgggctaaggcatacaaaatctatttcaaactgctttgcaaaccctcccaggtcagccagcaccatcctttggcatgtgagcaaattgacaccaattt

SEQ ID NO: 291965 - DNA, 201 bp, Homo sapiens
cagtgaacacacgatacatcttccattgtgatagaaagtggcagtggacagctttgttctagagtatttccgtttctgaaatacatgtttaagaagtttgraaaggaattagtgtagagtatgagaagggttacatttttggtgaatatgaagatttaacataatgttagttcaaaaatgaccaaagacacaagtgtagac

SEQ ID NO: 291966 - DNA, 201 bp, Homo sapiens
caagcaattctcctgcctcagcctcctgagtagctggaggctgtgcgccacaacactcagctaattttcgtatttttagtagagatggggtttcatcatgytgcccaggctggtctcaaactcctgagctcaggtgatcttcctgcctcggcctcccaaagtgctgggattacagacatgaaccactgcacccagcctaga

SEQ ID NO: 291967 - DNA, 201 bp, Homo sapiens
aaaaaatttagcagggcttggtggcgcatgatgtaatatcagctactcaggaggctgaggcaggagaatcgcttgaaccccaggaggcagaggttgcagtragctgagatcacaccattgcactccagcctaggcaacagagacagactctgtctcaaaaaataaaaataagggggaagcagcttcgcatgctcttcactg

SEQ ID NO: 291968 - DNA, 201 bp, Homo sapiens
ctcgtcccttcagggagcttcccttctgggaatccacccagccagtccattaagaatttagtgtagtcccacaaaccatgaggtagagagacaaagaccaragactgagcgttggctctgcggtttatgggctgcacaactttggacagactgctcactcagtttcctcatctttaaaatggaatcataattccagctgcc

SEQ ID NO: 291969 - DNA, 201 bp, Homo sapiens
ggacgccaaggcgggtggatcacctgaggtcaggtgttcaaaaccagcctggccaacatggtgaaaccccgtctctactaaaaatacaaaaaaatttagcrgggcttggtggcgcatgatgtaatatcagctactcaggaggctgaggcaggagaatcgcttgaaccccaggaggcagaggttgcagtgagctgagatcac

SEQ ID NO: 291970 - DNA, 201 bp, Homo sapiens
acctctgacctctggctggggacatgccctgagccttgccaactggtcttctggtcctcacttgtggcttaagggggaagcggggacgccaaggcgggtgkatcacctgaggtcaggtgttcaaaaccagcctggccaacatggtgaaaccccgtctctactaaaaatacaaaaaaatttagcagggcttggtggcgcatg

SEQ ID NO: 291971 - DNA, 201 bp, Homo sapiens
cactctgctccctgcctgctttctagtcagcagtgccgacctccatcctcctgccagccctagctgggccatctccatcctgtctcctgcctaggccagtsttgccctctaagatgcacccaggtctcgtcccttcagggagcttcccttctgggaatccacccagccagtccattaagaatttagtgtagtcccacaaac

SEQ ID NO: 291972 - DNA, 201 bp, Homo sapiens
tggcagaagccccctgagcagtacctcatttagactttcctacctctgattccacacctggtctcgggtaccacagacctctgacctctggctggggacaygccctgagccttgccaactggtcttctggtcctcacttgtggcttaagggggaagcggggacgccaaggcgggtggatcacctgaggtcaggtgttcaaa

SEQ ID NO: 291973 - DNA, 201 bp, Homo sapiens
acattaacagagatatcccgttgtgatcagaggcctccagtggctccccacatcctgggtgatacagttgccatcgcagagcttggtcttcaggacacccrcagtggcttccctcactctgctccctgcctgctttctagtcagcagtgccgacctccatcctcctgccagccctagctgggccatctccatcctgtctcc

SEQ ID NO: 291974 - DNA, 201 bp, Homo sapiens
cacttaggctcgccctggcccctcctaggttgaagctttggcatgaaatggtgcccatgtagcctctaccagcagacgtcctcacacttttggcagaagcyccctgagcagtacctcatttagactttcctacctctgattccacacctggtctcgggtaccacagacctctgacctctggctggggacatgccctgagcc

SEQ ID NO: 291975 - DNA, 201 bp, Homo sapiens
tgaatgagccctccttcagtggcctcttagaaaagtgctgttctgtccgggcgcagtgactcacacctgtaatttcagcactttgggaggccaaggcgacyggatcacatgaggccaggagttcaagaccagccaggcaaaacccatggccaacatggcaaaacctcatctctactaaaaatacaaaaattagctgggcat

SEQ ID NO: 291976 - DNA, 201 bp, Homo sapiens
cagatttgagctcctctcctcccctgtctgggcctcctctggctgacagtgggaaggggaaggtggctgcttgcttctctgccacccttgtcttgcacttrggctcgccctggcccctcctaggttgaagctttggcatgaaatggtgcccatgtagcctctaccagcagacgtcctcacacttttggcagaagccccctg

SEQ ID NO: 291977 - DNA, 201 bp, Homo sapiens
cgctgcacagaaacacggcaaccacattttatgaaccctgtgcaactgcagaaatgttcaatggcatggatccctgattcttcctggattattcttctcayacttgtgccctcatttacctctttatgctcacatttggaacatatttatcagatgcgcattttatagcagttcccgactaatagattatcttgcttccgt

SEQ ID NO: 291978 - DNA, 201 bp, Homo sapiens
tctaaaagtatacagaaatacccagttctttctgtttgtttatttggtttggtttcattttagcaaatgtgttctcacaatgttattaaggaagtgaaatktatatatagtgagttactatctccttggcttttttttttttttttttttttaattctacccagcatttttgtctgaaacaaactgtgaatgatcaaaggg

SEQ ID NO: 291979 - DNA, 201 bp, Homo sapiens
aaagaaactttttttaaagaccacgcctccctggctttgtcctgctcctcctccacccaccatcccaccttcttctgttcacttccttaccactggctctyggcagctctctgtgtgtttccagtgctggattttcctccaagtctgatatgtgctttcacccacttaacgaggcatcgctccactgcttcacatgcatcc

SEQ ID NO: 291980 - DNA, 201 bp, Homo sapiens
caatccaataactaatattgtgctatgctttgggatccacagattctttcacaattagatctttaaactaaccattgtatgaatcagcattcttcacacayagaaccaataaggatgtgtgtatatatagagaaagatatttattgtaaggaattgggtcacatgattacagaagctggcaagtccaaaatctgcactgtg

SEQ ID NO: 291981 - DNA, 201 bp, Homo sapiens
caatggttataaatgaaacttttcattaatatatttgtgtccaagtgtttttagatgtgcttttctgctactctctttttatttggtttggagatagatgrtgactttccttcagtgccttctatgtgtcttgacatgttaatgtctcaaacacatggtccgtatcatcatggagcttgcaatctaacagggtagtttaac

SEQ ID NO: 291982 - DNA, 201 bp, Homo sapiens
gtttacacaagggtggccttgacttttatattaaggcactttagggaagcaggaaccactgaagacaggagaacatggtgactacacgggcgcattgaagsggggaggagctaggtttttgaagggaatttgagcttgcaatttttcaagggcattcaatggttataaatgaaacttttcattaatatatttgtgtccaag

SEQ ID NO: 291983 - DNA, 201 bp, Homo sapiens
ccttacaggcctcttacttactaccttaaaaatgctagcgtggtgccagggtaggcagataggagtgcagcctataaagatgggaatgtttgctgttcttcttatgcaagcggttcactggctttttactgagcttgtccgctgagattgaaggctccatcatcttctacctctagccactgacaaaggcaagtaggcaaa

SEQ ID NO: 291984 - DNA, 201 bp, Homo sapiens
ctcccaggttaaagcgattctcctgcctcagcctcccaagtagctgggattacaggcatgtgccaccacgccaggctaattttgtatttttagtagagacrgagtttctccatgttggtcaggctggtctcgaactcctgacctcaggtgatctgcccacctccgcctcccaaagcgctgggattacaggcgtgagccacc

SEQ ID NO: 291985 - DNA, 201 bp, Homo sapiens
ttataggattattcttcatgttttctctccttatttcaggtaacggctggtgttcctcttaagaaagaatatacagaggaggtaagaggagctgtttagaygcttatgtgaagaatctcttaaatccagtgactcgttggctttcagtgaatgagccctccttcagtggcctcttagaaaagtgctgttctgtccgggcgc

SEQ ID NO: 291986 - DNA, 201 bp, Homo sapiens
tcaataatggcaagataaatgaactttcatcctcttaatcctctattccatagtgctcatctcggtgtccttccttcatattgaatagctctgtatttttraaccatgattattcatttctacttctgttttcttttttcttttttgctacaaatactgcgctgggatcgacttccttttgatcattacacaaataaccat

SEQ ID NO: 291987 - DNA, 201 bp, Homo sapiens
tcaagtgattttcctgcctcagcctccctgagtagctgggattacaggcacatgccaccatgcctggctaatttttgtatttttagtagagacggagtttygccatgttgtccaggctgctcttgaactcgtgacctcaggtgatccatctgcctctgcttcccaaagtgctgggattacaggcatgagctgccatgccct

SEQ ID NO: 291988 - DNA, 201 bp, Homo sapiens
cagctcactgcaacctccgcctcctgcgttcaagtgattttcctgcctcagcctccctgagtagctgggattacaggcacatgccaccatgcctggctaawttttgtatttttagtagagacggagtttcgccatgttgtccaggctgctcttgaactcgtgacctcaggtgatccatctgcctctgcttcccaaagtgct

SEQ ID NO: 291989 - DNA, 201 bp, Homo sapiens
tatttttttgtattttttagtagagacagggcttcaccaggttggccagcctggtcttgaactcccaacctcaggtgatccatctgccttggccttccaamgtgctgggattacaggcatgagccactgcacctggccagatgacattttaaattagtggtgaatggatgggatactgattaaatgatgttggaacatttg

SEQ ID NO: 291990 - DNA, 201 bp, Homo sapiens
cttgcaaagcgggctggtgcctttgatgcagtcccctgctatcactggtccgttggtggaaaaggatcggtggacttggctcgggctgtgagagaggctgygagtaaaagaagccgattccagttcctgtatgatgttcaggtaagatctagtaaaaacaatggctcacatttcttacaccttagcatgggttgtcccatt

SEQ ID NO: 291991 - DNA, 201 bp, Homo sapiens
gattctcctgcctcagcctcccgagtagccgggattacaggcatgcgccaccatgcccagctatttttttgtattttttagtagagacagggcttcaccargttggccagcctggtcttgaactcccaacctcaggtgatccatctgccttggccttccaacgtgctgggattacaggcatgagccactgcacctggccag

SEQ ID NO: 291992 - DNA, 201 bp, Homo sapiens
tttgtctctacttaaacaaaaattagccaggagtcatggcacgcacctggagtcccagctactcaggaggctgaaatgggaggattacttgagcccaggartttgaggctacagtgagctatgatcatatcattgcactccagcctgggagatagagtgagatctctgtctctaaaaaaatgaaataaaataataaaaaac

SEQ ID NO: 291993 - DNA, 201 bp, Homo sapiens
ggagtttgagaccagcctgggcaacatagccagactttgtctctacttaaacaaaaattagccaggagtcatggcacgcacctggagtcccagctactcargaggctgaaatgggaggattacttgagcccaggagtttgaggctacagtgagctatgatcatatcattgcactccagcctgggagatagagtgagatctc

SEQ ID NO: 291994 - DNA, 201 bp, Homo sapiens
tcccagctacttgggaggctgaggcaggagaatcgcttgaaccagggaggcagaggttgcagtgagcctagattgtaccactgcactccagcccggcgacrgagtgagattctgtctcaaaaaaaaaaaaggctttttcaagaaccatgatggatgattaaactaattgtaagtatcagaacaagataaccctatagcaaa

SEQ ID NO: 291995 - DNA, 201 bp, Homo sapiens
attcactcggccaatgctgcataaggcactcagctcggggctacagggagccccaactttaagaagctttctctgcttcaggtagtttacaggtggtagamgcagatagaagtgaattagtaaagaaaatagtttggtgtaaaaattgtgcatttaactgaaaccttaattcactactgagcatttaatagccattaaata

SEQ ID NO: 291996 - DNA, 201 bp, Homo sapiens
aaatggtagagtagctgagaaggttagcctcagtcacgatctgtcctgtcctaccctctgcggactctaaaccccgcagtagttcacccaacaaattcatkcactcggccaatgctgcataaggcactcagctcggggctacagggagccccaactttaagaagctttctctgcttcaggtagtttacaggtggtagacgc

SEQ ID NO: 291997 - DNA, 201 bp, Homo sapiens
tggggtgtagaaaaacagattattagggctttctttttttgggggggggcgggagcggggatggagtttcactcttgttgcccaggctggagtgcaatgaygtaatctcggctcaccacaacctcctcctcccaggtttaagtgattcttctgcctcagcctcccaagtagctgggattacaggcatgtgccaccacaccc

SEQ ID NO: 291998 - DNA, 201 bp, Homo sapiens
agtgcaggcccagagagactggaccatcaggggaggtgaggggtgacggaggtgcccaaacagagcatgaaatggtagagtagctgagaaggttagcctckgtcacgatctgtcctgtcctaccctctgcggactctaaaccccgcagtagttcacccaacaaattcattcactcggccaatgctgcataaggcactcagc

SEQ ID NO: 291999 - DNA, 201 bp, Homo sapiens
tgtcgcccaggctgaagtgcagtggcacaatatcggctcaccacactcttcacctcccaggttcaagtgattctcctgtttcagcctcccaagtagctggractacaggcatctaccatgcccagttaatttttgtcattttagtagagactgagtttcaccatgttggccaggctggtctcgaactcctgacctcaagtg

SEQ ID NO: 292000 - DNA, 201 bp, Homo sapiens
cctcccacctcagcttcccaagtagctgtgactacaggctcatgccactgtgccgggcctgtgcataatttaattatacctcagttaacaaaaatgggtgstgaagagcttgctttatattcgttagaatggcctcagtcagccgggtgcggtggctcacgcctgtaatcccagcactttgggaggccgaggcgggcggat

SEQ ID NO: 292001 - DNA, 201 bp, Homo sapiens
gtcctcacttgtggcttaagggggaagcggggacgccaaggcgggtggatcacctgaggtcaggtgttcaaaaccagcctggccaacatggtgaaaccccrtctctactaaaaatacaaaaaaatttagcagggcttggtggcgcatgatgtaatatcagctactcaggaggctgaggcaggagaatcgcttgaaccccag

SEQ ID NO: 292002 - DNA, 201 bp, Homo sapiens
caccgctcgtagcagtgttggcacagggagaagggcctggatgaaatgggttctgaatgacattttcaggtctacagttcagatcagtggttgccaggagytgggggaggggaagcgtttgactgcagaggggcaggagggaactttttgggataatgcaaataccctatgttttgacgtggtagtgattccatggctata

SEQ ID NO: 292003 - DNA, 201 bp, Homo sapiens
taaattttgtatttttagtagagacgggtttcactgttggccaggccagtcttgaactcctgacctcaggcgatccgcccatcttggcctcccaaagtackgggattacaggcgtgagtcactgtgcccagccaattgtaatgatttttatggttaccttttcttgaatggaatcatttcttaattaaaaaaataaatata

SEQ ID NO: 292004 - DNA, 201 bp, Homo sapiens
gacatactctaaaagtatcctcctaccgtgggggccgggggaagggaccgttctagcttggtgactctggctagtgatgccatcggtcatggaaaggacaygggagaaggcagattggcagagccagaaatgagcctggcttgaacatagagagctcagagggttaataggatctaaggaatagtctgtgtctccactgga

SEQ ID NO: 292005 - DNA, 201 bp, Homo sapiens
ttactgaatcataggagttctcatttttgatgttgttgtgatgggatcatgttgctattggatgattattctgttattttgtgttatctatgggggtaaasgagatgggcagataaataaaagcttatcaaagtgcttaaaatccatgaagatgggcttcatttggtacagctacacagtgatagccttccgttggtaccg

SEQ ID NO: 292006 - DNA, 201 bp, Homo sapiens
accctctctcacttccccagcacgtcaggtgggaagctctggcttaggaaattactgaatcataggagttctcatttttgatgttgttgtgatgggatcaygttgctattggatgattattctgttattttgtgttatctatgggggtaaaggagatgggcagataaataaaagcttatcaaagtgcttaaaatccatgaa

SEQ ID NO: 292007 - DNA, 201 bp, Homo sapiens
ttaattcctctggtcactttcaatcataagaatagcccctaaaattaaaaatgcatatccagttgtatatcaaaaccaaaaactccaaatgtcactcagayttgagctcctctcctcccctgtctgggcctcctctggctgacagtgggaaggggaaggtggctgcttgcttctctgccacccttgtcttgcacttaggct

SEQ ID NO: 292008 - DNA, 201 bp, Homo sapiens
tccacatgggaaaagaggtctggaggtgacaacaagtaacatagagtatgtgggctgtgccggaagcttgatattacagaggcacgaagtctgaggcaggragtgtgaaggaagatgaaggtaggggaaggaagtttacacaagggtggccttgacttttatattaaggcactttagggaagcaggaaccactgaagacag

SEQ ID NO: 292009 - DNA, 201 bp, Homo sapiens
tggttttctgttttgttttgttttgttttttgagacagagttttactcttgttgcccaggctggagtgcagtggcatgatcttggctcactgcaacctctsccttcctggttcaagtgattctcctgcctcagcctcccaagtagctgtgattacagacacgcaccaccgcacctggctaatttttgtattttcagtacag

SEQ ID NO: 292010 - DNA, 201 bp, Homo sapiens
tttgaaaactcatctatctcatttgtggttttctgttttgttttgttttgttttttgagacagagttttactcttgttgcccaggctggagtgcagtggcrtgatcttggctcactgcaacctctcccttcctggttcaagtgattctcctgcctcagcctcccaagtagctgtgattacagacacgcaccaccgcacctg

SEQ ID NO: 292011 - DNA, 201 bp, Homo sapiens
cctgtgaagctggttcagcagtcacctcatcactgtttttcttctccagagagtgctgggttgtagcgaccatactgttgacgcaacacatcccaaccacrctggacggaatttttactgcgataattcatattccaggatcttacagtgcacagggttacaacgattagcataatgatcttgcacaatctttctgcctag

SEQ ID NO: 292012 - DNA, 201 bp, Homo sapiens
tgaggccctctccccatgcctcggtctcttagaatggtttttccccatcgtgtgcacattgagcggtaaggcggacagctgccgccgcccatgctgccccrtgttgagagcatttctgttgaccttcccttcttccctgtgaagctggttcagcagtcacctcatcactgtttttcttctccagagagtgctgggttgtag

SEQ ID NO: 292013 - DNA, 201 bp, Homo sapiens
gggatctgatcactcggctgggagtgggtaaaatacctggacctcaggaggccggattgcagcgccagtgttctctacctgtgtggcctgttcctgcctgrggttgggtaccaagtccaggtggaagtggtccctggagcatcctctctctgaagtgtttctttgtcaaacagaatactccctgctgctgccccagaactc

SEQ ID NO: 292014 - DNA, 201 bp, Homo sapiens
attttttatttaataaaaagaatacttctgtattttaatgaataggatcaagtgagaaactgctttgtaaaatatgaactatgttcaggtcagcaattatrctaattctttctatgatctcatctagtctaagatgccgtaagtgggggggtttttcatgaggatgaaatctgtccgttgccagatggttcaaagggcaag

SEQ ID NO: 292015 - DNA, 201 bp, Homo sapiens
gtgaggaagcaaagtgtagcctttacttgaatgaaagctacagttttatttttctttcttatttacaagaaattcttttgatgattaagttagccagataygccccgtgcgctcatatttcttaacctattttgagctgagctagttgcaaggactagttcttctgtgaaacctctggcagtccataaattcaagttcgtg

SEQ ID NO: 292016 - DNA, 201 bp, Homo sapiens
gaacaagccattagcctctctgggtgtgtcccctgtagacattctcatctgaaaaatgagaagttggaccagatgaggagttggatgtggatgtgtagccrtggactcagagttagacactgtggaattggagccctgactggtagtgtgttttcatttctctagggctcaattttttatttaataaaaagaatacttctg

SEQ ID NO: 292017 - DNA, 201 bp, Homo sapiens
ttttggttttcagatatccttttgggtattaaactctatagagaccgaacactggagcagagagagcacagtgttggaagcctgaaccctggttctacacraaagagccaggtggacaaattaattaaccttttttggtctcagtttcttcgtctatgaaatgagaggactgttttgctaatttatgagtactctagtcaa

SEQ ID NO: 292018 - DNA, 201 bp, Homo sapiens
  misc_feature (1)...(201): n = A,T,C or G
gctggttcctttagtgaatggtgtcagagaattttcagaaattcagcttgctcggctaaaagtaagtttccagttagcaattctttaaaaagaaaatatcntagaaacgcatcagaaagattgtcaaagcctgaaattttcaacttggtttgattttggttttcagatatccttttgggtattaaactctatagagaccga

SEQ ID NO: 292019 - DNA, 201 bp, Homo sapiens
agattgcaccattgcactccagcctgggtgacaagaacaaaagtccatctcaacaacaacaacaacaacaaaaaaaaaaaaaaaaaaaaaaaaaaaaaaamccagcagggaccaggaagccctgtgaagctaggcatccctctcctgggctccagtagtaccttctgcctcacattgtttcatgaatgccttgttctgtgt

SEQ ID NO: 292020 - DNA, 201 bp, Homo sapiens
ttatcctggtgttgtctcctggtagtcactgaaaaagtcattacaatcctcactttctcccctttaattcaagttcagaattcatgtgttgctgtgacttyttttgagtttatctgcagacagctgccattgaataaacatgtttatatagggcagaaaaaggcagcctgaagattctactttctatttcttttagcactg

SEQ ID NO: 292021 - DNA, 201 bp, Homo sapiens
gggtgcttaagtgaagtggtggttctgatgcatcagctctgcaaataaagtagcttctagaaggaagcactctattttatgctgacagagatctctgcccrtaccagttcttactttgtcaaacacatatttataaaatacatgttatcatggcagaatactttcaaagatataaactgatgatgtatgcaaagcaaacga

SEQ ID NO: 292022 - DNA, 201 bp, Homo sapiens
  misc_feature (1)...(201): n = A,T,C or G
tagcccacaaattttaatagggtcttttatctaaatagtttggttataaatgcaatgaatttttgtcatatcctgtgaattgtccaagttcatggacaacnaacttttgtgtggtctcatttttgttttgtgtttttaggctctgtataatcggctggttcctttagtgaatggtgtcagagaattttcagaaattcagct

SEQ ID NO: 292023 - DNA, 201 bp, Homo sapiens
tgaggcttggtggagctccactcctccatgatctgttttctgcagctctcatgtactttgctccttcggtagcaaatccactgcaagagtggctagacatrctgtctaagtggatttgctcaattgatcgctgcctaattgtagagctaatggacgaggaggctgggtcagggcgggcactggaaagttgggtgcttaagt

SEQ ID NO: 292024 - DNA, 201 bp, Homo sapiens
attcaaaaatccaaaatccaaagaagtgctcaaaaatccaaagttttttgagtgacaacatgatgccaccagtggaaaattccacacctgatctcgtgtgrcgggttgcagtcagcatgcagttaaatctttcatatatgcacaaaattattaaaactattgtccagggccaggcacagtggctcacacctgtaatcccag

SEQ ID NO: 292025 - DNA, 201 bp, Homo sapiens
ctgtttatctctgaaagatcctgaatgctatgcttctttcatcccctctgccttgaattcgcctgctttctaggtgcggtggagaaagctgggaaaagagycacctctgctcccaggggccactgagagggtagaacactgaccgaatcccagactcactacctcaggggctgagatgggtccaaaggggcccttaacctc

SEQ ID NO: 292026 - DNA, 201 bp, Homo sapiens
cttaaattccatagttgtttaaaacaaataggaagatgtcttagccgagcacagtggcccaagagctcataaccagcctaggcaacatagcaagacccccrtctccacagaaaattcaaaaattagccaggcacaatggtgtgcacctatagtcccagcctactcagtaggcttaggtgagaggattgcttgagcccaaga

SEQ ID NO: 292027 - DNA, 201 bp, Homo sapiens
tggaccactacaccagtggggtaggaaatagcaggtgtgttatgggttgagtttggagaccttgacttgatcaaccatctgctcacccaggtcatctttcytttttttgcagaggtgaggtctcactatcttgcccaggctggtctcctgggctcaagtgatcttaccgcctttacctcccaaagtgctggtattacaggt

SEQ ID NO: 292028 - DNA, 201 bp, Homo sapiens
tttctccaaagttctgtaatatttcatattattttattgttactgtttattttatgccctgcctcactccaaagtatatttgatatgatactgttttctarataataaaacaatgaataaacgtagtgagtgactataaggagattcattattaaatgcatcagaatgttttgccttaacctgaggatggaagaatttatg

SEQ ID NO: 292029 - DNA, 201 bp, Homo sapiens
agttcccacatagctgtagggttttatgaacccatattttaaagggccttctaatgaagtgaggatgttaatgcttttttttaaaaaaaaaaaaaaaaaaagagagagagagattggtgattactttaaaatctgagtcctggccaggactcacgcctgtaatcccagcactttgggaggctgagacgggcagatcatttg

SEQ ID NO: 292030 - DNA, 201 bp, Homo sapiens
taaacataaagcttccaggaaaaagcaaaaaaaaaaaattattgttggtatcctatcaaggctagtaaaaagaatagataaatgtatacatggaacatgggaaaacattcacaaaatataaagttaaaaaaatcaggttgtaaaataatatatctccaatttgtatgagatttatatctatatatggaatgaagagatata

SEQ ID NO: 292031 - DNA, 201 bp, Homo sapiens
aactagtggttttcacgttttcctttttaagaaaaacctacaaacctagttacacgtgaataaaaatattcctaatatcctcctggcttattgtgcgactygataatcttgttttgtaacatccacaaacaatatttccatggtttaagtgtgtgccctgtcagcttttaccattctaacatgttttcccctctatccctg

SEQ ID NO: 292032 - DNA, 201 bp, Homo sapiens
cacaccctgctaaattttgtatttttagtagagacgggtttcactgttggccaggccagtcttgaactcctgacctcaggcgatccgcccatcttggcctyccaaagtacggggattacaggcgtgagtcactgtgcccagccaattgtaatgatttttatggttaccttttcttgaatggaatcatttcttaattaaaaa

SEQ ID NO: 292033 - DNA, 201 bp, Homo sapiens
gtgcaatggtgtgatcttggctcactgcaacctctgccttccggtttcaagcgattctcctgcctcagcctcctgagcatctgggattacaggcgcccgcyaccatgcctggctaatttttgtatttttagtagagacagggttttaccatgttggccaggctggtctcgaactcctgacctcatgatccacccacctcgg

SEQ ID NO: 292034 - DNA, 201 bp, Homo sapiens
ggttcaagcgattctcttgcctcagcctcccaggtagctgggattataggcgcctgccaccacacccggctaatttttgtattttttttttaagtagagayggggtttcaccacgttggccaggctggtctcaaactcctgacctcaggtgatctgcccgcctgagcccccaaagtgctggaattacaggcgtgagccacc

SEQ ID NO: 292035 - DNA, 201 bp, Homo sapiens
taagacagtggttgtcaacctttatcacacatagcacccaaaatgatgtcatcacggtggggttgactgctcacaccagacaggatctgcccagtcacccyaagggctggggaaagcagtcctcaccctctctcacttccccagcacgtcaggtgggaagctctggcttaggaaattactgaatcataggagttctcattt

SEQ ID NO: 292036 - DNA, 201 bp, Homo sapiens
tgggatctcggctcactgcaacctctgcctcccaggttcaagcgattctcttgcctcagcctcccaggtagctgggattataggcgcctgccaccacaccyggctaatttttgtattttttttttaagtagagatggggtttcaccacgttggccaggctggtctcaaactcctgacctcaggtgatctgcccgcctgagc

SEQ ID NO: 292037 - DNA, 201 bp, Homo sapiens
gaattcagtctgttatttaaatggtagaatggcttaagacagtggttgtcaacctttatcacacatagcacccaaaatgatgtcatcacggtggggttgamtgctcacaccagacaggatctgcccagtcaccccaagggctggggaaagcagtcctcaccctctctcacttccccagcacgtcaggtgggaagctctggc

SEQ ID NO: 292038 - DNA, 201 bp, Homo sapiens
aggttataattcgacatgagatgtgggtggggacacagagccaaaccatatcagaaccaatatgacagaaatggggggattggccaggcacggtggctcamgcctgtaatcccagcactttgggaggccaaggcgggcagatcccttgaggtcaggaacctcgagaccagcctggccaacatagtgaatcccatgtctact

SEQ ID NO: 292039 - DNA, 201 bp, Homo sapiens
atactaatttccttcctaaggtgagtaagaacataacttgggagaattcagtctgttatttaaatggtagaatggcttaagacagtggttgtcaacctttrtcacacatagcacccaaaatgatgtcatcacggtggggttgactgctcacaccagacaggatctgcccagtcaccccaagggctggggaaagcagtcctc

SEQ ID NO: 292040 - DNA, 201 bp, Homo sapiens
agtttgttctcgcattgccgtaaggaactacctgagactgggtaatttaagaagaaaattggtttaattggctcacagttctgcaggctgtacaggaagcrtggctggggaggcctcaggaaacttatcatggtggaaggcgaaggggaagcagacaagtcttcacatggcagaacaggagagagagggcgaaggaggaag

SEQ ID NO: 292041 - DNA, 201 bp, Homo sapiens
tttttgccatgagaccttctccttcgtccattcacagcatggcagcttatttcttgaaagccagcaggggggatgggttttctctggaatctgttagatgragtgacctcccttcactgtcactcgtgccatattctgctggtgagaagcaagtcacaggcctcacctgcactcagggagggactcactgggagtcgccgc

SEQ ID NO: 292042 - DNA, 201 bp, Homo sapiens
gctctttaaaaatcatggattagggaaaattgggagtaattaatagtacagtattcgctatttttctaaacactgtgtctcacctacttttgccattgtgstttggatttttctttttttagatcatgtgttcagggtccttagagtcataatactaatttccttcctaaggtgagtaagaacataacttgggagaattca

SEQ ID NO: 292043 - DNA, 201 bp, Homo sapiens
cctttagtgcaggggccttgggcagcaaggtgttttgcaatttcagacagcaagagcgaggatctggttaggaacctgtattagtttgttctcgcattgcygtaaggaactacctgagactgggtaatttaagaagaaaattggtttaattggctcacagttctgcaggctgtacaggaagcatggctggggaggcctcag

SEQ ID NO: 292044 - DNA, 201 bp, Homo sapiens
aggccactcctggatgaactcacagattgagagcttctcaaaatgtaaaatcaaattgtcttttaaaatatgctattttaaagttctggagaatcaatgarctttaaatgaaaatcggccaatacttggcaaaaagtcaatttgaagagttgtctctttataatctctgatttcacttatagagcttgcttccaaaaaaag

SEQ ID NO: 292045 - DNA, 201 bp, Homo sapiens
aagggacttcatcttacctatcagtgacgtccgggccagcataggcgctgggttcatttaccctttggtcggaacggtgagtgagtcacattttccaaaawccctccccattctgcattgccgtggtgcctcaaatcgttatgctccacccgctctttaaaaatcatggattagggaaaattgggagtaattaatagtaca

SEQ ID NO: 292046 - DNA, 201 bp, Homo sapiens
gaatcgcttgaaccctggaggcagaggttgcagtgagcctccagcctgggcaacagagagagattccgttctcaaaaaaagaaagaaaagaatgtgaataktgacatcacattaaaaaataataacaaactttagccttgtggcctttttttggcacatgttttccgctagttctcatgcatcatccctattctctctctt

SEQ ID NO: 292047 - DNA, 201 bp, Homo sapiens
atgttgaaaacaccaagacaccacttaaggtctttacaaagtgagaaggaattgggaaaaaaagaaacaaaggccgggcacagtggctcacgcctgtaatsctagcactttgagaggccgaggcaggcagatcatgaagtcaggagttcgcgaccagcctggccaatatggtgaaaccccatctctgctaaaaatacaaaa

SEQ ID NO: 292048 - DNA, 201 bp, Homo sapiens
cctgacaaaaaaggtgtgccaagggacttcatcttacctatcagtgacgtccgggccagcataggcgctgggttcatttaccctttggtcggaacggtgartgagtcacattttccaaaaaccctccccattctgcattgccgtggtgcctcaaatcgttatgctccacccgctctttaaaaatcatggattagggaaaat

SEQ ID NO: 292049 - DNA, 201 bp, Homo sapiens
ttgcccatctgcatggcaaagacccacctttctctatctcaccaacctgacaaaaaaggtgtgccaagggacttcatcttacctatcagtgacgtccgggycagcataggcgctgggttcatttaccctttggtcggaacggtgagtgagtcacattttccaaaaaccctccccattctgcattgccgtggtgcctcaaat

SEQ ID NO: 292050 - DNA, 201 bp, Homo sapiens
attgaaaagcacaggagactaacatctgtatcagtgaacacattttctttcctttctcacagggttttggaaatttgcccatctgcatggcaaagacccayctttctctatctcaccaacctgacaaaaaaggtgtgccaagggacttcatcttacctatcagtgacgtccgggccagcataggcgctgggttcatttacc

SEQ ID NO: 292051 - DNA, 201 bp, Homo sapiens
tatgtggttgcaatgaattagcaaagcctctaaaggaacactgtgtgccatttaatcagaaccaggctttgaggacactgtgctttttgtgagacaccacrtgtgacttcctgctctttcacctttggaactctgggtcagacatagactttggtccttaaaaacaagaagcttaaatagtgacctcatcttagttcttat

SEQ ID NO: 292052 - DNA, 201 bp, Homo sapiens
ctgcatgtgaggcacagagattttaggatgagcaggtgtgagacgcatgggtttgaatagcacagaggtatctggagagcactgtgttggtattctgaatrccctcagagcccagggggataacagctcattatgcctggggtagaacttacccaggatgtggaagaagaggggattcttcaaaaagagctcagcctctga

SEQ ID NO: 292053 - DNA, 201 bp, Homo sapiens
gccgaggcaggaggattgctcgagcccaggagtttgtgtccagcctgggcagcatagaagaccctgcctctgtgaaaaaattaaaattaaaacaaccagcyttagcccctgctcctgtggagcgtactgtctaatggtaattgaataagagaaagtgctcattgactgtcagccattactacccttactatgtagtactga

SEQ ID NO: 292054 - DNA, 201 bp, Homo sapiens
gtgaagaaggatttgtaggtaagttatttcttttaaatttagttgttgtagaatattgaagaaatctaaaagctgatgactggaatggagtgatatccatmctgacatgaaacatattctttcaggcaccctctttcatagagggtctcaataatggaaaagccctaaggtctggtctatactcgtgaaattatgcttgtg

SEQ ID NO: 292055 - DNA, 201 bp, Homo sapiens
gccggcctagtgtgaaagcagtttttaaggacagttgaacaggaaagctcctggattcctgcacatagatcttgtgcccctccaaagtgccgtaagtaccratttctgctgtcttgatttaactcagtgtctggagcttacgatccttcctctctgtttccttcagtggcgtagcttgggggtgtcaattaaagagttatt

SEQ ID NO: 292056 - DNA, 201 bp, Homo sapiens
tgggtgggtttttttttggacagtcttgccctgttgtccaggctggagtgcagtgatgtgatctcggcgcaccacagcctcctcctcccaggctcaagcgrttcttgtgccttagcctctcaagctacaggcacacaccaccacgtccagctaatttttgtatttttattagagacgagtttttgccatgttgcccaggct

SEQ ID NO: 292057 - DNA, 201 bp, Homo sapiens
tatttttttcatttttgagtcagagtcggtctgtcacccacactggagtgcagtggtgcgatctcagctcactgcaacctccacctcccaggttcaagctrttcttgtgcttcagcctcccgagtagctgagctgggtttacaggagcacaccaccacaccctgctaaattttgtatttttagtagagacgggtttcactg

SEQ ID NO: 292058 - DNA, 201 bp, Homo sapiens
gttttttcttccaaaaaaccatttcttcatttggcacatacacaaacaaatgagcagaatttagagtaatttagagacagaatttagataatttgggtggktttttttttggacagtcttgccctgttgtccaggctggagtgcagtgatgtgatctcggcgcaccacagcctcctcctcccaggctcaagcgattcttgt

SEQ ID NO: 292059 - DNA, 201 bp, Homo sapiens
gtcatagaattttttaagcaacatgtttaatttgatgtactgtatcttatagctatatccatgtttgagtgtgcaagtgtgtgtgtacctgtgtttggaartctaacaatgacattccaatatttttttctcaccaactccatactgggagttttaaaaccagagccctaatcttgacttaattattaatttcctccgtgg

SEQ ID NO: 292060 - DNA, 201 bp, Homo sapiens
gaatcgctcgaacctggagggcggaggttgcagtaagccgagatcgcaccattgcattccagcctgggcaaaaagagtgaaactccatatccaaaaaaaaaggggggaaaggtcagaaagacgttctttttcactaggtgatgaattaatctttcccatctttgtcatgttaaaaatgtgcctgtggctgtttctccacta

SEQ ID NO: 292061 - DNA, 201 bp, Homo sapiens
ctgggtatgtccacactgctggagctcagaaatgcacaatgaaaaaacaaaacgggttgtggaagtgtgtatacaatctgttacatttttgaaaaacacayaacacaatgctatattctgtttatgcatgtgtgcttatgtagaaaaagtctgaaaacctgatctgcataagctctgagttcataggagttatgaccatgg

SEQ ID NO: 292062 - DNA, 201 bp, Homo sapiens
tttggaattcagttcttcagtcattttagccacatttccatttatgcatttatttgtttatattttactgttcatatttaagtgcttagaactctggtaarctaacaattacttgaaattacttgaaatattaatcttatgaaatgtttgaaagggccattatggagaatattcatagcaagatagttcctgccttatttt

SEQ ID NO: 292063 - DNA, 201 bp, Homo sapiens
atgctttcaattgccagtgaggagaaattgacagttttgaaatagtggtttcaggaaggctctcctgagaagatggcactgaggcgagccttgaagaaggygagaggggagaaagattggcctgtgttcaaggaatcaaaatagttcgctagttcagagacagggtaaagcaaatagactggagtctcattcaatgtcttt

SEQ ID NO: 292064 - DNA, 201 bp, Homo sapiens
ttgtaccctgatcctatgttgtcactctgggttttatgtatctaatcattgactaggaatctatctcagcagataatccaaaaatctagtttgactagttkgtagattatgctttcccgctcacatctgaacacacctggttgttagtctggtaggaggtcatcaagggccacatccttacaggttgccaggagaccagta

SEQ ID NO: 292065 - DNA, 201 bp, Homo sapiens
aggccagggcaggcagatcacttgagctcaggagttcgagaccagcctaggcaaggtgatgaaaccctgtctcctctaaaaatacaaaaaaaaaaaaaaaacattagctgggcacggtggcacacacctgtagtcccagctatttgggaggctgaggtgggagaatcacttgaactgggtggcagaggttgcagtgagcca

SEQ ID NO: 292066 - DNA, 201 bp, Homo sapiens
aatgacttgaaaaatcaagtaatttgacatgtagacacagggaaattacattcgaggcagagagcaaacaacaggcatgtgactgtagctgacaagtgtcrgcagattgtgggcatagtttagagtctaagacatctgggggagatgagtttcatcattagatgaagtcatattctggaggggaataaatgctaatctgaa

SEQ ID NO: 292067 - DNA, 201 bp, Homo sapiens
ggacatcaaaatacgcaggaaagacagtgggggaagagaccatcagtcgccctcttgctgcctaggttcactagaatctctaagactgaattcactaggaracacaggacataccgtagagctgtttatgtcttgagagccccagtttcctagtctgttaaatgagcatagtaacaccaatctcactcctttggaatattc

SEQ ID NO: 292068 - DNA, 201 bp, Homo sapiens
ttttgtagtagttttttttataaaaggaaaaaatgacttgaaaaatcaagtaatttgacatgtagacacagggaaattacattcgaggcagagagcaaacracaggcatgtgactgtagctgacaagtgtcggcagattgtgggcatagtttagagtctaagacatctgggggagatgagtttcatcattagatgaagtca

SEQ ID NO: 292069 - DNA, 201 bp, Homo sapiens
gtgaccttagtcacacagccatacttagctgcaagacaagcgaagacattcagattctacctcttcttcttgaaatagaaaggtgagttgccaatccactstcagcgtgacgacagttcaagaggttttcctagacacagagttgagttaatcccgtcatctgtgtcatcgtctctattttgacagcatctgtcaggtggt

SEQ ID NO: 292070 - DNA, 201 bp, Homo sapiens
ttatttttgtttgcctggaggtaatggaatcatggtgattttcacttcacactttgtgttttggcattctcaaatttttacaattactgtgtattactttkgtagtagttttttttataaaaggaaaaaatgacttgaaaaatcaagtaatttgacatgtagacacagggaaattacattcgaggcagagagcaaacaaca

SEQ ID NO: 292071 - DNA, 201 bp, Homo sapiens
aatgtcaatagttttctttttttgttagccataaatacatactgtaatagagaaaatgtcctacttatacatgtcccccaaaggatagaatacttaggaaataagtttagcaagaaatgagcacatagaataaaactataaaactttattgaaagacaaacaacaagacctgaataaatggtaagacacatgacatactct

SEQ ID NO: 292072 - DNA, 201 bp, Homo sapiens
agggctgaagaaatggcagtgtgttccaatacttcacaacagtggggcctcattaagagatgctagggtattgagagtggagtgttacatagtgtttttcrtaggtcttctaaaagatttttcagagttgctgacttaagaatttggcctctgagtaagatgagacgcccctactacgttataaagccttcatggatcttt

SEQ ID NO: 292073 - DNA, 201 bp, Homo sapiens
ccaccactgtgcccagccagggtgtggccatacatgcccatcctgtgcatagggcaggagcagacccacctgcaccacatgcggtggccgccatgaccacragaccaggataggagtgctgatcaggccagaccccaagggctgttgctcagaccatacctggcctgtagagtagaagaactaaatgtctcacacaggcaa

SEQ ID NO: 292074 - DNA, 201 bp, Homo sapiens
ctcttctcctgttgtgcattagaatgtttggagtgttctgtggaaagctggtccttacattttccagtcagttatgcatctcactcataaacctgtttctycccccatgctctttaatattctgctttcttaattatggttgagctgcctttaaacagtcttagattgttcaatgtgagtggcttcaacaagcctcccata

SEQ ID NO: 292075 - DNA, 201 bp, Homo sapiens
gttattgagaagcataactaaatttatagtagctcctcattatatattttcatgttgataggattctgcccccatgggaattaattttcttcatcaaaagygatctccatactcacaaacactgaatagctttgggcttttaaaaacaatgttttggctttaaaagaaccacaggaggctgggcgcggtggcttacgcctg

SEQ ID NO: 292076 - DNA, 201 bp, Homo sapiens
tcacattgtacatacagggtttaattaataggatcttaaaacttaaaagggtattgatgcacatctctgttgccttttacatttcacagtaattagaaggraaaaaacacactctaggttgaaaggctgtcctttcttttggttgtccttgtccctggaaaagctgtcttccccctcagggcctttgacctcccccggctc

SEQ ID NO: 292077 - DNA, 201 bp, Homo sapiens
tggcattaaatagtgtaaccctgaagacgcatccagtatataaggaacaccacagcagtgcctatactcaccgttattattcatcattattctgaagcatraataagaacaatttcaaaaattataaatattggaaaggaagagacacattttattatttatgtacagaataattatataactagaaaattcaagagaggc

SEQ ID NO: 292078 - DNA, 201 bp, Homo sapiens
tagccttccaataactaatatgttgaaaacaccaagacaccacttaaggtctttacaaagtgagaaggaattgggaaaaaaagaaacaaaggccgggcacrgtggctcacgcctgtaatgctagcactttgagaggccgaggcaggcagatcatgaagtcaggagttcgcgaccagcctggccaatatggtgaaaccccat

SEQ ID NO: 292079 - DNA, 201 bp, Homo sapiens
gaatatctccatgtctgcagggatgcagggaaatatgatggctgaaagaaacgctaatctacatgcgcactttattagctaagaaatccctcctccatacrttcttccaggcatgcctccgcacatcccatctgctatgtgggctcaactctgcattatagatgggaaggtgatggacttgtccataagaaatggacgctt

SEQ ID NO: 292080 - DNA, 201 bp, Homo sapiens
atggcattaaatagtgtaaccctgaagacgcatccagtatataaggaacaccacagcagtgcctatactcaccgttattattcatcattattctgaagcaygaataagaacaatttcaaaaattataaatattggaaaggaagagacacattttattatttatgtacagaataattatataactagaaaattcaagagagg

SEQ ID NO: 292081 - DNA, 201 bp, Homo sapiens
atggggtttcaccattttggccaggctggtctcgaactcctcaggtgatctgcccacctcgacctcccaaagtgctgggattgcaggcatgagccaccacrcccagcccttaaatgtatttttgtgtgagtgtatgataaaaatcttggatctggaacaaacccaaagattactctttttagttacctttttaaataaact

SEQ ID NO: 292082 - DNA, 201 bp, Homo sapiens
tttgcttctcaaagcaaactgggtttctgtgtgccccttggtgtctccccagactttatatccccaagaatgtattcagtacaagactaatggcatcttgygtgctattctttctccaccccagtcttgtggaaggaaaacaccggagatgatttagggtaatgggaaatagtgctagagcccagggcatgactgcatttg

SEQ ID NO: 292083 - DNA, 201 bp, Homo sapiens
ctccatgttggtcaggctggtctcgaactcctgacctcaggtgatctgcccaccttggcctcccaaagcgctgggattacaggcatgtgccaccatacccrgctaattttgtatttttagtagagatggggtttctccatgttggtcaggctggtgtcgaactcctgacctcaggtgatctgcccacctcagcttcccaaa

SEQ ID NO: 292084 - DNA, 201 bp, Homo sapiens
gcacacactaccatgcctggcaaatttttatatttttagtagagatggggtttcaccatgttggccaggctggtctggaactcctgacctcaaacgatccrcccacctcagcctcccaaagtgctgggattacaggcgtgagccactgtgcttggcctctagtggatttttttgtttgtttgttgtttatttgattctttc

SEQ ID NO: 292085 - DNA, 201 bp, Homo sapiens
agctcaagccttctttgccccggatttcttgcattgattggtgctggtaaaactttagtaacttaagtaatggttttctggaagccctttttacctccccyacaaccccacaccctcacaaccaacccttgggtgctgggcagtgagaaagatatggcattgctctataggagaaagaagttataaatgctttgcatatga

SEQ ID NO: 292086 - DNA, 201 bp, Homo sapiens
gtaatcccagctacttgggaggctgagacaggagaatcgcttgatcccaggaggcgaaggttgtagtgagccaagatcacgccactgcactccagcctgcrtgacaaaaaaaaaaagagagacaaggtctcacttccatctcccaaatgggagtgcagagacacaatcatggtcattgcagcctcaacccccaagactcaa

SEQ ID NO: 292087 - DNA, 201 bp, Homo sapiens
tttagatcatctaagaccatttacagtcttgtcttgtcaccatgtaaaaatctgaattcattggtgcagtcagtaatagagctcaagccttctttgcccckgatttcttgcattgattggtgctggtaaaactttagtaacttaagtaatggttttctggaagccctttttacctcccctacaaccccacaccctcacaac

SEQ ID NO: 292088 - DNA, 201 bp, Homo sapiens
ttcactaaaccaaacctaattttcacaaaatgtaaataactgcaattcttgttttgttttgttttgagacagggccttggctgggtgcagtggctcacgcyagttatcccagcactttgggaggccgaggcaggtggatcacatgaggtcaggagttcaagaccagcctggccaaaatggcaaaaccccatctcttctaaa

SEQ ID NO: 292089 - DNA, 201 bp, Homo sapiens
caagatttagatcatctaagaccatttacagtcttgtcttgtcaccatgtaaaaatctgaattcattggtgcagtcagtaatagagctcaagccttctttsccccggatttcttgcattgattggtgctggtaaaactttagtaacttaagtaatggttttctggaagccctttttacctcccctacaaccccacaccctc

SEQ ID NO: 292090 - DNA, 201 bp, Homo sapiens
tggggtttcatcgtgttggccaggatggtctcgatttcctgacctcgtgatccgcctgccttggcctcccgaagtgctgcgattacaggcgtgagccaccrcgtccagcagattgtttcatcttatgcctcataccgaaagtttaaaggcctcatgttcctggacccagagtggaacaaggaacccacagacctttccaga

SEQ ID NO: 292091 - DNA, 201 bp, Homo sapiens
tcatccctcacatattctattgttgagtcactcagatgtcacagacactcttctttcctgttcagtggcataaatcaatagcataagtgaagaagaaatcmgtgaagcaagagcttagcagcgttgttgataagcctggagtcacagtggtgagagaacggggctgatgtattaatatttaatattaccacagctctcgct

SEQ ID NO: 292092 - DNA, 201 bp, Homo sapiens
ctccctggatcaagcaattatcctgcctcagcctcccgagtagctgggactacaggcatgcgccaccatgcccagctaatttttgtatttttagtagagayggggtttcatcgtgttggccaggatggtctcgatttcctgacctcgtgatccgcctgccttggcctcccgaagtgctgcgattacaggcgtgagccacca

SEQ ID NO: 292093 - DNA, 201 bp, Homo sapiens
catgcgtgagccactgtgcctggcttgggtagtttttttgagtgtctttgtctcccaaactaaactaaaatctccttggaaactttatggttttttttttkttttttttttgagacagggcctcattctgtcacccaggttggagtgcagtagtgcaatctccactcactgcaagctctgcctcccaggctcaagcaattc

SEQ ID NO: 292094 - DNA, 201 bp, Homo sapiens
gcctccaccttccaaagtgctgggattacgggcatgagccaccgcacctggcccagtttagtgttttttttgttttgttttgtttttgagatggagtttckctcttgttgcccaggctggagtgcaatggcacgattttggctcaccgcaacctccgcctcccaggttacagcgattctcctgcctcagtttcccaagtag

SEQ ID NO: 292095 - DNA, 201 bp, Homo sapiens
gggagtctgaggtgggcagatcacaaggtcaggagtttgagaccagcctggccaacatggtgaaaccacatctctactaaaaatacaaaaattaaccaggygtggtggcaggcgcctatagtcccagctacttgggaggcaggagaatcccttgaacctgggaggcggaggttgcattgagctgagatcatgccactgcac

SEQ ID NO: 292096 - DNA, 201 bp, Homo sapiens
atccgtctgcctctgcctctcaaagtactgggattataggcgtgagccaccgtgcccggcctgagcactttttaaaatataatctaaacctgttatttctktgctgcctaataaatcagagattcagaacccttaaaaagcaaataaaagtaagggcaataagacctgctgaggctgaggcaggagaatagcttgaaccgg

SEQ ID NO: 292097 - DNA, 201 bp, Homo sapiens
tctcaaactcctgacctcaggtgatccgtctgcctctgcctctcaaagtactgggattataggcgtgagccaccgtgcccggcctgagcactttttaaaayataatctaaacctgttatttctgtgctgcctaataaatcagagattcagaacccttaaaaagcaaataaaagtaagggcaataagacctgctgaggctga

SEQ ID NO: 292098 - DNA, 201 bp, Homo sapiens
tagtagaggcagggtttcaccatgttggccaggccagtctcaaactcctgacctcaggtgatccgtctgcctctgcctctcaaagtactgggattataggygtgagccaccgtgcccggcctgagcactttttaaaatataatctaaacctgttatttctgtgctgcctaataaatcagagattcagaacccttaaaaagc

SEQ ID NO: 292099 - DNA, 201 bp, Homo sapiens
ttctgtatttctcctcccaccgagatgacagcaagaccttttccatcctgttcaccaccgtatctccagcttctagaaagtgcccgacacctattagaggytcagtaaagacttgttgaataattaagtgaatgtttattatttttactacattctcctaaaaatacacatttattaataaataactgaataagagaaaaa

SEQ ID NO: 292100 - DNA, 201 bp, Homo sapiens
tgagtaaatttgcccgtctcgacatcgacccatctaccatcacgtggcagagaggtgggtgctggggagatgccagcaggctgatggccaggtggggaggygtgttcgagccgaagcgcttaaattcagaaacttacagtttgatcctgtccagtgatcttcccagcctgtgcttcatattcccaccatttatttcagtta

SEQ ID NO: 292101 - DNA, 201 bp, Homo sapiens
ctcatgtccagctccttcgcctccctctgttctcatgtcatgtaagcatcagctgctcagagaagccacaggaatgtgcagcccccgtccctctgctgtcrttgcagtacatggcacagaatgctgagagcttcctatttccttatctgttttctgtatttctcctcccaccgagatgacagcaagaccttttccatcctg

SEQ ID NO: 292102 - DNA, 201 bp, Homo sapiens
gatctggctctcaccccttcccgctccttgtcccttatcctcatctctcatcctctgggggacctttgcacggctaacaccactacctgggccacttcctsatattctcatgtccagctccttcgcctccctctgttctcatgtcatgtaagcatcagctgctcagagaagccacaggaatgtgcagcccccgtccctctg

SEQ ID NO: 292103 - DNA, 201 bp, Homo sapiens
agccctagggatctggctctcaccccttcccgctccttgtcccttatcctcatctctcatcctctgggggacctttgcacggctaacaccactacctgggmcacttcctgatattctcatgtccagctccttcgcctccctctgttctcatgtcatgtaagcatcagctgctcagagaagccacaggaatgtgcagccccc

SEQ ID NO: 292104 - DNA, 201 bp, Homo sapiens
gtcaaactaacacctaaattactataaaattactatactatatcatgccacactatactatactgtatttactgtaaaaactgcagaggaaaatgaacttsgtggttaaattaatcacagcatttgtctagattctgcaagaatgaattcatgaggatggatttaaaagctttttcaaggccgggcgcagtggctcacgcc

SEQ ID NO: 292105 - DNA, 201 bp, Homo sapiens
cccatgtttccaccccggtctgaaaagccctagggatctggctctcaccccttcccgctccttgtcccttatcctcatctctcatcctctgggggaccttygcacggctaacaccactacctgggccacttcctgatattctcatgtccagctccttcgcctccctctgttctcatgtcatgtaagcatcagctgctcaga

SEQ ID NO: 292106 - DNA, 201 bp, Homo sapiens
atagagaaaatgtcctacttatacatgtcccccaaaggatagaatacttaggaaataagtttagcaagaaatgagcacatagaataaaactataaaacttyattgaaagacaaacaacaagacctgaataaatggtaagacacatgacatactcttagatgggaataactggtattaatcatccttcctctgtcaaactaa

SEQ ID NO: 292107 - DNA, 201 bp, Homo sapiens
ttatttatgtacagaataattatataactagaaaattcaagagaggcaactgacaacttattttaagtaataaaagttttagtttgctagtggatgcaatrtaaatatgtaaatgtcaatagttttctttttttgttagccataaatacatactgtaatagagaaaatgtcctacttatacatgtcccccaaaggatagaa

SEQ ID NO: 292108 - DNA, 201 bp, Homo sapiens
cttgtgcccgggaggcagaggttgcagtgagccgagatcatgccgctgtactccagcctgtgcgacagggcaagacaccatctccaaaaaaaaaagcttcrctgtgagttatgatatgggaagaaaagtcttggcctggccaccacaaggaatccctcaggcctggcggtgggaagcagaggagggcgcagtctctttagg

SEQ ID NO: 292109 - DNA, 201 bp, Homo sapiens
tctgatatccttttaggatgtttctagaagattctaattgaacatagaagtgatatttcacgttgactttttttatttttctcatcttttgggagatacaratgaatacctagaaactttttctagtaagaccatcttataaattaaaagagaaattagtagagataaacgattagccctgttttaaacatgctcaatttc

SEQ ID NO: 292110 - DNA, 201 bp, Homo sapiens
taggctgtaccatacagccaaggtgtgtaggaggctataccatctaggtttgcaagtacactgtatgatgttcacacagtgacaaaatcacccagtgatgygtttctcagaatgtacccgtctttaagcaacacaggactgtgctgtaaatgcaaggtaaccatttcagtaattcaacaacgttatagttaaagagttgta

SEQ ID NO: 292111 - DNA, 201 bp, Homo sapiens
ttataattgtaaattttgaaagtttgtagcacagcaaggaaactgatcatgttaaatgtttctgatatcttagttaatttttctcccgccagttccgatcrgtgtcctggtcataccgtcagcatataagtatgtatttcataaacatttactttgtattaactcagtagtattcccttcctagagtggtttgcttcccag

SEQ ID NO: 292112 - DNA, 201 bp, Homo sapiens
tttgggagtctgaggtgggcagatcacaaggtcaggagtttgagaccagcctggccaacatggtgaaaccacatctctactaaaaatacaaaaattaaccrggtgtggtggcaggcgcctatagtcccagctacttgggaggcaggagaatcccttgaacctgggaggcggaggttgcattgagctgagatcatgccactg

SEQ ID NO: 292113 - DNA, 201 bp, Homo sapiens
tggggattgcgagtgtgggccactgtgcctggcctaattactgattttaaatattaatctttctaaaagtcaaactccagaactgtgcatgtagaactatycaatttctgtatataactatagaaatatatattagacgggccgggcgtggtggctcatgcctgtaatcccagcactttgggaggctgaggcgggcagatc

SEQ ID NO: 292114 - DNA, 201 bp, Homo sapiens
acacataataaaggataaatggcttgtagctatatttatccaaattgaacatttttgatgtaatttttttaatttgtcaaaagcatatcaatggtcataamaattttttatgtcctctggccctattaccttacccttgggaatttattccaagaacgtaatttgaaagagattaaagcacataggcacaaatattttcag

SEQ ID NO: 292115 - DNA, 201 bp, Homo sapiens
ggtggctcatgcctgtaatcccagcactttgggaggctgaggcgagtggatcacctgaggtcaggagtttgagaccagcctggccaacatggggaaacccygtctctactaaaaatacaaaaagtagctgggcgtggtggcaggcgcctgtaatcccagctccttgggaggcggaggcaggaggatcactcaaacctggga

SEQ ID NO: 292116 - DNA, 201 bp, Homo sapiens
caatctacctccaactatagggcgacattaaacagtttttcaaaataccatggcattgaaaaaaatgcgtaacatttgggttacttcagtcccactccccrgtactaatcaggccagtgaaccagtcttgctggtgaaataatgacttctccagtcatgatggatgatttcccttcatcatgaccatttcttccctggctc

SEQ ID NO: 292117 - DNA, 201 bp, Homo sapiens
gaaaggatggaagaagccaaaactgaacttcacaaaataactaggatatcagaaaatcaaggagtccctgtacttatagttgctaacaaacaagacttgargaactcattgtctctttcagaaattgagaaattgttagcaatgggtgaactgagctcatcagctccttggcatttgtagcctacctgtgcaatcatagga

SEQ ID NO: 292118 - DNA, 201 bp, Homo sapiens
tgatccaatgaagggattttattaagcccctagaagtcccagaatgaaaatgtataactgcatgactaacccctaagaatttgctggggtttctgcattawgtacgcttcccaggccatttgtaatgaaggtaccgtgatctgttaaggaagagacctacagctgggaacaaaaagagccaattccatcctagacatcagt

SEQ ID NO: 292119 - DNA, 201 bp, Homo sapiens
tttggtttggagatagatggtgactttccttcagtgccttctatgtgtcttgacatgttaatgtctcaaacacatggtccgtatcatcatggagcttgcartctaacagggtagtttaacacataaatatgcatccagttggaaagaacttagagatcacttgatcagcccccgttatgtaaaatgtatgcaacaatctac

SEQ ID NO: 292120 - DNA, 201 bp, Homo sapiens
acatttatttgcacctggaaatggggaatgggctatcagaccagacttctatcctgtccaacctgccttcattcagtccttccacattgttattctgggtytggactgtgctggaaagacaactgtcttatacaggctgcagttcaatgaatttgtaaataccatacctaccaaaggatttaacactgagaaaattaaggt

SEQ ID NO: 292121 - DNA, 201 bp, Homo sapiens
ctttgcttggaaaacacaaattcgattttaacttctttaaagactttttatatttacctatcctaatatatatagaaattacagacattataaaggaaatrtattcctttccacagaaaacctgtgcatagatttttgggggtttttttgttgttgtttgcttgtttgttgtttttttgtttcatttttaggaatttccaa

SEQ ID NO: 292122 - DNA, 201 bp, Homo sapiens
tttctgctactctctttttatttggtttggagatagatggtgactttccttcagtgccttctatgtgtcttgacatgttaatgtctcaaacacatggtccrtatcatcatggagcttgcaatctaacagggtagtttaacacataaatatgcatccagttggaaagaacttagagatcacttgatcagcccccgttatgta

SEQ ID NO: 292123 - DNA, 201 bp, Homo sapiens
tagtagagatgggggtttcaccattttggccagccggtctcaaactcctgacctcaggtgatctgcccaccttggcctcccaaagtgctgggattacaggygtgagcgaccacgcctggcctggcagtggtttttcttcttagtggtccatgaagtaatggttttaaatttgacaaaatatggtaatgtaatatttggaat

SEQ ID NO: 292124 - DNA, 201 bp, Homo sapiens
tccatgaatgtaacaactccagggacctcatgtaagtagcatcatactgtggctggcttatttcacttagcataatgtgcgtgcatgttgtagagtgtcakaatttcccttcttttttttttttgagatggagtttcgcttttgttgcccgggctggagtgcagaggcaccatctcagctcaccgcaaccttctgctctcg

SEQ ID NO: 292125 - DNA, 201 bp, Homo sapiens
gggaagcaggaaccactgaagacaggagaacatggtgactacacgggcgcattgaaggggggaggagctaggtttttgaagggaatttgagcttgcaattkttcaagggcattcaatggttataaatgaaacttttcattaatatatttgtgtccaagtgtttttagatgtgcttttctgctactctctttttatttggtt

SEQ ID NO: 292126 - DNA, 201 bp, Homo sapiens
agattacaggtgcacgccaccacacccagctaatttttgtatttttagtagagatgggggtttcaccattttggccagccggtctcaaactcctgacctcwggtgatctgcccaccttggcctcccaaagtgctgggattacaggcgtgagcgaccacgcctggcctggcagtggtttttcttcttagtggtccatgaagt

SEQ ID NO: 292127 - DNA, 201 bp, Homo sapiens
tgtgggagacggcacgtcagtgtacttaggatgctgcatgtggtgacagatgagggccctgcaagggagcacaccacagggccgggagggtgggatgggcrggaggagtagccaactttgcccgaaagcatcaggacaagcttccaggaaatggcacatccaagctgagtcttggacagcgggttaaagaggcagagaggg

SEQ ID NO: 292128 - DNA, 201 bp, Homo sapiens
aatgatgtttcctatatttaatggcagtgttttccccccccaccctttttttttttttgagatggagtcttgctctgttgcccaggctagagtgcaatggygcgatctcggctcactgcaacctctacctcccaggttcaagcgattctcctgcctcagcctcccgggtagctgagattacaggtgcacgccaccacaccc

SEQ ID NO: 292129 - DNA, 201 bp, Homo sapiens
tcttttttttccccttgggacagagtctcactttgtcacccaggctggagtgcagtggtgcgatcttggctcactgcaacctccacctcctgggtttaagmgattctcatgcctcagcctcctgagtagccgggactgcaggcacacaccaccacgcctggctaattttttgtatttttagtagagacagggtttcaccat

SEQ ID NO: 292130 - DNA, 201 bp, Homo sapiens
ggttaacttagaaagaaaacagatttaattggctcacggttcttttttttccccttgggacagagtctcactttgtcacccaggctggagtgcagtggtgygatcttggctcactgcaacctccacctcctgggtttaagagattctcatgcctcagcctcctgagtagccgggactgcaggcacacaccaccacgcctgg

SEQ ID NO: 292131 - DNA, 201 bp, Homo sapiens
gagactggttaacttagaaagaaaacagatttaattggctcacggttcttttttttccccttgggacagagtctcactttgtcacccaggctggagtgcartggtgcgatcttggctcactgcaacctccacctcctgggtttaagagattctcatgcctcagcctcctgagtagccgggactgcaggcacacaccaccac

SEQ ID NO: 292132 - DNA, 201 bp, Homo sapiens
tgtagagtgtaggacccatgaaagttacttactgtgcttccctgtaccttccatcatccagttcccagacatatctgtgtttcttctctgaatgcctagtwacttgggatcccatgctgtattggtctgttctcacactgctgtaaagaactacctgagactggatagtttataaagaaaagaggtttaattgactcagtt

SEQ ID NO: 292133 - DNA, 201 bp, Homo sapiens
tttgagggtatagtgggaagcctgaataaaaagagaagttaaacttttaagaaaagggtcaagctttaaaactggaattgggttttcaaatctaatgagtraaaagaaaccccaaaactggaattgtaattgtggagaaatataacggataatatctggaactcgcggcagtttacaggcttaactatgtatgtgttcctt

SEQ ID NO: 292134 - DNA, 201 bp, Homo sapiens
ttagctgccagcacgccccacctgcacgagtgcagcagcctcccaaccagtctctctgctgctactcttttcttccaaaatactctctcctcagcagccayagagactgaaacctaatgaagccctgttgccttcctacttagagttcttccatgatttacccatgtttccaccccggtctgaaaagccctagggatctgg

SEQ ID NO: 292135 - DNA, 201 bp, Homo sapiens
tactttaaatgaaatcagcctcagccagggaaatatgctgagtaataatgttgccaggtactataccactgagttgagtttgtaattcactgctattaatmcctgtgtattagttctgattttttactctttgcatacatagaaaaatggtgtttctcttcagagtcaaggagggaaaaaaagaaaagataaaagatgctt

SEQ ID NO: 292136 - DNA, 201 bp, Homo sapiens
tcctgggcccttcttgcttactgtgttgggagttggagaggggataattgacttctttcttctcacagtgttttctcttttttttttttttttttttttttgagacagagtattgctctgtcgcccaggctggagtgcagtagcatgatctcggctcactgcaacctccgccttccaggttcaagtgatactcctgcctca

SEQ ID NO: 292137 - DNA, 201 bp, Homo sapiens
ttctggaaaatcagaatctgttgccatggctcatgcctggacaccaggctgtccgctcctgacgtcactctttcacttacgacttgttagaaaatgaatgygtggaatggccctggatagctgctgcagctccctggtttcctgaagtgagccctctgtgtcattatctggtcttctcagccctcagccgagttcctcctg

SEQ ID NO: 292138 - DNA, 201 bp, Homo sapiens
tacttgagcccaggagtttgaggctacagtgagctatgatcatatcattgcactccagcctgggagatagagtgagatctctgtctctaaaaaaatgaaakaaaataataaaaaacacaatataatttaaaatctttggagtcactaaacaaatatacaatgtgaatctcctctcactccagctaacgccaccatatccaa

SEQ ID NO: 292139 - DNA, 201 bp, Homo sapiens
ggatgtggaagaagaggggattcttcaaaaagagctcagcctctgaactggcaaaacagtgagttttgactcaaaggcaccaaagtactaatacatgacaycctctcctggggtgatccgatgtggctggagttggatgagggggggtggctggggatgggaatgggaatgggattgggatagcaggacagggtcacatgg

SEQ ID NO: 292140 - DNA, 201 bp, Homo sapiens
attgctaaaggaagatgcatttagtgtatctttctatgtacctcttaacatcttttgtggggtgtagaaaaacagattattagggctttctttttttgggkgggggcgggagcggggatggagtttcactcttgttgcccaggctggagtgcaatgacgtaatctcggctcaccacaacctcctcctcccaggtttaagtg

SEQ ID NO: 292141 - DNA, 201 bp, Homo sapiens
ctgggttcatttaccctttggtcggaacggtgagtgagtcacattttccaaaaaccctccccattctgcattgccgtggtgcctcaaatcgttatgctccrcccgctctttaaaaatcatggattagggaaaattgggagtaattaatagtacagtattcgctatttttctaaacactgtgtctcacctacttttgccatt

SEQ ID NO: 292142 - DNA, 201 bp, Homo sapiens
gggagcaggaatttgaacctgagtgtcggccccacagcctttgcttttaccaccgtgctttgccacctctgaatgttcactttcattccatagcagcatcrtacagccctgtgcataacaggaagtgcacgtttgttaaatgagaaactagtaacacttctggtagctgaatgacttaactactggtaaacctgtctgcat

SEQ ID NO: 292143 - DNA, 201 bp, Homo sapiens
gtgctttgtacattgtgactcattcagttgctcaaacaacaccatgagtagtttaccagaattacccccatcttgcaggtgagaaaactgagcatccgagygagttagtagtttgctcaaaggcaggcagctagcgcaagggggagcaggaatttgaacctgagtgtcggccccacagcctttgcttttaccaccgtgctt

SEQ ID NO: 292144 - DNA, 201 bp, Homo sapiens
taacctgctttttacatttaattaggcttctacgagtcattcgggtagttgcatctagcaggctatttatccattctttatagaccctttagaggtttgaracccctttatagaggtttgagagccctttcttgccccagttctcttgtctgtaaagctgtaggaaataatatgacctaacatacaaggcagtgtgaggac

SEQ ID NO: 292145 - DNA, 201 bp, Homo sapiens
tgaagtgcagtggcacaatatcggctcaccacactcttcacctcccaggttcaagtgattctcctgtttcagcctcccaagtagctgggactacaggcatstaccatgcccagttaatttttgtcattttagtagagactgagtttcaccatgttggccaggctggtctcgaactcctgacctcaagtgatctgcccccct

SEQ ID NO: 292146 - DNA, 201 bp, Homo sapiens
cgcttgaacccgggaggtggagcttgcagtgagccgagatcgcgccactgcactccagcctgggtgacagagtgagactccatctcaaagaaaaaaaaaawaaatatatatatatatatatgtatatatttatatatgtatatacacacacacacacattagataagcacattgtttatataggaatcaaaaattacctgt

SEQ ID NO: 292147 - DNA, 201 bp, Homo sapiens
agcacgtctaagtggtattggtattttcaaagcttttactacaaccaaaaatatgttcacgtgtacctgtctcctctttacactgcttactttctctatcrcttttcccaaatacgtccccagtaacttcctcatgttctgtgcaccacctccaatcttcccctaatgtgtatgaacttggtcatcaccaaagaggtggaa

SEQ ID NO: 292148 - DNA, 201 bp, Homo sapiens
tgccaccagtggaaaattccacacctgatctcgtgtgacgggttgcagtcagcatgcagttaaatctttcatatatgcacaaaattattaaaactattgtycagggccaggcacagtggctcacacctgtaatcccagcattttgggaggccagggcaggcagatcacttgagctcaggagttcgagaccagcctaggcaa

SEQ ID NO: 292149 - DNA, 201 bp, Homo sapiens
ccctctgccttgaattcgcctgctttctaggtgcggtggagaaagctgggaaaagagccacctctgctcccaggggccactgagagggtagaacactgacygaatcccagactcactacctcaggggctgagatgggtccaaaggggcccttaacctctcacttgatcacctgactcttaccgctgtcattgatctgacat

SEQ ID NO: 292150 - DNA, 201 bp, Homo sapiens
gctgctaataaggtggaggttgcggtgagctgagatcgtgccattgcactccagcctgggtgacagagagagactctatctcaaaaataaaaaaaaaaaawttttttagatccttctaataagatgaagcccactgtgtcaaaaaaaaatctaaaggttaggatatgaagtcattctgacagattatgctgtggaagaata

SEQ ID NO: 292151 - DNA, 201 bp, Homo sapiens
aggactgcccacccggccctgcttttatgacatagatcttgataccgaaacagaacaagttaaaggcttgttctaagtggacaaggctctcacaggaccckatgcaggtaggctgatgtgcttcaactttttctctctttgtttttttccagttcatatcctttttttgtcattttttttttctgataccacagaagtgat

SEQ ID NO: 292152 - DNA, 201 bp, Homo sapiens
tggccaacatatttctaataatatattaatttgataaacagaagttattttggaaataagccaaaacaacaaaaaatgctcatccctgcttttcaaggctrttatctgtagtttgaggttttatcaaatgtagatatgaactgcgggcctcttcaggatgtcctcattgcttctgttaatgcttttaccatccagtaccac

SEQ ID NO: 292153 - DNA, 201 bp, Homo sapiens
aagcgattctctgcttcagcctccctagtagctgggatcacaggtgtgcaccaccacgcccagctaatttttttttttttttttttttttttttttttttkgtatttttagtagagatggggttgcaccatgttggccaggctggtctcaaactcctgacctcaggtgatccaccctactcggcctcctagagtcctggga

SEQ ID NO: 292154 - DNA, 201 bp, Homo sapiens
gtaattacttccaatgtatcgggcattgtgctaagcactttgcatgggtggtcacagcacctctggagccaagtgttgtcccataagggccacaaggcttyaagaggacggagcctaccccttggtcactgaggggtggccctggtctgcaaggctacagaactgccttgccaccctgtggcactgcctctcatttcatag

SEQ ID NO: 292155 - DNA, 201 bp, Homo sapiens
ttttttttgtatttttagtagagacagggtttcaccttgttggccaggctggtcttgaactcctgacctcaagtgatccatccacctcggcctcccaaagygctgggattacaggcgtgagccaccgcacccggatgctttttctcatttctccatcgcttaaagatagaggattgagagaggcccgtttgtggacacgat

SEQ ID NO: 292156 - DNA, 201 bp, Homo sapiens
cattctcctgcttcagcctcccgagtatctgggactaaaggcgcccgccaccacgcccggctagtttttttttttgtatttttagtagagacggggtttcmccgtgttagccaggatggtctcgatctcctgacctggtcatccgcccgactcggcctcccaaagtgctgggattacaggcgtgagccaccgcgcccagtc

SEQ ID NO: 292157 - DNA, 201 bp, Homo sapiens
gctaggattacaggtccctgtcaccacgcctggccaatttttttttttttttgtatttttagtagaagtgtggatgcaccatgtttgccaggttggtttcraactcctgacctcaagtgatccacccacctcggcctcccagagtgctaggattacgggcatgagccactgggcctggctaactctgtgaatattgagtgt

SEQ ID NO: 292158 - DNA, 201 bp, Homo sapiens
ttttttttgagacagggtctcgctctgttgttggagtgcagtggtgtgatctcggctcactgcaacctctgcctcctgggttcaagtgattctcgtgctgyagcctcctgagtagctgagattacaggcccccaccagcacgcctggctaatttttgtatttttagtagagacagggttttaccatgttggccagtctggt

SEQ ID NO: 292159 - DNA, 201 bp, Homo sapiens
ttttacttttcagggacaggcaacaatttcatgatataacttctaaaaatattttaaacaagtatgaaaatagttttttcttccaaaaaaccatttcttcrtttggcacatacacaaacaaatgagcagaatttagagtaatttagagacagaatttagataatttgggtgggtttttttttggacagtcttgccctgttg

SEQ ID NO: 292160 - DNA, 201 bp, Homo sapiens
tgtagggtatgatgacgcctctaaagacattctttctttgtggttacatccttaggttttgtagatcagaaaactctattagattggttgtggttgagtayccttgacaacatggctgacagtaactcatggaagaccaaactgtaaaccctaatgacagcctttaaattttttaacgatgcttgagagctaagctggaag

SEQ ID NO: 292161 - DNA, 201 bp, Homo sapiens
gctttggccagggtctctcccatttgggaggaggaaaataggaacaagtgagatgataattttccttgaattttagctcattaaaatcttcccttgtcctrggcaggctatttactgatttaagcatctagcacttttcctttccagaaagaattaacatctatgatgcaatcattgctaagggaggaggtttttgtgttt

SEQ ID NO: 292162 - DNA, 201 bp, Homo sapiens
tttatgaaattgcatagatgttttggttgagagtagattgtttttacttttcagggacaggcaacaatttcatgatataacttctaaaaatattttaaacmagtatgaaaatagttttttcttccaaaaaaccatttcttcatttggcacatacacaaacaaatgagcagaatttagagtaatttagagacagaatttaga

SEQ ID NO: 292163 - DNA, 201 bp, Homo sapiens
cggaagcttcagggagtggacggtcctcgttcttcgttaccagaaaaagaaaggttttcttccttttatcagtgagtgtaatgaggatacagaaaaagttyccacacacacatttcttccccgacaagcatgtttgcctgactgcttcctaatgttctcatagtcatatatgacgtgcttatgcctggctgcaacaaaaac

SEQ ID NO: 292164 - DNA, 201 bp, Homo sapiens
tgcgatctcggctcgctggaacctccgcctctcaggttcaagtgattctcctgcctcagcctcctgagtagctgagactacaggcgcctgccaccacgccyggctaatttttttgtatttttagtagaaacggggtttcaccatattggccaggctggtctcgaactcctgaccttgtgatccgcccacttcggcctccca

SEQ ID NO: 292165 - DNA, 201 bp, Homo sapiens
gcatacattatcataattttttataataaaccatgttgctttattgtgcaaacaagcaatagatagataaaaagtgcagattcttgccttgatatttacawacttcatctaatattggacacaatgttttttcaatcagcattttttgaattcttcctgcatgtgaggcacagagattttaggatgagcaggtgtgagacg

SEQ ID NO: 292166 - DNA, 201 bp, Homo sapiens
ttttttttttttttttgagatggaatcttgctctgtcgcccaggctggactgcagtgctgcgatctcggctcgctggaacctccgcctctcaggttcaagygattctcctgcctcagcctcctgagtagctgagactacaggcgcctgccaccacgcctggctaatttttttgtatttttagtagaaacggggtttcacca

SEQ ID NO: 292167 - DNA, 201 bp, Homo sapiens
agtacttgatatcaactactgtaatcttttttttttttttttttttttttgagatggaatcttgctctgtcgcccaggctggactgcagtgctgcgatctyggctcgctggaacctccgcctctcaggttcaagtgattctcctgcctcagcctcctgagtagctgagactacaggcgcctgccaccacgcctggctaatt

SEQ ID NO: 292168 - DNA, 201 bp, Homo sapiens
atcacatggagatgagtttttatcctcaccttcttgcttcttcagtgaacaagtagtaacaagcagctcctgcgtgtgcctcgatctgagccggcataccwttgctgccgagactgtataaagtgcaaattgaaaagcacaggagactaacatctgtatcagtgaacacattttctttcctttctcacagggttttggaaa

SEQ ID NO: 292169 - DNA, 201 bp, Homo sapiens
agcctccaaaataaacaatagtcacccttgacctgctaaacagtcatcacatggagatgagtttttatcctcaccttcttgcttcttcagtgaacaagtartaacaagcagctcctgcgtgtgcctcgatctgagccggcataccattgctgccgagactgtataaagtgcaaattgaaaagcacaggagactaacatctg

SEQ ID NO: 292170 - DNA, 201 bp, Homo sapiens
ttacaggcctcttacttactaccttaaaaatgctagcgtggtgccagggtaggcagataggagtgcagcctataaagatgggaatgtttgctgttcttcttatgcaagcggttcactggctttttactgagcttgtccgctgagattgaaggctccatcatcttctacctctagccactgacaaaggcaagtaggcaaaca

SEQ ID NO: 292171 - DNA, 201 bp, Homo sapiens
agtagcattcacactcctatgagaatctaatgccactgctgatctgacaggaggtggagctcaggcagtaatgctcacttgcccgctgctcacctcctgcwgtgcgacccagttccttacaggggctgcagaccagggggttaggggtctctgtttttgtttttttggagatcaagtctcactctgtcgcccaggctgaag

SEQ ID NO: 292172 - DNA, 201 bp, Homo sapiens
cttacaggcctcttacttactaccttaaaaatgctagcgtggtgccagggtaggcagataggagtgcagcctataaagatgggaatgtttgctgttcttcttatgcaagcggttcactggctttttactgagcttgtccgctgagattgaaggctccatcatcttctacctctagccactgacaaaggcaagtaggcaaac

SEQ ID NO: 292173 - DNA, 201 bp, Homo sapiens
tgtggcacaaatagaagagtcaggggttggcagctcctattcccactgtacgatgccaaggatctttacctataggataagccttcagaaacataatttgktctttcaagtgctgaatacctctgtgagtatacttttttccatcttttttcttttggtaaatgaaactcactgagaaatttgacttctgataatgggaaa

SEQ ID NO: 292174 - DNA, 201 bp, Homo sapiens
gactgcaggcacaatccactacacccagccaattgttcaatttttttctggagatgaggtctcactacgttgcccaggctggtcttaaactcctgagctcmagtgatcgcctgcctcagcctcccaaaatgctgggattacaggcatgaaccactgcgcccatccaaaaggatttaattttatggtcaaattctacattgt

SEQ ID NO: 292175 - DNA, 201 bp, Homo sapiens
tgtccaacggatgtcctgtattaccgcgtttccgtcaaaaatttaaaataccccacggtgcctctgagtttgctgcaatgcctcacggcacctcattgcayattagaatcacagatgtgcggcttttcttggtattttttatgtgttttcaaattttatatattaatagatattaactgactgcattgttctctaatgagg

SEQ ID NO: 292176 - DNA, 201 bp, Homo sapiens
agtgaaaaacctcacatgagtagtatttgcagtgtccaacggatgtcctgtattaccgcgtttccgtcaaaaatttaaaataccccacggtgcctctgagyttgctgcaatgcctcacggcacctcattgcacattagaatcacagatgtgcggcttttcttggtattttttatgtgttttcaaattttatatattaatag

SEQ ID NO: 292177 - DNA, 201 bp, Homo sapiens
aaaaaaaaaaaagaaagaaagaaaagaaaagagagaagagaagaaatcagatattagagacacagttgaagttcccgtggaccctcctgatcccgttcttytttctgcttctctcctgatttgagtgattatcgtttccgggtgtgtgtttctactttgaccacacacatatatgtacactagagatctgtagcggaggtt

SEQ ID NO: 292178 - DNA, 201 bp, Homo sapiens
tttagtaaatttattcataattaaatcaaggttgagaagtgctggcttattagagactctggctgaaggtcatgtgcgaactcaggaaactgctaatcacrggtcgtgtttttcagcccctgtcttcaggaaggcttaactctaagggagggttgttttgtgtcatctccagagctctcatttctcctgtgtggcttggtg

SEQ ID NO: 292179 - DNA, 201 bp, Homo sapiens
tgatcctgcagctctaagctgtaattctcccagaccttgccctgtttacattatttaaaaacactgatctcagcctgggctccacttttgttattatgatrcttccaggttttttgtctttagtaaatttattcataattaaatcaaggttgagaagtgctggcttattagagactctggctgaaggtcatgtgcgaactc

SEQ ID NO: 292180 - DNA, 201 bp, Homo sapiens
atctatatatggaatgaagagatatagaagtatatcaaatgattatttttgtttgcctggaggtaatggaatcatggtgattttcacttcacactttgtgwtttggcattctcaaatttttacaattactgtgtattacttttgtagtagttttttttataaaaggaaaaaatgacttgaaaaatcaagtaatttgacatg

SEQ ID NO: 292181 - DNA, 201 bp, Homo sapiens
tggtcacagcacctctggagccaagtgttgtcccataagggccacaaggcttcaagaggacggagcctaccccttggtcactgaggggtggccctggtctrcaaggctacagaactgccttgccaccctgtggcactgcctctcatttcatagctggcacatgtcattttgccacccccatcacatgtcatgctggcatca

SEQ ID NO: 292182 - DNA, 201 bp, Homo sapiens
cctattagggatctctaaaagccgcaagcctcttgctagccatagctgtgaatgttgtcttaaccattaatgcttcagtataaataatatcaatttaaaarctgcctaagatttaaaagtactatgcaaattacaaactgcttgggtatctagatcaaaataaagcagagcaaagaagtaactttaggaatgaaagggtat

SEQ ID NO: 292183 - DNA, 201 bp, Homo sapiens
aattgctaaatacagttctgggctagtgggcagtggttcaaaacccatcgtttgaccctgcttgaacaatcaaaaacagatccagtgtcctaagataaaascactatacaaagcaaacattccctctcagtggctcctcggtaatgacccagcaagtattgtctgtttcccgtgcctctcactatagccatcagggaccac

SEQ ID NO: 292184 - DNA, 201 bp, Homo sapiens
ggccccacagcctttgcttttaccaccgtgctttgccacctctgaatgttcactttcattccatagcagcatcatacagccctgtgcataacaggaagtgyacgtttgttaaatgagaaactagtaacacttctggtagctgaatgacttaactactggtaaacctgtctgcatggccactaggctttttatggtgaacac

SEQ ID NO: 292185 - DNA, 201 bp, Homo sapiens
aatcgtacttgtgccgagatcgctcacaatgtttcctccaagaaccgcaaagccatcgtggaaagagctgcccaactggccatcacagtcaccaaccccartgccaggctgtgcagcgaagaaaatgagtagacagctcgtgtgcacattttctgtttaaataaatgtaaaaacagccatctggcatcttcctttaaaaaa

SEQ ID NO: 292186 - DNA, 201 bp, Homo sapiens
caaaaggatttaattttatggtcaaattctacattgtctattgactttaatatttttataaaattctttaaataaaatgtctttacctggaataccttcartgtacttactggattagaggcaggtaggtcctgtttgtatggctagtatgttcattaaatatgaaagtaatggaaagatgtttatgacataaggagagag

SEQ ID NO: 292187 - DNA, 201 bp, Homo sapiens
aacaccagaggagaaagctattcttaaactactcaaacatggtttttttttctatttttcagactcctgaaacagactactctttgcctttttgctgcagytggagaagaaactgaatttgaaaaatgtctgttatgcaatgctggagacatggtgaaataggccaaagatttcttcttcgttcaagatgaattctgttca

SEQ ID NO: 292188 - DNA, 201 bp, Homo sapiens
gagtatttatgtccttacaactaagtggccacctgaaaaaaaaatacatatgaattcgaaggaaaaaataacatcatttcatttttaaattaccaccataygttatgaatgagatgtgtgtccttgtcaggcaccagacaacttctgaccctttgtaaccagttgacacccgcacctcatttcctgttccacgttgatttt

SEQ ID NO: 292189 - DNA, 201 bp, Homo sapiens
atacactaaacaggaaagtatgcaaagtaatgttacaaacacccatgttcccaccactctgtttcatcaaaatcttaacatgtcgctgtgtgtcctttagwttttttgtttttttaaagagatacgtttagctgggcatggtggcgcatgcctatagtcctagctacttgggagtctgaggcaggaggatcaattatgccc

SEQ ID NO: 292190 - DNA, 201 bp, Homo sapiens
agagagtaagtgacagaggacgtgacctgagggctcctcctcgccaaagcttgtgggtgatcaggcggctattgtgctcagtgtttttctcaatgctcttkacctggttgccaccctctcccattaaaaaataattttagctgggcgcagtggctcactcctgtaatcctagcactttgggaggccgaggtgggtggatca

SEQ ID NO: 292191 - DNA, 201 bp, Homo sapiens
tttttggatgattttatttatagttgttataaaatacacgtaacatgaaagttaccatcttcaccatttttgagtgtacgttcattagtgaagtacacctycattgttgtgcaaccaagctgcagaaccgaagtcccatgcccattaaatattcctcattctccagcccctggcagtgcccttctactttctgtctcaatg

SEQ ID NO: 292192 - DNA, 201 bp, Homo sapiens
gggcgtggtggcgcatgcctgtagtcccagctactcaagaggctgaggcaggagaatcacttgagcctgggaggtggaggttgcagtgagccaagattgcrccattgcactccagcctgggcgacagagcaagactccatctcaaaaaaaaaaaaaaaaaaaaaaaaaccagctggggcaacacagtgagaccttatctct

SEQ ID NO: 292193 - DNA, 201 bp, Homo sapiens
ggggatgcactgggttcagtaacattgaaccccatctccttcggcttattcacttccaaatctggactgcaacccttggcgttcagaatgaggacaacagrccttatgaggaagagaagcagactcaagaatattagaaaacagtaactgctttttgctatctttaaggaaacatcagattcactttgttccagtatttca

SEQ ID NO: 292194 - DNA, 201 bp, Homo sapiens
ctgtaggaaaagtgctagtgtgaggtaggaccgaaggataccttctttgccttcactcaaagttgagcagagatttggttgccaggtattgtttttcctgytcttaatgtcctgctgctgatgagcaaggcctttctgtgttgctgctatgcagttatttcaagcaggaagtcattcctaactattaccacagtaagtgga

SEQ ID NO: 292195 - DNA, 201 bp, Homo sapiens
aggtgtgaggtgataaggggctggtggtggtaagaatcagaagttggaggccaggcgtggtggctcacgcctgtaatcccagcactttgggaggccgaggygggcggatcatgaggtcaggagatcgagaccatcctggctaacagggtgaaaccccatctctactaaaaatacaaaaaattagcctggcgtggtggcggg

SEQ ID NO: 292196 - DNA, 201 bp, Homo sapiens
cagtttcttcagaaaactactcagaacccagaaatccagagaactgctactgtctgtgcctgtcattcagctagtagccacatgctgcctcaccatattgkatcttctcaattttgtgactctgccctgactggtgcttcttgtgggcataacccaaaacagcagacctcagtttgctggttacctaaggaaaaagcaaga

SEQ ID NO: 292197 - DNA, 201 bp, Homo sapiens
agctggaatctgaagaatgaatacattttagatatggaaggcagtccaagggcaggtgggagcagtatagtatatgcatgctcaggcagggctagagtttracctcaccacctcaccagtcatatcagagtagctgtccagacaaggtgtgggacacaatttcttatcagaccaacaacctgcaaagcagtcctcagtcct

SEQ ID NO: 292198 - DNA, 201 bp, Homo sapiens
  misc_feature (1)...(201): n = A,T,C or G
gctggattgcggctgtgggccgcgcgaactgacactcggctgggccgggcaggagagtctcggatgtcgaaccggtgggcagcgatggcccggctgccctngggcaggggccgaggttaggaggcccggcctaaggcaaggccaggccaggcccggggccaccgaacctgactgatggccccggggctccagcatctgcct

SEQ ID NO: 292199 - DNA, 201 bp, Homo sapiens
ccaccaacatttagcgagcttattatggctgggcattgttttaaacagattataagcatgatcttcacaacaatgtcatgagttaattactgttatctccwttttattttattttattttattttatttgtgagacagagtcttgctctgtcgcccaggctgaagtgcagtggcgccatctcggctcactgcagtctctac

SEQ ID NO: 292200 - DNA, 201 bp, Homo sapiens; identical to SEQ ID NO: 60225

SEQ ID NO: 292201 - DNA, 201 bp, Homo sapiens; identical to SEQ ID NO: 60226

SEQ ID NO: 292202 - DNA, 201 bp, Homo sapiens
aactggggatgagaattcctgtggctgcaagaagagatggctaactagaggggagcaggttggagggaaaaggggtaaggctctggaggaacttcttcccktgtggcctcttccccctaaaacaattgacagtttactgaatctccctttccccttctccctcccctaccactgctgtacataccaccatcccattactgg

SEQ ID NO: 292203 - DNA, 201 bp, Homo sapiens
ctacaatggtgagcaccctggagtggcagggattgggcttagattgcctagcagcaccagctgtgtgcctaattctagggaggtgggaggggcaaattggrggtatgatcaggaggttagagaggaaggcttgtatgcctcatagcaggggagactgtcattgctagaagagaggaacataaagtctatacacttgattag

SEQ ID NO: 292204 - DNA, 201 bp, Homo sapiens
ggtcgagattccggaggccaagccgatgggcggaggggaggacagcagattggagagcgagggaatggggcagggggagaggccgaacgaaagggtcgggrcgccgcggcctgtctgacggcccagggctgacgggagcgaaccgacaaccggggtctcgggtgccaaactgactaagcgaccgagcgaccgtgcgacccg

SEQ ID NO: 292205 - DNA, 201 bp, Homo sapiens
ttccctatctccttcctctaagagctacacccagaccagctggttatcagcggaggccccgctgctcctcatgagaacgctggtggaagacgaaggtgatrgcagtggaggcagcatcccaggcagcctggagtacctcatcccggagcccccacttatcagtgcagtggttccaccctgccaggtctgaagtgcagtcag

SEQ ID NO: 292206 - DNA, 201 bp, Homo sapiens
cagctggaatcttctttccccaccatatccagaaaactgcctggagcagttggagatgggatttccacggggagcccagccagccccactgctgtgctccrttctgaaggcctcgggttctctgcagcagctgtccctggatagtgccacctttgcctctccccaggattttgggcttgttttgcaaacactcaaaggtag

SEQ ID NO: 292207 - DNA, 201 bp, Homo sapiens
ggcgcctgtaatcccagctactcagtgactggagatcgtgccactgcactactgcactttaacctgggcaacagagtgagactccatctcaaaaaaaaaaraaaagttttctcctcctctgtttattcagagttcctcagagctttcccactttatgcacgcttcttggacaatttcatccattcctgtggtttcaaaggc

SEQ ID NO: 292208 - DNA, 201 bp, Homo sapiens
tttccattcgtgtggattacagaacagaatacaggtaaagtgtttagttagtaccatgcctaccacattaaacgggttcactaaatagtagcagccattaygtatatagtgccacaggagcacagagttgagagagacaagcagcctggagtcactgaggaaggctttgcataggaggtgacatctgaggaacttgcctgt

SEQ ID NO: 292209 - DNA, 201 bp, Homo sapiens
tccctcccctgccccctgctatagagactggtgagtcaccaaaccagatccctgaaggttggccattccttttttttttttttttttttttttgagacatrgtcttgctctgtgacccaggctggagtgcagtggcgcgatctcggctcactgcagcctctgcctcccaggttcaagtgattcttgtgcctcagcctccca

SEQ ID NO: 292210 - DNA, 201 bp, Homo sapiens
tcatgtccagtgagtgggcattcctcatcccctcctgccttcccaggatgctcactcaggaggaggagtgattgaggtgatgacacagggaacccatccckctctgagctaactttctaactcctaaagtaggaacttgctatggttttacgatttatcagccaagaaggtcttcttttaggcagctgcctctgttgcctc

SEQ ID NO: 292211 - DNA, 201 bp, Homo sapiens
ggttatgtgaaggacaagtatttgagctgggcttgctggagctcctaaacatagattcaggtgacggaatgattattggtttgtaggtcctctgggctctygagcattgggcctgaaaagggctggggtccgccgggccctccatgaccccctggaaaaagatgccttggttctgtatgagcctcccccgctgagcgctca

SEQ ID NO: 292212 - DNA, 201 bp, Homo sapiens
gtataaatagcagagggattgacgtcatcgtcatctcaatcttaaagattaggagacaaactcagggaagtgcgtagtgacttgcccaggttctcctagcragtacatagtaagctggaatgtgaatgcaggtgtgagattccaagtcgtggctctttttcctatccctctctgccttggatgcttggtgcaggaagaagc

SEQ ID NO: 292213 - DNA, 201 bp, Homo sapiens
tgaacccgggaggtggagcttgcagtgagccaagattgtgccactgcgctccagcctggtgacagagcgagactctgtctaaaaaaaaaaaagaattcacmcaaaaaatgaaaatggaaaaactgcaaactgcaataccggatttctgtcccctatttttctactcacagtgatatacttaggtactcttttttttttttt

SEQ ID NO: 292214 - DNA, 201 bp, Homo sapiens
atagccaattccagatgcctcttttgtatgttcaataaacttttagtgagtacttactatgtgccaggcattgaacaagattagtaaaatctttatcctcmgggtagtcactagaagctaatatagcctcagttttcctggtgggaaaagataagcaaaagagccagttggattggaccttttgactctgcttggaaaaaa

SEQ ID NO: 292215 - DNA, 201 bp, Homo sapiens
tgcaggatccttgcaggcactgtttctgttctccctttacagaggaggagcttggctcccagccagctggccaagagaaaacctgaaggcaggtcctgtgrtgatgaagactggcaacctggcctagtggtgagcactcaaggggacagggaaggtgggtagagctgtttggacagaaaagaagccaggatttggtttcta

SEQ ID NO: 292216 - DNA, 201 bp, Homo sapiens
atgctactaacactgtttagttgctgtcaataagaaattgtattttaaaaaatccattgtccagaagatatgaacaggtttgtttatggttgttataaaaytgaagtgctgaaacttgttcactgaaacattttgacttgtattaatgctttacatccctacatttatattaagaattcacacaaaaggccgggcacgttg

SEQ ID NO: 292217 - DNA, 201 bp, Homo sapiens
tggacagcagtcagcatgtaagccagaactgcaacctgcatgtgtatgtctgtgcccagtcactcagcctaggtagactcctgtccctgtacactccctcagtgctttctagagtggccagaagacacacatctgtaggggctttggacctgcccacagctgctggggcctgcttagagaggtgtgcctgacttgtgcctg

SEQ ID NO: 292218 - DNA, 201 bp, Homo sapiens
gagggtgctcccttgcccatgtctgagcacgctgttttctttgctgtgttttctcagggagaaactccctgtccatgtggttgttgaccctattctcagtraggttttgcggcctcatcagagagaggtaaatgagggtgaggggaacgaggtatgggctatgggctgagcctgggagactaccatccctgggacagcagc

SEQ ID NO: 292219 - DNA, 201 bp, Homo sapiens
tgtatgataagaatgctactaacactgtttagttgctgtcaataagaaattgtattttaaaaaatccattgtccagaagatatgaacaggtttgtttatgrttgttataaaattgaagtgctgaaacttgttcactgaaacattttgacttgtattaatgctttacatccctacatttatattaagaattcacacaaaagg

SEQ ID NO: 292220 - DNA, 201 bp, Homo sapiens
ccagtatttgggcttctctaggaggagggtgggagatttttttttgtgctagggctgtcctgtttcaaggcaggatatcaagagtaagaagcctgggccaytgggacagccagtaggggactgctggttgctgctcttcccaggtaagatgctggtcctggattatattctggcggtgacccgaagccgtagcagtgacaa

SEQ ID NO: 292221 - DNA, 201 bp, Homo sapiens
cactaagctttatgaggaatgttttgaaggaaaagtaggaatacataatggagattagtcatttgtgcattcagcaaacatttaaaaacggttttgtggcygggtcgggtggttcacgcctgtaatcacagcactttggaaggctgagatgggtggatcaactgaggttaggagtttgagaccagcctggccaacatggtg

SEQ ID NO: 292222 - DNA, 201 bp, Homo sapiens
  misc_feature (1)...(201): n = A,T,C or G
catcccctcctgccttcccaggatgctcactcaggaggaggagtgattgaggtgatgacacagggaacccatccctctctgagctaactttctaactcctnaagtaggaacttgctatggttttacgatttatcagccaagaaggtcttcttttaggcagctgcctctgttgcctccggatcagcaggacacagcttcctg

SEQ ID NO: 292223 - DNA, 201 bp, Homo sapiens
  misc_feature (1)...(201): n = A,T,C or G
ggtattttggtgtgatttctttttaggattgacatatgttttcagagagtagatgattggggaaggagactgcctggggaagagcctgtggtcatgtccantgagtgggcattcctcatcccctcctgccttcccaggatgctcactcaggaggaggagtgattgaggtgatgacacagggaacccatccctctctgagct

SEQ ID NO: 292224 - DNA, 201 bp, Homo sapiens
ctcccaaactgctggaattatgggcatgagcccctatgcctggcttccatctttttctgtttggatatctggttcaccctacatcatatattgaaaaaacygttctttcccccattgctttgcagtgctaccttcttcataaatcaaatgttcatatatgtgttgctctatttatggactctattctgttcctctggtccg

SEQ ID NO: 292225 - DNA, 201 bp, Homo sapiens
aaaaaaaaagaattcacacaaaaaatgaaaatggaaaaactgcaaactgcaataccggatttctgtcccctatttttctactcacagtgatatacttaggkactctttttttttttttttttttttgagacagagtcttgtgttctcacccaggctggagtgctgcagtggtgctgtcttggctcacctgcttacttatct

SEQ ID NO: 292226 - DNA, 201 bp, Homo sapiens
aataaggattctcttgcagggacacaggctcaagaactctgagaatcagacttaccaagccctggacagcttgaacaccagccggcgggtgctcatctccrgaactcccatccagaatgatctgcttgagtatttcagcttggtacattttgttaattccggcatcctaggtaagaatctagccttgtttgccacatcaga

SEQ ID NO: 292227 - DNA, 201 bp, Homo sapiens
taggcgggcggatcacaaggtcaggagatcggagattgagaccatcctggctaacatggtgaaactccatctctagtaaaaagtacaaaaaattagctgggtgtggtggcgggcgcctgtagtcctagctactcgagaggctgaggaatggcatgaacccgggaggtggagcttgcagtgagccaagattgtgccactgcg

SEQ ID NO: 292228 - DNA, 201 bp, Homo sapiens
caagctgatggtaccgagcatgagactgtgaggtacgggccccatcacatggtgctaacataatctgcgaaggcctgggatgagtcccatgagtcgctaamcacatggcaggtagcccggagccgccggatggcttccctggctgtgactgcatcctggtccagccagttttggaagaggcgcaggtgaccaaaggctcca

SEQ ID NO: 292229 - DNA, 201 bp, Homo sapiens
cactgtaacctcctggcccagggttcccaggatactgagtaaggggcccaaagactataaacccagctgtgagaatgcctgtttgctgggcctcatcaagrcctccaggacctcagtgcaagggaagaaggaaaaaagagaaaaaaggtgacagaaagagaaagatagaactggtggttggggttctgggcagcccatgct

SEQ ID NO: 292230 - DNA, 201 bp, Homo sapiens
gacttcttgtttcttgtttctggaactaagggaatatggccgtagttacttcctggccttttccagtatgtgtgaatggcaatagagaggctagtacttargaagcagtgagggtggctgggagcttcctactatagagaatttcccaggacttcccagtgggcttggcgaccctgaggctatagtcattgtttgcaactt

SEQ ID NO: 292231 - DNA, 201 bp, Homo sapiens; identical to SEQ ID NO: 60239

SEQ ID NO: 292232 - DNA, 201 bp, Homo sapiens; identical to SEQ ID NO: 60234

SEQ ID NO: 292233 - DNA, 201 bp, Homo sapiens
cttgagtatttcagcttggtacattttgttaattccggcatcctaggtaagaatctagccttgtttgccacatcagagaggagccctgccttgtctttggsagtataactccagctgaggagagaaagaagagaatgctagttatatgtgggtcactaggcattcttgtaggaaggcttctcttgtcagggagtagcaaag

SEQ ID NO: 292234 - DNA, 201 bp, Homo sapiens
ctacctttgagtgtttgcaaaacaagcccaaaatcctggggagaggcaaaggtggcactatccagggacagctgctgcagagaacccgaggccttcagaayggagcacagcagtggggctggctgggctccccgtggaaatcccatctccaactgctccaggcagttttctggatatggtggggaaagaagattccagctg

SEQ ID NO: 292235 - DNA, 201 bp, Homo sapiens
catatagagatgcccaaactgagtttggaggcattctcagagagagagggtcatatgggagctcgggaaaggttatgtgaaggacaagtatttgagctggkcttgctggagctcctaaacatagattcaggtgacggaatgattattggtttgtaggtcctctgggctctcgagcattgggcctgaaaagggctggggtcc

SEQ ID NO: 292236 - DNA, 201 bp, Homo sapiens
caactatagtcttttttttttttttttgacacagggtctcgctttgtcacccaggctggaatgcagtggtgagatcatggctcactgcagccttaacttcygggctctagtgatcctcctgcctcagcctcctgagtagctgggacaacaggcacacaccatcatgcctggctaatttttgtattttgggtagaggtgggg

SEQ ID NO: 292237 - DNA, 201 bp, Homo sapiens
ttgggtaatttcctctgactttcaagtctcatttccctcttcagttcagaagtctaaggctttttttagggctagtacttggagcctctaataattttttwtttcttaattaaatttctaggccaaatgcggtggcttacacctgtaatcccaggactttgaaaggctgagatgggcggatcacttgaggtcaggatttca

SEQ ID NO: 292238 - DNA, 201 bp, Homo sapiens; identical to SEQ ID NO: 60240

SEQ ID NO: 292239 - DNA, 201 bp, Homo sapiens
ccttatggttttggatgtaccatttgtttcttatttgtgtaactgtaagttcacatgaacctcatgggtttggcttaggctggtagcttctatgtaattcrcaatgattccatctaaataaaagttctatgatctgcaaacctgcccgtcttttttttttaattgagaatttttttttttaatttgatattttcttttagt

SEQ ID NO: 292240 - DNA, 201 bp, Homo sapiens
ttcccagagaaagagtgctgctataattattgactgcttgctattccaagtgctttatatgcactaattaatttttttttttttttgagatggaatctcgytctgtcgcccaggctggagtgcagtggcgtggtctcggctcgctgcaacctccgcctcctgggttcaagcgattctcctgcctcagcctcccaggtagct

SEQ ID NO: 292241 - DNA, 201 bp, Homo sapiens
ggtggcttcactgaatggcatggtagaggatgaaacatgtattaggactttttttggagacggggtctcactcttgtcacccagactggggtgcagtggtrcagtcatagctcactgcagcctcaaacccctgggctcaagggatcctcccacctcggccttctgagtagccatgaccacagacgtgcgccaccatgcccg

SEQ ID NO: 292242 - DNA, 201 bp, Homo sapiens
gggtttcaccttattggccaggctggtctcgaactcctgacctcatgacccacctgcctcggcctcccaaagtgctgggattacaggcgtaagccaccacraccagctggtgctatacacttttaaacaacttgatatgagatttgggcagggatgcagatccaaaccacgtaaggttttaaaatggttaacagaaaaatg

SEQ ID NO: 292243 - DNA, 201 bp, Homo sapiens
acttttatttgatatacttagtctactaggggttctgggagttcagcaagccaaaaagcagtgactaaccatccttagttaagctctgaccaaacaagggwttttaggtttagcagttttcatattcctaattcaagttcacagtctagaaaaaaatgggttttcctcctaacttggtttgggatgtaaggactaaatttt

SEQ ID NO: 292244 - DNA, 201 bp, Homo sapiens
aggcagatgctggagccccggggccatcagtcaggttcggtggccccgggcctggcctggccttgccttaggccgggcctcctaacctcggcccctgcccyagggcagccgggccatcgctgcccaccggttcgacatccgagactctcctgcccggcccagccgagtgtcagttcgcgcggcccacagccgcaatccagc

SEQ ID NO: 292245 - DNA, 201 bp, Homo sapiens
caagtgctgcttgcctatgtgagaaggggagtggtgagaagaggggcagtactgtttcaggtcttgaaggaccttgtaagccatgacattaaagctgccarttgattacctccttttctttcccccatctaggtggcccacaaactctttaacaacttgaaataaatgtgtggacttaattcaccccagtcttcatcatct

SEQ ID NO: 292246 - DNA, 201 bp, Homo sapiens
ggaagagggagctctttcccagagaaagagtgctgctataattattgactgcttgctattccaagtgctttatatgcactaattaatttttttttttttttgagatggaatctcgctctgtcgcccaggctggagtgcagtggcgtggtctcggctcgctgcaacctccgcctcctgggttcaagcgattctcctgcctca

SEQ ID NO: 292247 - DNA, 201 bp, Homo sapiens
tgaattaacatccctactgttgattttccccctcccactgtgtggtcattctaaaaatatttacatatatttgtcagccaagcactggtttaggatctggkagtaagatagacatggttcattccttcactgagtttatgagccagcataggaaacagaagtagaacaagtgctaaactttggtaagtctctcaggtatac

SEQ ID NO: 292248 - DNA, 201 bp, Homo sapiens
ccatagatgcaaagatttttttaaaatgtgctttgtatatacaatgggatattattcagccttaaaagagaagggggccggggcacggtggctcatgcctrtaatcccaacactttgggaggccaaggcaggcggatcacaaggtcaggagattgagactatcctggctaacacggtaaaaccctgtctcaaaatacaaaa

SEQ ID NO: 292249 - DNA, 201 bp, Homo sapiens
tagaaacaacccaattttccatccatagatgcaaagatttttttaaaatgtgctttgtatatacaatgggatattattcagccttaaaagagaagggggcyggggcacggtggctcatgcctgtaatcccaacactttgggaggccaaggcaggcggatcacaaggtcaggagattgagactatcctggctaacacggtaa

SEQ ID NO: 292250 - DNA, 201 bp, Homo sapiens
ccattttgttttttttctgtttctacatcaggatcccctaacaacagtgagagagcaatgcgagcagttggagaaatgtgtaaaggcccgggagcggctasagctctgtgatgagcgtgtatcctctcgatcacatacagaagaggattgcacggaggagctctttgacttcttgcatgcgagggaccattgcgtaagtca

SEQ ID NO: 292251 - DNA, 201 bp, Homo sapiens
ccggggaagcggagcttgcagtgagccgagattgcgccactgcagtccgcagtctggcctgggcgacagagcgagactccatctcaaaaaaaaaaaaaaawaataataataataatcttgcctaatccttactacttccactggagataggtatcattatcccatttcacagatagaaactgaggctcagagaaaaaaaca

SEQ ID NO: 292252 - DNA, 201 bp, Homo sapiens
agtgtctatcgtcagtaattacatcagtatgatcaggaataaatatgtcataaaattgctgctgacattaattttgttttccttttgtaggaggaagaggragaggaggaattagtggtaagaactgtctcaggtttggaaacatctcagtaaaagcagggtttgagcttcatgaaattctaagggcattttaaggagttt

SEQ ID NO: 292253 - DNA, 201 bp, Homo sapiens
tggctgatggcttgagcaggcttgctaacaagggctgcagaaagagactaagccaggatccctggtctcccttaactcatgctggactgttccctttggtytttgtaccgcacgtttccacctttaaagagaggtcagggttccactaggcaatgttgaaatccttttccgatctgattcttggagcaaagcttactttag

SEQ ID NO: 292254 - DNA, 201 bp, Homo sapiens
tgccccaggtgtaccgccagctcagcaagcctgtcacctttgtggatggccggtctctacctgcaggtgggatgggtggatttgggggtggaaaaggagtycctgcatgctcctctggcaccctctgtgcctttagtcaaatctttgcacttttggggaagagctcaggctttgcgttcagagagccctgggtctaaatcc

SEQ ID NO: 292255 - DNA, 201 bp, Homo sapiens
gtctgctttctcgccaaatcctgttgcttcccattccaagaatgttctggttgtgttgctggcagggatgatctgggcaaaatgacttatctgaccatgtscatcaaggagagcttccgcctctacccacctgtgccccaggtgtaccgccagctcagcaagcctgtcacctttgtggatggccggtctctacctgcaggt

SEQ ID NO: 292256 - DNA, 201 bp, Homo sapiens
atgccttccctaacccagggaagatgacatcaaactgtcagatgcagacctccgggctgaagtggacacattcatgtttgaaggccatgacaccaccaccrgtggtatctcctggtttctctactgcatagccctgtaccctgagcaccagcatcgttgtagagaggaggtccgcgagatcctaggggaccaggacttctt

SEQ ID NO: 292257 - DNA, 201 bp, Homo sapiens
tttcccctgtttcttggctcaagactgaactcctaaacacttaaggattgaccctgacctctctgcagtgtgatctctgggagtctctcaagaggctcctycacccttgctggctgcctgttcccctcaggcctttgcttgtggtcagacaacctgcctttctctctgggctcctgagcagcctccaagagggggctaggc

SEQ ID NO: 292258 - DNA, 201 bp, Homo sapiens
cccactgagcttcgggtcaactggctgatggcttgagcaggcttgctaacaagggctgcagaaagagactaagccaggatccctggtctcccttaactcaygctggactgttccctttggtctttgtaccgcacgtttccacctttaaagagaggtcagggttccactaggcaatgttgaaatccttttccgatctgattc

SEQ ID NO: 292259 - DNA, 201 bp, Homo sapiens
ttcttttggcttaggattgacttggcaatgtgggctcttttttggttccatatgaactttaaagtagttttttccaattctgtgaaaaaaagtcattggtrgcttgatggggatggcattgaatctataaattaccttgggcagtatggccattttcatgatattgattcttcctatccatgagcatggaatgttcttcca

SEQ ID NO: 292260 - DNA, 201 bp, Homo sapiens
ttcttaccaggctcccggggtaatcaaggcaggtgcctggcaggtgcttctagttctctagctttatttaaaagtttggccatcgcttgggctcatgcacrtgttttttatttatcttagttttctttatttcttaaataaatctaaagagctaggagaaagctgggcacagggaggcagtggcaagctggctgcgacctc

SEQ ID NO: 292261 - DNA, 201 bp, Homo sapiens
cagctgcaatagtgggaccaggtgctgggagctgtcctccttcttaccaggctcccggggtaatcaaggcaggtgcctggcaggtgcttctagttctctarctttatttaaaagtttggccatcgcttgggctcatgcacatgttttttatttatcttagttttctttatttcttaaataaatctaaagagctaggagaaa

SEQ ID NO: 292262 - DNA, 201 bp, Homo sapiens
ttaggctcttgagaagcagagaggaaagtggtgacgtatgcttgctcttcccaatccctccagtggtttatttctggtgaggtcaacaaggagtgccaatrtgagggtgggaggtggggctggggagctgggatcagtgaattattttcataccctgctctcttcctgtttccttccttctggagaaaaaacaagccgtcc

SEQ ID NO: 292263 - DNA, 201 bp, Homo sapiens
ctggtaattttggggtgtggggagagggcccatagtagggagacagctgagactagggcaccaaagggcacctaagggtgtccatcctgaaggagagcagwcctagggggttctagcccccaattcccaatccctgcaggacttccctgggcagtgggagcctgtgtggtcccagagggagacccatggggaaggctatgg

SEQ ID NO: 292264 - DNA, 201 bp, Homo sapiens
tgcttgacctgattgtctcctcctgcagaccctaaggcccctgatgtgtatgacttcttcctccagtggattggtgagtgagcacctgccttccctgccckgccaacctcagacccgtggtgctgggtgactaggatcctggcctgtcccactcaattggttatcccagatggcctagttctcgggtgcccatcctaagct

SEQ ID NO: 292265 - DNA, 201 bp, Homo sapiens
gagatgaataacacagcacatgtgttaccaatctttgggcctagagaagggcccctctcggcgtggggagtcagggaaggtccagggaggtgatgctgagrcacattctcaaagatctggaggtagaaacctgtggcaggaagtgcagaagaaaaggcagaaggtgctatctgtgcaaaaaggcacacaggctggaaaaag

SEQ ID NO: 292266 - DNA, 201 bp, Homo sapiens
aagtctgcggagctgaggttcccaccctactcataaatgagcctcctctaggaaccccgggtccctgcttgacctgattgtctcctcctgcagaccctaargcccctgatgtgtatgacttcttcctccagtggattggtgagtgagcacctgccttccctgccctgccaacctcagacccgtggtgctgggtgactagga

SEQ ID NO: 292267 - DNA, 201 bp, Homo sapiens
tcttcctccagtggattggtgagtgagcacctgccttccctgccctgccaacctcagacccgtggtgctgggtgactaggatcctggcctgtcccactcarttggttatcccagatggcctagttctcgggtgcccatcctaagctcagctgctcagtggagagacaagggaggagcaggagagcccccagctgtggggcc

SEQ ID NO: 292268 - DNA, 201 bp, Homo sapiens
aggcccagcacaggctcaggcctcaacaggaattttatgggactgtaacctaacctctctattccttaggctcctcttccctaaaatgggaccacttagarttgttgtgaggattcaatcaggtcaaaatgtaaggtgcttagaacaaggtctagcacacagcaagtgcttaataaagattagtcattaccatgcctcccc

SEQ ID NO: 292269 - DNA, 201 bp, Homo sapiens
ccatgctcccaaggtttgtttcataagcccaggtcaaccaatctatcagccagttattcatccaaaaacagttattgacttttgttggctgctaagagcaytgaatgtcatcactctggatgctccattgcacgatgactctttgtgctgcttgctacaggaactgcattgggcagcagtttgccatgagtgagatgaagg

SEQ ID NO: 292270 - DNA, 201 bp, Homo sapiens
atcctgttgcttcccattccaagaatgttctggttgtgttgctggcagggatgatctgggcaaaatgacttatctgaccatgtgcatcaaggagagcttcygcctctacccacctgtgccccaggtgtaccgccagctcagcaagcctgtcacctttgtggatggccggtctctacctgcaggtgggatgggtggatttgg

SEQ ID NO: 292271 - DNA, 201 bp, Homo sapiens
tcaaactgtcagatgcagacctccgggctgaagtggacacattcatgtttgaaggccatgacaccaccaccagtggtatctcctggtttctctactgcatrgccctgtaccctgagcaccagcatcgttgtagagaggaggtccgcgagatcctaggggaccaggacttcttccagtggtgagtctgagggtgggcccggt

SEQ ID NO: 292272 - DNA, 201 bp, Homo sapiens
ttgccatttcacttctgattggcttggctgattggagacactagtaggagatgggagatggcagatgaaagagtttaggacatttttgctctgttcttccrctgttccagcatcacttctctcgcactagctgtgttccccataaatacaacccccaccaagctacaggatcatgattttcttcccttcttcctttagtcc

SEQ ID NO: 292273 - DNA, 201 bp, Homo sapiens
tccaggagacagtgcatgagagacagggagtcaactgggctcagcgccagggagggtgctggattccttagcaagatcagcataggagaggtggggccatyacaaggaattggaaacagtgggcacagctctttagagaagttagattatgaagggatgagcaaataaggtgttagctggaggaggaagctgaacaaaggg

SEQ ID NO: 292274 - DNA, 201 bp, Homo sapiens
taagactggattgtaaacaggaggaatgaatttctatgtctcaattttaaaatgtgggcatctgagacccaggaagaggaggctcagtggcgggcagcacytgtcagtgtctgggtatgggatcctcgagtactggatttggagaattccgtggcagagtctcctcccatgacctgctacatctggttctttttgctctgg

SEQ ID NO: 292275 - DNA, 201 bp, Homo sapiens
aaatatggaatatggtatcactgatgtgtcttctgctcctcctgagatgggtctctgtggcacccctgccattgtcagtgtctgtgtctcacagtcacgtrgtgctccaggcattcagggttcagctggggaaggtggccaagtggcattagaagggggtttcctggaggaaaggaacccctctcccccacttgaatcagc

SEQ ID NO: 292276 - DNA, 201 bp, Homo sapiens
atgtcttcctctggcaggtggtattctatgtgcccagtgagcagaactaacagtcagggctggacaaggtcacaagtcatttggccagagcatttagggasggctttgtggaggaggaggcatccaggctgagctttgaaggaatataggaatctgggggaaggtcctaatccaccctctgaaaaggagctttcactccct

SEQ ID NO: 292277 - DNA, 201 bp, Homo sapiens
gggtgagtacattgttgcccacccctacctgaggactggtcccagagaggtcttcaaccatcctcccaggacagcagaaggagctcttaagcatttcccctctttcctcagcaaatataacctgttcctcgtcccatgaaacatattagcaggggttcagaggtgggcaggtgtagggtgtgtgtgcctgagctgtggagt

SEQ ID NO: 292278 - DNA, 201 bp, Homo sapiens
agatccacttgaaagggactgacctataactccagggtctaggacctggagtatgaagcctccattaccatttctgttggtcatatgtgagaatccccccmccacggggtatccagacacatgccaggtgctatcaggggtgcagaacggaagagaaagagaagccatgctgctcgtggggagttttatggagacaaattc

SEQ ID NO: 292279 - DNA, 201 bp, Homo sapiens
ccctgacctctctgcagtgtgatctctgggagtctctcaagaggctccttcacccttgctggctgcctgttcccctcaggcctttgcttgtggtcagacamcctgcctttctctctgggctcctgagcagcctccaagagggggctaggcacacagcaggggtacagaaaatgctgagccagagggggaactttagatcca

SEQ ID NO: 292280 - DNA, 201 bp, Homo sapiens
ttcctgaaggaggtggcactagagttgatccaaaaggagatttaaataggtagtgctggccagggcaagggcctaaggaaatggtgtggtggtaggaccayggctggtcaccagaggctgtgaggctgtcggggtggctacaaggcagagcccagcttggagatgatgctgggcagggaggacaggccagccttgactgcc

SEQ ID NO: 292281 - DNA, 201 bp, Homo sapiens
tgctacaggaactgcattgggcagcagtttgccatgagtgagatgaaggtggtcacagccatgtgcttgctccgctttgagttctctctggacccctcacrgctgcccatcaagatgccccagcttgtcctgcgctccaagaatggctttcacctccacctgaagccactgggccctgggtctgggaagtagctctgatga

SEQ ID NO: 292282 - DNA, 201 bp, Homo sapiens
agagaggatggggatctcaggagagggtggggcttcctgagaacaaagggctcagggcatgatatggggaggaagcctgggcctgtgtactaagtctgcgsagctgaggttcccaccctactcataaatgagcctcctctaggaaccccgggtccctgcttgacctgattgtctcctcctgcagaccctaaggcccctgat

SEQ ID NO: 292283 - DNA, 201 bp, Homo sapiens; identical to SEQ ID NO: 60263

SEQ ID NO: 292284 - DNA, 201 bp, Homo sapiens
agtcagggaaggtccagggaggtgatgctgaggcacattctcaaagatctggaggtagaaacctgtggcaggaagtgcagaagaaaaggcagaaggtgctmtctgtgcaaaaaggcacacaggctggaaaaagcagtgtgtttaggaaattaaattgtcttttggggtctaggacatacctgtgttagtacctcagcgctt

SEQ ID NO: 292285 - DNA, 201 bp, Homo sapiens; identical to SEQ ID NO: 60265

SEQ ID NO: 292286 - DNA, 201 bp, Homo sapiens
tgtacatgtgtaatggtttatttgtctttgaaagggaggatggaggatgaagtcatgtttgtcaccagcatgggaggaagtcacctctctgctccctgggrtattttgcattcgatcccctctttccaggctctccatggctctgttcaacctcacagctgaatccccaatgagtttttgtacattgagtctgcttttccc

SEQ ID NO: 292287 - DNA, 201 bp, Homo sapiens
agtttcctactgtattggggatctagaccagaggtttctaattagacacagggcagggaattggaatcaactgggaggagcaaattcctggacctccagtycctggagattctaatttgtcagattggaactaggagtttacatttataaacctgtccaagtgttagtgttttgatctgcagccagcttggggaatccagg

SEQ ID NO: 292288 - DNA, 201 bp, Homo sapiens
ttcaagctcatcccaggtgactgtcccaccatggggcagctcctggaagacaccatgatctttcccaacccagcgcgtttgtgctttctgttttctcaccyggaatgcttttcctttatgcttcacatggccagagactcaccatccttcaagtttcaccttaaatgttgtctccaacaagaagccttccaagattaccct

SEQ ID NO: 292289 - DNA, 201 bp, Homo sapiens
tattggggatctagaccagaggtttctaattagacacagggcagggaattggaatcaactgggaggagcaaattcctggacctccagtccctggagattcyaatttgtcagattggaactaggagtttacatttataaacctgtccaagtgttagtgttttgatctgcagccagcttggggaatccaggtagagatgccag

SEQ ID NO: 292290 - DNA, 201 bp, Homo sapiens
ttctccatagaatgaaagggcagaacttgtctgtctcattcccctgagatgtctagaacagagccctgcacatgtaggccctcaataaaaatgtgttgaaygatacggcaggggtggaattgaggccatttctctattgcacaatgagcaaatattacctatctttataattaaagagctttaatgtggagaagaaagcac

SEQ ID NO: 292291 - DNA, 201 bp, Homo sapiens
tctttataattaaagagctttaatgtggagaagaaagcactttctggctgcagtgcagtagagagttggtggcaggtgctaaatggaagcaggttggctastttggggatgttgagctaaccccggtgtgagaagagggcggcttggaattagagcagtggttgtggggctggagaggggactaagcccagggatgtttag

SEQ ID NO: 292292 - DNA, 201 bp, Homo sapiens
ggagagtaggtggtgctctgcagtaaggagaatagctgagccccaaggcctgttctgcctgcaacagcagtgccaaagccctgctctactgacatgtgccscaggctgccactgagtcggtgctgaatctctaagtgtcctggcagcccgatccttgtctccaccaggagacccagccctctttcctcccaggccaaaggg

SEQ ID NO: 292293 - DNA, 201 bp, Homo sapiens
ctaatttgtcagattggaactaggagtttacatttataaacctgtccaagtgttagtgttttgatctgcagccagcttggggaatccaggtagagatgccrgagacttttctttctttccctctctttttcctttcctttccctttccctttctttctttctttttttcttctttctttctttctctttctttctttctct

SEQ ID NO: 292294 - DNA, 201 bp, Homo sapiens
ggccaaagggtctctgtgagaacttaataaggctcctagcatagcaggtttgaggactgcctatatttgagagtatggggaaaggctttcacatctaaaamgtgtctcctcattttctgtctaccacagctgcccagaattatgtcaatacaactcatctctaagagggatgtcagaggtcagggttagagtcttagggct

SEQ ID NO: 292295 - DNA, 201 bp, Homo sapiens
accagtagtgaatgttggagggtagggagagtatccacagaggagaaagcatgagggagaagaaaagcaaagggaccaggagggcttgggagaggctttgmtaagtacacaagagggccaagggaaggttgaggtctgacgctaaaagggtacaagaggtatttagagagaactttctccctttcttcttgttccctctcc

SEQ ID NO: 292296 - DNA, 201 bp, Homo sapiens
tggccgccgcttcctgcgggcctgccaggtggcccatgaccatacaggtgggcctttcccacaaggctcacctctaggaagcctgggttcctcctcctggyccctctatgccccctcccattataggaccccagttcccctttggacaaaagatggcttcccaggcagtgacactctgtgcttttggttcagaccaggtca

SEQ ID NO: 292297 - DNA, 201 bp, Homo sapiens
aggcctggggttcaaagagcttacggtctgaagggaaaacagacaccagagccttgctcccgagctgggcgaggttcctccccaggattctgccttagccscattattttgatctcagcacctgtcctgttggattgaagtcttctgtttacctattcaacttctgcactagactttggctcctggaggatggagatctga

SEQ ID NO: 292298 - DNA, 201 bp, Homo sapiens
tgggcctttcccacaaggctcacctctaggaagcctgggttcctcctcctggcccctctatgccccctcccattataggaccccagttcccctttggacaraagatggcttcccaggcagtgacactctgtgcttttggttcagaccaggtcatcagggagcggaaggcagccctgcaggatgagaaggtgcggaagaaga

SEQ ID NO: 292299 - DNA, 201 bp, Homo sapiens
agcttgcggggagacaggacctgctcatggtggggtaaacacctggctttagcaaggaggcttaagggcagggagaagaagagcaggatgctctgtggttsgggctagattcctggaatggagtttctctggctctgctcctgggccagtgtctaagccaatccctcctcctaccctctgcttagcagggacagcagctac

SEQ ID NO: 292300 - DNA, 201 bp, Homo sapiens
ctgagaagagatagggtcctgccccagggagccttagcttgcggggagacaggacctgctcatggtggggtaaacacctggctttagcaaggaggcttaarggcagggagaagaagagcaggatgctctgtggttggggctagattcctggaatggagtttctctggctctgctcctgggccagtgtctaagccaatccct

SEQ ID NO: 292301 - DNA, 201 bp, Homo sapiens
tcagagtgaggcaagttccttctcctaccttctgaactcactttcctcattctcagtctggatgggggcactgcttctcttccttgattgacactagaaawgagcttgacctctaggcttattcttgccctgacagataaccctgtaacatgcatcctgaagacatccaggaaaggaaagtgtgggtcagagagatgaatc

SEQ ID NO: 292302 - DNA, 201 bp, Homo sapiens
ggaacagtgctgtatggcccgaccctgaggtaccctttccctgggctgggagatcagacagggtgggggactgggagggtcaccctctgccagaacctggmgagtgtttaagcaaggcctgtcccttcaggtctttgactctctgcgcttttccactgagaatgcatccaaacgccatccctttgcctttatgcccttctc

SEQ ID NO: 292303 - DNA, 201 bp, Homo sapiens
agacaccttctcctcattctgaggcccaaagtttggaccaggttctgctaaaagctcagcaatgacagaaaggcaatggcagaaatccaaaacctctggayagtacatagaagtaggcaatccattgaaagctcaatcagcgtccgtgttgttgtgtgtagtgtaaagatttccatttgtaaggcaggaaatgagagtgag

SEQ ID NO: 292304 - DNA, 201 bp, Homo sapiens
ctcacaaatgtctatcaggtgctgtacccagtgccgggattacaggaactgggcatcatgatgatcaaagtactgtgatgagtcggatgtggtcatgaackctctgtcactggcagtggtcaggcaggagctggcaccccagttaaggggtcactaggggactctgaccttatgtggaggtaggcctggctacccaggact

SEQ ID NO: 292305 - DNA, 201 bp, Homo sapiens
ttctcccctttattcatctcacaaatgtctatcaggtgctgtacccagtgccgggattacaggaactgggcatcatgatgatcaaagtactgtgatgagtyggatgtggtcatgaacgctctgtcactggcagtggtcaggcaggagctggcaccccagttaaggggtcactaggggactctgaccttatgtggaggtagg

SEQ ID NO: 292306 - DNA, 201 bp, Homo sapiens
gcaccctctgtgcctttagtcaaatctttgcacttttggggaagagctcaggctttgcgttcagagagccctgggtctaaatcccagccccacaacatatygatcaattcttctacctctgagcctccatttccccttctgtaaaatggggatgagaagagtatctatgtttctaggctgctgtcaggattaaagagaatg

SEQ ID NO: 292307 - DNA, 201 bp, Homo sapiens
cgggtgagtacattgttgcccacccctacctgaggactggtcccagagaggtcttcaaccatcctcccaggacagcagaaggagctcttaagcatttcccctctttcctcagcaaatataacctgttcctcgtcccatgaaacatattagcaggggttcagaggtgggcaggtgtagggtgtgtgtgcctgagctgtggag

SEQ ID NO: 292308 - DNA, 201 bp, Homo sapiens
ggggtgcagtggcgcaattttggctcactgcaacctctgcctcccagattcaagcaattctcgtgcctcagcctcccaagtagctgggaccacaggcacgygccaccatgcctagctaatttttgcatttttgtagagatggggtttcactatgttgggcaggctggtctcaaactcctgacctcaagtgatccacctgcc

SEQ ID NO: 292309 - DNA, 201 bp, Homo sapiens
ttctttctttctttttctttccttccttccttccttccttccttccttccttccttccttccttccttccttccttctttctttctttccttccttctctytctctcttttctttctttctttctttttttgatggggagttttgctctctctcccaggctggggtgcagtggcgcaattttggctcactgcaacctctgc

SEQ ID NO: 292310 - DNA, 201 bp, Homo sapiens
ccttctcctcattctgaggcccaaagtttggaccaggttctgctaaaagctcagcaatgacagaaaggcaatggcagaaatccaaaacctctggatagtayatagaagtaggcaatccattgaaagctcaatcagcgtccgtgttgttgtgtgtagtgtaaagatttccatttgtaaggcaggaaatgagagtgagcatga

SEQ ID NO: 292311 - DNA, 201 bp, Homo sapiens
  misc_feature (1)...(201): n = A,T,C or G
ggctgaagtggacacattcatgtttgaaggccatgacaccaccaccagtggtatctcctggtttctctactgcatagccctgtaccctgagcaccagcatngttgtagagaggaggtccgcgagatcctaggggaccaggacttcttccagtggtgagtctgagggtgggcccggtttatcctgctcagcccttgggaagg

SEQ ID NO: 292312 - DNA, 201 bp, Homo sapiens
aggagagccataagactggattgtaaacaggaggaatgaatttctatgtctcaattttaaaatgtgggcatctgagacccaggaagaggaggctcagtggygggcagcacctgtcagtgtctgggtatgggatcctcgagtactggatttggagaattccgtggcagagtctcctcccatgacctgctacatctggttctt

SEQ ID NO: 292313 - DNA, 201 bp, Homo sapiens
tgtctcaattttaaaatgtgggcatctgagacccaggaagaggaggctcagtggcgggcagcacctgtcagtgtctgggtatgggatcctcgagtactggwtttggagaattccgtggcagagtctcctcccatgacctgctacatctggttctttttgctctggtttgctgatttcaatgtaaaaatcacttggtgggcc

SEQ ID NO: 292314 - DNA, 201 bp, Homo sapiens
tttaattatactttaagttctagggtacatgtacacaacatgcaggtttgttacatatgtatgcatgtgccatgttggtgtgcagcacccattaacttgtsatttacattaggtatttctcctaatgttatccctcctcccttcccccacctcatgacaggccccagtgtgtgatgttccccaccctgtgtccaagtgttc

SEQ ID NO: 292315 - DNA, 201 bp, Homo sapiens
gccatgccctttgctgtgagagtgcccttgaccttgtgctgtgtagtgaagacagggctgtggctcattttcattcagtaaacattgattacaggccttcrctgtgcccagttagctaagccactttacctctctgtgcttctgtttccctgtcaacaaagtggagataatcatttttaccttactgggttagaaggggat

SEQ ID NO: 292316 - DNA, 201 bp, Homo sapiens
tggagggcagcttggggcatccagcccaactaacccctgcatcgcctcctacacattgcctcctatccctggactccaggacaagtgggaagagaaagctygggagggtaagtcctttgacatcttctgcgatgtgggtcacatggcgctgaacacactcatgaagtgcacctttggaagaggagacaccggcctgggcca

SEQ ID NO: 292317 - DNA, 201 bp, Homo sapiens
cagcaggatggagggcaggacagggactgggagtgtgtgaagggggcttggtggtggaggataggctacgggtcctggagggcagcttggggcatccagcscaactaacccctgcatcgcctcctacacattgcctcctatccctggactccaggacaagtgggaagagaaagctcgggagggtaagtcctttgacatctt

SEQ ID NO: 292318 - DNA, 201 bp, Homo sapiens
ttcactgagtctacacgtatcatgctggtgagctccctgtgccagagtactggaggctgttgcctgctgggctagcccctctccaccctgattttgtcctrgggagagtaggtggtgctctgcagtaaggagaatagctgagccccaaggcctgttctgcctgcaacagcagtgccaaagccctgctctactgacatgtgc

SEQ ID NO: 292319 - DNA, 201 bp, Homo sapiens
cagatgcactgttaccttccctaagcacaagtctgaacctgtctctccctgctcaagagcctttataggcattgcactgctcttagagagtgccgaatccraacatctacaatagcagggaactccgccctcctcttagagaatgaaatctaaacattttagcaactggcattcaaaagcctgtaacatgtggctctcgcc

SEQ ID NO: 292320 - DNA, 201 bp, Homo sapiens
aacatcttaaccttcatcgtggtccatgtctgccagctctgggattgggacatgtggatgcggatgcctgaacaacgccggggccgagagtgcatcatccstgacgtttcccgatcctaccactttggcatcgtcggcctcaacatgaatggctactttcacgtgagtgggaggcagggagcagggcacagtgtggcatga

SEQ ID NO: 292321 - DNA, 201 bp, Homo sapiens
aataaagagagctaacctggttccctagtcttttcagggcattggtagcagccaccgagaggggaaagggttggccagagcttagaaggatcagaatcccmctggctgggcattcaggccttcttgcctgtacacaccagtctacctgtctgtactggaagtaaatttgacttacagggtaatctcaagcgtccgttccag

SEQ ID NO: 292322 - DNA, 201 bp, Homo sapiens
tgtttatttccaagtgctgtttctagttctctgaatgtttacctttttacaccttcttgtttttgttcatggctacagtattatcttttatctctttaagkatatgcttaatgatttttataagttcgtatctctctgtattatctccatttcattcaagttgctttttcttttcctttttttttttctttttgagacaga

SEQ ID NO: 292323 - DNA, 201 bp, Homo sapiens
cccatgggacctgagggcctgcccactcccctgacccatttctccctcctcttcagtctgaagaaagaagcttatgaagtggaagttcacaggctgctcargtatggcctaggacaattggggtgtagcagggagcaaagagtcaaatactggggatcttggccccataatttacagggtcctgtgcaaaatgaaaatcag

SEQ ID NO: 292324 - DNA, 201 bp, Homo sapiens
tagttttttccttcccagcccagcccgtccctttgcccaccacctcctgcagggcctgtttctgacatctgtggctctagaacagcaggcccagggagaaytacaagaggcagggactgctagttcatgggtctgtggtgcagtagtgtgagctgccgtgacagcatgagctctccagcaatggtggaggccaaattaaag

SEQ ID NO: 292325 - DNA, 201 bp, Homo sapiens
cagggaagtccttaggtaccgccaacccacctggctgcattcagaggaccattccccagttacagcaagggaggccttgagccagcccagcccaaaggaaygaatagcgtccagcttggaacctcctagaagccagaggtccctcagaggctgactaatacgcgagccccattcctctcccagagaggggcaggcgcttcc

SEQ ID NO: 292326 - DNA, 201 bp, Homo sapiens; identical to SEQ ID NO: 60282

SEQ ID NO: 292327 - DNA, 201 bp, Homo sapiens
ctgctgttgaaggtacagtggatgaatggagacagtggggatttgggggaaggaggtactccaggaaggaggtgctcctgagacccagctccagcaattcyagcatctctgtgtgactagatttatccttgtccctccctgaactctttgaccctgcctctctcagtttcctgagccaatccatccacctactggaggagg

SEQ ID NO: 292328 - DNA, 201 bp, Homo sapiens
ttaactctgggagcatgagttcgtccctcccggccctacactagggactcgtccccttggcccatggattcagcactcaccagctccatcttcagcgccakgatcttgtcccccaagtcgtggccggtgctagacgcccctgggagcagcagggcgccagaggttcccagctcacactcgcctcgcagcccgcggagcagc

SEQ ID NO: 292329 - DNA, 201 bp, Homo sapiens
tggcaggtgttggggctgctgttgaaggtacagtggatgaatggagacagtggggatttgggggaaggaggtactccaggaaggaggtgctcctgagaccyagctccagcaattctagcatctctgtgtgactagatttatccttgtccctccctgaactctttgaccctgcctctctcagtttcctgagccaatccatcc

SEQ ID NO: 292330 - DNA, 201 bp, Homo sapiens
ctaataggcaataaaattactcagtgtttactttattaggatttggaaatgctcttcacagctaagccatgtagtttactatagttactttttatttcttacaacattttatccttagaattattattattattatattgcctagtttgctatgtagttatcagcaagtcaacctcaaacactccctcaattctctgaatt

SEQ ID NO: 292331 - DNA, 201 bp, Homo sapiens
taataggcaataaaattactcagtgtttactttattaggatttggaaatgctcttcacagctaagccatgtagtttactatagttactttttatttcttacaacattttatccttagaattattattattattatattgcctagtttgctatgtagttatcagcaagtcaacctcaaacactccctcaattctctgaattt

SEQ ID NO: 292332 - DNA, 201 bp, Homo sapiens
aataggcaataaaattactcagtgtttactttattaggatttggaaatgctcttcacagctaagccatgtagtttactatagttactttttatttcttacaacattttatccttagaattattattattattatattgcctagtttgctatgtagttatcagcaagtcaacctcaaacactccctcaattctctgaatttc

SEQ ID NO: 292333 - DNA, 201 bp, Homo sapiens
ttagtacagacagggtttcaccatgttagccaggatggtttcaatctcctgaccttgtgatccacctgccttggcctctcaaagtgctgggattacaggcrtgagccacagcacccagtcacatctatttctatacttgctctagtttctgaaatatttcaacttgatcaactcctctttttttttttttttttttttgag

SEQ ID NO: 292334 - DNA, 201 bp, Homo sapiens
tgtgactagatttatccttgtccctccctgaactctttgaccctgcctctctcagtttcctgagccaatccatccacctactggaggaggatgacagcctrtactgcatctctgcctggaatgaccaggtaggctggaatgaccagggtttagcaggcgagtttatgaggcctcagctaatacctcccactatggcaccct

SEQ ID NO: 292335 - DNA, 201 bp, Homo sapiens
agtattatcttttatctctttaaggatatgcttaatgatttttataagttcgtatctctctgtattatctccatttcattcaagttgctttttcttttcctttttttttttctttttgagacagaatgtcattctgtcacccaggctggagtgcagtggcacgatctcggctcactgcaacctctacctcccaggttcaag

SEQ ID NO: 292336 - DNA, 201 bp, Homo sapiens
atcgcgccactgcactccagcctggatgacatagcaagactccgtctcaaaaaaaaaaaaaaaaatttacatggttgtttatgttatacatggtctgacaytgaccaaaacgtcattatgtgtgtatgtgtatttacatatacaggtcagatcccgcaggtcacacaaacacagtaaatgttttttgtatttgaaaaatgt

SEQ ID NO: 292337 - DNA, 201 bp, Homo sapiens; identical to SEQ ID NO: 60272

SEQ ID NO: 292338 - DNA, 201 bp, Homo sapiens
cataccatctgacaagtataatactgtaaatcaataaatggtaggctatttggctctacatattactatggtcgacttatttactagttgtgatattactgtgtgtgtgtgtgtgtgtgtgtgtgtgtgtgtgtgtgtgatgtgtgcaggttttcatccagtttttggctcataagccccatagccattgttacagtgttt

SEQ ID NO: 292339 - DNA, 201 bp, Homo sapiens
ataccatctgacaagtataatactgtaaatcaataaatggtaggctatttggctctacatattactatggtcgacttatttactagttgtgatattactgtgtgtgtgtgtgtgtgtgtgtgtgtgtgtgtgtgtgtgatgtgtgcaggttttcatccagtttttggctcataagccccatagccattgttacagtgtttg

SEQ ID NO: 292340 - DNA, 201 bp, Homo sapiens
ccacacctacgtggcctttattcgaatggagaaagatgatgacttcaccacctggacccagcttgccaaggtgctccaataccatgcccaccctggagaamccctccccctcacacacatactgccccaagatccagggagcctttgctctggaatcttcaacctcagaacctcctctttatactcttagaacacctcttc

SEQ ID NO: 292341 - DNA, 201 bp, Homo sapiens
taccatctgacaagtataatactgtaaatcaataaatggtaggctatttggctctacatattactatggtcgacttatttactagttgtgatattactgtgtgtgtgtgtgtgtgtgtgtgtgtgtgtgtgtgtgtgatgtgtgcaggttttcatccagtttttggctcataagccccatagccattgttacagtgtttgt

SEQ ID NO: 292342 - DNA, 201 bp, Homo sapiens
ttcagattcctgaagtcatgggctggccaggacattggtgacccgccaatccggtatggacgactggaagcccagccccctcatcaagccctttggggctyggaagaagcggagctggtaccttacctggaagtataaactgacaaaccagcgggccctgcggagattctgtcaggtatagagatgtcccaaaccctcccc

SEQ ID NO: 292343 - DNA, 201 bp, Homo sapiens
ttttaagtaacatcattttccttggtactttttgatccatggaagggttttaagttagagatagacaaaacatttgtcttttttttttgagacagagtccrgctctgttgcccaggctggagtgcagtggcaccatcttggctcattgcaacttctgcctcccaggttcaagccattctcctgcctcagcctcctgagtaa

SEQ ID NO: 292344 - DNA, 201 bp, Homo sapiens
gaggccgaggtgggtggatcatgaggtcaggagatcgagaccatcctggctaacacggtgaaaccctgtctctactaaaaatacaaaaaattagccgggcrtggtggcaggcgcctgtagtcccagctacttgggaggctgaggcaggagactccagcctgggcgacagagcaagactccatctcaaaaaaaaaaaaaaaa

SEQ ID NO: 292345 - DNA, 201 bp, Homo sapiens
ggaggaactcttgaggtgggcagaaaggcaatagattctagacgcattcacctctgtgggtaagcatagggactctgggcccagctgtaaacacaggggarcctgagttgaggggtgatgaagtgaccctaacctatccctgggctccccaggatgctgcgctctctgctttcagcccagggggtgtctcctcagatgata

SEQ ID NO: 292346 - DNA, 201 bp, Homo sapiens
tgagggcctgcccactcccctgacccatttctccctcctcttcagtctgaagaaagaagcttatgaagtggaagttcacaggctgctcaggtatggcctargacaattggggtgtagcagggagcaaagagtcaaatactggggatcttggccccataatttacagggtcctgtgcaaaatgaaaatcagggccctcatct

SEQ ID NO: 292347 - DNA, 201 bp, Homo sapiens
agtacaacatggagcagcagtgattgccagggacgggcaagggagaccgcccaggcaagggctgtgaaatgtgaaggccttggattgcagaggtgggcagrgggaaagtgacctcacatggtgagcagtggccatgtcccccaggaacccatggatgtggtggcactgtttggtctgaggggcatccagcatactcccatc

SEQ ID NO: 292348 - DNA, 201 bp, Homo sapiens
gcataccatctgacaagtataatactgtaaatcaataaatggtaggctatttggctctacatattactatggtcgacttatttactagttgtgatattactgtgtgtgtgtgtgtgtgtgtgtgtgtgtgtgtgtgtgtgatgtgtgcaggttttcatccagtttttggctcataagccccatagccattgttacagtgtt

SEQ ID NO: 292349 - DNA, 201 bp, Homo sapiens
gcctgtaatcccaacactctaggggactgaggtgggaggatcgcttgatcccaggagttcaagaccagcctgggcaacacagggaaaccctgtctctaccaaaaaaaaaaaaaaaaaattaggtgagtgtggtattgcacacctgtagtgccagctacttaggaggctgaactgggaggattgattgagccagagaagtac

SEQ ID NO: 292350 - DNA, 201 bp, Homo sapiens
ggcagggagatgggaaaaagcccccaaactggtgtctgggcccccatggccctcattcctgcctcctgccaggtcctgtcttcggggagaaacattctaartcacctgccctctcttcctggggggacccagtcctgctgaagacagatgtgccattgagctcagcagaaggtggagttagtggagcatggatggggcagg

SEQ ID NO: 292351 - DNA, 201 bp, Homo sapiens
tcccatcagcatcaagaatgcccgcgtgtctcaggtactgcataggcaagtggggatggggcagacacctggctctgccttctaccctaaagctcatgtgycctattcccaccccactcccagcactacaaggccagcctcactgccactttcaacctgtttccggtgagtactaaggatacaactcttgggcctgggagg

SEQ ID NO: 292352 - DNA, 201 bp, Homo sapiens
ggctctttacaggtctaggacttcatttgtgtgtcttatagatgtctggctggtcagcaagtgggtgtgggccagacaatgtgaggtgctgattttcactytcatacccactccaggaggcctacttcaagaagcacaagttcaacacggttccaggtgtccagctcaggaatgtggacaggttggggctggcagcagggc

SEQ ID NO: 292353 - DNA, 201 bp, Homo sapiens
cccactccaggaggcctacttcaagaagcacaagttcaacacggttccaggtgtccagctcaggaatgtggacaggttggggctggcagcagggcaagggrtggatatctaggagatttggaggccagtccctgaaagtcccttccaatgctgggcctgtgtgtttactccagccctgcggctacagattcccatgtgacc

SEQ ID NO: 292354 - DNA, 201 bp, Homo sapiens
catggtgagcagtggccatgtcccccaggaacccatggatgtggtggcactgtttggtctgaggggcatccagcatactcccatcagcatcaagaatgccygcgtgtctcaggtactgcataggcaagtggggatggggcagacacctggctctgccttctaccctaaagctcatgtgccctattcccaccccactcccag

SEQ ID NO: 292355 - DNA, 201 bp, Homo sapiens
atcacttgaggtcagaagttcaagaccagcctggccaacatggtgaaaccccgtctctactaaaaatataaaaattagctgggtgtggtggcgcacgaccrtagtcccagctactcaggaggctgaggcaggagaatcgcttgaacccagaaggcggaggttgcagcgagccgagatggtgccactgcactccagcctggg

SEQ ID NO: 292356 - DNA, 201 bp, Homo sapiens
gttgatcctggacactcggcgagccatcagtgaagccaatgaagacccagagccagagcaagactatggtagggctaggctaaggatggggtagggggccktggatctcacagctggagtggcaggcagaccctaagcggtgagactctgctgaggagactatctccatgacctgttgtaccccacagatgaggccctagg

SEQ ID NO: 292357 - DNA, 201 bp, Homo sapiens
aaaaagaggataaaatactactacctcactgggttacgatattttgaggtttaaatgagtcaatatatgtaaagtgctttgaattataaacatatataagrgtcagctggtattgtttttatttttactatttttagcactagactgtgggtgtctggggagagtatttctgcctctaagtactggtccagccctgcaatc

SEQ ID NO: 292358 - DNA, 201 bp, Homo sapiens
tctcccagggggcctttcctgactgctccacccaccagactctcttcccagcctctcagctcaggcgtcggagccctggctggtctcagagcccccatgayttccttccccttctccttcacagaccagcttggcacaggctgggcacacaggaagactttagctgacgtactcactgtgggctcctggttgtgagccagg

SEQ ID NO: 292359 - DNA, 201 bp, Homo sapiens
gggagagtatttctgcctctaagtactggtccagccctgcaatctctgccctttcctgttttggcaagtgctggagcctatgcttcagcctgaggagaacrgggaagtccttaggtaccgccaacccacctggctgcattcagaggaccattccccagttacagcaagggaggccttgagccagcccagcccaaaggaatg

SEQ ID NO: 292360 - DNA, 201 bp, Homo sapiens
aatactgtaaatcaataaatggtaggctatttggctctacatattactatggtcgacttatttactagttgtgatattactgtgtgtgtgtgtgtgtgtgkgtgtgtgtgtgtgtgtgtgatgtgtgcaggttttcatccagtttttggctcataagccccatagccattgttacagtgtttgttataatgctggggcact

SEQ ID NO: 292361 - DNA, 201 bp, Homo sapiens
gcccagaacagggaagatcctctatcccttccctgtctactccagtctgcacctaccctcacctgagaagtcttccctaggtggggatcccagtttgaagsgggaataaggcaagagctaaacgctatttctcccacagctcccagacaacaaggtcctcaatgtgcctgtggctgtcattgcagggaaccgacccaatta

SEQ ID NO: 292362 - DNA, 201 bp, Homo sapiens
tggtaggctatttggctctacatattactatggtcgacttatttactagttgtgatattactgtgtgtgtgtgtgtgtgtgtgtgtgtgtgtgtgtgtgtgatgtgtgcaggttttcatccagtttttggctcataagccccatagccattgttacagtgtttgttataatgctggggcactcagaaataggcttcaggaa

SEQ ID NO: 292363 - DNA, 201 bp, Homo sapiens
ggtaggctatttggctctacatattactatggtcgacttatttactagttgtgatattactgtgtgtgtgtgtgtgtgtgtgtgtgtgtgtgtgtgtgtgrtgtgtgcaggttttcatccagtttttggctcataagccccatagccattgttacagtgtttgttataatgctggggcactcagaaataggcttcaggaaa

SEQ ID NO: 292364 - DNA, 201 bp, Homo sapiens
tagagatggggtttcaccatgttggtcaggctggtctcgaactcctgacctcaggtgatccgcccgcctcggcctcccaaaatgctgggattacaggcatragccaccgtgccggccctcaatctggtatcttgaactggaattcccactgactttattcattcttcaagccccagctcaaatgtcacctcctcgaggaag

SEQ ID NO: 292365 - DNA, 201 bp, Homo sapiens
gaactgtgtgaacagaaacataggcaggaggtgatgtttcaagcagctggtgttttaagtacccctaagacagagacaccttgaatgccagagtgaaaagytggactttgtctctgccactgtgtaggtgctggaggatgaggcccgggagcagggccggggcatccatgtcattgtcctcaaccaggccacggtgagttt

SEQ ID NO: 292366 - DNA, 201 bp, Homo sapiens
ggccttggatctcacagctggagtggcaggcagaccctaagcggtgagactctgctgaggagactatctccatgacctgttgtaccccacagatgaggccytaggccgcctggagcccccacggcgcagaggcagtggtccccggcgggtcctggacgtagaggtgtattcaagtcgcagcaaagtatatgtggcagtgga

SEQ ID NO: 292367 - DNA, 201 bp, Homo sapiens
agttgttcattgcccagtcttgtggattttaccctaaatatagttggcttattgcttagttactgactcagaggatccttatacaaatttttcctctgcartagtctaccttgaatatgtaagcttcttcagactcccttaactctggtcttcatctccttaacttattgagatcgtcattttctgtttcgaaattccctt

SEQ ID NO: 292368 - DNA, 201 bp, Homo sapiens
caagattaccatctagaatatgccatggaaaatagcacacacacaataattgaatttaccagagagctgcatacatgtgacataaatgacaagagtataayggtaaggcatctatgagtgaatgcatgcatgaacaaattgtatatttacacttgtgaagcactttaaagaataagagaaacaagtcatatagtctttttt

SEQ ID NO: 292369 - DNA, 201 bp, Homo sapiens
tgtgattgtctagttgagggatgaaggtcacttgtgccaaggtggtgacaccaagttgatgagacacattccattcaggttactttttgaaaggagcaccyacaggcttgttgatcaatggcatctcatggaggcagtgagggatagagcagagtaaaggctcagtgatggtgtgaatggtgttaggggaacatgctgagg

SEQ ID NO: 292370 - DNA, 201 bp, Homo sapiens
aactacagaaaattattgcttattgttgtgaagatggggaagtccaaaatcaaggcaccagcagtttcagtgtcttctgagggcttgctctccacttccargatggcaccttcttgctgtgttctcacaagtagaaggtacaattggaaggttccctcaagtctcttttgtaagggtactaattccattcatgagcatgga

SEQ ID NO: 292371 - DNA, 201 bp, Homo sapiens
actggtgcaatctcggctcactgcaacctcacctctcaggttcaagtgattctcgtgcctcagcctcccgagtagctgggattacaggcgcctgtcaccaygccaggctgatttttgtattttagtagggaccgggtttcaccaggctggccaggctggtctcaaactcctgacctcaggtgatccacctgcctcggcctc

SEQ ID NO: 292372 - DNA, 201 bp, Homo sapiens
atcttttcctttaataatttgtgttacaatgtttatggatgccaaaaattattcctcatttctaagtgtattgtaagttttatctattttttatctactagacaagagatgaaaatactggggcatttactgtggctgaaactgtaactttgtacagaaaaaaagttggtaggaacacttcccctaaaagtaatgatttga

SEQ ID NO: 292373 - DNA, 201 bp, Homo sapiens
aaaccaagaattttcttgggaatgaaaacattttaagaaccaaaaatcactttaattatgtgcttttgttctaggcttaatagataattctggactgaggytattttacacaatggatataaggaaatatgatgctggggtgattgaggctggcctctgggtgagcctcttccataccatccctccagggatgcctgagtt

SEQ ID NO: 292374 - DNA, 201 bp, Homo sapiens
taatctttgacattcttaagtcacccattagtcttccattctatggccttaaaataatgccattttcaactgacatgaaacaatttttttttattttttartttttcttctaccaaccaagtctactccaaccttgtatatctttttcaggtagtacaaaagtttagatgagaaaattgaatagcactagcacatttcttg

SEQ ID NO: 292375 - DNA, 201 bp, Homo sapiens
cttgtatatctttttcaggtagtacaaaagtttagatgagaaaattgaatagcactagcacatttcttggtaattattcattataaaaattagtaaataatttaattaacagcactttattgaaagaatactaagatatttatgttgaattctagatgttgatagcacaatgggattaagaggtgtggtaacattaaatta

SEQ ID NO: 292376 - DNA, 201 bp, Homo sapiens
ttgtatatctttttcaggtagtacaaaagtttagatgagaaaattgaatagcactagcacatttcttggtaattattcattataaaaattagtaaataatttaattaacagcactttattgaaagaatactaagatatttatgttgaattctagatgttgatagcacaatgggattaagaggtgtggtaacattaaattat

SEQ ID NO: 292377 - DNA, 201 bp, Homo sapiens
gtatatctttttcaggtagtacaaaagtttagatgagaaaattgaatagcactagcacatttcttggtaattattcattataaaaattagtaaataatttaattaacagcactttattgaaagaatactaagatatttatgttgaattctagatgttgatagcacaatgggattaagaggtgtggtaacattaaattatga

SEQ ID NO: 292378 - DNA, 201 bp, Homo sapiens
tatatctttttcaggtagtacaaaagtttagatgagaaaattgaatagcactagcacatttcttggtaattattcattataaaaattagtaaataatttaattaacagcactttattgaaagaatactaagatatttatgttgaattctagatgttgatagcacaatgggattaagaggtgtggtaacattaaattatgaa

SEQ ID NO: 292379 - DNA, 201 bp, Homo sapiens
acattatatagttattcttgagaactacaagcaaaaatgagaatggattggattggtccagggccacccagagaattgtcctaaggttttatgtgtgtatrtatatatatatatatatatatatatatatatatatatatatatacacacacacacacacacacacacacacatgtgtgtgtatatatgtatatatgtgta

SEQ ID NO: 292380 - DNA, 201 bp, Homo sapiens
cacataaatattagagagcccccaaagctgccgaatgaacattcatgtcaagctatgtgatagtggcagtaaaggagaagaagaaaggagaaagcagtgattgtttgggcacagtcccatgccatatggaaagaataatttggggaaagcacagagtagatgaattttaggtaggtggaagtagtggtgtggtgagcatga

SEQ ID NO: 292381 - DNA, 201 bp, Homo sapiens
acataaatattagagagcccccaaagctgccgaatgaacattcatgtcaagctatgtgatagtggcagtaaaggagaagaagaaaggagaaagcagtgattgtttgggcacagtcccatgccatatggaaagaataatttggggaaagcacagagtagatgaattttaggtaggtggaagtagtggtgtggtgagcatgac

SEQ ID NO: 292382 - DNA, 201 bp, Homo sapiens
cataaatattagagagcccccaaagctgccgaatgaacattcatgtcaagctatgtgatagtggcagtaaaggagaagaagaaaggagaaagcagtgattgtttgggcacagtcccatgccatatggaaagaataatttggggaaagcacagagtagatgaattttaggtaggtggaagtagtggtgtggtgagcatgact

SEQ ID NO: 292383 - DNA, 201 bp, Homo sapiens
caggaacaggccggaatgagtgctgcaaaaagcaatagagcctgctttgtattcttttccaaaggagtgcctggccctcttttctgtttcctccttaaccstaggtttctgactcccccagtgtgtgactcctttggtaaccactcctgccccctttatcccctgcagaagtgtgggcagctgagcggcctggtcactgtg

SEQ ID NO: 292384 - DNA, 201 bp, Homo sapiens
caaaggagtgcctggccctcttttctgtttcctccttaaccctaggtttctgactcccccagtgtgtgactcctttggtaaccactcctgccccctttatsccctgcagaagtgtgggcagctgagcggcctggtcactgtgctgccttaaatcagatgttcatttgcattgtttgtgcttccattttcagattcaaggaa

SEQ ID NO: 292385 - DNA, 201 bp, Homo sapiens
attttcaaatgctatagattttaggccattgctaggtatgtttatgtaatgcaatgctgattgctcttactttatggggcttcactttaaggtctttgtayaaaataatgcatttaaaactcaacaaagatatatattgattctaattaaaggaaattatgaaaaatgtaaagatctatatatattacctattttcctcat

SEQ ID NO: 292386 - DNA, 201 bp, Homo sapiens
tatttctgtggcattgttacacagatgtttagtaagctcagctagagtctttcaagctttgatctagagacttggtgattttatagaagtttctttcttartactaggcgttgatgtatttctcttatattctgtattctttctcatcttcaataatattagagagctaaaggcctttgagaagacagatcaacaaaaatg

SEQ ID NO: 292387 - DNA, 201 bp, Homo sapiens
tgtgaatatagctaattaaactatgctgtgtgatccagcttgacataatacttggggttatggtgaaggagagaagagaatgaaggctttaaaaaggttayaatgctttgttttctcaaatttttattccatgaccatcaagctcacttgtagtataattttctacccttattttacttttaaaagtcagatccctatacc

SEQ ID NO: 292388 - DNA, 201 bp, Homo sapiens
ataaatattagagagcccccaaagctgccgaatgaacattcatgtcaagctatgtgatagtggcagtaaaggagaagaagaaaggagaaagcagtgattgtttgggcacagtcccatgccatatggaaagaataatttggggaaagcacagagtagatgaattttaggtaggtggaagtagtggtgtggtgagcatgactg

SEQ ID NO: 292389 - DNA, 201 bp, Homo sapiens
acttacataaatatttttctctgagctccctagaagacaggaactttataaatatttagcattattgttgaaccttaggtacaagtaagcaggaaaattawgatactctcaagaagaaatactttagcccatcctagctcatatagggagactgcattggcttataatcgtcccttgggttttcttttttcctcaatcctt

SEQ ID NO: 292390 - DNA, 201 bp, Homo sapiens
actggatttaaaaactggaatttcttggctgcccattcagacacgacccactacataccatttccccccttgcttagatttccctacagaaaagagaaaamctgtggagaaaatggaaaacaaagccataggagaaaagagctgaaaacacttcatgtaaatgtgcatgctgaaagtagagagcaagcaaggattttaaaa

SEQ ID NO: 292391 - DNA, 201 bp, Homo sapiens
tagtaactctggattctgttcttttgaaggtctttaatctttttccaaattttagtagataattaactacctagattcaaaatatgaaatctttctcccctgtcgtatgcagctgctaatgtttatacacatgaagacaagattctagaaaattcaattaaatcagaaaaatttcctgcaaaaattcctgattgattggta

SEQ ID NO: 292392 - DNA, 201 bp, Homo sapiens
gtatgcagcatctgagtctgagctgctctctgcagattcatcaatgctcttagaaactgtggtgtgaaaaattccgcacatgtttattatcgattcctttmttgttgacacactgtgaaacccttatcgcaattttagtaggacttttgactgcttttttaaatcttgaagctacaggagtagaactctaaagacagaagt

SEQ ID NO: 292393 - DNA, 201 bp, Homo sapiens
ttagaaaaacatgtctcagagtttagatggaatttacaaaggaaaattacccatcaatattaaagcataataataacactgttttttattgactacagtaatatatatatatatatatatatataataccattcgtttacatgtatgtatggagagacatttacacactgacaagatatgcagaaatgtaactttttattt

SEQ ID NO: 292394 - DNA, 201 bp, Homo sapiens
tagaaaaacatgtctcagagtttagatggaatttacaaaggaaaattacccatcaatattaaagcataataataacactgttttttattgactacagtaatatatatatatatatatatatataataccattcgtttacatgtatgtatggagagacatttacacactgacaagatatgcagaaatgtaactttttatttc

SEQ ID NO: 292395 - DNA, 201 bp, Homo sapiens
cataaaaaattatctttataactccaagaaattaataaggaacttttaatttacttaaaaagatgatattcaatgtgcctgagtgggttatgtatgttaaragagagagagagagagagagagggagagagaaatgacataaataaattttaaaaatatgaagattaatgtatattcttcagctgagattatttgataatt

SEQ ID NO: 292396 - DNA, 201 bp, Homo sapiens
caaagcacaagagtaatgatgctagctagcaattcagatatgcccgggagaagccatcaagtgcttctgtaagtgaaaaggagaaagctctcaacttcataaaaaaaaaatgataaggttgttaagacctatgctaagaatgaatcttctctctgtgaaattgtgaagaaggaaaaagaaattcatgccaattttgctgtc

SEQ ID NO: 292397 - DNA, 201 bp, Homo sapiens
tttattacccaagaattaatcttactcgatgtgcaagtattccagacattatggaacaacttcagttcattggggttaaggagatctacagaccagtcacrtaagtagtaaatgtattttatgatggggtaacgtatttcagagaaagatgggctttattgtcatactggatccattaccacattatagaaatttttatgc

SEQ ID NO: 292398 - DNA, 201 bp, Homo sapiens
tacatgcttttatggctgtcagaattagctcttctctgacagtatatctctttccttctttcctgaaataatatttcaagacatattttaattgatgcagtttttcccccgatggaaacagcattttggtttgttgtcagcctgcatttgcacagactgccccgtctagttctcattgtttttttatgtgttcaccttctg

SEQ ID NO: 292399 - DNA, 201 bp, Homo sapiens
actgaacaatccgaattcaaactctttttcagttcaagcattcatttaaattgctttagctttttatctcagttgtccctccaagtgtgtttgaatgtaawctgtctgaacatgcattaatgtgggctaatcgggtcttcctcggtgtctcctgtaggctctggaagccgaaaagccaagtggaattcatgtgtttgctgt

SEQ ID NO: 292400 - DNA, 201 bp, Homo sapiens
atagcaagaccccatatctattaaaaaatataaaattaaaaataaaattaatgccaatctgctactaaaaaataaatatcattctttaaaaatcttttatktggtatttcttctagtaatcactgatgagctcatcaacattttgcattaggttatctatgtgtatgaaaatgaataagtgtgagatctattttaggatgc

SEQ ID NO: 292401 - DNA, 201 bp, Homo sapiens
aaaagatgatattcaatgtgcctgagtgggttatgtatgttaagagagagagagagagagagagagggagagagaaatgacataaataaattttaaaaatrtgaagattaatgtatattcttcagctgagattatttgataattatagaaattactgtaacatcttgggatgttatgagtgccagatactttctagtcacc

SEQ ID NO: 292402 - DNA, 201 bp, Homo sapiens
tcctttaatacacacagtagttaataaataacccacggctgccaggccctccttgcctggtctgttttgccatcagaaggtaagctcacgggcctgtcacsattctgggtctgtacaccccacctttgtacaagaatgtgggatcaataacatagtttgatgtcatcaggggaatttccatgtttgtgtcttgcctccact

SEQ ID NO: 292403 - DNA, 201 bp, Homo sapiens
tccagaccaacctgggcaacatagcaagaccccatatctattaaaaaatataaaattaaaaataaaattaatgccaatctgctactaaaaaataaatatcwttctttaaaaatcttttatttggtatttcttctagtaatcactgatgagctcatcaacattttgcattaggttatctatgtgtatgaaaatgaataagtg

SEQ ID NO: 292404 - DNA, 201 bp, Homo sapiens
tattgcttagttactgactcagaggatccttatacaaatttttcctctgcagtagtctaccttgaatatgtaagcttcttcagactcccttaactctggtyttcatctccttaacttattgagatcgtcattttctgtttcgaaattccctttcctgcattctggttcagagaatgcttctaggcagaaagctgggatgaa

SEQ ID NO: 292405 - DNA, 201 bp, Homo sapiens
tggtaaccactcctgccccctttatcccctgcagaagtgtgggcagctgagcggcctggtcactgtgctgccttaaatcagatgttcatttgcattgtttrtgcttccattttcagattcaaggaatgacagcattacctccagatatagaaagaccctataaagcagaacctttggtgtgtggcacgtcttcttcctctt

SEQ ID NO: 292406 - DNA, 201 bp, Homo sapiens
atatgctaatataggtacagaaggtaccttacagttcatgagtaatctattaaaaattcaaacaacaatatatacactaagcatgctgtgttataaactgwcttaaaagtaatgttctgttttgtttgtttttatattcttgaagtgtttggccaaaggacctaattcattcatatttaaaaataaatgactgtaaatcat

SEQ ID NO: 292407 - DNA, 201 bp, Homo sapiens
ttggagtggcaggtgaaggcagagtgtattctatatagggtattttttttctcagtacatttttaaaatttcaacttttattttaggttcaagggatgcaygtttaggtttgttacaatggtatattgtgtgaaactgaggtttagagtatgaatgattccatcacccaggtagtgagccaggcacccaacaggtagtttt

SEQ ID NO: 292408 - DNA, 201 bp, Homo sapiens
ggggttttccaaacagtgttatctcagagtttcctaactgacgcaccatgattatggcataagtgcgatgagatactgttctctgggccctctgagtggcrtgcagggaggtcaaatttaagagcaaaagcccagagattacggcctcaggtctatgaatagcttcatctgcttaccttaaaggggaaacataaaaatgtt

SEQ ID NO: 292409 - DNA, 201 bp, Homo sapiens
atttcttggctgcccattcagacacgacccactacataccatttccccccttgcttagatttccctacagaaaagagaaaaactgtggagaaaatggaaamcaaagccataggagaaaagagctgaaaacacttcatgtaaatgtgcatgctgaaagtagagagcaagcaaggattttaaaatgcggtgcctgaatttgag

SEQ ID NO: 292410 - DNA, 201 bp, Homo sapiens
gccgtgagtagaattctgattcaacatgccataataggcccaccacaaagataaacttggttaaactacagtgttttcaccctgtttgtggttcttcataragattgcataggacttagttaagtactctttagattgattttgaaacatagaaattttcttaaagtaattagtgaatacacatcactatgagataaatta

SEQ ID NO: 292411 - DNA, 201 bp, Homo sapiens
tatgtaagcttcttcagactcccttaactctggtcttcatctccttaacttattgagatcgtcattttctgtttcgaaattccctttcctgcattctggtycagagaatgcttctaggcagaaagctgggatgaacataatattcaaacaccttatttgtttccttccttttggggatcatagttctgtgctattttccaa

SEQ ID NO: 292412 - DNA, 201 bp, Homo sapiens
aacatagaaattttcttaaagtaattagtgaatacacatcactatgagataaattatgactggctgcattctcaatacatttaatgagcaataaataggayttcccgtccatttttattcctaaggaaataaaatcatttttacatgtaaaggatgatcgttttcttacttggctgacatattttaccttccatttccata

SEQ ID NO: 292413 - DNA, 201 bp, Homo sapiens
aataatataaaacttatatttaatgaaagacaacacctgaaaactatcttttcaagcaagttatgtcattcactttttcacttcactttttctgtcacttyttctgtctgctcatgtcattcttgtgatttctttttcctttcttgaatatttggcatgtgatttttggagtggcaggtgaaggcagagtgtattctatat

SEQ ID NO: 292414 - DNA, 201 bp, Homo sapiens
atgggattgtttttttcttgtaaatttgtttaagttccttgtaagttctggatattagatctttgttggatgggtagattacaaaaattttctcccattcwgtaggttgtctctttgatctgatgatagtttcttttgctgtgcagaagttctttagtttaattagatcccatttgtcaattttggcatttgttgcaattg

SEQ ID NO: 292415 - DNA, 201 bp, Homo sapiens
ctgttctcttctattggtagcactcataaatctcaatgatttcatttggggagtgtttcctagaacatgaaaatttaagaataattgacattgaatagccrtggaatgtccttgaagccagattactgtagagccatgaaatagccactcgaaaattgattttcctatagtaggcacctaacatgaacgttaggcttaata

SEQ ID NO: 292416 - DNA, 201 bp, Homo sapiens
tgagtgccagatactttctagtcaccatgataatttcctgcaaggtccatggattaatgtaaaattttgtgacatgccagcacttacacttttcccttttwcaggaatcaataatataaaacttatatttaatgaaagacaacacctgaaaactatcttttcaagcaagttatgtcattcactttttcacttcactttttc

SEQ ID NO: 292417 - DNA, 201 bp, Homo sapiens
aattactgtaacatcttgggatgttatgagtgccagatactttctagtcaccatgataatttcctgcaaggtccatggattaatgtaaaattttgtgacaygccagcacttacacttttccctttttcaggaatcaataatataaaacttatatttaatgaaagacaacacctgaaaactatcttttcaagcaagttatgt

SEQ ID NO: 292418 - DNA, 201 bp, Homo sapiens
tcttttcctttaataatttgtgttacaatgtttatggatgccaaaaattattcctcatttctaagtgtattgtaagttttatctattttttatctactagacaagagatgaaaatactggggcatttactgtggctgaaactgtaactttgtacagaaaaaaagttggtaggaacacttcccctaaaagtaatgatttgac

SEQ ID NO: 292419 - DNA, 201 bp, Homo sapiens
tcttcagctgagattatttgataattatagaaattactgtaacatcttgggatgttatgagtgccagatactttctagtcaccatgataatttcctgcaasgtccatggattaatgtaaaattttgtgacatgccagcacttacacttttccctttttcaggaatcaataatataaaacttatatttaatgaaagacaaca

SEQ ID NO: 292420 - DNA, 201 bp, Homo sapiens
tcaggcttttatagtgtatgggtttgaactttccatctctcacagtatcttttaggaacctgcaggtttcttgattacaccattagcattgtacttttcaraaatgaatgcttaccagttaattttttaactagaaccaaaccaaattaatgtagaattgtgagactctgtagaagctttctgagacaaaattatttgttt

SEQ ID NO: 292421 - DNA, 201 bp, Homo sapiens
ctctcattttgtaggtgtataaatgtgggccttcatgtcacaaagcatggaaattgtctgtggctgtcatatgactgtttcaggaaagtactcagaatgtkggaatgttcatttactgaatattcactgaatgtttattgaacacttcgagatgctggggacacaacattgaatgagataaaaccattggtatcacggagc

SEQ ID NO: 292422 - DNA, 201 bp, Homo sapiens
tctcttactgcttttattccactataaatggcacactgacacatttccataatatgatttttatgatttttcattcatcatatgccataccttgtgataaktccttacagtgtgttctcatgcaattctcgtgatagtcctgtgaggtcaatatcttattactctcattttgtaggtgtataaatgtgggccttcatgtca

SEQ ID NO: 292423 - DNA, 201 bp, Homo sapiens
gcctcaagaagtttgcctggtctctggatagatatgcattgaatcattatcatcacaatggttatgagattatttcatctcttttcccgttttttttttgttttttttttttgttttgttttgttttgttttgttttgttttttgagacggagtctcgctctgtcgcccaggctgaagtgcagtggcgcgatctcggctca

SEQ ID NO: 292424 - DNA, 201 bp, Homo sapiens
gggattggaccagatgacctcaataggctctttctacttctaaatatctgtgatttgacgaaaacaaaaagaaaagtctgtgctggggtttggctgctgcyctgtggtctgagttcctgacatgcatgcttttcagtcacagggcatgctgaggtgaaaatactgagtacgccactgcctcccttgaagttaaaaggcccc

SEQ ID NO: 292425 - DNA, 201 bp, Homo sapiens
aatccagaatgtctagagacatgtgtggctgcttggtctgttgacagaaatacttgattttttaaaaagaggctcatagactttcttatttctgggctatmcaacactcacttttttatctttaaattcccatgcacttaactaaacttgttactgatattatttaatggctattaagttttgggaacagctggttctaaa

SEQ ID NO: 292426 - DNA, 201 bp, Homo sapiens
tttgtcttctcacttagctaagccaaaacagatcagccagcaggggtcaggcttttatagtgtatgggtttgaactttccatctctcacagtatcttttargaacctgcaggtttcttgattacaccattagcattgtacttttcagaaatgaatgcttaccagttaattttttaactagaaccaaaccaaattaatgtag

SEQ ID NO: 292427 - DNA, 201 bp, Homo sapiens
attaataaaattgggtattttctccataatagctgattttagcctcataccttcaatgtaaaattggtcctttaggatggaaactaaacacagggtttttsaatatgcccctttacttttcccttaacttttatgattttggtgttagtatatacccatatataacataaaaataacaattcatatcttctcaagattact

SEQ ID NO: 292428 - DNA, 201 bp, Homo sapiens
agacaccactcaaaggtggtacaacagcgtaaaacaccaattagggaagggtagatatgtgttaaataggtgaagggtggggatcaatcaaaggaatgtgygccaaatgggaacagaggttctcaatccagtctgtggatttatccaagacttgtggcttggttttcaggctttaaattgtctttagtttgaaggtcaggt

SEQ ID NO: 292429 - DNA, 201 bp, Homo sapiens
tggcctacagggtcagagcaactggtttgaatcttggctcctcagcctactagtgtggaatccagggcaagcaatttaacttccttgagccttaggttccrtctgtacatagggctgataaccgtatttgcctcgtatgttagctgtcatcaaatgaaggcagtatctgtagagtgcttatatgtttggcaatgtattaga

SEQ ID NO: 292430 - DNA, 201 bp, Homo sapiens
gaaattttcttaaagtaattagtgaatacacatcactatgagataaattatgactggctgcattctcaatacatttaatgagcaataaataggacttcccstccatttttattcctaaggaaataaaatcatttttacatgtaaaggatgatcgttttcttacttggctgacatattttaccttccatttccataaacatt

SEQ ID NO: 292431 - DNA, 201 bp, Homo sapiens
tatgagtacacagagactgggtgatttcacccttggggattacaaatgctcattaacaatggatgacacatacgaagtttcatttgtgatttaggaagtckttaaagtaagattagagtaagatgattaggctaaagattatggctgcaaaaaggcttcatgttaaatcttggagatgatattagggagaaaggaattgga

SEQ ID NO: 292432 - DNA, 201 bp, Homo sapiens
atgagtgctgcaaaaagcaatagagcctgctttgtattcttttccaaaggagtgcctggccctcttttctgtttcctccttaaccctaggtttctgactcscccagtgtgtgactcctttggtaaccactcctgccccctttatcccctgcagaagtgtgggcagctgagcggcctggtcactgtgctgccttaaatcaga

SEQ ID NO: 292433 - DNA, 201 bp, Homo sapiens
tggctggtttttgtcttgtaaggactttgtttctcatctaaaggatccaattatttggcttcaaggtaagcataatattattaaccttttagtgtctgtargatctattgtgatgtttctccatttcatttacatctattttctatttattccatctttgctttttttaatctttttctgctttcttttacaatcagtatt

SEQ ID NO: 292434 - DNA, 201 bp, Homo sapiens
ctctttgaactgattacagtttgtattgtattgcaaaaactgcttggatcatgtaatgaaatatgagttcagtgaaaaggcacagttaactgatctaaatytctcattgtctacagacattgttatttcatttacatattgaaaatctatgtgatgaaaaatgggaaaatcacagactcacaggagtatttcatttaaatt

SEQ ID NO: 292435 - DNA, 201 bp, Homo sapiens
aaggatgtggagtgtggaatgatagacaatagagactcaaaagggtgaaggagtgggaaggtgtggaggaatagaaattacttatttgttacaatgtatgktatttgggttatggatacactaaaagccctgacttcaccactatgcaatctctgtgtgtaaagaatctgcacttgtaacgcatacatttatataaattaa

SEQ ID NO: 292436 - DNA, 201 bp, Homo sapiens
ctctcatgcatcataactgaaattctctcaataaactgagatgtgtgatcataagctgagggtggggaaatttcggaatcttgcatagagaaggtttagamtatttgttttgggaggtgtcttcagaaaatagcaagagattaacatggatttccagccattagtgagggcccagctgaagtaaacatgttaaataataat

SEQ ID NO: 292437 - DNA, 201 bp, Homo sapiens
cttttgagaagtgtctgttcatatcctttgctgactttttaatgggattgtttttttcttgtaaatttgtttaagttccttgtaagttctggatattagayctttgttggatgggtagattacaaaaattttctcccattctgtaggttgtctctttgatctgatgatagtttcttttgctgtgcagaagttctttagttt

SEQ ID NO: 292438 - DNA, 201 bp, Homo sapiens
gcgacagagcgagactccgtctcaaaaaaaaaaaaaaaagaaaaagaaaaaaaaaactctggcaatttgtatcatattctctaaaatagaaataaaaccarcctcttaattgcacacatgtgcatgtaaccatttagttctttaaagtgaagctaggcagatgcagtggctttcacctgtcatcccagcatcttgggagga

SEQ ID NO: 292439 - DNA, 201 bp, Homo sapiens
ggaaatagagtgttctccaaaaggcaagttactaaacatgtcttagtctgtgttgctataacaaaatactttagactgggcaatgtataaagaacacaaaygtatttcttacagttctggaggctgggaagttcaaggtcaaggcactgtcattggtgtctgctgtctggtgaaagctattgtccgattccaagatggcac

SEQ ID NO: 292440 - DNA, 201 bp, Homo sapiens
atttagcaactgtgagtgcccatttgaggcaagtaatgcagccgatgaatgctgagtttgtgtgaattagagaagagagcaacgttgttgaatatgcctgktgaatttgcatgaaaattgattcacccttcttatgggggtataaatcgctggtgaatggaggctgaaacatatgttatcatttcttacagccttgcttgc

SEQ ID NO: 292441 - DNA, 201 bp, Homo sapiens
ttcgtaggaagggattctttctttaagtcatttttattttatttcatcaattgtagatgaatggggttccagagggttgaaatatccttgaagatggctgvtttttgagtggaatagagctctcagggactttcataggacattgtctcatggcattttccatatttagggcttttcttatccacctcatgttggattatc

SEQ ID NO: 292442 - DNA, 201 bp, Homo sapiens
gagagcttattcttcttattttattaactgatttctagttgttttgtgtatcctctgttcctttcttactctcttattttttattattgtggttttgtggyttttctgtagtggtaaccttctagtcttttccttctttgtatgtttgctctagtagtttttatatttcatgtgttttaatgatattagatattgttcttt

SEQ ID NO: 292443 - DNA, 201 bp, Homo sapiens
aagatattggtatgtagtagaggtatgtagtagaggaagtgattctctcccaacatattactcttcaagggcatttactgaagtaactatttttaacttaygcaggtccaattaagaatagtaaataaactggaagagtaaaacaaaagcaaagtattttatgtggcaatgttccaatgtgaagaaaaaaatttcaggtag

SEQ ID NO: 292444 - DNA, 201 bp, Homo sapiens
tccatcttcatgcctccatcttctctctgtacgtatctatgtctgaatctctctctcctttctctcataaagacacatgtcattggatttagatcccaccytaatccagtatgatctcctctcaaccaattacatctgcaaaaaccctattttcaaataaggtccccttctgaggttcaaggtaaacatgaattttcagga

SEQ ID NO: 292445 - DNA, 201 bp, Homo sapiens
cctgattgattggtattatgctaaccaaacatccttatgattctctgaaatgttcactgtgttgagaagtttacatcccatccgcagaatttattaggttrtttaagaaaggcaaatttttaaagtggaaataattctattaatttttaattgtgtcactacctttctaaaaagccagttttttaacttttcagctttaag

SEQ ID NO: 292446 - DNA, 201 bp, Homo sapiens
tgagagctgattaggaggtgtgcataaattgggaaaggttttaggatagccacttcagggagctgaacagaatgcagagcaaaaccaaagaaagattgacrttctgaggcaaaagtgtgagttatgaactttgaagtctcatgcgaatacttgtataaagtttatctccagtgtccttagtggaggatgagaaggagcaga

SEQ ID NO: 292447 - DNA, 201 bp, Homo sapiens
atatgcattgaatcattatcatcacaatggttatgagattatttcatctcttttcccgttttttttttgttttttttttttgttttgttttgttttgtttkgttttgttttttgagacggagtctcgctctgtcgcccaggctgaagtgcagtggcgcgatctcggctcactgcaagctccgcctcccgggttcacgccat

SEQ ID NO: 292448 - DNA, 201 bp, Homo sapiens
tccttagtggaggatgagaaggagcagatgacaggagtgattcaccatttgagcatttgggtcagttgtgagtgctggtgagtgatgagttcagtgacctyccaggagaaaatggctggctgagcaactggaaaagtgtgaaagagctaacaggaaaggaaagaggcacagaaagagaatttcagaggtagtgtactcatg

SEQ ID NO: 292449 - DNA, 201 bp, Homo sapiens
ggtctgttttgccatcagaaggtaagctcacgggcctgtcaccattctgggtctgtacaccccacctttgtacaagaatgtgggatcaataacatagtttratgtcatcaggggaatttccatgtttgtgtcttgcctccacttccatatgcactgctttgtatttctttttatttatttcttctgccatcatacagccag

SEQ ID NO: 292450 - DNA, 201 bp, Homo sapiens
attcctgattgattggtattatgctaaccaaacatccttatgattctctgaaatgttcactgtgttgagaagtttacatcccatccgcagaatttattagkttatttaagaaaggcaaatttttaaagtggaaataattctattaatttttaattgtgtcactacctttctaaaaagccagttttttaacttttcagcttt

SEQ ID NO: 292451 - DNA, 201 bp, Homo sapiens
cccgggttcacgccattctcctgcctcagtctcccgagtagctgggactacaggtgcccgctaccacgcctggctaattttttgtatttttagtagagacrgggtttcaccttgttagccaggatggtctcgatctcctgaccttgtgatctgcccgcctcggcctcccaaagtgctgggattacaggcgtgagccacagc

SEQ ID NO: 292452 - DNA, 201 bp, Homo sapiens
cgggttcacgccattctcctgcctcagtctcccgagtagctgggactacaggtgcccgctaccacgcctggctaattttttgtatttttagtagagacggrgtttcaccttgttagccaggatggtctcgatctcctgaccttgtgatctgcccgcctcggcctcccaaagtgctgggattacaggcgtgagccacagcgc

SEQ ID NO: 292453 - DNA, 201 bp, Homo sapiens
aaacttcaatctgaaagcttttgcttttatgtttcagggagataacctaattactgagtgtcgctacaacacgaaagatagagctgagatgacttgggtawgaaaacttttattattattaaagttcatttatggagagaaagaaataaacttgattttagaagaaaaaggtaaaaaccatttccatttagaaagaaaagt

SEQ ID NO: 292454 - DNA, 201 bp, Homo sapiens
gagtacacagagactgggtgatttcacccttggggattacaaatgctcattaacaatggatgacacatacgaagtttcatttgtgatttaggaagtctttwaagtaagattagagtaagatgattaggctaaagattatggctgcaaaaaggcttcatgttaaatcttggagatgatattagggagaaaggaattggaaat

SEQ ID NO: 292455 - DNA, 201 bp, Homo sapiens
aaaatacttcagcttccctattttggagaactgctgagatcacttacataaatatttttctctgagctccctagaagacaggaactttataaatatttagyattattgttgaaccttaggtacaagtaagcaggaaaattatgatactctcaagaagaaatactttagcccatcctagctcatatagggagactgcattgg

SEQ ID NO: 292456 - DNA, 201 bp, Homo sapiens
tatccagtaatttagaacagctggacactcactttgatttcattgacttttctgagacatttaaaagagggaaaaattgaaatatttatatttaactagatttttatatggtatattagttcctttataacttggaattcattacttttactatctttcctttttatttctatacttccttttaagataaagtttagttcc

SEQ ID NO: 292457 - DNA, 201 bp, Homo sapiens
atgaacatacaaatgcatgtggtctttttggtagaactatttattttcctttgggtgtatagctagtaataggattactgggttgaatggtagttctgttytaagttctttgagaaatctacaaactgcttccacagttggctgaactaatttacatccccaccaacaatgtataagcattgtcttttctctgcaaccttg

SEQ ID NO: 292458 - DNA, 201 bp, Homo sapiens
aagagagtgtgcaaccctgacacagctcagctggtgctttgttaagagatatttataagtcttcagattatgccccccaatttccaggcaacgaagagacytctccaagtgtcgtgctttgtgcattagtaataaggacacatgctccacagtaatgctggaacacaggatgatgctcttcagctgtgtgcttcttcctgg

SEQ ID NO: 292459 - DNA, 201 bp, Homo sapiens
tcatccaaattttttaaaaattaaggtgatgggataggatgaaggcaaagtagtatcttattcagatggtgtagtctgaaattgttttttccactgaaatwtattattccaaataaagagtcaaaattttgattttatgctgtatctttcatgattctataattatagcaaggtattacattatcctacgtgacaactgaa

SEQ ID NO: 292460 - DNA, 201 bp, Homo sapiens
ttaaataataatattatttggatagctaaggtgtattatagtcaaatctgaagatctgcctccaaaataggacctcaaagttggaaaatatgaaaaaaaawttttttttttgagatggagtttctctcttgtcactcaggctggagtgcaatggcgcaaacttggttcactgcaacctccgcctcccaggttcaagcaatt

SEQ ID NO: 292461 - DNA, 201 bp, Homo sapiens
tctcttgtcactcaggctggagtgcaatggcgcaaacttggttcactgcaacctccgcctcccaggttcaagcaattctcctgcctcagctcagcctcccrtgtagttgggattacaggcacctgccaccacgcgcggctagtttttgtatttttagtagagacggggtttcaccatgttggccaggctggtctcaaactc

SEQ ID NO: 292462 - DNA, 201 bp, Homo sapiens
tttctcagtcaaacatagctataaattcttcaaatacaattttactgttagcaaaagtaattataattatgtttcagcatgtatattctaaatcaactgtrcaacttctcaaaaataaaatatcatcaggtactgaaaaaccagaaaggcagtaattaaggcaaattttgtgtcttttataagtgacaaaaattaatactt

SEQ ID NO: 292463 - DNA, 201 bp, Homo sapiens
cagaaaaagcatccaacaaaatctggcatccctttacgattaaaactcttagcaaagtcggcatacaaggaacatacctcaatataataaaagccatctaygacaaacccacaaccagcataataatgaatgaggaaaagttgcaagcattccctctgagaactggaacaagacaaggatgcccaatctcaccacccctct

SEQ ID NO: 292464 - DNA, 201 bp, Homo sapiens
acaacttctcaaaaataaaatatcatcaggtactgaaaaaccagaaaggcagtaattaaggcaaattttgtgtcttttataagtgacaaaaattaatactktgatttggatgactcaacagagtaggcgaatggtaaaaggcataagaagatattttggggataaaaccaaactatggtgcaaaaaagaaaatatgtatcg

SEQ ID NO: 292465 - DNA, 201 bp, Homo sapiens
acacaaagtgtttttatttatttatttattctaaacaaacaaacaaacaaaaaacgggatacatgtgcagaatgtgcagctttgttacataggtatacgartgccatggtggtttgctgcacttattggcccatcttctatattccctcccttcaccccccatcccccaacaggccctggtgtgtgttgctcccctctctg

SEQ ID NO: 292466 - DNA, 201 bp, Homo sapiens
  misc_feature (1)...(201): n = A,T,C or G
ctttcctgaaaggccagaagttcaaagatggactagtttcccagggacctgattccccagttggaatactccagccccttggaaattcccgggatttatanaataactctagacaacaagactttgtctttaaaggtcctatgaattcttttctctctgtatttaggtatcctgatttttcttttccatattttccacagg

SEQ ID NO: 292467 - DNA, 201 bp, Homo sapiens
ctcccgagtagctgggactacaggtgcccgctaccacgcctggctaattttttgtatttttagtagagacggggtttcaccttgttagccaggatggtctygatctcctgaccttgtgatctgcccgcctcggcctcccaaagtgctgggattacaggcgtgagccacagcgcccggcccagcctcagtatttttaattaa

SEQ ID NO: 292468 - DNA, 201 bp, Homo sapiens
cacagggtaaaatgccacagggagaaggaagtccccagctgaactttgtaacaatttgaatccagcaagaagcctcctggccagaacctggggaagggcaygaatctggtgtgcagactccacgggtgagggaagaaccaaatcctttttcttctgcacctgggaagtggctagtctggggcaagttctcaagccgtgctc

SEQ ID NO: 292469 - DNA, 201 bp, Homo sapiens
tggtggtttgctgcacttattggcccatcttctatattccctcccttcaccccccatcccccaacaggccctggtgtgtgttgctcccctctctgtgtccrtgcgttctcattgttcaactcccacttacgagtgacagtatgtggtgtttggttttctgttcctgtgtcagttcactgaggacattggcttccatcttca

SEQ ID NO: 292470 - DNA, 201 bp, Homo sapiens
tcggcctcccaaagtgctgggattacaggcgtgagccacagcgcccggcccagcctcagtatttttaattaaaaaatgtataactctgtcatcattacaartaatataataatgcaaaaacaaaagtcttgtcttttccgtggacagttacccagcacatcagaaagtcgggttaatgcagcattcagccaacaagcagga

SEQ ID NO: 292471 - DNA, 201 bp, Homo sapiens
ctttgattccatatgaaatttaaaatagttgttgctaattctgtaaagaatgtcaatggtagtttgatggaaatagcgttgaatctataaattacgttggrcagtatgaccattttcatgatattgattctacctatccatgaaaatggaatgtttttccatttatttttgtactcttttatttccttgagcagtggttga

SEQ ID NO: 292472 - DNA, 201 bp, Homo sapiens
gttagctcttcttgttgaatttttccccttaccattacgtaatgccattctttgtcttttttgatctctgttggtctaaagtctattttgtcagagactasgattgcaacccctgctttttttttctttcaatttgcttggtaaattttcttctatccctttattttgagcctatgtgtgtctctgcacgtgagatgcgtc

SEQ ID NO: 292473 - DNA, 201 bp, Homo sapiens
cttttaattggggcctttagcccatttacatttaaggttagtattgttatgtgtgaatttgataatttgatcctgtcatcatgctgctatttgatgatttygcacactagttgatgcagtttcttcatagtgtcattggtctttacaatttggtatgtttttgcagtggctggtacgagtttttcctttccatatttagtg

SEQ ID NO: 292474 - DNA, 201 bp, Homo sapiens
tcctccttaaccctaggtttctgactcccccagtgtgtgactcctttggtaaccactcctgccccctttatcccctgcagaagtgtgggcagctgagcggyctggtcactgtgctgccttaaatcagatgttcatttgcattgtttgtgcttccattttcagattcaaggaatgacagcattacctccagatatagaaaga

SEQ ID NO: 292475 - DNA, 201 bp, Homo sapiens
acaatgttttttttctcttccaaattctaataataaaattgttattggcttttgatcttaatcattaaaataaaaataaaatgtgcaaggaaacttgcagyaagtttccttgttgtttcatgggtggattttttttcttaggaaatcctcatattttaggctataccctcaatttgtaatctggaggtcagattacaattt

SEQ ID NO: 292476 - DNA, 201 bp, Homo sapiens
tcatgaaattctcgtgctgtatttttcagcttcatcaagtcattaatattcctctctaaactgattattcttgttagcagttcctcaaccttttatgaagkttcttagcttctttgcattgggttagaacatgcttctttagcccagcatagtttttattacccatcttctgaagcctgcttctgtcaattcatccatctg

SEQ ID NO: 292477 - DNA, 201 bp, Homo sapiens
aaaatgtggcacatatacaccatggaatactatgcagccataaaaacggatgagttcgtgttcgtgtcctttgtagggacatggatgaagctggaaaccawcattctcagcaaactatcgccaaggacagaaaaccaaacaccgcatgttctcactcataggtgggaattgaacaatgagaacacttggacacagggtgga

SEQ ID NO: 292478 - DNA, 201 bp, Homo sapiens
acggatgagttcgtgttcgtgtcctttgtagggacatggatgaagctggaaaccaacattctcagcaaactatcgccaaggacagaaaaccaaacaccgcrtgttctcactcataggtgggaattgaacaatgagaacacttggacacagggtggagaacatcacacaccagggcctgtcgtggggtggggagagtgggga

SEQ ID NO: 292479 - DNA, 201 bp, Homo sapiens
ttgggaatgaaaacattttaagaaccaaaaatcactttaattatgtgcttttgttctaggcttaatagataattctggactgaggttattttacacaatgratataaggaaatatgatgctggggtgattgaggctggcctctgggtgagcctcttccataccatccctccagggatgcctgagttccagtctgagggtca

SEQ ID NO: 292480 - DNA, 201 bp, Homo sapiens
attttagaagaaaaaggtaaaaaccatttccatttagaaagaaaagttctaaaaatcttgagtatcaagtatcataaaagtgacatcagagatgtttttarcattttctaagacttcaaattaactaatgatattatagtattaaataatacttggagtgtaattaattgactccttcatgaaaagctatccttagtcttt

SEQ ID NO: 292481 - DNA, 201 bp, Homo sapiens
gtttttttggtagtgtctttaattttggtaacaaagtaatgctggtataaaaaaaggaattaggaacccaggaggcggaggttgcagtaaactgagatcgyaccaagctgacatcatgccattgcactccagcctgggcaacaagagtgaaactctgtcgcaaaaaaaaaaaaaaaaaaaaaaaaaaaaaaaaaagaggaa

SEQ ID NO: 292482 - DNA, 201 bp, Homo sapiens
actggaacacttatacactgttagtagtgacttaaatttgtaaaaccatcttggggaaaagtatggcattatctagtaaaattagagattcatatatactytactcaattccattcctatgtagatttaaccttggaattacttttgcagaatgtgtttcaggagagaaatatgtaaactattcatagtaacatataataa

SEQ ID NO: 292483 - DNA, 201 bp, Homo sapiens
caacgtggtgaaaactcatctctacaagaaataaaattgaacccaggaggatgaggctgcagtgagctgtgattccaccactgtactctagcctggatgamaaagtgagaccctgtctcaaaaaagaaaagaaaaataaagactacagttttgaatttagatagctaggagaatagtagtgtaattaaagaaattcaggaa

SEQ ID NO: 292484 - DNA, 201 bp, Homo sapiens
ctctcaaaattgtaaaacagttactaatagaactaagaattgagatagacagcaacacaataataatgagggacttcaatactccactgacagcactagamaggtcatcaagacaaagtcaacaaagaaacaatggattaaaactataccatggaacaaatggacttaacagatatatacagaacatttcatccaacaact

SEQ ID NO: 292485 - DNA, 201 bp, Homo sapiens
aaagtaggctaaggacatgaatagacaattctcaaaggaagatatacaaatagccaacaagcatttgaaaaaacgctcaacatcactaatgatcagggaartgcaaatcaaaaccacagtgcaataccaccttactcctgcaagaatggccataatcaaaaaatcaaaaaacaggagatgttggtgtggatgcggtgatca

SEQ ID NO: 292486 - DNA, 201 bp, Homo sapiens
ttcaccacaaattctgcaagaagttaagcatagtcttttaaatatttttgctatcccttttccaactagagggcaacactccataaaataaatcaaataatttttttttttttgagacaggatcacactctgtcgcacaggctggagtgcagtggtacaatcttggctcactacaacctccaccttcggagttcaagcgat

SEQ ID NO: 292487 - DNA, 201 bp, Homo sapiens
ccagtcatgagcaggccaagttaatagagaagtgagaactgggaaagatactttttattcctatgtcaaaatttcaagttcatctgcacattagaatcacytggagatgttttaataattccagtgcccaggcaaccccatcccccaccagtcaaagcacaatccttgggaggtggacacaggcattaatatatttttcaa

SEQ ID NO: 292488 - DNA, 201 bp, Homo sapiens
ggcctcctggtacttggcagacccagatccttttggatagggccaagatgagttcatgctatggcagattgcagtccagtcatgagcaggccaagttaatrgagaagtgagaactgggaaagatactttttattcctatgtcaaaatttcaagttcatctgcacattagaatcacttggagatgttttaataattccagtg

SEQ ID NO: 292489 - DNA, 201 bp, Homo sapiens
gagagatgaagagagtgtgcaaccctgacacagctcagctggtgctttgttaagagatatttataagtcttcagattatgccccccaatttccaggcaackaagagacctctccaagtgtcgtgctttgtgcattagtaataaggacacatgctccacagtaatgctggaacacaggatgatgctcttcagctgtgtgctt

SEQ ID NO: 292490 - DNA, 201 bp, Homo sapiens
cgcaggtgcgggtcgtccccggggcccgcagctctctctcacctggcgcagccccgcgcccccggccacgctcactctcgcctccgcgggcagcgcctgckctcccggagccccagaaggcgcgcggtagggaagccgagcacggatgaccccaggcaggtttccttctttgaacactttcctgtccccagcgccccactt

SEQ ID NO: 292491 - DNA, 201 bp, Homo sapiens
gtgcctgggctctctcttcttgttgggagtcagctggttgtaagcaggtctaggaggcctcagctgaacaagtgggctctcctttatagtatcttgttctstagaagtctagactgggcttgttcaaatggtgatggcacagttccaaaagagagagtagaaactgtaaggccacttgaggcttggtttgggattagcacg

SEQ ID NO: 292492 - DNA, 201 bp, Homo sapiens
ataatgtgttcattttcatctttgaatttcattttctgaacataccagaattttttattcatttttattggttagctatttctgtgaaccaaaccaacccraagttcaacaactttaaataagctttaaatgaagaagcacatgttatagtttacaagtcagcttggtggttcttctgtttgtagctgggctacaaacagg

SEQ ID NO: 292493 - DNA, 201 bp, Homo sapiens
tttccatttagaaagaaaagttctaaaaatcttgagtatcaagtatcataaaagtgacatcagagatgtttttagcattttctaagacttcaaattaactratgatattatagtattaaataatacttggagtgtaattaattgactccttcatgaaaagctatccttagtcttttaatttttctcatctaatatttttaa

SEQ ID NO: 292494 - DNA, 201 bp, Homo sapiens
tcagaagcgtcctttgcgtcccctcccaggtactgtctgtccccagaggtcaccagtttgctgacttaaatcactctttactaattttgcctgttgtgaaytttttgtaggtagacagaaacgctagtgctcttctgtgtctggctttttttgccgaacgggatgtgcaagttggccatgttgtttgtagaaaataatgtg

SEQ ID NO: 292495 - DNA, 201 bp, Homo sapiens
atttttgaaatcttttttgattttttttagttttttttttagttttttcttttttacttttttagaagccaaaaatgtgtaagaccaaaaatttcaataawatccatttttgtgtgagtttaacattttgaagatccctttaaaatttgtatgatttagccataaatacattttactttcttctccataaagtttgaaaat

SEQ ID NO: 292496 - DNA, 201 bp, Homo sapiens
tctgaatattaggatataattcatctgatttgtaatggactcatctttgtaaatttctaaaatcaagatgaataggtggctgattataattgcctattggyatattaaatgagatttcttattttcagacttcatgcaaaaattaatatctttatgtgcattcaaattaaatatttagaagatatgtaatacttcagaaat

SEQ ID NO: 292497 - DNA, 201 bp, Homo sapiens
tctggtcacatagacctgatttcaaatccgggctctaccatttaccacttatatgaccttgagtaatttacagaacttttctgaatccgttttcccattgrcaaaatggagatatgacctatcacaatactactgtaaagttatttggaaaatgtttatggaacacctgaggcacaatagatgtgaaatattgtcatttta

SEQ ID NO: 292498 - DNA, 201 bp, Homo sapiens
gttataataattttttgaaaatagaaaaaagaaaattagtgaatttctacagaaataaagaaatacagaattgggtagtaaataaacccaatttgcctgtrcaatacaattattttccacccttctggaatgggcctcccagaacttttgcatctacttagcgaatgaacaaatatttttaaaaagttacaagtccttggc

SEQ ID NO: 292499 - DNA, 201 bp, Homo sapiens
tttgcattaacatgaaaggcattggagcattttttgcaatgtttggaggtcttctagacaacaaaagttatttaccttgagcaaaagggatttgagggaasgacagtaggtcataagggagtgctcatacaaacttttgttgttacaggggacagaggtttggtggctagaatttaaaatcctattattatgtgagaatac

SEQ ID NO: 292500 - DNA, 201 bp, Homo sapiens
ctaaagaaagttctcaaggaattatttatttatttaccaagctttgaaaaaatactgctttaaggtcatcctccaaagatgtatgtttgtttctcttagtyatcacaatcttccatagtctttataaaattacctttattaataaaattgggtattttctccataatagctgattttagcctcataccttcaatgtaaaat

SEQ ID NO: 292501 - DNA, 201 bp, Homo sapiens
tattcaaaaaataaagaaaactctactgaaaaaataaattcaaaatatttagtaatatgtaagtggttttaaggcagcctttcaaaaccagttttcatttkcaacttattcaagatttcaacaaaattttaatgatgtagaattcataaatctaggacttgccttaagttgtctgatttccatgctcttttttctagtaga

SEQ ID NO: 292502 - DNA, 201 bp, Homo sapiens
caccaagccatttactgcaagtggggaatagttgcagagattcaggaatatagattctgatcagtagtagcctaatactatgtcacaatacctacgttatycattatgctccatctcattatgtagggattgtatcatctcgcatcacaggaagggtgagtacagtatgataagatattttgagagagagagagaccacat

SEQ ID NO: 292503 - DNA, 201 bp, Homo sapiens
cactacacctgtaaatcgtgaggaagaatcagagtatctagtgagtgtctgctttggacagcattcagtgctatgtcttgtatatagagcaatataacacrtagtttttcagcccaaagacctcacagtctggatgggaggaagagatgtacacataaatattagagagcccccaaagctgccgaatgaacattcatgtca

SEQ ID NO: 292504 - DNA, 201 bp, Homo sapiens
gtattatcagatgacagcatatcacattgcaggtgaatatggaaattgtagaaaagaatattcttggtaatttatatttaaactgtacttctcatgtgagrtcatctctttgtcaggtactcgagaccactctgcagcccacctctccatatttcagcatgactctttttaagctttattttagatgtgactttaccgtaa

SEQ ID NO: 292505 - DNA, 201 bp, Homo sapiens
gaaataaattaactttcataatctatcttacgtgaaaatactttccatttctcttaaatattttgcaacactctatttggttattaaattattaacaccartggattacccctgcacctctgggttttgtcatcaattgataaaatagatgattcttgatcttctagagaaaaagttatgctataaaaatcaagaatcttt

SEQ ID NO: 292506 - DNA, 201 bp, Homo sapiens
ctttccttctacaatttggtacaactctgaacagccatcctaacttaaggataaattaaatacaatatttactgaggcatcaaatgcaacttcatttgcasatcagcatcttcctttgcctaatcctgccttgctcatcaagtgcaaaacatcatgtttttgcaattagtaaaatcattgtatattagcccctaggttaat

SEQ ID NO: 292507 - DNA, 201 bp, Homo sapiens
ccagatgatttaggactttatgggcaacataaggccttggggctttaagtgcaaagggaagcaattaaaggatataaataaagtcaatttggctactataytgggaaaggactctaggagggctagactggaaggaatatcaatcaggaaactattgtgattgtctagttgagggatgaaggtcacttgtgccaaggtggt

SEQ ID NO: 292508 - DNA, 201 bp, Homo sapiens
actattgtgattgtctagttgagggatgaaggtcacttgtgccaaggtggtgacaccaagttgatgagacacattccattcaggttactttttgaaaggarcacccacaggcttgttgatcaatggcatctcatggaggcagtgagggatagagcagagtaaaggctcagtgatggtgtgaatggtgttaggggaacatgc

SEQ ID NO: 292509 - DNA, 201 bp, Homo sapiens
agggatgaaggtcacttgtgccaaggtggtgacaccaagttgatgagacacattccattcaggttactttttgaaaggagcacccacaggcttgttgatcmatggcatctcatggaggcagtgagggatagagcagagtaaaggctcagtgatggtgtgaatggtgttaggggaacatgctgaggatgatattgagaattc

SEQ ID NO: 292510 - DNA, 201 bp, Homo sapiens
gaattagaatggctggtggaaatttggggatggctgaatttgttttaatatagagaagaattttctaatgatcactactattcaaaatgaaagggactgaygtaattatgtaattagagaaaatatacacatagaggttttgtttttgtttttgtttttgtttttttgagacagagtttcgctcttgtcacccaggctgga

SEQ ID NO: 292511 - DNA, 201 bp, Homo sapiens
ggctgaggcaggagaatggcgtgaacccgggaggcggagcttgcagtgagccgagatcccgccactgcactccagcctgggcgacagagcgagactccgtytcaaaaaaaaaaaaaaaaaaaaaaaaaaaaaagaagctgtagttattgttaccattgtcaagaaaggtgagttagactctgcattgccaacaatttgggg

SEQ ID NO: 292512 - DNA, 201 bp, Homo sapiens
gaatttgttttaatatagagaagaattttctaatgatcactactattcaaaatgaaagggactgacgtaattatgtaattagagaaaatatacacatagargttttgtttttgtttttgtttttgtttttttgagacagagtttcgctcttgtcacccaggctggagtgcagtgacgcgatctcagctcactgcaacctct

SEQ ID NO: 292513 - DNA, 201 bp, Homo sapiens
ggctcacacctataatcccagcactttgagtggtggaggtgggagggttgcttgcgcctgggagttccagaccaacctgggcaacatagcaagaccccatmtctattaaaaaatataaaattaaaaataaaattaatgccaatctgctactaaaaaataaatatcattctttaaaaatcttttatttggtatttcttctag

SEQ ID NO: 292514 - DNA, 201 bp, Homo sapiens; identical to SEQ ID NO: 60306

SEQ ID NO: 292515 - DNA, 201 bp, Homo sapiens
ttgcctcttccagcttctggtagcttctggcattcctgggcttgtggcagcatcactccaatctctgcctccatcttcatgcctccatcttctctctgtaygtatctatgtctgaatctctctctcctttctctcataaagacacatgtcattggatttagatcccaccctaatccagtatgatctcctctcaaccaatta

SEQ ID NO: 292516 - DNA, 201 bp, Homo sapiens; identical to SEQ ID NO: 60308

SEQ ID NO: 292517 - DNA, 201 bp, Homo sapiens
attcatttaattccattgacccactttcgctttcttatctggaaaagtgggaataatatttccttttaagaatttgggttttcaggttactaacatactgraatctttttgctaagaatgtttattgcctcttatcctcctaaaagaaggaaaaaggaggataacatgtagaaatggtctgggaggccccttataagcatc

SEQ ID NO: 292518 - DNA, 201 bp, Homo sapiens
  misc_feature (1)...(201): n = A,T,C or G
gttcaagcattcatttaaattgctttagctttttatctcagttgtccctccaagtgtgtttgaatgtaaactgtctgaacatgcattaatgtgggctaatngggtcttcctcggtgtctcctgtaggctctggaagccgaaaagccaagtggaattcatgtgtttgctgttcttctccatgctcacctggctggcagaggc

SEQ ID NO: 292519 - DNA, 201 bp, Homo sapiens
taaacattactctttttttatacttgacattccagttagtgattctttgggttgcaattcctgcagtggtaaaatagaggtgtctttatgctatgttgaaragataggatatttttagaagtttcattttagtaaaaaggaatgtaaggataattcttttatctgataaagctatgtgaatatagctaattaaactatgct

SEQ ID NO: 292520 - DNA, 201 bp, Homo sapiens
ataattttctacccttattttacttttaaaagtcagatccctataccatttacgaaatgagagtaatggcaatatcttttctacgtgatgctggagacagkgtttttagatgggatgaactgtcagggagaagacatggcacaataggatgtaaaaggaaagctgaaaaaacagaagaaagtgataaagaggaaagggatc

SEQ ID NO: 292521 - DNA, 201 bp, Homo sapiens
tcaaatttaagagcaaaagcccagagattacggcctcaggtctatgaatagcttcatctgcttaccttaaaggggaaacataaaaatgttatcattttccrtatgtattgtaatgtacaaaaggatggaaaacactagaacaataaacttctattaatttgcctcacgattctattgtaaggaaataaaggcatgactaga

SEQ ID NO: 292522 - DNA, 201 bp, Homo sapiens
  misc_feature (1)...(201): n = A,T,C or G
atcagcaaacctagaattaaacagatcaggggtcttctgctgaatgaaattacttggcgcatccattcatacagcaaatattaactgttgacgtacaaatntatttgataaataagccagcataaaacttcaatctgaaagcttttgcttttatgtttcagggagataacctaattactgagtgtcgctacaacacgaaag

SEQ ID NO: 292523 - DNA, 201 bp, Homo sapiens
  misc_feature (1)...(201): n = A,T,C or G
tgacttgggtaagaaaacttttattattattaaagttcatttatggagagaaagaaataaacttgattttagaagaaaaaggtaaaaaccatttccatttngaaagaaaagttctaaaaatcttgagtatcaagtatcataaaagtgacatcagagatgtttttagcattttctaagacttcaaattaactaatgatatta

SEQ ID NO: 292524 - DNA, 201 bp, Homo sapiens
tatgtttcagggagataacctaattactgagtgtcgctacaacacgaaagatagagctgagatgacttgggtaagaaaacttttattattattaaagttcrtttatggagagaaagaaataaacttgattttagaagaaaaaggtaaaaaccatttccatttagaaagaaaagttctaaaaatcttgagtatcaagtatca

SEQ ID NO: 292525 - DNA, 201 bp, Homo sapiens
ttcagggagataacctaattactgagtgtcgctacaacacgaaagatagagctgagatgacttgggtaagaaaacttttattattattaaagttcatttayggagagaaagaaataaacttgattttagaagaaaaaggtaaaaaccatttccatttagaaagaaaagttctaaaaatcttgagtatcaagtatcataaaa

SEQ ID NO: 292526 - DNA, 201 bp, Homo sapiens
tagatagtaggtctaaataaaagacagatgttattattattccagggataaattggtagctttgcagtttggtgttagttttagcacttcctatgaagacaaaaaaaaaagcacttgctcttaaaagtttctttcaagctgtttatttgaagctccccaaagtcaagcaccacccagcatcacacacccttcactccctct

SEQ ID NO: 292527 - DNA, 201 bp, Homo sapiens
accatgcttgaacgataactacccttttcaagcaaaatagaaaagtttctgccttcaggccacacgaccttttagagacaaaacaagtgcaaacaaaaccrtgtgcaatgttttttccatgaatgtgatgttgaaaatgtacctgaggcttaggtgtggcatgactcgctatgtaacacagaagaaaactggatttaaaaa

SEQ ID NO: 292528 - DNA, 201 bp, Homo sapiens
gtaccatttgatgagcttggaaatatgcagacacttatagtgacatcaccaaccaaggtaatagacatattcatcacctcccttgtttccttgagtctctwtggttttttttttttgttttttattgtggtaagaacatttgacatgagatctacactcaacaaatttggaagtgcaaaatactatattctgctggactac

SEQ ID NO: 292529 - DNA, 201 bp, Homo sapiens
tggcattgttacacagatgtttagtaagctcagctagagtctttcaagctttgatctagagacttggtgattttatagaagtttctttcttaatactaggygttgatgtatttctcttatattctgtattctttctcatcttcaataatattagagagctaaaggcctttgagaagacagatcaacaaaaatgtatgcctg

SEQ ID NO: 292530 - DNA, 201 bp, Homo sapiens
tcagggaggactaagcaccaggagtgaaatgtgtctctcataccttctttattacccaagaattaatcttactcgatgtgcaagtattccagacattatgsaacaacttcagttcattggggttaaggagatctacagaccagtcacgtaagtagtaaatgtattttatgatggggtaacgtatttcagagaaagatgggc

SEQ ID NO: 292531 - DNA, 201 bp, Homo sapiens
atacagacttccaaatgaagaatgaatttcatgaccttgaggcctctgactcaaagagaaatctggtcccaacagatttactgggggaattccaccaagcrttcaagaaatagataattcatgtcttactcaatctctttcaggaacactaaaagagggaacacctcccaccaagtcataaaatgtagttaacataatctt

SEQ ID NO: 292532 - DNA, 201 bp, Homo sapiens
cactcttaacagcggggcaccagaggctttaggcaacctaagcaccatagtaaagctgtcgtgccaccttgtggtgtttcagatggttacagactgatgawtttcccctagcatttatctggttataaaattgattttctctttttcaaattaggcattttatctttttgaaaagtaaattttatttttaataattgactt

SEQ ID NO: 292533 - DNA, 201 bp, Homo sapiens
tttttgtgagtgctttttttgttgtcattgatgctgttgttgttgcttcctgcttgtttttctttcaacagtcaggtccctcttctgtagggctgctgcastttgctgggtgttcacttcaggccctattcatctgattatttcccacacctggagatgacactccaggaggctagagaacagcaaagatgagtgcctact

SEQ ID NO: 292534 - DNA, 201 bp, Homo sapiens
tccaccaagcattcaagaaatagataattcatgtcttactcaatctctttcaggaacactaaaagagggaacacctcccaccaagtcataaaatgtagttwacataatcttaaaactaaaacttcacaaggatagtataaaaggggccagtagtatgcacctgatggaaataacttggacaagagtttgacaaaccaaatc

SEQ ID NO: 292535 - DNA, 201 bp, Homo sapiens
tttttatatacaaatctaatgataagaccaacttgagtttagctaaggaatataaaattgatttaaattagaaaatatatttattgaaagaaaaagatatwtaatcacctcaacagaggtagagaaagcattcattaaattcaagtttattgttgacaggggagacatttagcaagcctggaataacagggaattgtctta

SEQ ID NO: 292536 - DNA, 201 bp, Homo sapiens
agtaaaaaaatttcagagaaattttacgatttgaggttttggtattctagctaagaaatcttcaccagaccaaggctgcaaatattttcatgtattttttwatttatataaacattttgctgttttagctttcacatggagcaagttgattctaaaatttacacagaagagcaaaaggttaaaaataggcaggacaaaact

SEQ ID NO: 292537 - DNA, 201 bp, Homo sapiens
gaggttttggtattctagctaagaaatcttcaccagaccaaggctgcaaatattttcatgtattttttaatttatataaacattttgctgttttagctttyacatggagcaagttgattctaaaatttacacagaagagcaaaaggttaaaaataggcaggacaaaactgaaaagaacaagatagaaaacaatctactaga

SEQ ID NO: 292538 - DNA, 201 bp, Homo sapiens
tcatgctcacttttgatttttgtttgcatggaagttcttttcccatcctttaatttcagttagtatatggctttacaggtgagatgagtatggtaagcagygtatagtcaggtcatgttttttaacccattcagccagtctgtatttttaagtgaaagttttaatttgtttacattccgggttattattgatatgtgagag

SEQ ID NO: 292539 - DNA, 201 bp, Homo sapiens
aaacagacctacaaattctacagatggaaacttggtttatgatagacatagcatttagataaatggaaaaggataaactttttattaaaggatgctggcaytaatggctatccatatgacataaataaaactgagtcttaatttcacacaatgcataaaaatcaatgccagatgtattaaatatttaaatgtgaacagcaa

SEQ ID NO: 292540 - DNA, 201 bp, Homo sapiens
tagtctataaggtttctgctgttagtctagtctgacagacgtacctttataagtgacttgatgcttttctcttgcttttttgagttttctctgtgtctttsacctctgatattttgactataatgtgctgagcagaagaactttttgaattgtatctatatggagaactttgagcctcttgtttctggatatctaaagttt

SEQ ID NO: 292541 - DNA, 201 bp, Homo sapiens
atatgacataaataaaactgagtcttaatttcacacaatgcataaaaatcaatgccagatgtattaaatatttaaatgtgaacagcaaaaatttaaaaccrctggaagaaaaaatacctgaatatatcttcatgactttggagtagttaagaattttttaagcaaagcataaaagcacaaactgtaaattaaagattaaca

SEQ ID NO: 292542 - DNA, 201 bp, Homo sapiens
taagtagtaaatgtattttatgatggggtaacgtatttcagagaaagatgggctttattgtcatactggatccattaccacattatagaaatttttatgcwctgtttgttctatttgattacttttaactggggagaccaagtaacctttttgattactatgtccagagtccccaagaccaccctcaggttctgtgatttg

SEQ ID NO: 292543 - DNA, 201 bp, Homo sapiens
ccttctggaaatagcttttaatggacatatggataaactggagcatatcaaagaattacaaggatggttgaaaccttgggaaatctgagtacctgaggaamaaaaaacagctggcaatattttgcctggagaaagaacaatgagaaagacatgatcattgtctttggcgttgtagtgtacagtcttgctcaggaaaggtgg

SEQ ID NO: 292544 - DNA, 201 bp, Homo sapiens
tatttgattacttttaactggggagaccaagtaacctttttgattactatgtccagagtccccaagaccaccctcaggttctgtgatttgcaaggagtacytacagtactcagcaaatagttgtattcatggaaaacatgaatatggtgaaagcatgcaaagcagaaagaacaaaaggaaaagctacatgaagcaaagtct

SEQ ID NO: 292545 - DNA, 201 bp, Homo sapiens
ctttttcacctgcctcaagaagtttgcctggtctctggatagatatgcattgaatcattatcatcacaatggttatgagattatttcatctcttttcccgttttttttttgttttttttttttgttttgttttgttttgttttgttttgttttttgagacggagtctcgctctgtcgcccaggctgaagtgcagtggcgcg

SEQ ID NO: 292546 - DNA, 201 bp, Homo sapiens
cagcgacctccgtgataaggagccagctatagagatatgcaaattctgcacaggaaagagccagtgtaatgaatgaccctgtggttagtctgaacctaccrtgtttgtggagcagcaagagagtgcatttggctgcagaagagtgaagtatggtagagaataagtgaggacacatgagagcaggtgggaccagatgattta

SEQ ID NO: 292547 - DNA, 201 bp, Homo sapiens
atatttctatttctatttttaaggaaatacccatctaggtccatgagtgttgatggtgtgtagtttttttggtagtgtctttaattttggtaacaaagtartgctggtataaaaaaaggaattaggaacccaggaggcggaggttgcagtaaactgagatcgcaccaagctgacatcatgccattgcactccagcctgggc

SEQ ID NO: 292548 - DNA, 201 bp, Homo sapiens
aattgtatatttacacttgtgaagcactttaaagaataagagaaacaagtcatatagtcttttttctaatatttttgaaatcttttttgattttttttagttttttttttagttttttcttttttacttttttagaagccaaaaatgtgtaagaccaaaaatttcaataaaatccatttttgtgtgagtttaacattttga

SEQ ID NO: 292549 - DNA, 201 bp, Homo sapiens
attgtatatttacacttgtgaagcactttaaagaataagagaaacaagtcatatagtcttttttctaatatttttgaaatcttttttgattttttttagttttttttttagttttttcttttttacttttttagaagccaaaaatgtgtaagaccaaaaatttcaataaaatccatttttgtgtgagtttaacattttgaa

SEQ ID NO: 292550 - DNA, 201 bp, Homo sapiens
acacttgtgaagcactttaaagaataagagaaacaagtcatatagtcttttttctaatatttttgaaatcttttttgattttttttagttttttttttagttttttcttttttacttttttagaagccaaaaatgtgtaagaccaaaaatttcaataaaatccatttttgtgtgagtttaacattttgaagatccctttaa

SEQ ID NO: 292551 - DNA, 201 bp, Homo sapiens
aatcttttcctttaataatttgtgttacaatgtttatggatgccaaaaattattcctcatttctaagtgtattgtaagttttatctattttttatctactagacaagagatgaaaatactggggcatttactgtggctgaaactgtaactttgtacagaaaaaaagttggtaggaacacttcccctaaaagtaatgatttg

SEQ ID NO: 292552 - DNA, 201 bp, Homo sapiens
gaatgttggaatgttcatttactgaatattcactgaatgtttattgaacacttcgagatgctggggacacaacattgaatgagataaaaccattggtatcmcggagcccgtattgtggtggtgggggtagcattaaacaaataaataagcaagagaaacatcagaaagtactaagtgctaagtgctgtgcagataattaaa

SEQ ID NO: 292553 - DNA, 201 bp, Homo sapiens
atggtatgcctcttcacttatttactgttctttcatttctctaagcacttttttgtggttttcaatatagaagttttgcgcatgttttgttaataatatgttttttttaagttttagttatccttgtctgctaattctttaatctctgtcatttcaagatcttggagtattgactgattttttcttctagtttagattcac

SEQ ID NO: 292554 - DNA, 201 bp, Homo sapiens
cgcccagggagcttagtacgttaggcagttgcgagtcctagtgctggctgctgctcctctcccaaggagctcaaacagcttagacagtaggcagctgcggygctgatcgaccctgccctcgggagtttggtaggcttaagcagattccagttgagagactgttggctaagtttatgtttactccatagactctcaaaatgt

SEQ ID NO: 292555 - DNA, 201 bp, Homo sapiens
aattgtcctaaggttttatgtgtgtatgtatatatatatatatatatatatatatatatatatatatatatacacacacacacacacacacacacacacaygtgtgtgtatatatgtatatatgtgtatatatgtatgtatatatatatatatgtacatgtgtataaataaatgtgtgtgtgtgtgtgtgtgtgtgtgtat

SEQ ID NO: 292556 - DNA, 201 bp, Homo sapiens
atcattaagtatgttagctgtaggttttttataggtgccctttaaagggttgaagaagtgcccttctattgctagtttactgagggattctgcagtgaatkaatgttataaactgtttttttcttcatttattgggttcatcatatggtttttcttttttagacttttgatgtgctaaatcatattgattgattttctaat

SEQ ID NO: 292557 - DNA, 201 bp, Homo sapiens
gatgctttgtttttgtcttgtttttatacccttgaacattattaatgactgcagagctttctaagtggctttaataacactcaaagaactcttcctatttrtgcccctctgtgctttacaggtgtttgtttttggtcctgataagaagctgaagctgtctatcctctacccagctaccactggcaggaactttgatgagat

SEQ ID NO: 292558 - DNA, 201 bp, Homo sapiens; identical to SEQ ID NO: 60324

SEQ ID NO: 292559 - DNA, 201 bp, Homo sapiens
atagaattcccttctacgtttagaaaataacagggagaagaaaattatctgtattccagccatccacattagcagttggtgtatccttctagatgctttgyttttgtcttgtttttatacccttgaacattattaatgactgcagagctttctaagtggctttaataacactcaaagaactcttcctatttatgcccctct

SEQ ID NO: 292560 - DNA, 201 bp, Homo sapiens
gttaagatgggggaactgctttcctgccaaaagtgccaaagatcaacttggaaaacaaaatcctcacagaggggagagtaaagaacacttgattagtctcrttagcacctgtagctacttttctaaagttaattcctgaaggccttgaagcttcactatgagattgaatttcaccattctcaatgtctttcaataggatgg

SEQ ID NO: 292561 - DNA, 201 bp, Homo sapiens; identical to SEQ ID NO: 60325

SEQ ID NO: 292562 - DNA, 201 bp, Homo sapiens; identical to SEQ ID NO: 60339

SEQ ID NO: 292563 - DNA, 201 bp, Homo sapiens
tccgatgatgtgtacatgaaagagtacaccatgtgaagagaagagagaatgattgaaaatgttttagtatagaactcttcttgcagtgggttgctattttytagattttactttttagggaacaaaataaaatcctttgttaaaactgggtcagagaattctgttgtcatattttgaagtatcagatttatgtcctaaagg

SEQ ID NO: 292564 - DNA, 201 bp, Homo sapiens
cagggtgctttatgaggtagggaccagatctataagattttctttacatatggcattatttctagatgtgatggatttaacaaacctattgttatctgatratttttacagtatttgggtacccagaggtaccttgtatttggatctaactaaattattgcaattttaaaggggttgctgctattttctcatagcagtaaa

SEQ ID NO: 292565 - DNA, 201 bp, Homo sapiens; identical to SEQ ID NO: 60328

SEQ ID NO: 292566 - DNA, 201 bp, Homo sapiens; identical to SEQ ID NO: 60329

SEQ ID NO: 292567 - DNA, 201 bp, Homo sapiens; identical to SEQ ID NO: 60330

SEQ ID NO: 292568 - DNA, 201 bp, Homo sapiens
tatgagattgaatttcaccattctcaatgtctttcaataggatggggatagtgtgatggtccttccaaccatccctgaagaagaagccaaaaaacttttcmcgaaaggagtcttcaccaaagagctcccatctggcaagaaatacctccgctacacaccccagccttaagtctcttggagaagctggtgctgtgagccaga

SEQ ID NO: 292569 - DNA, 201 bp, Homo sapiens; identical to SEQ ID NO: 60333

SEQ ID NO: 292570 - DNA, 201 bp, Homo sapiens
acgagcactataggcagaaggagcagttagtgcaagaaactgggcctacaagtgagcttggcatgttggaggaatacaaggaaagctagcatgcttggagmagaagctgcagaaggtggggtgagggacaagagatgagaggaggcaggattccatcacacagggcttgcaggccatgatactcagaattaaatgtaaagt

SEQ ID NO: 292571 - DNA, 201 bp, Homo sapiens; identical to SEQ ID NO: 60334

SEQ ID NO: 292572 - DNA, 201 bp, Homo sapiens
ttgcatttatcagtctgttttccgatgatgtgtacatgaaagagtacaccatgtgaagagaagagagaatgattgaaaatgttttagtatagaactcttcwtgcagtgggttgctattttctagattttactttttagggaacaaaataaaatcctttgttaaaactgggtcagagaattctgttgtcatattttgaagta

SEQ ID NO: 292573 - DNA, 201 bp, Homo sapiens; identical to SEQ ID NO: 60349

SEQ ID NO: 292574 - DNA, 201 bp, Homo sapiens
ggtaaactggagtttcacttctgagggagggaaggacgtgaactggcttaaaaccagttccttttgcatgattcagcaaaacagtctttatggactcacartggaaaaagaactcctaacttttctaatttatcctccttttaacgatagaggaggaaacgccctgttccatttcttctcaacttctggagaccttctgtt

SEQ ID NO: 292575 - DNA, 201 bp, Homo sapiens
ctgcatttattaactaatatacaagtctgcctaggatcaggtatagtattccctaccttaccgggaagagaagtttgagccttttatatgtttatgacacrtggatttttgcctgatttttccaattttctattctgtatatgatcccaaatcagactgtcaatttttgatccaggtatttttgagaagaaaaaattaaaa

SEQ ID NO: 292576 - DNA, 201 bp, Homo sapiens
gcagccctcatcccccatccccatgaaacataaactatttccagaactcttagcttgtatagattaaatattagcataaaacgtatttactgtgccaacarttataaatgctgtcactttttaagctaaccatacttttttggggttttgttaatgtttattggcctctagatccatctagatttgatcaaaagtggtact

SEQ ID NO: 292577 - DNA, 201 bp, Homo sapiens
gagtgactgtcaaggaatgcctgtctatgaagggacctttggagaaaaacacagagaagatgtgaccaaggcatgtatacttgtgagggacgagcactatrggcagaaggagcagttagtgcaagaaactgggcctacaagtgagcttggcatgttggaggaatacaaggaaagctagcatgcttggagaagaagctgcag

SEQ ID NO: 292578 - DNA, 201 bp, Homo sapiens
aatatctgcatttattaactaatatacaagtctgcctaggatcaggtatagtattccctaccttaccgggaagagaagtttgagccttttatatgtttatracacgtggatttttgcctgatttttccaattttctattctgtatatgatcccaaatcagactgtcaatttttgatccaggtatttttgagaagaaaaaat

SEQ ID NO: 292579 - DNA, 201 bp, Homo sapiens; identical to SEQ ID NO: 60332

SEQ ID NO: 292580 - DNA, 201 bp, Homo sapiens
taactaacaataaagaaagctaatttatgttttaaaaaatatattttccttaagaaaaactagagcagagataaatgaactggaaaatagaaaaataataygaaaaatcaaaaaaatcaaaaaaagttggttatttgaaaagatcaacataattgacaaacctttagctacatgaattaaggaaaaaagaccactcaaatt

SEQ ID NO: 292581 - DNA, 201 bp, Homo sapiens
tatagaaaaatcacaattggccaggcgcggtggctcatgcctgtaatcccagcactttgggaggccaaggtgggcagatcacctctaaggtcaggagttcragactagcctgacccaacatggagaagcactgcctctactaaaaatacaaaagtagccaggtgtggtggtgcatgcctgtaatcccagctactcgggagg

SEQ ID NO: 292582 - DNA, 201 bp, Homo sapiens
aaaacatccatcctgtttcttctgtattcattttttttttcagagaaaccaagtagctgatgaagaaaagttttcatttatagaaaaatcacaattggccrggcgcggtggctcatgcctgtaatcccagcactttgggaggccaaggtgggcagatcacctctaaggtcaggagttcaagactagcctgacccaacatgg

SEQ ID NO: 292583 - DNA, 201 bp, Homo sapiens; identical to SEQ ID NO: 60362

SEQ ID NO: 292584 - DNA, 201 bp, Homo sapiens
ccaagtcattattctgaagactgatgaatagaggaaaggaataaaacatccatcctgtttcttctgtattcattttttttttcagagaaaccaagtagctsatgaagaaaagttttcatttatagaaaaatcacaattggccaggcgcggtggctcatgcctgtaatcccagcactttgggaggccaaggtgggcagatca

SEQ ID NO: 292585 - DNA, 201 bp, Homo sapiens
cggtgctgtatgtaggtcccagttaatcttcacaatgaccctgtgaggttgttgttttcctctccttttctgtaaatgaggagcctgcaggcactgagggrgagatgatgaactcgaaatcacccagcttgcaaatgatagagatgggaccaaccctggtgctgtcgtgtcccacaccccattctctggcttgactctggc

SEQ ID NO: 292586 - DNA, 201 bp, Homo sapiens; identical to SEQ ID NO: 60350

SEQ ID NO: 292587 - DNA, 201 bp, Homo sapiens; identical to SEQ ID NO: 60351

SEQ ID NO: 292588 - DNA, 201 bp, Homo sapiens
gcaagactctgtctcaaaatatatatattagaaactgtactgtacagcaaaccctgtgacatgtaacaaactctcacatgtatccctaaacctaaaagttraaaaaagaaaaagaaaacaagaaaaataaattgtacttgaaagcagacctgtctaacccaaacaccaggctcttaaccattatctgtattgttaaagact

SEQ ID NO: 292589 - DNA, 201 bp, Homo sapiens
tgaagaatctcccggggtctgtgtcctgcccggcttctggtgtccctggctttcttgtgctcttctctcaggctgaaacatcccttctcctatttacaccyggcttgtttttttctccccctggggaattccttctagaaccttctcacttgtcagttcctggataatccttccttgatggcccccacccctagttccatt

SEQ ID NO: 292590 - DNA, 201 bp, Homo sapiens; identical to SEQ ID NO: 60353

SEQ ID NO: 292591 - DNA, 201 bp, Homo sapiens
tccagtggtaccatttccttaatccatgttacatactttttggccatgattaacagtgagtgagtgtacactgtatggcaatgctgtgatagtaccttacwtagattatctctcattatgacatccctattatacagatgaggaaactgatgctaccagaggctaaataacttgccaaactttctaagttaatatgtaata

SEQ ID NO: 292592 - DNA, 201 bp, Homo sapiens; identical to SEQ ID NO: 60355

SEQ ID NO: 292593 - DNA, 201 bp, Homo sapiens
ctggctgcccatcatgtggccccacccaagcaagagaagaaggaggaatgcagaacagaggcccccagagtgtatggcaagagggtggcagcttcctttcytctgtgtactctgtttagttgctttagaaaatggaagcccagaggactcccaaccctgtcctggggtcaggaaacagccagtgagagttagggaccttag

SEQ ID NO: 292594 - DNA, 201 bp, Homo sapiens
tcaaactggtaatgagattggaattcctaaaattaaaaatacaccccactgcatatggagaacaacactaccagcaggtggctccggcagggccgtctgayggacgggtgagtcaggtgctggcagtccagggctgaatgtgcttgggtctcctcaaagttgcctggctttttatttatttttattttttatttttttgag

SEQ ID NO: 292595 - DNA, 201 bp, Homo sapiens
ctgaatgtgcttgggtctcctcaaagttgcctggctttttatttatttttattttttatttttttgagacagagtctcgctctgttgcccaggctggagtrcagcggtgcgatctcggctcactgcaagctctgcctcccgggttcacgccattgtcctgcctcagcctcccaagttgctaggactataggcacccgccac

SEQ ID NO: 292596 - DNA, 201 bp, Homo sapiens
ggccttcctcactggcacctgtgcccgctctccactcagctgtcctgcagcaaacacttcaccctccaccttccattttcccccactactgcagccgcctytgagcctgtggctatagagcctatctctatgtcaataaacaacagctgaagataaagaaagaaagtgggaacattaactacatacttactgaaataaaaa

SEQ ID NO: 292597 - DNA, 201 bp, Homo sapiens
caaagttgcctggctttttatttatttttattttttatttttttgagacagagtctcgctctgttgcccaggctggagtgcagcggtgcgatctcggctcmctgcaagctctgcctcccgggttcacgccattgtcctgcctcagcctcccaagttgctaggactataggcacccgccaccacgcctggctaatttttttt

SEQ ID NO: 292598 - DNA, 201 bp, Homo sapiens
ttgggaggctgaggtaggagagtcacttgaacctaggaagcggaggttgcagtgagctgagatcgtgccattgcactccagcctgggcatagtagcaagaytctgtctcaaaatatatatattagaaactgtactgtacagcaaaccctgtgacatgtaacaaactctcacatgtatccctaaacctaaaagttaaaaaaa

SEQ ID NO: 292599 - DNA, 201 bp, Homo sapiens
aaatcacttaaattgttttagtgatttttggcatattagtctggtttgagaaggagggagaaaacaagggaattgattttgtaatgtcaaacagaacttamaaatttaggacagatttacctagaccattatgaataaataaatagatccttttaattggtaagaaactagaccaaatttaatatagttgatttagtacta

SEQ ID NO: 292600 - DNA, 201 bp, Homo sapiens
cttttaatgtcctagtctcctaattctatcaaccctgtcatttctgggttggttttgattgattgatagctttccttctggctctgttttcttgccttagtttttttaacctgctagttaattaattgatgcatatcaggcatgtaaaataagacactgtaaattgtgccctgttgggtgctggacatttttatattccta

SEQ ID NO: 292601 - DNA, 201 bp, Homo sapiens
taacctgctagttaattaattgatgcatatcaggcatgtaaaataagacactgtaaattgtgccctgttgggtgctggacatttttatattcctatattctttttttttttttaagagatggggtcttgctctgttacctgggcagtagtgcagtagcatggtcataggtcatggcagtattaaactcttgggctcaagtg

SEQ ID NO: 292602 - DNA, 201 bp, Homo sapiens
atcatacattaaaaaaatgtgactctatgttctttaaaaaatttggtggggcatggtggctcaaacctgtaatcccagcactttgggaggctgaggcgggyggatcatgaggtcaagagatcaagaccatcctggccaacatgatgaaacctcatctctactaaaaatacaaaaattagttgggtgtggtggttcacgtct

SEQ ID NO: 292603 - DNA, 201 bp, Homo sapiens
ctcgagcttccagattcagaaaaagtactttgaaaaatcaaatatatttattgttccagagacattaaacaaatattacccaaagaatctctgtaaatacygaaagaaatgaatcatttaaataccttagtaccttaaaaaggtgatatcaatctagcctaggcaacatgccgagattttgtctctctctccccttttttt

SEQ ID NO: 292604 - DNA, 201 bp, Homo sapiens
ctctgcagcctcaacctccagggctcaagtgatcctcccacctcagcctcccaaggagctgggactataggcgtgcaccaccagttttaatttatttatasagacagggtctcactatgttgctcaggctggggaaataaatttttaattttaattctaatttaaatagttgcatgtagctattaaagcagtgtagctctg

SEQ ID NO: 292605 - DNA, 201 bp, Homo sapiens
ttattgagcatttactgtttgcaaaaggcagctggagatattatgtccagtttatatttactaaatgttttctttgttgttaatttagcctttttctgcawtgtttttggtcagtagtaactctgggcaggtgagggcaattacattgtggctggaaaatttgtactctgaagttgcttttattggtgtgtaggaaaaatc

SEQ ID NO: 292606 - DNA, 201 bp, Homo sapiens
agattgcctctagttaaaattttgttttaatttaatactagaacagcagctttccattaaaaagtgctaacctctgactaggactcactttccatctctcyttagagcctgcagcactttctcagattgaccagcctacaattgtgtatcaactgcttgtttactaactgccaagaacctttgtgtaagtcagccaatacc

SEQ ID NO: 292607 - DNA, 201 bp, Homo sapiens
gaacatatagcccaaaatatgtggttgagtacattttgtttttgattgattgttcaaagatataatttttaagtcttcatatataagttaatgtataattrtgcaagaaggaaaagaaagtgatgatggcactttgaggactttcaggcttagagctaattagtctgttatctggtagagcactaatgtacatggctgatt

SEQ ID NO: 292608 - DNA, 201 bp, Homo sapiens
caggataccagaaggccctattgatcaggggccagctataggaagagtacgcgttttagaagagcagcttgttaaggccaaagaacagattgaaaattacmagaaacagaccagaaatggtaggtgattatacagtgttttcccctcctcagtatatgggctttagcacagataattgaaagtttccttttatcaaaatgt

SEQ ID NO: 292609 - DNA, 201 bp, Homo sapiens
tgttttatataggtggtcacttggtacgagataatgaccatcctgatcactctagccgagaactgtccaagattctggcaaagcttgaacgcttaaaacarcagaatgaagacttgaggcgaatggccgaatctctccggtaggtcctaaaatactgaacgaagaatgatgaaatattgtactttgtttttaggtgtaggg

SEQ ID NO: 292610 - DNA, 201 bp, Homo sapiens
cttcttataaggattccagtcatgtattagggtccatcctaatccagaatgacattatatcaacttgattatatctgcatagaccctatttctagccgttmcacattttgggaggacacttatttaactcagtataggggacatgtagtttcagtcttcagtgcccaaactgtatgtaggtacagtgtttgctctcagtgt

SEQ ID NO: 292611 - DNA, 201 bp, Homo sapiens
tgcagccttgacctccttggctcaggtgattctcccacatcagcctcctgagttgctgcgattgcaggtgcacaccaccatgcctggctaattttttgcattttttgtagagatggagttttgccatgttgcccaggctgatcttgaactcctgtgctcaagcagttccccacctcagcctcccaaagtgctgggattaca

SEQ ID NO: 292612 - DNA, 201 bp, Homo sapiens
attgcttttttatctgaatcggccctttctatcccatcattatgataacatccatcttggtagtagtaaaactgttgcaaactgcagaaatgaactgtgatttttttttttttttttttttttttaaagacagggtctcactctgtcacccaggctggagtgcagtggcatgaacatcttaatagctcactgcagcctcaa

SEQ ID NO: 292613 - DNA, 201 bp, Homo sapiens
ttccagcactttgggagtctgaggtgggagaattgcttgagcccaggtattcaggactaccctggccaacatagtaatacttcgtctctattaaaaaaaawaataataatttttaatgtccttgtttgctaacatctgggttggtttcagtcaattgattgctttattcatgttttcatgcctctttgcatatctggtaat

SEQ ID NO: 292614 - DNA, 201 bp, Homo sapiens
aacctaacttgaattgactatagaaaggcatttaaaacaaaagaaaaatagaaccagatgtttaacacaaatatgaaggcttactgatgacttaaactcargggtaatctctttatcatttggcagtagtttctttttctttttttcttctacagccttattgagatatagttgacacaaaataaacggcacatatttaga

SEQ ID NO: 292615 - DNA, 201 bp, Homo sapiens
agctcaagtgatcttcctgtctaagcctcctgagtagctaggactacaagtgtgtgccaccacgtctggctaaaaattttttttagacatgggtcttgctrtgttgcccagactggtctgaaactcctggcctcaagcagtcctcccacctctgcctcccaaagtgctgagattaggggcgtgagctacctcacccagcct

SEQ ID NO: 292616 - DNA, 201 bp, Homo sapiens
acacagatctgctttctatcattatagatgagtttgtgtttcgtagaattgtatataaatggagacctacagtacatactattttgtctggcttcttttaytcagcgtaattattttgacgttcatctatgttgtatgtattaataatttgttattcttaattactgactggtattctattatatggttatgccaaaattt

SEQ ID NO: 292617 - DNA, 201 bp, Homo sapiens
cagacagtgcatttacatactattagaagagaaaaggtttattgtagttgctatgttcataaaaagtttctgattgaattacaagtagatggcttattctscctctgtatgtaacaaacaaggagtgaagaggaatctggggctgcaaagcatcgctctccagttgtatccagagaatctactcaggaggggcaacgtatt

SEQ ID NO: 292618 - DNA, 201 bp, Homo sapiens
atttacttatttgcctgttgatgaacacttggttgtttccactttggggctgttataaataaactgttgtgaatatttatgtacaagcctttctgtgggcrtatacttccatttttcttggctaaatacctaggagtggaatggctgggtcgtataacagtgtaggtttaactttttaagaaactgtttgaactgtttaca

SEQ ID NO: 292619 - DNA, 201 bp, Homo sapiens
tattcttaatgctgagggtttggaaggaaagttgttattattatttaaaaaattaatttgtttagttaatgtgatgggggagggggcatgagacgggtctkcttttcttttctttcttttttttttttgagacagtgtcttgctctgatgcccaggctggaatatagtggtgtaatcttggctctctgtagtcccgagctc

SEQ ID NO: 292620 - DNA, 201 bp, Homo sapiens
gagtggaatggctgggtcgtataacagtgtaggtttaactttttaagaaactgtttgaactgtttacaaaagtgattgtgccattttatattttcatccarcagtgtctgagacttttagttctcatataccctaactaacactttgtatggttatcttttaaattttagctattttagtgtatgtgtaggggtatgtcat

SEQ ID NO: 292621 - DNA, 201 bp, Homo sapiens
acatttttttgggagcagggctgtattctgtgccccatgtactaagctatcttgtctcatttaactagccactgttatctgaatagttgagttttacatgygtaaccacttgacctgattagtcttaatttttttcctgatgtttttatttctttatctcttagaaaatgacataattgaatcagttttgttggttattac

SEQ ID NO: 292622 - DNA, 201 bp, Homo sapiens
gaaacatattagcaaatgcctctgaaaatacacttattagtttgccaataaatgagtaatgttgcagttgtgagttaaatgtgcattaaatgtttgagaawatattgggcttaaaatacagttttaggcttctatttctggataagatatagtaaacacatcatacactatatatattagtctattctcacactgctataa

SEQ ID NO: 292623 - DNA, 201 bp, Homo sapiens
ataggccaggcacggtggagcacgcctgtaatccctgcactctggaaggccaaggcaggcggatcacctgaggtcaggagttggagaccagcctgaccaayatggagaaacctcgtctctaccaaaatacaaaaattagccgggcatggtggcatgtgcctgtaatcccagctactcgggagactgatgcaggagaagtgt

SEQ ID NO: 292624 - DNA, 201 bp, Homo sapiens
aaacactatagaagaccatactttacaggaaccatttctgtagttccttaaaacactatagataaatcaaaattaaatactaaaaaaggttcagagtatgyatagacaaggagaaatgggaacaacaaaaggagcaaataaaaaacaataaagtggcgtacttaaatcccaacatgtcaataattgcatgaaatataaata

SEQ ID NO: 292625 - DNA, 201 bp, Homo sapiens
catctgcaggctggagaacaggaaagccagtggtgtgaattagtccaagctcaaaggccagaaaaccaggggaacccaaggtctaagtctcagttcaaggyggaaggccttcggaggggattgctgctgctggataagtcttggagtctgaaggcccaacaattagtagctctggtatttgagagcaggaggtgaaagtac

SEQ ID NO: 292626 - DNA, 201 bp, Homo sapiens
aaaacactatagataaatcaaaattaaatactaaaaaaggttcagagtatgtatagacaaggagaaatgggaacaacaaaaggagcaaataaaaaacaatraagtggcgtacttaaatcccaacatgtcaataattgcatgaaatataaatacaaatgatctaaacataccagttaagaaagagagaaaaaaaaatacagg

SEQ ID NO: 292627 - DNA, 201 bp, Homo sapiens
ctccccatagtgagcttgaactgtgagtggtaaagactcattactttgtagggtgtcctggccctaaaaataaaacttctttctcatagcctacagcctaygaatgtgattattctgtaagcctctgtaagtcactgtaagaacagtgactgtggcttcatttttatttattttatttttcttatttatttatgagacagt

SEQ ID NO: 292628 - DNA, 201 bp, Homo sapiens
ctaaaaatacaaaaacaaaattagctggcatggtggtgggcacctgtagtcccagctactcgggaggctgtggcaggagaatggcatgaacctgggaggcrgaacttgcagtgagccgagatcacgccgctgcactttagcctgggcgacagagcaagactccgtctcaaaaaaaaaaaaaaaaaaagtacagtgactgta

SEQ ID NO: 292629 - DNA, 201 bp, Homo sapiens
accacgcccagctaattttttgtatttttagtagagagggtttcactatgttggccaggctggtctcgaactcctgacctcatggtctgcccgcctcagcytcccaaagtgctgggattacaggtgtgagccaccgtgcccagccagtctagaggtcttttattttttttaacacctgttatgctatgaattcacagggaa

SEQ ID NO: 292630 - DNA, 201 bp, Homo sapiens
taggactggcctcctgtcctatcagtgctgttggtaggaccctcaaggcagggttgtcccagttgtctttatcaggcagtttaccaagatcggttgggcagtgtttctctagaacagatttctgcctaatagaagaggaaaacttcatggcagttaataagaaagaatgtttgtaagaatggcctcctgtcctatcagtgc

SEQ ID NO: 292631 - DNA, 201 bp, Homo sapiens
aggactggcctcctgtcctatcagtgctgttggtaggaccctcaaggcagggttgtcccagttgtctttatcaggcagtttaccaagatcggttgggcagtgtttctctagaacagatttctgcctaatagaagaggaaaacttcatggcagttaataagaaagaatgtttgtaagaatggcctcctgtcctatcagtgct

SEQ ID NO: 292632 - DNA, 201 bp, Homo sapiens
agatattgtaaaatctactgaaaatttcccagtttagtaattaccaaagaaataataaaccaatattaaagttcagttacaaaattaaagtcaggactcayaaacaaatcatgttaaatgagttatgaattaaattagtgttattgttgagtttaactgtgtgtcaaatcaatataatttctttgacataatcacagaata

SEQ ID NO: 292633 - DNA, 201 bp, Homo sapiens
tagcatttacaaatgtgtagtagcaggaatatatttaataataattttaattttgttttggaggtactttgagggaggtatgtctacataattaaatggcaaagaacggaagtttttaagtttttttgtatacttataaatttaatttggatttagttattaataaatattaggttgaactgcacttttaatctaaagatt

SEQ ID NO: 292634 - DNA, 201 bp, Homo sapiens
agcatttacaaatgtgtagtagcaggaatatatttaataataattttaattttgttttggaggtactttgagggaggtatgtctacataattaaatggcaaagaacggaagtttttaagtttttttgtatacttataaatttaatttggatttagttattaataaatattaggttgaactgcacttttaatctaaagattt

SEQ ID NO: 292635 - DNA, 201 bp, Homo sapiens
tatattttttttctagaagattttatataatcttttcctgttactacttttgcccattctttttgtgaccatctccaagtcatttcccttgtatctcaccstcattccttattatcttcctaggaaaacttatttgtccaactctgtagctatcctctggctggataacaaaattattaataattccttaagatgttaccc

SEQ ID NO: 292636 - DNA, 201 bp, Homo sapiens
gcatttacaaatgtgtagtagcaggaatatatttaataataattttaattttgttttggaggtactttgagggaggtatgtctacataattaaatggcaaagaacggaagtttttaagtttttttgtatacttataaatttaatttggatttagttattaataaatattaggttgaactgcacttttaatctaaagattta

SEQ ID NO: 292637 - DNA, 201 bp, Homo sapiens
tttaaaaaagtaatctcatttgcaatagctacaaataaaattaagtaacaagaaattaaccaaagaagtaaaggatctctacaatgcaaactataaaacaytgatgaaggaaattgaagagaacataaaaaatggaaagatattctatgttcatggattggaagaataaatattgttaaaatgtttatactatccagagta

SEQ ID NO: 292638 - DNA, 201 bp, Homo sapiens
catttacaaatgtgtagtagcaggaatatatttaataataattttaattttgttttggaggtactttgagggaggtatgtctacataattaaatggcaaagaacggaagtttttaagtttttttgtatacttataaatttaatttggatttagttattaataaatattaggttgaactgcacttttaatctaaagatttat

SEQ ID NO: 292639 - DNA, 201 bp, Homo sapiens
gggcaccacagacactggggcctatcggagggtggacaatgggaggagggagaggatcaggaaaagtaactaatgagtactagacttaaaacctgagtgastaaataaagtgtacaacaaacccccatgacacaagttaacctgtatacaaacctacacgtgtacccttaaacttaaaatttaaaaaaaaaacaaaatgca

SEQ ID NO: 292640 - DNA, 201 bp, Homo sapiens
ttaatttatttcaataacttgctgtttttatcaggaaaaattaatgaactaatcaaaatgttccattctatacatagtttgctcataacaaactcattttwttagaaatgttatagcaaccttattttttttttatcctccacaagatcattttagtgtagttactggagtttcaaatcatacgtaattcagtttgaaaac

SEQ ID NO: 292641 - DNA, 201 bp, Homo sapiens
ttgtcttgcttattgtatcttgggcacccactacagtgccaaacacatggcaggcaatttgttgtggatgatgagaaagaattttggaggaatcttcttcttttttttttttttaaattcatactaccaaattatttcaagctacagaggtctttagagatcatttagataactcttttggatgttatgcatgagaagaca

SEQ ID NO: 292642 - DNA, 201 bp, Homo sapiens
cccatttgaattgccttggtcccttttgtctaaaatcaatcagtaatatatggatctatttctggtttctccatcctgttcagctgctctatttgtgtctrtccttacactttaaatttttatcagccatcagatatttcacagcatgttgattagaaagctgtacatatgcctagaagtggtattgttaggtcatatgaa

SEQ ID NO: 292643 - DNA, 201 bp, Homo sapiens
gtctagattctataccctgtttttgtttgtttgtttgttgtttttgcaagtagatgtctaatttttccagcaccatttgttgaaatactatcttttctccrttggattgcctttgctccattttcagagatcagttgaccatctctgtgtgggtctttttctgggatcttctgttccattcatctatttgtctgttttcca

SEQ ID NO: 292644 - DNA, 201 bp, Homo sapiens
atcaaccttgtatcctacaaccttgatatagttacttattagttccagcaggggttttttgctggtttttttggggggtggaggggcaggggcaagttgcmaactcttgggatttcctacataaatgaccatgtcatctgtgaacaaagatagttttatgtcttccttcccaatctgtataccttttctttctttcttttg

SEQ ID NO: 292645 - DNA, 201 bp, Homo sapiens
taacgtccacgtgattagttgttgtggcctgtcttttatttctaatattagtaatttgggtcttctccccttctttctcagttagcctcactagaggtttmttcattttactgatattttcaaagaactagcttttcagtttgttaattttctctgttgtttttctattttcagtttcattgatttcttctgcttactttg

SEQ ID NO: 292646 - DNA, 201 bp, Homo sapiens
agaaataatatttctaagcatgtagcacactgctcagcacatggtcttagtgttagaatcattacaagatagggactctagtttacatggaggtgagactragctgtaaaatcttgtagactgatgctgatacctacaaggtgggctgtgagcaagagataagtcacttagcagaaaggagagtatagcagacccacccag

SEQ ID NO: 292647 - DNA, 201 bp, Homo sapiens
gaggtcttttattttttttaacacctgttatgctatgaattcacagggaataggttccagcagctcaggctccttcccactggttctcacaaagtgtgctkctctggatggagcaggctggtgcttcagtagaacccgggtacctttctctttggcttctttctttttccgatcattttcctttacgtgtttcaggaagct

SEQ ID NO: 292648 - DNA, 201 bp, Homo sapiens
actcctagctatttgacccaagttagctgaaagttcacattcacagaaaccttttatttttgaatatatttttactgaataacaaagtgtagttttgtcattttttttttttagcattttaaaaagatgttgtcccattgtcttactagattgtatttttttctgattagaagccccctgcatttctttgttaccatgtat

SEQ ID NO: 292649 - DNA, 201 bp, Homo sapiens
tgccaactaagtgccaaataccgttctgagtgcctgggatacatcagtgaacacaatgaacaaaaattatggcgtttgtattttagcaagcatggttcagrcaataaacagtaaccataagtaagtaagcaagcattcattgtagttagtagatagggaaaaaattctgtacttgttcttttaaaccttgcagaggaaaat

SEQ ID NO: 292650 - DNA, 201 bp, Homo sapiens
cttctgtgtgatccctacccagaatcagcaaatgcttcccaagtaagaacatagctagttcagcctgctctggaattttagttaatttaatccctcacttccacagctctctaatgcctttaaaaggattatatttgcaagttttttttttttctgggagtggtggggagtgcttattgtcattattacagtgagaatgag

SEQ ID NO: 292651 - DNA, 201 bp, Homo sapiens
tgactttttcctgtaattatatgtatacagtacatatgtaatctttcatacatgggcattaatttcatagctgtgagtacagaaaatcccattttgatagratatccaaataggatactttttggatagtctgaccttttgctcatttaatgacaagttggttacctctgttcacttagaaccaacctcccttcctccctc

SEQ ID NO: 292652 - DNA, 201 bp, Homo sapiens
aatttgtttagttaatgtgatgggggagggggcatgagacgggtctacttttcttttctttcttttttttttttgagacagtgtcttgctctgatgcccargctggaatatagtggtgtaatcttggctctctgtagtcccgagctcccaaactcaagcagtcctctcacctcagccacccaagtagctgggactacaggc

SEQ ID NO: 292653 - DNA, 201 bp, Homo sapiens
taatttggaaaacttgcacattcttcagaatgattgctcaccctgagataaatcacttaacctctttgggtctaggatctacaattgtaggaaaagtagaytggggtaggtgatcacattcaataaatgtatttattgaaacagaatagttaaatatatactaggttaaatagaagcatagaatgggctttatttctcata

SEQ ID NO: 292654 - DNA, 201 bp, Homo sapiens; identical to SEQ ID NO: 60386

SEQ ID NO: 292655 - DNA, 201 bp, Homo sapiens
ttctttctttggggatcccagtatgaacccaaaatgacaatttatgaagttgttaagccacaattcacatccactaattgctttatatggctatacatgaygatgcatgtttgaagtttatatcatttatgtaaattcctagatctagtacacattatagagaaaaatctgtatcttacccataggaacttctctagagcc

SEQ ID NO: 292656 - DNA, 201 bp, Homo sapiens
taaccaacaggaagatctggtaaaactctgataagtaccttatgggctctaggcaacataagcgacatttaatttatttagattgctgaaaataataagcaaaaaaaaaaaagaatgctgagtcaaatgcaattaatttagcatctatagtaacttggttttagtgattttaatgattaattagaaagtgcatagaagctg

SEQ ID NO: 292657 - DNA, 201 bp, Homo sapiens
aattttatactcctcaagagtttccacatgagagtcacacagaacaatgaaagtaagaagaaaaaaagtttctacagaagcgaaattaattcccttagaakgaaaaagtacagaaatgcttttttgctctttctgttgacctcatttcccttgcacttggaacaaaatcaatgtgttatccaactggcacgtttggcagga

SEQ ID NO: 292658 - DNA, 201 bp, Homo sapiens
attagccaaactgactttctaataaccatgtagttggcttgattgactatattatattcctagatcatttcatttattttaaaacattttgcatatatacrggaaaacaatttgaagactgtgttttgttctggtgaatacattttaaacatattctaggtttattctttacaagtacattatttctttaatggtacagtg

SEQ ID NO: 292659 - DNA, 201 bp, Homo sapiens
aggaaaagagtgttataaaatccaccaatgggtactgcttctttgtttttacatgtaatctaggtagatttatttatgatgaaatatttagaaaaggaatmctgatttcagtagaaacttctcttttaaatgtcaaaatctacaatagcattatttaatgaaactcacatagaagaaataaaggatcatgggcctatgtaa

SEQ ID NO: 292660 - DNA, 201 bp, Homo sapiens
ccaagaatgaatcttttaagcaatttattctcccctttttagaaaaggttctggcagaatgagttcagagataaaaggacgtgtgacttaggaaaaagcartacgtatttagcatccacctcactatggagtgtaaactatttcattggaaaagtttctgaaaaatctcctaaagtctatttaggacctatccaaggttgt

SEQ ID NO: 292661 - DNA, 201 bp, Homo sapiens
ttggcatagagacttagaattctatagagaacaccatggcacttcccagacctttgctttgatattcaccctttgcttgtcaagggccttgccttaaatctttttttttttttttttttttgagatggaatctcgctctgtcgcccaggctggagtgcagtggcgcaatttcagctaactgcaagctctgcctcccgggtt

SEQ ID NO: 292662 - DNA, 201 bp, Homo sapiens
gaagtttttctacttttttgatgtagacacttactgctataaacttctctgtcagtactgctttcactgtatcccataggttttggtatgttgtgtttccrtgatcgtttgtttcaagaaatttttttaatttccttcttaatttcttcattgatccattggtatttaaggaacatattatttaatttccatgtgtttgta

SEQ ID NO: 292663 - DNA, 201 bp, Homo sapiens
tgctttcactgtatcccataggttttggtatgttgtgtttccatgatcgtttgtttcaagaaatttttttaatttccttcttaatttcttcattgatccaytggtatttaaggaacatattatttaatttccatgtgtttgtatagtttctaaaatttatcttgttactgatttcttgttttatttcattgtggtctgaga

SEQ ID NO: 292664 - DNA, 201 bp, Homo sapiens
tgattgcaccactgcactccggcctgagcaatagagccagaccttgtctcaaaaataataataataattgaagaaaataaaaagggacctgaattcagaakaatcctgttatatcttaaatccttatttcttgatttatatgtactatgatgacagctttgctgatgaattataattacaaaaatgttacataatgttgtt

SEQ ID NO: 292665 - DNA, 201 bp, Homo sapiens
ttgtggtgaactgtgattgcaccactgcactccggcctgagcaatagagccagaccttgtctcaaaaataataataataattgaagaaaataaaaagggamctgaattcagaagaatcctgttatatcttaaatccttatttcttgatttatatgtactatgatgacagctttgctgatgaattataattacaaaaatgtt

SEQ ID NO: 292666 - DNA, 201 bp, Homo sapiens
tgtaccacataacatttcagtcagcgatgaaacacctgtatgatggtagtcccatagattataaaactatacttttactgtaccttttctatgtttagatacacaaatagttaccattgtgttacaactaccttcagtattcaatacaatagcttgctgtacaggtttgtagcctgggagcaataagctattccatatagc

SEQ ID NO: 292667 - DNA, 201 bp, Homo sapiens
agtacttggcttgttcacagcatttaacagaaacaacaagtaattaagcttacttaatactttctaattttgcatatagtcaatatgtaaccagaatccayccatttctacacatcatcgcactgatactgagaggcttaaatgccctaaattttgcctcagttgattgctttatagaaaagagagtaaatgtaattccct

SEQ ID NO: 292668 - DNA, 201 bp, Homo sapiens
tagcttggaccactgtgtatgtagctcttaataaatgtttgttaaaattaactaattcatattcttaaattcttttgtactatatagagatagagagattytaattgtaataatctttcgtgagtttttcttctttatttgaaaaaggatccagacacagagatgaagaatgacttgtaccatcttctgagaacaaatgga

SEQ ID NO: 292669 - DNA, 201 bp, Homo sapiens
ctacatctcagttttatttagactttgttttggagtttcaggaatttgaggtttcaggaatgtattttgtatttagaaaattaagagtggaacttttatartattttctgtctttcacaatcatccatcttcattctcatttgacttttttttgctatattttttttctagaagattttatataatcttttcctgttacta

SEQ ID NO: 292670 - DNA, 201 bp, Homo sapiens
gattctgattcaatatgtccctgggtaaggcctgagattgtgcatttctaacaagctcccaggggaggctggagctactggtccctagaccagactttttwaactcccttccctcccttgagaactactggtttggcttagatccagtgttggacttggatggttgagtggtgagtgatcataaagtaagagtttctattg

SEQ ID NO: 292671 - DNA, 201 bp, Homo sapiens
tcttctttcttcctcaactgtgcttcttgtatccatttcccatcttgcacctattttggaggagaggcagtaaatattttcttatggacttaccatgtttsggaagaccgttttccaaagcgatcaagatcatgttaaattttattccatctagccatgatggctcagttaggatcaggtcaggaaaacagtccacactaa

SEQ ID NO: 292672 - DNA, 201 bp, Homo sapiens
agccaaaatatgttagtaatgctctgctttaaatactcatagaatataattttgcatattttaaactcaatctatctgccagtacaacaatgttatttatytctgagaattttgactattctttcatgctatttagaattcaatgaattgttaaaacttctagtaggctttttactgacagtctctgtctgacttctcctt

SEQ ID NO: 292673 - DNA, 201 bp, Homo sapiens
tgtatcatattttatttggctaagagcctaattataatatatttaatttttaaaaatcttagctatttgtagggtttaaaaaactaaacaacagcaatagratttgtattgctaattgagagataccaggttaaaatacaagttttctatataatttagcagaataaaacacacttatcatttttccattttctgaatttg

SEQ ID NO: 292674 - DNA, 201 bp, Homo sapiens
gacggaggttgcagtgagctgagatcacgccactgcactccagcctgggtgacagtgcaagactctgtctcaaaaaaaaaaaaaatctactttcttagcasatttagtgtgtacaataaatattattaactgtggtcaccatgctgtacgttagatctctcgaacttactcatcctgaataaccctttggccaacatctcc

SEQ ID NO: 292675 - DNA, 201 bp, Homo sapiens
tttggatcttctctcttcttttcttggttaatcttgctaatgctctatcaattttatttatcttttcaaaagaacaaaaatacactaaaaaaaaatccaargtatacaggcaacagataggacgatgaatggaatagtacctcacatcttaatgttaatattgaatgtaagtggtctaagtgctccacttaaaaggtacag

SEQ ID NO: 292676 - DNA, 201 bp, Homo sapiens
tggcacaatcttggctcagtgcaacctctgtctctggggttcaagcgattcccctgcctcaccctcctcagtagctgggactacaggcatgcaccaccacrcctggctaattttttgtattttagtaaagatggggtttcaccacgtcagccaggatggtctcgatctcctgacctcgtgatctgcccaccttggcctccc

SEQ ID NO: 292677 - DNA, 201 bp, Homo sapiens
gattttgagaagaaagttcacttcgaattaagtagaattgacatatattccttatattctttatcaaataacttgacgatttatcttctacaccattctcttttttttttttttttttttttttgagacggagtctctctctgtcacccaggctggagtgcagtggtgggatctcggctcactgcaagctccgcctcccgg

SEQ ID NO: 292678 - DNA, 201 bp, Homo sapiens
tcatagtacagataaggaaacagagcttagaaaggttaaataacttgcccagagtcacacagctaggaaaagttaagagtcacacagtaagactcttactaaagtctgtcttcctgtaaaaactatagtttaaatctctatattatttttctggataatgcagctaaccagcattttaaaaggcgctgatttgaatgagct

SEQ ID NO: 292679 - DNA, 201 bp, Homo sapiens
caagacagaaagtcaacaaagaaacaatggatttaaactctaccctggaacaaatgaacttaacagatatttatagaacattctacccagcaaccacagartatacattctattcatcagcgcatggaactttctccaaggtagaccatttgataggccacaaaacaagtctcaataaatttaagaaaactgaaattatat

SEQ ID NO: 292680 - DNA, 201 bp, Homo sapiens
gccgaggcacgagaatcatttgaatctgggaggcagtggttgtggcaagccaagatcccatcactgtactccagcctgggtgacaaatcgagactgtgtcaaaaaaaaaaaaaaaaagactgtgttgacatctgaatttaagttctgccaactataatttaaaacttaagttcccttaaactggtcatgatggtaagaata

SEQ ID NO: 292681 - DNA, 201 bp, Homo sapiens
tattttcatagtacagataaggaaacagagcttagaaaggttaaataacttgcccagagtcacacagctaggaaaagttaagagtcacacagtaagactcytactaaagtctgtcttcctgtaaaaactatagtttaaatctctatattatttttctggataatgcagctaaccagcattttaaaaggcgctgatttgaat

SEQ ID NO: 292682 - DNA, 201 bp, Homo sapiens
tctttatatataatcagtatttgaagtggagtgtgcagttttgcattgcggtacattggaactcatagtgagtccgatggttacatttctaattcaaacattaaaaactttaaaatagcatttttttaaggatttctaatgaaaggttaacaggattttttttttctttaagtaaaaaggagcattctgttcattgttctt

SEQ ID NO: 292683 - DNA, 201 bp, Homo sapiens
agatttgagtaatcaaataacttgagaatttaattttccagtgtttttaaaaattaattcatatatatatatatatatatatatatatatatatatatatrtatgtatgtatatatttatttatttattttttagatgtggaggtctttctatgttacccaggccagtcttgaactcctggtctccagtgatcctccctcg

SEQ ID NO: 292684 - DNA, 201 bp, Homo sapiens
ttctccatgttggccaggctggtcttgaactcctgatctcaggtgatccgcccaccttggcctcccaaagttgttcctttttgtttttgagatggagtctygctgtgtcatccaggcagaagtgcagtggcacgatcttggctcactgcaacctccgcctcccaggttcaagcaattctcgtgccccagcctccgggtagc

SEQ ID NO: 292685 - DNA, 201 bp, Homo sapiens
taagttaacagaacggttttactccaaaatccgttctcttaattgctaaatacttagcttttctgagctttttctcttctacgtacggggatataattccwatagcacagcattgtgatgattacatgaaggaaaatatataaaatactttacctagtgcgtgacacattatagattctagtaggctctggtcagacctat

SEQ ID NO: 292686 - DNA, 201 bp, Homo sapiens
catgtggaactggaaatattgccagggctatttatttatttattagtttatttttgaaaatccagtctgctacagtgccttatatacacctctattatcasattgaccatctcgatgtcattcatgtctttcatgtctatccttctgactgaaggatgcaagcacctggaagttttagtctgtgatttattaactttagta

SEQ ID NO: 292687 - DNA, 201 bp, Homo sapiens
tagctgagggctccaaaggtagtcacttcaagaggcagagatagatggagaacaagccaggaggaatgtgtgtccttgatataacctagcctcagaagtcrcatagcatcacttctgccctactgtattggttagagcagtcatgagccccactaggtagaagaggagaggtagagatctcctctcttggtggagagggga

SEQ ID NO: 292688 - DNA, 201 bp, Homo sapiens
tgacacaatgggggtcaatatgtatttattggataaaggaataagagaaagaatgaatgaaacttctactaaacctacctatactccagctgtccctgttracaggacctcatgtggaatacttgaaggctgggctggaatcatctgagagcacattctcttggctgatgctggaaagagccaaacatttggagcatgcga

SEQ ID NO: 292689 - DNA, 201 bp, Homo sapiens
ccagtgtcaatgcgagcatcaatctttatgaggaatctggcattcttcttaagactttgtgtaatccagtgaagcagtacagacaagttcgatctccattrttgtttgttttaacaggtctataatgacggatctatactacctcagtcagacagatggagcaggtgattggcgggaaaaagaggccaaagatctgacaga

SEQ ID NO: 292690 - DNA, 201 bp, Homo sapiens
ctgtgttactggaaatcgcctatgtgcaaagcatctcctttgtcacctattttcttatttgaatcttaaatctaaagcaaagaatttatagttggagaatmacagcagttgacagcccagttgtagataggcacagtatcagaaaggttttctgaaaatattgcttatcaggttctgggatcaatttttatttttctgaaa

SEQ ID NO: 292691 - DNA, 201 bp, Homo sapiens
atacattaatcctattctgtgttactggaaatcgcctatgtgcaaagcatctcctttgtcacctattttcttatttgaatcttaaatctaaagcaaagaayttatagttggagaataacagcagttgacagcccagttgtagataggcacagtatcagaaaggttttctgaaaatattgcttatcaggttctgggatcaat

SEQ ID NO: 292692 - DNA, 201 bp, Homo sapiens
aaatacattaatcctattctgtgttactggaaatcgcctatgtgcaaagcatctcctttgtcacctattttcttatttgaatcttaaatctaaagcaaagmatttatagttggagaataacagcagttgacagcccagttgtagataggcacagtatcagaaaggttttctgaaaatattgcttatcaggttctgggatca

SEQ ID NO: 292693 - DNA, 201 bp, Homo sapiens
ctcttagtcctgcagagatcatattactgtggtcccctttatccatggttttgctttctgcagtttcagtatacacagtcaactgtggtctgaaaataagwttttgagagagagagaatgcaagagaaagaccacattcacctaacatttattacattatcttgttataattgttctattttattattattcttgttaatc

SEQ ID NO: 292694 - DNA, 201 bp, Homo sapiens
tggagcaaaattgccctggttgagaactacagttctagtcacaagattctaaagttaaataaacatacacatgtctaaatgtttaccaacctcacatgtargtaggcactgagacttacagggttgtactcatgttttgcttttcttctcccaatcctccttagtaataccattaggcttattctggaatagaaagaaaat

SEQ ID NO: 292695 - DNA, 201 bp, Homo sapiens
gaccctcacttaaaattgtgacaaccaaagatgtctccagacattgccagatgccagatgcccctgtggagcaaaattgccctggttgagaactacagttytagtcacaagattctaaagttaaataaacatacacatgtctaaatgtttaccaacctcacatgtaggtaggcactgagacttacagggttgtactcatgt

SEQ ID NO: 292696 - DNA, 201 bp, Homo sapiens
aagtcatggtcctaaccttttttggaatactgtttggaagacaaacatgtaaactgactcctgatgcttcagggtttctatataagaactattattccttyagcaaatatttattcctcctctattatattccagattcttttcaaaagacatcctgtatgaatacttttaaacacacactatctctagcaagactaccaa

SEQ ID NO: 292697 - DNA, 201 bp, Homo sapiens
ttagaaatattaagagtgacttcagggagccttctgtttagtggcatgaagcaaacaaatctcttttgtcttttttcttttgacactgtcctgcctgcctyatcctgaactgcataactcactaagatattacctgttttccattagccattcttttagtccccaacccagagttaagtctgtcagaatatcattgagatc

SEQ ID NO: 292698 - DNA, 201 bp, Homo sapiens
acctagcactttacttggaccttaccttcagtttcagatattgctatttaactttactttcatgcttttcctttttccccccattggaaggaaaaggtgatttttttttttaattttcaaggagatagggacaatctcagtagaaaaaaagtgctttggaaaaatatttttctttttttcataggttgttggagtacaggt

SEQ ID NO: 292699 - DNA, 201 bp, Homo sapiens
agcccctctgcccggccaccacccggtctgggaggtgtacccaacagctcattgagaacgggccatgatgacaatggcggttttgtggaatagaaaggggrgaaaggtggggaaaagattgagaaatcggatggttgctgtgtctgtgtagaaagaagtagacatgggagacttttcattttgttctgtactaagaaaaat

SEQ ID NO: 292700 - DNA, 201 bp, Homo sapiens
caagtatccagggacacaaacactgcggaaggctgcagggtcctctgcctaggaaaaccagagacctttgttcacttgtttatctgtggaccttccctccrctattgtcctatgaccctgccaaatccccctctgcgagaaacacccaagaatgatcaattaaaaaaaaaaaaaaaaaaaaagaaaagggtgtcctttccc

SEQ ID NO: 292701 - DNA, 201 bp, Homo sapiens
gttattgttctgttcagggtatctaattcttcctgatttaagctaggagggttgtatttttccaggaatttatccatctcctctaggttttctagtttatrtgcataaaggtgctcatagtagccttgaatgatcttttgtatttctgtggtgtcagttgtagtatctcctgttttgtttcttattgaggttatttggatt

SEQ ID NO: 292702 - DNA, 201 bp, Homo sapiens
tttctcttcttttcttggctaatcttgccaatgatctatcaattttatttatctgttcaaagaacctgctttttgtttcatttatcttttgtatttttttgtttgtttgtttccatttcatttagttttgctctgattttggttatttcctttcttctgctgggtttgggtttggtttgttcttgtttctctagttccttg

SEQ ID NO: 292703 - DNA, 201 bp, Homo sapiens
aggcggagcttgcagtgagccgagatcgtgccactgcactccagcctgggtgacagagtgagactctgtctcaaaaaaaaaaaaaaaaaaaaaaaaaaaamcctgagactgggtaatttataaagaaaggaggcctaattggttcactgttctataggctgtgcaggaagcatagtggcttctggggaggcctcaggaaac

SEQ ID NO: 292704 - DNA, 201 bp, Homo sapiens
gtttcaccgtgttagccaggatggtctcaatctcctgaccttgtgatctgcccacctcagcttcccaaagtgctgggattacaggcgtgagccaccacgcrcggcccacaccatcctcttatattatttctagcctaaaacattctgctgtggctgataaacagttactatgactacctttgtttttgaaagtatcaggat

SEQ ID NO: 292705 - DNA, 201 bp, Homo sapiens
ctctgagatcatgtaatgtatccagtttaatttctttctataatactagtctttaggcaattggtcagtccttctaggctctaatgatgtttataatcccsaacataattctataggatttccagtgtaatcctagattattgattttaccttattttctgaattatttccttgaatcactgtaaaacataatcacttgca

SEQ ID NO: 292706 - DNA, 201 bp, Homo sapiens
tgggctgcacccactgtcctgcatccactgtctgacaatccccagtgagatgaacctggtacctcagttggaaatgcagaaatcacctgtcttctgcgtcrctcaggctgggagctatagactggagctgctcctatttggccatcttggaaccattgaggatcaaaataaaattgataagatacacagaagactggttaa

SEQ ID NO: 292707 - DNA, 201 bp, Homo sapiens
caccacgcctggctaacttttttgtatttttagtagagacggggtttcaccgtgttagccaggatggtctcgatctcctgacctcgtgatctgcccgcctsggcctcccaaagtgctgggattacaggcctgagccaccgtgcccagcttgtcttaaatgttttgactcagactggttcaacttcactcactcagtttaaa

SEQ ID NO: 292708 - DNA, 201 bp, Homo sapiens
cccgccaccacgcctggctaacttttttgtatttttagtagagacggggtttcaccgtgttagccaggatggtctcgatctcctgacctcgtgatctgccygcctcggcctcccaaagtgctgggattacaggcctgagccaccgtgcccagcttgtcttaaatgttttgactcagactggttcaacttcactcactcagt

SEQ ID NO: 292709 - DNA, 201 bp, Homo sapiens
ataaaaaaacacatctgtaaattattgcatttgccatcttttattaaagactgccttgcaattctgtttcacggaaatgaattaccagtaggtctttagartatgctaagatgacgaaaagggaagaaggaattcttctcaaaagatttgaatgtagtctttgagttgtagctaaagaatagtctgaaccctctatctact

SEQ ID NO: 292710 - DNA, 201 bp, Homo sapiens
gaattaatcctcttggtttcttacaagctttattatggtggaactttgccttcatatatttgcattggttaaaattatcctaatattaaaagactttaaakatttttatttctaatgtttccagtaaaactgaaaataacttagttaaaaaatatttttgcatttaaaactatagaaaataaggcattttctttataaaat

SEQ ID NO: 292711 - DNA, 201 bp, Homo sapiens
cttaagtaattttcacagatttaccttgtatttctaaaacttgaattatcattattgcaaggagctagaatatatctgcctattagtgagtctgacttttwagtagatcccatatataaaaatctcatattataaaatataatttattatgtttatagtttagagtaaagcttcttttagtaatgagacccttctatatat

SEQ ID NO: 292712 - DNA, 201 bp, Homo sapiens
agtcctcccacctcagcctcccaaagtgctgggattataggtgtgagccactgtgcctggcctcaacaatttataatttggttttttaaaggatattgackattttaggctatatatgatgactagctttcaaaatgcttttctagcttatataaacaatattgaatagatgatttagtgatagagaactccacttaaatt

SEQ ID NO: 292713 - DNA, 201 bp, Homo sapiens
aaatcacacaactgagttcataacagaaccttcactggaccaaaatcatatctttaacctctctatccaagctctttcattagagaatgttgtcttaagtwattttcacagatttaccttgtatttctaaaacttgaattatcattattgcaaggagctagaatatatctgcctattagtgagtctgacttttaagtagat

SEQ ID NO: 292714 - DNA, 201 bp, Homo sapiens
ctcagaatttcttaatgttacaactaaagaggatgtagaaagcatcctttctttattcatctggaatcaaaggcctagttaaggctaaatgacttacccasggtcatacagcttataaatgccagaactctggttagcacattcacttgtacatacccccagtctaagtccttatcagtaaactcatgccaaacactttac

SEQ ID NO: 292715 - DNA, 201 bp, Homo sapiens
ttgaaccctgttgtgtctatttgactattttaatatgaactaaaaatgttagcatttcttatttgaggtgaaattataaagaaaatttgtttccagggttyacttcatcctccttaaaagtaaagtattttgtttcctcactctcatgttatatacctcagtctggattagaactaaaaccacttacttgattttgagaag

SEQ ID NO: 292716 - DNA, 201 bp, Homo sapiens
cccagaagaatggtactttgcagaatggaaaaaccagcaaaactgtgtaacttaaaactctgacttttatttaaaacgaaacatttggagcagcttttgcrcaggaacagtttcaaccattgttttccttttgcaagtacttcatcttttacacttgatcttagccaaaaggccgagaactgatactttatctttttactc

SEQ ID NO: 292717 - DNA, 201 bp, Homo sapiens
acgtacaaatagaaaggacttttattatgtagaatatacccttttactgaccattttcaagatccttaagtataagaattaaaatcaaaacaaacttttakgtttgcctctggtaatttttatatgatacaaaagtccattttatttttacattggctcaaatgatagtgtataggtttctaggtctgtagctgggaccat

SEQ ID NO: 292718 - DNA, 201 bp, Homo sapiens
ttatatgacagagctttgttattttgtcctgcctttaccacttcatacttctttttcctcctagctctaagtagtcagtgatttgtttgtgttacttcatktatgcaaaaaatattaatgaagcaactactatgtgtcgtgagaatgtgtcatgtgctaggtatagaatagtgccctcacagatttgaatgtagcgggata

SEQ ID NO: 292719 - DNA, 201 bp, Homo sapiens
gcaaacgagtacaggaacccaactgcaggaactggccaggggcccggcagtttacttgggtaaacttactatttactttggtctgcctggctccacccctygcaggagggagcatgcaagtgagtgagtgcagggactgccagctgcttcagcgatgacaggagtaaactcccttcaggccctgtggcagcatccaggtag

SEQ ID NO: 292720 - DNA, 201 bp, Homo sapiens
ggctggaatgcagtggcatggacatggctcactgcagcctcctgggctcaagtgctcctcccacctcagcctcccaagcagctggaggacaggcattgagycaccatggctggctaatttttaaattttttgtacaggcaggatcttgccatgttgctcaggctggtctcaaagtgctagtctcaagcagtcctcccaacg

SEQ ID NO: 292721 - DNA, 201 bp, Homo sapiens
tagggcagtctagagtaacatttactcttgtgcattcttaccctcatttctaagatggacctctattgagtgactctctgttggatgtcccaaggattcaytgaggactctgtcttgcctgtgagaacttaaatgattcctggccctttgtgagctctggaaattactcagcactaactacatcataatttttctttcctg

SEQ ID NO: 292722 - DNA, 201 bp, Homo sapiens
actctcttcaaagctgtcagatggggacatttaaatctgcagaagtttctgctgccttttgttcggctatgccctgtccacagaggtggagtctgcagagrcaggcaggcctccttgagctgcggtggactccacccagtttgagcttccaggcctctttatttacctacgcaagcctcagcaatggcaggtacccctccc

SEQ ID NO: 292723 - DNA, 201 bp, Homo sapiens
tgctccactgagcagataagcaattactatgagtagcgtcattttaaatacatgcaaaactattggtatagtgacaataaagcattaactaagattaccayaactggagatttaggaaaatttcatctgagttgcattgttctcttttcacaatgtataaattgcttaaattgggtgatagtttagtttaactttattact

SEQ ID NO: 292724 - DNA, 201 bp, Homo sapiens
ttattattattcttgttaatctcttagctgtgcctaatttataaagtaaacgttataataagtatatatgtctaggagaaaacagtgtatataggatttartactatctgcaattcaggcatccactaggggtcttggaacagtatccccacaaataagagggaactactatgtcacattttccttttctttctcagcccc

SEQ ID NO: 292725 - DNA, 201 bp, Homo sapiens
ttttaaatgttgagtagtattccgttatattgatgtgtcttagcccatttagcattgctatcacagaatacctgacactggatagtttatagagaaagaakttatttggctcatgattctggtggccagaaagtccaagattgaacagctgcatctggtgagggcctgaggctgcttcaattcatggtgggaagtggaagg

SEQ ID NO: 292726 - DNA, 201 bp, Homo sapiens
aatgcagttcttagctaagacaccagccaagtatagattcaataggcaggcattcccaaataccctcagtctctcttgaaaaatatatcatttaattaggrtattgagccatttaaaagataaattgataaaattggcagtaacatcatttaatatgaaatgctagacatttatgtaagttatgattttggaatctaatgt

SEQ ID NO: 292727 - DNA, 201 bp, Homo sapiens
gaacagtcagtgctggagatgaatgtagcaatctttttacatttctgaaataaagaaaatgtgatctaggaatgcagttcttagctaagacaccagccaartatagattcaataggcaggcattcccaaataccctcagtctctcttgaaaaatatatcatttaattaggatattgagccatttaaaagataaattgataa

SEQ ID NO: 292728 - DNA, 201 bp, Homo sapiens
ttttttttcattcaaaaataagttttattggagaaatagaaaacttctccagtgacagtatatgatcctttggaataaggggaatgttaatgctggggatrcattattgaggctattaaacatacatttcagcttatggaacccctcactccaacacaggatttgcctgatctcatttttctttgacaggactaattcgtt

SEQ ID NO: 292729 - DNA, 201 bp, Homo sapiens
aaccgatatttctccaggtatccagaaagaagaatatatcatttcaaagagggggaaatcaggctcttgctaaatttcttcctaggaacagtcagtgctgragatgaatgtagcaatctttttacatttctgaaataaagaaaatgtgatctaggaatgcagttcttagctaagacaccagccaagtatagattcaatagg

SEQ ID NO: 292730 - DNA, 201 bp, Homo sapiens
atctttagaaaatttatgttgcgatttctgatgagctcatgttaaacaggcacgatgagtgagatctgtatacttcaagccttagttttttaacttgtttrgagcagttggaagttggcagttctcatgtaaagtgctgctagttagagcaaatagcctctgcagaaggatatctccgagtttaacttgaaattatctgtc

SEQ ID NO: 292731 - DNA, 201 bp, Homo sapiens
taataaagacactttccctgaaaaggagaaacacatcctcaggtcaaaatgatattttgggtcctgtgaattttgattgcttgacatatctaggttaaatrataaaaccgatatttctccaggtatccagaaagaagaatatatcatttcaaagagggggaaatcaggctcttgctaaatttcttcctaggaacagtcagt

SEQ ID NO: 292732 - DNA, 201 bp, Homo sapiens
gggatggtctttccacctaagacaactaaagaatgggacgaaataatgaaaccacagttctcaagacatttgccgtcaagcagcaaaagacattgatcccyaagggatgggaaacaaattaggcgagatcatgcggttgctctagctcacacctagagagggtttgtagggatggaacaaagcagtggaacccaggaggag

SEQ ID NO: 292733 - DNA, 201 bp, Homo sapiens
tttcacatatattacttgtaatttaatatcaagtgaaaattagtttgttttgccttaggttcttctttgtcatctttcagtacttaactccttagtttgtrtatgtttgtatttggcatccagtttgtaagacttcatccattcacgtagtccttcattcaggctttgtagtcagacagatctaatttatattctatattg

SEQ ID NO: 292734 - DNA, 201 bp, Homo sapiens
cttaaattgttttagtgatttttggcatattagtctggtttgagaaggagggagaaaacaagggaattgattttgtaatgtcaaacagaacttacaaattyaggacagatttacctagaccattatgaataaataaatagatccttttaattggtaagaaactagaccaaatttaatatagttgatttagtactagtttat

SEQ ID NO: 292735 - DNA, 201 bp, Homo sapiens
tctggtaaaactctgataagtaccttatgggctctaggcaacataagcgacatttaatttatttagattgctgaaaataataagcaaaaaaaaaaaagaaygctgagtcaaatgcaattaatttagcatctatagtaacttggttttagtgattttaatgattaattagaaagtgcatagaagctgtgaagctgtttgctc

SEQ ID NO: 292736 - DNA, 201 bp, Homo sapiens
tgaagtataggacatttcttctgcccttcagaggttttgagctttgctctttggtctcttgctccaggtagcatctaaatttgacatacattgaagagaaractagctgtgagtttaaggtagacctcaagcaggacttcatcctgtaaatttcgtaagactatgagaaatttcattctgtcttaaaattactgtctagcc

SEQ ID NO: 292737 - DNA, 201 bp, Homo sapiens
catcatccttatttaaaatggaaataactgtggtttctgagcttcctccatttcctcttattcgttaaattttcaccaactatatctggtgatagttctaractatgatctagtgatagttcagctacctaaactgtaacaagtacctgccacctgttttagtttccttttttttttcctcttggtttgtgggtggccaag

SEQ ID NO: 292738 - DNA, 201 bp, Homo sapiens
gatcatggtactctggggatgaaagatttttaggaaacagctctagaggtttgttaactcctagaagatcatagatttctgaagtagattaatattttctrtttttcgttattatcatttcattgtccatttcactggttaatcctatacctttgaagagaaaattccatttggtactgcttttgtgctatatggttcaac

SEQ ID NO: 292739 - DNA, 201 bp, Homo sapiens
tttattgacaatttggtagatttctcttcagatttgaagtataggacatttcttctgcccttcagaggttttgagctttgctctttggtctcttgctccakgtagcatctaaatttgacatacattgaagagaaaactagctgtgagtttaaggtagacctcaagcaggacttcatcctgtaaatttcgtaagactatgag

SEQ ID NO: 292740 - DNA, 201 bp, Homo sapiens
cactaggtcccacctgccaatactgccatgttggggatcaaatttcaacgtgagttttgatgaggacaaaccacatccaaatcatagcaagatatatcacytttttttttttaatccattcaccaattgaagaatgtgaggttatttccattttggggcagttgtgaacaaagtcactattaacctttgtttcataaactt

SEQ ID NO: 292741 - DNA, 201 bp, Homo sapiens
ccttgagataagggaggcaataaggagctttgttttcttgcctgtctcctggtcacatttttatccttagcattgcttatttttgctgcaggagcaaaccraagtaaaagcagctttggacaaaactcaagtaatttttcttgcccatgatgcagatttgcccatggatttgactttgagagtaaatcttagtcacattta

SEQ ID NO: 292742 - DNA, 201 bp, Homo sapiens
ctgaagtagattaatattttctatttttcgttattatcatttcattgtccatttcactggttaatcctatacctttgaagagaaaattccatttggtactrcttttgtgctatatggttcaacaacttatggagtttacagtataaatgttttagaaagtgagcttgtattttgttgcacagtttgaaagctaaatgttta

SEQ ID NO: 292743 - DNA, 201 bp, Homo sapiens
  misc_feature (1)...(201): n = A,T,C or G
gagtttggtgtagcaaaaaattgttcccctttaattttctgctggccgatataaaatgaagacatttaattattcaagatcttttagatattagttgttantcatttgtgagaaaactcacatcgatacatggtagtcactacatacacttgccaaaactgcttttgtttttgttctattatggctaaaagagatgggtct

SEQ ID NO: 292744 - DNA, 201 bp, Homo sapiens
agaagaagggaattatagaaaaactgaaacaaaatgcttgaattaatactataaacatgatgttagcatttataattgatattttaaattgttacataaaratgtatgagtatggataaaaacatatatattagtctaaatgaaattaatggcttcttttatacactcacaatatttatacttttctttaagtatatcaga

SEQ ID NO: 292745 - DNA, 201 bp, Homo sapiens
ttaaatttatttttttattatactttaagttttagggtacatgtgcacatagtgcaggttagttacatatgtatacatgtgccaagctggtgcgctgcacycactaactggtcatcaaatcacttctttacctcagttttctcctcttcaaaatggagataatgcctaccttacaaattgatggtgagaattaaatgagga

SEQ ID NO: 292746 - DNA, 201 bp, Homo sapiens
ctagaagtttcgagaacactttattttctaattccaaaacaacaacaaaaaatagaactttgctagctggctgtgtctactgtcattctttgattagataytttgagttctgcataccatgaggtgttggtatgatagcatgttatgatagaaacttttagaaaagaccagagacttgagagatagactaacctgcatgtg

SEQ ID NO: 292747 - DNA, 201 bp, Homo sapiens
accatgcctggctaattttttgcattttttgtagagatggagttttgccatgttgcccaggctgatcttgaactcctgtgctcaagcagttccccacctcrgcctcccaaagtgctgggattacaggagtcagccaccgtgcctggctaatatattttcttagtgttaaagaaaagaatgttaaggagttactcagaaagt

SEQ ID NO: 292748 - DNA, 201 bp, Homo sapiens
attcccataatccccacatgtcaagagacctggtggatgtaattgaatcatgggggtggtttcccccatgctgttctaatgatagtgagttatcacaagayctgatggttttatcaggggctcttccctcttcacttggcacttctccttcctgctaccttgtgtagaaggtgccttactttcccttcgccttcttccagg

SEQ ID NO: 292749 - DNA, 201 bp, Homo sapiens
ggggaacttaagagtggaattgtgattttttttttttaaatagggcaatggaggaaagtgaggctggaatttagctcttgggtaaatttgatgaaattaarccttgccttcctactgctttctgttcctatattcttgtttcttgccaatgaagagaagctgttctagtatctttgtgatcctttgagccggaaggaggtt

SEQ ID NO: 292750 - DNA, 201 bp, Homo sapiens
acactatcaggccgggtgcgatggctcacgcctgtaatcccagcactttgggaggccgaggcgggtggatcacgaggtcaggagatcgagaccatcctggstagtgaaaccccgtctctactaaaaatacaaaaaattagccgggcatggtggtgggcacctgtagtcctagctactcgggaggctgaggcaggagaatgg

SEQ ID NO: 292751 - DNA, 201 bp, Homo sapiens
aagcattgtaatgttatttaatgacttaagccaacattccataagctaatctaagcatttttacaattaatacaattgatagtaatatcttaattagtggyaaagtggacagatataatttatagattctgtattgtctgggaccttggggcagtcagtgaagagagggagatagagagaggagcatactggttgatgagc

SEQ ID NO: 292752 - DNA, 201 bp, Homo sapiens
attggtagcttccaataactagaggtcagtgaaaaatataggcttcctcccccataattctgctaacatttaatatgttacagtgaagacaagactcaaawtggggaagttcatactctgtctttttaggtgttcctgcaatatcttatatgaaagattatcttgagaaagttgtgaccttattccaacaacaggatttga

SEQ ID NO: 292753 - DNA, 201 bp, Homo sapiens
caaagctgtctgaaggagaacaaatataaatagatttcaatatatgtattagagctagcctgtgaattacaatggctacaaggaaatataatgtaaaatascacactatgcttttcttgttattgttgcttgttcaaatagaatgaatttgattttaacatagtctttctgttcttttttaaaaaaatgtatgcaaaagct

SEQ ID NO: 292754 - DNA, 201 bp, Homo sapiens
aggggcaaataatgagcagattctgtgaaacatatcctctgaggaggaaccataagcatggcttgaaggcagggttgctgaacagatacttcatttatttygttgatgttgcaggattaatattgtatactctttttgtggatgatggctttggttactggattccaaaggccagtattcttttctatgaaatgttttcta

SEQ ID NO: 292755 - DNA, 201 bp, Homo sapiens
cagagatagttggcaaccattttagaagctgcctacaacagcatgtggcatattaattatataaagaattgtaaatgggtctataaaataatgtaacaacrtcaatatataccacataataatttgctgcatggtatgctgaggtgcctcaccactgatgattattttatttaagccttttccagtattctctgggagagg

SEQ ID NO: 292756 - DNA, 201 bp, Homo sapiens
ctgatcatggtactctggggatgaaagatttttaggaaacagctctagaggtttgttaactcctagaagatcatagatttctgaagtagattaatattttytatttttcgttattatcatttcattgtccatttcactggttaatcctatacctttgaagagaaaattccatttggtactgcttttgtgctatatggttca

SEQ ID NO: 292757 - DNA, 201 bp, Homo sapiens
catgatggctgacagtatggtagcttgtatcatcagaataagcaagcagggacaatgtgagcaagacacagaagctccagtcttttgtaaccttatcttgsaaatgaaattctgtcacttttactgtattctatttaagaaacaagtcactaggtgcagccaacactcaagaggaggagatgatacaagggcatgaatagt

SEQ ID NO: 292758 - DNA, 201 bp, Homo sapiens
tacaatatataatctgcagtaaatctcattctttatatttttcatttcagacattatagttttcatctgtagtagttcaacttgggtatctattaaaattytttctttctttctttcttttttctgagatggagtctcactctgccaccccggctggagttcaaaggcgtgatctcgactcactgcaacctctgcctcttg

SEQ ID NO: 292759 - DNA, 201 bp, Homo sapiens
actggtgatggtgcatttctaagcttgctcacgttcactggtcattggcgggattcaacaaccttgtgaggtgcttgtggtcttaggactgagcactttawatcttcgttggctgttgtctgaaggctgccctcagctcctttccacatgggcctctcagcatgatggctgacagtatggtagcttgtatcatcagaataa

SEQ ID NO: 292760 - DNA, 201 bp, Homo sapiens
tgacatttgaataaatacaattatttgttgtgcttttgctgggaatatttcagtcctatgggtgaccacttaaaattccaaccaaaacaaacaaaactgcrtatctataatttactgagtataactctacctttcagccatattagtttatatttagaagtggtccgaattatgttaatcttagtagtttgttgatataat

SEQ ID NO: 292761 - DNA, 201 bp, Homo sapiens
aaggtgttttatttcttggatttttaccgaatgctgcaggttttctctgtggtatttttattgtacctggttggaactcacaggtctgtcaactttgcctratctttgagatgtgttcagcttttagctacccagtatttaatttttctatttctgataattgtcctttgcaagcctcatgagttcttactataacttagt

SEQ ID NO: 292762 - DNA, 201 bp, Homo sapiens
aattttatagtattctttccaaaattgttaattcatttatagcagttatccaaaccattgttctgtaggaggactgtcttcctttcttacatgatcagctrttttaatgttactgaagtttttaagagccatctttctttcattcttcaggtttttgaaggagatgatggtatggatttgcagaatagttaggggagttac

SEQ ID NO: 292763 - DNA, 201 bp, Homo sapiens
cttgcttaattttaatttctaaggtgttttatttcttggatttttaccgaatgctgcaggttttctctgtggtatttttattgtacctggttggaactcayaggtctgtcaactttgcctaatctttgagatgtgttcagcttttagctacccagtatttaatttttctatttctgataattgtcctttgcaagcctcatg

SEQ ID NO: 292764 - DNA, 201 bp, Homo sapiens
ttatctttctttgaagattgttgagttttattttgacaggcagataatttacttttggattacactgatccttttgtagcttgtttttaagctttgttagrgctcttgttggcatagcttttattctataactggagtcagtagactttggtttatgagccaaatctggtccacagcccatttttgtatagctcatgagct

SEQ ID NO: 292765 - DNA, 201 bp, Homo sapiens
gggaacatgttttttcttgagataatgaacatatagcccaaaatatgtggttgagtacattttgtttttgattgattgttcaaagatataatttttaagtyttcatatataagttaatgtataattatgcaagaaggaaaagaaagtgatgatggcactttgaggactttcaggcttagagctaattagtctgttatctgg

SEQ ID NO: 292766 - DNA, 201 bp, Homo sapiens
gagtctttcctctgtgttccagctccatccttagcttttagcaggtctttggatgcctgcatcacagcatgacctctgttcatattctttgtaacttttgwtaaaatgcaccttctagttttgattgtctgtattttcttatctttctttgaagattgttgagttttattttgacaggcagataatttacttttggattac

SEQ ID NO: 292767 - DNA, 201 bp, Homo sapiens
catacatgtatgtaaatgtatgcaaacaatttaatctactttttccttaacattaactccttcagatagaatggttggcccaaatgatttaattatttttkaggttgttgattcatagaaacaaatcccctgcagaaaggttgtaccaatttacacggttacctttcttcacattttctctaacactgggtattcttgagc

SEQ ID NO: 292768 - DNA, 201 bp, Homo sapiens
ggcctgctactgggattgtaggtataggaagttgagagggaaagggtctttctcaccctgctgtggtagtaagagcttggtgcttaatgggtgccttttasttgtttgatcacctaggatttctgcttagaacccagcaatacttgtaggcctgcacagtcccaagagagaaatcagagacttggtgataagtcaagggta

SEQ ID NO: 292769 - DNA, 201 bp, Homo sapiens
agtggcaggctcagcagtcgcctgatgtggggtggaccctggggatgtagccccgggcagccctgcacagagcctcctcctgaggcccaggaacctggcamcctcagtggggtgggcgcagtggctgtgtcactggctggtccctgaagtgggcaccgctcccacttcctgcctcaggcccctgaagctcagcctcagctc

SEQ ID NO: 292770 - DNA, 201 bp, Homo sapiens
gtttgtccttttttattgctgagtagtgttccattttatggatataccataattagtttattcatatacctgtttatggatatttaggctgtttttagttyttgatgatcataaaactgctgcaatcatacattaaaaaaatgtgactctatgttctttaaaaaatttggtggggcatggtggctcaaacctgtaatccca

SEQ ID NO: 292771 - DNA, 201 bp, Homo sapiens
ccaatgttatttaattggaatcatctaagatgtagtttttaaatcctggctttcacttagaataatatatttgaggtttattcatgttgctgtgtgcatcrgtagttgtgtatcagtagtttgtccttttttattgctgagtagtgttccattttatggatataccataattagtttattcatatacctgtttatggatat

SEQ ID NO: 292772 - DNA, 201 bp, Homo sapiens
ctttccagctaagatttagaataatcatagacaataataaaataaaatacatctgatatctgcacaatattttaagcacagtactcataaatattgtactrtttgatccttgcagtatccttgtgagataagtagaagggatattggtgagtagaaactattaaatataatatgtgttaaggtagtgtgctagaaatcact

SEQ ID NO: 292773 - DNA, 201 bp, Homo sapiens
gagggctatactattatattttctgtacttgggacctccaaaggtcttaatttggtcttatcaccactaacaccaccactgccatctccatgtcatgcttrtgttaaagaaagactttgaaatacgtcacctaatgtttagggtcgtagaaatgcaatttactgttttgggactagagtacatgaattcatattacttgac

SEQ ID NO: 292774 - DNA, 201 bp, Homo sapiens
tacataacacattttctttacccgtttatccattggtggacgcttacgttgactccatatcttagctatatgaataatgctttcatgaacattggagtgcmgatacctccttgacatactgatttcatttcctttggatgtatacccataagtggaattggtggagcatatggtagttctatttttaatattttgaggaac

SEQ ID NO: 292775 - DNA, 201 bp, Homo sapiens
gctgcattcccagacagttaagacattctaagtcacaggatgagataggaggtcggcacaaaatacaggtcataaagaccttgctaataaaacaggttgcmgttaaggagccagccaaaacccaccaaaaccaaaatggcaatgagagtgacctctggtcatcctcactgctacacttccattagcaccgctctatgacag

SEQ ID NO: 292776 - DNA, 201 bp, Homo sapiens
cgggtcgggagaggccgggcatcgaactcaggccctcgtggggggggtctttctcttcgagtgaatgtggaaacagctcttacaagataaagtagggcttygctgagtctcctgggggagcgatgccattgtaggatcgcgctggaagcagcagtcaagcggccaaatgcgggctgcaggggctgagcagcagcagcgcgc

SEQ ID NO: 292777 - DNA, 201 bp, Homo sapiens
actttttataatagatttgtatatatttgtagtagtaaatgataaaatagactagtatctacatatattttaagcactcatgacatacctcttactttctrtttttcttttcttttcttttttttttttttttttgatgaagtctcattctgtcacccaggctggaatgcagtggcacgatctcggctcactgcaacgtcc

SEQ ID NO: 292778 - DNA, 201 bp, Homo sapiens
gcatatggcacccagcgaacactcatcttggaatctcagaattggcgctatgctactggtggatgggagactgtatttaggcctgtaagtgagacatgcamagacagatctggcatctccactggacactggtcaggtaaggagcttgtgcagcatatgagatctctgggctgtttcactcaattaccagattattagatt

SEQ ID NO: 292779 - DNA, 201 bp, Homo sapiens
atcaacttatttgggaaggttaaatgagtccatatttatcagttctaggaggtttgtcctgcaggattgagtgggttgtcgggtgcagcacctgttctttmttcacagtggggattgcaatcttcagagacgcagtgtatttcttaagtggcagtgtcatgcttagggtttgtcccggatgagcttttattttagcatttt

SEQ ID NO: 292780 - DNA, 201 bp, Homo sapiens
aaagccaaattctgtagtacataaccccaaatttcaaggttttgcggaacaaattcaacacaagttttgtgtcagtttagagttaaacgcatctcaagtarctgacttaactggcttgcctctatgaaaactgtaggcaggtttcattatagattttttttttcttgttattccggcggttaggtgcatgtttattttctt

SEQ ID NO: 292781 - DNA, 201 bp, Homo sapiens
gctaatttcatttaaattttcttacccatctactttaaaaaaatacctctttgtggtagtcttttttttggtcagaaaatgacaatgtgaaggagaaataygttttgaatttataaatcttcttttaattaacaaattataccaatataagggtagtgttaatgtggttcaaatttgcctttgctattctgccttttcttc

SEQ ID NO: 292782 - DNA, 201 bp, Homo sapiens
agtatccaaggtaatcattgtaagacttttctgcttcaagagggtgaagagatgaaaaattaaacttaaatgatgtatagtgttcacacagtcagaggtayagtgttgacacagtcagaggagaatctattttctgtgttgctcattctttgaaaaggggttaaaattagctttatacacatagcttctgtgtgaagatga

SEQ ID NO: 292783 - DNA, 201 bp, Homo sapiens
cattttcaacatgagataaaaaactatttcacaaaacgtgcacaatttttgcacctgctggtgtgccttcagcaatggcttcatgaattctttttttacartggcccttatgctggattcatttattttgaagtagcacgcaactgcagctgcagacctcaatctacagtacgtatcaagcaattcacctttttcttgtaa

SEQ ID NO: 292784 - DNA, 201 bp, Homo sapiens
tgcttgctgcttcttcattcttggtttggagcctcggtgctggagtctttcctctgtgttccagctccatccttagcttttagcaggtctttggatgcctrcatcacagcatgacctctgttcatattctttgtaacttttgataaaatgcaccttctagttttgattgtctgtattttcttatctttctttgaagattgt

SEQ ID NO: 292785 - DNA, 201 bp, Homo sapiens
atgtcagctatggtctgaatgtctcttcagaattcttacgttgagacctaaccttcactttgatggttttaagaggtggggcctttgggaggtacctacgwcatgagcgcagagctctcaggaatgggattagtgtctttactattaaagaggcctgagggagcttgaacccccactttctgccatcaccagacaccaaac

SEQ ID NO: 292786 - DNA, 201 bp, Homo sapiens
gtttttttgttgtgattgtaatagttaaattcactgaatcagaaacttgaaattcctgcagtagtggactgcttgctgcttcttcattcttggtttggagyctcggtgctggagtctttcctctgtgttccagctccatccttagcttttagcaggtctttggatgcctgcatcacagcatgacctctgttcatattcttt

SEQ ID NO: 292787 - DNA, 201 bp, Homo sapiens
tgtttatataagggaatataatttcaggaaaatagtttatagttattttccctcaacctcattgggccctttcattgactttactgctggggccatttgtwtttcttccaaagggatgtcgttttagagccctctggcatgaaaggaagagcaatggaggtgctactagcattgggatttttttccccttatagtaattaa

SEQ ID NO: 292788 - DNA, 201 bp, Homo sapiens
tgtgttataatagagaataatggaagagggtgagtgtttttttaaaaaaaacatagagtgttgtatgtagcattcttgtagggtattgtagtcattctttygttctttcttgtttttagggtcccagttttgttttggagcctaccctcagggataaattctgattagtctaagctggtaatgggaatctattccatttgt

SEQ ID NO: 292789 - DNA, 201 bp, Homo sapiens
atcataagttgaaagtatcatgagtcgcaatatgtttaatacacctaatctgaacatcatagcttagcctaccttaaatgtgcccagaacacttatattagcctacagttggacaaaatcatttaacacaaaactattttgtaatgaagtgttgaatattttgtaatttattgaatactttactgaaagtgaagaacaaaa

SEQ ID NO: 292790 - DNA, 201 bp, Homo sapiens
taaaaatagattggaaattctatatatacccatggttaaacatattttcaatgtacattacttcaaatttgatgataaattttgttctgagaagtcctttwctgaagccaaactcaaaaatggggaagtgcttacagatttccaactggccccaaaacggatattgtaaatggctttttgcctaactaatgatgatggatg

SEQ ID NO: 292791 - DNA, 201 bp, Homo sapiens
catttctttgttaccatgtatggtttaccccccaatcttgtggctgttttaccctctaaattatggttttatttgtatttaaaaatagattggaaattctrtatatacccatggttaaacatattttcaatgtacattacttcaaatttgatgataaattttgttctgagaagtccttttctgaagccaaactcaaaaatg

SEQ ID NO: 292792 - DNA, 201 bp, Homo sapiens
gataccactacacagctaccagaattgcctttaaacaaactgacaataccaaatgctagggagattgtggatcaacaggagttcttattcattgcttctgwcaactcagaatggtgcagccactttggaatagagtttggcattttcttgtaaacatacatttttcatgtgacccagcaatcctactcctagctatttgac

SEQ ID NO: 292793 - DNA, 201 bp, Homo sapiens
tattttactattgtgtgtgttgtaaaccccataatactttgttattattttagctttgagtcaaatttattttgaaagaaattagaaatgaggagggggcwgggtggaaaaaagagaaattagaaatgagaaaaaattttatttgtatttacccatatatttaacatgtctgtttaaatccatcatttacattcaagtttc

SEQ ID NO: 292794 - DNA, 201 bp, Homo sapiens
gaaagtttattacatctatataataaatgctgttgaaatttttttcattaaaagtaagaatgtactaggtgatgatttgctgaaaaaatctgtctcattgmaacttaaatgcaaggacataatttaggcatttaatgaaataacaactttcaattattgacattttcaattatagtcacaaaataggggtaatttaaactt

SEQ ID NO: 292795 - DNA, 201 bp, Homo sapiens
agcgggtaggacgcatcctagggcaaagcctctcccctctccccgtgctgttctctttcccgtactaaataaacttccgcctcagaggggctgtcgcagcygcgggtcgggagaggccgggcatcgaactcaggccctcgtggggggggtctttctcttcgagtgaatgtggaaacagctcttacaagataaagtagggct

SEQ ID NO: 292796 - DNA, 201 bp, Homo sapiens
gattgaatttttagaattagatttattccaaatgtaagtcaacctaaatgtaaagtttttctctacttaaatataagcttttttggcactcttgaagattytgagtatttctgtggacagttatggccatcagggtgtttgtttgaattctggaattgccctagagagcacataagctgtggagtaaagcaggtgtgtggt

SEQ ID NO: 292797 - DNA, 201 bp, Homo sapiens
ttcccataatccccacatgtcaagagacctggtggatgtaattgaatcatgggggtggtttcccccatgctgttctaatgatagtgagttatcacaagacytgatggttttatcaggggctcttccctcttcacttggcacttctccttcctgctaccttgtgtagaaggtgccttactttcccttcgccttcttccagga

SEQ ID NO: 292798 - DNA, 201 bp, Homo sapiens
gcttcccaagaatcacattaaaactatttctggttgttttcttttccgaacaaatgtgacattttcttcatctccttgattttgagctgaagaaggcaaastgtcaaaaataatgaggccagatggatttgaacactgaatagcagtctgaaacagtgctcagagactttgcctttacaatcattattacagaggcaatga

SEQ ID NO: 292799 - DNA, 201 bp, Homo sapiens; identical to SEQ ID NO: 60365

SEQ ID NO: 292800 - DNA, 201 bp, Homo sapiens; identical to SEQ ID NO: 60368

SEQ ID NO: 292801 - DNA, 201 bp, Homo sapiens
aatgcgctcaaaattatactaggtgcagaggagatttcaaaggagattgaagatacagttcttgccctggtccagaatctaataagcaaaatacacacatsaaataactagagaataattaccagaacatataaattggtataagataaatgtatgcttaaatgctgagaagaagcggagaaaagaaaatgtgaaaaaaag

SEQ ID NO: 292802 - DNA, 201 bp, Homo sapiens
tcataaagaccttgctaataaaacaggttgcagttaaggagccagccaaaacccaccaaaaccaaaatggcaatgagagtgacctctggtcatcctcactrctacacttccattagcaccgctctatgacagcttacaaatgccatggcaatgtcaggaagttaccctgtatggtctaaaaatgggagacataaataatcc

SEQ ID NO: 292803 - DNA, 201 bp, Homo sapiens
tattccttgaaagttttgtgtacttttactgatatactgggaacatgtaattcttcctctctagagaatatctttcctccacttcatcccatgaaatcctrtttatcttttagtatcattccctttgtgatatttccctccaattgtccccatgttttcactgtatttaaacagttcatgtttctttgagtatactgtgag

SEQ ID NO: 292804 - DNA, 201 bp, Homo sapiens
ctttcttgtgtgaaatccaaaaaccctctcttgggatctggattaggacccctttcctgtaacatgtttctctgtcctgtaacctatttctggcaaccacrgaagagactatagtgcagaaaccctgacccaacggctacctttgggtaagtgttgggatcctgtaacaaaactgcgaattctatcactacagtgtttatc

SEQ ID NO: 292805 - DNA, 201 bp, Homo sapiens
tcacataaacagcctgcttttcaaaatgtgccctgcactccataattcactagtccacctacaaatgtattccttgaaagttttgtgtacttttactgatmtactgggaacatgtaattcttcctctctagagaatatctttcctccacttcatcccatgaaatcctatttatcttttagtatcattccctttgtgatatt

SEQ ID NO: 292806 - DNA, 201 bp, Homo sapiens
ccttttttttcttttatcccaatttggcatatttcctttattttttatacaacttttttcatttttaaattatgcattaatacattaaaatccacactgcratacacagttctatggattttggcaaatgcatataatatgtatctaccctcataatcaagacacagaactcctgctgcccatttgtagttaacctctccc

SEQ ID NO: 292807 - DNA, 201 bp, Homo sapiens
cagtgtttttataaatactgatatacctattatgatagatgtattccttaaagatttggcataaattattacaaattgagtcgtgtttgaaacattccagyggagctagattacaaagtaaataatcttttttctaataggagctagtagtcggtcccctgagtcaccccccacccctccttccttcttccttccctcctt

SEQ ID NO: 292808 - DNA, 201 bp, Homo sapiens
tccctctcaaaaaaaaaaaaaaaagtttttttccaaaatagaatagtaaatggccctgacaaggtctttgacaagcattggggttgcacactcaactgtaycacacaattccaggggacatcattcacataaaatttttttttcttttttcctactggagttgtgcagtgtagcagtctgggctatatatttacagttatt

SEQ ID NO: 292809 - DNA, 201 bp, Homo sapiens
cttatttaaggctcgtggcaactctattaagtctccttatcttactgatattacactcgagcttccagattcagaaaaagtactttgaaaaatcaaatatrtttattgttccagagacattaaacaaatattacccaaagaatctctgtaaataccgaaagaaatgaatcatttaaataccttagtaccttaaaaaggtga

SEQ ID NO: 292810 - DNA, 201 bp, Homo sapiens
taggtggcctgttctatctctctagctgcctttaacatgttttctttcatttcagcctcatagaatctgatgattatgtatcttgggcataatcttcttgwaaagtattttgcaggggttctctgcatttcctgtgaatgttggcctctctctataggttcagaaagttctcatgatggtatcctgaaaagtgttttccag

SEQ ID NO: 292811 - DNA, 201 bp, Homo sapiens
taatatagcagttcatgtgtagtgagacaacttgacttttgtgcacttccatttcctccgtctcatctttttaatattctgtcatatgttttacatctacrtatattataaacccagtgatacattattgccatttttgagtttaacagctttttatcttttaatgtggttaaattaagggaaaatagctctgatttttta

SEQ ID NO: 292812 - DNA, 201 bp, Homo sapiens
gtgattttcttagtcccaacttctatttttattatgctgtgttccgagagagtagttggtatgatttccgctcttttgcatttgctgagaattgttttttrtctgactgtgtggtcagttttagagtatgtgccatgtgcagatgagaagaatgtatattcttttgttttggggtagagttctatagatgtccatttggat

SEQ ID NO: 292813 - DNA, 201 bp, Homo sapiens
atatataaaattattagtctactttcaaataatatagcagttcatgtgtagtgagacaacttgacttttgtgcacttccatttcctccgtctcatcttttwaatattctgtcatatgttttacatctacatatattataaacccagtgatacattattgccatttttgagtttaacagctttttatcttttaatgtggtta

SEQ ID NO: 292814 - DNA, 201 bp, Homo sapiens
tactgatacgattttcctttataattttcagattattttttattttaggtgattttacacagctatttatatgaatgaatttatgaattaaggatgacagraatcacttaaattgttttagtgatttttggcatattagtctggtttgagaaggagggagaaaacaagggaattgattttgtaatgtcaaacagaacttac

SEQ ID NO: 292815 - DNA, 201 bp, Homo sapiens
aaaacctccttgctgtggaagaactccttgcatctagaatcagattgcttggttgaaattcctgtttgacagtactagctttgtgattttctccctctccygacttttccttttggtgccctggttttcttgtctgttagacagatattgttattctcattccagtattctttacaccataaacattttctcattaatctt

SEQ ID NO: 292816 - DNA, 201 bp, Homo sapiens
aaattagcagaaaatataaggaacataaaacataaccaatttttgaaatagaggttttaatacctgtcataggtggcttgctttcagagtcataaattctrttctacttggcggggcgcggtggctcatgcctgtaatcctagcactttggggagaccgaggagggtggatcacatgaggctgggagtttgagaccaacct

SEQ ID NO: 292817 - DNA, 201 bp, Homo sapiens
ctttctcttttttactttttatttttgaaaaaaataagcccattccagtttaatgaatatgataatttgaaatccaggtagaataatgtatctcattttcrccctcatattttaaagtgagatagtttataaaatggagaataaatcatgttgttagatgttgactcttatagtataaaagtatgaatcttatatagtgat

SEQ ID NO: 292818 - DNA, 201 bp, Homo sapiens
ttcttaattagaggagagaagacatgttctttgggcgtcctggttatgtctagtcaatagtcttagttttcacaggatagtacggaatgttaaattattaytacctattttcttaatttatttcaataacttgctgtttttatcaggaaaaattaatgaactaatcaaaatgttccattctatacatagtttgctcataac

SEQ ID NO: 292819 - DNA, 201 bp, Homo sapiens
tacaggtgtcagccacggtgcctggcacaaataactttttcagacaccacttttgattcttctgggtatgtatccagaagtggaatcactggtatcatackgtaattctattttttttttttaaatggagtctcactcactcaggctggagcgtagtggtactatctcggctcactgcaaccactgccttctgggttcaaa

SEQ ID NO: 292820 - DNA, 201 bp, Homo sapiens
gaggatcccttgagcctaggaatttgaggatgttgtgtgctattgttgtgcttgtgaataaccacagcatggtactctagcctaggcaacatagcaagacyttgtctcttataaaaagaaaaggaaaaaaaaaaagaaatttcagttaataattttatttgacatgttacagctccttatttgaccctgaaaatgttgcag

SEQ ID NO: 292821 - DNA, 201 bp, Homo sapiens
tctacaatagcttactgcattacagttactgtaattcatcaagataatagggaaattatgcatccaaaggatttatttacttgaaatagcacctctagaasggatattcatagagcagtaatataagaagtgagacacttgaacatacctttttctttgctttttttttttaatcttaggtaacttcagattttaataaga

SEQ ID NO: 292822 - DNA, 201 bp, Homo sapiens
aatgaccacatgtttggatttcttgactatgggtaaatgtgattagaacagaaatcccttaataatagggattctttatctttgtgtccctagtgcctcayagtatctggccctaattaggagctttagaagtgcttattgactgattgcttttttatctgaatcggccctttctatcccatcattatgataacatccatc

SEQ ID NO: 292823 - DNA, 201 bp, Homo sapiens
tgagaatgggggaattggatttaaaattttcttacatgaagaaaccaaatattttgctgctatcctttggaaacttcttactatgattggttctgggtggyattggaatcagtttgaaatgatgccattaatgaccacatgtttggatttcttgactatgggtaaatgtgattagaacagaaatcccttaataatagggat

SEQ ID NO: 292824 - DNA, 201 bp, Homo sapiens
tcctaaaagggagctaattgtgggaaatagagccttttctcacatatccagctgcctgggagctttcctctaaagacctttaagcattggaaagtcattcytcaagtagttaagataggaaatgacagtcgtgtaaaatagggccttaaaaacaactaccaggtagactcatgatagtgaccctacagggaattaacaaca

SEQ ID NO: 292825 - DNA, 201 bp, Homo sapiens
gaactgtccaagattctggcaaagcttgaacgcttaaaacagcagaatgaagacttgaggcgaatggccgaatctctccggtaggtcctaaaatactgaaygaagaatgatgaaatattgtactttgtttttaggtgtagggcttcattccgctaggaaaaatagttaattatttttataacctgctgtctttgccacaac

SEQ ID NO: 292826 - DNA, 201 bp, Homo sapiens
cactgacttgttcatgtatttattcactcagcattgtgtggagtgctagatgctgtgatgcaaagaaaaataagtcatggtcctaaccttttttggaatastgtttggaagacaaacatgtaaactgactcctgatgcttcagggtttctatataagaactattattccttcagcaaatatttattcctcctctattatat

SEQ ID NO: 292827 - DNA, 201 bp, Homo sapiens
tcccagtactttgggaggccgaggtgggcggattaccagaggtcaggagttcaagaccagactggccaacatggtgaaaccccatttctactaaaaatacaaaaaaaaaaaaatcagcctggcgtggtgatgggcacctgtaatcccagctactcaggaggctgagagggaagaatcacttgaacctgagaggcggagctt

SEQ ID NO: 292828 - DNA, 201 bp, Homo sapiens
caagtagatgtctaatttttccagcaccatttgttgaaatactatcttttctccattggattgcctttgctccattttcagagatcagttgaccatctctrtgtgggtctttttctgggatcttctgttccattcatctatttgtctgttttccaatatcacactgtcttgattactttatatataaagtaatcttcaaaa

SEQ ID NO: 292829 - DNA, 201 bp, Homo sapiens
gattgaaaaagatggtatggatgtgtttgaattattcacttttatggtgtatagtcttcactttccatgttgtgttttgttggactcaaagatgcttgagmagttagagagattctccctggctcccccagccacccctgcagccccactggggaaaaaaggaaacaaaggaggaaaaccgtgttgaacacatattttttc

SEQ ID NO: 292830 - DNA, 201 bp, Homo sapiens
ccgtcagaagatatagccatttctaggtttagaattccttttctttatatagttctcttgaatacttgtctttaagaaaatagacattaaggatttcttgwgtaatcaaatactactttgatatttgtacagagcatgagagcaagactagaaccacattaaagcaggaagaataattaaaagttttgtaacatagcaaag

SEQ ID NO: 292831 - DNA, 201 bp, Homo sapiens
tgtatctacaccattcgtaatggtaaccactagacacaggtagctattgagcaatcaaaatgtggcctactgtgcctgaggaaatacgttctttttttccsccagacagggtcttgctctgtcacccatcctggagtagaatggtgtgatcacggctctctgcagcctcaacctccagggctcaagtgatcctcccacctc

SEQ ID NO: 292832 - DNA, 201 bp, Homo sapiens
ggacctaagcaatgtttggtctggggcacattttcctgctattgaggccaaatccttctgagcattttacccagcatcccatgaattacggttttctagtytggctgataggatcaggaactgtttctacctaatctgtatgaatgccaggtactacttcctctaatccttttagagagttctttccccagcctgagtagt

SEQ ID NO: 292833 - DNA, 201 bp, Homo sapiens
gattttactttcagtaatttctatctgctaacacaaatagaaaggtaatctttcatttggttgccatccttcaagagcctctctctgcccttccctccctsccttcctggatctttccttttgtctttacagacctagattttgaaaggttctaggttccttttgtctgttgatactatgtgaatgttatccttaagtttt

SEQ ID NO: 292834 - DNA, 201 bp, Homo sapiens
gtttgttcttcaaccagatagaattatattctatatttcagttctttgaaatttatttaatggcttagcaaatgacttatgttgttgaatgcttaagaaaygtgtattctgttgctgagtctgatctagtatatatgtcatttaagttaggttggttaattaagttattcagatttattaatttttataaacactcatatt

SEQ ID NO: 292835 - DNA, 201 bp, Homo sapiens
aaacttctctcttcaacattttgaatcaggcgtaaacaaaaagccctctttgtgtttggttcctcagtggcatagaggcagactagaagtctttttttttwaatagttttatgactattgaaatagaaaactagagaaattagcagaaaatataaggaacataaaacataaccaatttttgaaatagaggttttaatacct

SEQ ID NO: 292836 - DNA, 201 bp, Homo sapiens
atggtcataggtcatggcagtattaaactcttgggctcaagtgatcctcctgttgcaacttcttgagtagttgggactacaggtgtgtaccaccagccctrgtgcctgcagatatttttgaactttttcctggtctgtattgaagttatttgaaagtgttttttaacttttaggtattgcttttaatctttgttaagtgta

SEQ ID NO: 292837 - DNA, 201 bp, Homo sapiens
tattatttagaggtgaagaatcatgtcatcactgtataccctttctagcacagtgttcacgtagtagttgttttagctcgttttgcattgctataaagtartactcaaggctgagtaatttataacaaaaaaagatttatttggctcatggctctgcgggctgtgtaagaagtatggtgccagcatctgcctctggtgagg

SEQ ID NO: 292838 - DNA, 201 bp, Homo sapiens
aacattttacaatgaaaataggatccaaacatataagtatttacttttggatatttgatagataggcttgttataagattgtgactcagctgaagtggttktagtttatacagatttttgagagaagaaagtacacctttttgctctatatgttttctctggaaacatctcattgtattgtaccaattttgtcttgattct

SEQ ID NO: 292839 - DNA, 201 bp, Homo sapiens
gatccaaacatataagtatttacttttggatatttgatagataggcttgttataagattgtgactcagctgaagtggttgtagtttatacagatttttgasagaagaaagtacacctttttgctctatatgttttctctggaaacatctcattgtattgtaccaattttgtcttgattctctaagaatctttttagtcttt

SEQ ID NO: 292840 - DNA, 201 bp, Homo sapiens
ttgatagcaataaattcagattctcttttttaaaaactttatctttcattttgttagatatttctattgagtgtagaatttactttagcagtaatttttamaagcatttaaaacatgtcatttcattgattcctgcctttcatagtctctgagaagtctgcaattttaagaagcgtatctttctctttggctgagtttact

SEQ ID NO: 292841 - DNA, 201 bp, Homo sapiens
atccattattcctcatgttatcaagaatatcttatttttaagatataatgaaagatactccttccctgagaacattacagtgggaacaacattcctatccygataggcctgattaagcagatattctctccctggaatttcttgtaactttttaacattttactggattaaatttgctaacattttgttttggattttttc

SEQ ID NO: 292842 - DNA, 201 bp, Homo sapiens
caaatgtccttcttataaggattccagtcatgtattagggtccatcctaatccagaatgacattatatcaacttgattatatctgcatagaccctatttcyagccgttacacattttgggaggacacttatttaactcagtataggggacatgtagtttcagtcttcagtgcccaaactgtatgtaggtacagtgtttgct

SEQ ID NO: 292843 - DNA, 201 bp, Homo sapiens
tgcagcctcgacccctggggcagaatctatcctcccagctcagcctcctgagtagctgggactgtagacacataccaccacgcccagctaatttttttttktttttgatattttttgtagagacagggtttctctgtgttgcccaggctggtctcgaactctgagctcaagcgacctgcccacctcggccacccaaaatgt

SEQ ID NO: 292844 - DNA, 201 bp, Homo sapiens
gtaattgggcagttccaagaaaagcttcagaacagctgtaattacagctgcagatttagtcaaaataggggctgtaagaggctgtttactctccttttgcrtctctttcacccccaccccaaataacccaaatttagttgtaaaagtttttggtaagctcaggatttctgaaactggagtctatgtatttaactgcatgca

SEQ ID NO: 292845 - DNA, 201 bp, Homo sapiens
tcttggaaacatccttttcacacagtcatatgccaaatgtggccattgttcattttcttgttagacttaagaagtgtcagtttgatcgtattataaatggwactgcattttttgttatgtctaatggaataattgagctatatctatctttaggaaatgtaggagggggaaatgaggaattattagtcaaagggtacagag

SEQ ID NO: 292846 - DNA, 201 bp, Homo sapiens
tctgataggattctgaattccttctttgtgttatcttgaacttctttgcatttcctcaaaatagctcttttgaattccctctctgaaaggtcacatatctmtgtttcttcaggatttggtccctggtgccttatttagtttgtttttcaaggccatgttttcctggatggtcttgatgcttgtgggtgttcattggtgtct

SEQ ID NO: 292847 - DNA, 201 bp, Homo sapiens
ctgatgataggacatctgcagatttcaaaaagtgtgtttagtgtgaatttcatactgatggcatttctctgcttttgacagtttcatatacttaaacttgycattaaaacacagcatcttgccttgagccaaatgaaactttgaatagagcccaaatttatgaaattgttaatttctctttacatctagattttactttca

SEQ ID NO: 292848 - DNA, 201 bp, Homo sapiens
ttcccatgacttgtgatttttgtatattattattgctaattattagggttttaaaaattcaatggactatgtacttgtgtaactgtcagtctaatcaaagygtttttattagccatatccaataatgccttataagaagtctaaaatgaactggaccactgacttacgcattgtcaccagcaataatcattattatcatta

SEQ ID NO: 292849 - DNA, 201 bp, Homo sapiens
taagtggttatagaaacaacttacatttaaatatcagtaggggatgggttaagagatgatgatgtctccatgggatgaatattttgcagctgttaaaatakataaaacatttgtaaaaaatatgcataagacgatatttgtagtaacatgggtttcatggggactagacttgttattatgtataatcttgtaccttaaaaa

SEQ ID NO: 292850 - DNA, 201 bp, Homo sapiens
tacaagcccacagggattattgccaggctacggttcatgttcacttaaggcccaagggctcttcagtcagcttgtggtgaatgttgccaggcctgggactygcccttcagggcactgggctcccctctggcccaggcaggtccaggagtgccatacaagagccaaggtctggaatcaggaaccccaagagcccacttggtg

SEQ ID NO: 292851 - DNA, 201 bp, Homo sapiens
aattgaactaccatatgatccagcaacccagctgctgggtatataatgaaaggaaatcagtatattgaagaaatatttgcacttccatgtttactgcagcmctttccacaatagccaggatttgaaagcaacctaagcgcccatcagcagatgaatgaacaaagaaaatatgtgatacctatacacaatggagtactatcc

SEQ ID NO: 292852 - DNA, 201 bp, Homo sapiens
gcatgactatcattgggaaggttgtcctagaggcaaagctgacaggtaacattcaggttataaactaggaaaacaatacatgtatgggggatttaaaaaayagtgtacatgtgtatatgtgtgtgtttgtaacaggagtagacaattgactgagtaggctggtgtcaggtatatgctaaaagagtaatgttcattttcagt

SEQ ID NO: 292853 - DNA, 201 bp, Homo sapiens
cactcaaggtagtcaagtggggttagatagtttttcaagaagaacgaaggaaagtgcatgactatcattgggaaggttgtcctagaggcaaagctgacagktaacattcaggttataaactaggaaaacaatacatgtatgggggatttaaaaaacagtgtacatgtgtatatgtgtgtgtttgtaacaggagtagacaat

SEQ ID NO: 292854 - DNA, 201 bp, Homo sapiens; identical to SEQ ID NO: 60387

SEQ ID NO: 292855 - DNA, 201 bp, Homo sapiens
tagtgtgtactttttcatcccaggtaagtgtcagtagggcattttaaaataaccaatactttttggttgtataggagtcagaaaaattatttgtgtgtctrtgtgttgttaatgttcattattgtgactcaggtgcaatttttctgatactcagtaatgatcccttttgtgaaagaatggaaagatcccataacatagcca

SEQ ID NO: 292856 - DNA, 201 bp, Homo sapiens; identical to SEQ ID NO: 60367

SEQ ID NO: 292857 - DNA, 201 bp, Homo sapiens
ctgttccttaaatatttgatagaattcacgaatgaattatcttgagtgtggtgctttctgttttggaagattattaattatttattcaggttttaaaaatygatttaggcttattcagattatttgtttcttcttgtgtgaattttggtagattgtgtcttttaagggattggtccatttcacctaagttatcaaatttaa

SEQ ID NO: 292858 - DNA, 201 bp, Homo sapiens
agctagtccacaattactgtttcaagtgttcctactgatgctggcttcagttgagagcttgtattcctggacttctgcttcctgcacactgtgattctctrtctgcctgtcttgtctctccaggttttagagcagcagtttgccctctgacctcaattctctgatggctctaagaagagttggattatcagtttttttttt

SEQ ID NO: 292859 - DNA, 201 bp, Homo sapiens
aatgagtcttaaaatatgtatagcttcatttgtgttgattgatgttgtaactttttttgagtaaaatgcatcattagaaaatgtatttggaattacattamaaaggtttctatgttttgtttattggtatcacacacgtgtcatgtgggtcatagacttgtttcatagtaaaacagatggcatggcaagggagaagaaact

SEQ ID NO: 292860 - DNA, 201 bp, Homo sapiens
tgacttttaaggttcccataaccttttagttcttgtattgctctatgcacagttaagtgatttttgtcagctgtgtctgtattgaattttacagatacacrtatattttaaacacagtttagtgatttttatcaaggcccaggcatctgctcaaactactgagaagggtaatagttttcaatctaaatttgagctaatgtt

SEQ ID NO: 292861 - DNA, 201 bp, Homo sapiens
caatccccagtgagatgaacctggtacctcagttggaaatgcagaaatcacctgtcttctgcgtcgctcaggctgggagctatagactggagctgctcctrtttggccatcttggaaccattgaggatcaaaataaaattgataagatacacagaagactggttaactttctgtatgacaatgaagccatataacttaagg

SEQ ID NO: 292862 - DNA, 201 bp, Homo sapiens
tagtgaaatactctaaactacagactacatttggatttcagcagtttttccatggtgtccctgccctgttccaagattcaattcaggataccacagtatakttagtcattatgtctccttagacttctctaatctatggcaatttctcagttgtttgtttttatgactttaatagttcaatacttttgaagagtactggtt

SEQ ID NO: 292863 - DNA, 201 bp, Homo sapiens
ctttttttccccctatgacacctccctttatggcagttattacaatactctcatgagcctctcttggtctaattccaaatccgcacgcaattctactcccyttattacactttgaatcagattttggaagcccagagggcaaaaccaaaaactacgttaactattccagacagatggctctggacaggaatttccattgag

SEQ ID NO: 292864 - DNA, 201 bp, Homo sapiens
tttgtacagcactttagctatgcaatactaaattaagctatacagtgttacactaactgccctctttcctcatattccatagaaatcttaagtgttttgtktttgcttcctttaacatgactctgcgttttcattttcttctcttacgatgtggccagaatttctacttaataattcttatatcttagggtattgaccttt

SEQ ID NO: 292865 - DNA, 201 bp, Homo sapiens
gtacaaagcattgtcttttaaagcaatggcaagccaaagcctacttcccaccatatcagacatctcctccttgccctgtttgctacatgtatcttcttccytcctcccacttgcatgctctgttagttaaggtttcatgccttttgcttcatagttctttttcttcatttatggatatcccctcttcttcccaattaaacc

SEQ ID NO: 292866 - DNA, 201 bp, Homo sapiens
ttttcagtgatggtggtggattaatctgatttatccacactatcaggccgggtgcgatggctcacgcctgtaatcccagcactttgggaggccgaggcggrtggatcacgaggtcaggagatcgagaccatcctggctagtgaaaccccgtctctactaaaaatacaaaaaattagccgggcatggtggtgggcacctgta

SEQ ID NO: 292867 - DNA, 201 bp, Homo sapiens
ttttggtatcatgagtgcctagcttggaccactgtgtatgtagctcttaataaatgtttgttaaaattaactaattcatattcttaaattcttttgtactrtatagagatagagagattttaattgtaataatctttcgtgagtttttcttctttatttgaaaaaggatccagacacagagatgaagaatgacttgtacca

SEQ ID NO: 292868 - DNA, 201 bp, Homo sapiens
caaagaaatctgtttagcaaacagcctaggaagatagaaatagtgcttccattaggacagatggcacatttctttgctgtccaggataattaagataatcyctctagggaaaaaggttgggcatatttgcttgtagctccttttaaagattggagtttcattaagctcaggttttcttgtcctgtaatgcaacccacagta

SEQ ID NO: 292869 - DNA, 201 bp, Homo sapiens
cttggaaacatccttttcacacagtcatatgccaaatgtggccattgttcattttcttgttagacttaagaagtgtcagtttgatcgtattataaatggtwctgcattttttgttatgtctaatggaataattgagctatatctatctttaggaaatgtaggagggggaaatgaggaattattagtcaaagggtacagagt

SEQ ID NO: 292870 - DNA, 201 bp, Homo sapiens
ttacgtgccttggagtactcaaaattttcattgcacgtgtccatgaatgaccgtgaaagcaccacaagtattgatttgggtgttacaaataaattctagtwggtaaattcacatggaatctgtgaatagtgaggattgactccaggatgaaaaaagaactcctaacaagttacaattgtataaagctgacaaatgccacaa

SEQ ID NO: 292871 - DNA, 201 bp, Homo sapiens
aggctacggttcatgttcacttaaggcccaagggctcttcagtcagcttgtggtgaatgttgccaggcctgggactcgcccttcagggcactgggctcccytctggcccaggcaggtccaggagtgccatacaagagccaaggtctggaatcaggaaccccaagagcccacttggtgctctgttccactgtggctgagctg

SEQ ID NO: 292872 - DNA, 201 bp, Homo sapiens
actacagtgacagagttaaatggttccaacagaggaaccattgtatatggcccactgtattagtcagggttcttcagacaaactgaaccaataggatatayagtgagatagagcctgaaagatgtattataaggtcagtaccttataattagctcacacagttatcaagtctgagaagttccacgatctgccatctgcaag

SEQ ID NO: 292873 - DNA, 201 bp, Homo sapiens
taggaatctgaacataccccaggtaggaatttccacgtaaattttacctaaaagtagaaagggttttttcatttaaaagtctttttttctaaacactgcartggaattgtacaaatcctaaggatctgaatattagaaataaatacataacagtgagggcctttgactgagaaaacatccctttggtatctctctattgac

SEQ ID NO: 292874 - DNA, 201 bp, Homo sapiens
tctcctgacaaaacagtcttcagatagtctttttaaggtctccaagttgataggatgatggctgggagtaaaggggggtactaggaataaaccattttgtmttggagctctaatatgtatataatactaagagaagcaaaaataggcccctgtgaagcctctactctgtgggagctaatgcttaggaatctgaacataccc

SEQ ID NO: 292875 - DNA, 201 bp, Homo sapiens
ccagtttaatgaatatgataatttgaaatccaggtagaataatgtatctcattttcgccctcatattttaaagtgagatagtttataaaatggagaataartcatgttgttagatgttgactcttatagtataaaagtatgaatcttatatagtgatattctattttaaatgctttatatgtttaaataatttagaagaag

SEQ ID NO: 292876 - DNA, 201 bp, Homo sapiens
taactactagaagtctataattttacattgaatatacaaaatattatttgggcaaatgattattaaaataatatcatagtaatatacatcccccctttttrttatggtaaaatgtacataacacaattcaccatttaatcatttttaagtatacagttcattgttatgcaaccatcatcactatctccagaacgctttcat

SEQ ID NO: 292877 - DNA, 201 bp, Homo sapiens
tttgttttaacaggtctataatgacggatctatactacctcagtcagacagatggagcaggtgattggcgggaaaaagaggccaaagatctgacagaactrgttcagcggagaataacatatcttcaggtaagaaggttgggttaagaataaatttgagtgaaaaaaagaaggatcataatataactaagagtaataattt

SEQ ID NO: 292878 - DNA, 201 bp, Homo sapiens
aaagcttgaacgcttaaaacagcagaatgaagacttgaggcgaatggccgaatctctccggtaggtcctaaaatactgaacgaagaatgatgaaatattgyactttgtttttaggtgtagggcttcattccgctaggaaaaatagttaattatttttataacctgctgtctttgccacaacttagcatgacagttttctat

SEQ ID NO: 292879 - DNA, 201 bp, Homo sapiens
caggaaccatttctgtagttccttaaaacactatagataaatcaaaattaaatactaaaaaaggttcagagtatgtatagacaaggagaaatgggaacaamaaaaggagcaaataaaaaacaataaagtggcgtacttaaatcccaacatgtcaataattgcatgaaatataaatacaaatgatctaaacataccagttaa

SEQ ID NO: 292880 - DNA, 201 bp, Homo sapiens
cataagattgaaactggaccccttcctttcactatatacaaaaattaagtcaagatagataaaagacttaaatgtaaaacctaaaaccataaaaactctakaagaaaacctagggaataccattgtggatataggccctggcaaagattgcatgatgaagacgccaaaagcagttgcaacagaaacaaaaattggcaaaca

SEQ ID NO: 292881 - DNA, 201 bp, Homo sapiens
tttgtctcccttccccaggattatataaattgtaggctaatttcatggaataggaaataataaagtccgtgatctttagtggagttatacatatttttttycctccaaaaggttgttactcagtaagaaagttctatagtggtttatacatcagttccattggaaagaaagacatatttgtgtgtgtgtgtgtgtgtgtgt

SEQ ID NO: 292882 - DNA, 201 bp, Homo sapiens
ccaggcagaggggctcctcacatcccagacaatgggcagccaggcagagacgctcctcacttcccagacggggtggcggccaggcagaggctgcaatctckgcactttgggaggccaaggcaggcggctgggaggtggaggttgtagcgagccgagatcacgccactgcactccagcctgggcaccattgagcactgagtg

SEQ ID NO: 292883 - DNA, 201 bp, Homo sapiens
actttgggaggccaaggcaggcggctgggaggtggaggttgtagcgagccgagatcacgccactgcactccagcctgggcaccattgagcactgagtgaaygagactccgtctgcaatccaggcacctcgggaggccgaggctggcggatcactcgcggttaggagctggagaccagcccagccaacacagcgaaaccccg

SEQ ID NO: 292884 - DNA, 201 bp, Homo sapiens
aggtggaggttgtagcgagccgagatcacgccactgcactccagcctgggcaccattgagcactgagtgaacgagactccgtctgcaatccaggcacctcrggaggccgaggctggcggatcactcgcggttaggagctggagaccagcccagccaacacagcgaaaccccgtctccaccaaaaaaatacgaaaaccagtc

SEQ ID NO: 292885 - DNA, 201 bp, Homo sapiens
ttcaacacaagttttgtgtcagtttagagttaaacgcatctcaagtaactgacttaactggcttgcctctatgaaaactgtaggcaggtttcattatagattttttttttcttgttattccggcggttaggtgcatgtttattttcttgattaaatttacattctatgttttatgactaattctttaaataggtgcatcat

SEQ ID NO: 292886 - DNA, 201 bp, Homo sapiens
attggttcaattcatgttagctatcaaatttgtgggtacagtgttatccataatattcctttattatcgttttaacgtccacgtgattagttgttgtggcctgtcttttatttctaatattagtaatttgggtcttctccccttctttctcagttagcctcactagaggtttattcattttactgatattttcaaagaact

SEQ ID NO: 292887 - DNA, 201 bp, Homo sapiens
ttggttcaattcatgttagctatcaaatttgtgggtacagtgttatccataatattcctttattatcgttttaacgtccacgtgattagttgttgtggcctgtcttttatttctaatattagtaatttgggtcttctccccttctttctcagttagcctcactagaggtttattcattttactgatattttcaaagaacta

SEQ ID NO: 292888 - DNA, 201 bp, Homo sapiens
tggcctcaaacgatcctcctgcctcatcttcccaaagtgctgggattacagggatgagccactgcacctggcctcctcagtgattttctttctttctttcttttttttttttttttttcgagactgagtctcgctttgtcacccaggctggagtgcagtggcgcgatctcggctcactgcaacctccgccttccgagttca

SEQ ID NO: 292889 - DNA, 201 bp, Homo sapiens
tggttcaattcatgttagctatcaaatttgtgggtacagtgttatccataatattcctttattatcgttttaacgtccacgtgattagttgttgtggcctgtcttttatttctaatattagtaatttgggtcttctccccttctttctcagttagcctcactagaggtttattcattttactgatattttcaaagaactag

SEQ ID NO: 292890 - DNA, 201 bp, Homo sapiens
agcaaatattcactcttgagctcacctcattaacaacaggaggtggctacaaaattatttcaatagtacagggtgtagtacagttaaatttatgtagttaygatttaatactgcatctttactcttttgagacagggtttctctcagtgtcaaatgccaccatgtgtggctaagtgtgtggtataagttgtgacaattttt

SEQ ID NO: 292891 - DNA, 201 bp, Homo sapiens
ggttcaattcatgttagctatcaaatttgtgggtacagtgttatccataatattcctttattatcgttttaacgtccacgtgattagttgttgtggcctgtcttttatttctaatattagtaatttgggtcttctccccttctttctcagttagcctcactagaggtttattcattttactgatattttcaaagaactagc

SEQ ID NO: 292892 - DNA, 201 bp, Homo sapiens
aaatcaaaactatgtttattttatgaagatttgtcactctgacaatattataaacattatattaagactttaaagcaggccaggcatggtgcctcatgccygtaatcacagcattttggaggctgagatgggaggattgcttgagcccaggaatttgagatcagcctgggcaacatggtgataccccatctttacaaataa

SEQ ID NO: 292893 - DNA, 201 bp, Homo sapiens
tttttatgaaatgtcagtgtcagcgttatggaaataaatgtagaactctctgaggtgactgttcttattgcaagaatctttttttgtttttgttttttttktgagacagggtatcactctgttgcccaggctgtagtgctgtagtgctttcatggcttactgcagcctcgacccctggggcagaatctatcctcccagctc

SEQ ID NO: 292894 - DNA, 201 bp, Homo sapiens
gtttccagctggagattgtcatctaattgtcatgctgtcatgcttaacccactcaaatttgaattttcttttcttttaaaatgtattttttctactttcctttttttttttttaaattattggcttttccttcccattatccaaacttgaattgtgaatcatctttgtattccccgtcagattcattcgcttgtcaaacta

SEQ ID NO: 292895 - DNA, 201 bp, Homo sapiens
tgcgagatcctgatggcatacctgcttattctagtcgtttctttcaagggggcatgacatgtagtgaaggaataaggggaacttaagagtggaattgtgattttttttttttaaatagggcaatggaggaaagtgaggctggaatttagctcttgggtaaatttgatgaaattaagccttgccttcctactgctttctgtt

SEQ ID NO: 292896 - DNA, 201 bp, Homo sapiens
cttgccaatgaagagaagctgttctagtatctttgtgatcctttgagccggaaggaggttctaagttaggagaaagtactaacttatttaaaaaaaatagaacaaacaaaaaaactccctcaaacgtctagccatggactcatagggtcttatgaatcatcaaagagactgttggcagtatcccctttattagcaagctgt

SEQ ID NO: 292897 - DNA, 201 bp, Homo sapiens
taataaccatgtagttggcttgattgactatattatattcctagatcatttcatttattttaaaacattttgcatatatacaggaaaacaatttgaagactgtgttttgttctggtgaatacattttaaacatattctaggtttattctttacaagtacattatttctttaatggtacagtgatttttattctaattcatt

SEQ ID NO: 292898 - DNA, 201 bp, Homo sapiens
aaactttgacccaaactattttggctcacacttttacttctcatatgggcttttataataatatggagagaggggataagaagttgtctaaagtaaaatcaaaagttgtttgtccatttcctctctcaagtaagaatatatcaagaatatttcagtctagccattttgtagcttgagattagagaaggaaagtttacattc

SEQ ID NO: 292899 - DNA, 201 bp, Homo sapiens
aataaccatgtagttggcttgattgactatattatattcctagatcatttcatttattttaaaacattttgcatatatacaggaaaacaatttgaagactgtgttttgttctggtgaatacattttaaacatattctaggtttattctttacaagtacattatttctttaatggtacagtgatttttattctaattcatta

SEQ ID NO: 292900 - DNA, 201 bp, Homo sapiens
aaaattatcttatctcttatgtttgttaaagcattatttgccatagctaagatatagaatcaacctaagtgttcatcaacacatgaatggataaagaaaakgtgtgtgtgtgtgtgtagtatatatatatatatatatatatatatatatatatatatatatatgtacacacacacagtggaatactgttcagcttttcag

SEQ ID NO: 292901 - DNA, 201 bp, Homo sapiens
ttaggtccatttggtttctgatgcagattaagtctgatgttcctttgttgattttctgtctgtccaattctgaaagtgaggtgttgaaatctccagctatkattatattggggtctacctctctcgttagctgtaatatttgctttatgtatctgggtgctccagtgttgagtgcatatatatttataattattatatctt

SEQ ID NO: 292902 - DNA, 201 bp, Homo sapiens
atgtttgttaaagcattatttgccatagctaagatatagaatcaacctaagtgttcatcaacacatgaatggataaagaaaatgtgtgtgtgtgtgtgtagtatatatatatatatatatatatatatatatatatatatatatatgtacacacacacagtggaatactgttcagcttttcaggagaaggaagtcttgata

SEQ ID NO: 292903 - DNA, 201 bp, Homo sapiens
tttgtgtagatagttgttaaatttggtgttcctgtggtgggggcagcgattggttgaggcttctattcagccatcttgcttcatctccctccaatagattaaaaaaaaaaaaagattttagaattatctaatttttttctttaaaagatgtagatgattggcttataattataatcttcaggtgtttccagagtcattgtg

SEQ ID NO: 292904 - DNA, 201 bp, Homo sapiens
taaaagaggaaaaaaaagaatgaatataagctggttatattgaagtatattttacacagattttttttagtagttaatttcttatttagataactaggaagggtaagtggaaagatacatatgtttttaaagaggggcaggtaacttttaattttctttgtaactttcagaatttctttccctacttgatatatggagacc

SEQ ID NO: 292905 - DNA, 201 bp, Homo sapiens
ctacctctgaagaatccaaatgaacctgaagcaaattgccttttttattcaaggctccctctcttgagcatatgcacacactaccatatacatgcgcgcaygcgtgcacacacacacacactgagatgtgtatatatataaacaaagggcaaataattcatcagccaagtataagaatgagttaatgtaagagggattaaa

SEQ ID NO: 292906 - DNA, 201 bp, Homo sapiens
actttgggaggccaaggcaggttgatcacctgaggttgggagttcaagaccagcctggccaccatggtgaaaccccatctctactaaaaacacacacacamaaaaaaaaattagccgggtgtggtggcacatgcctgtaatcccagctacttgggaggctgaagcataagaattgcctgaatccgggaggcagaggttgca

SEQ ID NO: 292907 - DNA, 201 bp, Homo sapiens
tggccctcttctaacagctccactaggcggtgtcccagtagggactctgtgtgggggctctgaccccacattttgcttctctactgccctagcagaggttytccatgacagccccattcctgcagcaaacttctgcctgggcatccaggtgtttttatacatcctctgaaatccaggcagaggttcccaaacctcagttcc

SEQ ID NO: 292908 - DNA, 201 bp, Homo sapiens
acaaggaaagccaggataaatacttgattctttatttttatttaccagttttcaagatactgaaattgttacatctaaacctgtgaagatgttttagggcttttttttttttttttttaacatgtttagattttcattcattgcaattaatatgcttaatgaagctcaaattgttgttacatctttgaccagtgggagcct

SEQ ID NO: 292909 - DNA, 201 bp, Homo sapiens
ctcctgggtctgagggaggaggggctgggggcctggactcctgggtctgagggaggagggggtgagggcctggactccagggtttgagggaggggagggckgggggcctggactcttgggtctgagggaggaggaagctagggtcccaaactcctgagttctggagaaagaagagcttggggtcttgtaaaagggatatgc

SEQ ID NO: 292910 - DNA, 201 bp, Homo sapiens
taagccctgtcctggctttcttttctccctacgctgccaccccaggatttttgggaccctggattgctggggagaagcagatctcttagtatctccggctragtacacacaggcttcgatcaatactgagctgtcttcaaacaaacagctcaggaagtccgggaacattattcgaccacagcaaacaagagagccagcagg

SEQ ID NO: 292911 - DNA, 201 bp, Homo sapiens
aagaaaaagaagaaaaaagaaagagaaaaggaaaagagaataaaagaaagaaagggcctgacccactggagaggcttgggaactgtctgtggggcacacargtgagcagaagggtggacacatggatggacaggcggacagacaaactgaaacttcatcctacacgagttagaggtgagagggaaaaggcagcatggacta

SEQ ID NO: 292912 - DNA, 201 bp, Homo sapiens; identical to SEQ ID NO: 60429

SEQ ID NO: 292913 - DNA, 201 bp, Homo sapiens
agagccttatccctgcaggtgttccccatgaggggaggaagagggtgtcagtgggagccccaaggatagccagagtccttgcccatccccacaggcgacasctggccaagctggccatcatcttcagccacatgcacgcagagctgcacgcactcttccccgggggaaagtactgtggacacatgtaccagctcaccaagg

SEQ ID NO: 292914 - DNA, 201 bp, Homo sapiens
gagggtgcaaccattcacataggggacatctcaaatctgcagtactacaaaattccagcaggtggcagtcaaaggtcttgaggaaggggcgcctctgaggktcgcacaaagtggccatagatcgggcccagccacagctccgaggagaagtgtgtggggcattgggcacaaccgcaagggctccattccttggaactgagc

SEQ ID NO: 292915 - DNA, 201 bp, Homo sapiens
ccaagaattaaggctgtggcctcagccgcgcaggaagccacctccagcccccaggtggtctgggactcccaggtctaagacaaaggggacagggaagaggsgcagagggaaagattggatgccgggaatcaaccgccctctcaaaatatctccattgcagagactcctaaaggggaactcccctccagctgcgctgggacc

SEQ ID NO: 292916 - DNA, 201 bp, Homo sapiens
ctagagggctgagaattgagctgtctagataccaagagaagagaaggtcaggtttgtgagtctctgcagggctgaggtgcaggggtaggacggtgagtgcrttagcattcttccagttacacttcaaacttatttaagggaaaagaaaaaggaaagaataaattcctataattgaaaaggccaggccccgcacagtggctc

SEQ ID NO: 292917 - DNA, 201 bp, Homo sapiens
ggcacccgtaatcccagctactcgggaggctgaggtaggagaatcgcttgattctcgcttgattatcgcttccgccaggaggtggaagttgcagtgagccragattgtgccactgcactctagcctgggcgacggtgcaaaaactccgtctcaaaaagaaagaaagaaagaaagaaatccccactggctccccagggctct

SEQ ID NO: 292918 - DNA, 201 bp, Homo sapiens
ctaaaaactaaaaaaaaaaaaaaaaaatagccaacgtggcagtgcatgcctgtagtcctagttactagggaggctgagacaggaggaccacttgagccccrgaggtcaaggctgcaatgagtggtgatccaacaaccactgcactccagcctaggagacagagcaagaccctgtctcaaaaaaataaaataaaataaaata

SEQ ID NO: 292919 - DNA, 201 bp, Homo sapiens
ccgccctctcctttcactctgggcgaggccgcccctatcccagccgcaccggtccttcccggcacacgcgaggctcccatggctctggcggtggccccgtrggggcgacagtgggaagaggcccgcgccctgggccgggcagtcaggatgctgcagcgcctagaagagcaatgcgtcgacccccggctgtccgtgagtccc

SEQ ID NO: 292920 - DNA, 201 bp, Homo sapiens
cagctggccaagctggccatcatcttcagccacatgcacgcagagctgcacgcactcttccccgggggaaagtactgtggacacatgtaccagctcaccamggcccccgcccacaccttctggagggaaagttgcggagcccggtgagtaagcccttgtcctcagctcccggagccccatcctgccctggcccagggaccc

SEQ ID NO: 292921 - DNA, 201 bp, Homo sapiens
actcttccccgggggaaagtactgtggacacatgtaccagctcaccaaggcccccgcccacaccttctggagggaaagttgcggagcccggtgagtaagcycttgtcctcagctcccggagccccatcctgccctggcccagggacccaggggtccaggcccacagctgcttctttcctggagaccctcccatcataggct

SEQ ID NO: 292922 - DNA, 201 bp, Homo sapiens
ctcggctcacagcaacctctgcctcccagattcaagcaatgctcctgcttcagcctcctaagtagctgggactacaggcacccaccaccatgcccgactamtttttggatttttagtagagacgaggttttgccacattggccaggctggtctcaaacccctgccctcagctgatccaccgccttggcctcccaaagtgct

SEQ ID NO: 292923 - DNA, 201 bp, Homo sapiens
ttgagtctagaacagtgcctgaatgctgagtcccaggcaggagaacatggaggcgagaagaaaatggcagctcacaagccccttctccttcctctgtcccmccccaggtgcccctttcggctcctccattgcccccacggccagatctgccccccaggaagcccagaaatgcccagccgaaagtggtgagtcaggcgctgg

SEQ ID NO: 292924 - DNA, 201 bp, Homo sapiens
acgtcataggtgctcaataaatagatgccaaatgaatacactgaagtgagtcttcccaacagccctatgaagtcaaaagtgttcctctcccggctgggcgyggtggcttatgcctgtaatcccaacattttgggaaggtgaggcaggtggatcactgagttcaggagttcgagaccagcctaaccaacatggtgaaaccct

SEQ ID NO: 292925 - DNA, 201 bp, Homo sapiens
gcgccactgcactccagcctggatgacagagggtgagaccctgtctcaaaaaacaaacaaacaaatgaatgttcctctccccattttccagaggaaaaaarttcagagaggtgacagtacctgcccaaaaccacacagcctgaaagaggagaagtcagcgttggagtctttaaggcccccaaaccatctacttattttttt

SEQ ID NO: 292926 - DNA, 201 bp, Homo sapiens
gccaggatggtcttgttctcctgacctcgtgatccacccgcctctgcctcccaaagtgctgggattacaggcgtgagctactgcggccggcccccccacctttttttttttttttgagatggaatcttgctctgtcacccaagttggagtgcaacggcactatctcagctcactgaaacctccacctcccgggatcaagag

SEQ ID NO: 292927 - DNA, 201 bp, Homo sapiens
ggggtgagccaccgcgcccggcctacttattttttaataagccctgtcctggctttcttttctccctacgctgccaccccaggatttttgggaccctggaytgctggggagaagcagatctcttagtatctccggctgagtacacacaggcttcgatcaatactgagctgtcttcaaacaaacagctcaggaagtccggga

SEQ ID NO: 292928 - DNA, 201 bp, Homo sapiens
ttctcagcaaggcactgtcataacttttgttgttgttgttgttgtttgagatggagtctcactttgtcacccaggctggagtgcagtggcacgatctcagmccattgcaacctccgcctgccaggttcaagcgattctcctgcctcagcctcccgagtagatggggtcacaggtgctcaccaccatgcctggctaattttt

SEQ ID NO: 292929 - DNA, 201 bp, Homo sapiens
tttttttttgagatggagtcttattctgtcatccaggctggagtgcagtggcgtgatctcagctcactgctacctctgcctcccgggctccagcgattctsctgcctcagcctcctgagtagctgggattataggcgggcgccaccacgccaggctaatttttgtattttcagtacagacagggtttcaccatgttggcca

SEQ ID NO: 292930 - DNA, 201 bp, Homo sapiens
tagctaggcgtggtggcgggcacccgtaatcccagctactcgggaggctgaggtaggagaatcgcttgattctcgcttgattatcgcttccgccaggaggyggaagttgcagtgagccaagattgtgccactgcactctagcctgggcgacggtgcaaaaactccgtctcaaaaagaaagaaagaaagaaagaaatcccca

SEQ ID NO: 292931 - DNA, 201 bp, Homo sapiens
ggcaatgttatcagtggaaagctctccttccttctctgcctaggtgatccccagccagtggcttcacgtctctgagccttagcctcgtcccctggagaacrgggctgagaatagtgacctcccaaaggccacagtgaggctgggcacggtggctcacgcctgtaatctcagcactttgggaggccggggtgggtggatcac

SEQ ID NO: 292932 - DNA, 201 bp, Homo sapiens
ctcagcctcccacagtgcggggattacaggagtgagccactgcgcctggcctcaaggactttctagctctccttccagcatcccagatgtgtcctacctcrgggcctttgcataagctgttcccttggcctgcacagtctttcctgaggcttgctttcccatcccttttcagggaggccttccctgaccactctgttcaag

SEQ ID NO: 292933 - DNA, 201 bp, Homo sapiens
acagctgtcttctcagagcgaaaaacagggccttggcctggcgcggtggctcatgcctgtaatcccagcactttgggaggctgaggcaggaggatggtttragcccaggaggtcaaggctgcagtgagctatggtcccatcactgcactccagacgaggcaacagagcgagaccctgttttgctttgttttgttttgagac

SEQ ID NO: 292934 - DNA, 201 bp, Homo sapiens
agtgctgggattacgggtgtgagccaccgcgcgtggcccctgttttttcggtttgttgttgttgttgttgttgtttttaaaaaagaaagaaaagtaaagaragagagagagaaagaaagggagagaaagaaggagggagagagaaaggaaagagagagaaatagaaaaagaaagaaagggagggagggaaagagaaaaaag

SEQ ID NO: 292935 - DNA, 201 bp, Homo sapiens; identical to SEQ ID NO: 60432

SEQ ID NO: 292936 - DNA, 201 bp, Homo sapiens; identical to SEQ ID NO: 60434

SEQ ID NO: 292937 - DNA, 201 bp, Homo sapiens
ccctttccctcccgacctcccccagcactcggacagccagacctgccccttctgccgctgcgagatcaagggctgggaggccgtgagtatctaccagttcyacggtcaggctactgctgaggactcagggaacagcagtgaccaggaaggcagggagttggagctggggcaggtgagcagggccagccgggagctggaatc

SEQ ID NO: 292938 - DNA, 201 bp, Homo sapiens
ggtgtgtgctgccctgggctgagtttgagtccctcctgggcacctgccaccctgtggaaccaggctgcacagccctggccttgcgcaccaccattgacctsacctgcagcgggcacgtgtccatcttcgagttcgacgtcttcaccaggctctttcaggtcagggaaggccaaggctgggagctagacttgggtccaggag

SEQ ID NO: 292939 - DNA, 201 bp, Homo sapiens
caacactcctcaagaactggcagctcctggcagtcaaccacccaggctacatggccttcctcacctatgatgaggtccaagagcgtctgcaggcctgcagrgacaagccaggcaggtaaagggtccagggctcagcagaacaaggctgcagggctcagggatctgggctctgggctggtgcgtggtggagcccagatgtcc

SEQ ID NO: 292940 - DNA, 201 bp, Homo sapiens
cctgccaggagcagctgcagctctactgggccatggactccacatttgagctctgcaagatctgtgctgagagcaacaaggatgtgaagattgagccgtgygggcacctgctctgcagctgctgcctggctgcctggcaggtgggtctgacccctgtggcgccttcccctctggtctccccctctctacagggaaagcccc

SEQ ID NO: 292941 - DNA, 201 bp, Homo sapiens
atccccctgcctcagcctccaaagtgctgggattacaggcgtgagccaccacaaccagccgaggtttgggattttcttcctgtggcccaagttgtgtcccygtggctgacgcatgcccctcgctgtcttctctatcctctcacctgccaggagcagctgcagctctactgggccatggactccacatttgagctctgcaag

SEQ ID NO: 292942 - DNA, 201 bp, Homo sapiens
atgtccttccaagagtgggaacagaggtacccaggaccccagagagttgataactcagaggcaggacactgagtgcccctcccagcccgcctcttctctcraggcctcctgtactgtcccataatcctgcagctaagggacagtgcccgctctagcaaggagcccaaagacccgcttgagggtaaggtccgtttctggtag

SEQ ID NO: 292943 - DNA, 201 bp, Homo sapiens
tccacccacctcggcctcccaaagtgctgggattacgggtgtgagccaccgcgcgtggcccctgttttttcggtttgttgttgttgttgttgttgtttttwaaaaagaaagaaaagtaaagaaagagagagagaaagaaagggagagaaagaaggagggagagagaaaggaaagagagagaaatagaaaaagaaagaaagg

SEQ ID NO: 292944 - DNA, 201 bp, Homo sapiens
tgtggcgccttcccctctggtctccccctctctacagggaaagccccaaaaggatctccatgcctcattgatcatatggggaaaccgaaggccagagaggrcaaagagctgatggcaaccactcaggagcccggctgtctttcccagggcctctggttccatcccactctgcacacgctgcctctgtttctccctctccgg

SEQ ID NO: 292945 - DNA, 201 bp, Homo sapiens
caggattttgagacctttctgggcaatatagcggaaccccgttctctaaaaaaaaaaagaaaagatgaaaatagcaccgctgtccctcggggccctgctckgctgtatgttcaaagatctttcgccacccggcagagcttagggttggttttgtcggcttttatcactgtcaggttgcaaccttcctgcaggtcaggcctt

SEQ ID NO: 292946 - DNA, 201 bp, Homo sapiens
tgagctcagatggcagcatcctgcagaccatccctgccaacaaacccctgtcccaggtgctcctggagggacagaaggacggcttgtgagtctccattctsgtaggaggagggtgtcagcaaaatctggttggaaagatcttgcatgttgtgcactgccggtggccaccacgtttgagggtgcaaccattcacatagggga

SEQ ID NO: 292947 - DNA, 201 bp, Homo sapiens
ggaggctgaggcgggtggatcacttgagcctgggagttggcggttgcagtaggccaagattgcgaccctgcacttcaacctgggtaacggagtggggctcygtcccgcaaaaaaaaaaaaaaagaaagaaagaaaaataatgaaattcaaatttagcagcatcagcatccaatacttttatttgctaaatctggcaccact

SEQ ID NO: 292948 - DNA, 201 bp, Homo sapiens
ttccccaagggctggggctgtggctttccctggctgtaaccctcctaagtgttcatacgttgtcttggtctctgttatatcttgagtctagaacagtgccwgaatgctgagtcccaggcaggagaacatggaggcgagaagaaaatggcagctcacaagccccttctccttcctctgtcccaccccaggtgcccctttcgg

SEQ ID NO: 292949 - DNA, 201 bp, Homo sapiens
tctcctgcctcagcctcctgagtagctgggattacaggcacccaccaccatgccccgctaatttttgtatttttagtacagacagaatttcaccatgttgrtcaggctggtctagaactcctgacttcattatctgcccccctcagcctcccacagtgcggggattacaggagtgagccactgcgcctggcctcaaggact

SEQ ID NO: 292950 - DNA, 201 bp, Homo sapiens
gagccttatccctgcaggtgttccccatgaggggaggaagagggtgtcagtgggagccccaaggatagccagagtccttgcccatccccacaggcgacagstggccaagctggccatcatcttcagccacatgcacgcagagctgcacgcactcttccccgggggaaagtactgtggacacatgtaccagctcaccaaggc

SEQ ID NO: 292951 - DNA, 201 bp, Homo sapiens; identical to SEQ ID NO: 60431

SEQ ID NO: 292952 - DNA, 201 bp, Homo sapiens
ttggcccaagggacaggatggagagcaggggagcactgaccctttccctcccgacctcccccagcactcggacagccagacctgccccttctgccgctgcragatcaagggctgggaggccgtgagtatctaccagttccacggtcaggctactgctgaggactcagggaacagcagtgaccaggaaggcagggagttgga

SEQ ID NO: 292953 - DNA, 201 bp, Homo sapiens
cctctgtttctccctctccggcaatgttatcagtggaaagctctccttccttctctgcctaggtgatccccagccagtggcttcacgtctctgagccttakcctcgtcccctggagaacggggctgagaatagtgacctcccaaaggccacagtgaggctgggcacggtggctcacgcctgtaatctcagcactttgggag

SEQ ID NO: 292954 - DNA, 201 bp, Homo sapiens
gtctgagggaggagggggctgggacctggactcctgggtctgagggaggaggggctgggggcctggactcctgggtctgagggaggagggggtgagggccyggactccagggtttgagggaggggagggctgggggcctggactcttgggtctgagggaggaggaagctagggtcccaaactcctgagttctggagaaaga

SEQ ID NO: 292955 - DNA, 201 bp, Homo sapiens
acatgtaccagctcaccaaggcccccgcccacaccttctggagggaaagttgcggagcccggtgagtaagcccttgtcctcagctcccggagccccatcckgccctggcccagggacccaggggtccaggcccacagctgcttctttcctggagaccctcccatcataggctctgggaggcctcagcggtgtctcccccac

SEQ ID NO: 292956 - DNA, 201 bp, Homo sapiens
actggagtgcaatggcatgatctcggctcactgcaacctctgcctcccagattcaagcgattctcctgcctcagccgcctgagtaggtgggattacaggcrcccaccaccacacccggctaattttttgtgtgtgtttttagtagagacagggtttcaccatgttggtcaggctggtctcgaactcctgacctcatgatcc

SEQ ID NO: 292957 - DNA, 201 bp, Homo sapiens
gggaaagttgcggagcccggtgagtaagcccttgtcctcagctcccggagccccatcctgccctggcccagggacccaggggtccaggcccacagctgctkctttcctggagaccctcccatcataggctctgggaggcctcagcggtgtctcccccacccctctcccacccaggtgtgtgctgccctgggctgagtttga

SEQ ID NO: 292958 - DNA, 201 bp, Homo sapiens
ggctgcagtgagccaagatcacgcctctgcattccagcttgggtgacagagtgagattccatctcaaaaacataaaaataaagtcaatcataagctgggcrcagtggctcacgcctgtaatcccagcactttaagaggctgaggtgggtggatcaccaggccaggagatcgagaccatcttggctaacacggtgaaaccct

SEQ ID NO: 292959 - DNA, 201 bp, Homo sapiens
tgcggagcccggtgagtaagcccttgtcctcagctcccggagccccatcctgccctggcccagggacccaggggtccaggcccacagctgcttctttcctrgagaccctcccatcataggctctgggaggcctcagcggtgtctcccccacccctctcccacccaggtgtgtgctgccctgggctgagtttgagtccctcc

SEQ ID NO: 292960 - DNA, 201 bp, Homo sapiens
gcagtggctcacgcctgtaatcccagcactttaagaggctgaggtgggtggatcaccaggccaggagatcgagaccatcttggctaacacggtgaaacccygtctctactgaaaataacaaaaaattagctgggcgcagtggcgggcgtctgtagtcccagctactcaggaggctgaggcaggagaatggcgtgaactcgg

SEQ ID NO: 292961 - DNA, 201 bp, Homo sapiens
gccactgtggggcccaggtcagggatcctgcactgctccacatgacaggccaggcagggccactagcctcagggagtctgagggtccaatatttcatgtgstatacatgtcggaataactggagtagcattgaggcatgccagataggccgaggaaatgatccagggggagacccagggagcccagagcttgcttctccgg

SEQ ID NO: 292962 - DNA, 201 bp, Homo sapiens
agcttgcagtgagccgagatcgcgccactgtacttcagcctgggtgacagaaccagactctgtctcaaaaaataaaaataaaaataaaataaagtcaatcrtagaagtcccttcttattgggtgtttatgcacagaggaggacgctgcatttaaaatttttttctaatttaaaaaatttatttgcaccgggcacccagcaa

SEQ ID NO: 292963 - DNA, 201 bp, Homo sapiens
agacccaggagtccatactgcagcccctcctccctcagacccaggagtccatactgcagcccctccttcctcagacccagtagtccatactgcagcccctyctccctcagacccaggagtccaggccccagcccctcctccctcagacctaggagtccaggccccagcccctcctccctcagacccaggagtccagacccc

SEQ ID NO: 292964 - DNA, 201 bp, Homo sapiens
gactctgtctcaaaaaataaaaataaaaataaaataaagtcaatcgtagaagtcccttcttattgggtgtttatgcacagaggaggacgctgcatttaaawtttttttctaatttaaaaaatttatttgcaccgggcacccagcaaagtgctgggattacacggtggctcacacgtgtaatcccagcactttgggaggccg

SEQ ID NO: 292965 - DNA, 201 bp, Homo sapiens
catactgcagcccctccttcctcagacccagtagtccatactgcagcccctcctccctcagacccaggagtccaggccccagcccctcctccctcagaccyaggagtccaggccccagcccctcctccctcagacccaggagtccagacccccaaccccttctccctcagacccaggagtccaggccccagcccctcctcc

SEQ ID NO: 292966 - DNA, 201 bp, Homo sapiens
tggagtgcagtgacatgaacacggctcactgctgcagcctcgacctcccaggctcaggggattctctcgcttcagcctctcctgagtagctgagaccacasgcacatgccaccatgcccagctaatttttttaatttttttttttttagacatagtgtctttctgtgttgcccaggctggtctcgaacccctgggctcaag

SEQ ID NO: 292967 - DNA, 201 bp, Homo sapiens
tacaatctctgcctcctgggttcatgaaattctcctgcctcagcctcccaagtagctgtgattacagacacgcacctccatgcctggctaattattattgkatttatttatttattttgctatttttagtagaaacggggtttcaccatgttggccaggctggtctcaaactcctggcctcaaatgatctgcctgccttgg

SEQ ID NO: 292968 - DNA, 201 bp, Homo sapiens
ccgtgccagctcctaatcttcacagccaccctacgagtgagaaaaacaacaataacaaataaataatttattttttatttatttttatttttagagacagratctcttctgtcgcccaggctggagtgcagtggtgcgatcatggctcactgcagcctcgacctctgggctcaagcaggcctcccacctcagcctcccgag

SEQ ID NO: 292969 - DNA, 201 bp, Homo sapiens
gtggcgcaatcttggctcactgcaacctccacctcccgggttcaagaaattctcctgcctcagcctcctgagtagctgggattacaggcacccaccaccaygccccgctaatttttgtatttttagtacagacagaatttcaccatgttgatcaggctggtctagaactcctgacttcattatctgcccccctcagcctcc

SEQ ID NO: 292970 - DNA, 201 bp, Homo sapiens; identical to SEQ ID NO: 60452

SEQ ID NO: 292971 - DNA, 201 bp, Homo sapiens
acatggggtggccattcctgggggcctggacagatggcaggaacagattttggggagccgtcacaagtgtgggtttagacacagggttcaggtgcctttargacatccagggggccaaggcccaggcccgttaggagcagcagcaggggaaaccctgggcctccacaccctggttgaggtgggacaggctgctgaccactc

SEQ ID NO: 292972 - DNA, 201 bp, Homo sapiens; identical to SEQ ID NO: 60453

SEQ ID NO: 292973 - DNA, 201 bp, Homo sapiens
ggctcacgcctgtaatcccagcactttgggaggctgaggagggtcaggagttcaagaccagcctggccaacatggtgaaaccccgtctctatactaaaaamttaataaataaataaattatccaggcgtagtggcgcgcgcctgtagtcccagctactcgggaggctgaggcaggagaatcgcttgaacctgggaggcaga

SEQ ID NO: 292974 - DNA, 201 bp, Homo sapiens
aatattttatgttctaagatcctgcttctgagatgctaggattgggagctaacacactacgatgggaagattttctggtcctgaaaccagatgtaggattwccaagtgttatcagttctgatcccaagcttctgtttgtcaaacatcctgagatcccaaggatctataataatactgttcaaagacttaagtccctaaaag

SEQ ID NO: 292975 - DNA, 201 bp, Homo sapiens
tttttttttttttaaagattggggtcttgggccaggcgcccaagtggagaaaccccgtctctactaaaaatacaaaattagccgggcatggtggcgcatgyctgtaatcccaggtacttgagaggctgaggcaagagattcgcttgaacccgggagacggaggtggcagtgagccaagatcgcgccattgcgctccagcct

SEQ ID NO: 292976 - DNA, 201 bp, Homo sapiens
gtttggaagtgtgactgtgtgacttagtttacagtgtgatctggggagtctgcggtggtgggggtgtgtggctctggggctttctgcttatgtctcttgtsgggggggtcaccaccctgcctcagtgccctctcctggggtgtccctggcagggattaggggggcatcctctgaagggagggggtctgggctgccatccca

SEQ ID NO: 292977 - DNA, 201 bp, Homo sapiens
gaggcggagcttgcagtgagctgagatcgtgccactgcactccagcctgggcgacaggagactccgtctcaaaaaaaaaaaaaaaaaaaaaaaaaaaaaaagccaggcgtgatggcgtatacctgtggtcccagctactcgagaggctgaggatcagctgggcccagaggattgaggttactgtgaatcatgaccgaggta

SEQ ID NO: 292978 - DNA, 201 bp, Homo sapiens
tagatttattgtacatatgcacaaacacaaattcattatacacatattttatacatgaatatacaaataaacacacaattttttttcttttttttttttttagacagaatctcactctgtcacccaggctggagtgcagtggcaaaatctcagctcactgcaacctccacctcttgggttcaagtgattctcgtgcctcag

SEQ ID NO: 292979 - DNA, 201 bp, Homo sapiens
ctggctctgttcctccatgggcaggtcctcgggtctctttgggcccccgctttccaaagtaggggaagagcttggtaaatcgtgggggcttggggaatggygcgggctgtcagcattacctgctgtgttggagattcagggatgctgtccagactcgacggcccctgagaagacctacgcagacacctggctgcccccagc

SEQ ID NO: 292980 - DNA, 201 bp, Homo sapiens
ccattaagttcacccttttatatgggcaaggtcggtggcaccccccaaaattaaaacagtaacatcagagatcactgatcacggatcgccatgacagatayagtaataatgagaaagtctgcagtactgtgagaattacccacatgtgacacagagacacgaagtggcacatgctgtaggaaaaatggctccaatagacct

SEQ ID NO: 292981 - DNA, 201 bp, Homo sapiens
tggaaggtgagcgcccctaccccgtccactgctggggtcacccagccctggctctgttcctccatgggcaggtcctcgggtctctttgggcccccgctttycaaagtaggggaagagcttggtaaatcgtgggggcttggggaatggcgcgggctgtcagcattacctgctgtgttggagattcagggatgctgtccagac

SEQ ID NO: 292982 - DNA, 201 bp, Homo sapiens
cagcacccaaggtctttggcgggtccctgttcctcttccctggcttcagctcaccgtggtcccaatctccctcccacaatcccacctgcttcccatccccktctcccaccgctgctggaggccccttctcctttctgggtcccttctcctttctgggtccagtgaataaaataataataacagtaggacctggcgcagtgg

SEQ ID NO: 292983 - DNA, 201 bp, Homo sapiens
agaggcggagcttgcagtgagctgagatcgtgccactgcactccagcctgggcgacaggagactccgtctcaaaaaaaaaaaaaaaaaaaaaaaaaaaaaaagccaggcgtgatggcgtatacctgtggtcccagctactcgagaggctgaggatcagctgggcccagaggattgaggttactgtgaatcatgaccgaggt

SEQ ID NO: 292984 - DNA, 201 bp, Homo sapiens
aagaggcggagcttgcagtgagctgagatcgtgccactgcactccagcctgggcgacaggagactccgtctcaaaaaaaaaaaaaaaaaaaaaaaaaaaaaaagccaggcgtgatggcgtatacctgtggtcccagctactcgagaggctgaggatcagctgggcccagaggattgaggttactgtgaatcatgaccgagg

SEQ ID NO: 292985 - DNA, 201 bp, Homo sapiens
ccagacaggagtggacaacccaggtgagcctccccagtggagcactgaaggggctacatgggggctctggaggctgccggccatgccccaatcccaccacycttgaaggggggggggcctcagttttctcatctgtaaaatggggctgttgtgggaatcaatgcattaatatacataaaggcttgggacagtgcgaggtac

SEQ ID NO: 292986 - DNA, 201 bp, Homo sapiens
aaactccaaaaaaaaaaaaaaaaattagcccggcgtcgtggcaggcgcctgtagtcccagctacttgggaggctgaggcaggagaatggcctgaacccaaraggcggagcttgcagtgagctgagatcgtgccactgcactccagcctgggcgacaggagactccgtctcaaaaaaaaaaaaaaaaaaaaaaaaaaaaaaa

SEQ ID NO: 292987 - DNA, 201 bp, Homo sapiens
ggggagcatctgggggagacctgggcttgctggagagggcggaggatctgcctggtcctgatctcccacccgctctccagggtggagacgacctggacccyaactacgtgctcagcagccgcgtccgcactggccgcagcatcaagggctacacgttgcccccacactgctcccgtggcgagcgccgggcggtggagaagc

SEQ ID NO: 292988 - DNA, 201 bp, Homo sapiens
ctcccacagcagtgcgggaggcctaggagggagggtcgcttgagcccaggagttcaagaccagactgggcaatacagcaagaccctgtctctacaaaaaakacaaaaatgagccaggagtggtggcacacacctgtcatcccagctactcaggagactgaggtgggaggatcacttgagcccgggaggttgaggctgcagt

SEQ ID NO: 292989 - DNA, 201 bp, Homo sapiens
tctagccagcaccctcggaatctcctacctccctgttcccctcagaatcccacctccaccacgttcccacgccctgtccctccggaccctgtccatgttgygggtgcatttgggggtgcctgccggcgctgacccctggtcctctctctgaacctcagattgaggagatctttaagaaagctggccaccccttcatgtgga

SEQ ID NO: 292990 - DNA, 201 bp, Homo sapiens
aaagtaggggaagagcttggtaaatcgtgggggcttggggaatggcgcgggctgtcagcattacctgctgtgttggagattcagggatgctgtccagactygacggcccctgagaagacctacgcagacacctggctgcccccagcgtcctgccatccgttcatccagcacacatttccaggggttcttgccctgtgtggg

SEQ ID NO: 292991 - DNA, 201 bp, Homo sapiens
aacccaggtgagcctccccagtggagcactgaaggggctacatgggggctctggaggctgccggccatgccccaatcccaccacccttgaaggggggggggcctcagttttctcatctgtaaaatggggctgttgtgggaatcaatgcattaatatacataaaggcttgggacagtgcgaggtactcagcaaaccacgcaa

SEQ ID NO: 292992 - DNA, 201 bp, Homo sapiens
caaagtaggggaagagcttggtaaatcgtgggggcttggggaatggcgcgggctgtcagcattacctgctgtgttggagattcagggatgctgtccagacycgacggcccctgagaagacctacgcagacacctggctgcccccagcgtcctgccatccgttcatccagcacacatttccaggggttcttgccctgtgtgg

SEQ ID NO: 292993 - DNA, 201 bp, Homo sapiens
gagaaatggggggagacagagaaatacagagacagagagagacacagaggtgtggagaagcagagagatggaaagagagagggacattgggaggctgaggygagcgtatcacttgaggtcaggagttcaagaccagcctggccaacatggcaaaactctgtctttaaaaaaaaaaaaaagggctgggcacggcggtggctc

SEQ ID NO: 292994 - DNA, 201 bp, Homo sapiens
aatgttatggttgtttctcaaaggacattgcaaggcgaagagagctgggagtggaggggaggctctagtgcccctcacatccagctcactgtgtgatgccrgggagaagcccctctctcctggcccctgtttttccactgggaaacaagagggtctttcaagtctcttaccctcctgaccctctgtggtacggtggtagcc

SEQ ID NO: 292995 - DNA, 201 bp, Homo sapiens; identical to SEQ ID NO: 60454

SEQ ID NO: 292996 - DNA, 201 bp, Homo sapiens
tgagacacaggggctcagagagaggatttctcttgctccaagttacacagcctgcctgaccccaacgccttgcccagttctcttgctgctgtctgcaagaygcgagctaggcggggcacagtggctcacgcctgtaatcccagcactttgggaggccgaggcgggtggatcacttgaggccaggagttcgagaccagcctg

SEQ ID NO: 292997 - DNA, 201 bp, Homo sapiens
ccaggtgtggcacacgcctgtagttgcagctactcaggaggctgaagcaggatagttgcttgaacctgggaggtggaggttgcagtgaactgagattatgycactgcactctagcctgggcgacagagcgagactctgtctcaaacataataataataataataataatagcagctaagtgaaataatgcttattgtgtac

SEQ ID NO: 292998 - DNA, 201 bp, Homo sapiens
tcactgtagacgatgtcatccagacaggagtggacaacccaggtgagcctccccagtggagcactgaaggggctacatgggggctctggaggctgccggcyatgccccaatcccaccacccttgaaggggggggggcctcagttttctcatctgtaaaatggggctgttgtgggaatcaatgcattaatatacataaaggc

SEQ ID NO: 292999 - DNA, 201 bp, Homo sapiens
actgcactccagcctgggtgacagagcgagactccgtctcaaaaaaaaaaaaagaagaagaagaagaaaaaagatgccagctaatcttcaatcttcccctyctgccctgcccatcaggtctcctacaccgccaccatgccattcggtaacacccacaacaagttcaagctgaattacaagcctgaggaggagtaccccgac

SEQ ID NO: 293000 - DNA, 201 bp, Homo sapiens
caagccgtgggaggtgtgtctgtcgcctagcagagtctgcaagagcaggtgtcgcaggctttctttgcgtttgctactgtgtgggtccctgtgaccttgtwtctgacttagtagcggacacatgagtgtcctgggcatgtccttgagtttggaagtgtgactgtgtgacttagtttacagtgtgatctggggagtctgcgg

SEQ ID NO: 293001 - DNA, 201 bp, Homo sapiens
cgcctgtagttgcagctactcaggaggctgaagcaggatagttgcttgaacctgggaggtggaggttgcagtgaactgagattatgccactgcactctagyctgggcgacagagcgagactctgtctcaaacataataataataataataataatagcagctaagtgaaataatgcttattgtgtaccaggcactgttccg

SEQ ID NO: 293002 - DNA, 201 bp, Homo sapiens
ccgagcacacacatttatccattaagttcacccttttatatgggcaaggtcggtggcaccccccaaaattaaaacagtaacatcagagatcactgatcacrgatcgccatgacagatatagtaataatgagaaagtctgcagtactgtgagaattacccacatgtgacacagagacacgaagtggcacatgctgtaggaaa

SEQ ID NO: 293003 - DNA, 201 bp, Homo sapiens
ttggtgggggggcgtgagcccagcccctggggcggctcagcccatacaaggccatggggctgggcgcaaagcatgcctgggttcagggtgggtatggtgcsggagcagggaggtgagaggctcagctgccctccagaactcctccctggggacaacccctcccagccaatagcacagcctaggtccccctatataaggcca

SEQ ID NO: 293004 - DNA, 201 bp, Homo sapiens
aaaccactgcctggattcccacgcctcttctttaactcatttgcaggtgagggcagggaaggaaaatcctagggtcagcattggggagggggggactctcytaaatttattgggcaacaggctgcaggtgagggggctgacaggaggagggtcggggtgtaataacttaaaaaccgtaggtgacagcggcagctcctcaag

SEQ ID NO: 293005 - DNA, 201 bp, Homo sapiens
tggcacacacctgtaatcccagcgacttgggagactgaggcaggagaatcgcttgaacctgggaggcagaggttgcagtgagctgagatcacgccactgcmctccagcctgggggacagagtgtgactccatctcaaaaaaaaaagttatgtttatcctatactgtagtctgttaagtgcacaatagcattatgtctagaa

SEQ ID NO: 293006 - DNA, 201 bp, Homo sapiens
actggggcctcggggatgaggccgagttccatcctgccttcttccacgaccatccttaccttcccacccccaccgctcccattctgcagatgagaaaaccraggctccgaaaggaaaaaccactgcctggattcccacgcctcttctttaactcatttgcaggtgagggcagggaaggaaaatcctagggtcagcattggg

SEQ ID NO: 293007 - DNA, 201 bp, Homo sapiens
cctacctccctgttcccctcagaatcccacctccaccacgttcccacgccctgtccctccggaccctgtccatgttgcgggtgcatttgggggtgcctgcyggcgctgacccctggtcctctctctgaacctcagattgaggagatctttaagaaagctggccaccccttcatgtggaaccagcacctgggctacgtgctc

SEQ ID NO: 293008 - DNA, 201 bp, Homo sapiens
gcgcacctgagcaagcaccccaagttcgaggagatcctcacccgcctgcgtctgcagaagaggggtacaggtacggctcccacatcctttgcaccacgacrgagggggagcgagggccctttgcagggatgcaaggagaggtgcgacatccctgcgagttctggggatccggcaagggctgaccctctgtgagcttgcatt

SEQ ID NO: 293009 - DNA, 201 bp, Homo sapiens
ccaggagtttgaggttgcagtgagctatgatggcaccactgcactccagcctgggcgacagagagagaccctgtctcaaagaaaaaaaaaaaaaaaaaaarggaaaagaaatatacgaagatggggagagagaggtataaagaaaaacagagataggagaggggagagagacagagaagggagagacagagcccaggtatg

SEQ ID NO: 293010 - DNA, 201 bp, Homo sapiens
aggaaaatctcttgaacccaggagatggaggctgcagtgagctgagatcatgccactgcactccagcctgggtgacagagcaagattctatctcagaaaawaaaaaaaggaaagagagagggacagagagacacagagacagccaaggagacacagacaaccaaggagacagacagacaaaggagagggagagggagaaga

SEQ ID NO: 293011 - DNA, 201 bp, Homo sapiens
gagatcaagactatcctggctaacatggtgaaaccccgtctctactaaaaatacaaaaaatgagccggcgtggtggcgggcgcctgtattcccagctactygggaggctgaggcgggagaatggtgtgaacccaggaggtggagcttgcagtgagccgagatcgtgccactgcactccagcctgggtgacagagcgagact

SEQ ID NO: 293012 - DNA, 201 bp, Homo sapiens
tgggaggcagaggtgggcggatcacttgagttcaggagttcaagaccagcctggccaacatggcgaaaccccaactctactaaaaataccaaaaaaaaaaatagccaggtgtggcacacgcctgtagttgcagctactcaggaggctgaagcaggatagttgcttgaacctgggaggtggaggttgcagtgaactgagatt

SEQ ID NO: 293013 - DNA, 201 bp, Homo sapiens
cctggacagatggcaggaacagattttggggagccgtcacaagtgtgggtttagacacagggttcaggtgcctttaggacatccagggggccaaggcccasgcccgttaggagcagcagcaggggaaaccctgggcctccacaccctggttgaggtgggacaggctgctgaccactccctcgtgtgtccccatagctctca

SEQ ID NO: 293014 - DNA, 201 bp, Homo sapiens
ctgaggtgggcggatcataaggtcaggagttcgagaccagcctgaccaacacggtgaaacccagtctctactaaaaatacaaaaattagctaggcatgctrgtgttcacctataatcctagctattcagcctgggtgacagagcgagactctgcctaaaaaaaaaagggtggggggagaggcagagacacagagggagaca

SEQ ID NO: 293015 - DNA, 201 bp, Homo sapiens
tcacccttgtaatcccaacactttgggaggctgaggtgggcggatcataaggtcaggagttcgagaccagcctgaccaacacggtgaaacccagtctctaytaaaaatacaaaaattagctaggcatgctagtgttcacctataatcctagctattcagcctgggtgacagagcgagactctgcctaaaaaaaaaagggtg

SEQ ID NO: 293016 - DNA, 201 bp, Homo sapiens
gacaaccaaggagacagacagacaaaggagagggagagggagaagaaaggcacaaaagcatgtagaaaaggaagaggcatagccgggcacagtggctcacscttgtaatcccaacactttgggaggctgaggtgggcggatcataaggtcaggagttcgagaccagcctgaccaacacggtgaaacccagtctctactaaa

SEQ ID NO: 293017 - DNA, 201 bp, Homo sapiens
cagccaaggagacacagacaaccaaggagacagacagacaaaggagagggagagggagaagaaaggcacaaaagcatgtagaaaaggaagaggcatagccsggcacagtggctcacccttgtaatcccaacactttgggaggctgaggtgggcggatcataaggtcaggagttcgagaccagcctgaccaacacggtgaaa

SEQ ID NO: 293018 - DNA, 201 bp, Homo sapiens
cgcttgaacctgggaggcagaggttgcagtgagacgagatcacgccattgcactccagcctgggtgacacagagagactctggaaaaaaaaaaaaaaaaaacccgccttcaaagcgttcttagtccccgcccctcaaaatcctgccttggtccccattgtctagccagcaccctcggaatctcctacctccctgttcccct

SEQ ID NO: 293019 - DNA, 201 bp, Homo sapiens
catgaccgaggtactgcactccagctacctgtctcaaaaataagaactcagacttgaaccgtactccctaggttcaaatcccagctctaccatttactagmtttactagctttgtgaccttgggcaacttattttatttttctctaccccagtttcctagctataggatagggatcacaataatttgtagtttctggtgtt

SEQ ID NO: 293020 - DNA, 201 bp, Homo sapiens
tgtggctctggggctttctgcttatgtctcttgtggggggggtcaccaccctgcctcagtgccctctcctggggtgtccctggcagggattaggggggcawcctctgaagggagggggtctgggctgccatcccaggatgtccttgagccccgaggcctggacccgtgtcctcccagccaccctggcccacctgtcttggg

SEQ ID NO: 293021 - DNA, 201 bp, Homo sapiens
tcatgaccgaggtactgcactccagctacctgtctcaaaaataagaactcagacttgaaccgtactccctaggttcaaatcccagctctaccatttactarctttactagctttgtgaccttgggcaacttattttatttttctctaccccagtttcctagctataggatagggatcacaataatttgtagtttctggtgt

SEQ ID NO: 293022 - DNA, 201 bp, Homo sapiens
ccagtcctgcaacggccctcctcactcctccaccaaaaccaaggccatatacgtaattatgatcttctaaatgccacggaaaatgatcttgccctccgccmctgcccatcctgtggtctgtgtgtcagattttgggatatctggaccggagaagtggtagttaaaaacttaagacttggcggggcacggtggctcatgcct

SEQ ID NO: 293023 - DNA, 201 bp, Homo sapiens
tggtgaggcccctccccgccccctggcttcctcttcccccagcctcctccagtcctgcaacggccctcctcactcctccaccaaaaccaaggccatatacrtaattatgatcttctaaatgccacggaaaatgatcttgccctccgcccctgcccatcctgtggtctgtgtgtcagattttgggatatctggaccggagaa

SEQ ID NO: 293024 - DNA, 201 bp, Homo sapiens
ttggggagccgtcacaagtgtgggtttagacacagggttcaggtgcctttaggacatccagggggccaaggcccaggcccgttaggagcagcagcaggggraaccctgggcctccacaccctggttgaggtgggacaggctgctgaccactccctcgtgtgtccccatagctctcaacagcctgacgggcgagttcaaagg

SEQ ID NO: 293025 - DNA, 201 bp, Homo sapiens
agtccagtgtaacatggtggctgggagtgtgagtggatgaatggggggcccgatataggaactggggcctcggggatgaggccgagttccatcctgccttyttccacgaccatccttaccttcccacccccaccgctcccattctgcagatgagaaaaccgaggctccgaaaggaaaaaccactgcctggattcccacgcc

SEQ ID NO: 293026 - DNA, 201 bp, Homo sapiens
tagcggtgcagtgccagggactgaggagagcaggtgcagggagggggtggccaggcgtacctgctcataccaggaggccacggtgctctccatgtactggyagctggtgaagaaggccacgatgccatcagggaccacagcggacatctccagcaggaggttcccatagttccggatcacagctgcaaggggtcagaggtt

SEQ ID NO: 293027 - DNA, 201 bp, Homo sapiens
ctcagctgtcacatggccagtgtgacatacctggaccacacctatcacacgtgtgtcccgacaggccctgggctggctaagcttgtccgatggaggagggyggagcccctgttcccccagggtccatctgttgcctgggagccaacacatggccccatcctcattccccccaacctagaggcctcctgggcttctgggggc

SEQ ID NO: 293028 - DNA, 201 bp, Homo sapiens
accatagggcagaggcagacccgtgccagcgtcatggtgaaggttgccatggtgacggggtggaagtccaggatcttggggtagatgtccagcggggacastgtctgtggcgggacagtgggagggatctcagcaggactgggcagggaccaggaggcccatggagggaggtcagggactaggaggggacggggaagggtc

SEQ ID NO: 293029 - DNA, 201 bp, Homo sapiens
agtgggggaagccaaggaaggagggcggccccttgcccccatctcccctcccggccccagccctagcctctcccactcaccatagggcagaggcagacccstgccagcgtcatggtgaaggttgccatggtgacggggtggaagtccaggatcttggggtagatgtccagcggggacagtgtctgtggcgggacagtggga

SEQ ID NO: 293030 - DNA, 201 bp, Homo sapiens
gtcttgaactcttggcctcaagtgatttacccaccttggcctcccaaagtgctggcattacaggcgtgagccactacacctggccccatgttgtattggaragaagggagagtgcgtgtgtgtgtcaaattgtatttcggagaggaaaatgtgtatgttgcattgtgtctttaagaagggagggtgcgggtgtgtgaggtg

SEQ ID NO: 293031 - DNA, 201 bp, Homo sapiens
gacaggcccagctgatcctcctgcagagaacagaggaaagggagaggggggcactgttgggcaggggcccaggcagctgctgcacttccccaaccaccccsccgaatggccagtagggacaggatgtttgaatgaatttggagatgtccgtataatccagagcgggccatccctgtcaacataagatggggctgagggagg

SEQ ID NO: 293032 - DNA, 201 bp, Homo sapiens
gagcctgggatgggagcacaggggcacccctgaagctgcaccttgtcggcaaagaccatgaggccgtagtccgtcttgcccctgatggcccgacccacacrctgggccgcgtggcgcatggcatcgaaggtaagaaagtcattctcacgaatctggaactggtcccgcaggtattccagccgcgcctgcagatacggagga

SEQ ID NO: 293033 - DNA, 201 bp, Homo sapiens
cgtccagtgaactgcgctggccgcagcttcttgggaacagtgcaggagggatgggctggtggggtgagagggggtctatcatctcctggcccccccttgcstctgggtacctggtggatagctgccttctcctgcgattaaaggctgtggacgtgacagtgagaaatgtcacctgacttcataagaccttctagcaccacc

SEQ ID NO: 293034 - DNA, 201 bp, Homo sapiens
tgggagatgggagtggagacgtggacatttaagtgggatgctcctccaagcgggtgacaggatggaaaagggggtccgcgtcagggatcagtgtgtgggastgtgcctatgattatcagctgtgcggttgtgcacccggggctctgtgtgagtgtgggagctgctgtgtgtctgggacacagcccgagtgctggatggctg

SEQ ID NO: 293035 - DNA, 201 bp, Homo sapiens
aattacacataggatttgggaactgtcctcagggcagaaccctgggttgggaggacagacgaaggtagacaagactgttccagatgagagctggctgggawgggtgtggagactgggatggagagggtgtggaggcagagggctggccaggatgggtggagcagggaagagccaggatggggagaagttaggggtcctgat

SEQ ID NO: 293036 - DNA, 201 bp, Homo sapiens
tgtatttctaaaaggaaaatgtaaatgtttttactgagttgtatatttaataggagaaagtgagtgcgtgttctaagaggagaatgtatattatgctgtcctttctttctttcttttttgactgggtcttactctttcacccaggctgagtgcagtggcactatcatggctcactgcagcttcaacctcctgggttcaagc

SEQ ID NO: 293037 - DNA, 201 bp, Homo sapiens
gtatttctaaaaggaaaatgtaaatgtttttactgagttgtatatttaataggagaaagtgagtgcgtgttctaagaggagaatgtatattatgctgtcctttctttctttcttttttgactgggtcttactctttcacccaggctgagtgcagtggcactatcatggctcactgcagcttcaacctcctgggttcaagca

SEQ ID NO: 293038 - DNA, 201 bp, Homo sapiens
aggcacatccggggcagggggaggcctaggggaaccaggcctgggaaggggaggctccaggtcagagatggagtcccttggcagctttagggggtccttgkgtgtgacagggacccctgaaccagatggcattcttcagtaaactgtgggtcctagggcaagtttgggggtaaaatcagaggggcccctgggagcctctga

SEQ ID NO: 293039 - DNA, 201 bp, Homo sapiens
tatttctaaaaggaaaatgtaaatgtttttactgagttgtatatttaataggagaaagtgagtgcgtgttctaagaggagaatgtatattatgctgtcctttctttctttcttttttgactgggtcttactctttcacccaggctgagtgcagtggcactatcatggctcactgcagcttcaacctcctgggttcaagcaa

SEQ ID NO: 293040 - DNA, 201 bp, Homo sapiens
caacccctcatggccaccagcacaagcccaaccctgacctacccatctcaccctgtgccccacgtttctggaccaccatgacctctgaccttggtaatccygttagatggtataacttgtgtccccagcccccaacctctcaggtcactctctgctttgaccctgtaatccccaactcatgaccaccatacagcagtgatg

SEQ ID NO: 293041 - DNA, 201 bp, Homo sapiens
atttctaaaaggaaaatgtaaatgtttttactgagttgtatatttaataggagaaagtgagtgcgtgttctaagaggagaatgtatattatgctgtcctttctttctttcttttttgactgggtcttactctttcacccaggctgagtgcagtggcactatcatggctcactgcagcttcaacctcctgggttcaagcaat

SEQ ID NO: 293042 - DNA, 201 bp, Homo sapiens
cgctgggaaccagggccaggcaagactcaggagtcaccaggaaccgtttatggccccacccgccccactcagagctgctgagcaatctgctctatcctctkcagcgtctcctctgattctagctgctccaggctgagcagggacaggcccagctgatcctcctgcagagaacagaggaaagggagaggggggcactgttgg

SEQ ID NO: 293043 - DNA, 201 bp, Homo sapiens
agctcagcctgggagggtgccgggagggggacgcaggcctcacccggtggaagggctgtgccatctgccgcaggaagtacttggccacctggacaccctcrtccacggtcaggttgaggttggcatctgtgaggtgctcctggatccagcggggcagcttcccccgcttgtccccacgggcaaaccgctgtgggcagaagc

SEQ ID NO: 293044 - DNA, 201 bp, Homo sapiens
atatttgttacagcagcatgactcagcccacctgactgatacacctcccctcttggaacccacagaaaccagccccactggcagcataccaatatcctccygggtctcaaatttggagctgatggccacctggtcattgccacggccgatgatctggagagcaacagaggtcacgataagcgaggcagcagcaactgctcc

SEQ ID NO: 293045 - DNA, 201 bp, Homo sapiens
agctctgggaagacacctggggaggaagagcccagtccactcaccaaagtcgattccctcggacactttgccccgggccactgacagcaggatggccccgsggccattctcgcaggcctgaggtggggagaccgagacgcaagttaggtcactcctcagagccacctcccccacccctctccacgctggcctcgcacaccc

SEQ ID NO: 293046 - DNA, 201 bp, Homo sapiens
cagagagctctgggaagacacctggggaggaagagcccagtccactcaccaaagtcgattccctcggacactttgccccgggccactgacagcaggatggscccgcggccattctcgcaggcctgaggtggggagaccgagacgcaagttaggtcactcctcagagccacctcccccacccctctccacgctggcctcgca

SEQ ID NO: 293047 - DNA, 201 bp, Homo sapiens
ttgatcctaacactgtgggactccctgggagacagagctactcaccttgagaatgcggctctgtgtgtagacgtaggggacgccaaacatgatgacggccsgcccgtagtggtgcactggtgggcagaggagagggggcgaggggggttacaagtgtggctggtgggacagggacagcctcacgcaacccaggatgctgtg

SEQ ID NO: 293048 - DNA, 201 bp, Homo sapiens
tgatcctaacactgtgggactccctgggagacagagctactcaccttgagaatgcggctctgtgtgtagacgtaggggacgccaaacatgatgacggcccrcccgtagtggtgcactggtgggcagaggagagggggcgaggggggttacaagtgtggctggtgggacagggacagcctcacgcaacccaggatgctgtgt

SEQ ID NO: 293049 - DNA, 201 bp, Homo sapiens
ccaccctgcaacccaccccacctgggaaatgaacgggaaacagcctggttcttggagcctgggatgggagcacaggggcacccctgaagctgcaccttgtyggcaaagaccatgaggccgtagtccgtcttgcccctgatggcccgacccacacactgggccgcgtggcgcatggcatcgaaggtaagaaagtcattctca

SEQ ID NO: 293050 - DNA, 201 bp, Homo sapiens
cacctggacaccctcatccacggtcaggttgaggttggcatctgtgaggtgctcctggatccagcggggcagcttcccccgcttgtccccacgggcaaacygctgtgggcagaagcgcaggccagggacagaaggtcattcggggagcctgggccactctccaccctgcaacccaccccacctgggaaatgaacgggaaac

SEQ ID NO: 293051 - DNA, 201 bp, Homo sapiens
acctggacaccctcatccacggtcaggttgaggttggcatctgtgaggtgctcctggatccagcggggcagcttcccccgcttgtccccacgggcaaaccrctgtgggcagaagcgcaggccagggacagaaggtcattcggggagcctgggccactctccaccctgcaacccaccccacctgggaaatgaacgggaaaca

SEQ ID NO: 293052 - DNA, 201 bp, Homo sapiens
tggggagtggggagaatccaaggggactttctggaggagaagctcagcctgggagggtgccgggagggggacgcaggcctcacccggtggaagggctgtgscatctgccgcaggaagtacttggccacctggacaccctcatccacggtcaggttgaggttggcatctgtgaggtgctcctggatccagcggggcagcttc

SEQ ID NO: 293053 - DNA, 201 bp, Homo sapiens
gggtggggagtggggagaatccaaggggactttctggaggagaagctcagcctgggagggtgccgggagggggacgcaggcctcacccggtggaagggctrtgccatctgccgcaggaagtacttggccacctggacaccctcatccacggtcaggttgaggttggcatctgtgaggtgctcctggatccagcggggcagc

SEQ ID NO: 293054 - DNA, 201 bp, Homo sapiens
tcttggcctcaagtgatttacccaccttggcctcccaaagtgctggcattacaggcgtgagccactacacctggccccatgttgtattggagagaagggaragtgcgtgtgtgtgtcaaattgtatttcggagaggaaaatgtgtatgttgcattgtgtctttaagaagggagggtgcgggtgtgtgaggtgtttctgagg

SEQ ID NO: 293055 - DNA, 201 bp, Homo sapiens
tacacctggccccatgttgtattggagagaagggagagtgcgtgtgtgtgtcaaattgtatttcggagaggaaaatgtgtatgttgcattgtgtctttaaraagggagggtgcgggtgtgtgaggtgtttctgaggagtgtgtttgtgtgtatatgaggaccccagaggcaccaccagctaagtttctgtgaccttgtcac

SEQ ID NO: 293056 - DNA, 201 bp, Homo sapiens
cagaggcaccaccagctaagtttctgtgaccttgtcacccacatacaaccacatgaagtcccatagaggggggcccccacccactatgagctgggcttcaractctcagctgtcacatggccagtgtgacatacctggaccacacctatcacacgtgtgtcccgacaggccctgggctggctaagcttgtccgatggagga

SEQ ID NO: 293057 - DNA, 201 bp, Homo sapiens
gagaagctcagcctgggagggtgccgggagggggacgcaggcctcacccggtggaagggctgtgccatctgccgcaggaagtacttggccacctggacacsctcatccacggtcaggttgaggttggcatctgtgaggtgctcctggatccagcggggcagcttcccccgcttgtccccacgggcaaaccgctgtgggcag

SEQ ID NO: 293058 - DNA, 201 bp, Homo sapiens
tcaggattggcccagcccctgtggctgcagctgccccaacccttggctaaccccctccattcctggggcgccccccacagggaccagaacaagtacaaagmagccacagaccttctccatgatgccctgcagatccgggagcagacgctgggccctgagcaccccgcggtgagtggggccccagggagacgaagtggggtc

SEQ ID NO: 293059 - DNA, 201 bp, Homo sapiens
ttcgcctcccgggttcaagcaattctcctgcctcagcctcccaagtagctgggactacaggcatgcgccaccatgctctgctatttttttttttttttttycagtagagacagggtttcaccctgttggccaggctggtcttgaactcttggcctcaagtgatttacccaccttggcctcccaaagtgctggcattacagg

SEQ ID NO: 293060 - DNA, 201 bp, Homo sapiens
aaggccgagctccaaacccactctgccccagggcaaggctttaggcaggggaaggatacggccaggtcagcacattagaaagtggggccagacgtggtggytcacgcttgtaaccccaacactttgggaggccaaggcaggaggatcacttgaggctaggagttcaagaccagcctgggcaacataccaagacccctgtct

SEQ ID NO: 293061 - DNA, 201 bp, Homo sapiens
aggagcaaagatgggttttacttggggtagaggcgagggggttggatagttggctgccaggctggacctggagctggagggtggatgtaacacttgcccchcccctccaaccatcccctgtgcctgtctccagtttcccagctggcacctggacaaggcccctcggaccctcagcgccagcacccaggacctgagccccca

SEQ ID NO: 293062 - DNA, 201 bp, Homo sapiens
tgtgtgtgtgtaccgtcttttttttttttttttttaaatgaagtctcactctgttgcccaggctggattgcagtggtgcgaccttggctcactgcaacctycgcctcccgggttcaagcaattctcctgcctcagcctcccaagtagctgggactacaggcatgcgccaccatgctctgctattttttttttttttttttc

SEQ ID NO: 293063 - DNA, 201 bp, Homo sapiens
cactggggccatgttggcagagtctctgcagaatctgggcgtgtcgtgcatagtagtggggtgctacggcctgactcgaggcctgggctgggtcaggggcygtctggcagggcaggaaccaacctcgacttgggacccccaccccgggcaggtgctgctggccctgtcggcacatgtgggtgcactggaggcagagaagca

SEQ ID NO: 293064 - DNA, 201 bp, Homo sapiens
gatggcccgacccacacactgggccgcgtggcgcatggcatcgaaggtaagaaagtcattctcacgaatctggaactggtcccgcaggtattccagccgcrcctgcagatacggaggatgagaagctggggaggtgggggagccactcctcccttgatcctaacactgtgggactccctgggagacagagctactcacctt

SEQ ID NO: 293065 - DNA, 201 bp, Homo sapiens
aacatgatgacggcccgcccgtagtggtgcactggtgggcagaggagagggggcgaggggggttacaagtgtggctggtgggacagggacagcctcacgcracccaggatgctgtgtctgagttggggggagagggtgtgttcccgccgggtgcctagggacagaggggaggggagggcccctctgtgcacctaggctggg

SEQ ID NO: 293066 - DNA, 201 bp, Homo sapiens
cccgggccactgacagcaggatggccccgcggccattctcgcaggcctgaggtggggagaccgagacgcaagttaggtcactcctcagagccacctccccsacccctctccacgctggcctcgcacacccacctcctggtacttctccagggcgacactggtttcggcaccatcctgggtctcaataaagagcagcttgtt

SEQ ID NO: 293067 - DNA, 201 bp, Homo sapiens
gcacaggggcacccctgaagctgcaccttgtcggcaaagaccatgaggccgtagtccgtcttgcccctgatggcccgacccacacactgggccgcgtggcvcatggcatcgaaggtaagaaagtcattctcacgaatctggaactggtcccgcaggtattccagccgcgcctgcagatacggaggatgagaagctggggag

SEQ ID NO: 293068 - DNA, 201 bp, Homo sapiens
gtgcgaagttctgccattcccgcggggctggagccccgaggctgaacttcccacgggcggtgggcgtggccggctcacctgcgggggcgtggctcccggcygccccgcccctcggaggagccgcccgaggtcccagacgcccggcgcagcgggagcggcggggcgtgcctggcctgcgggacgcgactgatcgcagtgggg

SEQ ID NO: 293069 - DNA, 201 bp, Homo sapiens
gtgtcccgacaggccctgggctggctaagcttgtccgatggaggagggcggagcccctgttcccccagggtccatctgttgcctgggagccaacacatggycccatcctcattccccccaacctagaggcctcctgggcttctgggggccctggcccctcggccctctcctcccaccccacccacccccagtggtctgact

SEQ ID NO: 293070 - DNA, 201 bp, Homo sapiens
gaaagctaaaaccacaagctcctagaaggaaacaaaggagcctctctctatgaccttggggtaggcaaaggtgtcttaagtaggacacaaaaggcacctgsgctgtggggactgggtcacctttcccgccgcgtggaagccgcctattgaagcacaaggccgatgtcctggctgtgaggatgacgttcccgcctcccatgc

SEQ ID NO: 293071 - DNA, 201 bp, Homo sapiens
ctcattccccccaacctagaggcctcctgggcttctgggggccctggcccctcggccctctcctcccaccccacccacccccagtggtctgactggttccsgacaaaaacaccctaagaatgagctcacgcagaggctgccgcctccacacgccccgcctcactctgccggcagaggagggtgcctctggtcccaggtcac

SEQ ID NO: 293072 - DNA, 201 bp, Homo sapiens
acctagaacgtgggggtgactctgccacagggtactcctctgagggaggggcccacattggggcttatatctgcattctcagcctgatgtactgggggcgrggcatgggggtgtgtgctgcttacaccccattcctacatgctgcacgcactctcctgtcacacaggaaacctgtcaccatcagagtgtgagaggaatgaa

SEQ ID NO: 293073 - DNA, 201 bp, Homo sapiens
ccctggcccctcggccctctcctcccaccccacccacccccagtggtctgactggttcccgacaaaaacaccctaagaatgagctcacgcagaggctgccrcctccacacgccccgcctcactctgccggcagaggagggtgcctctggtcccaggtcacacggccaaccgggagctctgggccaggggatccaagggcct

SEQ ID NO: 293074 - DNA, 201 bp, Homo sapiens
ggggcccacattggggcttatatctgcattctcagcctgatgtactgggggcggggcatgggggtgtgtgctgcttacaccccattcctacatgctgcacrcactctcctgtcacacaggaaacctgtcaccatcagagtgtgagaggaatgaagctgacatagcggtgcagtgccagggactgaggagagcaggtgcagg

SEQ ID NO: 293075 - DNA, 201 bp, Homo sapiens
ttcccgacaaaaacaccctaagaatgagctcacgcagaggctgccgcctccacacgccccgcctcactctgccggcagaggagggtgcctctggtcccagrtcacacggccaaccgggagctctgggccaggggatccaagggccttggggtggggaaggctggccaggtgagctgagggcagatgggggaccccaggcta

SEQ ID NO: 293076 - DNA, 201 bp, Homo sapiens
ccccagggggcctctgacgctcgtgaccaccacctccctcaaaccttgagataggctgggtgcggtggctcacgcctgtaatcccaacactttgggaggcygaggcgagcagatcacctgaggtccggatttcaagaccagcatgaccaacatggagaaaccccgtctctactaaaaatacaaaattagccgggtgtggtg

SEQ ID NO: 293077 - DNA, 201 bp, Homo sapiens
cgacaaaaacaccctaagaatgagctcacgcagaggctgccgcctccacacgccccgcctcactctgccggcagaggagggtgcctctggtcccaggtcayacggccaaccgggagctctgggccaggggatccaagggccttggggtggggaaggctggccaggtgagctgagggcagatgggggaccccaggctagctg

SEQ ID NO: 293078 - DNA, 201 bp, Homo sapiens
ggtgcagtgccagggactgaggagagcaggtgcagggagggggtggccaggcgtacctgctcataccaggaggccacggtgctctccatgtactggtagckggtgaagaaggccacgatgccatcagggaccacagcggacatctccagcaggaggttcccatagttccggatcacagctgcaaggggtcagaggttgggc

SEQ ID NO: 293079 - DNA, 201 bp, Homo sapiens
tgactgcgggtgagcctggtgcgcggggctgggcaggccagggtaagttggtgcggcttgcggggctgggccacgatgggagtctcctgcctgcctgtgtttgtgtgtgtgtgtgtgtgtgtgtgtgtgtggctttgcgtgtgtgtaagagagtgtgtcaggctgtgggtatgagggtgaaagcgactgtccgtgtaaccc

SEQ ID NO: 293080 - DNA, 201 bp, Homo sapiens; identical to SEQ ID NO: 60456

SEQ ID NO: 293081 - DNA, 201 bp, Homo sapiens
gactgcgggtgagcctggtgcgcggggctgggcaggccagggtaagttggtgcggcttgcggggctgggccacgatgggagtctcctgcctgcctgtgtttgtgtgtgtgtgtgtgtgtgtgtgtgtgtggctttgcgtgtgtgtaagagagtgtgtcaggctgtgggtatgagggtgaaagcgactgtccgtgtaaccct

SEQ ID NO: 293082 - DNA, 201 bp, Homo sapiens
agagagtggaactggttgtaggattaggtgtgattgaccaagaggctgtgcggctgtggttgtctttctgcctgttggtgtgtgtgtgtgtgtgtgtgtgygcgcgcgcgcgtgtggtggacagtgtggcactggatcagtgataggtgactatgattgacttttgattgtgtgtcactgtgatggtgcatggggctgggc

SEQ ID NO: 293083 - DNA, 201 bp, Homo sapiens
agcacaggggcacccctgaagctgcaccttgtcggcaaagaccatgaggccgtagtccgtcttgcccctgatggcccgacccacacactgggccgcgtggygcatggcatcgaaggtaagaaagtcattctcacgaatctggaactggtcccgcaggtattccagccgcgcctgcagatacggaggatgagaagctgggga

SEQ ID NO: 293084 - DNA, 201 bp, Homo sapiens
cacatcccacagggcaggtgggctgccgtgttcctgtcccgaggccaggatgcatcccaccagctggttagatgctagtgactcctatctcagaagttagmgtgggggcccatagtcccaggggccagttaggcagtccggcagttctgaggcacgtgtcccctcatgcgaggctggaggggcaggaggcttgcagtgacc

SEQ ID NO: 293085 - DNA, 201 bp, Homo sapiens
gcagctgcgacagtacgacccaccggcggagagccaggtgccacgggcagggcgaggcggggggtgctgggcccttcatagagccccacagtcccccagaycctccttagaatcccacagtccccaagatcctccttagaatcccacagtcccccagaccctccttagaatgccacagtcccccaaccctccacagagccc

SEQ ID NO: 293086 - DNA, 201 bp, Homo sapiens
actgcgggtgagcctggtgcgcggggctgggcaggccagggtaagttggtgcggcttgcggggctgggccacgatgggagtctcctgcctgcctgtgtttktgtgtgtgtgtgtgtgtgtgtgtgtgtggctttgcgtgtgtgtaagagagtgtgtcaggctgtgggtatgagggtgaaagcgactgtccgtgtaaccctg

SEQ ID NO: 293087 - DNA, 201 bp, Homo sapiens
ggactgtgtgtatgatgtgacacttttagcaatgtgaaaacgtgggcgacctctgactggaatggtgtgtgtgtagaattggattgctggtagcactttaygaccaagagctagtgcgactgtagtcgactttctgcttggcctgatgtgcatgtgtgtggctgtgtgtgtggctgtcttcatggcagagagtggaactgg

SEQ ID NO: 293088 - DNA, 201 bp, Homo sapiens
atgcttggttcagccaggttccctgggcctgtcaggattggcccagcccctgtggctgcagctgccccaacccttggctaaccccctccattcctggggcrccccccacagggaccagaacaagtacaaagaagccacagaccttctccatgatgccctgcagatccgggagcagacgctgggccctgagcaccccgcggt

SEQ ID NO: 293089 - DNA, 201 bp, Homo sapiens
ggggcgccccccacagggaccagaacaagtacaaagaagccacagaccttctccatgatgccctgcagatccgggagcagacgctgggccctgagcacccygcggtgagtggggccccagggagacgaagtggggtcaaagtggggccacacctgcccatccctgacctgtgcctcccccaaccccgcaggtggccgccac

SEQ ID NO: 293090 - DNA, 201 bp, Homo sapiens
tggttcttggagcctgggatgggagcacaggggcacccctgaagctgcaccttgtcggcaaagaccatgaggccgtagtccgtcttgcccctgatggcccracccacacactgggccgcgtggcgcatggcatcgaaggtaagaaagtcattctcacgaatctggaactggtcccgcaggtattccagccgcgcctgcaga

SEQ ID NO: 293091 - DNA, 201 bp, Homo sapiens
gagctgcaggaccccaaaatctctgagccaggggatggggaggtgagggcagggtgaggaggaccctgaatgtgacagtgcaggtgaggctgggagccacraagacagggtagccgctatgagcctggcaggccccgtattcacatcccacagggcaggtgggctgccgtgttcctgtcccgaggccaggatgcatcccac

SEQ ID NO: 293092 - DNA, 201 bp, Homo sapiens
atttctcctcaagtgggacaagagactgagaaaagaaataagacacagagacaaagtatagagaaagaaaagtgggcccaggggactggcgctcagcataycaaggacctgcactggcaccggtctctgacttccctcagtatttattaattactattttcagtatctcagcaggaggaatgcggcaggagagcagagtga

SEQ ID NO: 293093 - DNA, 201 bp, Homo sapiens
ctgttaagaaatctactgtcatctgaattgttatcccccatatgtaatgaactttttctcactgccttccttcaagaaattttctttgtttttgtttttgkttaattttcagaggtttagttatgatagatcttggtgctactttctttgggtttatcctgtttgggtttctgaaaatatagatttctcttttgccagttt

SEQ ID NO: 293094 - DNA, 201 bp, Homo sapiens
tgcagtgcaacagggctctttctttgttcccaggtggatcggcaggtcgagaaataaaagatacacacaagatagtgaaagctgggtccaggggggtcacsaccttctggacctgcgatgccgccagtgcgctggatataccagcatttattattaagtttagtgaggatgggggtaggttagtgagggatttagggttgt

SEQ ID NO: 293095 - DNA, 201 bp, Homo sapiens
ttatttatttgagatggagtctcgctctgttgcttccaagtagctgggactacaagcatgcgccactatgcccagctaatttttgtatttttagtagagayggggtttcaccatgttggttggccaggatggtctggatctcttgacctcgtgatccacccacctcggcctcccaaagtgctgggattacaggtgtgagcc

SEQ ID NO: 293096 - DNA, 201 bp, Homo sapiens
  misc_feature (1)...(201): n = A,T,C or G
atattgctgtaataagagtctgccttctgaagaggccaaagggaaaattgtttcttttggggaccttttcttccaaatgtcctcctaggatgaagcccctntgtgttacggcaatcaggaatcctctgaataaaccaataaataacatcaaacattgtgttttctagcacacaggcaatcctacttcaagtttccatgaag

SEQ ID NO: 293097 - DNA, 201 bp, Homo sapiens
agcccttatccacatggaccaaaactttgggaaccgccccgtgacccctatgcgagaacatatctttaagaaaaatggtaagtttcttggccaacgaaagrtgagtgtttgatgttgatagtcctataatctgttaaaggcaccttggtgactgtaattttccaacactcctagaaaccagccccataataaacttcctgc

SEQ ID NO: 293098 - DNA, 201 bp, Homo sapiens
  misc_feature (1)...(201): n = A,T,C or G
cccttatccacatggaccaaaactttgggaaccgccccgtgacccctatgcgagaacatatctttaagaaaaatggtaagtttcttggccaacgaaaggtnagtgtttgatgttgatagtcctataatctgttaaaggcaccttggtgactgtaattttccaacactcctagaaaccagccccataataaacttcctgcca

SEQ ID NO: 293099 - DNA, 201 bp, Homo sapiens
tgcaaaaaccatttctaacatgcatgtaaagtacaacatgttatatgacatacgcctatccacctatgttgttctttttaaaaagaaaaacaatattgctrttgcccttgagtctctcctctctgtgtccttccccaactcgtccatttccctcctccctcagaggttctcttctgtatcctctttcttcctcagcaagtt

SEQ ID NO: 293100 - DNA, 201 bp, Homo sapiens
acactcaaccagtgctcagatgtccccagatgtctcataagtatttttttttggtggcaagctgttgcggtggtgagaaatggtccaaggctggatatatwtttgacagagagctgaactgttttgctagagaggtgagagagaaaagaggggtcaaggataaccaaggtttaagtgtgagcaaataaaagagacggaaag

SEQ ID NO: 293101 - DNA, 201 bp, Homo sapiens
  misc_feature (1)...(201): n = A,T,C or G
atgtcagccacagatgggtttttccttttagttttttttgggtttttgaagttaaaatataacctttcaaaactaatttcaacacaaacttatttgaaatnaatctattgactttagttttttaactaatatggaatatttatatgcaaaaaccatttctaacatgcatgtaaagtacaacatgttatatgacatacgcct

SEQ ID NO: 293102 - DNA, 201 bp, Homo sapiens
ggaagctcttgaatggctttaagtagagaagggaattatatttacactgtatatttttaggttttatttaggctgccattcagagaatagaagaaaaggarcaagggacttttgtagcattttaggttacagacagtggtagctcaggctaggaaggtccaatagcagtagggaaataacagtaggttagtccaagatagt

SEQ ID NO: 293103 - DNA, 201 bp, Homo sapiens
acactgtatatttttaggttttatttaggctgccattcagagaatagaagaaaaggagcaagggacttttgtagcattttaggttacagacagtggtagcycaggctaggaaggtccaatagcagtagggaaataacagtaggttagtccaagatagtagcagtgaagacctggatttgagatatccaggaaggtacacct

SEQ ID NO: 293104 - DNA, 201 bp, Homo sapiens
tttagatgaagaagaagttcctgaagaactccaccatttcaagatttaatagaagatgaaccagcaaaatatataggaagttgctggcagagaattaggamgaaaatctggagacagtggtatcctgagcaccactggaaggcagtatttcaagaaagaagtgtctactgctgctgcaagtaagacgaggtcaaaaggtat

SEQ ID NO: 293105 - DNA, 201 bp, Homo sapiens
ttcctgaagaactccaccatttcaagatttaatagaagatgaaccagcaaaatatataggaagttgctggcagagaattaggacgaaaatctggagacagkggtatcctgagcaccactggaaggcagtatttcaagaaagaagtgtctactgctgctgcaagtaagacgaggtcaaaaggtatccggaccaattcagtgg

SEQ ID NO: 293106 - DNA, 201 bp, Homo sapiens
  misc_feature (1)...(201): n = A,T,C or G
cctttcactgtactaaaagcttccccaaaattataggcataagaaaataattgtcttgattttcatccatccaaaggtgtccagcacttggggcaggacantgctaatgatattgctgtaataagagtctgccttctgaagaggccaaagggaaaattgtttcttttggggaccttttcttccaaatgtcctcctaggatg

SEQ ID NO: 293107 - DNA, 201 bp, Homo sapiens
ccccttctgcctgtctagccttggccgcacctaccctccatggtggcctcactaagtgacacgtcactttctttgcagtctatatttatgcctctatgtcrtgatagatgcttttccctctacttgcccagttttcctacatagtaaactcctagctcttcttgaagaatctgttcaagtactacctctctaagatgtttc

SEQ ID NO: 293108 - DNA, 201 bp, Homo sapiens
acttgggaggctgaggcaggagaattgcttgaacccaggagatggaggttgcagtgagccgacacactgcactccagcctcagtgacagagtgagagtctrtattaaaaaaaaaagttattactaatattggcaatcattgatattaattccttgaagtaatattatattaatatgttaatatttgaatgaattcaacaaa

SEQ ID NO: 293109 - DNA, 201 bp, Homo sapiens
ggaactcctgtgtttcttagcatgtacctggatggacaggggctccttgcatgggtctacctgattctattactaaacctaccatggggagtggggtgccrtgtactagacattggaggaaagagaatggtgaaaccaagatgaatgagatgtcttttacctttgtagagctgccatcgttatagcttcactgagcagctg

SEQ ID NO: 293110 - DNA, 201 bp, Homo sapiens
tcacaaagaggattaggtgcttccattttttttctttttttgatacgaagtttcactcttattgcacaaggctggaatgcaatgccatgatctcagctcaytgcaacctccacctcccaggttcaagcgattctcctgcctcagcctccctagtagctgggattacaggcatgcaccaccatgccaggctaattttttgta

SEQ ID NO: 293111 - DNA, 201 bp, Homo sapiens
aggtaagttatatacaagggatactgatccaataagtaaatatattgaggataatgagaggaagttgcaaataaagaaagggagaaaatcgaactttgtgrtgttggattggaatctgatgtaatctacaatgaactcagattttcaataggtgaatcaataaatgtagaaatgtagatgtaaatatgggtatatatattt

SEQ ID NO: 293112 - DNA, 201 bp, Homo sapiens
tttttagcttggagcttggtgacatatctgcagttcttattactggcttgcccttaatcaaagaagcccttatccacatggaccaaaactttgggaaccgscccgtgacccctatgcgagaacatatctttaagaaaaatggtaagtttcttggccaacgaaaggtgagtgtttgatgttgatagtcctataatctgttaa

SEQ ID NO: 293113 - DNA, 201 bp, Homo sapiens; identical to SEQ ID NO: 60463

SEQ ID NO: 293114 - DNA, 201 bp, Homo sapiens
attactggcttgcccttaatcaaagaagcccttatccacatggaccaaaactttgggaaccgccccgtgacccctatgcgagaacatatctttaagaaaartggtaagtttcttggccaacgaaaggtgagtgtttgatgttgatagtcctataatctgttaaaggcaccttggtgactgtaattttccaacactcctaga

SEQ ID NO: 293115 - DNA, 201 bp, Homo sapiens
catattatggaatcagaatactgtaatgttgactttctttttcccaggattgattatgtcaagtggccaggcatggaaggagcaaagaaggttcactctgrcagcactaaggaactttggtttaggaaagaagagcttagaggaacgcattcaggaggaggcccaacacctcactgaagcaataaaagaggagaacggtga

SEQ ID NO: 293116 - DNA, 201 bp, Homo sapiens
aggattgattatgtcaagtggccaggcatggaaggagcaaagaaggttcactctgacagcactaaggaactttggtttaggaaagaagagcttagaggaaygcattcaggaggaggcccaacacctcactgaagcaataaaagaggagaacggtgagcattgcatatgacagaggtgagagactgtggcccatttgttcat

SEQ ID NO: 293117 - DNA, 201 bp, Homo sapiens
gtgttgggattacaggcgtaagccactgcacatggccagaacttatttattttattacagttttatcctcatgccttgctctagggacacatgatagatgytcactcagttcatgttggttgaatacataaatagatatttataaagaaacattcacattctgaagtgaattgaatctgagccttgttgagagaaggagaa

SEQ ID NO: 293118 - DNA, 201 bp, Homo sapiens
gcacacaggcaatcctacttcaagtttccatgaagaaaacctcatctgcagcaccctggacctcttctttgccggaaccgagacaacttccacaactctgmgatgggctctgctttatatggccctctacccagaaatccaaggtgagcatgtcagtgagtaagcctgaaccaggacagaatagtgcctcctgggatgtgc

SEQ ID NO: 293119 - DNA, 201 bp, Homo sapiens
cagtgagtaagcctgaaccaggacagaatagtgcctcctgggatgtgctgcctgaagtcggggccagaagatagcattgtaggatgaaaagagaggcagarcagtcatgagtgatgaggacttggaaactgcacattcttcatattttctgtctgaattgtgatgggcccaggtaatacaaatgtaagagagaatccttgt

SEQ ID NO: 293120 - DNA, 201 bp, Homo sapiens
agagactgagaaaagaaataagacacagagacaaagtatagagaaagaaaagtgggcccaggggactggcgctcagcataccaaggacctgcactggcacyggtctctgacttccctcagtatttattaattactattttcagtatctcagcaggaggaatgcggcaggagagcagagtgatagtggggagaaggtcagca

SEQ ID NO: 293121 - DNA, 201 bp, Homo sapiens
ttctggtctactccacttttattacccactcccacaggagcccatctcacattctcatcagtgcaagctggggaaaaggaagatggaacagaagacagggwtccctctggcatagtagcttatgctttactacggagggaagagagtcagagatctgcctatatctcctccaaggggaagtgcacctccttattactgtag

SEQ ID NO: 293122 - DNA, 201 bp, Homo sapiens
gactgtaattttccaacactcctagaaaccagccccataataaacttcctgccactaaagaaagctggatattcacatttcctgattgaagtcactccctsagaagatttgataagatcatccctcactgggatttgggagaaaccacatgccctgcccaaacctactctggatgcttttataatgaagtaaccatgttac

SEQ ID NO: 293123 - DNA, 201 bp, Homo sapiens
atcaagaatagtgaaattcctagagacacaaagtagaatggtggtggccagaggctgagggaggggatatagagcctcagttctgcaagatgaaaaagttytggagagtgattgcctaacaatgtgaatatatttaatactactgaactgttcatttaaaaatgctaacatagtaaattttatgttatgggtattttaccc

SEQ ID NO: 293124 - DNA, 201 bp, Homo sapiens; identical to SEQ ID NO: 60467

SEQ ID NO: 293125 - DNA, 201 bp, Homo sapiens
atgaactcagattttcaataggtgaatcaataaatgtagaaatgtagatgtaaatatgggtatatatatttggtgtatatatatatatatacttggtgtgwatatatatatattttatatatgtacacacacacacttttggacatatacccacattatatacatacatatatttcttagctctgcccactgatataagct

SEQ ID NO: 293126 - DNA, 201 bp, Homo sapiens; identical to SEQ ID NO: 60468

SEQ ID NO: 293127 - DNA, 201 bp, Homo sapiens; identical to SEQ ID NO: 60469

SEQ ID NO: 293128 - DNA, 201 bp, Homo sapiens; identical to SEQ ID NO: 60470

SEQ ID NO: 293129 - DNA, 201 bp, Homo sapiens
tgtttttgtttttgtttaattttcagaggtttagttatgatagatcttggtgctactttctttgggtttatcctgtttgggtttctgaaaatatagatttstcttttgccagtttgagggagcttctgccactctttcttcaaatatttttcaactacacattctttttcctctctttcttggactcttggatactgatgg

SEQ ID NO: 293130 - DNA, 201 bp, Homo sapiens
tcatattatggaatcagaatactgtaatgttgactttctttttcccaggattgattatgtcaagtggccaggcatggaaggagcaaagaaggttcactctkacagcactaaggaactttggtttaggaaagaagagcttagaggaacgcattcaggaggaggcccaacacctcactgaagcaataaaagaggagaacggtg

SEQ ID NO: 293131 - DNA, 201 bp, Homo sapiens; identical to SEQ ID NO: 60472

SEQ ID NO: 293132 - DNA, 201 bp, Homo sapiens
ggtccgcagtttgacttccctggagttgactgaatacttgttgtatgtcagatgcagtgtaaggtcatgtggccagctcctcatatatggttctgcactargtatgtcttatgccatgtaaagtagactctcagtaggaaatggagacaaatccatcagaaggatccatcttgcccttcctccaccttcaggacagccttt

SEQ ID NO: 293133 - DNA, 201 bp, Homo sapiens
attggccaggggcagcagccgagcacagccgcccgggagtccatgccctacaccaatgctgtcatccatgaggtgcagagaatgggcaacatcatcccccwgaacgttcccagggaagtgacagttgataccactttggctgggtaccacctgcccaaggtaattaagcagatcttcaagcccatcttttaggggggtaga

SEQ ID NO: 293134 - DNA, 201 bp, Homo sapiens
actaatatggaatatttatatgcaaaaaccatttctaacatgcatgtaaagtacaacatgttatatgacatacgcctatccacctatgttgttctttttamaaagaaaaacaatattgctgttgcccttgagtctctcctctctgtgtccttccccaactcgtccatttccctcctccctcagaggttctcttctgtatcc

SEQ ID NO: 293135 - DNA, 201 bp, Homo sapiens
ccatcctcggactctcctactgggcactgtcgcctttctgctcgctgctgactttctcaaaagacggcgcccaaagaactacccgccggggccctggcgcytgcccttccttggcaacttcttccttgtggacttcgagcagtcgcacctggaggttcagctggtaggagtgggagaaggtgcctagcgtgtcctgaccct

SEQ ID NO: 293136 - DNA, 201 bp, Homo sapiens
cattaactggcatgattccacctgcactttctagggatggaatattattaaatgtttactatttgcatgttgtcatgttaaacattactggaacaccttayttgtaatgtgattaccttgccctcttttatatgattgtccttaaaaatgctatactttctttctgagaaacttcatttcccatacataaaatggtgataa

SEQ ID NO: 293137 - DNA, 201 bp, Homo sapiens
ttatatacaagggatactgatccaataagtaaatatattgaggataatgagaggaagttgcaaataaagaaagggagaaaatcgaactttgtggtgttggrttggaatctgatgtaatctacaatgaactcagattttcaataggtgaatcaataaatgtagaaatgtagatgtaaatatgggtatatatatttggtgtat

SEQ ID NO: 293138 - DNA, 201 bp, Homo sapiens
atattataattttgcttttgaatgttaaatgcaattttgaaaactcaagagaataatagtctattgtatttactcatttatttacccttttcatttatctyttttcatttctgatgttacaagcttatcatatcctttcagatctgaagaactatctttagatattcttttagtgcaggtgtactggcaagaaattctctt

SEQ ID NO: 293139 - DNA, 201 bp, Homo sapiens
  misc_feature (1)...(201): n = A,T,C or G
atgtgctgcctgaagtcggggccagaagatagcattgtaggatgaaaagagaggcagaacagtcatgagtgatgaggacttggaaactgcacattcttcanattttctgtctgaattgtgatgggcccaggtaatacaaatgtaagagagaatccttgtcctcaagaagctcagaggcaagagggaaatcaacgaagtcag

SEQ ID NO: 293140 - DNA, 201 bp, Homo sapiens
actgatggcacaaatgttaggtctcttgttgtgccacgagttcttgaaactctgtttttgttgtttccaatgtagtttctctgtgttgtttagtttgaatrtgttcttctgagctgtcttcaaattcacagattctgctatcattaccattctgctattgagctattttactgaattttaaaatttattctattgtatttt

SEQ ID NO: 293141 - DNA, 201 bp, Homo sapiens
cagagaaaaagaataattttacaagagaacttggtagacaccaccttaatcaagtgattaccaataatgtaacacatcacaattgtatagcacttgatagkataaaatgagaagaatacagtatcactttggtgatattcctacccaaaatggaaaactccacagcctgaatccaatcatgaggaagcatgagaggcattt

SEQ ID NO: 293142 - DNA, 201 bp, Homo sapiens
atttcagaataaaaggcttgttatggaaagtatcacagtaaagaattgtaatatacagaaagctgtttgagtaatgctaccacccaaaagattttctttaraggtcatcttttaaattgtattctcctgttttttgagaattaaccagatcaagttaataataagcaattgtacagttatgtttattattacctaggtgac

SEQ ID NO: 293143 - DNA, 201 bp, Homo sapiens
tctctcccaccccaactctctcactctcactcattcttactttcactctgtcactcccactaaactctgtcactcaggttctggagccatcttgggctcaygtctttgtcctcaaatcttacataatgcctgggaaattccctgcaccactcaatagctttgtcacctttgctgtgttgtttcagctataattcattttcc

SEQ ID NO: 293144 - DNA, 201 bp, Homo sapiens
aatgtacattttcactgattcctagagaggttgtttaatttgccccaatcacgtggttaggaggtgggagaagctgaattgaatctctgcccttctgcctycagttcacccacacataacagggagtgggacaaggtcagggcaatgctaggtgtcagctgtggagaccaggacccagccttgggccacacttcagaagaa

SEQ ID NO: 293145 - DNA, 201 bp, Homo sapiens
caggacccagccttgggccacacttcagaagaaatgcctgcaaagggaaagggccactgtgcataagaagaaccactgaaggaggaaggccaaagcagtcrcaatacagagggccacccatgccagtaggtcccccatgattaaggaggaaaagtggcacagggaaaagatgacttataccttaggaactctgctctgaca

SEQ ID NO: 293146 - DNA, 201 bp, Homo sapiens
ttctccacccaaacatcccagtagagtaaagagtaacagagcagcgttgctgccaacatgtctcacctcctgccatagggtggtttttctcctatctcagmattgaacaaatgtacaatcgggttttataccgaaacattccattcccaagagtaggcaggagacagtggccttcctctatctcaactgcaagaggctttc

SEQ ID NO: 293147 - DNA, 201 bp, Homo sapiens
ggagacaaatccatcagaaggatccatcttgcccttcctccaccttcaggacagccttttgaccctcatttcaagatcaacaatgcagtttccaatatcawttgctccatcaccttcggagaacgctttgagtaccaggatagttggtttcagcagctgctgaagttactagatgaagtcacatacttggaggcttcaaag

SEQ ID NO: 293148 - DNA, 201 bp, Homo sapiens
caaatcccagctctactgtctcgtccgaattagccttgggaaaatcatttatatgctaaataatttacctttttatctaggagatgaaaagaggataatgwttccttccataaagaaagttcttgtaagaatcaaaagaaatggtgagctttaagtggtttgtaaaccataaaacacatcataaaagttctatctatagtg

SEQ ID NO: 293149 - DNA, 201 bp, Homo sapiens
tacactctttttctgtttttcttttcctcttttcatgtctttgttctgttggttattaaatttaagaacttagattcagtggaatctctgtaaactttatrtctcttggtagccatggttcaatagttcagtctcttctcccactaatcctttacttcttcctctttactgtaaacatttattttgttccaccctttttta

SEQ ID NO: 293150 - DNA, 201 bp, Homo sapiens
aagccggaggatgaccacccctctgcataggtgtgctttttcatgggtcaagccttgcctgagtctctgctgctttctctagggtaccatgatcctgaccwatttgacggcgctgcacagggaccccacagagtgggccacccctgacacattcaatccggaccattttctggagaatggacagtttaagaaaagggaagc

SEQ ID NO: 293151 - DNA, 201 bp, Homo sapiens
taatgtttccttccataaagaaagttcttgtaagaatcaaaagaaatggtgagctttaagtggtttgtaaaccataaaacacatcataaaagttctatctrtagtgtgcctccttcctgcttcctttgtgagatatgtgtttgcttctgacctgttgagaagctcaagtcaaagtggtgcaaaatagttgataagagttaa

SEQ ID NO: 293152 - DNA, 201 bp, Homo sapiens
agtttgtgaagaaatatgggaacctttttagcttggagcttggtgacatatctgcagttcttattactggcttgcccttaatcaaagaagcccttatccayatggaccaaaactttgggaaccgccccgtgacccctatgcgagaacatatctttaagaaaaatggtaagtttcttggccaacgaaaggtgagtgtttgat

SEQ ID NO: 293153 - DNA, 201 bp, Homo sapiens
ggtggtggcccatcccgtctgctctctgtcccgtctcccgacccgtacgcttttccctcaactcgcgcgcacgaatggttaaaaaaagggtgtgaggctcragcccgccagccaggccgctagcacctcgcgcgcgccctcagcgaggacccgcacgagctgcccggctctgtgcctgcgttgtttgaaactgtggaaccc

SEQ ID NO: 293154 - DNA, 201 bp, Homo sapiens
taaaaatgcaaaaattagccaggcatggtggcgcacgcctgtagtcccagctacttgagaggctgaggcaggagaatcgcctgaacccgggaggtggaggktgcagtgagccaatattatgccactgcactccagcctggggcgacagagcaagactccgtctcaaaaaaaaacaaataataataaagtagggaagttcag

SEQ ID NO: 293155 - DNA, 201 bp, Homo sapiens
ggcagatcacctgcggtcaggagttcaagagcagcctggtcaacatggtgaaaccccgtctctactaaaaatgcaaaaattagccaggcatggtggcgcamgcctgtagtcccagctacttgagaggctgaggcaggagaatcgcctgaacccgggaggtggaggttgcagtgagccaatattatgccactgcactccagc

SEQ ID NO: 293156 - DNA, 201 bp, Homo sapiens
ctaggtgcaatatattgctataccttagttaagaggtattgtaggccggtcacagctcacacttgtaatcccagcactttgggaggtgaaggtaggtgggkcatttgaggtcaggagttcaagaccagtgtggccaacatggtgaaaccctgcccctactaaaaatacaaaaattagctgggtgtggtggtttgcacctgt

SEQ ID NO: 293157 - DNA, 201 bp, Homo sapiens
acactgagttgctcaggttaaaaaaaaaatcgttactctttgtttttttttcttttttcgggtgggagggtggagggcagggcctcacactgttgcccagrctggagtgcagtggtgcatctcggctcactgcagccaggggatcctcctccctcatcctcccgagtggctgggactacaggcacgtgccaccacgcacgg

SEQ ID NO: 293158 - DNA, 201 bp, Homo sapiens
aggtgggtggtggattgcttgagcgcaagagtttgagaccagcctgggtaacatggcaagaccctgtctttactaaaaatacaaaaactagtagggcgtcrtggtgtgagcctgtagttccagctaattgggaggctgaggtggaggattgcttgagcccaggaggttgaggctccagtgagccgcgatcaagccactgca

SEQ ID NO: 293159 - DNA, 201 bp, Homo sapiens
tcattgcttccttggtggcctggttctgggaagactttgggactcattcctgaaaaactaatctagagcctatttaatcaaccctcccaagtattcaatayctttgtgtttatactagctaaaatggattctattttccgcaaatgaatcttaactgataccacacattgtgtacaggaagaatagtggctgcagacaata

SEQ ID NO: 293160 - DNA, 201 bp, Homo sapiens
ccactcgcttcggcctcccaaagtgctgggattacaggcgtgagctatcgcttccggcccttgaaataataagtttttactacttatactattttactgtaggtctactaaataggatattttgtaatgcgacccttaatccatagcaggctgattttaaaaattcagtagcttctgttttttgttctttaagaacagtgt

SEQ ID NO: 293161 - DNA, 201 bp, Homo sapiens
gagttttgctctggttgcccaggctggagtgcagtgaggcgatctcggctcaccgcaacctccgcctcctgggttcaagcgattctcctgcctcagcctcyggagtagctgggattacaggcctgcgccaccacgcccggctaattttgtatttttagtagggacggggtttctccatgttggtcaggctggtctcgaatt

SEQ ID NO: 293162 - DNA, 201 bp, Homo sapiens
caccattatagcttttaccccataggcaaaagtcctaatgcatttgcatcaattgccaaaaatgacaactccattatacatttgaagagtggggaaatgayaattagttgtggtcacagatccagtagtaaactcactctgagccggaccttgccatgactccatttattaactggcttctttatgcccccattataacag

SEQ ID NO: 293163 - DNA, 201 bp, Homo sapiens
cttggcttattgaaccagcatcttggctgacctttccgctggtacttttctttttttgagacagagttttgctctggttgcccaggctggagtgcagtgasgcgatctcggctcaccgcaacctccgcctcctgggttcaagcgattctcctgcctcagcctccggagtagctgggattacaggcctgcgccaccacgccc

SEQ ID NO: 293164 - DNA, 201 bp, Homo sapiens
ccttggcttattgaaccagcatcttggctgacctttccgctggtacttttctttttttgagacagagttttgctctggttgcccaggctggagtgcagtgrggcgatctcggctcaccgcaacctccgcctcctgggttcaagcgattctcctgcctcagcctccggagtagctgggattacaggcctgcgccaccacgcc

SEQ ID NO: 293165 - DNA, 201 bp, Homo sapiens
tgaatcattataatgaaatattaagttgttttttttttgagactaagtcttgctctatggcccaggctggagtgcaatggcacgatctcggctcactgcarcctccgcctcccggattcaagggattctcctgtctcagcctcctgagtagctgggattacaggcgcccgccagcacgcccggctaatttttgtattttta

SEQ ID NO: 293166 - DNA, 201 bp, Homo sapiens
attcattccctcttagatgttagtagcagaattcagtagaactgactaaagcagggaacaaattttgtatacatcaagatttttttgaaggggcgggaaargctaaattcttcctagttttaaggtaagccaggaaatcaaactagtctttcaacagtttgaaaaaaaatgctgattgttttggatagtctgtttttttct

SEQ ID NO: 293167 - DNA, 201 bp, Homo sapiens
ggaaggtgcggcaaggcattcctttcataggcatgagaggtcctcccacctgaccctggggctagaaactgaaaaagaattgaaaattctgaagccaagtrgattttagctttttatttttatgttctcctttttcctctaaagcagccagaaaagctgaatttttaccttttaaacagattttagtttgtggattaatct

SEQ ID NO: 293168 - DNA, 201 bp, Homo sapiens
gacagctagcctagagcccgtgaggctagaagcaagatagagaccagtctgggcaacacagcaagactctgtccttaaaaaaaaaaaatttagctgggtayggtggggtgtgcctgtagtaccagctactcaggaggctggggcagggaggatcacctgagcccagtagttcaaacctgcagctatgatcataccactgca

SEQ ID NO: 293169 - DNA, 201 bp, Homo sapiens
gaaaaggcattggaagagaggactcatcgtccagcactactttgattttccattcatcctttcctaccttgtacttgagaattagaggtggtagtgctcaktcaatattttctgaatgaatcattataatgaaatattaagttgttttttttttgagactaagtcttgctctatggcccaggctggagtgcaatggcacga

SEQ ID NO: 293170 - DNA, 201 bp, Homo sapiens
taatactctagtcagataatttttcctcccatgtcctgaaaaataggcctgatgtagaaaatattaactcctacactcctacaaatgttgccattttttttcacgtgcaagttttactttaaaacagggtgggaaagttgcaaatggcaaaccaaatcatctttttttcctactcaaagcactatttttaaaatccaaagt

SEQ ID NO: 293171 - DNA, 201 bp, Homo sapiens
tttttaaatgcttttaaaacttttattctgggcatatagcaatttttgagcctgtatttcttaaaatgtcatctgaacaagattcacatacttttcagatyatacaacttttgggaaaagactaaatctacagaagtaatattttcaccttgtttctttaagataactacttatcgttctcccttctatatttcatagtga

SEQ ID NO: 293172 - DNA, 201 bp, Homo sapiens
ttgagtgcttattggcaggcattaggttttcaaatgttaatttctaatttgtaccattcccttggtaaatttgttttcaaaattgatgattttgttgccaraactgataaccaaaaactaatgaaactttctctgtgattaacagatataattggtgattacaactttcctctataaattaactcttgacactccttggga

SEQ ID NO: 293173 - DNA, 201 bp, Homo sapiens
tgaagctcctgttggtacgtgcttgtctaggtcttacatcttctttggggaacagtcctttacctctacccatcaggtacagcaccttcccaactaggttwtgctatgatttaaccctaattatagatctactggctagaaggctagatgacaggtgtgagtgctggcggaagggagaacatgcctttcaagtagaagcct

SEQ ID NO: 293174 - DNA, 201 bp, Homo sapiens
aattattcttaaagcaagttaagattgtaaaaagccatgggtctttaagccatgatactcaaaagaaaataataatttattttctcttcaaatacctagtrttttattatagcaaattttattcagagaaggaaaaaatattgttgaagtttaagtgtaggtctcttttcaggatggtttaaacatataaagaataagaga

SEQ ID NO: 293175 - DNA, 201 bp, Homo sapiens
cggcctcccaaagtgttgggattacagatgtgagccaccgcacccagatctggttagttcttaagtgattcatgtaactggtcagtagaagaaaaggattrtaaatgatgccattctgtaaactgcactactacccaaaaaccattgttctaaactgttctggaaatcattactatgcatcgttttggaaaaacttgccaa

SEQ ID NO: 293176 - DNA, 201 bp, Homo sapiens
ctcaaatagagttttgaggttatgcccttctgactcagatttggtctaacaatgtagactcatctgaaaaatgtttttgtgattcagtctttgaattgatrtagataagaggaatttgagatgatactgcccattaaagtacatggagtgtgggatatcaaccatcacttaggctctcagaagtagatattttttagtata

SEQ ID NO: 293177 - DNA, 201 bp, Homo sapiens
gtaagtgatgaatgatttcatgacttgttaatggacattcttggtactaagtttttcctagaaatgattctaaatatgtaaatgctattggggtaacactwtaataccccatttcaacaaggagtaccttctcaattaaaaaaaaatcgcagtaggctgggcgcggtggctcacgcctgtaatcccagcacattgggaggc

SEQ ID NO: 293178 - DNA, 201 bp, Homo sapiens
ctgaagtggtaagtgatgaatgatttcatgacttgttaatggacattcttggtactaagtttttcctagaaatgattctaaatatgtaaatgctattgggrtaacactttaataccccatttcaacaaggagtaccttctcaattaaaaaaaaatcgcagtaggctgggcgcggtggctcacgcctgtaatcccagcacat

SEQ ID NO: 293179 - DNA, 201 bp, Homo sapiens
gactgcaggtgcccaccaccacgcccggctaattttttgtatttttagtagagacggggtttcaccatgttagccaggatggtctcaatctcctgacctcrtgatccgcccgccttggcctcccaaagtgctgggattacaggcgtgagccaccgcgcctggcctactgaggttgtttttaacacaataattgagccactg

SEQ ID NO: 293180 - DNA, 201 bp, Homo sapiens; identical to SEQ ID NO: 60525

SEQ ID NO: 293181 - DNA, 201 bp, Homo sapiens
gtcagttttatctttacagggaccttaaatttcattaatagggtacctctaataagctaataatgctaataagctgatctatgaaaatggaactgttattyatgatatactttatttaaatggaaaattggttatttggactataatgagaaactaatctgtatagacttacattttcctattttcattttaggtgaagaa

SEQ ID NO: 293182 - DNA, 201 bp, Homo sapiens
gggctgggcgtaaataggccaactccgcggcgagggcgcccggcgcgggggtgtgggccgaggacgccgccgccagcctcccccgaccgggcagcccggtsgctgctcgtccttccagctttctttccgttcccgagagcggtgaaggatggggagaaagaaacgtttccacgcaggttgccctgtgtcggtaattgcgaa

SEQ ID NO: 293183 - DNA, 201 bp, Homo sapiens
aaaaaaaatcaaaaaagtctcataatgttttaagaaagtttatgaatttgttacgggctacaggcaagctttgcatggcctattgctcctaggcaacaaasctgtatagcatataactactgaatactgtaggcaactgtagcacaatggtatttgtgtatctaagacgtatctaagcatagatatgtaaacataggtaca

SEQ ID NO: 293184 - DNA, 201 bp, Homo sapiens
gtgcgggctgggcgtaaataggccaactccgcggcgagggcgcccggcgcgggggtgtgggccgaggacgccgccgccagcctcccccgaccgggcagccyggtggctgctcgtccttccagctttctttccgttcccgagagcggtgaaggatggggagaaagaaacgtttccacgcaggttgccctgtgtcggtaattg

SEQ ID NO: 293185 - DNA, 201 bp, Homo sapiens
tgcccccacacccacattctgaacattttatttttaagtgagggatagctacatattttttttttttttaccagcaggaagtcatatataattctcttcayagactttctttcctctgaattcttattaatagaatcttacttagtgcagcctctcccaaatattgtcatggttagtttattcccaggtttctgttcagtt

SEQ ID NO: 293186 - DNA, 201 bp, Homo sapiens
aggaaaaaatacaattatttcttccacagaaatgcctgaatattagcagttatttatttttttgtttctgcatatattataaatattattcaaagttgggktcttgttttgattctgcttttctgatatatgaacactggatattaagggttcattcagatttttacttggtttcagattggggtataacattttgaattt

SEQ ID NO: 293187 - DNA, 201 bp, Homo sapiens
cccttgcttaagcatcatctgaatccagccccatgtactcttctgaagctcctgttggtacgtgcttgtctaggtcttacatcttctttggggaacagtcmtttacctctacccatcaggtacagcaccttcccaactaggttatgctatgatttaaccctaattatagatctactggctagaaggctagatgacaggtgt

SEQ ID NO: 293188 - DNA, 201 bp, Homo sapiens; identical to SEQ ID NO: 60511

SEQ ID NO: 293189 - DNA, 201 bp, Homo sapiens
aacttttttttccccactggtacaaaataatagagcttagttggttgtctatctattttgcccctaaagacgccaccatctagtaaccatttctataactytctgagggtcaagtccccttggtaggtcattataattgcgacctcctggcttctagtaattaagcactgccagttggccagtattgttttggggtctatc

SEQ ID NO: 293190 - DNA, 201 bp, Homo sapiens; identical to SEQ ID NO: 60514

SEQ ID NO: 293191 - DNA, 201 bp, Homo sapiens
aaatataggattgagaatgctgtgaacctattaaatcccattgtttccaaagggattagctgtcattaagagtggggtaactggggagcacacagaaactrggaaaaaagtttcggggcttaaaaactcatctaggcaagaactgtggctagaatttctcccacaaacaactgactgaaagcaaaagaatgagaagcatat

SEQ ID NO: 293192 - DNA, 201 bp, Homo sapiens
aaggatgaaataagaaaacaattcatttacagtgctttttttaaaaaaaggtttttgccttcttccaagttatatataggccaagtgtggtggctcatgcytataatcctagcactttaggaggctgaggcaggaggatcccttgaggccaggagttcaagaccaaactgggcagcatagcaagaccctgtctctaaaaaa

SEQ ID NO: 293193 - DNA, 201 bp, Homo sapiens
tagtcacttttggatcattgggtcattgccatggaaaggagcagtaacacccgggtgttgccatggcaacggtaaattgacatggcacactggtggacatrtctgattgaaagctgtttttgccctggccttgttttagctagacctcaatctggtcccatgtctgagtcccgcctctgagtcctgccttctaccttaaaa

SEQ ID NO: 293194 - DNA, 201 bp, Homo sapiens
agaagaaaacagctttactgaagaggcggtgttacatgcagagcagggttacctctaggcagagagtaacagctcagggcagttttgcagtcatatttatacccatttttaactgcatgtagattaaggggcgatttatgcagaaatttctagggaaggggtagtcacttttggatcattgggtcattgccatggaaagga

SEQ ID NO: 293195 - DNA, 201 bp, Homo sapiens
cctggtaagggaggcatagcagagaatgctatttgtcctctaatatccattctatccttcttccttaatattataacccctgatttttagttgggtatatrgccacccagaataatgttgtcaaatgactaagttctggccaatgggctataagtaggaatggtgtgtacagcttccaggaagtatccttaaagagagggg

SEQ ID NO: 293196 - DNA, 201 bp, Homo sapiens
tcgtactaattcttgcaggcagccttcttgaggagcaggtgcagagagagacaaagctggagcataagatgtgaaaggaagggagaggaagtaggactggkaagagaatgaagtcaaattccagtacaggtccaataaagctttggccagcctcgctaagagctctggagtgaatactgcccatcagaggtgtccagtggt

SEQ ID NO: 293197 - DNA, 201 bp, Homo sapiens; identical to SEQ ID NO: 60522

SEQ ID NO: 293198 - DNA, 201 bp, Homo sapiens
tgtaggcaactgtagcacaatggtatttgtgtatctaagacgtatctaagcatagatatgtaaacataggtacagtaaaaataatcatagactactgtcayatgcggtccattgttaaataattgaaacgttggtaggtggtgcataactgtaagttacacgatacttgaactagatttttacctagttttgtccagatct

SEQ ID NO: 293199 - DNA, 201 bp, Homo sapiens
atggtgttttaagtgctatgcttagattagtgtgtgtgtatatattgtatgcatatatatgtgtgtgtgtgtgtgtgtaatgtcattaaagtaattttaayttatagcttataaagtagggaagttcggccaggtatgttagctcgcacctgcaatcccagtactttgggaggcctaggcgggcagatcacctgcggtcag

SEQ ID NO: 293200 - DNA, 201 bp, Homo sapiens
tcaagagaaggaaatttaacactgaatgtgaactatggtgttttaagtgctatgcttagattagtgtgtgtgtatatattgtatgcatatatatgtgtgtrtgtgtgtgtgtaatgtcattaaagtaattttaatttatagcttataaagtagggaagttcggccaggtatgttagctcgcacctgcaatcccagtacttt

SEQ ID NO: 293201 - DNA, 201 bp, Homo sapiens
cagtctgggcaacagatcaagacccttgtctccaaaaaaaaaaaaaaaaaaaaggccattgtagcgtggtggccaagagcgggtttgaatactggcttttmatcctaagtagttctgtgaccttgggcaagttatttaacctgtctgtgccttagtgcttgtatctgtcagtaatggtgataatagtacctcatagggtta

SEQ ID NO: 293202 - DNA, 201 bp, Homo sapiens
agtgggcctgtagttccagctatgcagaaggctgtggtgggaggatcatttgagcatcggaggttgaggctgcagtaagccgtgattgtaccactgcactmcaggatgggcgacagagaccctgtcttaaacaaaacaaaacaaaacaaaacaaaacaaaacaaaacaactatgtttatatttcttcttcttgatttttta

SEQ ID NO: 293203 - DNA, 201 bp, Homo sapiens
gagccaagattgcgccattgcagtccagtctgggcaacagatcaagacccttgtctccaaaaaaaaaaaaaaaaaaaaggccattgtagcgtggtggccargagcgggtttgaatactggcttttcatcctaagtagttctgtgaccttgggcaagttatttaacctgtctgtgccttagtgcttgtatctgtcagtaatg

SEQ ID NO: 293204 - DNA, 201 bp, Homo sapiens
acccaggctggagtgcagtggtacaattgtagctgactgtagcctcaaattcctggactcaagcgatcctaccacttcagcctcctgagtagctgggagaygctcaccactacgtccagctaattaattttttttttaacgtaaagataggatctcactctgttgcccacactggtcttgaactcctggcttcaagcaatt

SEQ ID NO: 293205 - DNA, 201 bp, Homo sapiens; identical to SEQ ID NO: 60518

SEQ ID NO: 293206 - DNA, 201 bp, Homo sapiens
ttctgaatactttgaggtgctagagtaataatagctagcaatcgtaaaataaatgaaaatattggaaggacctagtggtttttttgttgttgttgttaaaraagtaaaagaatagtaaacttaaagcatttgtgttttgagatggggtctccttgtgttgcccaggctggtcttgaattcctgggctcgagcagtcctccc

SEQ ID NO: 293207 - DNA, 201 bp, Homo sapiens
ggtcctgcctttctcactcatctcatctcctcccatcttatttcccaaattgactgcgctctaagcgccctggcctccttgcttcttttcaaaacaccaascacattaagcttcaggacgtttgtaacttgctgttctctctgcccgcaccattcttccctcagattcctccaagctttttcattcagctctgctcaaatg

SEQ ID NO: 293208 - DNA, 201 bp, Homo sapiens
acttgtatactatatattactgtatactataatcacaatatgttatacccatgtacaacttatttacccattgtgttttcaaattgagttaaaatttaaawacagtgtatttaaagaaatctttaacttccataattaaaaaaccattgtaattcacataaatagtaattcataattcctcttaaaattacaaaaaagacc

SEQ ID NO: 293209 - DNA, 201 bp, Homo sapiens
ctagataattcccttttacaatgtttgctcctgtaatctgtgtatcaaacttttgttacttgtatactatatattactgtatactataatcacaatatgtyatacccatgtacaacttatttacccattgtgttttcaaattgagttaaaatttaaatacagtgtatttaaagaaatctttaacttccataattaaaaaac

SEQ ID NO: 293210 - DNA, 201 bp, Homo sapiens
ctgagatggatggcttgcacccaggagttcaagaccagcctgggcaacatgacaaaaccctatctctacaaaaaatacacaaactagtttggcgtggtggygggcacttgtggtcccaactactcaggaggctgaggaggaggagcctgaggtgggaggatcacttgagtccagaaggagccatgattgcaccactgcagt

SEQ ID NO: 293211 - DNA, 201 bp, Homo sapiens
ttgagtagaccttaagtggaaggtcaaacctttaatttctttctctgattcctggtgctacagtgtgatatatgtcttatcccttggaagtaacgttggcrttgtgttgtgtgtccgttggcgctgtgttgtgtgtccttgtaaccttaaagtcttagcaatatctgcccaggtgcagtgctttgtgctaatgagggaaga

SEQ ID NO: 293212 - DNA, 201 bp, Homo sapiens
atttttttgagatggagtcttgctcggttgcccaggctggagtgcagtggcgtgatctcggctcactgcaagctccgccttctgggttcatgccattctcytgcctcagcctcctgagtagctgggactgcaggtgcccaccaccacgcccggctaattttttgtatttttagtagagacggggtttcaccatgttagcca

SEQ ID NO: 293213 - DNA, 201 bp, Homo sapiens
gctagcaatcgtaaaataaatgaaaatattggaaggacctagtggtttttttgttgttgttgttaaagaagtaaaagaatagtaaacttaaagcatttgtkttttgagatggggtctccttgtgttgcccaggctggtcttgaattcctgggctcgagcagtcctcccaagtagctggaattacatgtcaatgcccccaca

SEQ ID NO: 293214 - DNA, 201 bp, Homo sapiens
tatcagcattcatacttctgaatactttgaggtgctagagtaataatagctagcaatcgtaaaataaatgaaaatattggaaggacctagtggtttttttkttgttgttgttaaagaagtaaaagaatagtaaacttaaagcatttgtgttttgagatggggtctccttgtgttgcccaggctggtcttgaattcctgggc

SEQ ID NO: 293215 - DNA, 201 bp, Homo sapiens
tgggaaagttgcaaatggcaaaccaaatcatctttttttcctactcaaagcactatttttaaaatccaaagttttttaaaaagtttggaaaacgagtattrtggtttctagtgcattaagaattggatttacacaaagtgcatcgaacagttttttttatcacggtctcaactttgcttgtgttttatctttcacttacgg

SEQ ID NO: 293216 - DNA, 201 bp, Homo sapiens
cagccattttccgaagctgctctcttggtaaccccgcccgggcgcgtacgcacgaacggaggcggggcttaccgcgagggcctcgctccggaagccgcacyctccgcggcgtcccaccgtcgaggattaacaaaacgccaaacaagattttaacagtcggcagcgaaagcgcgcactcgagcgccaatgagagcggaagga

SEQ ID NO: 293217 - DNA, 201 bp, Homo sapiens
tcgtttcctcctgcggccgagaaagggaagaggtaaacaggcgaaaatgaggcgagcaggggctgaggaccgggcctcagctctacagcattcgcctgagmatgtattgttatccgtggcagcgccttgtctcattggatggccctaggcctagtgtggccgcgactccgaactgaaagcccaagcgcggcggcgtccagc

SEQ ID NO: 293218 - DNA, 201 bp, Homo sapiens; identical to SEQ ID NO: 60516

SEQ ID NO: 293219 - DNA, 201 bp, Homo sapiens
gtaaagactcagatactgcaagatggaaaactggtgacctttgttctccagttgccagacatttggtaaacctgttgccagctttagaagacagatcacaygccaatcaaaattgtggcacgaagggaaatggctggaaatatctataaacttggtatttgctggctttttcttgacactttaaaccaagttctatgagat

SEQ ID NO: 293220 - DNA, 201 bp, Homo sapiens; identical to SEQ ID NO: 60519

SEQ ID NO: 293221 - DNA, 201 bp, Homo sapiens
ctatagaaagcatgatgttgttttaatgattttacgtgtattgtttgttcagtaaacacttaagacaatctcactttttataggtattatatttttgtccsggttttaaatctggagtaaagcacttatttaatattatttcaaggaagaaagaagctctaaaggatgaagccaatcaaaaagacaaggtaagaaaaataa

SEQ ID NO: 293222 - DNA, 201 bp, Homo sapiens
ccttgtataactgagggatctttctgttgatcagtggctgtagggcctctttaaggcgatgatagtttctctccagttccctttgatactccttttgatcyggcccaattaagctcttattttttcttaaggcatcttcacacctaggaaaaacaggatgttatcaagatattacttctggcatagtttgtgggtttaatg

SEQ ID NO: 293223 - DNA, 201 bp, Homo sapiens
tcggaacgctgggggcctggagaagaccttatagatacccggagagagacatcgagtcacactcaaggtgcagcatcacgtggcgcccattttcctgacartactgggagaggaagacaacagagttgcgccttcagaatcccgaaggcgaaggatggtcttcaagctggaattctatacccagccaaagtcaggacgcgt

SEQ ID NO: 293224 - DNA, 201 bp, Homo sapiens
tccctctcaccaagcaagtgcagtggggcttgctggcttgcaccgtgactcactctcaccaagcaagtgcagtggggcttgctggcttgcaccgtgactcmctctcaccaagcaagtgcagtggggcttgctggcttgcaccgtgactccctctcaccaagcaagtgcagtggggcttgctggcttgcaccgtgactccct

SEQ ID NO: 293225 - DNA, 201 bp, Homo sapiens
gcacaagccactctaagccagcagagctctgcagaaggtggcatttgcactgggacttggcgggtgagtggggctggggcagagaggcagagggttgtgcrtctcctggccggcactggtaccagggagctgccacgatggggaggctgctctgagtggagctgattttcagaagacaggtattaggagttctaggcgggg

SEQ ID NO: 293226 - DNA, 201 bp, Homo sapiens
tccctctcaccaagcaagtgcagtggggcttgctggcttgcaccgtgactccctctcaccaagcaagtgcagtggggcttgctggcttgcaccgtgactcmctctcaccaagcaagtgcagtggggcttgctggcttgcaccgtgactccctctcaccaagcaagtgcagtggggcttgctggcttgcaccgtgactccct

SEQ ID NO: 293227 - DNA, 201 bp, Homo sapiens
ctaagcaagtgcagtggggcttgctggcttgcaccgtgactccctctcaccaagcaagtgcagtggggcttgctggcttgcaccgtgactccctctcaccmagcaagtgcagtggggcttgctggcttgcaccgtgactcactctcaccaagcaagtgcagtggggcttgctggcttgcaccgtgactccctctcaccaag

SEQ ID NO: 293228 - DNA, 201 bp, Homo sapiens
aaaacagcataccaagaaacagcaatgctctcactctcactaagcaagtgcagtggggcttgctggcttgcaccgtgactccctctcaccaagcaagtgcmgtggggcttgctggcttgcaccgtgactccctctcaccaagcaagtgcagtggggcttgctggcttgcaccgtgactcactctcaccaagcaagtgcagt

SEQ ID NO: 293229 - DNA, 201 bp, Homo sapiens
ctgtgaagatgtgaaatgagcctggatcacacgtgggttgattcccttctaattaagcgtggtcgccagattccagcctgctgtgtggagccctcagcccrccagtggccgagggggtgcggggcaggcattatcaatgccagagggaaccttggggttttgtgaccgtcccgtccctctttcagctgacccagtaacgcc

SEQ ID NO: 293230 - DNA, 201 bp, Homo sapiens
gaaaacagcataccaagaaacagcaatgctctcactctcactaagcaagtgcagtggggcttgctggcttgcaccgtgactccctctcaccaagcaagtgyagtggggcttgctggcttgcaccgtgactccctctcaccaagcaagtgcagtggggcttgctggcttgcaccgtgactcactctcaccaagcaagtgcag

SEQ ID NO: 293231 - DNA, 201 bp, Homo sapiens
cattgaagcggaggatgcactggtgctggtttcattactgttcttttactaaacatacttgttcttcagcatggatggcacactgcacaataaataaaggrtgaaggacattgtagctaagtcatgcatttctgatgtgctgtctccctcctcttctgtcccatcctctctcttccccccacccccacatagaggcaaaat

SEQ ID NO: 293232 - DNA, 201 bp, Homo sapiens
agatgttattatcatagcaaagcaagaggacacttaacaaggtcaggatgttgctcacggggtagggggtgcatgtggtttgaagggacgcagagggtgaygtttgggcctcattgaagcggaggatgcactggtgctggtttcattactgttcttttactaaacatacttgttcttcagcatggatggcacactgcacaa

SEQ ID NO: 293233 - DNA, 201 bp, Homo sapiens
gcctgacctctgttgaccacatggccccactctctcttccttgccccactgcctcgattccccgaggtcactcatttctccaagggggtcttctgcccagytcccacctgagagctggaggtggccaccatggagggcagctcaccccccagaccacaccttctggcacctggttctggtccacatgactgccctgccaga

SEQ ID NO: 293234 - DNA, 201 bp, Homo sapiens
acttcgctttcagccgtggcctgttcttgcttcctgatgcgtgtttgcgcttctaacaagaaaatgttcttttacttaaacacgtcaaaaaggaggaagcrctagttttatcaaggtctctttaaaagtctctttaatgcacaagagttggcctgggccccgcccctctgcccggcagcctttgatgaaggttgatataca

SEQ ID NO: 293235 - DNA, 201 bp, Homo sapiens
cctcggcgccccagcggctgccctgggcccgttcccacagcacctggcacacagcaggagccatgaatgttctttgggaactgaatgaggagtggaaatgygggcatgtcatgtttttgaagttaataaaaaaaatcccttaaaagttgttttatgttcggtttttaaagagattaacaccagacgtttacaatgctgccc

SEQ ID NO: 293236 - DNA, 201 bp, Homo sapiens
acagagttgcgccttcagaatcccgaaggcgaaggatggtcttcaagctggaattctatacccagccaaagtcaggacgcgtgaaggggagaatcgacacrttttcagatgtgcagaacttactctcatgcctccctttttaagacacagctggagcctgagttctgcagagtgagaaaataaaccaaggaagacgatggc

SEQ ID NO: 293237 - DNA, 201 bp, Homo sapiens
tcagcatgggagacggcacactgtcacggccctgccctgctgttcaccatcagaggcctttctcccataggcagggcccgcgccatctctcgtagattccrtggctgttggcttcccatgctgccttgtgtttctctggggatgattggaagcaaagtctccaacaccttctactgtgcttctaaccttgtgatagcacca

SEQ ID NO: 293238 - DNA, 201 bp, Homo sapiens
ctgtgtctccatcagaattgcttctggcagaaggatgaaggcacctgctaggcattgggcactgcgttgaattttaaggttgtgattggaatgttgtatckccttaattagtcatttacttgattggcttcaggagaaacaatcccacctgctccctgttccctaaggagcagacactgcatttggaagtacagttggcat

SEQ ID NO: 293239 - DNA, 201 bp, Homo sapiens
ctaagaaacagaaccagcttgagtacttcatagcaaggaaggctatcagcatgggagacggcacactgtcacggccctgccctgctgttcaccatcagagrcctttctcccataggcagggcccgcgccatctctcgtagattccgtggctgttggcttcccatgctgccttgtgtttctctggggatgattggaagcaaa

SEQ ID NO: 293240 - DNA, 201 bp, Homo sapiens
cgggctggccatgtcccaggtggagtgggtcgtatggggccggccaagtccctggaggagtgggtcataacaggccagctgtgacctcagaggagtgggcygtatcgggctggtggagaccctgctggagtgggccatatcagcacggccatgtcctctccaagtcaagaaccctgcaaacatgggcgcatttccatttgg

SEQ ID NO: 293241 - DNA, 201 bp, Homo sapiens
cgggaggtggaggttgtattgagccaagatcgcaccactgcagtccagcctgggtgacactcagcacacacacacacacacacacacacacacacacacacaaacttttagtgagctatcattactatcttcagagactagacaagatattttatctaggaaatatgaacaggatgacattttaaaaaaagaatatccagg

SEQ ID NO: 293242 - DNA, 201 bp, Homo sapiens
cctgttcccaatggagtgggctctattagggtgtgttgaggcggtggtgtcccaggtggagtgggctgtattgggctggccatgtcccaggtggactgggwcatatcagtctggcccatgtcccaggtggagtggaccatatcaggccggccatgttcccaatacacctattagggtttattgaggcggtggtgtccctgg

SEQ ID NO: 293243 - DNA, 201 bp, Homo sapiens
tccaaggtagggccacttaagttacatgttatctacagaatatttttatatctttaccttaaagaatacttctactttctctacctcgtctctactttgcrtgcgtgcccctccccaccatggtaaatacaacagttgcaattcagttaagaacactgggggaaaatgacatcacatgtaagtcagcgtttggaatgggtc

SEQ ID NO: 293244 - DNA, 201 bp, Homo sapiens
aatatgcaccaagtgtatcctgtagctggaccctgcaaacactggaccaccttgaatctcagctccccttggctggggatgctgcctgtgttcccagtaayaggaacacaagtggggagggccgcatcctgggccagcacactgaagcaatagagcaggtctgtctgggcagcttgcccaggctcttcaccgtgcgccccg

SEQ ID NO: 293245 - DNA, 201 bp, Homo sapiens
agcaggtgctgagggcgggcagtgcctcatcccagatgtggccagtggatcctacaaactgcaagacagtgtgggaaatcccaaggcgtcctccctagggrgcggctcttggagatgagagcctaggggcaccgcttttttttgctaaacaaattctctgttatccaaaggttttggccagttctgggcggaaacagtgaa

SEQ ID NO: 293246 - DNA, 201 bp, Homo sapiens
tggccatgtgctgcagctgccttcatgctagaactctgcaccgagaacgccactccgagcacggcgtcgaatgcaatctgcctgtgacgcgtctctctccygcccagccccacacagagaaagcctcccctgtgcacatccataaataccactgtatcttctctttgcatttatttctttacattttgatttcaatggaaa

SEQ ID NO: 293247 - DNA, 201 bp, Homo sapiens
gactcacaagaggctgagccaggaagtatgggaactaatatgcaccaagtgtatcctgtagctggaccctgcaaacactggaccaccttgaatctcagctycccttggctggggatgctgcctgtgttcccagtaataggaacacaagtggggagggccgcatcctgggccagcacactgaagcaatagagcaggtctgtc

SEQ ID NO: 293248 - DNA, 201 bp, Homo sapiens
ttttaatggaatccacaagccgctaagccgtgtgcaagggccttcatatttcctttctgatgtggtgagatgccacacataaggcgtggctgaattggctygtgggcctgaggcaggctggccgctgccctaggcgtcactgaaagtcacgtggctcatctgctcatgtcagctggcagggtgctgcatccgggcagagct

SEQ ID NO: 293249 - DNA, 201 bp, Homo sapiens
agggcaggagctggagcaggtgctgagggcgggcagtgcctcatcccagatgtggccagtggatcctacaaactgcaagacagtgtgggaaatcccaaggygtcctccctagggggcggctcttggagatgagagcctaggggcaccgcttttttttgctaaacaaattctctgttatccaaaggttttggccagttctgg

SEQ ID NO: 293250 - DNA, 201 bp, Homo sapiens
gtggacaggtcaggcccttggccttttcgcggtagcttctgcctgccaccctatggcacaggagccctgcagggctgtgtgcctgtagggctgaggctccrctcagcgctgccagcacccaggagtctgggcttgctgcctgggctgtgctgcaccccgtagcctacatccaggtgcggcgatcagtctgctgctgctcag

SEQ ID NO: 293251 - DNA, 201 bp, Homo sapiens
cccaagcacagccatgcccacacacagtgtactgattgtgagtcctagtttcattgactcctgtaagcctgcacctaccctgatgctttttttttttttttaccagaagtcccatcccacagcactgttgtgcaagtacctccagaattcctcaagtgcaggagactgactcctgttagcctgactcacaagaggctgagc

SEQ ID NO: 293252 - DNA, 201 bp, Homo sapiens
tggggaagggagccctagagggcaagggcggcagagagggcaggcggctttctgtccgggagctgggtggacaaaggccatgcatcgaggcactgaggctrgagtgtgctgtccctcaggattctccagtccttaccaggaaacgtcactgcctccccatgtaacacctcagcttctggccgggttctccagcatgggagg

SEQ ID NO: 293253 - DNA, 201 bp, Homo sapiens
atgggtgccttctgagagacagccccatgggcttcttctctccaggtggcagagagagtcccacacatcacagcgtttgttcttagaccgttttttgcccygtctcagctgcctatgaactcacctttgattccttatgcagcagcctactgttttcctcttcctctccccaccggggataggctctctgagtggccagtg

SEQ ID NO: 293254 - DNA, 201 bp, Homo sapiens
tctccagagttctgacagtatgtagaggtttgcagctcagagtacagactctggcacctgagtccctggcctaaatgtaggccttgccacctgccagccaygtggggtggggagaccaggccggaaggatgagtgcctgcaggagttcagtgctgagggacagaggcggctcagggacgggggaaggtggggaggccctag

SEQ ID NO: 293255 - DNA, 201 bp, Homo sapiens
cgaggaaagtggccagcacccacctgctatcccggcccagctttgtttcccgggaaaccaaggggagtggctggcacctgtctgctgtcccagcccagctytattccctgggaagctgaggggagatgtcgtcttcaggctgcaggtgcaggttggctgatgaccgagtgaagggtgcagtgctgtgtcggtaacgaaggt

SEQ ID NO: 293256 - DNA, 201 bp, Homo sapiens
tttgtcttgattactttttaaacaaatttataaaacagtacatgttcattgtaaagaaaaacatgatagaaacccacaggaaatgccgtttgcccgtaatsccactccccagtggtggcaggttgttagtatttgctttaaaccttccagatctatttctgtgcatagccagatggacagatagacacaaacataatttgt

SEQ ID NO: 293257 - DNA, 201 bp, Homo sapiens
ggcggggagcaccgctggggctggggaagggagccctagagggcaagggcggcagagagggcaggcggctttctgtccgggagctgggtggacaaaggccrtgcatcgaggcactgaggctagagtgtgctgtccctcaggattctccagtccttaccaggaaacgtcactgcctccccatgtaacacctcagcttctggc

SEQ ID NO: 293258 - DNA, 201 bp, Homo sapiens
tgcttggggttggaggtgtgccctgagcagtgggcggggttggggcgtggcctgaagctgtgcagttttccggagctccctgagctcctcctgtgatgcayggcccagcaccccactgcccaggtgcctgggctcggctcctcaattttgtctatgagttcccttcagcacattctttgcactggtgtgctctcaaatatt

SEQ ID NO: 293259 - DNA, 201 bp, Homo sapiens
tcagtcagtgccttcttctgagaaactccctgtgcgcccttcctagtctaactccagacccccgccctctctcctgagcttttttttttttttttttttttgccacttcccgcatccctctctcccctcttgttctcaactccagcctttgctctgctcacattcatcccttttctggctcccagatgtgatggggcagct

SEQ ID NO: 293260 - DNA, 201 bp, Homo sapiens
ccccttctggggactgcccaaggcctcctgaggcttccagagctccataacctgcttccttgtccctcccctacatgtgcccccacccccaggaggttccrctgaggccaggggattgggagagggtctctcagccagaaaagcaaagcaaatgcaagcaagggagggaggagtgagaaagcaaagaccctggaagaaaca

SEQ ID NO: 293261 - DNA, 201 bp, Homo sapiens
agaactacagggaagagaagggaggcttgcacaaggacgtggtcccacttggaggccacagcccctgcacaggtgcagacaggcgtgtcccagccctgcastccgagcctgactgcatggtggaattccccgggaaacagcgagaagctgcttggggttggaggtgtgccctgagcagtgggcggggttggggcgtggcct

SEQ ID NO: 293262 - DNA, 201 bp, Homo sapiens
agacgcggctgccgaaagcctcaggcaggcaggttgcagtggccttggggcccctgaaacagccccccaggaagagaggctgacccccgctatgacccccrctacctccaccgccattcatctgtgcataggggaaggacgtttgagattttcttacagagttcttgaagtttttctttaagtttgaaatttaaagctggg

SEQ ID NO: 293263 - DNA, 201 bp, Homo sapiens
gtgaccttggacaaatttccatttctttgtctgtagagaggggctggcaacactgtgcagggtcgcacaaggccccacccatgccagggcccaccagtagrgacctgctatgtccactccccacaccaggaatcccaccatcctacagatagcgcacagggtggacaggaacatccacacccacccctccaacagtcctgg

SEQ ID NO: 293264 - DNA, 201 bp, Homo sapiens
aaaagtgaacgcggaaatggtcccagactgtcacctggtgttgaagaagtttggaatcagccaagatcacattccccataggatacaatctgaaaatactrtttggtagagaaagagtgttgcccccagaccttttcatgagattgtgagacgaggggtagaactacagggaagagaagggaggcttgcacaaggacgtgg

SEQ ID NO: 293265 - DNA, 201 bp, Homo sapiens
cctcgccggaggcccacggtgtggagatgatccctcctccaggccgaggggcgtgcggcagcgggggacacttcagaggcttcatcctcgtgaaagggagraaaaagacctgggaatgttgtcactaaaggacactaaagagatgcggcccctggcagcacacgccatccgcagccagccggggaagggccatccaagagc

SEQ ID NO: 293266 - DNA, 201 bp, Homo sapiens
ttcatggtgaacactcgtccacaggtcctgtccgacaggcccagggtgggggcctcttcctgtggtcgggccttgtaagttgatgaagatctgaaattcaktgtgctattattaggctgataagaaatgggaaactatttacattaataatttttagggctagtttctcatagatcagcctttactttgagaaaaagaggc

SEQ ID NO: 293267 - DNA, 201 bp, Homo sapiens
ggtgcatttgttcttcctgaattgatgaaaggggctctcagtgtccccaaggccttcgggctgcacagagctgcttcaattgtttgcccgcgtccggctcrcctcccaaagccagctctgcagtgcagccccagcccacagcccagccagtgagactcagaactgaatgtcaaaggagagagagagagagaagcaggcttt

SEQ ID NO: 293268 - DNA, 201 bp, Homo sapiens
agcaggggagtgaccaggtccactggcccgtttgaaagcgtgccctcactgctacatgaagaagattgcaaagcgttgacgctggaggtgggggcctcccrggagccatgctgtcatccaggcaggagaggccaggtggggcaaagcaggaaaggcaggaggtcgaggctggagagaagcagcaccgtccagaggcgtttc

SEQ ID NO: 293269 - DNA, 201 bp, Homo sapiens
taccattagcccctcctgcctgcctggtcccaatttccttctctcaagccccacagttccagcccagaagaggagtcagctcagccctggcgcagtggtcraaggctttgattgcgtggtgtccggtccagtggggctgagtcggggaaggcccctgggagatggcagccggctgtggcccaaatccatcctagtgtgtga

SEQ ID NO: 293270 - DNA, 201 bp, Homo sapiens
cggctgacccctgggagcaagcggacactgagtgcccaccaacccgtgccccgtagttcaggctgctggagaggccgcctcgcgtgagtgtggagcagcaygcagtgctctaagggtgttgaaatgcaagggctcgggggatttcaggtgtcagtcttccttgcacacctcagtttccttctggaaacagtcggatgcggt

SEQ ID NO: 293271 - DNA, 201 bp, Homo sapiens
gtatgtgaattatatcccagtaaagctgttacaaggaagaaagaggatgagttgatgggaggggaacgtggagaaacctttggcagatttggcgacagacrgaatcatttctccgtttattgtctctcctgtgaaagtgcccccctcactccaccccacccccgttgcttccctggatttcaggaccggtcctgggttgtc

SEQ ID NO: 293272 - DNA, 201 bp, Homo sapiens
agtgttgaaacacatgctttttttggtcaaccactgagaaacctgtcagagcaaatggggacaatgttgctagattccttagttgaacttgtttctccccrgctttgtgaaagtctaaccggaaacagtcgcatgtatttacagcgtacggcgtgatgatttgatacttgtatgcgttgtgaaatgatcgccacaagggac

SEQ ID NO: 293273 - DNA, 201 bp, Homo sapiens
ccctagagaagggacctgcctctgtgtcctctatggggttgctgccctccatcacttttatccacttcagaatggcccctgggctgctaaagaaaggcagscacaccacttcggtcattgctgggatggggcagccccacagggtcccctctaaggtcctagccttcctcccccacccctccccctatttcccttccccgc

SEQ ID NO: 293274 - DNA, 201 bp, Homo sapiens
gggggctagtcactgtgtccacagcaaacactgagtagggggtccctcccttggtacactgaaggcccagctctcaccctctagtcccaggatggagaggygcctctcgtggacagtaggccagccctaggggaaggttctctgggcactgagccagggggttcctgatgatgccacctccagtcaccctccatgaagcct

SEQ ID NO: 293275 - DNA, 201 bp, Homo sapiens
accttccagtcctgagttggctgcttcttctttcctaatcttagaaaaacctgtaaagggcacttatttttcttcatttaatgtaaaaaaaaaaaaaaaaaacaacagagactgcattgacatggttagattcccaggacactcagtcctttcgggagggactaaatggctgcggtcaccattgcaaaagtgtcttggact

SEQ ID NO: 293276 - DNA, 201 bp, Homo sapiens
caccttccagtcctgagttggctgcttcttctttcctaatcttagaaaaacctgtaaagggcacttatttttcttcatttaatgtaaaaaaaaaaaaaaaaaacaacagagactgcattgacatggttagattcccaggacactcagtcctttcgggagggactaaatggctgcggtcaccattgcaaaagtgtcttggac

SEQ ID NO: 293277 - DNA, 201 bp, Homo sapiens
agcagcagcttctgcagaacgtgtgagtgtcctctcgcctgtccccacagtgcatccgcggacgcaaggccaccctggaggagctacagacggtgcactcrgaagcccacaccctcctgtatggcacgaaccccctcaaccggcagaaactggacagtaagaaacttctaggtatttcaggaccttcctttcctcccatat

SEQ ID NO: 293278 - DNA, 201 bp, Homo sapiens
tcttgcagaatagcttccctgtgaatgcgattctagcttgacagtggctttctcttagttctcagaggctcactggtcctggcttctgtgactgcatttcmtttgttggataacgttgcccatattgcggggtcttctgaactctgtctcagtggtctgctgtttcgctttgaagttgtcttgattccattctgctttttc

SEQ ID NO: 293279 - DNA, 201 bp, Homo sapiens
agtctctgggtccaagcagtgttcatacactgtgattggcacctgtcatgaagtcctcagttaatctctaggtttcttcttcctaccttttttttttttttcagtccttgagatttatctgttgaagacactgtattgtttgtcccacagagttttccttcctaggttctaaattttacttgattttagccctgtcatgtc

SEQ ID NO: 293280 - DNA, 201 bp, Homo sapiens
gttgaaacgtggctgtcgctgcctttaaaatgatttttgtgaaaagattttaaagtattaattcaatttagttcatgattatagggttaattctgttttctatttattttttgtcaactttggaatgtttttctagaaatgtgtctacttcatgtaagttttaaaacttactggcctcaagttgttcctttgtattttttt

SEQ ID NO: 293281 - DNA, 201 bp, Homo sapiens
tggtgtgctcctggcggtgagctgggctatgcaggaggtgaggtcgctcctgtgaggtctctggatccatcgaggtggtccagcggggaggcgctggcagytggggggcagggcccagcccctcctgcacctgctgctctgctcgttttaaggtttgacaggaaagtggggattttaacactgaaagcacctcaagagatc

SEQ ID NO: 293282 - DNA, 201 bp, Homo sapiens
aggataagtgtttgtcccagctgcatttgtggaacaccctgttttttccacagtaatctgcaaaggacctgcatctaccctctttgggaccacctcaactrcttctcagttcttcttccatgtagttttatattcagcttttaagatcatgaactaccttgcactggacctgtagttccgtttggagagaatcactatctt

SEQ ID NO: 293283 - DNA, 201 bp, Homo sapiens
aaggctgcacctgcagtcaaggaggccacgggagaagaagtggcctggggcagcctcagggcgctgagggacgtgctgagagacgggagatggggggcttycagggaggaggggtggcaaacagagtggctggggctgggaggactgacttttcctggaactccctgggtgagctgggtgttcaaggtgagtgtcttggcc

SEQ ID NO: 293284 - DNA, 201 bp, Homo sapiens
cattttgtctttcacatttgagtcttaatccacatggaatccattttggcctgtggtgtgaatagggacgaatcccatctttttgttccccgtagaatagyaggataagtgtttgtcccagctgcatttgtggaacaccctgttttttccacagtaatctgcaaaggacctgcatctaccctctttgggaccacctcaact

SEQ ID NO: 293285 - DNA, 201 bp, Homo sapiens
cagtggggctgctgggaagcaggggtcacggtgagcacagggcagcccccagagggtggccacggcagcatggaagaaggtggggagctggcgccccctcrcccaggagtcagtggacagtggacggggggccgaggccagcaggaatagaagccgggcagtggcctggacctgaggggaggacggagcagcaggcccaag

SEQ ID NO: 293286 - DNA, 201 bp, Homo sapiens
ttgctgggtcacgaaagcgagattcggctgtctatgagaaagcccactgttctagaaggccccgtctcattcatgctgctgctgctcccacgcccccgctscctgcctctccacccgtagttgggtcggtgggcgtaaagtggggtctccaggggtctgatttgcctttccgccctcactaacatggtccagcgtttgatc

SEQ ID NO: 293287 - DNA, 201 bp, Homo sapiens
acagcagtgacccactgggacctgagagaggaggtggcttcctgagaatcgctggcaaccggcacctgggagcccgctttgggggagaccccgatctgtgyccccagagccagtccactgcctggactggttgtggagaaactccattgtcctactggctggggcagggcgtggggttgcagggcagaaggagcaagggac

SEQ ID NO: 293288 - DNA, 201 bp, Homo sapiens
tatcttcctggccaggtggcagacagggacctgatcacttcctggtggtcctggatgccactgcctgttgtcctgttctcttagcccagagaggaccctcycagctcctccctggagtccaggcctggctcacacagcctcaccccttggcatgtcagctctcactgcccctgtttactgcccatgctggcgctcctgccc

SEQ ID NO: 293289 - DNA, 201 bp, Homo sapiens
agacacaccgtctggatttgggtaactcgaccagggacacacaaacttgcaaggaggagtgagaccggcgtccatgggaggcagcacgtgacagcagtgasccactgggacctgagagaggaggtggcttcctgagaatcgctggcaaccggcacctgggagcccgctttgggggagaccccgatctgtgcccccagagcc

SEQ ID NO: 293290 - DNA, 201 bp, Homo sapiens
cactaaagagatgcggcccctggcagcacacgccatccgcagccagccggggaagggccatccaagagcccttggaacagtggggaggtctcctgatgcasagcacggtagacgcggctgccgaaagcctcaggcaggcaggttgcagtggccttggggcccctgaaacagccccccaggaagagaggctgacccccgcta

SEQ ID NO: 293291 - DNA, 201 bp, Homo sapiens
gcacaggtggcccacgtcctccactctggcagccgctgtgcttgccagtggcacataagctgcactcacggcagacacaccgtctggatttgggtaactcraccagggacacacaaacttgcaaggaggagtgagaccggcgtccatgggaggcagcacgtgacagcagtgacccactgggacctgagagaggaggtggct

SEQ ID NO: 293292 - DNA, 201 bp, Homo sapiens
acttcagaggcttcatcctcgtgaaagggagaaaaaagacctgggaatgttgtcactaaaggacactaaagagatgcggcccctggcagcacacgccatcygcagccagccggggaagggccatccaagagcccttggaacagtggggaggtctcctgatgcacagcacggtagacgcggctgccgaaagcctcaggcagg

SEQ ID NO: 293293 - DNA, 201 bp, Homo sapiens
ccttggttctttgaggaagcgctcaggaggccacagcgtcctgaaggtgcatagccgtccccagcccttccctccctctgtggccccgctgccctgcattrctgctgtagggcagagccacacttcaccccctgctatgctttctcccacgccaggtgccgtggccagcacagaagtgaagatgaagttacaagaatttgt

SEQ ID NO: 293294 - DNA, 201 bp, Homo sapiens
cttagtgccaaggttttttggagactttttcttttatttttttttttctctgggaagatgtgtgagaacatttcatttttgttcttgaatggaatcttccrcataaatactacatatacatgtacatatgtgagtatgtgtgaatatctatgtgtgtgtgtgtatatataaacacgtgcgtttttatattcattgatgtgg

SEQ ID NO: 293295 - DNA, 201 bp, Homo sapiens
ctcaggcggatgccgagttccaaagagtcccccaccagggcctccaagagctggtgtggttacttcctttgtcatttcacccggtcagatgcccttgagcrggtcagggtcatttttatcctgagcagcattgtttagtttagtgtttaccccactcaggttaccagaggaacagatattcacagagcaggacagagggtt

SEQ ID NO: 293296 - DNA, 201 bp, Homo sapiens
agcaccagctcacggcccccagcctcagctggaaggggcccagttagcgagccagctctggggcaccagggcagaacgcctgggctggcgggcacagggcrcagttgtctccatcacttactcaatagccctctctccctcctctcttcttcctcttcccctctgctgtttcttcctccaattatcttcagactggtatct

SEQ ID NO: 293297 - DNA, 201 bp, Homo sapiens
agaagtgggttttgtgttagctaacaataagtctttcggatgattaaatctgcattttaaatagaatgcaatgatgtaaaatcttgatgggaagaaaacckctcattaaaacccctcccggccttggttctttgaggaagcgctcaggaggccacagcgtcctgaaggtgcatagccgtccccagcccttccctccctctg

SEQ ID NO: 293298 - DNA, 201 bp, Homo sapiens
cagaagctcttgttaatgatctcagggatccaaattggaaaccaccctgccagcaaatagcattgctatgcagaggtcagggcgctgcttttcaaggatamccaggggtagggtgtccctgtgtatggcggccctgggttttgcaccctggaggcagcagagtgaaattctgagtgggcgagataggctgagagagagtga

SEQ ID NO: 293299 - DNA, 201 bp, Homo sapiens
acctgccacacaggactcctgacgtttcctgtgtcgacctgattttcatagaaaattgcctccaaattatggttcctatagtcccaaagcaccagctcacrgcccccagcctcagctggaaggggcccagttagcgagccagctctggggcaccagggcagaacgcctgggctggcgggcacagggcgcagttgtctccat

SEQ ID NO: 293300 - DNA, 201 bp, Homo sapiens
gctttgcggtagcaagaatgcaaccaccacgctgccactgcctaattcagagtgttcttttatgtaagaatattaaaacttccttcagaagtgggttttgygttagctaacaataagtctttcggatgattaaatctgcattttaaatagaatgcaatgatgtaaaatcttgatgggaagaaaacctctcattaaaacccc

SEQ ID NO: 293301 - DNA, 201 bp, Homo sapiens
cgatggcatgctactgtttaggcctcatttccccaaaaaacagcgagtcccaggaagggcttgagcacagctggccgtggttcatgtcctataattggcaygcgaggctgtggtcctcagccctggcctggcctcagctccatccccagaagctcaaacagatgctgattggtccaagcgaatccagagcacccacattgt

SEQ ID NO: 293302 - DNA, 201 bp, Homo sapiens
tcctccactcgctggcagggattagccagatcttttcagaaaggggttttgacaatatgcataaggactttttaaaatgtttacgccatctttgtgcatamaatcagtgctcgaagagaccttaaaacgatgtcaaccctaaggacaattgtttttctcacaactcaggctgtctttggaaatatgtggaggctcccagaa

SEQ ID NO: 293303 - DNA, 201 bp, Homo sapiens
gctgagccagcgctggaagcccagaaccgactcttgtggtcagtttgtgttagcgaacttttacaaatgtgcactgtctgggggagtggttacatttagaraaatacaatttagaggaaaatgggaacgtccttatgaaattacatagcaacagcaatgtgaaagtgtcacttcagaaatgagggcacaccggccggacac

SEQ ID NO: 293304 - DNA, 201 bp, Homo sapiens
gtgttacccactcataaatgttcactgcagcgtggtttctaacaaccaaaactgcctcccagtcgggaagtggttttgtaaacatgcttcactcacctcarggtgtgtttttgaccattacaaacgctatctgaatattatgcaacactaggaagatacttaaggtgctgtaagaaggatagaagtactgtgtggttagat

SEQ ID NO: 293305 - DNA, 201 bp, Homo sapiens
tgagcagggagggaagcaaggagtgaagttgcttcagcttggccctagtgacgtgtcacggttggccccatctagtggtggacacgcagaaggacaagacygagcagacccccatcctgaaggctcacccgcccctcttgagggtacatccccatccagaggaccacccattcccaaccaccaccagggtacacccctcac

SEQ ID NO: 293306 - DNA, 201 bp, Homo sapiens
tctcgatgaacgcatgcagaaggaaaaaatgtacttcactaggttgcattgtaaatcaagatacagatgccaattaaagcaagatcatctatcaaaatggrttcttttaatcaaaacatacagggttggtgaagtgggcatcctccactcgctggcagggattagccagatcttttcagaaaggggttttgacaatatgca

SEQ ID NO: 293307 - DNA, 201 bp, Homo sapiens
ggtgcctccttctctctgcagttctgcctgcccgccctgtcccacggcgatattgcgtgcattctctgctgctacatcaatgggttctttcctcgctggcygctggacattgcatcaggcccacaaagaaaccgccctccacactggtgccaggtgcacgcctgtcccctctgtaaacccggcccctaagagttaaagcgt

SEQ ID NO: 293308 - DNA, 201 bp, Homo sapiens
gctgcgctgccacaaaggggtgctctccagcgactatgatcctgagcgcctctgcatggggacaggagcaagctgaggatgtgggtactgcagcaagaacrgggggctagtcactgtgtccacagcaaacactgagtagggggtccctcccttggtacactgaaggcccagctctcaccctctagtcccaggatggagagg

SEQ ID NO: 293309 - DNA, 201 bp, Homo sapiens
cacgctctggaggcctcactgactgacacagctggggcgatgcatgggcgagcaagaaagtgtgcaacgtggacaccatcctcacatccctgggcccagcytcacatccctgtcagtctttctctgattttagagcaacacagctatgaagataggggtgtattatctagaagagcattagttacgagacatcgccattaa

SEQ ID NO: 293310 - DNA, 201 bp, Homo sapiens
tcacagagcaggacagagggttcgttagatccttttgcccacaaaaccatggaaaaatgttaaacgacctaaaccaacaatttatatatatctcgatgaamgcatgcagaaggaaaaaatgtacttcactaggttgcattgtaaatcaagatacagatgccaattaaagcaagatcatctatcaaaatggattcttttaat

SEQ ID NO: 293311 - DNA, 201 bp, Homo sapiens
gtgtgacacacgtctccgtggcggtattcttggctctgttctggactctgaaagccgataacctctcccgggtgggtttggggatttctttgactccggtygctgcctttagatccctagtgcttcccaaggcgggcctcgcgccggaggtttgggttccagatgcagatgagttggggaccacggtgggctgaaaggtgt

SEQ ID NO: 293312 - DNA, 201 bp, Homo sapiens
ggtatccctggaggtcccgtagcccttgcagcaggcatgtagccccgcctggcagcaggaacagcaggctgcctcaggcggatgccgagttccaaagagtmccccaccagggcctccaagagctggtgtggttacttcctttgtcatttcacccggtcagatgcccttgagcgggtcagggtcatttttatcctgagcagc

SEQ ID NO: 293313 - DNA, 201 bp, Homo sapiens
agcagggatagagcttcacttctgctcgccctgctggacgcttcttcgcggagggcacgcgtgtgcggtctggcctgggaccatgtgaccagggctgggcrggtgtgacctgccctgacggtgagggccgccctctcctggtgtctggagggcgggtgcgcggtggggcgggctctgcatggtgtgctcctggcggtgagc

SEQ ID NO: 293314 - DNA, 201 bp, Homo sapiens
taccagttgtgtgatgtgcggatgtgagtgagagtaattgtgtgcggtgcgggtgtgattgcagcagggatagagcttcacttctgctcgccctgctggaygcttcttcgcggagggcacgcgtgtgcggtctggcctgggaccatgtgaccagggctgggcgggtgtgacctgccctgacggtgagggccgccctctcct

SEQ ID NO: 293315 - DNA, 201 bp, Homo sapiens
cctggcctttggtcaggaatgaaaccaaagcccaagccacacagagcaggccgaggggtcgggcaggcccccagtgctggctttggaagaccatcgactcyggagcagaagttctgaggcctcagggatgcttgggtctctacggcaggttaggacccaggccctctcattgctcccaaatccctgtgttgctgaccacac

SEQ ID NO: 293316 - DNA, 201 bp, Homo sapiens
tcggagtcagaggaggtatgcagacagagtgtcgacagggccatgcaggtgctggtgttgaggagagaagggaccaggagccaggggacatggcagcctcyggaagctagagaaggccaggagcagattctcccctggagcctgcagaagaagcacagccctgctggctttctgactttcgctccgtaaaccccatgtcag

SEQ ID NO: 293317 - DNA, 201 bp, Homo sapiens
catttcatttttgttcttgaatggaatcttccgcataaatactacatatacatgtacatatgtgagtatgtgtgaatatctatgtgtgtgtgtgtatatawaaacacgtgcgtttttatattcattgatgtggaaagtgctcacagtgattactaggggaaaagcatgcataatatggccctaattaaaatgtaaaagcta

SEQ ID NO: 293318 - DNA, 201 bp, Homo sapiens
cgtcgccgctgcgagcgcccggggggtcgcgggagggcggggggctgcccgggacccgctcggctcagcccgcagggcgccagcaggccgagacggggccsggtcccgctcgggggtgggatccgcgtttgccggcgttgcgaaaacacaccacggaatcataagcaaattatctcgtatttacattgagcgttgaattat

SEQ ID NO: 293319 - DNA, 201 bp, Homo sapiens
ggcacacgttgcaggaggtgtcctccgtgccaggcctgtgcccggcagactcagcctcacagagacctgcactcctagtccttcatgcgttcactcactcrctcgctcacgccttcatccactcgccgagggcaccttctgtactggatgccctgtaggtacagacggggtcacagaccatggagccagtagggctgtgag

SEQ ID NO: 293320 - DNA, 201 bp, Homo sapiens
gttctgtctgttatttctgggggtcatgcttgtctttcatggctgcgcttctgtatgagaacttaaagcacatttcaccatttttttttttttttttttttggtatggggtaaggcctggttctatttatagtttccaggaagtacatttgtgcacttcttgaaagccaacttaccaactgcatgccaggtttttattttc

SEQ ID NO: 293321 - DNA, 201 bp, Homo sapiens
attttccaggaatgctttgtccataacgtgattgtagcagcatctcagacggatggttctgtctgttatttctgggggtcatgcttgtctttcatggctgygcttctgtatgagaacttaaagcacatttcaccatttttttttttttttttttttggtatggggtaaggcctggttctatttatagtttccaggaagtac

SEQ ID NO: 293322 - DNA, 201 bp, Homo sapiens
gatttcactttaagcagtcgtgaactgtgcgagcactgtggtttacaattatactttgcatcgaaaggaaaccatttcttcattgtaacgaagctgagcgkgttcttagctcggcctcactttgtctctggcattgattaaaagtctgctattgaaagaaaaagaaagcgaacagtttttgtttgttttttttgccgtgtg

SEQ ID NO: 293323 - DNA, 201 bp, Homo sapiens
gcttcagggggctgtgaggacgaaaggagatcacaaagcaaaaatactttaaattcgtgctcagtcctgaaacattagttttttgttattgtttctattcrattgcttttgcattggaattgtagagtcttagaaagattttccaggaatgctttgtccataacgtgattgtagcagcatctcagacggatggttctgtct

SEQ ID NO: 293324 - DNA, 201 bp, Homo sapiens
agaatagtaagtttgttagatgtagtcactttgccaagatgtcctaagcaagtaattctaaaggtagtcagtgttacccactcataaatgttcactgcagygtggtttctaacaaccaaaactgcctcccagtcgggaagtggttttgtaaacatgcttcactcacctcaaggtgtgtttttgaccattacaaacgctatc

SEQ ID NO: 293325 - DNA, 201 bp, Homo sapiens
tggtttcagggaggtggtggtgttccaggaggtgtggccagttttgaatccaggtgacaatgcttactggctgcatctcccgtctgtgatacccaggtccscgctgggacctgcttcagggggctgtgaggacgaaaggagatcacaaagcaaaaatactttaaattcgtgctcagtcctgaaacattagttttttgttat

SEQ ID NO: 293326 - DNA, 201 bp, Homo sapiens
cacagtgatgcctgctggcttttggatttgggcaaatggtgatttgaggaccagcaggaggagcagctgcccctgctgcaggtggatgggtggttcagggsgtcagcgtgtagagaagtttcgtttttctttttttcttttgagacagggtctaaactcgcattgcgcagggtggagtgcagtggcacagtcttggttcac

SEQ ID NO: 293327 - DNA, 201 bp, Homo sapiens
taacttgtgctggtgtgagcaggctggagagatgggctgcagtggtttcagggaggtggtggtgttccaggaggtgtggccagttttgaatccaggtgacratgcttactggctgcatctcccgtctgtgatacccaggtccccgctgggacctgcttcagggggctgtgaggacgaaaggagatcacaaagcaaaaatac

SEQ ID NO: 293328 - DNA, 201 bp, Homo sapiens
aggcacagcttgactcgggcaatgacatgattttctcagaccgacagagagccctgagcctgaagcctcatgcatcacggtggcccttcccggactcatgytggtggtcgtgtagttaatgtctttgtgtttccctggcttggctagtgcaggccccaccacagcctgggtagaccctgtttccaggcgtctcattgctga

SEQ ID NO: 293329 - DNA, 201 bp, Homo sapiens
gctgcgtaccgtgtgttcattggcatttaatgcccctggggacatcacacagtagttactggttcaggaactgaggctgggaggcgtaagtcactttttawcaagctgcccaggtgatttttctggacagaagtctgaaccagccccctgccttctgcatttccacctgcctgctggattattccacccccagtgacccgc

SEQ ID NO: 293330 - DNA, 201 bp, Homo sapiens
gagcagccttgctggggtcttgctgggtttagtctgtctggatgtgtcctttgtgtttgcatatcacgtagtatttcttaaatttagaaatagcccctgcraagggacttgagaagcactaagcagcatggctctcactgggaggcttggactccactaaacctgatgacacacccagctgccctgcgagccctggcatca

SEQ ID NO: 293331 - DNA, 201 bp, Homo sapiens
gcatccctcctgtccccccaccgccaccctacctggggcagtgctcaccgcagtcacaacttaggtgatgagacatcttcagcagcatgagctgggggacrtcacaggcacagcttgactcgggcaatgacatgattttctcagaccgacagagagccctgagcctgaagcctcatgcatcacggtggcccttcccggact

SEQ ID NO: 293332 - DNA, 201 bp, Homo sapiens
gttactggctccgggatctttgctgggcagagagtgtgagcgcacagcctccacagccagcagcaaggtcctgctcaaagtgggactcgtggttgctcctmattacagcaatgatgaggacactgatggccacaggtccccttaccaaggccacccatctgtcactcagctgcgtaccgtgtgttcattggcatttaatgc

SEQ ID NO: 293333 - DNA, 201 bp, Homo sapiens
ctgacttccttatttcctccgtgaagtagttcaatcccacgtaatacacacgtcaacaattgaaaaattctgaaatgccttcttttttttattttttttttgagacagagtctcgtttgtcgcccaggctgaagtgcagtggcattatctgggctcactgcaaccttgcctcccaggttcaagcaattcttctgcctcagc

SEQ ID NO: 293334 - DNA, 201 bp, Homo sapiens
cagtaaagttaagctgatttaacatactcattggcaaatttgccttctccttttgaaattcgccttctgtgttctctgctcacttatcttccccaccgccyggcctttccttttattcctagttgtggaggcagtttgtatatttacgaggttaactctctggtttatgtctgggtctgtttttccaaagttagcagcctg

SEQ ID NO: 293335 - DNA, 201 bp, Homo sapiens
cagagacccctatttcatggtactcatgttaccctgggaggaagagaggaaactagtaaaggcaatgagtaaacagtagagcagggaaggcagagcagggytcgggagtggaggggctgcgattttacacccgctggtgagggcaggcctccttagaaggtgagcagacatttgcaggccgaagacctggtcaggagaaga

SEQ ID NO: 293336 - DNA, 201 bp, Homo sapiens
tgcctgagagccctcgccggaggcccacggtgtggagatgatccctcctccaggccgaggggcgtgcggcagcgggggacacttcagaggcttcatcctcrtgaaagggagaaaaaagacctgggaatgttgtcactaaaggacactaaagagatgcggcccctggcagcacacgccatccgcagccagccggggaagggc

SEQ ID NO: 293337 - DNA, 201 bp, Homo sapiens
ttgcttttccatcttcctccggaagacaaggtttgcctttaggtgtggcatccgggttggccccagggccccgtgggggctgcacctcggctcctggcccrgcgtctgtgtcccatccccaggctgcaggaaatgaaaggttgaaaaatcggaagataatttatggtcaggtgaggtagagggagcagctctgtaggttct

SEQ ID NO: 293338 - DNA, 201 bp, Homo sapiens
gggggaaaacaacgctaaggaaaatgtatttcaggttcccattgctttccgaggagagacctttccagcaactacgtagcctttgcgtcccctgaaagcarctttgtgtgactgacttccttatttcctccgtgaagtagttcaatcccacgtaatacacacgtcaacaattgaaaaattctgaaatgccttctttttttt

SEQ ID NO: 293339 - DNA, 201 bp, Homo sapiens
tgctggccaggcctatgctgggcatgggtggggtgtgaaccccagtcatgtctgccccccactgcatggggcatgaacgccagtcatgcccagcacccagycctgcatagagggagccaggcaggacccaggcttgtggccaagtcaccctttgccaccgaatggtgtttgcagaagcagggagaggacgtgggtcataaa

SEQ ID NO: 293340 - DNA, 201 bp, Homo sapiens
caggctccacccctccatccaggtgtttctcatccccccctggggtgggggcaccctgcaggtggtgggagtccagctatgctttactctcccgcagaccracttctgccttcgtggatctgctcttgtgggtgtgttctctgttttattaattcctgttttaatagctgttctcctttctctgcatttattcggatatgc

SEQ ID NO: 293341 - DNA, 201 bp, Homo sapiens
ctggggcagggcgtggggttgcagggcagaaggagcaagggacaggagtgtggatcgtggttcagatggtgcccctggggcccaagctggaaagggcaggwtgaggagccaggggcagggtgggcctggggcctggcggaggatggagagctggagtgcagagcctgctggaccagggcagggccgccttgggtccccctg

SEQ ID NO: 293342 - DNA, 201 bp, Homo sapiens
tctgctcacaccagttctgaaaatgaagccctgttccaatggggcgtaggcttgtgtccccgtgtgaagctggtggcctgggaaattcctgggcccatgcrgaggatggcgggaggcagagccctggaccagaaggagcctgggagcgctgtgtagcccccactcacaccgctggctcgagtcgcttgttccttaccgtgt

SEQ ID NO: 293343 - DNA, 201 bp, Homo sapiens
gaaggaggttcttgtctgtgcaggctggaggagcagtggcgggccggcgcgggggacacgaagcaccgccagcatctaagcatttgaaaacacggtgcacrgcatctgtttattctcttgggttttttttaagtgaatttcttattgagtatctaataaatatcattacacttataaacatttacattacttttaatttta

SEQ ID NO: 293344 - DNA, 201 bp, Homo sapiens
gtcactggtggccaaaagtattatccaggaatgaatttttgcatcatgacatcatttctggttaaagggctttttatcttttttcttttattaccagcttygtgtgctttaaggctgtggactgtaaaatgtatccagagggcctgcggagcccctcagtggcatctggaagcctgtgccgccaggacgagggagatggct

SEQ ID NO: 293345 - DNA, 201 bp, Homo sapiens
ctaatgatattaatcatttattagcagttggtcagaatatccatagagccttatatgccaaatccatttctgagccatcagagtgagtcatgaaaaaattyagcaaataaccaaatgaatgaaaacccagcaccagaaccaaggataaaattaaaatgatggcttattaaccactgaaaggaggaacaatggcagagtttt

SEQ ID NO: 293346 - DNA, 201 bp, Homo sapiens
gccactgagcacagttcaggcccagccccaagtgcctccaggaggagcaggagccggcagccatagggacacagccgtccagcaccaggagccagggtcarctcaggagccagggtcagctgttgcccttgcactgggcacagggaagggcttctgccagtgctcagggcagaaagagcagaagctggaaaaaccctggct

SEQ ID NO: 293347 - DNA, 201 bp, Homo sapiens
cccaagccggcgtcttcccccatgaaggaggttcttgtctgtgcaggctggaggagcagtggcgggccggcgcgggggacacgaagcaccgccagcatctmagcatttgaaaacacggtgcacagcatctgtttattctcttgggttttttttaagtgaatttcttattgagtatctaataaatatcattacacttataaa

SEQ ID NO: 293348 - DNA, 201 bp, Homo sapiens
actgagtttgggtctactggaaagtgttgagggcgtcctcgtcccgcacaccgagaacctgcttcttgtcctgctctgctgcctccactcaaggacggccrtgtagggggacctgcagggcagtcccctccaacaactggccatctgggtcctcatcctcactgtcgctgtcaccagcatcattttgcggttggactactt

SEQ ID NO: 293349 - DNA, 201 bp, Homo sapiens
gggaagccgcttatgctctgtgtgccttgttttcccatctaggaagtggggatactaagcggtccgcccccgtgagcctgatgagggttaagtgggctgtrcactcatgtgcccctgcaggtgttggcatcattgttgtagtcattgccttgttcttaacctgccacctcccatgctctctcactcccccagccagcccct

SEQ ID NO: 293350 - DNA, 201 bp, Homo sapiens
ggaatgttcctgctcccctctagccccgtcacaggcggccgtcccggtggttttcactgaggatttgggtggtcagattttattattaataataaactgtrtacagttgggtacttggcaagcttgtgtcggctctgcagccctcagagtgtggtcttgtggtgaggacgcagggccgcaggcccctgtggtggacgccac

SEQ ID NO: 293351 - DNA, 201 bp, Homo sapiens
taggctgcatctgtccgctctgcgtttccgccctgagtgagctctgagcagcgggagggagggagccaaggggccctgtgcaggtgacagccagaggggargggctcgccatgacgaggagatcagttcaacaaaggactgtgtttgttttctgagctgagaagcaccccgaagccctgtgggttgtatgtttataggtta

SEQ ID NO: 293352 - DNA, 201 bp, Homo sapiens
cctggcagggagcctcggagccagtgtcacgtgtgcagcgtagtgcagccacacagccgcctctgtcccagctttctcctgctccatgaccctgggaagcygcttatgctctgtgtgccttgttttcccatctaggaagtggggatactaagcggtccgcccccgtgagcctgatgagggttaagtgggctgtgcactcat

SEQ ID NO: 293353 - DNA, 201 bp, Homo sapiens
tctttgcatgcagatccgggccctctcggtagtggacggctgtgctgtgggtctctgttcactccagggtgttctgccaaactgatcccaagtggaacccrgctggcagtgttcttgcttctgaagctgcctagtgcgttgcctgggttgaggaccaggagcgcagctgagccctctggcttcacgtgtgaggaatctgag

SEQ ID NO: 293354 - DNA, 201 bp, Homo sapiens
caggtgactgcagctcccacggctaagcggcaacccagggatcagaaccccaagctccggccagtgcccaggcctcccccaaagcatttcccacccttttytcaggagaaggctgagtcctgggaccaggacctccagtggtttggagacaaagccagtgtgggacctgctgcctgggcagtgactgtggaaatgctttgc

SEQ ID NO: 293355 - DNA, 201 bp, Homo sapiens
ctatgccgccacctccaaaaccctgcaagccccttctctcctgcacagcctccccaggttgccagcagctcatcctgcaaaccccctggcagggagcctckgagccagtgtcacgtgtgcagcgtagtgcagccacacagccgcctctgtcccagctttctcctgctccatgaccctgggaagccgcttatgctctgtgtg

SEQ ID NO: 293356 - DNA, 201 bp, Homo sapiens
ctgctcctgcacatggaacagtcctcacccatgtgcggggtggggggtgggcggacccctactccctgcttccgcacattgaacacgcagtttatgtgcgyagattcttctcacataatagcaaatgaaaaccttttactgtgtcaaagtcgacacccaattaaaaactaaatacatgcattttaaaagttgggggttgca

SEQ ID NO: 293357 - DNA, 201 bp, Homo sapiens
gcccagcttgctctggccttgctttacgcctgtgcccagcaagcccctccagtcctatgccgccacctccaaaaccctgcaagccccttctctcctgcacrgcctccccaggttgccagcagctcatcctgcaaaccccctggcagggagcctcggagccagtgtcacgtgtgcagcgtagtgcagccacacagccgcctc

SEQ ID NO: 293358 - DNA, 201 bp, Homo sapiens
tgtcacagaatggaaggttttagcagaaaaaggagtttgtaagcgacattcagaagatttgggcagcagtttcttcccccatagggtcctgtcttttgggrgtggggagtgctgggccaggctgctcgctggctgtttcacaggtggtggaatttaagagcagacttgggtcgagctgtgaccgttcaggtgatgcacgca

SEQ ID NO: 293359 - DNA, 201 bp, Homo sapiens
tgcccagcttgctctggccttgctttacgcctgtgcccagcaagcccctccagtcctatgccgccacctccaaaaccctgcaagccccttctctcctgcayagcctccccaggttgccagcagctcatcctgcaaaccccctggcagggagcctcggagccagtgtcacgtgtgcagcgtagtgcagccacacagccgcct

SEQ ID NO: 293360 - DNA, 201 bp, Homo sapiens
aggctccttctcagcagaaggtggctgctctgcagggcccctcgcctccctgctcctcaggggacccgcactcttccatgtccgtagggagacgcgcaccragctggagacacagatctgcgaggagtaacttgcctctctcaccagcactgccaggggcggatcagcgccagcaccttccagcatgcgctaaactgctgg

SEQ ID NO: 293361 - DNA, 201 bp, Homo sapiens
caggctccttctcagcagaaggtggctgctctgcagggcccctcgcctccctgctcctcaggggacccgcactcttccatgtccgtagggagacgcgcacygagctggagacacagatctgcgaggagtaacttgcctctctcaccagcactgccaggggcggatcagcgccagcaccttccagcatgcgctaaactgctg

SEQ ID NO: 293362 - DNA, 201 bp, Homo sapiens
gaaggacttactgttaaacagacggcatgctgagggcttacggccctcatggcgctgctctccaccgtgaccgagtgccctggctcctgtgccccccaccygctcctacagaaggaaagccagagcctcagatcccatggccgctgtcccagggtcgctcagcatatacattacagggcaggacacatgactgccctgagg

SEQ ID NO: 293363 - DNA, 201 bp, Homo sapiens
cttgggaagcgcaccctgcctgtcgagacctgccatgggatccctgcctggtgtgaggacaggccggggcttcagcctcccacagagggcacctggggccygcctctgctgcctgtttgcgtgggagcttaggcgagttgctgaatagctcagttttgttttctcatttcttagccggggatgataatgcctctctacaga

SEQ ID NO: 293364 - DNA, 201 bp, Homo sapiens
ggggctcctttctgtctgttttttacaccttgattttactctgcattattactgatcaagcagtttattttttaccccagcacactggagcctgggggagyggtggggagctttaagtaccagatgaagatgcacaattttaaaattttggcttatgtcgacagttttggttttcactttctctcaagttcactttgccgg

SEQ ID NO: 293365 - DNA, 201 bp, Homo sapiens
gggccacgtggagtctgtagggctactcgctgggctgtgctggcttctgtgagctgatgatatggacctggcctgggcatatgaatcactggtctgtgccrgcttctacgaactgatgatatggacctggcctgggcatatgaatcactgggctgtgctggcttctacgagctgatgatatggacctggcctgggcgcata

SEQ ID NO: 293366 - DNA, 201 bp, Homo sapiens
gatcctgacaacgtgattgtgttcactctgttatttttgaccagaaatgccctgtggctctgaaatgccaccctgtggctggcaggtgggaccgtgcctcyccacgcggcccaggacactgctgcctgccagccccacccgtgagcctgccggcctcactttccaactggttctttccctgtccgcagtgcctgaggcaga

SEQ ID NO: 293367 - DNA, 201 bp, Homo sapiens
tagacgccccctccttttggcgttcaggcccagctgaccagcgttaacatcaaaacagcgatctcacgactgataaaacagacacagcagtaagattcccrgttccaccctgactctgggatagcagcaggcgacagagagcaggccctgcaggaaataaaagtattttaccccagaatatattccttccacctattttga

SEQ ID NO: 293368 - DNA, 201 bp, Homo sapiens
gccatttacctcccttgtcatcaggttcccattggtctgagtcagagagagtgccgtgtctcctggcatttattgcatattcaggcatgggttggtgggcrtggtgggagtgtttgcagggtaattttaaataacgtagcagcgatgcccaggaacagtgggcagagaaagcatgcatgcatgtgcagcagtcctgtatga

SEQ ID NO: 293369 - DNA, 201 bp, Homo sapiens
gagctgattctgagttgggtttcaggccttcaaaggcctggtggatttctggccatcgttactcataaggcatatccctttgaggtcctacgcacaagctyatgaggtttattggggtcctttaattttcctcagtttttgtggccctatcaagggcctcttctgaaacccactgttgagtctagagaacaggctacccga

SEQ ID NO: 293370 - DNA, 201 bp, Homo sapiens
accccagtcaacttgattgtaatatattatcttttatgtagtgaaaacttggatttgctaacattttattttgtatgattgcaactgtgttcctgagggakattgccaaacagtttcctttctcataatgtcctcgtcaagttttggtgtcatgactgtgctggcctcagaatgagttaagcatcattcctctctcctttt

SEQ ID NO: 293371 - DNA, 201 bp, Homo sapiens
ggtgccatgttttctgtaggggctttgtattttttactcatttgtctacttgtttttgacaggtgctatttatcagatcatggaagtttcccttccattcyttgtttgctcggggtttcaatatgaatggatattgatttttgtcaggtgctgtttcagcatcttttgagatgattgtatgattttttggctttatgtggt

SEQ ID NO: 293372 - DNA, 201 bp, Homo sapiens
tcatccctcttttcctcccaggtgcagcttgctcgttggcatggggacctgcccaccgtgccctgcccaggctctgtgccaccagggggcccatgcatggytgcccagcttgctctggccttgctttacgcctgtgcccagcaagcccctccagtcctatgccgccacctccaaaaccctgcaagccccttctctcctgca

SEQ ID NO: 293373 - DNA, 201 bp, Homo sapiens
gcttattatatagaatgggctgagattgccaatatagtatcaaattgtggtcctgatggcaggaacatttgtctggttcccagtttactgttaggtgccaygttttctgtaggggctttgtattttttactcatttgtctacttgtttttgacaggtgctatttatcagatcatggaagtttcccttccattctttgtttg

SEQ ID NO: 293374 - DNA, 201 bp, Homo sapiens
atttagaggaaaatgggaacgtccttatgaaattacatagcaacagcaatgtgaaagtgtcacttcagaaatgagggcacaccggccggacacggtgactsacacctgtaatcccagcagtttgggaggccgaggcaggcggatcacgtgaggtcaggagttcaagaccagcctgactaacatggtgaaaccccgtctcta

SEQ ID NO: 293375 - DNA, 201 bp, Homo sapiens
gtcgaggtatacattttcctcaggtaacaggattccaggtaaggagagtagagggatttactcttgtagggctggcccatgagtcagaagagaagtccttrtgcacttcccccttccccaaagataactcctctcctgatgtttaacatggaagattaattttgcctgcttttgaaatgtatgtaaatggaacccttaata

SEQ ID NO: 293376 - DNA, 201 bp, Homo sapiens
ctgctctgctcttagcttactttagcagatagtggagtttcacgtggcagtccggtaaaccaaggcagtgtgaacatcccttccccacaatgagtgaaaaygcaggaggtgccgtagcgagaacagcgacagcattctgcgcattggtgagcccgactccccagcctcggtgcccaccgaagccccctctggctgcactgt

SEQ ID NO: 293377 - DNA, 201 bp, Homo sapiens
gcagtgaaaatccatgcctcactcccagagtcaggtagatggagtggaaacagaagtcacttcccctttctcaccttttgggagaggccaccggctcttgygatttgggtttctgtctggaccaagctgagccagcgctggaagcccagaaccgactcttgtggtcagtttgtgttagcgaacttttacaaatgtgcactg

SEQ ID NO: 293378 - DNA, 201 bp, Homo sapiens
tgggaagtgttcactagtgagcttgaacatttatcccgatttctttttaaacagttcttctgtgcatcttgttcttttctgcccaacgttttagtgggctkcctgtcatgttctcattaatggataacaaccatttatataaaatttgtatgtcataaatactgcagtttttcttttaccttctgccttttgttattaaga

SEQ ID NO: 293379 - DNA, 201 bp, Homo sapiens
ggccgtggccggaggtgcgcatgggatgcaggcggcgtgtgctgctgttgattttctctgctctgctcttagcttactttagcagatagtggagtttcacktggcagtccggtaaaccaaggcagtgtgaacatcccttccccacaatgagtgaaaatgcaggaggtgccgtagcgagaacagcgacagcattctgcgcat

SEQ ID NO: 293380 - DNA, 201 bp, Homo sapiens
aggtgagcacaaatgggcctgggtgcagccaggctctgaggctgcccacgctctggatggtgccccgccttcgcctgcctttggaggagacaggaatgcaygcctgtcccacccccacagttcccaaacacacatccccatcacgtgatgtagccaccgtgactgcagtgaaaatccatgcctcactcccagagtcaggta

SEQ ID NO: 293381 - DNA, 201 bp, Homo sapiens
tcgggcctctcatgtgaagaaggacccagcaagatgcaggagatgttcccggacacacaccgcctgcccccgtcaccttgccaacgccgctgaaggttggygcccacagagaagggcagcgcccttgcacgctcacagttacctggagcacacatgctcaatcccacgcgctcactcacattcagaacgcacacttgggtg

SEQ ID NO: 293382 - DNA, 201 bp, Homo sapiens
ggcctcatccccacccacccggctcccaggatcctcattaggaagccctcaggagccctggggtgggtctccttgccctgtgaacgctccatttgtgttaytgaatccaacataaatgcagcattgtcttcagaggtgagcaatggccgtggccggaggtgcgcatgggatgcaggcggcgtgtgctgctgttgattttct

SEQ ID NO: 293383 - DNA, 201 bp, Homo sapiens
agcagccgccggcacaagcacccctcgtcacaggtgagcacaaatgggcctgggtgcagccaggctctgaggctgcccacgctctggatggtgccccgccytcgcctgcctttggaggagacaggaatgcacgcctgtcccacccccacagttcccaaacacacatccccatcacgtgatgtagccaccgtgactgcagtg

SEQ ID NO: 293384 - DNA, 201 bp, Homo sapiens
gactggcatgtctcatcttgagtaggaagaggctgtgagcaagctgaaatcctttcttccctatttacaagtggttctgggtggtcgtggaaaccggctgmgtcctcagcagtgggaagcgaggtccaggaacgggattgatgccctggtgaggccattcctcatcccctgcaccgcctgtgaccatgaaagggcttgggc

SEQ ID NO: 293385 - DNA, 201 bp, Homo sapiens
cagatgacccgatgtcttcagctaataaattatcggggtggggggcaggaagcaggaggtcaggggaaggggtcttaaaagatacatcagctaattacaaygtatttggatcgtgatttgaacaaaatatttaaaagtgtttatgaaactatggggacactttctggctacttcataatattacagacttgtccatttatt

SEQ ID NO: 293386 - DNA, 201 bp, Homo sapiens
ttggagcgggacggaggggcagcgcacagccctcttctgcagcacatggtcttactggagcagccgccggcacaagcacccctcgtcacaggtgagcacaratgggcctgggtgcagccaggctctgaggctgcccacgctctggatggtgccccgccttcgcctgcctttggaggagacaggaatgcacgcctgtcccac

SEQ ID NO: 293387 - DNA, 201 bp, Homo sapiens
tggggcactcatgaggggcaatcatgttcattttgcttgttcactgccagcgccagtttgaggttgccgaatgccatttggttggccaatgcctgtctctrtcccttgtctgggctgggggctttacttacagaatggaagaatgaggagttttaccttacaaaattacacagttgatgttacgtttaacatcgtggacac

SEQ ID NO: 293388 - DNA, 201 bp, Homo sapiens
gagcgagcagtctcctctgctgcagttctcagggagcctgaagagctccacctcccttcttttctagaaggctaaagcgcagtgccatccaggcctggccrtgtgctgcagctgccttcatgctagaactctgcaccgagaacgccactccgagcacggcgtcgaatgcaatctgcctgtgacgcgtctctctcccgccca

SEQ ID NO: 293389 - DNA, 201 bp, Homo sapiens
gccaaattgtcctgcagaaagggtgccactaactgatttgtgattcacccaacagtgttcgccgttcctctaggccaagatggtattaccatgtttcaaargtgtttgccaatttgttgggtttcagaataccttttttgatgaccatgatgtgttttcctgagcgccttccccttcctgagctctgccgtcactggtcct

SEQ ID NO: 293390 - DNA, 201 bp, Homo sapiens
gtccgctctgcgtttccgccctgagtgagctctgagcagcgggagggagggagccaaggggccctgtgcaggtgacagccagaggggaggggctcgccatracgaggagatcagttcaacaaaggactgtgtttgttttctgagctgagaagcaccccgaagccctgtgggttgtatgtttataggttaacctgctggtgg

SEQ ID NO: 293391 - DNA, 201 bp, Homo sapiens
gtcaccacaccctccttttacagaagacagtcagaccgtggacgttcagttcatgcatgttttagaacccaagtctgtttcagttaaagcggttcagcttygagaccacaggactcatactggttagtgatcctggagggagggaaaggcaggtcctttggtttctttcttatatcctgaaagtgtaatttttgtattttc

SEQ ID NO: 293392 - DNA, 201 bp, Homo sapiens
gtaatcagctagatcgttcccaacccccagagcatcccggtgtgcaatgcccctccgttctgttaacaccaaggtgtcggggaagccgcatagctctgccrtgcctgctgggtgctcggccctgcagcggaggcttcatgggcatcaggccatctccttatttcttaacgttacatcccaagagtggagctccagcatcaa

SEQ ID NO: 293393 - DNA, 201 bp, Homo sapiens
taggactgagccagcagaataaagaagaagaaaaggtgtgaggtctggaaggtggaaacaactgtcattatttgtacgtgacctgattctatatgtagaaratacacgataactacagaaaaatgattgaaattaatattctacgatacagaaccaataagtaaaaattaattgtgtttccatatgcaagcaaacagaaat

SEQ ID NO: 293394 - DNA, 201 bp, Homo sapiens
accttgtgtcacaagcgagtcacttttggtggaagtggggcaagacatttccctgtgctggtttaagcagggccggtctcctccaagggagccccaagccrttgtgctcacaggccgggtaataaatgtacacgtttgtagtaaagccattcaccactccccaaaacacaacgctgagaatagggtttagcactgagttac

SEQ ID NO: 293395 - DNA, 201 bp, Homo sapiens
gagtgagaggaagtcgcccaggtgcgtaaggggacagctcctctgtggccgctgctgctgttatttacacgcgtgcctggatgctctgacctcaggcccgyggactttccctctgagcacatgctgagatgcggtccgggggcgccagcctcagaatgcctcccgcagggctcggccccgaggcagcagatgccagaacgc

SEQ ID NO: 293396 - DNA, 201 bp, Homo sapiens
ggcaaactaggagtagatgggaacttccttaatctgatagttacctgttggacacctgcagcaagcaatacactttccagtaaaacattgaaatatccttygtaagatcagaaacaagaccaaagtgtcttttatcaccatttctctttagttactgtactgtaggactgagccagcagaataaagaagaagaaaaggtgt

SEQ ID NO: 293397 - DNA, 201 bp, Homo sapiens
ggtggtcctggatgccactgcctgttgtcctgttctcttagcccagagaggaccctctcagctcctccctggagtccaggcctggctcacacagcctcacsccttggcatgtcagctctcactgcccctgtttactgcccatgctggcgctcctgccctcagcctgatagcaccaagcctggggaattctgggggaatggg

SEQ ID NO: 293398 - DNA, 201 bp, Homo sapiens
ggatgtggggggagcaggggcctcccagcctggctctcagcactgccttttctgttcaccctggggtccctagaaacactactgtaccttgaaggcccccyggacccagggaagcccagtgtgccgggcacctcctcctctacagtgccagggaggcccagagtgccggcacctcctcctctacaggccagggaagcccag

SEQ ID NO: 293399 - DNA, 201 bp, Homo sapiens
attccctgagcagatatttcattctccttcacctccagtcctggtcccaccagcccctgtgccccggagggctgtgtgaccgagactggtctgcccctccyttggcccaccctggctgatgggtcagctttgctgtctctgataccttattcacccagatcctttctgacttccagcattttgtggctgctctctcatctc

SEQ ID NO: 293400 - DNA, 201 bp, Homo sapiens
tagtagtccctgggctctgccagccacgtggggtaagcggtggttggggccctgcattccctgagcagatatttcattctccttcacctccagtcctggtsccaccagcccctgtgccccggagggctgtgtgaccgagactggtctgcccctcccttggcccaccctggctgatgggtcagctttgctgtctctgatacc

SEQ ID NO: 293401 - DNA, 201 bp, Homo sapiens
ggagtaagtctttcaacccaaggggcgtgttggctgaagcaccttggagcagacttttgctgggtgaagccaccggcctgtcacttgggtagctgctggcrgggtcagcctgactcgcacagaacatcaccgagtgttatgggcgctgggggagccccagcctcactctctccccatctcactggccactgaccacagatt

SEQ ID NO: 293402 - DNA, 201 bp, Homo sapiens
tccagaacgtccacctgaaaccttagtgccgcatcgagtttaggtgcatgtacctgtggggagcggagactgccgctccagccgctcccaggctggcttcygtctccaccccagtgccctggccttgtcatcttccacgtaggaagctgggttttcttggtggccgctgacaggataggcttccgtgcctccttctcaggt

SEQ ID NO: 293403 - DNA, 201 bp, Homo sapiens
tttcgctcttttgccacactcacaaatgtgagctgcatttggaaatgcctgtgcttccatttgcaaaccgaagctgaatggaacctggcaggcgcatctgytcctccgcagtggaggctggggcggcccgagcagaaagaggtgaagcctgtgcctgctgggagtccccgagcggcaggaactccggtgtctgggatggcc

SEQ ID NO: 293404 - DNA, 201 bp, Homo sapiens
acatttaatgtaattattgatatatttatgcttaaatctatcattgtacaatatgaattataattatctcaactattctaatgcacttgtcttgcttttartgtatgtttttagtgatatatatatatatatttttttttttttttcaccagcttggtaatcactattttgctgtttctttactgattatcagtaggattt

SEQ ID NO: 293405 - DNA, 201 bp, Homo sapiens
gagaagcccggtgagagctggccattcatcctgagggcgcggtttccacctggactctcgtggtgagggtaggggacactcctcactcagtcgcccccatyccatgccccctgcgggcctggcctggtgtggctggttcttgtccccaggtcccctgctctcaggagaccttcatttgtgggaggcactgtgggggctgtg

SEQ ID NO: 293406 - DNA, 201 bp, Homo sapiens
acctgctcccacaatgttttccttaccctttttaagttgcttggaggcttcagcatttgggaccaggtggggaggcgtgcagtgcccgggtcacctgcctsccttctgtgcccctggctcgcccatcggagggaccagtcggcacggctgagtcatgctgactcaatgtttcatacagtggagctggcttcccagaaacag

SEQ ID NO: 293407 - DNA, 201 bp, Homo sapiens
tctcagcgaatctgactcctctagggcccttctgtgaatggacttgtatttgtccttttgtgcgtggcttctttcacttggcataatgtgtcagggttcaytcgtattgtggcatggtcagaatttggttcctaaaacttttaaggatgagcagtccattgtgtgcatacatcacatcttatttattccatctcttggtgg

SEQ ID NO: 293408 - DNA, 201 bp, Homo sapiens
catcttcctccagtggccacctagcgggtcctggtcccgagccgacggggagtgagcacatcctttccacatcaccccgacccctgagccaagggcaccaygcctcaccgacagttctgagagtgggcagggcacccacctgttatcctagtgactgcgtttcgggggaaccattagtagcccccagacctctttaggaga

SEQ ID NO: 293409 - DNA, 201 bp, Homo sapiens
ctcctgttatctttactattttattgtctgcttttctgtcagatagtgggaatggaatattaaaatccccctgatgtaactgtggattggcattgtttctstttttagctctgtcaggtttagcctttgtttattttgaagctattttaagcctaggcagatttagaattttatgcataaaattattccataaaattggaa

SEQ ID NO: 293410 - DNA, 201 bp, Homo sapiens
ctccctaggaaacacggggcaccccctgcagggtgcatctctccccaggaggcacgggacacccccacagggcacacctttccccagcagttagggtacayctctccccaggaggcgtggggcaccccctgcagggcacatgtctccccacgagacacggggcacccttcatagggcagacctctccccaggagatacagg

SEQ ID NO: 293411 - DNA, 201 bp, Homo sapiens
gtaagaggatgcatatttttcatttgtgctgtaccagcactgggtaggttcagtctctctcatttttgtcagtgtgctatgggaaaattattgtttgagtwcacttgattattttaatgggggtgcatatttttgtatgacttggtgtacacataatcataatttgtacatgctctgcaggcatttgaagagaaagtatgc

SEQ ID NO: 293412 - DNA, 201 bp, Homo sapiens
tttcaaactccaatgcagccttttttcctatgagcagtgccttgcttggccagctctaatggacacgtgaacctttgcgtttttttgttgtttttttttttaaagtgtgcagtgggtgagacggagtcttcagcaagcttcttctgagtgttaaagctggtgttcctgttgtcacccagtgactactgagtgctgtttttg

SEQ ID NO: 293413 - DNA, 201 bp, Homo sapiens
tggtgagtgatggagcaggggcatgtgggagaccccaagcacaagactgggccccggcacccacctcagggtgcatctctccccaggaggcacagggcacmccccacactgtgcacctctccctaggaaacacggggcaccccctgcagggtgcatctctccccaggaggcacgggacacccccacagggcacacctttcc

SEQ ID NO: 293414 - DNA, 201 bp, Homo sapiens
ctgatcaatgcctcccagaagaatatggagaggcaggacacaaacatggatacccagagagggtccaaggacaggccacgaagccatggctagagcatgcyccaggctggtgagtgatggagcaggggcatgtgggagaccccaagcacaagactgggccccggcacccacctcagggtgcatctctccccaggaggcaca

SEQ ID NO: 293415 - DNA, 201 bp, Homo sapiens
gcacttctgtgtttttgtttgtttgttttttgaggcagtctcgctcaactgttgcacaggctggagtgcattggtgccatctcagttcacttcaatcttcrcctcccaggttcaagcgatgctcatgcctcagccacctgagtggctgggattaccagcatgcaccaccacaccctgctgctaatttttgtatttttggta

SEQ ID NO: 293416 - DNA, 201 bp, Homo sapiens
tctgagtcagagagagtgccgtgtctcctggcatttattgcatattcaggcatgggttggtgggcgtggtgggagtgtttgcagggtaattttaaataacrtagcagcgatgcccaggaacagtgggcagagaaagcatgcatgcatgtgcagcagtcctgtatgacatccatcattgagcctgcacagtggcctgtgcct

SEQ ID NO: 293417 - DNA, 201 bp, Homo sapiens
gatcttttaggagaattttaatgctcgtggtccccttggactttccggtttcctggctgtttgtggtggtttagacacagccttgcctctccttctcggayggtgcttttccaccaagaagcggatcccaggtaagcgtggaagttctctcttgcacttctgtgtttttgtttgtttgttttttgaggcagtctcgctcaa

SEQ ID NO: 293418 - DNA, 201 bp, Homo sapiens
gacctgccatgggatccctgcctggtgtgaggacaggccggggcttcagcctcccacagagggcacctggggcccgcctctgctgcctgtttgcgtgggarcttaggcgagttgctgaatagctcagttttgttttctcatttcttagccggggatgataatgcctctctacagagttctcataaagatgaaagatatgtg

SEQ ID NO: 293419 - DNA, 201 bp, Homo sapiens
gttgcctttctctttgcattttaatcatttatttcttcattaaaatagagattataaaagccatttgaactacatagtggtttcattacattaggaggctkttgtttggatgatttaaactctctttataagccatcatattgtttgttagtgacatttggcaatagtgtttgtcagacagatttcttgaacacaaaatct

SEQ ID NO: 293420 - DNA, 201 bp, Homo sapiens
ctctcccggccccaagcctgagtgacactctaggattgcagatggcaggctggtctctgggctcccccgtccccatgaccctccacctgcacccagacctytgggtccttgctcaggcagcccctgccctcggtgagacgcagcccactgtgggcccttcccctgggcctgccatcagctcctgtgctcctcggcgcccca

SEQ ID NO: 293421 - DNA, 201 bp, Homo sapiens
cgtagctccttcgtattctgcatgttggcaaccccacatcaagcccgaggactccctgacagcagtcttgacccaggcactgccctgtgcctctcagaagyccccgtcggccattggtcccgcctgcctcggggacatgaggaccactcactcactccggcttccctgcgttcctgcaggccaacacagatgctggctgag

SEQ ID NO: 293422 - DNA, 201 bp, Homo sapiens
agccctcaagaggccactcgttttatttagtttttgcgccataggctcacattctatgactcctagaagtaattttttaaaatgagtaccgtagctccttygtattctgcatgttggcaaccccacatcaagcccgaggactccctgacagcagtcttgacccaggcactgccctgtgcctctcagaagcccccgtcggcc

SEQ ID NO: 293423 - DNA, 201 bp, Homo sapiens
aggcaatccctgcagcctgcccagggcttcagctcaccagcctttccatgatctgcgaagagcagccctcaagaggccactcgttttatttagtttttgcrccataggctcacattctatgactcctagaagtaattttttaaaatgagtaccgtagctccttcgtattctgcatgttggcaaccccacatcaagcccgag

SEQ ID NO: 293424 - DNA, 201 bp, Homo sapiens
gatggcctttggggtgtgaccttaggctgaggccagagcccgtctccccacgagctccccgcctggcctgggaaagtcagccccctcctttccagggctgygtcttcccccttttgttttcagtcattgagcccccgctcgaggatggcccccaccccaaaggtcctgtgtgccctgagtaagccactggctctcagaggt

SEQ ID NO: 293425 - DNA, 201 bp, Homo sapiens
tacacctctccccaggaggcgtggggcaccccctgcagggcacatgtctccccacgagacacggggcacccttcatagggcagacctctccccaggagatwcagggcaccccctttagggcattcctctccccagaagacaccgaggcacccctatagggcacaactcttcccaggagatacagggcaacccccatggggg

SEQ ID NO: 293426 - DNA, 201 bp, Homo sapiens
acggtgcagtggtaagaggcagtgcaggtggctgccccaggacaggccctgggctccaggctggctttcatgttctatttgccctgccttgaattcctgtytttggagtatattcctcactcttcagccaactcagccctgagtataattagacgtctctaaaagtgcgtgtgccatattgccaggcgtgaaggcttttct

SEQ ID NO: 293427 - DNA, 201 bp, Homo sapiens
tgccctgagcaggctctgtcttcagagccaccctgtgcccagcatctggagccacgcagggcacgtgaggcggttccatcagtgctgaatggaggttgctyagcggcagtgcgttcacctgttcttctgtggggcatcgtctttgcttgttcctttgtaagtactgtttatatgttgtttgcaatgctgtgttttcatgta

SEQ ID NO: 293428 - DNA, 201 bp, Homo sapiens
tgcccacctagtgtgcagagtagcttaggggtgcatccctctgtttctgccctagctgataattctcttgaccacaggatcccagtttcccttcctttatrtgtaagacactttgttcagtgtctttatttcataatcactgtcgagaaatggaggtaaagtagtatcagttgtctgtagacttagtggcagattgtgggg

SEQ ID NO: 293429 - DNA, 201 bp, Homo sapiens
ttcctgcttcaccctactgccctcgttggagagacccccagcagtctggggccttgaggatgcctctggccgagcagccacccacgcgccctgccctggtstgctttgcagctctgcgggtgcagctgctcccgtccgccagctgctggatgtttgtggggcattgttgaaatctctgatggatgctgccccctgcccctc

SEQ ID NO: 293430 - DNA, 201 bp, Homo sapiens
tagtcagatccgcgtgttagagcagaatctccttcacgtacagggaggagactgtacgtgagagatagtcagatccacatgttagagcagagtctccttcrtgtgcagggaagagattgtacgtgagagacagtcagatccgcgtgttagagcagattctccttcatgtacggggaggagactgtacgtgagagatagtca

SEQ ID NO: 293431 - DNA, 201 bp, Homo sapiens
agaggacacagtcttcactttactgatggcaccactcggtgcagtggacaggccagtcttgcctccctcacggccctgaccatgggcaactgcagctggcytctgtttttctggcctgggagaagagttttcaagctggctgcaggaaacaggtgcatgccaggcagaaggcgcgggtccgggggagtcactgcaggcaat

SEQ ID NO: 293432 - DNA, 201 bp, Homo sapiens
tttcagagcgacctagcagccgtgtgtaacaaacacgtcacttgtccctgtggagattggcccaccagcctccactggcaccctgtccactttaacaagcrcactcgagtttagggtggggcagttgagagctccacaagcaccataccctttgggatccctgtgatcctgacactcctggcaggtgggacatgagagagg

SEQ ID NO: 293433 - DNA, 201 bp, Homo sapiens
gtctctcgtgccctgatctgggaagtggcaggccgccaccaacactgctgctgttgttgttcatgctaagtcttggcaagccactgggtcgcacgtagggyatgtctccattcaggccagccgcatttcgagccacacgtggttcgtggcaactgttggacagcacagatgtagggcatcaaaagcctatgaccgtatgca

SEQ ID NO: 293434 - DNA, 201 bp, Homo sapiens
cgagcagctctcccggcagcacgaggcgcagctccacgagcacatcaaggtgaggcgcggtgcggggctgcgggtgggccaggcctccggcaccctcaacwcccggtgactccagccctgcctccgcggagtgtgctggggccccaggcatgatgcagggttcctgcaggaggccttctgcgttgggacggtaacaccagg

SEQ ID NO: 293435 - DNA, 201 bp, Homo sapiens
ctgtagcggggtcctctgagagccggcctcccggggagggtggaggaaggaacagggattgtggagtgcgtcctggcctgacctcccatgggcttttgtgktttttgcccttgaggaatgggccccagaggcctctgagtcttgcattttgagtttgttgggcaagagggggacagggggagaggggtatccaatcctcaa

SEQ ID NO: 293436 - DNA, 201 bp, Homo sapiens
caaaattacttgtagccttttctcaatagcacattagtacagggcagaaaatccatttcttcgcgaggtgcagaaacgcatgcccagaggaacgcacttgygccaagagccaggagcacgtctcgttggctgtgtctggtaaacatgttttccaagggggcgcttgtctcaccatggaaacgggctccgggtctcgagcgt

SEQ ID NO: 293437 - DNA, 201 bp, Homo sapiens
gcagctgccacctatgggctgtttcacccaaatcggtggctttgagactgtggagtgcaggttttcctaggaactgagttgctgacaaggcctggtcttargccagtccagagacgggctgagtgtcagggtgaacgtgggtgggctgctctcagggatgcacctggacaaggtcacgcccaaaggtgctgaccctgaggg

SEQ ID NO: 293438 - DNA, 201 bp, Homo sapiens
agggccaggttaggagcatgattgactgcggtggggcaggggaggggtgaggagacagtgaagtcagccagagaagctgagagcacccctcaccctgggcrccaggagctcaggtgactgcagctcccacggctaagcggcaacccagggatcagaaccccaagctccggccagtgcccaggcctcccccaaagcatttcc

SEQ ID NO: 293439 - DNA, 201 bp, Homo sapiens
gcagccagcagggccaggttaggagcatgattgactgcggtggggcaggggaggggtgaggagacagtgaagtcagccagagaagctgagagcacccctcrccctgggcaccaggagctcaggtgactgcagctcccacggctaagcggcaacccagggatcagaaccccaagctccggccagtgcccaggcctcccccaa

SEQ ID NO: 293440 - DNA, 201 bp, Homo sapiens
ttcaagccagtccagccagggcagccagcagggccaggttaggagcatgattgactgcggtggggcaggggaggggtgaggagacagtgaagtcagccagrgaagctgagagcacccctcaccctgggcaccaggagctcaggtgactgcagctcccacggctaagcggcaacccagggatcagaaccccaagctccggcc

SEQ ID NO: 293441 - DNA, 201 bp, Homo sapiens
acgggcccgctcacctgaggcactctaggaagtcactgcagggcactggtcccaggagaaccgcgtgccaatcacagccatgaacgcggaagagggaaccrcaacctgacagtcattcacgagactgtgtgttcaggaaagcatttagcaccgccgtgcttgtgagagccggacccgtagcccccagtgcccacagcaggg

SEQ ID NO: 293442 - DNA, 201 bp, Homo sapiens
tttgttcttctacattatacaagtgtatgccttccccgatgggttcacccatgggtgctgactgtgtaacttagaagaacaaagttgtgtttatccctggraagcacgggcccgctcacctgaggcactctaggaagtcactgcagggcactggtcccaggagaaccgcgtgccaatcacagccatgaacgcggaagaggg

SEQ ID NO: 293443 - DNA, 201 bp, Homo sapiens
agccaaccttgggtgtgcagagcctgccccgccttccccactttgtcctgagaagctgggtcctccccagcaccagagttgctgctgcttcccctcgcgcycttggctgctctcccggccccaagcctgagtgacactctaggattgcagatggcaggctggtctctgggctcccccgtccccatgaccctccacctgcac

SEQ ID NO: 293444 - DNA, 201 bp, Homo sapiens
cggccagccaaccttgggtgtgcagagcctgccccgccttccccactttgtcctgagaagctgggtcctccccagcaccagagttgctgctgcttcccctygcgctcttggctgctctcccggccccaagcctgagtgacactctaggattgcagatggcaggctggtctctgggctcccccgtccccatgaccctccacc

SEQ ID NO: 293445 - DNA, 201 bp, Homo sapiens
tggccggcatccctgtgaggaaccttgtgatcattttccatttctgaaaactcccaggtggtgggggcccttggcccacatcagcattgaccaccccgggytcagatctggccaggtgcctgcgttgtgatgggaatttcagtacactgaattttgcctctgaccctgatgaaatagcttcggtggcatttgcatcaagat

SEQ ID NO: 293446 - DNA, 201 bp, Homo sapiens
acaggtggtggaatttaagagcagacttgggtcgagctgtgaccgttcaggtgatgcacgcacaggaggttcagctgtgtgcctgtgaggcgggcaggagygtcacccaagcttcagaagagaattccccggcagcagcgtggcgctcagcatgttccgtgtctgactgttttgattgtctctcagtccagttgacaaatt

SEQ ID NO: 293447 - DNA, 201 bp, Homo sapiens
ggctgtttcacaggtggtggaatttaagagcagacttgggtcgagctgtgaccgttcaggtgatgcacgcacaggaggttcagctgtgtgcctgtgaggcrggcaggagcgtcacccaagcttcagaagagaattccccggcagcagcgtggcgctcagcatgttccgtgtctgactgttttgattgtctctcagtccagt

SEQ ID NO: 293448 - DNA, 201 bp, Homo sapiens
gggttattggttcccgggttcattggttcccggggtcattggttcccggggtcattggttcccggggttcttggttcccggggttcttggttcccggggcygtttcaggccacctctggctcctgagagcgaggggagcccatggaggcctgcagaggagagtgggaggtgaggacagggacctctggatatggccctcaa

SEQ ID NO: 293449 - DNA, 201 bp, Homo sapiens
aaaaaagaaaacagcgcagtttctcttaaatgccggccagcattgtgaccctgatctgctgaggccttggaaggtagttgaggctgcaggaaatgtcacgrggtgacctttagaattagagtgtcagcactcagctggctgcctgcatctgaaaaaggagccattgtagccagtgaaatggggaaaaaccagaaaaccagc

SEQ ID NO: 293450 - DNA, 201 bp, Homo sapiens
gtgagtgactgcggggagctgggctgctgtttgctggccacccaggatgtgccgcatgccggcttggctccagctcctgggtgtggagtgcagatgccaargtctgcgagcatcactgctcggttatgacggagacagatcagaggaaaggatgggaaagggtctgtggaggttagtccagagaagcctctggttgttgag

SEQ ID NO: 293451 - DNA, 201 bp, Homo sapiens
gttgtctggcgcaggtggctggggctctggggtgcagtggctctcgctttaagaaacaggatcctgtatgcagccagcatctcatccccttcgaagtctgyggcagtaatctgctcacatcaggccacgagtatggtgcgggtaggatgcgtgcttctgtattctgtacctagtttccacccgaagctacaggtggggctc

SEQ ID NO: 293452 - DNA, 201 bp, Homo sapiens
aagcctgcaggagttaggttttctgttcttgacagactgagaatgatactgagaatgttttctgattgatttggtgagctgtctgtttatagcatcattasagattattttccatggctaggaattattcttgacctcacagtaaaggactctgaatcccccaccccctgcctgttttttttgttgttgttgtgttttttt

SEQ ID NO: 293453 - DNA, 201 bp, Homo sapiens
cagtacaggccctgcctcctgacatgccccaggccggctggaagaaagcgcgggactgtcctattgacgtggggaggggacggctggactctgtgatgctmactgtgttctctgctgggccatgtggctccccacagagaccctgggtgcccagtcattcgcgttctcctatgtgtgtgtatatatattatatatacatgt

SEQ ID NO: 293454 - DNA, 201 bp, Homo sapiens
ttatatcgtaaatctgtcatcttcaactggatggtgtaacacttggattctacatttcccggatgcttggaaaggagtgccaggagttatgtgttctgcgkatcagaacagctgacgccggctgaggacacttcatccactgtttgctcggcgcttgacaaatgctacccagtctaacggtgagcgtcgggtgtctccggg

SEQ ID NO: 293455 - DNA, 201 bp, Homo sapiens
ataatggtaaatatggctggcagtgatggagtctgccctgcacaggcactttgctaagtgttttctacatatttacagctgtgatccccacaacagcctayggatgggtcctactaaccttacatcatctgtattttacagatgagaaaacagaggcattgagaaaggaagtcactggcccaaggggctgtgccaagcaac

SEQ ID NO: 293456 - DNA, 201 bp, Homo sapiens; identical to SEQ ID NO: 60553

SEQ ID NO: 293457 - DNA, 201 bp, Homo sapiens
tttttaaccctgatgagagaatctagtcagtgatcattttgagccttcgcaacacaaaaaagccacccagagagcaggggttcgccttaggccttgctggsaagtctaagctgcctctgaccaggcctctcggtgagcacccagctttcagaagaacgggggacagagccttgctcgtcagcaccagggtgtaatcagcaa

SEQ ID NO: 293458 - DNA, 201 bp, Homo sapiens
  misc_feature (1)...(201): n = A,T,C or G
cccctcgttgtcccacaaatgcccaagtgccactgaagaccccggagtgcgcccagggcctgtcgagcaccttggccgcgtgcccttggcctctctgaccntctccctcccccccacaggctcgctcgcctccgtgttcgtccggctcccttgcggtggtgttggggtaagtgttcctttaatgtgtaaataatgtcctgt

SEQ ID NO: 293459 - DNA, 201 bp, Homo sapiens
  misc_feature (1)...(201): n = A,T,C or G
ccagacactgaccctgcagcagggccacagggtgtcacaagggggagcagtggcccctcgttgtcccacaaatgcccaagtgccactgaagaccccggagngcgcccagggcctgtcgagcaccttggccgcgtgcccttggcctctctgaccgtctccctcccccccacaggctcgctcgcctccgtgttcgtccggctc

SEQ ID NO: 293460 - DNA, 201 bp, Homo sapiens
tctaaatgagagaaacagaagtggcatataaaaactcacctacatacgaagctccaaggtagggccacttaagttacatgttatctacagaatatttttawatctttaccttaaagaatacttctactttctctacctcgtctctactttgcgtgcgtgcccctccccaccatggtaaatacaacagttgcaattcagtta

SEQ ID NO: 293461 - DNA, 201 bp, Homo sapiens
ctggctcagcacctcctcagagaagccctccttgataccccatactgggccaggcctccctgggaccccctgactcaacctgtgttatcctgttaacgtarcccatggcaggatcccacgtggacagcctgccttccctagagagaccgtcctgggaggcagagcctgtgctggcctcgttcttggctctgggcccactca

SEQ ID NO: 293462 - DNA, 201 bp, Homo sapiens
agttgctgctgcttcccctcgcgctcttggctgctctcccggccccaagcctgagtgacactctaggattgcagatggcaggctggtctctgggctccccsgtccccatgaccctccacctgcacccagacctctgggtccttgctcaggcagcccctgccctcggtgagacgcagcccactgtgggcccttcccctgggc

SEQ ID NO: 293463 - DNA, 201 bp, Homo sapiens
ttcaggcacattgcctttcctgctgcagagccccaggctgccggcccagttggttctggggcccccaccaggagcctcttctgtggctgccgcaccctggrggcccgtccatgctgagctcagtgctgtggtgagcacatggctggcctcttttcacagtcagaggttaagtagacctgtgtacatgggttttgcgtgtgt

SEQ ID NO: 293464 - DNA, 201 bp, Homo sapiens
caggagccatgcgtggcagggcgtgatcagtgctgagctcacccaggagccatgcgtggcagggcgtgatcagtgctgagctgtggcataaagggagcccrtgccgaggcacctaggagttgggagatcagcacaagccactctaagccagcagagctctgcagaaggtggcatttgcactgggacttggcgggtgagtgg

SEQ ID NO: 293465 - DNA, 201 bp, Homo sapiens
ggaagtgccaggcccaggggaccaggtttgatgactccggcatgtctaagccgggccctgctcctggcattagtgactcagagctggttctaggtgggctsaggtgcacaagggtgccccagcttggcactgcgggagatgcagtcaggagcttgagttgaggctcctctgaaggtgggtcttaaccagtcccaccctagt

SEQ ID NO: 293466 - DNA, 201 bp, Homo sapiens
gctgccctgagcaggctctgtcttcagagccaccctgtgcccagcatctggagccacgcagggcacgtgaggcggttccatcagtgctgaatggaggttgyttagcggcagtgcgttcacctgttcttctgtggggcatcgtctttgcttgttcctttgtaagtactgtttatatgttgtttgcaatgctgtgttttcatg

SEQ ID NO: 293467 - DNA, 201 bp, Homo sapiens
aaggaggagtgagaccggcgtccatgggaggcagcacgtgacagcagtgacccactgggacctgagagaggaggtggcttcctgagaatcgctggcaaccrgcacctgggagcccgctttgggggagaccccgatctgtgcccccagagccagtccactgcctggactggttgtggagaaactccattgtcctactggctg

SEQ ID NO: 293468 - DNA, 201 bp, Homo sapiens
ttgttcgtctgaggactgaagagagccgacctgccatgcaaaagaaggccttcggggggagagttcacagagcacagtgcgagcgagtggcgaggtgatgmggcttgaaacagtgagcaagggcaacagaggatcgctttgaaatgtagttttctgctgctctcaaggttcatttcatttctagaaaaaaatcccataagg

SEQ ID NO: 293469 - DNA, 201 bp, Homo sapiens
agacagccagccctccagcagcacccgctcgccttctccatcagaatgttctcgggtccagcagacccggagaagccctgggatgctggagatgcctgcakgggggtggaggctggggaaagatcctgccaactgcagggaccacccttctcagtggcacagatttgggctgagttcataccttattatgcatgcatctac

SEQ ID NO: 293470 - DNA, 201 bp, Homo sapiens
tggcatgcacctgtgttcccagctactcgggaggctgaggcaggagaattgctcgaacccagggttgcaggggtggtggaggttgcagtgagcccagatcrtgccaccacactccagcctgggcgatagagcaagattctgtctccaaaaaaaaagaggaagtcatcatttccctagttggatgttgttttccagatcgga

SEQ ID NO: 293471 - DNA, 201 bp, Homo sapiens
gaggctttcaggcatgttgttggtgaagctcaattcaggcccgttgttggtgaagctacgcgtgcttgggtgcatggtggttatggtggaagagatctttycttacttagtctggtactgacataaggttctggggctgtttgtcacctgccctgggggtgccctgcgtagggcagggataagtcagggataagtcatgtt

SEQ ID NO: 293472 - DNA, 201 bp, Homo sapiens
caggccccagggcggctgtgtgctgtgcgcttcagcctcaggcttcagcactggcccctttctgaccttaagggaggccaggaggcagaaagagggaaccraggaggcacatgctctggcccacagcacagagctgggcaggggcaggggcagaagggatgctgctgggagcttgggctcaggaacagttcacctgcaggg

SEQ ID NO: 293473 - DNA, 201 bp, Homo sapiens
aggggacccgcactcttccatgtccgtagggagacgcgcaccgagctggagacacagatctgcgaggagtaacttgcctctctcaccagcactgccagggrcggatcagcgccagcaccttccagcatgcgctaaactgctggagaagctggagtggctggaaggagccctgcctgcctgccctcctcctcctcagttgct

SEQ ID NO: 293474 - DNA, 201 bp, Homo sapiens
ttggtcattctttttcttgcttcaactttttcagtggctggtcaattgttcatatctaagtatgaggggaagatacatttcagatggattcaaggcttaaytgtaaaaagtaaagcaagagaaatctccaaagacaattggggcatcagggacccgtcctcattgaccccggatctctagaagcggacaaagatgcaattg

SEQ ID NO: 293475 - DNA, 201 bp, Homo sapiens
tgtttacacggcttatctcatttaatcttcccagcatgtaataaaaatattgcaacaggtactgctcctgtgtggactccttcccccgagctcacactgcytgaggccttcccagctctgggctttgtgtcctgtgtggacttcttccccgagctcacactgcttgaggcattctagctctgggctttgtgaatatcctgc

SEQ ID NO: 293476 - DNA, 201 bp, Homo sapiens
ctctgggctttgtgaatatcctgcttttatcctcatttataggtaagaaagctgactcagagaggttaagcagctggtctgaggtcaactgcttacgggtsggggagctgggcctgcacacaggggtctgatgcagagctggtcctatctgctttataagctgtggctcacagggcactccaggggctcgagaggacctgg

SEQ ID NO: 293477 - DNA, 201 bp, Homo sapiens
atctggggtcccggagaagcccttggcacggggcttcatgagagcataggcgagtgccgcgccctgcagttgagcacgggggatgcagctgtcgcagtcgyttttgaagagtgaggggtgaggcctgcagttgctgcccgacgttgtttacaagtgagcaagttttacaaaaaacatggacagcatcagggctgacttgaa

SEQ ID NO: 293478 - DNA, 201 bp, Homo sapiens
tgaaatgaactcacccgagacttcagcttgatgcctcctttggctaatgctgggttctgggctttggccgccgcctgcctgtccatcacaaggggccatgytctccaatcaggacagagttctaagcatttcacagtaaagcctgcaggagttaggttttctgttcttgacagactgagaatgatactgagaatgttttct

SEQ ID NO: 293479 - DNA, 201 bp, Homo sapiens
aggtcgaggctgcagtgagccatgtcataccgctgcactccagcctgggtgacagaggggagaccctgtttcaagagagaaaaataaaaaaaaaaaaaaaraaagaaagcaccagcagaatttagaaatgtgggccagtgtgggagcctcgcctggcatcactggcctcgcctggcatcactggctgtgggctgctgctct

SEQ ID NO: 293480 - DNA, 201 bp, Homo sapiens
aaaaaaaaaaaaaaagaaagaaagcaccagcagaatttagaaatgtgggccagtgtgggagcctcgcctggcatcactggcctcgcctggcatcactggcygtgggctgctgctctcgccctggagctgttactttgagagcagatcgaggactcagcaggcaggaggaatgttcacggcagggtcagttcccacgctgca

SEQ ID NO: 293481 - DNA, 201 bp, Homo sapiens
tctttatttattcctaaaaatcaaaggcagttgtcgccctccctcccatttccttcgtgtggctgtgacccttcagcatttagccgcagggcgccgtttaragacgcagtgtttgcttttgtcatcaagcggttccttctcctttggtctaggccagattggggtcattcctgtgacccaaaatgggatgctgagcagcgc

SEQ ID NO: 293482 - DNA, 201 bp, Homo sapiens
aaaaaaaaaaaaaagaaagaaagcaccagcagaatttagaaatgtgggccagtgtgggagcctcgcctggcatcactggcctcgcctggcatcactggctstgggctgctgctctcgccctggagctgttactttgagagcagatcgaggactcagcaggcaggaggaatgttcacggcagggtcagttcccacgctgcat

SEQ ID NO: 293483 - DNA, 201 bp, Homo sapiens
tggagcccggaggagggggcagggcttgtccttctggacgggcagccccaggaaaagagaagcccagagctaagggcccttgccctagggaggggtcccayatggaccccgaagacgttcctctctgcagcccttcctggcactgcgtggacacgatgtacggaatgaggaaaacgagcttctttcccttctctttcactt

SEQ ID NO: 293484 - DNA, 201 bp, Homo sapiens
tgtggaaacagactgatacacacacacactcaattgtcaggaatgactccagcagtcactgtgagagctcgctccctttgaacagatgagtgtgtacttgkagcaggaagggcgcccgggcagccctccccactgttgatctgtcctgtttcctgaccattccctcgtgtgaatgccgttatgttcaacacaggtcttttt

SEQ ID NO: 293485 - DNA, 201 bp, Homo sapiens
gaagcccagagctaagggcccttgccctagggaggggtcccacatggaccccgaagacgttcctctctgcagcccttcctggcactgcgtggacacgatgwacggaatgaggaaaacgagcttctttcccttctctttcacttctccctcccatcacgcagcgtgcaattatggaagaggataaagaaggaaagagcagtc

SEQ ID NO: 293486 - DNA, 201 bp, Homo sapiens
tcaagtaatctgcctgcctcggcctcccaaagtgctggaattacaggcgtgagccaccgcgcccagccccataggtaacattttaaggtactccaagtctrtaggccatggaaacagactttttcccccttttctttgtctgtaaaacccgtttccacatagaatcctccagggtttaaactccttgtgagggtaccattc

SEQ ID NO: 293487 - DNA, 201 bp, Homo sapiens
cccatgacacacaggtatctcttcaatattgtgctaattcctgcctttttttggtgtcttctcatctcagcatcagtagtggtggccatgtagggacagargcacttagcagccgcggcaccgggaataatgatttgacttgggggccctgtggaagaggcacatgttgccgcttgaattctaagaacactatttaccttt

SEQ ID NO: 293488 - DNA, 201 bp, Homo sapiens
aaaggcgtatgaaggagagagtctctgactcctagtcctgtcaccctgggttcagctgtgaacattttcatgtgtttccttccggctcccatcttgtctcrttctcgttggtttttatgtaaccagcttttggatgaataaaaatctgctcttttgcttttcacccttgccagtttactataatcatcttttttttttttt

SEQ ID NO: 293489 - DNA, 201 bp, Homo sapiens
cactggagcgggaactcttgcaaacaaaggttctattttcatgcaaatgtaatcggcggctcccggggagaaggcccagctagctgggactcttgagcttrggccccttttctagaaggcgatggtggacactggaaatcttctttatgatatctgtgtggacttagaagaaccaaataagaagctcttacatagatattg

SEQ ID NO: 293490 - DNA, 201 bp, Homo sapiens
attaagccatttcaatggagtgtacatttatattaactcttgatgccttttttatttgccgtaattggattagaaaataagatcttttctgtagttgatakaactttgttaattttattctctcatttgttttccttaactcaaaaatggtgagtaaagatcacgatgctgttttaaaatttaggaagtggtgaaccatca

SEQ ID NO: 293491 - DNA, 201 bp, Homo sapiens
gcccctgtggcgtgtgtgctagctctgggcagttattgtcagagtggaactggatcattggacgcccagttggtgccagttggctggtgtcagaaaccacmccacccgccagtatacaggattggacatgttaaggtcaaggtctggtttacgcagggaatccacatgctgttatcgaacggcattctccttggtgtgcca

SEQ ID NO: 293492 - DNA, 201 bp, Homo sapiens
actttctccccactcccttcccctcccagttcaggagcctgtgcgtggggctttcatgtactttctttattggctcaagaaacctcctttcttgtgtgtcrgtattgtgatgtgaaacccttggtggagggcactggtcttggtgggtacctgtttgctcaaggtccagcttcagacaagccgctggtttaattgagacag

SEQ ID NO: 293493 - DNA, 201 bp, Homo sapiens
tccatagtcttccttccttcccttccttcccttccttcccagtcctgcagagtcagctgtcacacctcctcaggtggctcttatgggttttcaactctccytggacttttactttcagaatacaaaatacaggatttgggctctccttcatttttgtattttgattccctctgctcagctgatttcttcgtcaggatcttc

SEQ ID NO: 293494 - DNA, 201 bp, Homo sapiens
gtaacacaggaggtcaatggcccagcctttccccaaccccaggtgctatgaggtgaatgaactcgctgcctccctcggcttcagggaggacctgcccagcygcgtcctgccatgtttctgcagtgggtgtcttctgtgtgctgggccccatgttatgacgtgtggtccgttagtccctgcacacctgtggcgtggataccc

SEQ ID NO: 293495 - DNA, 201 bp, Homo sapiens
ctggtgggcggggctgagcctcaccttcaaggctgcagattccctggctttcggtgtgctgggggatgccttctgcatggcctggctttcctgggatttcyagaccagatccacctctttctcccctttttctttgtctttctgcccccgaagagatagcagtgtacaaaaacaagccagcatttcttgttctcttgctat

SEQ ID NO: 293496 - DNA, 201 bp, Homo sapiens
gacccccattccacctctgggggctgtggacaaggaggggaagatggcctgtgggtccacacaagcggggtgtatcttaattagtgatgccaactgtgcctccttgcttgcaggatgtgggtggccctctgaccttttggacctttaaagtgagccataaagaaaaccattgggaggttctggcatattaaaaccccctct

SEQ ID NO: 293497 - DNA, 201 bp, Homo sapiens
acttggaggtgagttttctttttctcctttcatcacgtttggtgtattcttctcatccttggccggcctacctcagcatagcagccgctccttccttgtctgtctgtgtctcactggctgctcgtcacatcttcttttgtccttgatgctcccagttttgtcagggtgtgtttgggtgtggagcaccctgttgtcttggca

SEQ ID NO: 293498 - DNA, 201 bp, Homo sapiens
agtcgcccccatcccatgccccctgcgggcctggcctggtgtggctggttcttgtccccaggtcccctgctctcaggagaccttcatttgtgggaggcackgtgggggctgtgtgagatttctggcttctgctgctgctggagctgtcccagctcactccaccctgggctgctcccacccctgcccttctgctcctcaccc

SEQ ID NO: 293499 - DNA, 201 bp, Homo sapiens
caggtgttttctgtgtgagtttgctaagcgctgttgggcgttctggaagtgtctttccaaagcagacattatcaagccagggtccttgtggctacaccagrctgggcggctgtgtggcccttttaggcagctagaactggcctcactggttccggggatgcgtgcggtgagagtgggcacatgtccggtgagcttgtggaa

SEQ ID NO: 293500 - DNA, 201 bp, Homo sapiens
ggtgagagtgggcacatgtccggtgagcttgtggaagtgccctgagaccctggttcctgctccggagtacagaacgtgtgatgatcagcgatgggccaccrtggcgtgactggcaccaacagcgcagagaccataaacatgttccttcctgctgaccggcccgtactcccagggtggtggcccagggcctgtccacctggg

SEQ ID NO: 293501 - DNA, 201 bp, Homo sapiens
tgggtgtgcctggcagcctgaggggtggggagtgggaccaggcactgcagaggcccccagcctcactctgaggctggacctggagtcgcagggtggcagtrccgaacccaggtgtgccacccgcacacacacagaccgtgcaggcaggggcggtggctgctgttcttccatgtgtgtccccctcgtggcggccctgcattg

SEQ ID NO: 293502 - DNA, 201 bp, Homo sapiens
ttgggtggaaactaaccagctggctggagcagtctctgtccttgacggagggagaagcctgcgaggggatgcagaggacctgccccagggcagagctcttygtgaggggcctcgtccctgtgatttgagtccccattgccgtgtagaagggcgcagggcccctggcacaggcctcttctgtggagccctccaggtctgcct

SEQ ID NO: 293503 - DNA, 201 bp, Homo sapiens
cgctttggcctcacctcatcccaccaggcccaggaggtcagtactccagcctgatcggggcactgcccactcagcaccagccagcccatggcatggttccygcattcccattcacccccaggacctagcagaatgcttgagctcatgcataaccttaaaatggtgtttggaagttccaagaagcctggtgtctctgacact

SEQ ID NO: 293504 - DNA, 201 bp, Homo sapiens
gctggctgaccttgagcctgcacccagcctggtggctgtgtctttgtggggtgcctgtgttggtgccggcgctgtggcctggtgagcattggcatcacctsgtgttcctgctctgtcctttgtgcctcaaggctctgcggagcaggagagtcaggggcaaagggagggcctgggttcccgccccaccgcacctccccccag

SEQ ID NO: 293505 - DNA, 201 bp, Homo sapiens
atggttctttcttttgctcagtggagttggaggttttgtgtttggttttctcattcttgtcttgttttgtgtgggtggattttcaccgaccaatgatatcstcttctgacggtcaccttctttccacttcactggagtccagtattctgtaccacatcacgcaacgtgttatcttgtggtgtaaataaagactgcgttact

SEQ ID NO: 293506 - DNA, 201 bp, Homo sapiens; identical to SEQ ID NO: 60559

SEQ ID NO: 293507 - DNA, 201 bp, Homo sapiens
gccttattcatgccattggctcagccgagccctgggccaccccgtgggaaaggcacaccctccctcccaggtgggtacggctaggctcccagggcaaagcyaggtgccccaggaaacccagctgccagcagagccaggcgaggctgccgccttctgaccccaggctcttgtggcttccttggggctctgcttctcagattc

SEQ ID NO: 293508 - DNA, 201 bp, Homo sapiens
gggggaagctgttcacctgctgcctgttgtgaagagaaggggtgatctccaggcaggggactgggcgggcttcggggcggctgatgtgcaaggggctgggmtgggcgggggtcctcagggtgggcttcgagacagctgatgtgtagggggctgggctgggcgggggtcctcagggcgggcttcgggatggctgatgtgcag

SEQ ID NO: 293509 - DNA, 201 bp, Homo sapiens
agtccacggtcttacccaccatgcgatgcttttgcatgagcgtgtgtgtgtgcgtgtgtgcaagagagtcgtcacagggcgcctgcagagtctggacacgyggtccgcagaggggcttccgttggatgggacaccccaacctctgtctttcagctgaacttcaccaaaaggaattgctcagcttatagaggtggcggcctg

SEQ ID NO: 293510 - DNA, 201 bp, Homo sapiens
ctgagacctgggcagagaaaaagaatgttccacgggctcggggtgagagcgccacctgcagcgttccattccagcatgacgctggggcccgggcctccctkctcccagcagggcctccaccaggcgtgggccagtgagatgggaggaggaggcagtgccacagctaccaatgtcatatccacctccaagagtgtctgaagt

SEQ ID NO: 293511 - DNA, 201 bp, Homo sapiens
accccaacctctgtctttcagctgaacttcaccaaaaggaattgctcagcttatagaggtggcggcctggcatgcagttaggaaatcaatcacagcgttgsgggtggaaggcaagggagcggtgtcatctggctccttgagtcttcagccttccttcctgggctctggcaggagcttcacccttagatcctcttctcctta

SEQ ID NO: 293512 - DNA, 201 bp, Homo sapiens
gctgggcacccccaagtccccggtgtgttaccccacagcagcttgcaggcaagggacacacttggggacagatgctcaggttccctggggccagcccaagsgctgtgtatttcatcttaacacctccctcccctggccagactcccataggagactgctctgtgcagaactggctgtccaggtctctgtctgtcgactttc

SEQ ID NO: 293513 - DNA, 201 bp, Homo sapiens
ggtgttcatttccagtcttccctctgagatcaggtgtgagaatgtcttctggtgtaagatgatcagtctttgttggaaaatgactctttgaagaatgcccrtgctggttagaggattctagtttgacagttaccatcttctagtacttctaagcagtccttctgcactgtgaaagatattactgttttctggtttacgtgt

SEQ ID NO: 293514 - DNA, 201 bp, Homo sapiens
tttcagtctcgttccacctgcgcactagctctcttgcccaccacatcccgccagctcctgcccagccccagcacctcccaaaggggtccggcgtgcaggcygcttccccgcatggtcagccccacgtccactacttgctgtcaccaaggcacagaggagagcagggccaacatgcctgcggggatgagggctgaccaccat

SEQ ID NO: 293515 - DNA, 201 bp, Homo sapiens
gactctttgaagaatgcccgtgctggttagaggattctagtttgacagttaccatcttctagtacttctaagcagtccttctgcactgtgaaagatattaytgttttctggtttacgtgtttccgttgagaaatcaccagtcatcctaactgctgttctttgtaggtaatcccccctccccctccacggccgtttttgttt

SEQ ID NO: 293516 - DNA, 201 bp, Homo sapiens
cacacgcagttctgtgcgcccacctccacgcctttcagaatggcggctgctcctgacaccttcatccattttcaaaggaccggctgttggtccatcccctrccaccttcagtctttcaaacctgtggaattcagtgggcggaggatggaggcaggaccagctccaccagcagaaggatgaaggcaggcttagctccaccac

SEQ ID NO: 293517 - DNA, 201 bp, Homo sapiens
ttttgcatttttcagttctagaattctcttttcaagtttccaactcatcttcttaaacatagaaatcatcatttctttaaaatctatttctaaaactgcckcaggatcttaaattgcattcaactcttttatcgttactagaacactattgatattcctactttgaaactattgtttatgggtcctggtattgcagcaaat

SEQ ID NO: 293518 - DNA, 201 bp, Homo sapiens
taccaccggaagccgtgtcacatcttttctttgttaaacaagagaccttcatagaggaagcccggttttgtggaattgttgttcatgagaagagaacccgyagagcatccgtccctgcccagcgcacctgccctctggaggtctctcccctgtgggcggggactgagttcttggctccgccccttcttcctccaccctgca

SEQ ID NO: 293519 - DNA, 201 bp, Homo sapiens
gtcagatactctccccttcacagcggtcccacgtatgctgactgagacagggtggcatccaacacgggttcaggcacattgcctttcctgctgcagagccycaggctgccggcccagttggttctggggcccccaccaggagcctcttctgtggctgccgcaccctgggggcccgtccatgctgagctcagtgctgtggtg

SEQ ID NO: 293520 - DNA, 201 bp, Homo sapiens
gttgtttccacaggtggacagtgacaccatatggaacgaggtgcactcggcgggggcagcccgcctggctgtgggctgcgtggtagagctggtcttcaagrtggccacaggggagctgaaggtcagtcggggcctggacagtggtggccctccaggaggcctgccatagattcccagtgtggggaggggccgcccactccg

SEQ ID NO: 293521 - DNA, 201 bp, Homo sapiens; identical to SEQ ID NO: 60561

SEQ ID NO: 293522 - DNA, 201 bp, Homo sapiens
tcgtccacaggtcctgtccgacaggcccagggtgggggcctcttcctgtggtcgggccttgtaagttgatgaagatctgaaattcagtgtgctattattakgctgataagaaatgggaaactatttacattaataatttttagggctagtttctcatagatcagcctttactttgagaaaaagaggcttgttatattccaa

SEQ ID NO: 293523 - DNA, 201 bp, Homo sapiens
cagattctttgttctttgctctccctccggtgcaccgagtgataagggccccgctctcaagaaacctcccatacaccactcagtcagtcacatcccgttayacatcagactgcaccgggccctgggggagctgcaggaactgagcgtatgggtgccctcttgatgagtgtcctgaaagccaagacttggatgccatcttcg

SEQ ID NO: 293524 - DNA, 201 bp, Homo sapiens
atgtcctcagcctgtggtctgagccctgtctcctcatccttagcctgttgcttttccttccacacctgcagcctccaggacattcttgcttcctgaaggcycgtcctggctgctgctctccctcctcccgaatccctcctgctcctcatccagggcattgtcctcagcgctctgtgccaccttcttagggaattgttctgc

SEQ ID NO: 293525 - DNA, 201 bp, Homo sapiens
ttctgtctccaaaaaaaaagaggaagtcatcatttccctagttggatgttgttttccagatcggaacttccatgttgtaactccagtctcttttctccttytgaccttgcaggttcatctgcagaagccagcggacgcctctgttcaacttgtgggttacctggctcatgagaccttgccggcgaggctcggcgcttgaac

SEQ ID NO: 293526 - DNA, 201 bp, Homo sapiens
tctcccagctctctctccgcctcccccgccttccgcagcccctccccgccctgggcgacactccgcatggtggctgaagtcggaatggaaggtccttaccrtggccttcggacctgcagccgtgtctcctctgtctgccccgtgggaacccccaggcttgttcccctcccaggccttgcccttgctgttccctccacctcg

SEQ ID NO: 293527 - DNA, 201 bp, Homo sapiens
tccactgtggtcagcgccctccgttctccacctcgctccagggagggatctctgctttgatgctcccagccgcgcagttaatgtgcctgcctagactttcsgcaaatggccactttgagtttattgttctaaattagtgactcatttttcgtgagctacttattaacatgcacctattttccagcttcctgccacctaacc

SEQ ID NO: 293528 - DNA, 201 bp, Homo sapiens
cgagtttgtgatgttcagcagtgtggaaaatattctgggagaatggttcgtctgtatagtggttttcgttgctgagtcacgtttggtgagcagcttgttcrgctcagatgccctggcgtggagggcacgggccccggctgcggcactgaagcaaaggtgaagcgggaggagcaaagggagtctctcgccccgcacgtactg

SEQ ID NO: 293529 - DNA, 201 bp, Homo sapiens
gcaaagggagtctctcgccccgcacgtactgtgtgcctcgttctttatctgtgttcgtttattcactcctcatgtcagcctcgtctccactcgacaggggrgatattccaccccaaaccctgcaggactgcctcccacacgggttctacgtccaggtggagggtagatgcgggtaggaattgtataatatttgttagaatt

SEQ ID NO: 293530 - DNA, 201 bp, Homo sapiens
ctcggtgccaggacctgtggcaacaggacagccccattcagcccccgggcagccccttttccacactgattcctgacactgctcctcgcgtcctgtggccygcagcaaccccggtgcttctccggctgccacgcctcctgggtgcatggatggtttctccgacgggggaggggaaggggcgaggtgctgtgtttccactgc

SEQ ID NO: 293531 - DNA, 201 bp, Homo sapiens
ttctgagttttgcttgctgctactccatttgtgcttgcatatagcctgtgacgtgagctggacacgttatttctgttttgtagatgaggaaaccagtgttactgctatcgagtgcttaggtaggctgaggctgggcagcgcatcagaggccaatctggcaccgctagaatcggtcaccttccctcaaggagtgtgcgcctc

SEQ ID NO: 293532 - DNA, 201 bp, Homo sapiens
aaggtgaaatgtgggactgaggtctccaagtcttcagaatcaagcgtggaaaagagtttaggtgtagcttgtgtggagctcttgctgccttcctgttcccraaaaccccctgggcctgaccacgctggtttgtcacaggaatgcaaagttagtttgacatgagaaaaaaaagtttactacgttatcagatggaaggggaaa

SEQ ID NO: 293533 - DNA, 201 bp, Homo sapiens
ggcttggtgcagctgaggctcagggaagagctggggtgtcctggggtgagggagcagcagcaccagcaggaccccatgccccaactgctgcagggaccatyctggcctgaatgtgttagaaactaggagggtatctggggtggggacacatcccactcttcttgctttgtgttcaggcccccagcctctttctgtcatgat

SEQ ID NO: 293534 - DNA, 201 bp, Homo sapiens; identical to SEQ ID NO: 60555

SEQ ID NO: 293535 - DNA, 201 bp, Homo sapiens
tcttgctttgtgttcaggcccccagcctctttctgtcatgatgtcttgatgtctccctactcagctgctagcacttctgctgagggaagcagtcacaaagsccggtggccctggcctgagcatggatgtggctttcttggttcttggctgcggtttccttgaactctctgtggtctgcaggacctgatgcatgagaatcac

SEQ ID NO: 293536 - DNA, 201 bp, Homo sapiens
ggggcactgatggaatgaagggaagcgggaggagagggtaacgagtagaggctgccgctgccccagttgtattagagggtggtgagggacgtggtggatargaagctgcatgggcctccaggaactcactgcactggctttgagtcgcgagagaggtgccacgggaggtctagaaaccgtgcattttgggactgagataaa

SEQ ID NO: 293537 - DNA, 201 bp, Homo sapiens
gcatccaggaaagtgcaagaatcatgactgcttagcttgatgaactctcccaaaaggaagatgcctgtaactgctacccagattgtgaaatgggacatccyaacacccagaagccccgtatatgtcctctctcagttactgtaccctcactctcacaccctctagataccacttctctagcttctaacatgagtttctcct

SEQ ID NO: 293538 - DNA, 201 bp, Homo sapiens
gtgataaggtgccctgagtccctgattgtctgccccagagggtggggtttgcagcatcccttctcctgtcagatgagctcagaggacccagctctctgtgyttcatgtgttacctccgccttgcagatcatccccaagccaagcgagccagcccggcagccggagagccacccggaggagacggaggaggagctccgtgag

SEQ ID NO: 293539 - DNA, 201 bp, Homo sapiens
ctttttggcatgtcttaaaaagattgaaggctgaacgtgggctgcagctgccctggctctggtaggccctggggtttcagaagcagagcccacggaacctsagctgctctgcccagccagggctggtgatgacggtggcctgggagggtgacctcactgtggggtgttgtttccacaggtggacagtgacaccatatggaa

SEQ ID NO: 293540 - DNA, 201 bp, Homo sapiens
cctggctgtaatgacatctccttttcgtgcagcttctgaaccgaatctgaaattacggtccaggctaaagcagaaagtggccgaaagacggagcagccccytgttacgcaggaaagacgggccagtggtcactgctctaaaaaagcgtccgttggatgtcacaggtatgtcggctgagcaggtacacccgccccgctgccc

SEQ ID NO: 293541 - DNA, 201 bp, Homo sapiens
gagcaaatatttactcaccagagtgcgtatttttaaaaaaccaccaacaggataaccttgagccagtggtgtctgcctggctgtaatgacatctccttttygtgcagcttctgaaccgaatctgaaattacggtccaggctaaagcagaaagtggccgaaagacggagcagccccctgttacgcaggaaagacgggccagt

SEQ ID NO: 293542 - DNA, 201 bp, Homo sapiens
tttaaataacaatagggaacttcgctttcagccgtggcctgttcttgcttcctgatgcgtgtttgcgcttctaacaagaaaatgttcttttacttaaacaygtcaaaaaggaggaagcactagttttatcaaggtctctttaaaagtctctttaatgcacaagagttggcctgggccccgcccctctgcccggcagccttt

SEQ ID NO: 293543 - DNA, 201 bp, Homo sapiens
agtcacgtgaaggccaagctgggacacaacgtctctgccccgcggccaagtccttgagtggggccccttctgcttcatcttcctccagtggccacctagcrggtcctggtcccgagccgacggggagtgagcacatcctttccacatcaccccgacccctgagccaagggcaccacgcctcaccgacagttctgagagtgg

SEQ ID NO: 293544 - DNA, 201 bp, Homo sapiens
cacagagtggaggctactgttctggagcaggctgagaatgggagaggagccccacagcggggggtacagcccagctgaggccagaaagtggggtcccacgytggataaaggagcctgttacatcaagccagtctccctggagcatgtgagatgtcactccagctccagcccaggaaggggccgggggctgcggagagtgag

SEQ ID NO: 293545 - DNA, 201 bp, Homo sapiens
cgttccacctgcgcactagctctcttgcccaccacatcccgccagctcctgcccagccccagcacctcccaaaggggtccggcgtgcaggccgcttccccrcatggtcagccccacgtccactacttgctgtcaccaaggcacagaggagagcagggccaacatgcctgcggggatgagggctgaccaccatgaggttcag

SEQ ID NO: 293546 - DNA, 201 bp, Homo sapiens
tgaattggctcgtgggcctgaggcaggctggccgctgccctaggcgtcactgaaagtcacgtggctcatctgctcatgtcagctggcagggtgctgcatcygggcagagctgggcccctggcgagtgggtgccggtgatgctcagggtagggtgcggcaggaaaatgacttggcacagcgagggcctcctcccagccaggg

SEQ ID NO: 293547 - DNA, 201 bp, Homo sapiens
atgttgtcactaaaggacactaaagagatgcggcccctggcagcacacgccatccgcagccagccggggaagggccatccaagagcccttggaacagtggrgaggtctcctgatgcacagcacggtagacgcggctgccgaaagcctcaggcaggcaggttgcagtggccttggggcccctgaaacagccccccaggaaga

SEQ ID NO: 293548 - DNA, 201 bp, Homo sapiens
ccaaaacagccagtgaaaaagccaataaacatgtaagaagatggtcagtgtcattggtcatctgggaaagacaaatgaaaccttcaagagacaccctttcwccccaacctgggcaggactaggtgttcccaggcaggtcccaagggtggaaaccacactttctccccactcccttcccctcccagttcaggagcctgtgcg

SEQ ID NO: 293549 - DNA, 201 bp, Homo sapiens
acctgcagggagtgggacgcgcagggccagtgccctctcccaccagcccgtgtgagttccgttggaccagtgccctctcccaccagcccatgtgagttccmctggaccacgtcctgcctgtggtgcatcagtgccagcgaatggaatagtctacttgggcaacacttttttcttgggtttcctaaggccatttagtaaaca

SEQ ID NO: 293550 - DNA, 201 bp, Homo sapiens
ccagttggtgccagttggctggtgtcagaaaccaccccacccgccagtatacaggattggacatgttaaggtcaaggtctggtttacgcagggaatccacrtgctgttatcgaacggcattctccttggtgtgccagctagtgcaagcatgcaataaatgtcttcttgaagggtaggtgggacgcggaccagcccagtgcc

SEQ ID NO: 293551 - DNA, 201 bp, Homo sapiens
tttcctgtgtcgacctgattttcatagaaaattgcctccaaattatggttcctatagtcccaaagcaccagctcacggcccccagcctcagctggaagggrcccagttagcgagccagctctggggcaccagggcagaacgcctgggctggcgggcacagggcgcagttgtctccatcacttactcaatagccctctctcc

SEQ ID NO: 293552 - DNA, 201 bp, Homo sapiens
cggagagggaagggcacaggtggagggagatgtgtatgcctcgtggaggtggccctgtcacagatctttctagcatcctgaaacagagcatgccaccagcrtcttaaggacaggtggagggagatgtgtatgcctcgtggaggtggccctgtcacagatctttctagcatcctgaaacagagcatgccaccagcgtcttaa

SEQ ID NO: 293553 - DNA, 201 bp, Homo sapiens
ctgtaactgctacccagattgtgaaatgggacatcccaacacccagaagccccgtatatgtcctctctcagttactgtaccctcactctcacaccctctasataccacttctctagcttctaacatgagtttctcctggttttgaacgtcatataaatcacgtaatacttattcttattgtctggattatttcacttgaca

SEQ ID NO: 293554 - DNA, 201 bp, Homo sapiens
aaactaaacatatgacaagccaaacaaatccttgtgtgaatatcgagagcctcagcggcctcccacggtggatgtgtgtgcccaaaatagcagcagacccyttcagaggtgaagggatctttggattggacgtggccccttttggaagtcacattcagtcagagcggaacctggtctcattaaccagggtcaagccgcacc

SEQ ID NO: 293555 - DNA, 201 bp, Homo sapiens
tgccccagcttggcactgcgggagatgcagtcaggagcttgagttgaggctcctctgaaggtgggtcttaaccagtcccaccctagtagtggtgaatcgcrtgctctgccctgttccgctgcccctgagcagtgtctgaaccaccggggcattttaacgtcttcccacgccagagcacccatcaactgagcagggagggaa

SEQ ID NO: 293556 - DNA, 201 bp, Homo sapiens
tcccaggctcaagcagttctcgtgccttagcctcctgagtacctgggattacaggcacatgccaccatgcctggctaattttttctattttttgtagagayggggcgtcaccatgttgatcaggctggtctcgaactcctgacctcaagcaatccgtcctcctcggcctcccaaagtgctgggattacaagcatgagccac

SEQ ID NO: 293557 - DNA, 201 bp, Homo sapiens
gtgtcagagcacagccacggaaccgctgtcccttttccttgagccgaggagccgagtcctggcaacgtggtgttcggggcctacctggctgcacctcccctccctccgtgtgtctctcgtgccgtcctctgctagctggccctgtccttcgccctgcccacccggctcactcttgcctgcctggctcacccttgcctgccc

SEQ ID NO: 293558 - DNA, 201 bp, Homo sapiens
ccacacaggcagagctgttcacagaaaccgacccacgcccagtaccttcaccctgtggtcagatgaaaggtgaagccggcgcagatgttgggatgggctcygctgagcctccccaggtcggggtggggatagcagcctcacgctctggaggcctcactgactgacacagctggggcgatgcatgggcgagcaagaaagtgt

SEQ ID NO: 293559 - DNA, 201 bp, Homo sapiens
gctcaagcagttctcgtgccttagcctcctgagtacctgggattacaggcacatgccaccatgcctggctaattttttctattttttgtagagacggggcrtcaccatgttgatcaggctggtctcgaactcctgacctcaagcaatccgtcctcctcggcctcccaaagtgctgggattacaagcatgagccaccgtgcc

SEQ ID NO: 293560 - DNA, 201 bp, Homo sapiens
ttttttacattccatctgcatcttcaaatgtattgaaataaagttgtttaaataccttctcattatctttgtaatgactgtaggatttgtagtgtcatccycttttaaattcctgatattgtttgttctctcatttttccttcattggactttgctaggagcttatttattatattaatattttttaagaactgtgtttgg

SEQ ID NO: 293561 - DNA, 201 bp, Homo sapiens
gtccatgtgacttgtgctatggagagcacagtggataggagagagttttcagagctgtttagttgatagtgtgactcttcctttcagggaggaactaacayggaaagaacctagttttctggcactgggagcgtgggtcatgatccttattctctttaatacctggccgaggaaggtgaagagatgttgcccaggcccagc

SEQ ID NO: 293562 - DNA, 201 bp, Homo sapiens
caaatgtattgaaataaagttgtttaaataccttctcattatctttgtaatgactgtaggatttgtagtgtcatccccttttaaattcctgatattgtttrttctctcatttttccttcattggactttgctaggagcttatttattatattaatattttttaagaactgtgtttggttttcttgattttttaaaattgaa

SEQ ID NO: 293563 - DNA, 201 bp, Homo sapiens
tcaactcctgagaaaggaattttactagcagataatggagggttcctgtcattccaataggaggacccgcctttggggtctgcacagctggtggggtcccygtggaccccttctgagtccttctgggagtgggctagcccaggatcggctggtggggaggtagctgcactgggggggatgtggggggttggcattgcagga

SEQ ID NO: 293564 - DNA, 201 bp, Homo sapiens
gaacgttcatcgggccccggcttgccttattcatgccattggctcagccgagccctgggccaccccgtgggaaaggcacaccctccctcccaggtgggtayggctaggctcccagggcaaagccaggtgccccaggaaacccagctgccagcagagccaggcgaggctgccgccttctgaccccaggctcttgtggcttcc

SEQ ID NO: 293565 - DNA, 201 bp, Homo sapiens
gctcaggcctgtaatccctgcactttgggaggccacagcgagaggatcacctgaggtcaggagtttgagaccagcctggccaacatggaaggaagggaggragggagagaaattagctgggcatggtggtgcacacctgtaatcccagctactcgggaggcaaggcatgagaatcatttgaatccgggaggtggaggttgt

SEQ ID NO: 293566 - DNA, 201 bp, Homo sapiens
ttaagttcgcactggtgagttgtggcaggattggttttcttgtaggatggctcagggctgtgtttctttcagctaattgtggctacatttttgcctttgcrtgtccaatttgggtttcaaattcaggattgtccaagtactctatgtttgaaaatattttccagagaccccagatttcttatttatgtgcgttagttactt

SEQ ID NO: 293567 - DNA, 201 bp, Homo sapiens
gccatcatggtcctgcagtgccgcgaatcaccacagacggttacaggcagggaggacgggagccggtggacagcaggagccgctgcagccgaaacggtgcrgtgtgtgtgtaatcactgatcgcagggtgaagctcaaggtctggattctgttatggaaatgaaacaaaattgttttcttcctgagtttttataaaaatca

SEQ ID NO: 293568 - DNA, 201 bp, Homo sapiens
gctgctcaatcccctccccgagccccgcatccaaaaccctgcttgtctgataggttctgcgggggagtcagagtgctgaatagcccacggggcagggacgrgcggagggccccagcctcatgccatgctgtccctggcagtgctggcatggtgtcctggagcctcctggtcagctgcagccaccctgcaggcagagtcgac

SEQ ID NO: 293569 - DNA, 201 bp, Homo sapiens
atctagaaggtggggaagtggtggatgagcagaggacctgagatcggcttgattacactattcttcatgcttttgtgtatttttggaatttctcatgaaasataaaaatatatattccagagaaaggtcataagctcacaaagatggggagaacagaagaggggcgacacgaatgagagcctggcaactgacagcaggtga

SEQ ID NO: 293570 - DNA, 201 bp, Homo sapiens
tcaccctcatcatcaagagtgagccgtttgtggcacgtgcaccccacccactatggcaagatgcctccacacaccccgcagcagcgctgggtttgtctcaktcactgcagttctttctgggcttcccgagaaggaagggccacaagagtctgtccaggtgctggggcagacattggtgacgtcgcttatcgaagccaggag

SEQ ID NO: 293571 - DNA, 201 bp, Homo sapiens
ccaaagcaccagattcgttttattcattatttgggactgatgaatgggatttagaatcccctgcttcgtgagctccctgcgctctcccctgcagcaacacrgcagtgttgagcaaatatttactcaccagagtgcgtatttttaaaaaaccaccaacaggataaccttgagccagtggtgtctgcctggctgtaatgacat

SEQ ID NO: 293572 - DNA, 201 bp, Homo sapiens
gatcctcatcgctgagttccagaggcagcacgagcagctctcccggcagcacgaggcgcagctccacgagcacatcaaggtgaggcgcggtgcggggctgygggtgggccaggcctccggcaccctcaactcccggtgactccagccctgcctccgcggagtgtgctggggccccaggcatgatgcagggttcctgcagga

SEQ ID NO: 293573 - DNA, 201 bp, Homo sapiens
gggtgtggctgagcaggttcacgaggtggatcctgagctagtgccggggacaagggccaccgacccaccccacagactccgacagctcaggctcagcaacwgcagaggctatggactcagggaggcactcagtcaagggcctgggccaaagctggtggaaaggcctctgggccccgactccctacacagcggcttcgcctg

SEQ ID NO: 293574 - DNA, 201 bp, Homo sapiens
cagatccagaggcagatcctcatcgctgagttccagaggcagcacgagcagctctcccggcagcacgaggcgcagctccacgagcacatcaaggtgaggcrcggtgcggggctgcgggtgggccaggcctccggcaccctcaactcccggtgactccagccctgcctccgcggagtgtgctggggccccaggcatgatgca

SEQ ID NO: 293575 - DNA, 201 bp, Homo sapiens
gttcaggcacattgcctttcctgctgcagagccccaggctgccggcccagttggttctggggcccccaccaggagcctcttctgtggctgccgcaccctgrgggcccgtccatgctgagctcagtgctgtggtgagcacatggctggcctcttttcacagtcagaggttaagtagacctgtgtacatgggttttgcgtgtg

SEQ ID NO: 293576 - DNA, 201 bp, Homo sapiens
agcacagacatgtcccggcagggcctcggggcagccctcctgccaggtgtcaccaggggccaaggcctggtgagaaggggccggggcagagctgtgccccrgagggccacctggccttccctcgcatctctagcctctgcagacaggtcagatactctccccttcacagcggtcccacgtatgctgactgagacagggtgg

SEQ ID NO: 293577 - DNA, 201 bp, Homo sapiens
gctttctttgtgcctcggcctgggtggcaggttgctgtgctctccctcagctgctgtctggggagaggcttggcagctgtgacctcatctctgccctgctycctccactccactctgcctcgtatgggggtttgcacctcagcctgttcccagaatccctcagggtgtcccaggcccctggctgagtgccccccccacaca

SEQ ID NO: 293578 - DNA, 201 bp, Homo sapiens
agcctttgctctgctcacattcatcccttttctggctcccagatgtgatggggcagctccattgcccaaaacgaaggagttgtcctggccaccctctcttkcctctccatatgcagtctgtccctgggcctagagctgcttcctttttggtgtcatggaaacctgttctttctcccatgccttagccagacgtggggctgg

SEQ ID NO: 293579 - DNA, 201 bp, Homo sapiens
tttgcaccattcctgttctccgaaggcaaccattctagtcagtttcttttgtttacaggaaggttgatcattctatttcttgttctttcctggaaagcttygtgctttaaaatctgttcacattcctgtgaggatgcctctcccattaccttctcacaactcaagatcgatttttgaatttccgacaattgtcctaaccca

SEQ ID NO: 293580 - DNA, 201 bp, Homo sapiens
ccgttccccttagctccagttcccgcgccctcagcccttagctctggtccccacaccctcagctctgagctctggtccccgcgccctcagccctgagctcyggtccccgcacccttagccctgagctcctgtccccatgtcctcagcctgtggtctgagccctgtctcctcatccttagcctgttgcttttccttccacac

SEQ ID NO: 293581 - DNA, 201 bp, Homo sapiens
gcccccccatttccctcccccaccttcctccttctccccttgccctttcctggcattgtacccacccttctgctggccctctggtctcctctccttgtctstgtgtgcctgtgcctatgtgtatttgtgtatctgtgtatctgtctcttcatgtgtatatgtatctgcatgtctgtctatttgtgcatctgtctgtgtctg

SEQ ID NO: 293582 - DNA, 201 bp, Homo sapiens
ccttgtcctccaccccaccctagagaagggacctgcctctgtgtcctctatggggttgctgccctccatcacttttatccacttcagaatggcccctgggytgctaaagaaaggcaggcacaccacttcggtcattgctgggatggggcagccccacagggtcccctctaaggtcctagccttcctcccccacccctcccc

SEQ ID NO: 293583 - DNA, 201 bp, Homo sapiens
gaatgtatctgaggttgcgtctgagtctcttggatgctctagatcagctggcacgagtgtgggtagtgaaggacacctgagtttctcgcctgtctttaaawacgtaaaatgtgcctgatcttcaggattcctgggattcacttcgtcagagatgtttgtcacttatcttctttccttctctaaatcagtttattctgcacg

SEQ ID NO: 293584 - DNA, 201 bp, Homo sapiens
gggtcctgcatagattgcccccaccgtgacttcctgtatcactgtcgggggatgaggatgtatcctggagcaaggagatgatgccacgagcagctgtcacrtgctcccgtagctgacgccagatgagcacctgcttggggctcgtgctgtttcatgcactcaccatgtaggtgtcagcacagtcctgcaggtgggctctac

SEQ ID NO: 293585 - DNA, 201 bp, Homo sapiens
aaccacccggtcctgggaatgtacgacgccaaagatgacttccctcttaggaaaacaggtcagtgcccaggcatgctgtgggccgggaggtctcctgcackggcaccttccacgccacaagccacgcagggcccaccgctgtcttccacttagagaaggaatcacctgcagatttttaaatattttctcctttcatagagc

SEQ ID NO: 293586 - DNA, 201 bp, Homo sapiens
tcttttgaataatggcaagaaacccagcgtggaaatagaagtggagcttgtgaatctacgcttgcctcggtcggttgtgttaggcacagaagtgtgccctsgtcagtagcccgtggagaggccggcttgtggctgaatccgtcatctgtcgtcatccaggtcccccgtgccacagcacagaggcctcgctccctgcagagg

SEQ ID NO: 293587 - DNA, 201 bp, Homo sapiens
ggtgcttgggcgaacacagcctcttagagaagaggacgatttggaatacctttctagttcagtgtcgttagactttctagtgctgtgttgactgttcttgrcgctgttacaggcgcgtttcataggtctgggcagtacttctggctttctcatgctgtcttatgtcacgtgtgggactgcagaactagaagacatcatgtt

SEQ ID NO: 293588 - DNA, 201 bp, Homo sapiens
cttctgaaaccagtcactcaaggtcacggctgcccatgggaaacatccatccattgcttagatgtgcagatagggtgggttttcctccattttggggggargctgtcccgcttggtgaggaagagcacagggcctgtggccaggctggcgcccacgacaccatatcctgggcagactagatgacctcccgttgtgtccgca

SEQ ID NO: 293589 - DNA, 201 bp, Homo sapiens
tctgttggcttttcagggctcatctcctcgctcctggcttgccttcacctgagtgccatctcccaggaggagcctccaccgctgggcttgagagtcagagmcctctacccagggcctcaggtccagctcttcctgccagaggccccgcccctttcctgggagattggcagcaggggtgtctccacttcagaggtcttcacc

SEQ ID NO: 293590 - DNA, 201 bp, Homo sapiens
taggaaacctctaaagggtacttaacccccagaagattttgcaagtgggagtcttgagcagcttgctctggagcttgctcctgctctgtggagtgtacttycgcttaaacaaatctgtgctttcgttgcttcattctttcattgctttgtttgtgtgttttgtccaattctttgttcaacatgtcaagaacctggacgact

SEQ ID NO: 293591 - DNA, 201 bp, Homo sapiens
atcagaaacccactagaatcatggattttgtatttgccaataattaatagctagaaaagttcaacagcaaaatagttttgattaaaatacatatttttacrtaacagaagagtcctaccaatttccttatttccatatttggcaaatttagatttacctatgtcatttgtcactggtggagatcagcattccattctctat

SEQ ID NO: 293592 - DNA, 201 bp, Homo sapiens
ttttctcaccagtgcaccagtgttatagtcaaacgactggcattgcttgaggaccctctgtcgttggcttaaagttgcggtttccaagaacctgtggacarcgtgaaatgtggactcctgtagttaactttctcctgtaaagagctttcctttcctccttatttatgtgtttccttattgtttacttatattagtttgaac

SEQ ID NO: 293593 - DNA, 201 bp, Homo sapiens
gttgattttgctgcccagctggttcctgctctggccctggggcacctttcagactggccctgcatgtcctgtgatggccccgtcccttgaccttcaggcaygtcctgatttcccagcaccacgaggtgctccaggctctcgtgtcttgtattttccccgccccagccttggaccgagctgttctccaaggagcctgcttcc

SEQ ID NO: 293594 - DNA, 201 bp, Homo sapiens
ggacatttacatcagcgcattttgttaagtacttttgttgctttccattaagagcatatttaaaaatatgaaatgaattcaggcagaagccaggctctgcygctgagaacatctgtgtgctggtgagagggagagactgggcggtggataacgggctgcagcttcctcctccgccacctcggaacgcccccggggaggcac

SEQ ID NO: 293595 - DNA, 201 bp, Homo sapiens
tatctgtctttcttacactttgggtcatgcttcaataccacggtgttgattttgctgcccagctggttcctgctctggccctggggcacctttcagactgrccctgcatgtcctgtgatggccccgtcccttgaccttcaggcacgtcctgatttcccagcaccacgaggtgctccaggctctcgtgtcttgtattttccc

SEQ ID NO: 293596 - DNA, 201 bp, Homo sapiens
gctgggggaacaccctgccccaggctggccaccttgactccttgctctgcaggctgcccccggcacctcgtctgcctcccgtcggcagccagtgagaggarcgtggggcctgagagcattgcctgcctgctggccggccgcccccacagtgcagagctggagcggtcttcagaggctcccggtctccctctgcagatgaag

SEQ ID NO: 293597 - DNA, 201 bp, Homo sapiens
cgtgatggtggctcagctgctatggcatgtccagattgcgccttggccacagtgtgattcgtatcgaggccgagccgaggcccctggccctgaggatgacycgagcggtctgatggacactgtgccacggctttgccgtctgtcatgcttcccagtgtgctgggagagggagctgccctgagactgtggctgtgcgtaaat

SEQ ID NO: 293598 - DNA, 201 bp, Homo sapiens
tgggggaacaccctgccccaggctggccaccttgactccttgctctgcaggctgcccccggcacctcgtctgcctcccgtcggcagccagtgagaggagcrtggggcctgagagcattgcctgcctgctggccggccgcccccacagtgcagagctggagcggtcttcagaggctcccggtctccctctgcagatgaagac

SEQ ID NO: 293599 - DNA, 201 bp, Homo sapiens
gcgcggctcctccaggggcgcactcttgttggaaagtagagtgaggaggagctcggctttttaggctttttagggcccaggtgcatcttggtggagccacrttccagctgctctggtgccattgacccaaccgctctaagcctcggttttcttctccacacgatcagaattgcagtatccctgccctggctgaattgtttt

SEQ ID NO: 293600 - DNA, 201 bp, Homo sapiens
acactgagggaccaccccatagggcacagcctccaggacagacactgggggacccccccccatagggcacagcctccaggacagacactgagggacccccyctcatagggcacagcctccaggacagacactgagggacccccccatagggcacagcctccaggacagacactgggggaccccccctcatagggcacagcc

SEQ ID NO: 293601 - DNA, 201 bp, Homo sapiens
ctcccggtctccctctgcagatgaagacactgggggaacgtggcctacccacagtcagcaggctcccctctccgtgtaccaggctagtctgccggcgccayggcagctgggccaccaccacattctgccctcagtgctgtggtgcagtcgaggggtgtgccttggaggacccataggaagaccaacttcatgtccatggga

SEQ ID NO: 293602 - DNA, 201 bp, Homo sapiens
ctcaaacctgcacacctctaagaggaggtttcttccaggcgaaggtggggggttttgtaaagtaaggggtgggaggctctcctgggcattgcgttggtggyggccggccctgtggtcctggccaggcacgcagcggcgggactgaggctggaagtggcctcctggcctgggtgcaccgggggatcttctggccactctcca

SEQ ID NO: 293603 - DNA, 201 bp, Homo sapiens
ctgagggaccccccccgatagggcacagcctccaggacagacactgagggaccaccccatagggcacagcctccaggacagacactgggggacccccccccatagggcacagcctccaggacagacactgagggaccccctctcatagggcacagcctccaggacagacactgagggacccccccatagggcacagcctcc

SEQ ID NO: 293604 - DNA, 201 bp, Homo sapiens
tcacctgggcagtgtggggggcatatagggggaacatggggtgcctgatgtagtgcctgtgtttgaccttgtttaggtgaagagcaccctttccagcttaygttttgtatcatgaccgggaaaggtacgaaacaagtgtgtcggggcccagatgatttgatggctctacgggccgagtatgggacacaggatagcttggcc

SEQ ID NO: 293605 - DNA, 201 bp, Homo sapiens
acatggggtgcctgatgtagtgcctgtgtttgaccttgtttaggtgaagagcaccctttccagcttatgttttgtatcatgaccgggaaaggtacgaaacragtgtgtcggggcccagatgatttgatggctctacgggccgagtatgggacacaggatagcttggccctgggtcaggtattagtcagtccttgctggcac

SEQ ID NO: 293606 - DNA, 201 bp, Homo sapiens
ggaagcaggtgcctccttctctctgcagttctgcctgcccgccctgtcccacggcgatattgcgtgcattctctgctgctacatcaatgggttctttcctmgctggccgctggacattgcatcaggcccacaaagaaaccgccctccacactggtgccaggtgcacgcctgtcccctctgtaaacccggcccctaagagtt

SEQ ID NO: 293607 - DNA, 201 bp, Homo sapiens
ccgtgtcagccctgaggcgactgccatcgctttcagaaacctgactaccaacctggatgaaaaccgactgcttggtcatggccatgcagttagaaaacacwgcagcaatcctcagatgagtgtggccgtatttgtgttactcaagctgctttgtcatctgcatttgaagaaacgtggtgagcctcctgtgtgtgcccatgt

SEQ ID NO: 293608 - DNA, 201 bp, Homo sapiens
tttaggatttcagggcagagcagctggaagcaggtgcctccttctctctgcagttctgcctgcccgccctgtcccacggcgatattgcgtgcattctctgmtgctacatcaatgggttctttcctcgctggccgctggacattgcatcaggcccacaaagaaaccgccctccacactggtgccaggtgcacgcctgtcccc

SEQ ID NO: 293609 - DNA, 201 bp, Homo sapiens
ggctcttggagaagtcgtgcatggagcatgagtttttggagtcctcatttgctggtaaatcactttattctgtcgcactcttggatgatcagttggttggracgggtttcctgcagggttttcaggtcatcgtcttgccctcgatgtggctgttgccaagtacaaaactgttctcaaggccgagcctttgtccccagagct

SEQ ID NO: 293610 - DNA, 201 bp, Homo sapiens
tcgtgtccctgcctgtccagagcagaggagcccgtggtgtaacgagggagggggcagccctcacagtgcctctctgagctgcggccacagtggcaggcacrcggatctctctggaggaatgtatctgaggttgcgtctgagtctcttggatgctctagatcagctggcacgagtgtgggtagtgaaggacacctgagtttc

SEQ ID NO: 293611 - DNA, 201 bp, Homo sapiens
tggtggattttggtgttttcttgttttgtgctgcccatgtgtctctgtttagacagagaggattccttcttattccttctttgcccagaagccaaatggcrcaatctttgttttgtgcctgagcccctttctgtttgtttctccagaagcttgaattcgtgtccctgcctgtccagagcagaggagcccgtggtgtaacga

SEQ ID NO: 293612 - DNA, 201 bp, Homo sapiens
tcagagacgcaggagctgagtggcaaggcagggaggagtggcgcccaggctggccgagtcgcacactgaccatactcggaggctttccagggcagcaggtscgaggacctcgctccgtgttccttgagctcctttgcgccccctgcctttatcccacacgtgtcccgagcgccttgtgccaggcccagggacagaaccagg

SEQ ID NO: 293613 - DNA, 201 bp, Homo sapiens
gcatcttccactttggctgcctttggcagaattattggagttacaggcattgtgcaagctttaagacacatgcatttgaagggctgatattgtaggtcccyatgtcttaagtcaatctatgagatgcccggcctggaagtaatgagggagggcaggaagcaggaaggctggccaccctgaaagcaggcagtgagccggtcc

SEQ ID NO: 293614 - DNA, 201 bp, Homo sapiens
tgagggatcttagttttccccagtaacatcttcatcgtgatcttcttaaagatattagtcaccgtgtattttttataatgactcttaaattttcccctcaygtgactgctgatagatgaaaggaggccaaaacaactaactaactgttgtccagccagcacagttcgttcccatttgtcagcagcttcttgggcctgagca

SEQ ID NO: 293615 - DNA, 201 bp, Homo sapiens
catcccaaatgtcagcactacctggggatcagcctcctgttctaagaaacagaaccagcttgagtacttcatagcaaggaaggctatcagcatgggagacrgcacactgtcacggccctgccctgctgttcaccatcagaggcctttctcccataggcagggcccgcgccatctctcgtagattccgtggctgttggcttc

SEQ ID NO: 293616 - DNA, 201 bp, Homo sapiens
tccatcttcctccggaagacaaggtttgcctttaggtgtggcatccgggttggccccagggccccgtgggggctgcacctcggctcctggcccagcgtctstgtcccatccccaggctgcaggaaatgaaaggttgaaaaatcggaagataatttatggtcaggtgaggtagagggagcagctctgtaggttctgccctca

SEQ ID NO: 293617 - DNA, 201 bp, Homo sapiens
agtttgtatgaagctttattctacagtcaagccagtgtttagaagaaaacagtatttgcttttccatcttcctccggaagacaaggtttgcctttaggtgyggcatccgggttggccccagggccccgtgggggctgcacctcggctcctggcccagcgtctgtgtcccatccccaggctgcaggaaatgaaaggttgaaa

SEQ ID NO: 293618 - DNA, 201 bp, Homo sapiens
actgcacacggtgcatgccaggtgatcctcctcgcacgctcccagcgctgtacagcacagctgtgcagtgacgcacccacatgtgccctcgccactgggcmgtggacatcctctcaggagcagagatggtgctgttttcaaaggcaggcgaggacattttctcctgatttgctaaatcacttatgaacgcttcagctggcc

SEQ ID NO: 293619 - DNA, 201 bp, Homo sapiens
tcagagcgacctagcagccgtgtgtaacaaacacgtcacttgtccctgtggagattggcccaccagcctccactggcaccctgtccactttaacaagcacwctcgagtttagggtggggcagttgagagctccacaagcaccataccctttgggatccctgtgatcctgacactcctggcaggtgggacatgagagaggac

SEQ ID NO: 293620 - DNA, 201 bp, Homo sapiens
tgacgtcagcaaggcctctgggcctgtagcggggtcctctgagagccggcctcccggggagggtggaggaaggaacagggattgtggagtgcgtcctggcytgacctcccatgggcttttgtggtttttgcccttgaggaatgggccccagaggcctctgagtcttgcattttgagtttgttgggcaagagggggacaggg

SEQ ID NO: 293621 - DNA, 201 bp, Homo sapiens
ataagagttttttaaaaaatctctttggcaaaagactccgtcagccgggctaagagacgagagagaaaatacataccacattatgcctgtgtaagcttaayagtcaatatataaagagcttttacagaccaataaggagagcatgagatcaccattgcaagatgagcagaacgtatgaacattgaatcattgtgccagtga

SEQ ID NO: 293622 - DNA, 201 bp, Homo sapiens
gtttttctctgcttgttttaaattagaattaatgacattatttaatcacttcttatttagcgtcataattttaatatgatacattaatatgtttgtgtacrtaaacattttggagtctgctctgtttaaaaatgtgagtgttgggctttgtgagtttactgttgtttatgaagtactccgtctgtgtgagtcaagtgcttt

SEQ ID NO: 293623 - DNA, 201 bp, Homo sapiens
cctcacctgaggcgcacctggccgcctttgtgttctccatccacagtcgggggatgagaatacctatttatagctctcatgcgaggccgaaccaggccagrgctggcatatactaggctctcgatacagccattatcataagaaacccacgcaactccagtggatacaagtatgaaacacacacacacacacagacccaca

SEQ ID NO: 293624 - DNA, 201 bp, Homo sapiens
acctgacagtggctctgaacctccgagacacaggccccagcctctcttccctgtgctccgactctcagccttccttctctgccctggtcctggcatcctgyggctcatcattgtctagagtaaaacgcaggcccctctgccttgcctgccgggtcttccagggtttggcccagcctccccgacccagattccttctccctc

SEQ ID NO: 293625 - DNA, 201 bp, Homo sapiens
taagcatctgaatgcagtcaggtctggagctgattctgagttgggtttcaggccttcaaaggcctggtggatttctggccatcgttactcataaggcatawccctttgaggtcctacgcacaagctcatgaggtttattggggtcctttaattttcctcagtttttgtggccctatcaagggcctcttctgaaacccactg

SEQ ID NO: 293626 - DNA, 201 bp, Homo sapiens
ctctcttccctgtgctccgactctcagccttccttctctgccctggtcctggcatcctgtggctcatcattgtctagagtaaaacgcaggcccctctgccktgcctgccgggtcttccagggtttggcccagcctccccgacccagattccttctccctcatccttgggtctggccacattgtttagcccttgtttagggc

SEQ ID NO: 293627 - DNA, 201 bp, Homo sapiens
gcacacacaccccactctatgcctcgggcgtctggtggctgcctcgcacgcactccccactctatgcctcgggcatccggtggctgcctcgcacacacacyccactctatgctttgctcatcctttccctggcctgagcctcatcctccaggaagaatcaccagctggtggaagccccactctggagccagcccggagccc

SEQ ID NO: 293628 - DNA, 201 bp, Homo sapiens
gcaaggtgcccttctcaggagagagagccaagatggaagggaagggatgggaagggctcttccatggaagccttgtccctgtccctgtgcacaaaatgtcygcagttctgttctcctgtatcctggctcgctggagcccttgggtgtgcacctccccatcagtttctgggcccggtggggtgcagagaggagccctgagcc

SEQ ID NO: 293629 - DNA, 201 bp, Homo sapiens
tctgggtggtcgtggaaaccggctgagtcctcagcagtgggaagcgaggtccaggaacgggattgatgccctggtgaggccattcctcatcccctgcaccrcctgtgaccatgaaagggcttgggccaggctgtttttgcaggctggatcttcccagaagcctaggggtttgaaaggtgtgtgtgctgggtgcccgggggc

SEQ ID NO: 293630 - DNA, 201 bp, Homo sapiens
tctcccctggaggacaatggccataattctttttgaaaaccaggcattttgatgtccatagaactcctatttcagggaaaattagaggtccttgaggtggktgtaaaaccaagcaggtggggcgctccccctgtggcatatggagacagtcccagcagaaggtggcggcagctgagctcagcgcggtgatcagtcttgggc

SEQ ID NO: 293631 - DNA, 201 bp, Homo sapiens
ctgagctggtcttcgtggcctgaggcctgggcactcctcaggttcaagccagtccagccagggcagccagcagggccaggttaggagcatgattgactgcrgtggggcaggggaggggtgaggagacagtgaagtcagccagagaagctgagagcacccctcaccctgggcaccaggagctcaggtgactgcagctcccac

SEQ ID NO: 293632 - DNA, 201 bp, Homo sapiens
ggctgctccaggttggtggtctgggcgaagtgaggcaggatacatcataggtccctttggggaaggagaatctcgtgctccctccattgtggtgatgcacygagaggtgtggagatctgcatagaagacagggcctccaggagggtccagagaggcccattggtggcagagaggatgcaggcgtcggggcagccctcgtga

SEQ ID NO: 293633 - DNA, 201 bp, Homo sapiens
aagctggagtggctggaaggagccctgcctgcctgccctcctcctcctcagttgctggccttggcagctctagggtgacccagcaggggcctggaggagtmggaagcagcttcccagctgcagtctgcatcatcctctctgtgctgtcacagaatggaaggttttagcagaaaaaggagtttgtaagcgacattcagaaga

SEQ ID NO: 293634 - DNA, 201 bp, Homo sapiens
tacatcataggtccctttggggaaggagaatctcgtgctccctccattgtggtgatgcaccgagaggtgtggagatctgcatagaagacagggcctccagsagggtccagagaggcccattggtggcagagaggatgcaggcgtcggggcagccctcgtgacaggtgctgtgttgcagcctggagcaggcctctcatgctg

SEQ ID NO: 293635 - DNA, 201 bp, Homo sapiens
gccagtgagtccaggctccttctcagcagaaggtggctgctctgcagggcccctcgcctccctgctcctcaggggacccgcactcttccatgtccgtaggsagacgcgcaccgagctggagacacagatctgcgaggagtaacttgcctctctcaccagcactgccaggggcggatcagcgccagcaccttccagcatgcg

SEQ ID NO: 293636 - DNA, 201 bp, Homo sapiens
tgtattatttggaagaaagtcacagtgcagtgcacactcagggggacagagttggagaggccttaagccccacctcctggagaggggagtagatacgtgcrttatttgaaatgctcaaggagttgtctctgctcccctgtgtgtgtatttcgttatttattcatatcccggtgaactcctgtgtatctgtctttcttacac

SEQ ID NO: 293637 - DNA, 201 bp, Homo sapiens
tcatcgtgcaaccccagtttgtgctgtagttgtcatcagtgtgtcagaaacattttgtgctgtgcttactcagggagtctggttccaccgagaccctgccwcccagccgtatgcctgcattatgaggatttgtgtcatagcagtggcgtgttctgttgagcactgtggctttttaatcgttactcaagtgtggccactcag

SEQ ID NO: 293638 - DNA, 201 bp, Homo sapiens
gccccctggggggccatggaggaaacgcccgtccagagcacctggcagtgggtgctccatggcaagcagcgtccccatgcgatcttccaccccagactgcscttctgctgcgccactggagcctgtgcgtgactgagttggcaggaccctctcctgcagtcatactggaaggctgtgatggcctgtagcgtccgtggtgtc

SEQ ID NO: 293639 - DNA, 201 bp, Homo sapiens
gttggcaggaccctctcctgcagtcatactggaaggctgtgatggcctgtagcgtccgtggtgtccgtgtgccaggtaggcgtgagtgccatcctgtggaygctgtgaggcgtcaccactcgctgaggtcagtggtgttgccctggtggggctgaatctgcatggaggacgctcaggcctgaggcaggggcttcgcttcac

SEQ ID NO: 293640 - DNA, 201 bp, Homo sapiens
agtcatactggaaggctgtgatggcctgtagcgtccgtggtgtccgtgtgccaggtaggcgtgagtgccatcctgtggacgctgtgaggcgtcaccactcrctgaggtcagtggtgttgccctggtggggctgaatctgcatggaggacgctcaggcctgaggcaggggcttcgcttcacacatcctcacggtggggttgg

SEQ ID NO: 293641 - DNA, 201 bp, Homo sapiens
tttgtctatgagttcccttcagcacattctttgcactggtgtgctctcaaatatttaaatatacacctgtacccatttacaagctcccattcttaattcarataactccaggtgcattggtgtgccatactatgtattcaaatagtctaaccaattccaaataagtaagtcggcaaatttgtttgtagtcattaagcagat

SEQ ID NO: 293642 - DNA, 201 bp, Homo sapiens
gtttaaaatttaaatatcagctgggtgatttgtgccacaactaaccaacaaataagagtttttcagattgctaaaaagcagcttggtctaaattacttccwcagagtttaccagactcttccaataaaaataccatcttgaggctcacagaatatgaaaagacttcacttcagaaaacattttggatccgtttaccagccc

SEQ ID NO: 293643 - DNA, 201 bp, Homo sapiens
ctgagttgggtttcaggccttcaaaggcctggtggatttctggccatcgttactcataaggcatatccctttgaggtcctacgcacaagctcatgaggttyattggggtcctttaattttcctcagtttttgtggccctatcaagggcctcttctgaaacccactgttgagtctagagaacaggctacccgagggtggggt

SEQ ID NO: 293644 - DNA, 201 bp, Homo sapiens
atctatcattgtacaatatgaattataattatctcaactattctaatgcacttgtcttgcttttaatgtatgtttttagtgatatatatatatatattttwttttttttttcaccagcttggtaatcactattttgctgtttctttactgattatcagtaggatttcaacaactgtctttaatctatcacagccttatcta

SEQ ID NO: 293645 - DNA, 201 bp, Homo sapiens
cttcgcagtgacgactggggcctgcttccctgtcatctagaaggtggggaagtggtggatgagcagaggacctgagatcggcttgattacactattcttcmtgcttttgtgtatttttggaatttctcatgaaacataaaaatatatattccagagaaaggtcataagctcacaaagatggggagaacagaagaggggcga

SEQ ID NO: 293646 - DNA, 201 bp, Homo sapiens
cccgctcgccttctccatcagaatgttctcgggtccagcagacccggagaagccctgggatgctggagatgcctgcaggggggtggaggctggggaaagakcctgccaactgcagggaccacccttctcagtggcacagatttgggctgagttcataccttattatgcatgcatctacttagactttttttctgccagtaa

SEQ ID NO: 293647 - DNA, 201 bp, Homo sapiens
gggcaagacatttccctgtgctggtttaagcagggccggtctcctccaagggagccccaagccgttgtgctcacaggccgggtaataaatgtacacgtttstagtaaagccattcaccactccccaaaacacaacgctgagaatagggtttagcactgagttactttctttaaaaaactagttttgccgtgtaagtatgct

SEQ ID NO: 293648 - DNA, 201 bp, Homo sapiens
cggcccccaggagaagcacggggcagggctctcaggaagggcagagcccaattctttccagcattctggaagctggcttttatactgcttagtgattttgyattgtgagggcaacaattctgtttataatattaaaaataggatgaaagaaataatatattttcttctgtcagacatttttgtttaaatttttgaatagat

SEQ ID NO: 293649 - DNA, 201 bp, Homo sapiens
ttaaaattttagtgagacagaacatcgttttcccaaccttcccatcggtcacattagagcaaagtcttcaacagcatttttcacttaagggatgttttctraaaagtgaccctgtgcttttgatgaaatagtcagctaaggagaatggaaccctttgtaccttcacgctgaagtctaaattcagcgtctgcagggcacggg

SEQ ID NO: 293650 - DNA, 201 bp, Homo sapiens
ttaaattgtggaacagaagcacacagatggtcttgctccctccagatacagccctggctggtacggccagcacccagggactctgcacacggaattccacragaataacatcacgggctgccgtaaaagccagggaagcgaagggaggcgtttctgatctgtttctggccttgcgctggcacagggtgtcatcccttgggt

SEQ ID NO: 293651 - DNA, 201 bp, Homo sapiens
ttcatatctaagtatgaggggaagatacatttcagatggattcaaggcttaactgtaaaaagtaaagcaagagaaatctccaaagacaattggggcatcarggacccgtcctcattgaccccggatctctagaagcggacaaagatgcaattgacagaataaaaatgacaacttttgagtggataaagatattagcaacaa

SEQ ID NO: 293652 - DNA, 201 bp, Homo sapiens
tggtgcagccctccacggaccctcttttccctgaaagcaggggttcttgggccagcgtaggggctggcagtgcagatggcagactgtaagggccggtttcrctggacgtgatccgaatcagagccctctgcccatttccctgggcccatcgcagcctgcctgccagctacctgccgttcctgacattctgcctgggaaatc

SEQ ID NO: 293653 - DNA, 201 bp, Homo sapiens
gttgaagggcgagaagcggcagactctctgtgccaggcccgggacgcctggtccatccctaagcccttcctgagcacacctcagtggtgcagccctccacrgaccctcttttccctgaaagcaggggttcttgggccagcgtaggggctggcagtgcagatggcagactgtaagggccggtttcactggacgtgatccgaa

SEQ ID NO: 293654 - DNA, 201 bp, Homo sapiens
catgtcagcgtgccagcttcagcacacgcgggctgcgttctgacgaagttctgttttcagaattcttctggttaagcggaggccagagctgaggcacgtgkgagctgcggagggcctcttctcttgtttcacgtatccttctcctggttcctcggtgctctcgtgggtgtggggtgaagggtctgattggtggatgtgctc

SEQ ID NO: 293655 - DNA, 201 bp, Homo sapiens
tcctttgtcagttgctgtgttaaagtagctcctctgagattcagcctttcactttttaaggctgtctagtgagcagaaaattttaatttaaatgtagtcasatgtaacaacgtcatattttgtcgtaagaagcacttttcacatcttgagttttctattccaaggatattttccaatagtgtctgctaaaaatttcaacat

SEQ ID NO: 293656 - DNA, 201 bp, Homo sapiens
tgtcagcgtgccagcttcagcacacgcgggctgcgttctgacgaagttctgttttcagaattcttctggttaagcggaggccagagctgaggcacgtgggrgctgcggagggcctcttctcttgtttcacgtatccttctcctggttcctcggtgctctcgtgggtgtggggtgaagggtctgattggtggatgtgctctc

SEQ ID NO: 293657 - DNA, 201 bp, Homo sapiens
tctctgctggcaggtcttgggaggaatgaggagtagggtatgtcccctgcccggggcctgctgctgaccgggccttggatgcacctgcaggactttctgargctcctgcacctgctcagggtgtctctgcagcaggtcgtggtgtggtggacgtctccccgaaggaccttagtacagtttgagaacaagctctcgtctgcc

SEQ ID NO: 293658 - DNA, 201 bp, Homo sapiens
tgcacgcctgtaatcccagctacttgggaggctgaggtgagagaatcgcttgaacctgggaggtggaggttgagccgagatcacaccaccgcactccagcmtgggcgacagagtgagactctgtctcaaaacaaacaaacaacaacaacaacaaaaagtttactatggagaggtctcttccaaactggagagaaagaccaa

SEQ ID NO: 293659 - DNA, 201 bp, Homo sapiens
ccgagatcacaccaccgcactccagcctgggcgacagagtgagactctgtctcaaaacaaacaaacaacaacaacaacaaaaagtttactatggagaggtmtcttccaaactggagagaaagaccaacattagaaaatgaacgctcagtgtgaccaggcagcccagggaagaggggtcgttgcagacatgcccaaactccc

SEQ ID NO: 293660 - DNA, 201 bp, Homo sapiens
gggaagaggggtcgttgcagacatgcccaaactccccagcccccagggagatgcccagaaaagtcagcagagatcgtgctttttacctagcttggcagaakatggcaagagagatggtgtccattacaagggaggatgtagaggccgcagcagtgtcgggcatggctggaggaggtacgcgcggctgcagcctctttagag

SEQ ID NO: 293661 - DNA, 201 bp, Homo sapiens; identical to SEQ ID NO: 60557

SEQ ID NO: 293662 - DNA, 201 bp, Homo sapiens
gctgcagcctctttagaggtcgttctgctcacatgtcctgatgtgagaaataagcagatacttcactcagcccccactcccagggctgtgctccacagggscacagaccccaggacgtgaggctctttgcacccggcagtctcttgcagtgttgtggtaagagtcaaacgcttggaggaaagtctgtgcccatgagtggga

SEQ ID NO: 293663 - DNA, 201 bp, Homo sapiens
aggctccagtctccatcctgcttgtgcggccatgcctgagccaggtcccctgtgctgttgccacacacgtgtgtgtgtgagtgagtccgtgcgtatgtgtktttgaggttatatgagtgtatttgtgagtgtgaatgtgtgagcatgagtgtttgtgaatgtctgtgggtgtgttacactgtgagcatgagtgcatgtttg

SEQ ID NO: 293664 - DNA, 201 bp, Homo sapiens
acccagcatgatgcggggatgagctgtgaagacaggttttcaagcccaagtccagtgggtgctcaaccagctcctctgctcggctcctccaggcgccgcarggctgcaggtgcaccagcctttccaccaggtgcctggccagcacaagagtcctgctctcccggaggccgctgtgcaggatcagctctgcactatctgttg

SEQ ID NO: 293665 - DNA, 201 bp, Homo sapiens
agggagttggaacatttcagagctgtggggtgcctccctcagcgcagcattttggacctctagcaccactctctgacggttgttggtggcccatggctaarggttgcatggttgtctttgcatttttaaactctgttttgaccccgcagagccccttgggaaaagtcgggatgctaccctcactgacctgccagtcccggg

SEQ ID NO: 293666 - DNA, 201 bp, Homo sapiens
gcagcctcagctgtcgatgccgacatcgatagttttgagtagagttggggaggaacttgggctatcacctggaatcaaagcacctttatttactgctttgrtccgaaagaacgcaacacttaggagggtccactccagcagtgataagcacctcacctgcagaacagggagggctgcctgcccaggtctcccacctcacct

SEQ ID NO: 293667 - DNA, 201 bp, Homo sapiens
gctccggccagtgcccaggcctcccccaaagcatttcccacccttttctcaggagaaggctgagtcctgggaccaggacctccagtggtttggagacaaarccagtgtgggacctgctgcctgggcagtgactgtggaaatgctttgcacccaggggcagctgccacctatgggctgtttcacccaaatcggtggctttga

SEQ ID NO: 293668 - DNA, 201 bp, Homo sapiens
tggatattttaggttgcatgtctgactttgcactgttgtgatgatgggggacctgggatggtgacacattcttttcgagtggactttgttttccttcttgyagttgaccagaagtggccaagtttcttaagcatctgaatgcagtcaggtctggagctgattctgagttgggtttcaggccttcaaaggcctggtggattt

SEQ ID NO: 293669 - DNA, 201 bp, Homo sapiens
acgagaaggctcggccgctccacttcccctctacacatcgccatccttgcccaacatcacgctgggcctgcctgccaccggcccctctgcggtaagtcagsccccgtgggtccgtgtggtgtggggtggtggtgatgggtccttccacccgagcatcctggctgtgctttccagggcacggcgggccagcaggacgccgag

SEQ ID NO: 293670 - DNA, 201 bp, Homo sapiens
aagtgctgggattacaagcgtgaggtactgtacctggctggcttcgagggaggtattgagcagggaggtatttctggtagctccccatcagataggatctygctaggtactgtggcctcagggaattgtttggcttgttttcctagaaagtgccggaggaggaagtattcaggcactgtttgatccagctcctccacagtg

SEQ ID NO: 293671 - DNA, 201 bp, Homo sapiens
ccttggcatgtcagctctcactgcccctgtttactgcccatgctggcgctcctgccctcagcctgatagcaccaagcctggggaattctgggggaatgggkttggtccctgtatggggggcagaagggatgaggggtcacatgctctttatagctcagccttccctgggccattctggccttcagaccagcctggcttcag

SEQ ID NO: 293672 - DNA, 201 bp, Homo sapiens
ttccttcggatgcagggcagttttcccttctctttcttttcttccgtttcctttgcctttttctgagatagagccttgatctgttgtgcaggccggagtgyagtgggacaatcatggctcactgccgccttgacctcttgggctctctccatctgcctgcctcagcctcctgagtagctgggactacaggcgtgcaccacc

SEQ ID NO: 293673 - DNA, 201 bp, Homo sapiens
ccagcgtaagcacatcaggagttttgttgctggagttgggtagtggctccggccactctccgagctggaaaaacacaagctggtgtgactatgcagatgcrggcttttggggatagacaatagatgggcctccagaacccgagtgaattccagatgcagtagcaacagcagcaggcttgtttgtgtagggtccagaagttt

SEQ ID NO: 293674 - DNA, 201 bp, Homo sapiens
tttccagtttttcttgcttggcaccctgtcaatcttgagtttgtttcaagaagctgttctgctgccttgatgagaccccctccacgtgaagaaaggtgaartgcagcagcgccagccacgcaagatggtactgtgctttggacggtgcatttcagggtcttctcatcgccccctttgctagtccctgaattcctcacagcc

SEQ ID NO: 293675 - DNA, 201 bp, Homo sapiens
cctagaaagatgccgagtatggcgggtggaacccctgtgcacccccttctcaccagactcccatcccggcacagggaaggggcaggacacacacccttccyggtcagtcctgttcccaggggcccaagtagcccacaggaggaaggagtgcagcagggcagagtgaaggcggagggtctggcaggtggagcttcacccaga

SEQ ID NO: 293676 - DNA, 201 bp, Homo sapiens
tgtgcatgcgtgtttgtgtgtgtccaccagtgccacatgcatgaccctgacaaccctgctgtgtgcatgcatgtctgtgtatgtcacatagtgccacacgygtgaccctgacgaccctggtctgtgcctgcatgtctctgtgtgtcccccagtgccacgcgtgtgaccctgatgaccctgatctgtgcatgcgtgtctgcg

SEQ ID NO: 293677 - DNA, 201 bp, Homo sapiens
aatattaatctcaggttaggtgataactggaaaattgataggaaaatgtctttaaagccacatttttatggtatgggagtataaacatttttaggtatatkttatgtcagtcctcaattgctgttatacatttcctaatgattgaatttaatcttaactattctttagacattttgatgtttgaaggtgtggaaacagact

SEQ ID NO: 293678 - DNA, 201 bp, Homo sapiens
tctctgtgtgtcccccagtgccacgcgtgtgaccctgatgaccctgatctgtgcatgcgtgtctgcgtgtgtcccccagtgccacacgtgtgaccctgackaccctggtctgtgcatgcgtgtctgtgtgtgtcccccagtgccacgtgcgtgaccctgacgaccctggtctgtgcatgcatgtctgtgtgtgtcccctgg

SEQ ID NO: 293679 - DNA, 201 bp, Homo sapiens
gcaccctcgtgggttctgaaagaattcttttccgtttctgcgaggtttcttttaagaggagtagtatggtgactatttctcctacatgtactggttgtaaraaatggtggcaagaattataaaatacttcctcactgtctggaaagtccaggtaagatcgtgcaagctgcatggaccagtcagatcagtattatttggatc

SEQ ID NO: 293680 - DNA, 201 bp, Homo sapiens
tggtgccccgccttcgcctgcctttggaggagacaggaatgcacgcctgtcccacccccacagttcccaaacacacatccccatcacgtgatgtagccacygtgactgcagtgaaaatccatgcctcactcccagagtcaggtagatggagtggaaacagaagtcacttcccctttctcaccttttgggagaggccaccgg

SEQ ID NO: 293681 - DNA, 201 bp, Homo sapiens
ttcaaagacacaccacctaaggagaaggtgacggaatgggcagaaagaagagaggtgtatcaggcagacagctgactgatgggttttcatcccatatccartagaaaagactgctttcctcgtgggctccagatagcgctgctttctttatgaggggttccatttagttttcagctgtagaatcgtttgttcttaactcca

SEQ ID NO: 293682 - DNA, 201 bp, Homo sapiens
tgcacgttgagtgataggaagtggatttgttcccgagactctaatatcttaggagaagatgaaaatatgtcatgagcttaatgccgcgtatgaagtgtgaygggaatgtgtgttgtgcctctgctctgccaggcacactgccagctacacaggaagcctgctaggaagtgtgcagtgcgggccgccgtggccagcgggctc

SEQ ID NO: 293683 - DNA, 201 bp, Homo sapiens
tgacggaatgggcagaaagaagagaggtgtatcaggcagacagctgactgatgggttttcatcccatatccaatagaaaagactgctttcctcgtgggctycagatagcgctgctttctttatgaggggttccatttagttttcagctgtagaatcgtttgttcttaactccataatttttctcttctctgcctgtgatct

SEQ ID NO: 293684 - DNA, 201 bp, Homo sapiens
aagacagaaacatgagggaactattttaggttatcatgttacgtgaggaatgcggactttagaattaaattctgtgattacacagacattgtgactacgartgtctatggatccaggctgatgcaagcgtgcagtaatgacattttgtggtgggaatgtgctgaaagtgatttttcttttaaaacattttatttcatattt

SEQ ID NO: 293685 - DNA, 201 bp, Homo sapiens
cctccacaccctccctgaggggatgcgctgtggcagggcaggatgcgtttgtcaggacacagagcctctgccttgaagccagagtccctggcatgaaaccrggagtgtggacggaaagcccacgggggcctgctggcaggacaagctacgcctccttttttttctcccattcccttgttttcctccaaggacagttctcca

SEQ ID NO: 293686 - DNA, 201 bp, Homo sapiens
caattttaaaattttggcttatgtcgacagttttggttttcactttctctcaagttcactttgccggtgttgttttcgtgtaaacactgaattctgtggcyggggcatttttgagacaacttgcttgtgcttaaccaggcgtggcacgagggtaagaggattttctgatagcttgatgggctgggaaaagatggtaaatat

SEQ ID NO: 293687 - DNA, 201 bp, Homo sapiens
gtgtaaataatgtcctgtttcttctcgagtcccagtggtcacagaaatcgcagccttgcttccctcaaagtgaataattgctgccaggtgttttccatacrcaggggctgcccatgtgcggcttcaaaggccgtgtgagccgagagcgttttgatcgccgactcgggcacctttctctggggaaggttgtctggcgcaggt

SEQ ID NO: 293688 - DNA, 201 bp, Homo sapiens
cctggctgtgggctgcgtggtagagctggtcttcaaggtggccacaggggagctgaaggtcagtcggggcctggacagtggtggccctccaggaggcctgycatagattcccagtgtggggaggggccgcccactccgtctccctctcatcaggctgggaggcggctgtgatggggaggcgtggaccccactctgtcagca

SEQ ID NO: 293689 - DNA, 201 bp, Homo sapiens
tcttaaatattttaaaatatcacgttgggtgatgttgcttcttcttttgcagtaaccaaataacatgcttgtttttgtatcaaattaagtttccttttggrcaatggtttcagttggagtttctgtctgtggagctgaagcagcagcttctgcagaacgtgtgagtgtcctctcgcctgtccccacagtgcatccgcggac

SEQ ID NO: 293690 - DNA, 201 bp, Homo sapiens
acgtcctcacggcgaacagcttccctgagtgttctgtgcccaggttcagaaggggctgcccctgcctggtgattgcggtccttgtctgagtcactgggagktgatagaggtggatcatggggcacttctgttttagcgtaaatgtgacgcctcagcgaccctgcactgcacggagcatccatgagctttctgcccaacctg

SEQ ID NO: 293691 - DNA, 201 bp, Homo sapiens
atttccccctctggtaatgattcttcagttttccttcgaggaatgaccctcattcccattggtcccacattggcggcgctgcctgtcagggtgtcctggcytccctggtcaagggctgtggctcagcgcaggccatcaggtgtggttggacagtgttctggagggactctccgttaattcctgcctctgggtccctccacc

SEQ ID NO: 293692 - DNA, 201 bp, Homo sapiens
aaggtcctgtctgtggctgttggagctacttttttagcccaactgagcatcatggctgctgactcagtctccccagctgtgacacgggggctggggtctcygggtccccttgcggctgtctgtggcgtctgtctgccttgtcctatttccccctctggtaatgattcttcagttttccttcgaggaatgaccctcattccc

SEQ ID NO: 293693 - DNA, 201 bp, Homo sapiens
tcgaggctgcagtgagccatgtcataccgctgcactccagcctgggtgacagaggggagaccctgtttcaagagagaaaaataaaaaaaaaaaaaaagaaagaaagcaccagcagaatttagaaatgtgggccagtgtgggagcctcgcctggcatcactggcctcgcctggcatcactggctgtgggctgctgctctcgc

SEQ ID NO: 293694 - DNA, 201 bp, Homo sapiens
aattgtccgtcgcaaatgtcattggtacctagggtgagaagctctcttgtcattaagtccagaacatgagcatttatttagcattagaagtaaatggcacygcatttgcccagtatggattttgttccactgtacagtcatagaacttaaatagtaattttgaaaactcttgggacaagttacatacatcatttaccagct

SEQ ID NO: 293695 - DNA, 201 bp, Homo sapiens
aggggcaccgcgtttgctggacagaggggatgcctcaggacgcgacgtctcccctggaggacaatggccataattctttttgaaaaccaggcattttgatrtccatagaactcctatttcagggaaaattagaggtccttgaggtgggtgtaaaaccaagcaggtggggcgctccccctgtggcatatggagacagtccca

SEQ ID NO: 293696 - DNA, 201 bp, Homo sapiens
ccctggcctcttggggggtgttcggggggctcctttctgtctgttttttacaccttgattttactctgcattattactgatcaagcagtttattttttacyccagcacactggagcctgggggagcggtggggagctttaagtaccagatgaagatgcacaattttaaaattttggcttatgtcgacagttttggttttca

SEQ ID NO: 293697 - DNA, 201 bp, Homo sapiens
tgtctgtaaaacccgtttccacatagaatcctccagggtttaaactccttgtgagggtaccattcttcccagccatgcagcctctccgagaataaaacctsaacctcctgatggcgtggggctgagggaaccagtgttccgttccacatgcgtcctgcagggcagtgtggctgggccttgcagggactgcgtcccgaggcc

SEQ ID NO: 293698 - DNA, 201 bp, Homo sapiens
aaatacatatgctaaccaaggaatttaactctcttacaaatgcactcacctgataactttggaaaccagtgtcttacctggatacggtaaggctgagaacraggagaatcgtgtataaatggtggtcttgtgaatgtgtttctcatgtgtagaggttagcgattctgaaatgactttgtgtgtgtaccggaattaaacaaa

SEQ ID NO: 293699 - DNA, 201 bp, Homo sapiens
gggtgatgttgcttcttcttttgcagtaaccaaataacatgcttgtttttgtatcaaattaagtttccttttgggcaatggtttcagttggagtttctgtytgtggagctgaagcagcagcttctgcagaacgtgtgagtgtcctctcgcctgtccccacagtgcatccgcggacgcaaggccaccctggaggagctacag

SEQ ID NO: 293700 - DNA, 201 bp, Homo sapiens
ctggaatcttggtgcgaggtacggataatgtttagttcaaaacaaaataagtggccgggtgcggtggctcaaacctgtaatcctcgtgctttgagaggccraggtgggcagatcatttgaggtcaggagttcgcgatcagcctggtcagcatggtcaaaccccgtctctactaaaaacacaaaaattagccaggcgtggtg

SEQ ID NO: 293701 - DNA, 201 bp, Homo sapiens
tgcacctgctcagagggccgtttgctttctttcctttctggtaattggggtcttctcttgaattcaactctgcctacaatattagggcgagattttattcwatcttcataactgtttctttgttcttacagtgggaagcgagggatccttatcgagtcagtgcagtaaggtttgggaacctaaagttctggttgacttgct

SEQ ID NO: 293702 - DNA, 201 bp, Homo sapiens
tgttcttgccgattcccacatggtgggttgtttccatctatcatttgtgatgttaaatttgcatggtaaactcttcagcaggggactttcctccctccctycctctcatccttctttgtgtgttttgtgtgctgtggattgtgggtgtagccctaaggagctatttttctttgtcttcctggggctacagggtttcccagg

SEQ ID NO: 293703 - DNA, 201 bp, Homo sapiens
tttaacttttttttttttttagcgcagcttgttgtcttttccacattgttttaatatttgtggacattttggagtcatttctcggttttgttgttcttgcygattcccacatggtgggttgtttccatctatcatttgtgatgttaaatttgcatggtaaactcttcagcaggggactttcctccctcccttcctctcatc

SEQ ID NO: 293704 - DNA, 201 bp, Homo sapiens
cgggagtagcagcagccaccccgagcacgccgggaggatccagagcatctggtcccgcctgcaggagacgggcctccggggcaaatgcgaggtaacgccgrccggggcaggtgggcagctgcggctttgggcaccattagaggggaccctcgtgggcccgcgtgattcagggtgttggttttgcaggtggttctttgggct

SEQ ID NO: 293705 - DNA, 201 bp, Homo sapiens
ggcatccttgtggcccatgtatggcctgtgcgtggacgggagacttgcaagagagggcaacccctagccctgcagcccaggggcgggagacatccgcaacygccaacacggccgtttcttccccgcagcaagccctcctgctggagcagcagcggatccaccagctgaggaactaccaggcgtccatggaggccgccggca

SEQ ID NO: 293706 - DNA, 201 bp, Homo sapiens; identical to SEQ ID NO: 60564

SEQ ID NO: 293707 - DNA, 201 bp, Homo sapiens
gctccacgagcacatcaaggtgaggcgcggtgcggggctgcgggtgggccaggcctccggcaccctcaactcccggtgactccagccctgcctccgcggartgtgctggggccccaggcatgatgcagggttcctgcaggaggccttctgcgttgggacggtaacaccaggcaacaaaccgcgggcagcacttgcgtgtat

SEQ ID NO: 293708 - DNA, 201 bp, Homo sapiens
ccttggtgtgccaagggcagggtcggcgagagcctacagcagccaggaaaagggcccccttgctgatgtcagtgtgcccctgtcagtggggccccttcacrcgcgtcttaatgaatatgcaccaggagatcaggacacgtgggctctccccaggggcccaccaaggccgagcccatcccggtgccacctgcatcaggcgtt

SEQ ID NO: 293709 - DNA, 201 bp, Homo sapiens
agcgagggcctcctcccagccagggagcaggagcagcagcgagaggatggctggagccgagccttccctgccccaggcacagaacgcctgtctgccagccygcggcaaacagacaagtagtaaggctggtcgtttgcagagcttcaggccctgtcaccaggctggaacgtttcgtggcctgggcttggtgattgtggctcc

SEQ ID NO: 293710 - DNA, 201 bp, Homo sapiens
tcccgacggccggcgctttagcaccaacaccaatggtggcagtatgggactaataacacagcggataacgtaactatctgtgagtccacacgaacggaagyagattactgagtcactgggaagatggagcagtgaaagctcatccttgccttggaattctaagtaataagtgcagcaaaaaggaggtgatttggatgtcac

SEQ ID NO: 293711 - DNA, 201 bp, Homo sapiens
tacagggtggacaccgaggcctgcaggagctcagcggatgctggggcagggctgcagtcgggagggagagagcagatcctgctcaggcctgggggaagcargtaacagccacaaccggggccacctgagtggcgtctgactcatcctgtggtggcctaaccctctgagagccatttccatgtgaaatgttaactcgaatct

SEQ ID NO: 293712 - DNA, 201 bp, Homo sapiens
gcctcctgcttgtgaggggcatcatggtggaggattccccctgtgggctggagccagggtcaggggtggccacgggaaacaagcacatcttcctcgacaasgggagcctttgggtgagcggggtgagatccgtgaactggactgtgagaccgtgttggagaacactgggtattaagccaaccatgcctgtaacgtgggcag

SEQ ID NO: 293713 - DNA, 201 bp, Homo sapiens
taattaattgggtgtctactgtagagcacaaagaagaaaatgcattcccatacgcactctgtccagagtgaatcctgctcactctgcacattcccgcagcmcgtgttctgtgccttcctcacacctgagttctctcactctgcacgccttcccgcagcccatgttctgcgccttcctcacagctgagttctcaccatcttc

SEQ ID NO: 293714 - DNA, 201 bp, Homo sapiens
atgggcctgctaatgtcagtgtttgacaaaccaaggagaggacactttcctgagctcttgaagtccatgctttatcgtttttgccttcagatttcagagcracctagcagccgtgtgtaacaaacacgtcacttgtccctgtggagattggcccaccagcctccactggcaccctgtccactttaacaagcacactcgagt

SEQ ID NO: 293715 - DNA, 201 bp, Homo sapiens
ttgcatttgccccatccttttagtgaatgtgcgatgagcaatgcctgtgccacgtggatgagtcagaagtggtccctaccctcctgggaactgcagactgyaggaaagatggatacatgaatggcaaccacagaaaagccagaggactggggtcggggggtgctggaggagggcacattgccctatcaggaagatcagctg

SEQ ID NO: 293716 - DNA, 201 bp, Homo sapiens
ctgggcctagagctgcttcctttttggtgtcatggaaacctgttctttctcccatgccttagccagacgtggggctggcctcaccctttcaacctctggcytgtctgcagcagggcatgcttctagaacgtgcacctgcttgttttcagcccagagtgcccttcccacagccccacctcgtctccggcaccctgtgttcct

SEQ ID NO: 293717 - DNA, 201 bp, Homo sapiens
cttgtcattttcatactttgctagcgcttcaggattcttcatctctgttcttgaattggagtggacggtaattttccttttttaaggtcttttttttttttaacttacagggatagtttatttaagattagaattaattattccttgaaagtttgtaaaaattaacctcagactatttggggttcatatttccttggtggt

SEQ ID NO: 293718 - DNA, 201 bp, Homo sapiens
ggcttgtcccaccgtccctcgaatctgcccttcaggccgttccccacggggacagatgaatcgagcatccggagagacccctcgatctgggactttgggaytgtgggacgttctttcacagtctgcagaggaatgcagctcagtcagtgccttcttctgagaaactccctgtgcgcccttcctagtctaactccagacccc

SEQ ID NO: 293719 - DNA, 201 bp, Homo sapiens
cttgctctttgaaacctgccacacaggactcctgacgtttcctgtgtcgacctgattttcatagaaaattgcctccaaattatggttcctatagtcccaamgcaccagctcacggcccccagcctcagctggaaggggcccagttagcgagccagctctggggcaccagggcagaacgcctgggctggcgggcacagggcg

SEQ ID NO: 293720 - DNA, 201 bp, Homo sapiens
atggggtgttgagacagtttgatatgctcactgatatagttgggcttggctgtctccagttctgcaacttagatgctttaattcttccttttactgttccrtcaaactgttttcacctttttaaaaggtaaatttctatgtttactggacttttcattgatcaggactattatatatatatttttaaaactatgtgatgtt

SEQ ID NO: 293721 - DNA, 201 bp, Homo sapiens
gagcctgggagcgctgtgtagcccccactcacaccgctggctcgagtcgcttgttccttaccgtgtgtcacaccaggaagctgaatcctatgaagttggcrtgtccttctcctctgcagagggtcaggcctgggcaggggactgtgcagctcatcaccgcctccacccctgaatggtgtgcacactgaggctttgggggaa

SEQ ID NO: 293722 - DNA, 201 bp, Homo sapiens
tgattggtccaagcgaatccagagcacccacattgttcccttgggcggccgggattgcaaactgtgagttggatctaactcttgcctggtttgcttctcartggaaggattttaaagaattttgcagaaaaagcaatggaatacaccagatggacttctaaggactcaggcaccctgaattgttcatctcatgtgaattca

SEQ ID NO: 293723 - DNA, 201 bp, Homo sapiens
tttggtcaaaaacaaaattcttctataagatgattagcagtatatatggaaaatcaggcaatttgaaatgaaattaataactaagataattattaaagggkttataggaatgcttattctgttatttacccagagttatttgtctacatggatattttagagttttaacagcaagtttatgtgagaataggtgtttctgtt

SEQ ID NO: 293724 - DNA, 201 bp, Homo sapiens
tgccgcaggtgggcctagggaaggcttcccggagcagtggcgtcggagctgagatctcagtaggagcttgcaggcggagagggaagggcacaggtggaggragatgtgtatgcctcgtggaggtggccctgtcacagatctttctagcatcctgaaacagagcatgccaccagcgtcttaaggacaggtggagggagatgt

SEQ ID NO: 293725 - DNA, 201 bp, Homo sapiens
tgctctgggagccagcgcattgcagcacctgcccggctgggagtccccagccacactgacaaaacaccggaacacttggggccccacctaccatcctggcygtccccttgcctgccttgccacgatgggcaagcacagcccctggcgtggccgtcctgagctgggctgtgcgcgcagcccctggtgtggccgccctgagct

SEQ ID NO: 293726 - DNA, 201 bp, Homo sapiens
actggttgcatcttgttgattgtggtcctagatacatgtttttatttaaaatgaggcacttatgtacatggtagttaatattggaacagtgccttgtttgrgtgggtctgcatcattccagttctgtgttaatttttagaaatcacgatacgtaaatgaagctactggaaattaatagaacatgtagaaggagttacagga

SEQ ID NO: 293727 - DNA, 201 bp, Homo sapiens
ggtcccctgggactgcttctgcaggtgctctgggagccagcgcattgcagcacctgcccggctgggagtccccagccacactgacaaaacaccggaacacytggggccccacctaccatcctggccgtccccttgcctgccttgccacgatgggcaagcacagcccctggcgtggccgtcctgagctgggctgtgcgcgca

SEQ ID NO: 293728 - DNA, 201 bp, Homo sapiens
tcggaggctttccagggcagcaggtccgaggacctcgctccgtgttccttgagctcctttgcgccccctgcctttatcccacacgtgtcccgagcgccttrtgccaggcccagggacagaaccaggcaggcagcaaggacctgccccacactccacacaatgccccactgacaaggagaggccacccccagagcacgggga

SEQ ID NO: 293729 - DNA, 201 bp, Homo sapiens
ttgtgtgacacacgtctccgtggcggtattcttggctctgttctggactctgaaagccgataacctctcccgggtgggtttggggatttctttgactccgrtcgctgcctttagatccctagtgcttcccaaggcgggcctcgcgccggaggtttgggttccagatgcagatgagttggggaccacggtgggctgaaaggt

SEQ ID NO: 293730 - DNA, 201 bp, Homo sapiens
cccatctcagtgcagaagctctccagggtctttctgtcacacatctaacaaacagccagtgctagaaaggggtttatcctcgaacgcagagagcagtgagygagggcatcttgtcttctgccgtaccaggtgaaggtgacctcagggtcccctgggactgcttctgcaggtgctctgggagccagcgcattgcagcacctg

SEQ ID NO: 293731 - DNA, 201 bp, Homo sapiens
gcacccacctcactccctacctgagcacctcgcccttggagcgggacggaggggcagcgcacagccctcttctgcagcacatggtcttactggagcagccrccggcacaagcacccctcgtcacaggtgagcacaaatgggcctgggtgcagccaggctctgaggctgcccacgctctggatggtgccccgccttcgcctg

SEQ ID NO: 293732 - DNA, 201 bp, Homo sapiens
gttgcaaatgaagtgtgagttggtgacagagcagtgaagaggctgagaaagacaatgaagggctctgggggcacttgtgatgtggtttggagagacagctkccctagaactcacacaggtggcccacttctttggtctgtttgtgcaaaagtcattggtagtgattttgttggtggtggtggttttggtgaggatgtccat

SEQ ID NO: 293733 - DNA, 201 bp, Homo sapiens
cccgccgtccccagcatcccggcggaggtcagtgcgaagcgtttgtcctgtgtcctacggctagagtcggactcgggacggatgagcttgaaatgaccccrctttgcacttgcccttcactcttcaccttccaatttggggtgagggaaagtggcctgtgagccatcctaaaaaggacgcagttggaggttactctcctgc

SEQ ID NO: 293734 - DNA, 201 bp, Homo sapiens
tggccccctccttccagtgccaaagccccttagagacgcatgaggagcattagatcctgaacagatggacccggggctgccaggccagggctaggctggcrggtggggcagcacacagcctttaacccacgttctgttctctcctctctgtggtgcacctgccccacgcccccatctccttctcttgcgggatccacagac

SEQ ID NO: 293735 - DNA, 201 bp, Homo sapiens
tggctgggacaaaggaagcgggagacttaaggtagggcagagacagagggaatcccctggaggagttggacccgtccaggccagcagcagtgcagacagasggagcgcctgcccggggtgagtggcacagcttcggaggcagcgtctgggccggcctcaccagactgcctgcctcgctgcctaaacctgaggatgcaacac

SEQ ID NO: 293736 - DNA, 201 bp, Homo sapiens; identical to SEQ ID NO: 60568

SEQ ID NO: 293737 - DNA, 201 bp, Homo sapiens
aggagcctccttttcttcagtcctcggaggtgacccggaggcccccggaacctcctgacactgccagccagtgcttcctcctgctgagagcagccagcccgctgtgtgcccccatgtactgagctccaagagtgtcgcctctggctaagggaagctgagggcaaggcttcttcctgaggcttggaggagacctttcagctg

SEQ ID NO: 293738 - DNA, 201 bp, Homo sapiens
tagtgacctgaataaagttacaagtgtttgttcttatctgtgtgtagagtaggctcagggtactgtgaaataggacagagtgtgttttccaccctcacatycatccctgagtttgggaaggggctctctgtttgcctctgaccattgcttgctgtcccttgttctaatgcagtttgcagaaactgctggagaggggtggga

SEQ ID NO: 293739 - DNA, 201 bp, Homo sapiens
tgctccagaagaacttaattaagatttgattgcattatcagttttttaaaaagtcatcactaccacattaataataataacataaagatttccgagaaaaygtttaaaccacttaagagaatagtgtgtagttacacaccctgtatcacccttgacatctactttcaaacacatgacatcgctcattctaagtaagttata

SEQ ID NO: 293740 - DNA, 201 bp, Homo sapiens
tgtacctcgttgggatcgttgatcccacatgtccttcaggtgtcggctcaaatgccaccacctcacagggccctctcaggtcactttgtctaaaagaacaktccctgccgtgttccgcctgcgtgattgttattccagcacgtgatcccacacggtcttctaatttacgtgtcatcacctcttcagcagtggaagtttggg

SEQ ID NO: 293741 - DNA, 201 bp, Homo sapiens
cggctcttggagatgagagcctaggggcaccgcttttttttgctaaacaaattctctgttatccaaaggttttggccagttctgggcggaaacagtgaacrtactcagtcacacaagggcttcttcactggaacaatgaggctttgtgaggggctgctgggagccgtgtcaggccagccacatccctggagcagagggtca

SEQ ID NO: 293742 - DNA, 201 bp, Homo sapiens
cacggccacaccgtcttagacctagtgccagtgtcttcaggctgaccagggcgccttgctcggtcccgggaggtggccctcgcctggcctgtgcctgaccrccagcctgctgtggctgtcagtgtcttctgacatgggtcacccatttttatgtttgttgttggtttcgttttcttaatcatttgcagaattgaaatatct

SEQ ID NO: 293743 - DNA, 201 bp, Homo sapiens
catcccaaaaggtgtttccagcacaggtggcccacgtcctccactctggcagccgctgtgcttgccagtggcacataagctgcactcacggcagacacacygtctggatttgggtaactcgaccagggacacacaaacttgcaaggaggagtgagaccggcgtccatgggaggcagcacgtgacagcagtgacccactggg

SEQ ID NO: 293744 - DNA, 201 bp, Homo sapiens
ctgcagctcttctatccccgtgctcctggctggaattgagtcccaccccccttgtgagggctgtaggtgggtgggcgtgtttgtggacagggcttttcatytgtgaggagagccggcaggtcctgtccccaatgtctggatgctgatctgctctctctgctgctgtaaatccttgctgtgtgtgaccacaggtgtgactgg

SEQ ID NO: 293745 - DNA, 201 bp, Homo sapiens
gtgacttgtgctatggagagcacagtggataggagagagttttcagagctgtttagttgatagtgtgactcttcctttcagggaggaactaacatggaaagaacctagttttctggcactgggagcgtgggtcatgatccttattctctttaatacctggccgaggaaggtgaagagatgttgcccaggcccagctttctg

SEQ ID NO: 293746 - DNA, 201 bp, Homo sapiens
tgagttgctgacaaggcctggtcttaagccagtccagagacgggctgagtgtcagggtgaacgtgggtgggctgctctcagggatgcacctggacaaggtyacgcccaaaggtgctgaccctgaggggcgaggagctgttttctcagcagccctcttgttggcccagacacccctctgagcttgagaccctcctagagggc

SEQ ID NO: 293747 - DNA, 201 bp, Homo sapiens
ccctaacttcagcctattcccagtcgaatgcatgaagagtaaaaatcatttacacactgttttagtggcatgtcttttttttttttttttttttttttttttacactagcaaggctggcctctttttcgtgtgcttgtgtgtgtgtgtgtgtccatgtgacttgtgctatggagagcacagtggataggagagagttttca

SEQ ID NO: 293748 - DNA, 201 bp, Homo sapiens
caggagaaccgcgtgccaatcacagccatgaacgcggaagagggaaccgcaacctgacagtcattcacgagactgtgtgttcaggaaagcatttagcaccrccgtgcttgtgagagccggacccgtagcccccagtgcccacagcagggagcccgccagctgagtcttcttcaagaagccaggccccgttctcttttctcc

SEQ ID NO: 293749 - DNA, 201 bp, Homo sapiens
ctcaaacatgatgttgtggacattcttttgtgtgttttctgacacacgcaaacttgggtctttgccaggttcctgcctgggaatgggagtgccgggtcacrggtaagctacttttaactctgcgtgacctccagcacggccacaccgtcttagacctagtgccagtgtcttcaggctgaccagggcgccttgctcggtccc

SEQ ID NO: 293750 - DNA, 201 bp, Homo sapiens
gtttgtcagaatcagcatcctcctctgagataagaaaacagagtgtgaaggttggctgacctgtgccacttctgccacgtggctgccttcaaccactgtgygcggtcactggcagcctgttcagtgttggtggagaagagcttcttggagcggaagtccaggccagtgttcggtggggccagagttcaggtgtccttggtg

SEQ ID NO: 293751 - DNA, 201 bp, Homo sapiens
tccctaacttcagcctattcccagtcgaatgcatgaagagtaaaaatcatttacacactgttttagtggcatgtcttttttttttttttttttttttttttttacactagcaaggctggcctctttttcgtgtgcttgtgtgtgtgtgtgtgtccatgtgacttgtgctatggagagcacagtggataggagagagttttc

SEQ ID NO: 293752 - DNA, 201 bp, Homo sapiens
gtgatgtgctttattcctggcagttaaggtgaaacgttactgcatgagcttaaaatgtctaaagtccctattttatgtccctgacctctacaacacgtggkttacagacactttaacactgagcaccccttccccattcacctcttgccgttctctactatttaaattttccttcacttcaaccccacaagttaggtaaac

SEQ ID NO: 293753 - DNA, 201 bp, Homo sapiens
aagaattttgagttcacaaaatgaagtacatttatagatactctcttttgcttaatgtttgttcatgaatggctgtatactgtagttactttagcacctarcttttacagtttttcctttggggactcttttttttatggttgtgcatggatgtggtagagtaacttaacaagtcattgttggtggacagggagtttgttt

SEQ ID NO: 293754 - DNA, 201 bp, Homo sapiens
ttccctaacttcagcctattcccagtcgaatgcatgaagagtaaaaatcatttacacactgttttagtggcatgtcttttttttttttttttttttttttttttacactagcaaggctggcctctttttcgtgtgcttgtgtgtgtgtgtgtgtccatgtgacttgtgctatggagagcacagtggataggagagagtttt

SEQ ID NO: 293755 - DNA, 201 bp, Homo sapiens
gcctgaggaaggggctggcacttctttcagttctacagcacccagccctgcgtgggccttcctgggcgggcctgccctcccctgccgacctgccttccccrccttcctggcttccctctcctgctcttgagcccagccaggctccacccctccatccaggtgtttctcatccccccctggggtgggggcaccctgcaggtg

SEQ ID NO: 293756 - DNA, 201 bp, Homo sapiens
taggacacagtctccaggacagacactgagggacccccccataggatacatcctccagggcagacactgagggacccccccataggacacatcctccaggrcagacactgagggaccccccaccataggacacagtctccaggacagacactgagggacccccccataggacacatcctccgggacagacactgagggacc

SEQ ID NO: 293757 - DNA, 201 bp, Homo sapiens
ggacacatcctccagggcagacactgagggaccccccaccataggacacagtctccaggacagacactgagggacccccccataggatacatcctccaggrcagacactgagggacccccccataggacacatcctccagggcagacactgagggaccccccaccataggacacagtctccaggacagacactgagggacc

SEQ ID NO: 293758 - DNA, 201 bp, Homo sapiens
gacagggccaggtggagaacagccaccaggaaaacggccagaggtgctgcccatcccatccccaagcactgctggtcccgcagaggaggatgtgggcatcrgatgtttgcttgcttgtttagcatcctgtttgtttccatttaatttcagcttgaccctagggaaaaggtgtgtctgttgaggtggggctgaggtttcaag

SEQ ID NO: 293759 - DNA, 201 bp, Homo sapiens
ttcaagcttggttatttttggtaagactttatagatgcaatggtgcacctcttttgggaggcaaccagccatacccatgtgtgtgtgtgtgtgtgtgtgtkcacgtatgtgtgcatgtatataacagccgtattttaaaacatttatttaattactttctttttttttgaggcaggtttttgctcttttgcccaggctgga

SEQ ID NO: 293760 - DNA, 201 bp, Homo sapiens
tctgttgaggtggggctgaggtttcaagggaaagatcatcgtgtgtggcttctcggctgcagcatgcctggggcagtgcgctgggtaaactaaaccatctstctttgccttctctccaggaaaacgcagcacagttcccttgaccagagttctccaccccagagcggagtgtcgacctcctataaccacccggtcctggga

SEQ ID NO: 293761 - DNA, 201 bp, Homo sapiens
ttagtagggacggggtttcaccgtgttagccaggatggtctccatctcctgacctcgtgatccgcctgtctcagcctcccaaagtgctgggattacaggcrtgagccaccgcgcccggccttttcttgtgttttcttgtgttaaaacaccaggtgtattggtctgctgtcttttctatagactattagattaagcttgctc

SEQ ID NO: 293762 - DNA, 201 bp, Homo sapiens
tgcagcaggagctcctggcgctcaagcagaagcagcagatccagaggcagatcctcatcgctgagttccagaggcagcacgagcagctctcccggcagcaygaggcgcagctccacgagcacatcaaggtgaggcgcggtgcggggctgcgggtgggccaggcctccggcaccctcaactcccggtgactccagccctgcc

SEQ ID NO: 293763 - DNA, 201 bp, Homo sapiens
gtggctcacttgtcagagacacggcaggtgtaggaaattgatcagatggcttcgtctgggaaatggtggcctctaggcctggctgaactccagccccatcsgctgctggagtcaggattgtgccatggcgctaagggcgagggaaacagtgctgcagacgcgaacattggcccttagaacccctgcgaccctgcaccacgt

SEQ ID NO: 293764 - DNA, 201 bp, Homo sapiens
gtttgtacataggttgcttttcttgtgttttctttttttttttttttttttttttttgggacggagtctcgctctgtcccccaggctggagtgcagtggcrcgatctcggctcactgcaggctccgcctcccgggttcacgccattctcctgcctcggcctccggagtagctgggactacaggcacccacgaccgcacccg

SEQ ID NO: 293765 - DNA, 201 bp, Homo sapiens
ccatccaggcagacagaggtgtttgtgaaggaggaggtgtgtggtgcccgttttcctccgggcagggcccaggccactgtcttccacaggacaccctccgrcaaggggctctgtccactgtcctttgcccggcgcggggctgcatggcggccccaggaacggcaggcccagcggctccttgacaacgccccaggtccccgt

SEQ ID NO: 293766 - DNA, 201 bp, Homo sapiens
agtcttttccccctttttgctccagttaaaaggcaactgacgtatatattctaccatcccgaagccttatggttcttctggctagttattttaaataacartagggaacttcgctttcagccgtggcctgttcttgcttcctgatgcgtgtttgcgcttctaacaagaaaatgttcttttacttaaacacgtcaaaaagga

SEQ ID NO: 293767 - DNA, 201 bp, Homo sapiens
cgtaatttctcgatggttcaggaagacgggtggggctgtgtccatgcttgcacagcctactgtgaacagctgagctcactgccctgtgactggcttggtgyagctgaggctcagggaagagctggggtgtcctggggtgagggagcagcagcaccagcaggaccccatgccccaactgctgcagggaccatcctggcctga

SEQ ID NO: 293768 - DNA, 201 bp, Homo sapiens
ggcaggtggttcttttctgaacacaaacatacacgtgagcatccccaaaggctgtttttgagagatggtgtgtgtctccatgtccaggctgttgtaacagratgataaggtgcagaggccatctgacagctggaagggtacagaggcatctctaagcagcagcaccgatggagtacccagcctggaagtgctgacacccca

SEQ ID NO: 293769 - DNA, 201 bp, Homo sapiens
tttaagattgcttcatccagcctttcaaatactgtccagtaaagcaggacaggccagcatccaccttcttttaggatggcatgtgtaaaggaccctcagtrtttgtggagtgtgttttctgtgatcaggttcatgccataaatcccctttaagagttggccggcgaaggaatagtgctttttcgtccttgtcccgtggaag

SEQ ID NO: 293770 - DNA, 201 bp, Homo sapiens
tcttgcagcatcaggatggggccagggtgcctggcctggaggggtggacttgggccgaggactgcagggcacagatgtcctctcagtgtggccctcagcayggggagccctgtggctttgaagcagatgcttcattcaaggcaggtggttcttttctgaacacaaacatacacgtgagcatccccaaaggctgtttttgag

SEQ ID NO: 293771 - DNA, 201 bp, Homo sapiens
ggcctcactctgtcgcccaggctggagtacagtggcatgatcatggctcactgcagcctctacctcccaggctcaagcagtgctcctgcctcagccttccragtagctggaaccacaggcacgtgtcaccactgctggctgactttttaattttttggaaagatggggtcttatgatgttggccaggttggtctcaaactt

SEQ ID NO: 293772 - DNA, 201 bp, Homo sapiens
catgtgactgtgttatttatgaatgttgataaaatggacatatttctcctaaaattttcatccagttttatattctgtttatctgtttttgttttttgagmtggggcctcactctgtcgcccaggctggagtacagtggcatgatcatggctcactgcagcctctacctcccaggctcaagcagtgctcctgcctcagcct

SEQ ID NO: 293773 - DNA, 201 bp, Homo sapiens
aaatatgtttgatatttagtgttggattcaatctttgtgataccgatatctcgattgcacatttcaatttgtttctatttgccttttggggctttttaccygtctaatctgagccttacactggatttgtttttattttatttattttattttattttattttattattattatactttaagttttagggtacatgtgcac

SEQ ID NO: 293774 - DNA, 201 bp, Homo sapiens
catgcctatgtcctgaatggtattgcctaggttttcttctagggtttttatggttttaggtctaatgtttaagtctttaatccatcttgaattaatttttrtataagatgtaaggaagggatccagtttcagctttctacatatggctagccagttttcccagcaccatttattaaatagggaatcctttccccattgctt

SEQ ID NO: 293775 - DNA, 201 bp, Homo sapiens
gtgtatatgtgccacattttcttaatccagtctatcattgttggacttttgggttggttccaagtctttgctattgtgaatagtgccgcaataaacatacrtgtgcatgtgtctttatagcagcatgatttatagtcctttgggtatatacccagtaatgggatggctgggtcaaatggtatttctagttctagatccctg

SEQ ID NO: 293776 - DNA, 201 bp, Homo sapiens
tttctggttaaagggctttttatcttttttcttttattaccagcttcgtgtgctttaaggctgtggactgtaaaatgtatccagagggcctgcggagcccytcagtggcatctggaagcctgtgccgccaggacgagggagatggctctttgccgacccttgtctgtgttagggtgtcgcggtgcagctgaaagggagttc

SEQ ID NO: 293777 - DNA, 201 bp, Homo sapiens
atggtcacaaccccccccccgccccgtgaaggtggccagtgtgttgggtgggggctctggggcccagggacagcaaagggcggcagtgaccggctctcctkcttgtttttcccacagtggatgtggccacggcgctgcctctgcaagtggccccctcggcagtgcccatggacctgcgcctggaccaccagttctcactgc

SEQ ID NO: 293778 - DNA, 201 bp, Homo sapiens
cgttggagctatcgtttccgtggaaattttgagccatttcgaatcacttaaaggagtggacattgctagcaatgagctcccaaagccatccaggtaaggcygggtcatttcttctctgggcacacagcggggctttctttgcccaaagtagaagttcttgtgactgcagcttgctttctggatttgagacttttgtttttc

SEQ ID NO: 293779 - DNA, 201 bp, Homo sapiens
ggctcaccgaggtgctgcctggccctgtctttgcctgaacacctgcagtctcaatgtggctgtgcgggagcaaaggcggccttcgccccacgtctctctcrtgtgcttccatagcactgccttgtttttgtgaaaggatcggggagggaggaaggcaaggttaattttttctttctgatgtactagtggataaaaagagtt

SEQ ID NO: 293780 - DNA, 201 bp, Homo sapiens
gggctgtgctggctgcggtcctcccccgttcacactgcagtctcccgtttcccgttgcaggcttcgggtacctgacgaagcagctgatgggcctggctggyggccggattgtcctggccctcgagggaggccacgacctgaccgccatttgcgacgcctcggaagcatgtgtttctgccttgctgggaaacgaggtaggaa

SEQ ID NO: 293781 - DNA, 201 bp, Homo sapiens
ggttgaggacaggggcgcttcggggaggacgcctacctcaggcatccgggagcaggtgctcagcagcctcggttgaggagaggggcgcttcggggaggacrcctacctcaggcatccgggagcaaaccggaggcaaacaaaaaaagtcagtagcaacaggaagtgtggatgaaggacttactgttaaacagacggcatgct

SEQ ID NO: 293782 - DNA, 201 bp, Homo sapiens
gtgctcagcaacctcggttgaggacaggggcgcttcggggaggacgcctacctcaggcatccgggagcaggtgctcagcagcctcggttgaggagaggggygcttcggggaggacgcctacctcaggcatccgggagcaaaccggaggcaaacaaaaaaagtcagtagcaacaggaagtgtggatgaaggacttactgtta

SEQ ID NO: 293783 - DNA, 201 bp, Homo sapiens
aggtggggacccctgtcgtagagggattgaagaatacacagggacgacagtgtgacgtgggtggcatcccatgggcgccagtcctgctgtgccagcgcagycactcatggagcacaggcatccagtggctgcctcgcacgcacaccccactctatgcctcaggcgtccggtggctgcctcgcacgcactccccactctatg

SEQ ID NO: 293784 - DNA, 201 bp, Homo sapiens
ggcgttagattctcataaggaccatgcatcctaaatcccccacacgcacagttcacaacaggatcacactcctgtgagaatctaatgccaccactgatccrgcaggagcttgagctctggcgggaatgctccctagcctgccacttacctcctgctttgtggcccatttcctaacaggccagggactgctgctacccgtcc

SEQ ID NO: 293785 - DNA, 201 bp, Homo sapiens
cccacagagaagggcagcgcccttgcacgctcacagttacctggagcacacatgctcaatcccacgcgctcactcacattcagaacgcacacttgggtgcrcaagcacgttgatgtgcaggttcctccgtgcgggcagccctgttgtcttggagcagcgagccctgtagcagaaggcttgtgccgcctcccaccctgagca

SEQ ID NO: 293786 - DNA, 201 bp, Homo sapiens
ctggtgaggccattcctcatcccctgcaccgcctgtgaccatgaaagggcttgggccaggctgtttttgcaggctggatcttcccagaagcctaggggttkgaaaggtgtgtgtgctgggtgcccgggggctgagctggacctccaggctctcgcaggagagggtgtggtggccacctggaagctggctgtgcaggggcag

SEQ ID NO: 293787 - DNA, 201 bp, Homo sapiens
tttatcagccaggcagcctggcctgggcactgccctccagccagcgtgctatgggccgcctgtgagtcttcggaggccagcgctgccctgatgaaggacayggcaagagcttgcttatgtttatcccaccatccccaagaagttcatttaagttggttgttcggaattaagtttttgccatgggaaagatacaggtgagat

SEQ ID NO: 293788 - DNA, 201 bp, Homo sapiens
gttgtatgtttataggttaacctgctggtggcattcccaatctgcagacagtgtggcccagggatgctctcggggcacctttccctgtgtacacagctccrggtccccagggcagagtcctgaatctgtacatgcccagatgtttgtcctggtagagggactttgcttgcatgtggcggcaaggaacaccgcgttaggaag

SEQ ID NO: 293789 - DNA, 201 bp, Homo sapiens
atcaagaaacaggcctgacgtctcagcttgtgctatgaacagggagtgttgaaatcctgtttgtcctgatggctttcactttgcaggctttgctctacagrtaatctgttataaatctaataaggtggaatgcctccctacaagtagcgaagccgagatcacacagcgttgccgggggcaggtagggaatcagtcactgtt

SEQ ID NO: 293790 - DNA, 201 bp, Homo sapiens
ccgagcatgccgagggcagagggtccctgtgtcttctttgaagatcaagaaacaggcctgacgtctcagcttgtgctatgaacagggagtgttgaaatccwgtttgtcctgatggctttcactttgcaggctttgctctacaggtaatctgttataaatctaataaggtggaatgcctccctacaagtagcgaagccgaga

SEQ ID NO: 293791 - DNA, 201 bp, Homo sapiens
gacccaggcactgccctgtgcctctcagaagcccccgtcggccattggtcccgcctgcctcggggacatgaggaccactcactcactccggcttccctgcsttcctgcaggccaacacagatgctggctgaggatggcctcaggggctcctgctgaattccatttttcctgttgtcactgcaccctggtgagccctgcagt

SEQ ID NO: 293792 - DNA, 201 bp, Homo sapiens
cgtctaatagaaatatacatgagtatattaaaattccaccagtaattttaaatattctagtggtcacagtaaacaaagtgaaaaatcccacaaaaccagaytaagttatctatatctgtgtaacaaaattaccccaacacttagcagtttaaaatagcaagtttgtattgtcttgctctgtgggtcaggaatcctggagca

SEQ ID NO: 293793 - DNA, 201 bp, Homo sapiens
agcactttcactgccggagcaggcgcgggtgccagagcagtggggtgggggtttcgagggccccgatttccatgggaggaggcctggcgtgcagctgcagygtccttggagccctcagtcagctgtacacgctccgcctgtgtcgcagggaggggctgtcgctgcatacattcccgaggatctcagggtctaagaggcctc

SEQ ID NO: 293794 - DNA, 201 bp, Homo sapiens
atgaggttcaggcgagaagtgttagctgatgttgtcccatgtgccacgctgacatgtggacacgggaaccagggtcaggagccacgactccaggcagtggygggtccgtgagccatggacacggaggaagtaggcccaggacagcgcccaggaaggggaggcatgctggtgctgctgccctcagtgggcgtgagggccagg

SEQ ID NO: 293795 - DNA, 201 bp, Homo sapiens
cctcttctgaaacccactgttgagtctagagaacaggctacccgagggtggggtcctgctccccgcggtccctgtttctgacctcggccctggtgttccaygctgccctagttgttctctgtgccttcacacagaaggctagggtgctttgtctagatcttctgaccatttccagtaggtttaattgaattacctgaataa

SEQ ID NO: 293796 - DNA, 201 bp, Homo sapiens
gcaaggtccagccacccagggcagacctcctcatcactgttttctcctcagcctgctgcagcagggcagctgcgcacgtccctgcctgggtcctggggcgytactgtgagcatgagtgacaggcaggccctcccacccgcctggcctctgcattcgtccacgttctctgggcctggccagtcaaggagtcttggcaaacgt

SEQ ID NO: 293797 - DNA, 201 bp, Homo sapiens
ctatcattgtacaatatgaattataattatctcaactattctaatgcacttgtcttgcttttaatgtatgtttttagtgatatatatatatatattttttwttttttttcaccagcttggtaatcactattttgctgtttctttactgattatcagtaggatttcaacaactgtctttaatctatcacagccttatctaaa

SEQ ID NO: 293798 - DNA, 201 bp, Homo sapiens
ggccgtattgaggggaagttcctccctccctgttaggtagtgtgatgcagaattcttgacactctttgttttcacatggactgaatccaaatcaggtgggrctgattcttccagccctgtctcctcatcccggtctgacactgcacaacacaaaccttcctgctgcaggctcaccgaggtgctgcctggccctgtctttgc

SEQ ID NO: 293799 - DNA, 201 bp, Homo sapiens
ccctttaattttaaggtctatgttgttcttaagaggaaaccaaccaggtgttttaaacagtgactttgaaacacacacacacacacacacacacacacacmgtgagaaaacaagattacacatagtctcggtatctgtatgaacctttgtattaattgaatattcagtagttattaatgtgtacttacatgatttactagt

SEQ ID NO: 293800 - DNA, 201 bp, Homo sapiens
gccctttaattttaaggtctatgttgttcttaagaggaaaccaaccaggtgttttaaacagtgactttgaaacacacacacacacacacacacacacacacagtgagaaaacaagattacacatagtctcggtatctgtatgaacctttgtattaattgaatattcagtagttattaatgtgtacttacatgatttactag

SEQ ID NO: 293801 - DNA, 201 bp, Homo sapiens
gtcatcaagaagatgtgtttatatttgtccagcttttgtgatttttctctctgctaaggctggaccacatggcctatttcaccttttttctttttttttttgcacttgtgttttttgaagcagtcatgtttattaaatatcgatattcagagtttttttggtcaaaaacaaaattcttctataagatgattagcagtatat

SEQ ID NO: 293802 - DNA, 201 bp, Homo sapiens
gaatgtgtgtgggtgtgtgaatgtgtgtgggtgtgtgaatgtgtgggtgtgtgaatgtgtgtagatgtgtgaatgtatgtgggtgtgtgaatgtgtgtgggtgtgtgaatgtgtgtgggtgtgtgaatgtgggtgtgtgaattgtgtagatgtatgaatgtatgtagataatgaatgtatgtacgtctgaatgatgggggt

SEQ ID NO: 293803 - DNA, 201 bp, Homo sapiens
agacaataaggagcggactaggctgctgtccccatcttcagcgatggctgagcagggccaggcctgcctcactgtattgttccaaagcagttctaccgtcatgcaggtgtcttccgaacatgcgaccctaataccattgtcacagctttaacacatcaacacgtgaatccatcaaataatcagtcatttaaaatccccatt

SEQ ID NO: 293804 - DNA, 201 bp, Homo sapiens
tagggaaacggagggttataaccaggggcattctcagagtttgggcaggatcaggcagcgggcagagctctggtgccccatcaggcggggactttggggggtgctctctgctctccgtgggctcccacatcagatgagccaggtggctgggaggggccctgcgtgcccaacacagtggctgaggggctgctgctcctgccc

SEQ ID NO: 293805 - DNA, 201 bp, Homo sapiens
caggccccgttctcttttctccgagtttgcgagtttgctgacttagctctcctccctgcctttcatatattttattccttaaaagaaagtctgaagcaaaygtaggtgaacgctgatgtttcataaaaccagcattgcttacgcagtttttccattttgctatattttgtcataaaaatgatcagaaaagggaagaaagga

SEQ ID NO: 293806 - DNA, 201 bp, Homo sapiens
tactttagcagatagtggagtttcacgtggcagtccggtaaaccaaggcagtgtgaacatcccttccccacaatgagtgaaaatgcaggaggtgccgtagygagaacagcgacagcattctgcgcattggtgagcccgactccccagcctcggtgcccaccgaagccccctctggctgcactgtgccagtgagtccaggct

SEQ ID NO: 293807 - DNA, 201 bp, Homo sapiens
aaattatggttcctatagtcccaaagcaccagctcacggcccccagcctcagctggaaggggcccagttagcgagccagctctggggcaccagggcagaaygcctgggctggcgggcacagggcgcagttgtctccatcacttactcaatagccctctctccctcctctcttcttcctcttcccctctgctgtttcttcct

SEQ ID NO: 293808 - DNA, 201 bp, Homo sapiens
ggccttctgaaaccagtcactcaaggtcacggctgcccatgggaaacatccatccattgcttagatgtgcagatagggtgggttttcctccattttggggrgaagctgtcccgcttggtgaggaagagcacagggcctgtggccaggctggcgcccacgacaccatatcctgggcagactagatgacctcccgttgtgtcc

SEQ ID NO: 293809 - DNA, 201 bp, Homo sapiens
ggttgttcggaattaagtttttgccatgggaaagatacaggtgagatgcttggtgtgtgcagctagccctgacggccctccctgcccctcctgcgcacacrctgctgccgggcgtggtgggtgccccctctccctcggcccacccaggcctcctgccttgcctgtgcccacacatctgccaggagcagcacccctgctgga

SEQ ID NO: 293810 - DNA, 201 bp, Homo sapiens
atgggcaaaccgaggaagagaatcaagcatgacactgcctttctcataagcgctgtttgtgagagtaacaagatagttgatcttggattccttcccgttakagaaatggtcctgctaacacatggagaggggctgatgggactcgaagagctctgtttttaaccctgatgagagaatctagtcagtgatcattttgagcct

SEQ ID NO: 293811 - DNA, 201 bp, Homo sapiens
ccagccaaccttgggtgtgcagagcctgccccgccttccccactttgtcctgagaagctgggtcctccccagcaccagagttgctgctgcttcccctcgcrctcttggctgctctcccggccccaagcctgagtgacactctaggattgcagatggcaggctggtctctgggctcccccgtccccatgaccctccacctgc

SEQ ID NO: 293812 - DNA, 201 bp, Homo sapiens
ggtaaatacaacagttgcaattcagttaagaacactgggggaaaatgacatcacatgtaagtcagcgtttggaatgggtctcagttatgaccgttcaggcstttgaatgtcagcttcagcgcgaggtgctctccatagctctgaggagggatggcaggtcaaacacgcatgtccgtccctcaggaaattcacaaaaacgcc

SEQ ID NO: 293813 - DNA, 201 bp, Homo sapiens
cccacacagagaaagcctcccctgtgcacatccataaataccactgtatcttctctttgcatttatttctttacattttgatttcaatggaaagcaatacmaagcaccttcttcttgcaccataatattttttattcttatttttcaagcataatttaacttacagtgattgttaacataagcttttgtctttggcattgc

SEQ ID NO: 293814 - DNA, 201 bp, Homo sapiens
agctttgtgggagcagatctaggttgctgccacagccccaggagctttttaggaaaaagtgactttattcacggagagctgtgggctgtaggctctcagcraatagtaattacaggggggcctggcctttggtcaggaatgaaaccaaagcccaagccacacagagcaggccgaggggtcgggcaggcccccagtgctggc

SEQ ID NO: 293815 - DNA, 201 bp, Homo sapiens
tgctcagcaggctgggcttggccgggcttcccctctcgtcacctgtttttctggtgctgttgggaagggaggtggggcctggctgtgcctctggggctgtygtctcggccttgagcagctttgtgggagcagatctaggttgctgccacagccccaggagctttttaggaaaaagtgactttattcacggagagctgtggg

SEQ ID NO: 293816 - DNA, 201 bp, Homo sapiens
gtcggcactgatcctgctcatggggggcggtagccatgagaccaggctttctgctgtttgaggagccccgcagctcctgtacctcaggcccgcaccctggscacttctgctgccgggagccccttcctccggatctcagagacccagcgtcatgcagagtttttttagcttaagcctcagttcctcagagaggcctttcca

SEQ ID NO: 293817 - DNA, 201 bp, Homo sapiens
ccccatagtgccctagaaacacactaaacacgggagcgtgtgtggtgtgtgtgtgagtgcgtgcgcgtgtgtgcgtacgtgagtgcgtatgtgagtgtgtgcgtgcgtgtgtgtgcatgcgcgtgcgaactgaatgcatgcgtgcgcgcatgtgtggttgtgtgtgcgtacatgtgtgtacgtgactgcttgtgcgcacgt

SEQ ID NO: 293818 - DNA, 201 bp, Homo sapiens
tccccatagtgccctagaaacacactaaacacgggagcgtgtgtggtgtgtgtgtgagtgcgtgcgcgtgtgtgcgtacgtgagtgcgtatgtgagtgtgtgcgtgcgtgtgtgtgcatgcgcgtgcgaactgaatgcatgcgtgcgcgcatgtgtggttgtgtgtgcgtacatgtgtgtacgtgactgcttgtgcgcacg

SEQ ID NO: 293819 - DNA, 201 bp, Homo sapiens
cgcgatctcggctcactgcaagctccgcctcccgggttcacgccattctcctgcctcagcctcccaagtagctgggactacaggcgcccgccactacgccyggctaattttttgtatttttagtagagacggggtttcaccgttatagccgggatggtctcgatctcctgacctcgtgatccgcccgcctcggcctcccaa

SEQ ID NO: 293820 - DNA, 201 bp, Homo sapiens
tggatgaataaaaatctgctcttttgcttttcacccttgccagtttactataatcatctttttttttttttttttttttttttttgagacggagtcttgcyctgtcacccaggctggagtgcaggggcgcgatctcggctcactgcaagctccgcctcccgggttcacgccattctcctgcctcagcctcccaagtagctg

SEQ ID NO: 293821 - DNA, 201 bp, Homo sapiens
ctggtccaggcgggtattggcctccttctgggcagagtgctggtgtccacgcccagggcacacatacagctaagcacatcctctgtgtgcgtgcatgtgtrcatacctgcatatgtgcgtgtgtgtgtgtgctttgagagtggtggctttctgattgaacaagcagagtgctcaaggacacggctccaggtcagcctgtgc

SEQ ID NO: 293822 - DNA, 201 bp, Homo sapiens
gggcgctgcaggactggccatgaccgccctgtgccactgtctgcagagaccctggtccaggcgggtattggcctccttctgggcagagtgctggtgtccaygcccagggcacacatacagctaagcacatcctctgtgtgcgtgcatgtgtgcatacctgcatatgtgcgtgtgtgtgtgtgctttgagagtggtggcttt

SEQ ID NO: 293823 - DNA, 201 bp, Homo sapiens
ccactcctggggactgtctttcttcctgctacttgtaggaacccacaaatatcttatagcgtcctaaaaaaaaatccacttttacaaaaaaattataaatwccacggcacatttggctttttaaagttatttttttctactctgtgggcaaatgcaccccacaagggtctctgtgctcaggaaacagttgcagtctcggaa

SEQ ID NO: 293824 - DNA, 201 bp, Homo sapiens
ttttaacttttaattttgctgtaatttcaaacttacagaaaatcagcaaaaaatagtccaaagaattactgtttattgatatgcatcctttttttttttttcagaatcgtttgaaagttagtgttagatgtgatgccttcccccaactaataatccaggccatgttgcctcagataagcgtggtcactcttcaactacggt

SEQ ID NO: 293825 - DNA, 201 bp, Homo sapiens
ccaactttttaaaacttttcaaagcttgttttggttctttttagccctttgcatttccatatggatttttttttttttttttttttgagatggagtcttgytctgtcttccaggctggagtgcagtggcacgatcttggctcactgcaagctccgcctcccaggttcacgccattctcctgccttagcctccccagcagct

SEQ ID NO: 293826 - DNA, 201 bp, Homo sapiens
gaaaatactgtttcaggaatgtgtcgtttccatctctgtgctcagcaggctgggcttggccgggcttcccctctcgtcacctgtttttctggtgctgttgrgaagggaggtggggcctggctgtgcctctggggctgtcgtctcggccttgagcagctttgtgggagcagatctaggttgctgccacagccccaggagctt

SEQ ID NO: 293827 - DNA, 201 bp, Homo sapiens
aagccagtgtttctttctccctcttcagtggagaacaaatcagctcctattttcttggtgccttatgaagcgggagtgtttctgagtcctactcgaatccmttgaagctgataattccattttagtgtcgtgtctgtgttagtacctcgcagtccctcatctccactgctttgcatacagaaggttttgcagactgaggaa

SEQ ID NO: 293828 - DNA, 201 bp, Homo sapiens
aaatgtaggccttgccacctgccagccacgtggggtggggagaccaggccggaaggatgagtgcctgcaggagttcagtgctgagggacagaggcggctcrgggacgggggaaggtggggaggccctagcaatcagctttgatgacaggtggggtagggaggagcacagacaccttccctgtgacattgagttagctcttt

SEQ ID NO: 293829 - DNA, 201 bp, Homo sapiens
caggagtttgagaccagcctgggccaacatggcaaaaccccgtttctactaaaaatacaaaaattagctgtgcctggtggcatgcacctgtgttcccagckactcgggaggctgaggcaggagaattgctcgaacccagggttgcaggggtggtggaggttgcagtgagcccagatcgtgccaccacactccagcctgggc

SEQ ID NO: 293830 - DNA, 201 bp, Homo sapiens
tcttagttctcagaggctcactggtcctggcttctgtgactgcatttcatttgttggataacgttgcccatattgcggggtcttctgaactctgtctcagyggtctgctgtttcgctttgaagttgtcttgattccattctgctttttcatgcatcgttgtgctttctgtgtctgtagatgcatgtctcccaccagttctg

SEQ ID NO: 293831 - DNA, 201 bp, Homo sapiens
ccattcacctcttgccgttctctactatttaaattttccttcacttcaaccccacaagttaggtaaacttcttccttcttccttctttgttcttctccctycctcctcgtcctcccctcctcctcctcctcctcttccttcttctttcttcttcttcctgtgttgttcagatgaagtctgtttagatttctctccgtagcc

SEQ ID NO: 293832 - DNA, 201 bp, Homo sapiens
ccactgttctagaaggccccgtctcattcatgctgctgctgctcccacgcccccgctccctgcctctccacccgtagttgggtcggtgggcgtaaagtggkgtctccaggggtctgatttgcctttccgccctcactaacatggtccagcgtttgatcctttgtttcccctgctgtcagggtcttctgtgaccaacccatt

SEQ ID NO: 293833 - DNA, 201 bp, Homo sapiens
tcatcacacgctctgctttctcctggcaccggcctggtgcgtctccccggggctcgcccacctgcgcgggagccagcacttgcagggacccaccttcctgkgttggtcacctggcttccttcctctccacccccagcgcccactccccctggctggactctccctctgtcctccgaggaacagcttttcttggcggcctcc

SEQ ID NO: 293834 - DNA, 201 bp, Homo sapiens
ctgagaatagggtttagcactgagttactttctttaaaaaactagttttgccgtgtaagtatgcttcctcagtcagcatacggtttggatttgcttttccragcttttaataatcgaaatcatactgacgtcgttttctgcagcttgtttatttttgtttttgttttttgtgtttttttaactcagcattgtttctaagat

SEQ ID NO: 293835 - DNA, 201 bp, Homo sapiens
tcccgcatccagtgactaatcagttgggtgccgggcagcgtaagcaccaggccaccttggcccaacttaggacaactcaaggcctgctggcttcccggaargtgcctgagcccctccctaggctgactgccttccctcctcccctgtcacagctgccaacccaaggacacctcaaccaccttgcacactgaagcccaccca

SEQ ID NO: 293836 - DNA, 201 bp, Homo sapiens; identical to SEQ ID NO: 60556

SEQ ID NO: 293837 - DNA, 201 bp, Homo sapiens
gtaaaaatgcttatcattgggcttacagattaaaattttagtgagacagaacatcgttttcccaaccttcccatcggtcacattagagcaaagtcttcaasagcatttttcacttaagggatgttttctaaaaagtgaccctgtgcttttgatgaaatagtcagctaaggagaatggaaccctttgtaccttcacgctgaa

SEQ ID NO: 293838 - DNA, 201 bp, Homo sapiens
gacccggggctgccaggccagggctaggctggcgggtggggcagcacacagcctttaacccacgttctgttctctcctctctgtggtgcacctgccccacgcccccatctccttctcttgcgggatccacagaccagatgaggagcccatggaagaggagccgcccctgtagcactccctcgaagctgctgttctcttgtc

SEQ ID NO: 293839 - DNA, 201 bp, Homo sapiens
gttctttttcagcatccgccacggctcacccttcagcattcctcctggctacccagcatctgtccttgtggctgtggccccgcccgcccctccctggcccytactttgctgttatgggactgatgagctgtgctaagccctcctcctcctcattcttgtccttccttccagcatcgtggccgtctcatattctggggacag

SEQ ID NO: 293840 - DNA, 201 bp, Homo sapiens
tcctgaacagatggacccggggctgccaggccagggctaggctggcgggtggggcagcacacagcctttaacccacgttctgttctctcctctctgtggtgcacctgccccacgcccccatctccttctcttgcgggatccacagaccagatgaggagcccatggaagaggagccgcccctgtagcactccctcgaagctg

SEQ ID NO: 293841 - DNA, 201 bp, Homo sapiens
tcacacacatcaagcacaagaagctaacacccagagtgagcctgtcaactttatgtcagccagactcagcttttcactcccaaccatgtgacctaggcagrtttctctacctccctgcctcagttttccacatctgtgaaatggggactagcaggcggttaggcacatgctttgcatagctttctgctttcttgcgggtcc

SEQ ID NO: 293842 - DNA, 201 bp, Homo sapiens
gagacggtcaccgccatggcctcgctgtccgtgggcgtgaagcccgccgaaaagaggtgagcacctgccctgccgcccgcctgcaggctcacccagccccmctgtgcccactgacacactattcagggtcagaacctttatggcacatgccctgcccaacagactagagacaggccagtgtggccccctccttccagtgcc

SEQ ID NO: 293843 - DNA, 201 bp, Homo sapiens
cccgcatctgcctattggccacctgggctttccctccttgtgaagttcatgtcaacccgtttttctattggattgtcttttccctatttgttcttagtggkgtgaattagacagatggacagagggagagaaggagagagcggtggtgtgaagcaggttctccacacattggtgaccagcctgtgtgagtccagggagaca

SEQ ID NO: 293844 - DNA, 201 bp, Homo sapiens
ccccgcatctgcctattggccacctgggctttccctccttgtgaagttcatgtcaacccgtttttctattggattgtcttttccctatttgttcttagtgsggtgaattagacagatggacagagggagagaaggagagagcggtggtgtgaagcaggttctccacacattggtgaccagcctgtgtgagtccagggagac

SEQ ID NO: 293845 - DNA, 201 bp, Homo sapiens
acacgaggctccctctctgggatgcgggtgcctagggacctgcaggccacctccaggggcaggtcctggtcccaccaagagctgagatgtgccccatgccrcttctctggcaggcggtgctccttggaactgtaaagggaagttgctgggggcacagttgagttcagagttggatgagggagcccaggatgtgtgtgtcct

SEQ ID NO: 293846 - DNA, 201 bp, Homo sapiens
aaggtggtcggggaacagcttggtttcatacatttttagggagacatgaggcgtctgtcagtatgtggaagatgaacattggtccagtccagaaacgcggracaactcgaagtgtgaggctttcagattataggtagattttaaaatgttctgattggcagttggttgaaagagttattatcaacacaaaggaatgtctgg

SEQ ID NO: 293847 - DNA, 201 bp, Homo sapiens
aataatgtaggtcttccaactttttaaaacttttcaaagcttgttttggttctttttagccctttgcatttccatatggatttttttttttttttttttttgagatggagtcttgctctgtcttccaggctggagtgcagtggcacgatcttggctcactgcaagctccgcctcccaggttcacgccattctcctgcctta

SEQ ID NO: 293848 - DNA, 201 bp, Homo sapiens
acacgcatgaccctgacaaccctggcttgtgtgtgcatgtctgtccatgtccctcggtgccacatgcatgaccctgatgaccctggcctgtgcaagtgtgygtgtgtgtcccctggtgcctcatgcatggctctgaagacctagccttgctggctcccatggcccttcctctttatcctcttggtatctgatcttccgaac

SEQ ID NO: 293849 - DNA, 201 bp, Homo sapiens
aggaagggtcaggtcttgcaatcaaacttctcaataacaaaagagttctcccctggcccctgacctccttgatgcagcctgggcaggggtggcaatagcgmgggcggccatgagaagctgaggcggagcgtccgagcagatccgggccatcatggtcctgcagtgccgcgaatcaccacagacggttacaggcagggagga

SEQ ID NO: 293850 - DNA, 201 bp, Homo sapiens
ggagcctccttttcttcagtcctcggaggtgacccggaggcccccggaacctcctgacactgccagccagtgcttcctcctgctgagagcagccagcccgctgtgtgcccccatgtactgagctccaagagtgtcgcctctggctaagggaagctgagggcaaggcttcttcctgaggcttggaggagacctttcagctga

SEQ ID NO: 293851 - DNA, 201 bp, Homo sapiens
gagctgatgatatggacctggcctgggcgcataagttcacaaggactttccagtctgggcatctgcccatccgtccacacaggaagggtcaggtcttgcartcaaacttctcaataacaaaagagttctcccctggcccctgacctccttgatgcagcctgggcaggggtggcaatagcgagggcggccatgagaagctga

SEQ ID NO: 293852 - DNA, 201 bp, Homo sapiens
gtggccagctattattccgttatttgtccccacccgcgtcctactgattggtccattttacagagtgctgattggtgcatttacaatcctttagctagacrcagagtgctgattggtgcatttttacagagtgctgattggtgcatttacaatcctctagctagacagaaaaattctccaagtccccacccgacccagaag

SEQ ID NO: 293853 - DNA, 201 bp, Homo sapiens
ttcggagttcacaaccaaccatgtgcagtgcttcccgcggtccctccctgaagaagagtgtctttccatgtcagcgtgccagcttcagcacacgcgggctkcgttctgacgaagttctgttttcagaattcttctggttaagcggaggccagagctgaggcacgtgggagctgcggagggcctcttctcttgtttcacgta

SEQ ID NO: 293854 - DNA, 201 bp, Homo sapiens
ttctttgccgtatgattctgatttttaccacgctaacgcagtggtacaagatttatcatctgagttgcacgttgagtgataggaagtggatttgttcccgrgactctaatatcttaggagaagatgaaaatatgtcatgagcttaatgccgcgtatgaagtgtgatgggaatgtgtgttgtgcctctgctctgccaggcac

SEQ ID NO: 293855 - DNA, 201 bp, Homo sapiens
gcttcggagttcacaaccaaccatgtgcagtgcttcccgcggtccctccctgaagaagagtgtctttccatgtcagcgtgccagcttcagcacacgcgggstgcgttctgacgaagttctgttttcagaattcttctggttaagcggaggccagagctgaggcacgtgggagctgcggagggcctcttctcttgtttcacg

SEQ ID NO: 293856 - DNA, 201 bp, Homo sapiens
tggtttatccttttccaagagctggttactcttaactaatttctgagtgtagaaaggataagcaatcttttgctgattatttctcacaaagaattgctttygcccaagtgtgtagctgtttccaaagacgggctctccgacatgcacgtgtgatgttgagtgcagcacaggaagaatggcccatgtgcctggcagtgattg

SEQ ID NO: 293857 - DNA, 201 bp, Homo sapiens
ggcttcggagttcacaaccaaccatgtgcagtgcttcccgcggtccctccctgaagaagagtgtctttccatgtcagcgtgccagcttcagcacacgcggrctgcgttctgacgaagttctgttttcagaattcttctggttaagcggaggccagagctgaggcacgtgggagctgcggagggcctcttctcttgtttcac

SEQ ID NO: 293858 - DNA, 201 bp, Homo sapiens
cataatttgatggtatgtggtggtttagagctagacgtgccccgtgacacagccccttgcgcagagcacagctgggaggctgcacgagcgatggcctttcsaggaagcagagtggccggcaccctgcctgctgtcccggtccagctctgttccccctgggaagccgaggggcgtggccaacacccgcctgctgttccaacc

SEQ ID NO: 293859 - DNA, 201 bp, Homo sapiens
ttgtctgagtcactgggagttgatagaggtggatcatggggcacttctgttttagcgtaaatgtgacgcctcagcgaccctgcactgcacggagcatccaygagctttctgcccaacctgtgagaatgagctgctcttcctcccataggcagcagagggtgggctgggagacgatgggcgggtatttgtgtggcccagttc

SEQ ID NO: 293860 - DNA, 201 bp, Homo sapiens
gggcttcggagttcacaaccaaccatgtgcagtgcttcccgcggtccctccctgaagaagagtgtctttccatgtcagcgtgccagcttcagcacacgcgrgctgcgttctgacgaagttctgttttcagaattcttctggttaagcggaggccagagctgaggcacgtgggagctgcggagggcctcttctcttgtttca

SEQ ID NO: 293861 - DNA, 201 bp, Homo sapiens
agaatgtctgccaaggaggctccctttctataggagagctgtaagggggctcggggtttggggttacactgggggaagggaaagtggcgtgaatgcagtcrcctgtcttttgctacttacttctcttctgacaaaccagggactgtgtcatttagaaattgttgagaatagttcgaggtagcttagtcagagcttccttcc

SEQ ID NO: 293862 - DNA, 201 bp, Homo sapiens
tgttcagtcctgttttttatccaatctggtaattttcatgtgactgtgttatttatgaatgttgataaaatggacatatttctcctaaaattttcatccarttttatattctgtttatctgtttttgttttttgagatggggcctcactctgtcgcccaggctggagtacagtggcatgatcatggctcactgcagcctct

SEQ ID NO: 293863 - DNA, 201 bp, Homo sapiens
acaaactgtccccaccataggctttatcgcttctgcctagatccgcaatctgtcggatttctttcatctttattatcttcttcctctttttcagtgcacartgtatgctttaattttctagttatttttctaactttttgagtctaatgtttttatttgtttgggttccttttgtagttacttacatgtaggcagctattc

SEQ ID NO: 293864 - DNA, 201 bp, Homo sapiens
cttctggcaccatcttctccgaggtcactgtcttcccctacgaagcacaaactgtccccaccataggctttatcgcttctgcctagatccgcaatctgtcrgatttctttcatctttattatcttcttcctctttttcagtgcacaatgtatgctttaattttctagttatttttctaactttttgagtctaatgttttta

SEQ ID NO: 293865 - DNA, 201 bp, Homo sapiens
ggaaagggaggccctgattctgctcccctcacccacagagggagtgaaggagactttgaaagtcagtggtggtgattaactcaggatcgaaggcggcagcytaaaggagacatgaaactgctgaacttccctactcacggagagcacacatatggattcatagcatacgcatggattcatagcacacactgataagatcat

SEQ ID NO: 293866 - DNA, 201 bp, Homo sapiens
aactctgtgtgtcgttgaagattttcatgatgaaaggccgctgaccagttcctaagagtcttctggcaccatcttctccgaggtcactgtcttcccctacsaagcacaaactgtccccaccataggctttatcgcttctgcctagatccgcaatctgtcggatttctttcatctttattatcttcttcctctttttcagtg

SEQ ID NO: 293867 - DNA, 201 bp, Homo sapiens
ctgataccatctgacagggttctccttcatgtagaggaatcatttaaggcgcctgtaaacggggaaggtaaagagagacagggcggtgaggcctctgtgcytcactcagcgggtcacacgccaccgcccgcagaatgagctgagtccaagggctggtgggagggaggtcttcgtggtgagggagtacctcgccttggtcat

SEQ ID NO: 293868 - DNA, 201 bp, Homo sapiens
gttgacaccatgggcgtctcaaccggctcagcttacacaactctgcctgcagaattaaagttgagcagactttccagtcagtgggcaccaaaaccacagcrtccagatcagctgccgacaggagcagagctttcggtggaaatgttcaacaggtggactcagggtcctgagtgtcataacaggagatggagcacggctttc

SEQ ID NO: 293869 - DNA, 201 bp, Homo sapiens
cttggctttcctcagcggtttatgtcagagaacgggccgatgtccgctccatccccttcgcttctcttttattcttctaaatggtattcgcaagaacactrataccatctgacagggttctccttcatgtagaggaatcatttaaggcgcctgtaaacggggaaggtaaagagagacagggcggtgaggcctctgtgcttc

SEQ ID NO: 293870 - DNA, 201 bp, Homo sapiens
ttgtttccccggaagctgaggggagtggctggcacccgcctgctactgctatcctggcccagctttgtctcccaggaagccaaggagagttcgctggcackcgcctgctactgctatcccagcccagctctgtttcccaggaagctgaggggagtggctggcacccgcctgctgtcccaacccagctctgtctccctggga

SEQ ID NO: 293871 - DNA, 201 bp, Homo sapiens
cctccttcaggcctcgtccttggtgccctctcttcttctccaatgttttctatttttaaatatttcaactgttactgttaagtaatagtggttcctacttyggcccagctgttaggtgaaacacataaccaaacgtttggaggttgctaagaaggaaattctgaaatgcgttcttatgtaaacttgatcttacgtaactga

SEQ ID NO: 293872 - DNA, 201 bp, Homo sapiens
gggctgattttgggggagagggcacttggtgaggtctcgaggtgctggcttagaggaggctgaagggtgctgggcagagatccagcgggagaaggttcagrtgggggtggatgagggttcagtggggacgcttttgcttcagtctgttttcaggaaaaagtgagaaagtgtccatccaagtgggtggttgggagcatctcc

SEQ ID NO: 293873 - DNA, 201 bp, Homo sapiens
gggaaggctgaggctcttgaatgttcgttccttccgtaagctgtgttgctgtgttgctgctgttgctgccttttgtagacaggtgtgttttaggagtcgcrgcgcctgatgtctgctgttttcaccattgctgagtggcacccgctgcacacaccacgctggtccctgggtttcttgcctgaggaagtcagggttatgaag

SEQ ID NO: 293874 - DNA, 201 bp, Homo sapiens
atgagtacacacacgtgtgcttgtgtgtctttgcatgcacatgtcttcgtgtgcacctgagtatgcacgtctccggcaggtgaggcccttcacaaggacaygtgtaaacgtcttgtgtggactctaccacatgctttctggggacggtgaataagtcacgagacccctctcagtgtctgctcactcttctctaactggggt

SEQ ID NO: 293875 - DNA, 201 bp, Homo sapiens
caggaagcacttgttggagatgagcgtgtctgaaactggtctgtggctgaacggggctgtggggtccggaggagctgtctcagttcattcttcagtgccargcgtggaatcttggcgactatcttcttaccatcagctcttagtgctcccttttgtgcatgaaataaaaccaggagctcactttgggtcgatggtgagaga

SEQ ID NO: 293876 - DNA, 201 bp, Homo sapiens
cgtccctcctgcctggctttccagggacatgtgacttatgtccccaaagtagaagcagcactaggttatgtggatgggaccatagagtcgttttttaccaycggaagccgtgtcacatcttttctttgttaaacaagagaccttcatagaggaagcccggttttgtggaattgttgttcatgagaagagaacccgcagagc

SEQ ID NO: 293877 - DNA, 201 bp, Homo sapiens
cccatccaggcagacagaggtgtttgtgaaggaggaggtgtgtggtgcccgttttcctccgggcagggcccaggccactgtcttccacaggacaccctccrgcaaggggctctgtccactgtcctttgcccggcgcggggctgcatggcggccccaggaacggcaggcccagcggctccttgacaacgccccaggtccccg

SEQ ID NO: 293878 - DNA, 201 bp, Homo sapiens
ggtttttctacttttcttctttgccttattctaacatcaactttaatttgtgaatttcatttgtggtctaacgtcagatctctctttctgcaattcagtcycttatccagtgggtcgcttttgagtggggaggacacacatggctaccctgccgttctttcacccaaagtccacactacatgacctgcctcttggcaccgc

SEQ ID NO: 293879 - DNA, 201 bp, Homo sapiens
ttctcactctcaggtcttagaaggatgctattcatattcagagacaaatttccagagtaggtatccagcaagtaaaatgctgcttctcagaaagaaaaccrtggaaggtcacaggagcagccagatgacccactccacaagtcctgggcagctgactgcaataagtgtgttcttgaaagaatgcagctcagacaagggaga

SEQ ID NO: 293880 - DNA, 201 bp, Homo sapiens
tgtccatcgctcctcacctgtagctgcccttccgccttttctgtgatgagcacagataacggagcagcaagttctcgtgctgggaacatcagggctgcatrctgtcttctcaggcacacagctgttctcagcggggccaccccctcgcccgcccatcctggtgaccacctgccctgtggcccggggcagaacagccacggt

SEQ ID NO: 293881 - DNA, 201 bp, Homo sapiens
tttgggcttcggagttcacaaccaaccatgtgcagtgcttcccgcggtccctccctgaagaagagtgtctttccatgtcagcgtgccagcttcagcacacrcgggctgcgttctgacgaagttctgttttcagaattcttctggttaagcggaggccagagctgaggcacgtgggagctgcggagggcctcttctcttgtt

SEQ ID NO: 293882 - DNA, 201 bp, Homo sapiens
ggagggacaaggcgggcacagaccctgcccttggagccaggccaggtggagaggagcgcgggctccctccgacacaggctggctcctccgagcacgtaggsctttgtctggaaaacgtcacagcatctgcatggcgcctgcgcccctcagctggccgggccctcctagcagatgggggccgggcctatcctccctttgcct

SEQ ID NO: 293883 - DNA, 201 bp, Homo sapiens
gggtgtggatgcatgtctgtgtgcatgcagtatacgtgtgtgtgcatatctctgaggacacacccatgtgcttgtctttgcatgcacatgtctttgtgtgtatatcgctgtgtgtgcacatctgtatatgagtacacacgtgtgcttgtgtgtctttgcatgcacgtctttgtgtgtatatctctgtgtgtgtgtgcacat

SEQ ID NO: 293884 - DNA, 201 bp, Homo sapiens
ttttgggcttcggagttcacaaccaaccatgtgcagtgcttcccgcggtccctccctgaagaagagtgtctttccatgtcagcgtgccagcttcagcacasgcgggctgcgttctgacgaagttctgttttcagaattcttctggttaagcggaggccagagctgaggcacgtgggagctgcggagggcctcttctcttgt

SEQ ID NO: 293885 - DNA, 201 bp, Homo sapiens
aatgccttgtacagcccaggcagggaggagggacaaggcgggcacagaccctgcccttggagccaggccaggtggagaggagcgcgggctccctccgacayaggctggctcctccgagcacgtaggcctttgtctggaaaacgtcacagcatctgcatggcgcctgcgcccctcagctggccgggccctcctagcagatgg

SEQ ID NO: 293886 - DNA, 201 bp, Homo sapiens
tgggtgtggatgcatgtctgtgtgcatgcagtatacgtgtgtgtgcatatctctgaggacacacccatgtgcttgtctttgcatgcacatgtctttgtgtgtatatcgctgtgtgtgcacatctgtatatgagtacacacgtgtgcttgtgtgtctttgcatgcacgtctttgtgtgtatatctctgtgtgtgtgtgcaca

SEQ ID NO: 293887 - DNA, 201 bp, Homo sapiens
cttttgggcttcggagttcacaaccaaccatgtgcagtgcttcccgcggtccctccctgaagaagagtgtctttccatgtcagcgtgccagcttcagcacwcgcgggctgcgttctgacgaagttctgttttcagaattcttctggttaagcggaggccagagctgaggcacgtgggagctgcggagggcctcttctcttg

SEQ ID NO: 293888 - DNA, 201 bp, Homo sapiens
tagctctcttgcccaccacatcccgccagctcctgcccagccccagcacctcccaaaggggtccggcgtgcaggccgcttccccgcatggtcagccccacrtccactacttgctgtcaccaaggcacagaggagagcagggccaacatgcctgcggggatgagggctgaccaccatgaggttcaggcgagaagtgttagct

SEQ ID NO: 293889 - DNA, 201 bp, Homo sapiens
gtgggtgtggatgcatgtctgtgtgcatgcagtatacgtgtgtgtgcatatctctgaggacacacccatgtgcttgtctttgcatgcacatgtctttgtgtgtatatcgctgtgtgtgcacatctgtatatgagtacacacgtgtgcttgtgtgtctttgcatgcacgtctttgtgtgtatatctctgtgtgtgtgtgcac

SEQ ID NO: 293890 - DNA, 201 bp, Homo sapiens
tataatagggctgggcgaggtaccttatgcctgtaatcccagaactttgggaggccaaggtgagaggatcacttgagcccaggagttcaagaccagcctgrgcaacatagtgagaccctcatctctacaaaaaaaaaaaaaaaatcaggcatgacgtcgtgtgcctgtagtccccattacttgggaggctgtggcaggaga

SEQ ID NO: 293891 - DNA, 201 bp, Homo sapiens
gaggggctgcctgtgggccccatgaggggacaagatctttgcctcgatgtcaccggggctgccacagcaggggcttcagcaggcgtgggagttgctgagcrgcctcaaagcatcagctcatcaggccgtgtcctgcacacacgcagttctgtgcgcccacctccacgcctttcagaatggcggctgctcctgacaccttca

SEQ ID NO: 293892 - DNA, 201 bp, Homo sapiens
tgtgggtgtggatgcatgtctgtgtgcatgcagtatacgtgtgtgtgcatatctctgaggacacacccatgtgcttgtctttgcatgcacatgtctttgtgtgtatatcgctgtgtgtgcacatctgtatatgagtacacacgtgtgcttgtgtgtctttgcatgcacgtctttgtgtgtatatctctgtgtgtgtgtgca

SEQ ID NO: 293893 - DNA, 201 bp, Homo sapiens
gccgcagaggccgagagaactgccgttgctgagaggcagcggggcgacaggctgtggccgggctttcctccgaggctcagaattgatgactgtagctgggratgggggaactgaagggcgaaggggcccagtctccacctaagcttggggctgtggaaccgagactgagcccctgccctgttgttggcagcccccagtctg

SEQ ID NO: 293894 - DNA, 201 bp, Homo sapiens
gacaaatttccatttctttgtctgtagagaggggctggcaacactgtgcagggtcgcacaaggccccacccatgccagggcccaccagtagagacctgctrtgtccactccccacaccaggaatcccaccatcctacagatagcgcacagggtggacaggaacatccacacccacccctccaacagtcctggacacccgac

SEQ ID NO: 293895 - DNA, 201 bp, Homo sapiens
tgagcaactggttgtttctgcacacacacttacgtatttcacggggcagtgtccgtcattgcctatgtgtctgtgttgccattacaaactcccaagcacakccatgcccacacacagtgtactgattgtgagtcctagtttcattgactcctgtaagcctgcacctaccctgatgctttttttttttttttaccagaagtc

SEQ ID NO: 293896 - DNA, 201 bp, Homo sapiens
cagggtgtcccaggcccctggctgagtgccccccccacacacagagcccagcccagctccatctcatcagagaggcacatccccaccagcaggcctgctcyaggccccaaaggtcctgggtgcccagaagctgatgggctgttactgcttttagcctgcacgagggtgtgtgggatgtgagaccagggaggggagcggctg

SEQ ID NO: 293897 - DNA, 201 bp, Homo sapiens
aaacacttattttctgttctctctggagagtaataggcagaaccccttatcagggaaacgtcgtagtacacggagcaatttgccgaggtaaacataaggcrgggcacctccagcccgcgtcggggaggattgcttattaaccacttaaccgcgtggggcccacggcaatcccagctgaatttggtcagcagcagactgggg

SEQ ID NO: 293898 - DNA, 201 bp, Homo sapiens
agccggggaggggctcctggtgccatgccccgtgtgtgcgagcattggcatcacacagggactctgcttcagcagtgaggtgagagccagacctacccgcyaaatacagggccctgcctgtttctcgtgccctgtcccctctctacttgaggagttcctaaccacggtgtaagggtctgggtctgaatatttgtggatttc

SEQ ID NO: 293899 - DNA, 201 bp, Homo sapiens
gctggaggcgagtgtggcatgagggatgcagagccagcggcgtggtcgggagcagggtggcagggaggctgcaggggcaacatggccacacgatggagggrctcttcagcagaggcaggatggcagaagagcacttgggggacattcagcaggggagtgaccaggtccactggcccgtttgaaagcgtgccctcactgcta

SEQ ID NO: 293900 - DNA, 201 bp, Homo sapiens
gcgggggtcctcagggcgggcttcgggatggctgatgtgcagttgcacagtggccccgtgcccttggagccattctgacctctggggcagaggctagggcrccgacacagcagacatgaaggagggtagtgtttttcatattttctagcagtaattgcagtggtgtgtatgtgcctgtgtcaccgccgcagcaggttctgg

SEQ ID NO: 293901 - DNA, 201 bp, Homo sapiens
gtctactcttgccaggcccactcgatatgccaaggtcatcagaaacaagcatcctttgagaaactgtcaccaccaggagggatctcaggacatgcgacacytaagtgtgatgtggaattcctggatgggatcctggatggatcttggaatacagtaaaagacattagtgggaaacttcaggaaatcctaaactctagaatt

SEQ ID NO: 293902 - DNA, 201 bp, Homo sapiens
ccaaagtggagaaggtcctgggctgtctgcacgtcccaaagagtgaagtcatgttggtccccatcgcccagccacatcagtcctgcttccaggagaaactccgtctcattccttgttgctctggaggcggtgcactgcctgttccagaaagattaagaacagcaggagtgctgattctttaagaagaggtaaaatctccct

SEQ ID NO: 293903 - DNA, 201 bp, Homo sapiens
gcggaatgtacgttgctgcctggaagaggccggctcgccccagagagaggggctacctccttcaggcctcgtccttggtgccctctcttcttctccaatgktttctatttttaaatatttcaactgttactgttaagtaatagtggttcctactttggcccagctgttaggtgaaacacataaccaaacgtttggaggttg

SEQ ID NO: 293904 - DNA, 201 bp, Homo sapiens
tccaaagtggagaaggtcctgggctgtctgcacgtcccaaagagtgaagtcatgttggtccccatcgcccagccacatcagtcctgcttccaggagaaactccgtctcattccttgttgctctggaggcggtgcactgcctgttccagaaagattaagaacagcaggagtgctgattctttaagaagaggtaaaatctccc

SEQ ID NO: 293905 - DNA, 201 bp, Homo sapiens
tgctcaaagtgggactcgtggttgctcctcattacagcaatgatgaggacactgatggccacaggtccccttaccaaggccacccatctgtcactcagctrcgtaccgtgtgttcattggcatttaatgcccctggggacatcacacagtagttactggttcaggaactgaggctgggaggcgtaagtcactttttatcaa

SEQ ID NO: 293906 - DNA, 201 bp, Homo sapiens
tctctactttagagggagagagaaagctatgtggcagtcccagcagtgcccctcaaccgtgttgatacagaatacagagaaatctcactgagtatctctcrgggaggattccacagttctaagtgatgattggttggaagaaaggattttttttttccactgagaatttggtttggtttgtgtattcggagtgtcactggt

SEQ ID NO: 293907 - DNA, 201 bp, Homo sapiens
gcccagctgatgctgggaagcataacaacaggagggcttgaattgcgttgaaaatgtgtcttgagaagatgcctggtggatggaagcagctgggagacctrgcagagggcccgggccaccctgcagtggcagctgctggacctgcagtccgctggacctgatctgcagggcgatgactctcgtgaagctgctgagtcagtc

SEQ ID NO: 293908 - DNA, 201 bp, Homo sapiens
tgagaacacctgtgcttcatggccaggggctggctctccgttctcacgtggtgcagagtgtagtgagcttgcccgtcagagggggtgtctcgagtggatgrggatgtggggggagcaggggcctcccagcctggctctcagcactgccttttctgttcaccctggggtccctagaaacactactgtaccttgaaggccccc

SEQ ID NO: 293909 - DNA, 201 bp, Homo sapiens
acagaggccagtgaaggatcaggtcctgggctcagctgagttgctccaaggcctgggagcctggcagacatgggggcagcacagtcttcctgtctcccttyggccacatggcctccagcaggctgctcctcacctggtgtcccggggctgcttggtcctgggccagggcgcaggcagcaagggcaagtgtctggcgtagcg

SEQ ID NO: 293910 - DNA, 201 bp, Homo sapiens
gttcattagagtgggcacgggcagcctttgcatgttggatcacacccaggcgccctttctgggtttcagtatctctagagttggacgggtctgtgagaacrcctgtgcttcatggccaggggctggctctccgttctcacgtggtgcagagtgtagtgagcttgcccgtcagagggggtgtctcgagtggatgaggatgtg

SEQ ID NO: 293911 - DNA, 201 bp, Homo sapiens
tgtctttgaggaatcaatgccctccagcccacggactcggcagcttgccagccacaggcaaggattggccaggacggtcatgtccgccacggaacatgtcrcctgctttgctttttttttttttttttttttgcttgcttgctttgttttaatttttagaggtaaaatgaagtgtagaatgtaaagacatcaaagtaaaac

SEQ ID NO: 293912 - DNA, 201 bp, Homo sapiens
aaatgaagctactggaaattaatagaacatgtagaaggagttacaggaaataccaagaggtgccattgttcatgttccacatcagatgttcattagagtgrgcacgggcagcctttgcatgttggatcacacccaggcgccctttctgggtttcagtatctctagagttggacgggtctgtgagaacacctgtgcttcatg

SEQ ID NO: 293913 - DNA, 201 bp, Homo sapiens
gcgcctgccgtgactgcttgggttattttcctccgatcagggaagtgtctttgaggaatcaatgccctccagcccacggactcggcagcttgccagccacrggcaaggattggccaggacggtcatgtccgccacggaacatgtcgcctgctttgctttttttttttttttttttttgcttgcttgctttgttttaatttt

SEQ ID NO: 293914 - DNA, 201 bp, Homo sapiens
tttaaaatgaggcacttatgtacatggtagttaatattggaacagtgccttgtttgggtgggtctgcatcattccagttctgtgttaatttttagaaatcrcgatacgtaaatgaagctactggaaattaatagaacatgtagaaggagttacaggaaataccaagaggtgccattgttcatgttccacatcagatgttca

SEQ ID NO: 293915 - DNA, 201 bp, Homo sapiens
gccaccctccaatacctgcctcagccctgaagtagttgtccctgctctttaaggacgtgcaccatggaaacgggacccagcaggctttctacagcgacccyagcgtcctgtacatgtccctccaccgctacgacgatgggaacttcttcccaggcagcggggctcctgatgaggtaggtggggtatataagggcctctggg

SEQ ID NO: 293916 - DNA, 201 bp, Homo sapiens
caggctgcgtagaccctgtgtggcgtgctccctgcgcgctgagctgtgatattgcccatgtacacaccatgcggacagggtcatctcagtgtgaagccacrtgtcgggaaagcctccatgtgcgtcttcacagcgattacctactctgtggggtggaaggttcttgtccatcgctcctcacctgtagctgcccttccgcct

SEQ ID NO: 293917 - DNA, 201 bp, Homo sapiens
aagagaggccgtggcggcctcgtcctggcggcgcctgccgtgactgcttgggttattttcctccgatcagggaagtgtctttgaggaatcaatgccctccrgcccacggactcggcagcttgccagccacaggcaaggattggccaggacggtcatgtccgccacggaacatgtcgcctgctttgcttttttttttttttt

SEQ ID NO: 293918 - DNA, 201 bp, Homo sapiens
tgaggtctaccagtaataagccttataatgcaacctagaaattacttcctgccctgaggttaacactggttgcatcttgttgattgtggtcctagatacaygtttttatttaaaatgaggcacttatgtacatggtagttaatattggaacagtgccttgtttgggtgggtctgcatcattccagttctgtgttaattttt

SEQ ID NO: 293919 - DNA, 201 bp, Homo sapiens
cccaaaagagtgaagcgctaggacacgcagacaggctgcgtagaccctgtgtggcgtgctccctgcgcgctgagctgtgatattgcccatgtacacaccaygcggacagggtcatctcagtgtgaagccacatgtcgggaaagcctccatgtgcgtcttcacagcgattacctactctgtggggtggaaggttcttgtcca

SEQ ID NO: 293920 - DNA, 201 bp, Homo sapiens
cttacggccctcatggcgctgctctccaccgtgaccgagtgccctggctcctgtgccccccacccgctcctacagaaggaaagccagagcctcagatcccrtggccgctgtcccagggtcgctcagcatatacattacagggcaggacacatgactgccctgagggctgtgctactggggagaaagacatcctcagaaaat

SEQ ID NO: 293921 - DNA, 201 bp, Homo sapiens
gccacccccagagcacggggaagaagagagaggcagagagaggcagtcccgcaggctgagtggtgccctgggcctgggtgggcctgactgcagggcagggktgggaggggtacgctttagcagtgagttttctgatgagttgagctggaaatgctgtgtctgcttcatggggcagagttctactgagtgggaggttctttc

SEQ ID NO: 293922 - DNA, 201 bp, Homo sapiens
cctgggaagagagcagtgtgaggtcgctgatggctaaagactggggacccatccccaaaagagtgaagcgctaggacacgcagacaggctgcgtagacccygtgtggcgtgctccctgcgcgctgagctgtgatattgcccatgtacacaccatgcggacagggtcatctcagtgtgaagccacatgtcgggaaagcctcc

SEQ ID NO: 293923 - DNA, 201 bp, Homo sapiens
gattgaggagaggggcgcttcggggaggacgcctacctcaggcatccgggagcaggtgctcagcagcctcgattgaggagaggggcgcttcggggaggacrcctacctcaggcatccgggagcaggtgctcagcaacctcggttgaggacaggggcgcttcggggaggacgcctacctcaggcatccgggagcaggtgctc

SEQ ID NO: 293924 - DNA, 201 bp, Homo sapiens
cttgaaaatcaaacgaggtataaaattggtaacgtacatgtcctagaaaaagtgaagtcagtggcaaaactggaaaatcagaaatcagcatcatactttcytttttgaaaccatggccatgttctttttgttgggacttctgcctgtcgcaagctaacgagcaggtccgtggaaggcaccgggcattcgggccacaggtca

SEQ ID NO: 293925 - DNA, 201 bp, Homo sapiens
cgggcaggccacagccagtgacctccttcctgacagaggctgaggaagtggctcacttgtcagagacacggcaggtgtaggaaattgatcagatggcttcrtctgggaaatggtggcctctaggcctggctgaactccagccccatcggctgctggagtcaggattgtgccatggcgctaagggcgagggaaacagtgctg

SEQ ID NO: 293926 - DNA, 201 bp, Homo sapiens
gtaggagtgcctgggaagagagcagtgtgaggtcgctgatggctaaagactggggacccatccccaaaagagtgaagcgctaggacacgcagacaggctgygtagaccctgtgtggcgtgctccctgcgcgctgagctgtgatattgcccatgtacacaccatgcggacagggtcatctcagtgtgaagccacatgtcggg

SEQ ID NO: 293927 - DNA, 201 bp, Homo sapiens
tcacttagcttctgcattttctggtcttctgttgttaggtcactaataagtgtttaaggatttatctttttggtgtttaaaattgtcttgaaaatcaaacraggtataaaattggtaacgtacatgtcctagaaaaagtgaagtcagtggcaaaactggaaaatcagaaatcagcatcatactttcttttttgaaaccatg

SEQ ID NO: 293928 - DNA, 201 bp, Homo sapiens
tcccccacacccaaggacctgcgagccgggagccctccctcagctcctcctaagggagcaggtaggagtgcctgggaagagagcagtgtgaggtcgctgayggctaaagactggggacccatccccaaaagagtgaagcgctaggacacgcagacaggctgcgtagaccctgtgtggcgtgctccctgcgcgctgagctgt

SEQ ID NO: 293929 - DNA, 201 bp, Homo sapiens
actgcagcacttgcttgtctagaggactcaggtcattttgcgcatggccttttagctgcctgccgaatgcctggtactgacgcagcaagccacagagccaygtccatgcaggcagctatcctgatgctgtttcgggtctttcagagactgccgacggtccatacagctgaggatctgggcagggtggcgagtgtggggtgt

SEQ ID NO: 293930 - DNA, 201 bp, Homo sapiens
tcatgtgtgacagggcatgatcagtgccgagctcacccaggagccatgcgtggcagggcgtgatcagtgctgagctcacccaggagccatgcgtggcaggrcgtgatcagtgctgagctgtggcataaagggagcccgtgccgaggcacctaggagttgggagatcagcacaagccactctaagccagcagagctctgcag

SEQ ID NO: 293931 - DNA, 201 bp, Homo sapiens
gacttttcagaggtattctaattgtgggtattctttgacagtataccaaaaattcagcaagtggtagtgtcttgaaaattagctgcagtgtggatctgaamtcaaatcgtggcctcctccccctccgttttgtttaactgaaccattagcccttcttggagatcaaatcgatccttcgttcatgggtgattggtagcaccg

SEQ ID NO: 293932 - DNA, 201 bp, Homo sapiens
tgggcgggcagctatctgctgagaagcccggggctgtctccctggagtcccgtaccctccctgcaggaagctgctgcctctgtctgtgacctttcctgatrtttcgctcccacctcccacctagcaggctcttctcaaggtccagggctgttgctttctgcctccgggtcacttccccaaggaaaccagttcccaccatgc

SEQ ID NO: 293933 - DNA, 201 bp, Homo sapiens
tcagcatccctaatccaaaaatctgaaatccagaatgctccagagtgcatttcctttgagcgtcacgtaagcgctcaaaaagtttccagttttttttttttcctttttggagacagagcctcactgtgttacccagactggagtgcagaggtgcattcatggctcactgcggcctcgacctcctgggctcaagtgatcttc

SEQ ID NO: 293934 - DNA, 201 bp, Homo sapiens
ttcaaaccagatcagctcctgcgttgctcctctccagtgaccgcaagtttcaactgggtgaggagctggtgtccctgctcggcctcgcccagcggagtccyggcctgctctcgtacgcccggctccccgcggctcctctgagcttcccaaaggcctcccagccctgccagccctcggcatgtcccttttagactccatggg

SEQ ID NO: 293935 - DNA, 201 bp, Homo sapiens
ccagaatgtcacataacgtggaatgtcatataacgcagccacacgccagcacaccggaatgtcacataacatggaatgtcatataacgcggccacacgccrgcacaccagaatgtcatataacgcggccgcacgccagcacaccggaatgtcacataacgtggaatgtcatataacgcggccacacgccagcacaccagaa

SEQ ID NO: 293936 - DNA, 201 bp, Homo sapiens
taaccgaccagacctcaccagaacccactcattacagtgaggacagcaccaacagacggtgttcagccgttcatgccaaatccacccacatgatccagccrcctcctgccaggtcccacctccagtattgggggctaggcttcagcaggagatgtgggcagggacacagatccaaaccgtatcagtcgtaataaccgtatc

SEQ ID NO: 293937 - DNA, 201 bp, Homo sapiens
ggtcccgcagaggaggatgtgggcatcggatgtttgcttgcttgtttagcatcctgtttgtttccatttaatttcagcttgaccctagggaaaaggtgtgtctgttgaggtggggctgaggtttcaagggaaagatcatcgtgtgtggcttctcggctgcagcatgcctggggcagtgcgctgggtaaactaaaccatctg

SEQ ID NO: 293938 - DNA, 201 bp, Homo sapiens
tggtcccgcagaggaggatgtgggcatcggatgtttgcttgcttgtttagcatcctgtttgtttccatttaatttcagcttgaccctagggaaaaggtgtgtctgttgaggtggggctgaggtttcaagggaaagatcatcgtgtgtggcttctcggctgcagcatgcctggggcagtgcgctgggtaaactaaaccatct

SEQ ID NO: 293939 - DNA, 201 bp, Homo sapiens
ctcctggcacattgattagataaggtggtgacttaatccccagggattgcccacaggggagcgcttccagacatggctgcagaggccttgaggagacgggrcggcataggggagagcttccagacatggctgcagaggccttgaggagaaggaccctgcagacagggctgcacacacgcacgcctggtctttgcatgcaga

SEQ ID NO: 293940 - DNA, 201 bp, Homo sapiens
cataaggcatatccctttgaggtcctacgcacaagctcatgaggtttattggggtcctttaattttcctcagtttttgtggccctatcaagggcctcttcygaaacccactgttgagtctagagaacaggctacccgagggtggggtcctgctccccgcggtccctgtttctgacctcggccctggtgttccacgctgccc

SEQ ID NO: 293941 - DNA, 201 bp, Homo sapiens
cacgtagtgcagttattttggagtctgactggtaacactctctggccctgtggcaaggctttcctgcctgttgtttctctcatttttttttttttttttttggtcagattgtgtttatttctatggttggatattttaggttgcatgtctgactttgcactgttgtgatgatgggggacctgggatggtgacacattcttt

SEQ ID NO: 293942 - DNA, 201 bp, Homo sapiens
gcacgtagtgcagttattttggagtctgactggtaacactctctggccctgtggcaaggctttcctgcctgttgtttctctcatttttttttttttttttttggtcagattgtgtttatttctatggttggatattttaggttgcatgtctgactttgcactgttgtgatgatgggggacctgggatggtgacacattctt

SEQ ID NO: 293943 - DNA, 201 bp, Homo sapiens
ttgcaggcgctcagcagcctcgattgaggagaggggcgcttcggggaggacgcctacctcaggcatccgggagcaggtgctcagcagcctcgattgaggasaggggcgcttcggggaggacacctacctcaggcatccgggagcaggtgctcagcaacctcggttgaggacaggggcgcttcggggaggacgcctacctca

SEQ ID NO: 293944 - DNA, 201 bp, Homo sapiens
tgcacgtagtgcagttattttggagtctgactggtaacactctctggccctgtggcaaggctttcctgcctgttgtttctctcatttttttttttttttttttggtcagattgtgtttatttctatggttggatattttaggttgcatgtctgactttgcactgttgtgatgatgggggacctgggatggtgacacattct

SEQ ID NO: 293945 - DNA, 201 bp, Homo sapiens
aaatcactaaagtggtgggtgttgggttccaaggctggaggtcgagctggcttccagccaggccttgcaggcgctcagcagcctcgattgaggagaggggygcttcggggaggacgcctacctcaggcatccgggagcaggtgctcagcagcctcgattgaggagaggggcgcttcggggaggacacctacctcaggcatc

SEQ ID NO: 293946 - DNA, 201 bp, Homo sapiens
aatctatcattgtacaatatgaattataattatctcaactattctaatgcacttgtcttgcttttaatgtatgtttttagtgatatatatatatatatttwtttttttttttcaccagcttggtaatcactattttgctgtttctttactgattatcagtaggatttcaacaactgtctttaatctatcacagccttatct

SEQ ID NO: 293947 - DNA, 201 bp, Homo sapiens
ccacttccaacagaaaagcattattcataccatgtattcgtgtgccatcttgagattttagaaacgtcaggtgagcatatcatgtgctttgggaaagtctrtacaggttgagtatctcttatctgtaatgcttggaagcagaagtgttttggattttgggtttgtttttttttttttcggattttggaatatttgcattat

SEQ ID NO: 293948 - DNA, 201 bp, Homo sapiens
agcggctgccctgggcccgttcccacagcacctggcacacagcaggagccatgaatgttctttgggaactgaatgaggagtggaaatgcgggcatgtcatrtttttgaagttaataaaaaaaatcccttaaaagttgttttatgttcggtttttaaagagattaacaccagacgtttacaatgctgccccctccctccatc

SEQ ID NO: 293949 - DNA, 201 bp, Homo sapiens
ctgtttttgagtcagcactgggctgggcgcaaaaatagtgagacagagtccttccctggaaggagcttgtgatgtaatttgagcaagcagcacatcacacrtgagaccatccaggagccatgcgtgacagggcgtgatcagtgctgagctcacccaggagtcatgtgtgacagggcctgatcagtgctgagctcacccagg

SEQ ID NO: 293950 - DNA, 201 bp, Homo sapiens
ccaccactcctgaaatcacagcaccaggataaaggagctgcttgggcatggcctggatagaggggaggcagcggacatgtttgcacaacagaaagtgttcracttgaaggccaaggctcatggtaggtggtctgtgaaaggcacagttccactgagcaggctgttgacctagggaagccggggaggggctcctggtgccat

SEQ ID NO: 293951 - DNA, 201 bp, Homo sapiens
ccatcctgaaggctcacccgcccctcttgagggtacatccccatccagaggaccacccattcccaaccaccaccagggtacacccctcaccccaccactcstgaaatcacagcaccaggataaaggagctgcttgggcatggcctggatagaggggaggcagcggacatgtttgcacaacagaaagtgttcaacttgaagg

SEQ ID NO: 293952 - DNA, 201 bp, Homo sapiens
ccaccagggtctgtgacccagctcagccctcacaggagtcaaggcacctctaagggccagacactgaccctgcagcagggccacagggtgtcacaagggggagcagtggcccctcgttgtcccacaaatgcccaagtgccactgaagaccccggagtgcgcccagggcctgtcgagcaccttggccgcgtgcccttggcct

SEQ ID NO: 293953 - DNA, 201 bp, Homo sapiens
gttctggactctgaaagccgataacctctcccgggtgggtttggggatttctttgactccggtcgctgcctttagatccctagtgcttcccaaggcgggcstcgcgccggaggtttgggttccagatgcagatgagttggggaccacggtgggctgaaaggtgtagattcgcaaatggctctgtccacacaggcagagctg

SEQ ID NO: 293954 - DNA, 201 bp, Homo sapiens
agcaggctgagaatgggagaggagccccacagcggggggtacagcccagctgaggccagaaagtggggtcccacgttggataaaggagcctgttacatcargccagtctccctggagcatgtgagatgtcactccagctccagcccaggaaggggccgggggctgcggagagtgagggattggggcccaggcagccgctag

SEQ ID NO: 293955 - DNA, 201 bp, Homo sapiens
actccttcctatggcccccggcagccagccctaggagcgtggaccagagcacacagagtggaggctactgttctggagcaggctgagaatgggagaggagmcccacagcggggggtacagcccagctgaggccagaaagtggggtcccacgttggataaaggagcctgttacatcaagccagtctccctggagcatgtgag

SEQ ID NO: 293956 - DNA, 201 bp, Homo sapiens
gagggcctcctcccagccagggagcaggagcagcagcgagaggatggctggagccgagccttccctgccccaggcacagaacgcctgtctgccagcccgcrgcaaacagacaagtagtaaggctggtcgtttgcagagcttcaggccctgtcaccaggctggaacgtttcgtggcctgggcttggtgattgtggctccaaa

SEQ ID NO: 293957 - DNA, 201 bp, Homo sapiens
aggccggcttgtggctgaatccgtcatctgtcgtcatccaggtcccccgtgccacagcacagaggcctcgctccctgcagaggcttagagtctggtacctyctcacagcgcctctctggtttctctgggaaggctgttttagggagcttgcttctcccacatccttccaagacctgcagaaaaactgtccctgactcgaag

SEQ ID NO: 293958 - DNA, 201 bp, Homo sapiens
gcgagggcctcctcccagccagggagcaggagcagcagcgagaggatggctggagccgagccttccctgccccaggcacagaacgcctgtctgccagcccrcggcaaacagacaagtagtaaggctggtcgtttgcagagcttcaggccctgtcaccaggctggaacgtttcgtggcctgggcttggtgattgtggctcca

SEQ ID NO: 293959 - DNA, 201 bp, Homo sapiens
ctgttcacattcctgtgaggatgcctctcccattaccttctcacaactcaagatcgatttttgaatttccgacaattgtcctaacccagaaacttcattaycatcagtctaagtatttcagacatggtaatagctgatgattatcttgagttttgtgaacataaccctaatgaggtgtttaaacactactgtgtgattttt

SEQ ID NO: 293960 - DNA, 201 bp, Homo sapiens
gcgcccacctccacgcctttcagaatggcggctgctcctgacaccttcatccattttcaaaggaccggctgttggtccatcccctaccaccttcagtcttycaaacctgtggaattcagtgggcggaggatggaggcaggaccagctccaccagcagaaggatgaaggcaggcttagctccaccaccttgcttaggtttct

SEQ ID NO: 293961 - DNA, 201 bp, Homo sapiens
gagcagcctcaaagcatcagctcatcaggccgtgtcctgcacacacgcagttctgtgcgcccacctccacgcctttcagaatggcggctgctcctgacacyttcatccattttcaaaggaccggctgttggtccatcccctaccaccttcagtctttcaaacctgtggaattcagtgggcggaggatggaggcaggaccag

SEQ ID NO: 293962 - DNA, 201 bp, Homo sapiens
ccaccaggggtaagaaagaccctcttagggagaaacagcagagcctcagaatgcagggacaggtgagagccagggcacctgcagactccatggggcctgcrgccatgccagttttaagggcgcctcattgccctcctgaagtttgtgtcccgccaaactgccgggtgagtaggaaggtggcacagaggcattccaggcatg

SEQ ID NO: 293963 - DNA, 201 bp, Homo sapiens
cctggagctggagccacacaggggaaggaggctgggggcagacagtgtgaggcactaacccagctgccattagcaccctcagagaggatgccacatccacrtaacgtggacaagttcagtggaaaaggggaaagcacagaacgttcagagaagacaaaaattaaacacctgaccgcagaaaaagaaaatcctcctcagact

SEQ ID NO: 293964 - DNA, 201 bp, Homo sapiens
ttctggttctgcaggctgtagaggaagcgtggtgttggcctctgcttctggggagtcctcgaggaaacattcaactgtggtaggcgaagggggagcgggcrcatcacttggcaagagcaggagcaaggggtggggagaggggccacacacttctaaccgaccagacctcaccagaacccactcattacagtgaggacagca

SEQ ID NO: 293965 - DNA, 201 bp, Homo sapiens
ttcataagaaaagaggtctgattggcttctggttctgcaggctgtagaggaagcgtggtgttggcctctgcttctggggagtcctcgaggaaacattcaaytgtggtaggcgaagggggagcgggcacatcacttggcaagagcaggagcaaggggtggggagaggggccacacacttctaaccgaccagacctcaccaga

SEQ ID NO: 293966 - DNA, 201 bp, Homo sapiens
gggtccagtcctcacccacatatggggtgggggagtgggtggacccctgctttctgctcctgcacatggaacagtcctcacctatgtgtggggtggggggygggtggacccctgctttctgctcctgcacatggaacagtcctcacccatgtgcggggtggggggtgggcggacccctactccctgcttccgcacattgaa

SEQ ID NO: 293967 - DNA, 201 bp, Homo sapiens
cttcccagtggagaggatgagcaaggggccccggcagccgatggggggcttggagaaagggcgcttaccccaccctggggctccttggggctgccaggggratggtgcccaggctggctctgaagatagggtaagatgactgggccaccaaggtgggggctgtggggagcgctagggaggccctgccaggagccggtgccc

SEQ ID NO: 293968 - DNA, 201 bp, Homo sapiens
  misc_feature (1)...(201): n = A,T,C or G
cctcttctgcagcacatggtcttactggagcagccgccggcacaagcacccctcgtcacaggtgagcacaaatgggcctgggtgcagccaggctctgaggntgcccacgctctggatggtgccccgccttcgcctgcctttggaggagacaggaatgcacgcctgtcccacccccacagttcccaaacacacatccccatc

SEQ ID NO: 293969 - DNA, 201 bp, Homo sapiens
gcaagtgcagtggggcttgctggcttgcaccgtgactccctctcaccaagcaagtgcagtggggcttgctggcttgcaccgtgactccctctcaccaagcragtgtcgtggggcttgctggcttgcactgtgaagatgtgaaatgagcctggatcacacgtgggttgattcccttctaattaagcgtggtcgccagattcc

SEQ ID NO: 293970 - DNA, 201 bp, Homo sapiens
aagctagtttcaaacaaagtttaagagagatgatcaaaaaggaagacccctttcttgtttttggtttctttattgaagtgtctctgcagcatccctttgcmccattcctgttctccgaaggcaaccattctagtcagtttcttttgtttacaggaaggttgatcattctatttcttgttctttcctggaaagctttgtgct

SEQ ID NO: 293971 - DNA, 201 bp, Homo sapiens
ggagttcacaaccaaccatgtgcagtgcttcccgcggtccctccctgaagaagagtgtctttccatgtcagcgtgccagcttcagcacacgcgggctgcgktctgacgaagttctgttttcagaattcttctggttaagcggaggccagagctgaggcacgtgggagctgcggagggcctcttctcttgtttcacgtatcc

SEQ ID NO: 293972 - DNA, 201 bp, Homo sapiens
cggagttcacaaccaaccatgtgcagtgcttcccgcggtccctccctgaagaagagtgtctttccatgtcagcgtgccagcttcagcacacgcgggctgckttctgacgaagttctgttttcagaattcttctggttaagcggaggccagagctgaggcacgtgggagctgcggagggcctcttctcttgtttcacgtatc

SEQ ID NO: 293973 - DNA, 201 bp, Homo sapiens
ttctggccccactgcccggtgcgtgtgaacggtctgctctcccggcctggcccccgcctcctctcccgggctccgtggcctcctttctgcggcctcgccaycttggtcatgcacgtcttccagtggctcttggagaagtcgtgcatggagcatgagtttttggagtcctcatttgctggtaaatcactttattctgtcgca

SEQ ID NO: 293974 - DNA, 201 bp, Homo sapiens
tgtatctgagttgtcttgttaacaaaaatacccattttgcgttttctcctctacctttatttttaattaatattatatggtggccattattccatttttaygtatgaagctcaacgcctttctctcaagtagtctaagacatagatataagttggactgttttctggttaccattttgccagcaactttgagcacctttcc

SEQ ID NO: 293975 - DNA, 201 bp, Homo sapiens
tgtgtatctgtgtttctgtgtgtgtatctgtgtgtctgtgtgtgtacctgtgtttctgtatgtatctgagttgtcttgttaacaaaaatacccattttgcrttttctcctctacctttatttttaattaatattatatggtggccattattccatttttacgtatgaagctcaacgcctttctctcaagtagtctaagaca

SEQ ID NO: 293976 - DNA, 201 bp, Homo sapiens
gtatctgtatgtctgtgtatctgtgtttctgtgtgtgtatctgtgtgtctgtgtgtgtacctgtgtttctgtatgtatctgagttgtcttgttaacaaaartacccattttgcgttttctcctctacctttatttttaattaatattatatggtggccattattccatttttacgtatgaagctcaacgcctttctctcaa

SEQ ID NO: 293977 - DNA, 201 bp, Homo sapiens
cagccgttggcacttcccccttaggagcggacaaccaaggaggacccagggcccgaggaacggctggacagggacctggagctggagccacacaggggaargaggctgggggcagacagtgtgaggcactaacccagctgccattagcaccctcagagaggatgccacatccacgtaacgtggacaagttcagtggaaaag

SEQ ID NO: 293978 - DNA, 201 bp, Homo sapiens
gcaggggttgcaggggcaaggagagggtgggccgtgcctggctcgttgactgcatttggcagggcacacgttgcaggaggtgtcctccgtgccaggcctgygcccggcagactcagcctcacagagacctgcactcctagtccttcatgcgttcactcactcactcgctcacgccttcatccactcgccgagggcaccttc

SEQ ID NO: 293979 - DNA, 201 bp, Homo sapiens
gccccaactgcaccctgacccctacccagagagtacgtccctcctgcctggctttccagggacatgtgacttatgtccccaaagtagaagcagcactaggytatgtggatgggaccatagagtcgttttttaccaccggaagccgtgtcacatcttttctttgttaaacaagagaccttcatagaggaagcccggttttgt

SEQ ID NO: 293980 - DNA, 201 bp, Homo sapiens
gggcctctggtctcctggcttagtttctgcagggtcccgccctgcaggttcgcctgccctcctttagaagctgggatatttgtgaacttttaatctgtgcytcatcttaccccccgtttcctttaccagttttattggtgatacataattttcaggggggaattctctaaaagtcaggcccaggaccctctcctgcagtgc

SEQ ID NO: 293981 - DNA, 201 bp, Homo sapiens
atttcttgttaatgacgcactaagaaaaatgttctgtaaatacagcacggcttcattcttcagatgattctcatcacgtggcttagtgttctgcagtctgygaggttctcactctcaggtcttagaaggatgctattcatattcagagacaaatttccagagtaggtatccagcaagtaaaatgctgcttctcagaaagaa

SEQ ID NO: 293982 - DNA, 201 bp, Homo sapiens
catttacatttaatgtaattattgatatatttatgcttaaatctatcattgtacaatatgaattataattatctcaactattctaatgcacttgtcttgcytttaatgtatgtttttagtgatatatatatatatatttttttttttttttcaccagcttggtaatcactattttgctgtttctttactgattatcagtag

SEQ ID NO: 293983 - DNA, 201 bp, Homo sapiens
gtgcctcagtttcgtcatctgtgaaatgtacctttaaattgcttctctcctggagctatcatgagatgtgaattaattaatatttgcaaagtccttcgagyaggaccagatcgaggtgttttctgctcttgtttctctacgctgttagggtgtttttgatttttttctccatccaatgactggtaactgccagacccagca

SEQ ID NO: 293984 - DNA, 201 bp, Homo sapiens
ctatgtccactccccacaccaggaatcccaccatcctacagatagcgcacagggtggacaggaacatccacacccacccctccaacagtcctggacacccracagcccagggcccaagtggctgtggcagagatgagtgagcacgtggagctggcgtggcacggagggcctctggtctcctggcttagtttctgcagggtc

SEQ ID NO: 293985 - DNA, 201 bp, Homo sapiens
agttcccacggagtccccagaggcttgccggctgtgggtggccacaggactgcagcctcttggccccataagctcggtttgctctgaggcttgtgttgacrgaaggtgtggtgagttttgtttagggtcctactaggggaatgaactggaaggtcatttctttccagatgttgaaacccagctgttaagtgaattattgca

SEQ ID NO: 293986 - DNA, 201 bp, Homo sapiens
cctggtgaaagcaatgcagtgactcctattcggagcttgggcatattctgggcattcacatcgcctgcacctgtgggcaggaccaggtgcctgagtttctrcccagctccttcacccgccaccttgggacctggggaagctcttgaacctctctgtgcctcagtttcgtcatctgtgaaatgtacctttaaattgcttctc

SEQ ID NO: 293987 - DNA, 201 bp, Homo sapiens
tctttggaatctcaagtaccttggacagttctccgtccagcagaactggagttactattggtccaggaccaggcagactttgagggtagggggctagagtygcctccttctagaagtcagcaccgtcctccccagcacaagtcccacatagagctcacccctgcaaggtccagccacccagggcagacctcctcatcactg

SEQ ID NO: 293988 - DNA, 201 bp, Homo sapiens
agcactttgaagtttacaatttatggttccctgggcatccgatgatggggaagaagggtcagaaattggttttcccctttcttctgctcttctcccccacsggggccccccggggacaatgcatgccttccaggcagcaccttgttattcagacccgttgcctgccacattgcattttcaggggatcaagcctaagacgaa

SEQ ID NO: 293989 - DNA, 201 bp, Homo sapiens
cattttcctctaaatgcaactttatctgcatcccacaagttttgatacgtagtttgacaatctttgtctttcaattagtttggcccatttacatttaatgkaattattgatatatttatgcttaaatctatcattgtacaatatgaattataattatctcaactattctaatgcacttgtcttgcttttaatgtatgtttt

SEQ ID NO: 293990 - DNA, 201 bp, Homo sapiens
tatgaaacacgtcattaaattttagttatgaagttccttgaatgaactgaaatagtctttaataattgtgatgtagacttaaataattatatgattttgaytttacattaacttatcctgacccggcacacagtttgcccatttctgcatctctaaagggcaattgtatgacctgtgaacatgtgaaaagctttgtcactg

SEQ ID NO: 293991 - DNA, 201 bp, Homo sapiens
ccaccaggagcctcttctgtggctgccgcaccctgggggcccgtccatgctgagctcagtgctgtggtgagcacatggctggcctcttttcacagtcagargttaagtagacctgtgtacatgggttttgcgtgtgttttctagcatatgtgttccagtccctctggaagtttctaaaggcagagctcgaatctggtgttt

SEQ ID NO: 293992 - DNA, 201 bp, Homo sapiens
ctggtggacggggagaaagggggtgctgccctctttcaggtcagtggtcccaggccaggttttgatggagccaccctcaccccataggcgtttctcagtgktgccttcggctcttgggtcctggggtgaaaccctcaccccgtggcatccctgctggcgggcaagcccaggcccaaagcagcaatgggcgtctgccgtcag

SEQ ID NO: 293993 - DNA, 201 bp, Homo sapiens
tcacgctcgtaatcccagagctttaggaagctaaggcgggaggatcacgtgagcccaggggtttgagaccagccccagcaacagagcaagatcttgtttcrtcaaaaaagaagaaaacgtatctgggtgcagtggtgtgcacctgtagtcccagctactcaggaggctgaggtgggagaatggcttgagcccaggagttcg

SEQ ID NO: 293994 - DNA, 201 bp, Homo sapiens
gtcccacgtatgctgactgagacagggtggcatccaacacgggttcaggcacattgcctttcctgctgcagagccccaggctgccggcccagttggttctrgggcccccaccaggagcctcttctgtggctgccgcaccctgggggcccgtccatgctgagctcagtgctgtggtgagcacatggctggcctcttttcaca

SEQ ID NO: 293995 - DNA, 201 bp, Homo sapiens
ctcggaagcactgagtgcagaaacgcagggaggccagggcctcttgagagcgtttgccgccacctcatgggctgccctcgccccttcctgagcctggtccytgcggcgtccggctcaccccgtccatggcattgtcactcatggttggccggcactttttttgaggcttcattacagaccttgaccacacagtgtcctgtt

SEQ ID NO: 293996 - DNA, 201 bp, Homo sapiens
ctccccttcacagcggtcccacgtatgctgactgagacagggtggcatccaacacgggttcaggcacattgcctttcctgctgcagagccccaggctgccsgcccagttggttctggggcccccaccaggagcctcttctgtggctgccgcaccctgggggcccgtccatgctgagctcagtgctgtggtgagcacatggc

SEQ ID NO: 293997 - DNA, 201 bp, Homo sapiens
cagatgggggccgggcctatcctccctttgcctggggggcctgggagcccctgagccccttctgaaagtggctgcagctgctgccccctgcctcctgcctyctgccctgctccctgttggcatggcagctccccagccccgggccgtggacgtggccattctacaagcctccggccttgatgcagatctgtgacctccaca

SEQ ID NO: 293998 - DNA, 201 bp, Homo sapiens
ataggaacacaagtggggagggccgcatcctgggccagcacactgaagcaatagagcaggtctgtctgggcagcttgcccaggctcttcaccgtgcgcccygcccttatcagcctggatgaacccacattagcacaggtgcccctggccagtgacctgcctgcggaaggcgtctgttcacccagcctggccttccctttgt

SEQ ID NO: 293999 - DNA, 201 bp, Homo sapiens
ccaggcacagaacgcctgtctgccagcccgcggcaaacagacaagtagtaaggctggtcgtttgcagagcttcaggccctgtcaccaggctggaacgtttygtggcctgggcttggtgattgtggctccaaaccacaggaggccgctgggctcctcacaactgtcaccaaaactctgcctataactccattcctatacgca

SEQ ID NO: 294000 - DNA, 201 bp, Homo sapiens
ctaagccgtgtgcaagggccttcatatttcctttctgatgtggtgagatgccacacataaggcgtggctgaattggctcgtgggcctgaggcaggctggcygctgccctaggcgtcactgaaagtcacgtggctcatctgctcatgtcagctggcagggtgctgcatccgggcagagctgggcccctggcgagtgggtgcc

SEQ ID NO: 294001 - DNA, 201 bp, Homo sapiens
gaggccgtggcgggtggatcacatgaggtcaggagttcaagaccagcctggaacaacatggcaaaactccatgtctgataaaaatacaaaaattagccaggtgtgatggtgggcacctataatcccagctactcaggaggctgaggcaggagaatcacttgaacccgggagatggaggttacagtgagccaagattgcgcc

SEQ ID NO: 294002 - DNA, 201 bp, Homo sapiens
tggagtcacttgctctaggtccccagctagcagcgggggccatggctgtgagcctgtaccctggggactccggcctcttccctggaccagagaagcccacrtcctgacctcaaagaacccttggccctgcagagaggcagggtgtaggccctctgagttctggcaccgaccctcaagcagcaggtcctgggtgcaagggcg

SEQ ID NO: 294003 - DNA, 201 bp, Homo sapiens
actgtgccagtgagtccaggctccttctcagcagaaggtggctgctctgcagggcccctcgcctccctgctcctcaggggacccgcactcttccatgtccrtagggagacgcgcaccgagctggagacacagatctgcgaggagtaacttgcctctctcaccagcactgccaggggcggatcagcgccagcaccttccagc

SEQ ID NO: 294004 - DNA, 201 bp, Homo sapiens
tatatagtattttgattatcagtttaaaatattttttaatcttgatttttatttctctttgaatcacagattctatattttttgttcctaatcataaaggktatttttaaaagtaattttgttatttttggctagcttgattctactgtggataatgaacatggaatcagtttttttaagttgttaagccttgtttcatgg

SEQ ID NO: 294005 - DNA, 201 bp, Homo sapiens
ttcagtgatttcacaaatctagctacatggatgtagaaagagtgaaaaatagaacctggggcattcacactgatttgccatttaatggagattgtattgcygaccatgttctgtgataaataaattgtgctattattgtttagttcaaaatgtattttaactgcctgcttttctttcttagattaatatttttggggacag

SEQ ID NO: 294006 - DNA, 201 bp, Homo sapiens
ccttaagtttgagtgaggaaactgaagctcaatctagttgtcaaggagctaagataaatagtgggatattggatgggtcactacggaatcccaaaagaaaktaaggactgtgataagacaaatctcccttagttttccctctgtactttaattctgcttttttagatgttgataaagataacatatactcatttcagaaat

SEQ ID NO: 294007 - DNA, 201 bp, Homo sapiens
ctcagtgtatcaggaagatgctttcttatttaaaaaatgtacattttatatgcatactttatcattttataaatgaatatgtatacattatccttgaagtrattaatgatccctggatggtaagtcactgactagatgtgacatacttagtttaatcagttctttcttggtgtgtgtttctactttctcaagatgataagc

SEQ ID NO: 294008 - DNA, 201 bp, Homo sapiens
cgagtagctgggactacaggtgcacgccgccacacccagctaattttttgtatttttggtagagacggggtttcaccgtgttagccaggatggtctcgatytcctgaccttgtgatctgccggcctcggcctcccaaagtgttgggattacaggcgtgagccaccgcacctggccgcattcaggttttaaaaaatataaaa

SEQ ID NO: 294009 - DNA, 201 bp, Homo sapiens
ggcttcatgatagaaaattacaaggtcaaaggctgtctgagacaggaaacagaaatgagtgactctggaaatgtaataacagggagtggtgaattaaacaytacttgtccctccccaaaagcagtcaggttttttttggtttttttttttgagacggagtcttgttctgtcgcccaggctggagtgcagtggtgcgatctc

SEQ ID NO: 294010 - DNA, 201 bp, Homo sapiens
tatgtatacatgtgccatgctggtgcgctgcacccactaactcgtcatcgagcattaggtatatctccccatgctatgtctccccactccccccaccccayaacagtacccagagtgtgatattcccttcctgtgtccatgtgttctcattgttcaattcccacctatgagtgagaacatgcagtgtttggttttttgtct

SEQ ID NO: 294011 - DNA, 201 bp, Homo sapiens
cttgatgattgggaggtcactcaggatttttctgagcatttttatagaatacacatcatagttaattaaaaattccagttaatgcaacatcttataatggratttattgtatatcactatttaagaaacagcttagttatataatatttttgataattgccaaaatacactttttttgaaaaaagacatttggaattgttt

SEQ ID NO: 294012 - DNA, 201 bp, Homo sapiens
taactcgtcatcgagcattaggtatatctccccatgctatgtctccccactccccccaccccacaacagtacccagagtgtgatattcccttcctgtgtcyatgtgttctcattgttcaattcccacctatgagtgagaacatgcagtgtttggttttttgtctttgcgatagtttactgagaatgatgatttccagtttc

SEQ ID NO: 294013 - DNA, 201 bp, Homo sapiens
ttccagtgaggaacctgaacgattataaatggtattattaaaatgtgttccatagaatctgtactgtcaagattatcaggatatcatttggaaatacattstgctattgagaaatagagctttgctgcattattcaagataatgtaaaaatcaaactctttggtattatttttattgagttttaaaaagaaaaagtaaaag

SEQ ID NO: 294014 - DNA, 201 bp, Homo sapiens
gtatcatacaatttttctggaatgcatactgtaggaggttatctttccattttttaaattcttatttctttatataagtaattcttggtcgttgtttaaaratcaggacaataaataagtacaaaaataaagcaattatctaaaaaaatcacccatactcttaacattgttcataaccctgctatgtatttactctatata

SEQ ID NO: 294015 - DNA, 201 bp, Homo sapiens
aactcgtcatcgagcattaggtatatctccccatgctatgtctccccactccccccaccccacaacagtacccagagtgtgatattcccttcctgtgtccrtgtgttctcattgttcaattcccacctatgagtgagaacatgcagtgtttggttttttgtctttgcgatagtttactgagaatgatgatttccagtttca

SEQ ID NO: 294016 - DNA, 201 bp, Homo sapiens
tcaaatgggtaagacagtgtttttatcaaatttgacctttttctcctttaggttggcaggtttgactgttcctctgcaccagacatctgtagtaatctgtrtgtttttcagccgtctctagcagtatttaaaggacaaggaaccaaagaatatgaaattcatcatggtaagaatggaaaaaaatgataaaaaaaaacttag

SEQ ID NO: 294017 - DNA, 201 bp, Homo sapiens
ctctacttaaaaatgatcatattcaagtaagaaaaatgtattctgcctagccttctgctggtgtactttgttgttaatttaatgcatataattaaattttraataacataaaaactcttatttgaaattataagaagcctataagtgcttttagtcttggtttgtgcttgcttttcctcttttttattaaaagtttatatg

SEQ ID NO: 294018 - DNA, 201 bp, Homo sapiens
tgaactagtttacagtcccaccaacagtgtaaaagtgttcctatttctccacatcctctccagcacctgttgttttctgactttttaatgattgccattcwaactggtgtgagatggtatctcattgtcgttttgatttgcatttctctgatggccagtgatggtgagcattttttcatttgttttttggctgcataaatg

SEQ ID NO: 294019 - DNA, 201 bp, Homo sapiens
ctttttaactttgctgtagaactaaggcatgaagttttaattttttggtagaaaaattgtgtttttagctaagtaaagctctaaatccctttaactttttscctcccatttacaacatggtttgttgtttctttccattttaggatggtcttgttaatgtaggatggatggactgtgccacccaggataacctttgtaaaa

SEQ ID NO: 294020 - DNA, 201 bp, Homo sapiens
  misc_feature (1)...(201): n = A,T,C or G
cggacatgcttattgtaaataacttttctcagtaaatatgaggacagatattttgaattatatgtagtcactttattctctttacccttctttttaacatnaatgccttttctctattcagtattttgatcaggatttctggtgataagtcaagctagtgagaaatttaagtcctgcttgtttgcaaaagtaagcaacacc

SEQ ID NO: 294021 - DNA, 201 bp, Homo sapiens
tgtgagttcattgtagattctgcatattagccctttctcagatgagtaggttgcgaaaattttctgccattctttaggttgcctgttcactctgatggtastttcttttgctgtgcagaagctctttagtttaattagatcccatttgtcaattttggcttttgttgccattgcttttggtgttttagacatgaagtcctt

SEQ ID NO: 294022 - DNA, 201 bp, Homo sapiens
caactataggggaaaagaagtgagacctctaggctggaggaactttggggtaagataaccctcacagtaactactgtttattcactgctgtctccaagtcwgacattctgccagaagccttgcatacgtgattcatttttatctttacaacagcccagtgaaggagaaaatggagactcagaaaggttaagtaacttgccc

SEQ ID NO: 294023 - DNA, 201 bp, Homo sapiens
tgcctgttcactctgatggtactttcttttgctgtgcagaagctctttagtttaattagatcccatttgtcaattttggcttttgttgccattgcttttgktgttttagacatgaagtcctttcccatgcctgtgtcctgaatggtaatgcctaggttttcttctagggtttttatggttttaggtctaatgtttaagtct

SEQ ID NO: 294024 - DNA, 201 bp, Homo sapiens
gttctgttccattgatctatatctctgttttggtaccagtaccatgctgttttggttactgtagccttgtagtatagtttgaagtcaggtagtgtgatgcstccagctttgttcttttggcttaggattgacttggcaatgcgggctcttttttggttccatatgaactttaaagtagttttttccaattctgtgaagaaa

SEQ ID NO: 294025 - DNA, 201 bp, Homo sapiens
agtcttgggatagtgtatgagtcgaggaacttatccatttcttctagattttctagtttatttgcgtagaggtgtttgtagtattctctgatggtagtttktatttctgtgggattggtggtgatatcccctttatcattttttattgcatctatttgattcttctctctttttttccttattagtcttgctagcggtcta

SEQ ID NO: 294026 - DNA, 201 bp, Homo sapiens
tagcttttgaatgtgtttgctcttgcttttctagttctgttaattgtgatgttagggtgtcaattttggatctttcctgctttctcttgtgggcatttagygctataaatttccctctacgcactgctttgaatgcgtcccagagattgtggtatgttgtgtctttgttctcgttggtttcaaagaacatctttatttctg

SEQ ID NO: 294027 - DNA, 201 bp, Homo sapiens
agtccatttacatttaatgttattcttgatatatttggccctatgcttaccatcttgttagttttatatttgtcctacctgttttatagtccttttttctytcctttttgcttcttttggattaagcaagtgatttttaaaatttcatttcccatctctactagctctttggttacctgtccttttattgttcatttaatg

SEQ ID NO: 294028 - DNA, 201 bp, Homo sapiens
cgggggtttcaccatgttggccaggatggtctcgatctcttgacctcgtgatctgcccacctcggcctctcaaagtgctaggattacaggcgtgagccacygcacctggccaattttgacatttttaactagtccaggaaacagaagagtgtgcaagaaaagggtgctcctatcagagctaagccctgtatagtatacagc

SEQ ID NO: 294029 - DNA, 201 bp, Homo sapiens
gcaaaagtaattgcagtttttgccatttgaaagtagtggcaaaaaccacagttacttttgcacaaaaccaaatacttcctaaccacagatcttttgaagtstgtatcactacgagatcttatgtgctaagcctgaaaaagctgacaactttgccacccaactttttagctatatgctgttaaaatcatgtatttgtttttg

SEQ ID NO: 294030 - DNA, 201 bp, Homo sapiens
aactcctgacctcaggtgatccacccacctcagcctcccaaagtgctgggattacaggcgtgagccaccacacctggccacatgggaaattttcaactcarggttatgttttcttaaatggtttttattctcattactagagtcctccagaaagttttatcagtttataatctcactgacagcacgtgagtggccatttct

SEQ ID NO: 294031 - DNA, 201 bp, Homo sapiens
accaggtacagtactgaggaataggaaaaaatgtgaactatacttagtaatctctaatacaaagaacattgtggactattagggaaaacagacaagtaaaytaacaaatttttattttttttttttatggacaagttttttttttatttgaatttttttttaatttattattattatacttcaagttttagggtacatgtg

SEQ ID NO: 294032 - DNA, 201 bp, Homo sapiens
aaagaacattgtggactattagggaaaacagacaagtaaactaacaaatttttattttttttttttatggacaagttttttttttatttgaattttttttwaatttattattattatacttcaagttttagggtacatgtgcacaatgtgcaggttaattacatatgtatacatgtgccatgctggtgcgctgcacccact

SEQ ID NO: 294033 - DNA, 201 bp, Homo sapiens
gttacaatgtactgaataccataagcaactgtaacacagcggtaagagtttgtgtatctaaatgtatctaaacatagaaaaggggtaatgtgttgcactasagagttacaacagccacaccatcactgagccataggaatttttcagctccattataatcttatgggaccccatcatatatgtggtccaccattgcctgaa

SEQ ID NO: 294034 - DNA, 201 bp, Homo sapiens
caagtacagtttttcactgggcagttggtaatatgggttttgaattcataagagaagtctaggttgtagaaaatgatttaggagttaggccatagtaatcmctgaagtaagcataattaatttaaagaaccctataaaaaagtcattattctacctctgaagatgagggaacatttcaaagagattttgactttttttttt

SEQ ID NO: 294035 - DNA, 201 bp, Homo sapiens
tagatgaaggatagagaggagtctggatgagcctaatttctggcttgaactgaatgaatagaacgaggaaaagtgggttcaggggacatgctgtgtttggrtgcttatgcggcattcacccaaagcaggccaatgcgtggttagatatgaaatcgaagagaatgattggggtacatcagcatatagatatgtaaaaccacc

SEQ ID NO: 294036 - DNA, 201 bp, Homo sapiens
tacttaaaactttaagagtgcaaagttcagctacagcaaatccacagacaaggatctctttataactttttgaaaaataaaaataaaagctttagagagakgcttcctgggctggtgcccattttaattctgagaaggaaattaagcatttcctactataaaggctatcttgaagaagaataaaaagggattacattcata

SEQ ID NO: 294037 - DNA, 201 bp, Homo sapiens
cttgttgatttctttgcccccgtaagttatttttatctgtcagattctaacattgtcagatcttctcctgttatggcaaaaagacattttctagataactytgaatcattagtacaaaaactgtgtcattccattatggccactaatgcatattgcttttaaatgagtgctaatgtaattactcctccagggaaggtttgc

SEQ ID NO: 294038 - DNA, 201 bp, Homo sapiens
cccctttgcactgttttctctgaaaacaagtgtctggcatctacagcatctttttttttttttttctcagtaacactcttgatagaaatacttacaggggmctcctagaaaaaaaaaaagaaaatttctagtttattattatccatttgatgaccctccaaccctgtcctactcacctgttcctcctcctctgacgtaatg

SEQ ID NO: 294039 - DNA, 201 bp, Homo sapiens
ttatcattatcagtaagtattctctcatatttgaagacatttattataattatttaattatacacttaacagttaagttacctgaacaaaataaaagttarcccaacaaatatttattgggagcccactacgtaaagatagtttgttaatgaacatttcagaagatgaaaagggagtattgaacagtctcactgtgcataa

SEQ ID NO: 294040 - DNA, 201 bp, Homo sapiens
gttccagacacggattttctcatgaggttgcattcaaaatatgcaagggctgtggtcatctgaagtctagactggctacagggtctggttccaagcttacktttgtgattgtcaggaggcctaagttcctcactggctgttggcagaggcctcagttcctcatcatgtgggcctttgtagggctgctctcaatatggtagc

SEQ ID NO: 294041 - DNA, 201 bp, Homo sapiens
ccagactgagttcaggcagtagcaatgggttggaaatggtaagagatggaatggatagaattattatgatacagggcagagaaagaagtcaaggctcactytggggaattatatttaggcacctagtggataattatgttattgccaagataaggttggtgagaaaaggagcaggtttggaggaaaataacacagcctcaa

SEQ ID NO: 294042 - DNA, 201 bp, Homo sapiens
tagaattattatgatacagggcagagaaagaagtcaaggctcactctggggaattatatttaggcacctagtggataattatgttattgccaagataaggwtggtgagaaaaggagcaggtttggaggaaaataacacagcctcaatttgaatatattgccatgtgtcaacgacagagacgtcttctgagaaatgtgtcat

SEQ ID NO: 294043 - DNA, 201 bp, Homo sapiens
atgttattgccaagataaggttggtgagaaaaggagcaggtttggaggaaaataacacagcctcaatttgaatatattgccatgtgtcaacgacagagacrtcttctgagaaatgtgtcattaggagatttcatccttgtacaaacatcagagagtgtacttaaaaaaaactagatggtatagtccactacacatctaggc

SEQ ID NO: 294044 - DNA, 201 bp, Homo sapiens
agcagtttcagcagagggagcagtaagcacagaagacgactaaaatgttgccaaataagcagacaatgggaagcagtgaaacagtagactgctgctcaggaaaaaaaaaaaaagagagagagagcgtgagaagcactatgacagaggaaccataatccaggaaggaatcctttcatgattatatacatcttcactggagaa

SEQ ID NO: 294045 - DNA, 201 bp, Homo sapiens
ctttacaggacaaatacccagtatatacattgtatatagtggaggagagattaaaaagacttaaaagactatcagtcaaatacaacatttagactttgttyggatgcagtttaaacaaaccaagtgcaaagaaagagataattggggaaatgtgaacactgacaagatatctgatgatttcaggtaattattgttagtttt

SEQ ID NO: 294046 - DNA, 201 bp, Homo sapiens
gcagtttcagcagagggagcagtaagcacagaagacgactaaaatgttgccaaataagcagacaatgggaagcagtgaaacagtagactgctgctcaggaaaaaaaaaaaaagagagagagagcgtgagaagcactatgacagaggaaccataatccaggaaggaatcctttcatgattatatacatcttcactggagaat

SEQ ID NO: 294047 - DNA, 201 bp, Homo sapiens
gtatagattgccaacagtatcattctttttgtgcccaggaaaacgttcaaagataccctgagataagattttttcccccaaaatcaaataaagcttatcaktatcagtaagtattctctcatatttgaagacatttattataattatttaattatacacttaacagttaagttacctgaacaaaataaaagttaacccaac

SEQ ID NO: 294048 - DNA, 201 bp, Homo sapiens
gagggagcagtaagcacagaagacgactaaaatgttgccaaataagcagacaatgggaagcagtgaaacagtagactgctgctcaggaaaaaaaaaaaaagagagagagagcgtgagaagcactatgacagaggaaccataatccaggaaggaatcctttcatgattatatacatcttcactggagaatatgtgttctgac

SEQ ID NO: 294049 - DNA, 201 bp, Homo sapiens
acaccttatttggtttcaggtactatattagatactttactcaccttatttccaataatcctcacatatgctctgtgaactaggaattactacccttcctrctattacagagaagtaaactgtgattctcagaccttagaatccaaggtctaggagttatctaaggcttagataacttccccaagtcacacagctgctaag

SEQ ID NO: 294050 - DNA, 201 bp, Homo sapiens
caatggcttgactagttgaggtataaggaatactagttttgtgttgtatgtgctaaagttgcaatgcatatgcaaatcgagcactaagctagcaaggtctrttatcaggttttatagtttgtggaaggtttaaagttataatggattcaaataaatgaccaattgcatctttagttttttttctggtctgggggtagcatg

SEQ ID NO: 294051 - DNA, 201 bp, Homo sapiens
tcaggggattggttccaggaacccccattccataccaaaatctgtgcagctcaggcctcacagtgggccctctgtatgcagggtttcacatcctatgactrttctgttttccatctgcaattgcttaaaaaaaaaaattcccagttcaagcagttcaacacagttcaagcctttgttgttcaagagtcatctatggtatta

SEQ ID NO: 294052 - DNA, 201 bp, Homo sapiens
gaagactgtcataatcagccactttccttccctcctgtaggcacccctccagcagggaagtttgttgaggagacgcagccacctaatcatacaaatgttcrctgaccgggggtataatctaagaactgtcacttgggcggcctctaatctacttaagggggatgggaggtgctgttgcctgaacggggccaacagatgcag

SEQ ID NO: 294053 - DNA, 201 bp, Homo sapiens; identical to SEQ ID NO: 60575

SEQ ID NO: 294054 - DNA, 201 bp, Homo sapiens
atttttatatcctcagggcctaactcagtaaatgcttatataaaattaaactgaatacataccctcaatgcagtctgagcttttggtgtttctttctgtcrtaacagtcttattagtgacctaatccagattgatagctttcttgcctccataactcgaggaactcttgccactagtgttggtataaaacactcaactgga

SEQ ID NO: 294055 - DNA, 201 bp, Homo sapiens
ggaatcaagtagagagaggagcacccccgtgctgttctggttcctgtttttcctcactagaaaaaatctcttccttattccccatagaagggaatgaagcstagagtggaatctctccctttaaatcttccaaattcctttcaggtggagataatgggcgatctggtgggtaaagaggataccacgcagagcgtaccggtg

SEQ ID NO: 294056 - DNA, 201 bp, Homo sapiens
aaatgggagttcactcatgatttggctctctgttgatggtgtataggagtgcttgtgatttttgcacattgattttgtatcctgagactttgctgaagttscttatcagcttaaggagattttgggctgagatgatggggttttctaaataaacaatcatgtcatctgcatacagggacaatttgacttcctcatttccta

SEQ ID NO: 294057 - DNA, 201 bp, Homo sapiens
tgaagctgacttgatcttggtggataagctttttgatgtgctgctggattcagtttgccagtattttattgaggattttcacatcaatatttaggattttmatcgatgttcatcagggatattggtctaaaattccctttttttgttgtgtctctgccaggctttggtatcaggatgatgttggcctcataaaatgagtta

SEQ ID NO: 294058 - DNA, 201 bp, Homo sapiens
attttttgaagggttttttatgtctctctttcagttctgctctgatcttagttatttcttgtcttctgctagcttttgaatttgtttgctcttgcttctcyagttcttttaattgtgatgttagggtgtcaattttagatctttcctcatttctcctgtgggcatttagtgctataaatttccctctaaacactgctttag

SEQ ID NO: 294059 - DNA, 201 bp, Homo sapiens
tccttgccaagtcttaatgccagaatggaaaagaatggcccgggtatagtaaaaatagtttattttaaatcttaacatttactaagaatgtttatttaacrgaattattttgaaacggatgtgaatgaacccacaactaaattattacttaataacagtactgatcataccactttgattccagctctgtttctgtctggt

SEQ ID NO: 294060 - DNA, 201 bp, Homo sapiens
aatttctctcattcactttgaaaggaaagaagattctatatgatatacttgcctttgccaaagaaagtgtgaattctcatgttaccacgcttggacctcaraattttcctgccaatgacaaagaaccatggcttgttgatttctttgcccccgtaagttatttttatctgtcagattctaacattgtcagatcttctcctg

SEQ ID NO: 294061 - DNA, 201 bp, Homo sapiens
tgagcttttggtgtttctttctgtcgtaacagtcttattagtgacctaatccagattgatagctttcttgcctccataactcgaggaactcttgccactartgttggtataaaacactcaactggaatgagaaagtcagctccagttccaccagttcacactaaagcttagcatcccaggccatgggaattttttagcaga

SEQ ID NO: 294062 - DNA, 201 bp, Homo sapiens
aagcctataagtgcttttagtcttggtttgtgcttgcttttcctcttttttattaaaagtttatatgtaatctgaaagtggttaattttcacttattttgrcatttgataaacctgtatcatacaatttttctggaatgcatactgtaggaggttatctttccattttttaaattcttatttctttatataagtaattctt

SEQ ID NO: 294063 - DNA, 201 bp, Homo sapiens
ctgttcacagtgaaaagattgttgatcaaagatggaactctgattggatattataacttgaggggcaggtaaaggagatcctcatgctggaaaaaggaagmacagtcagaggggtaagaaagccaagagagagtagtgataaatgctaaaaaagaaagaaaggagtggtcagcagtaaacatcagttgcgcaataagaaga

SEQ ID NO: 294064 - DNA, 201 bp, Homo sapiens
  misc_feature (1)...(201): n = A,T,C or G
ttgtttttaaaaatatttgattatatttttggtacattttgatatttatttaaattgctttaaatgatcaaatgcttaagaataatcatatgtcaaaattntaattcaacttgtatgctagaaacaaaagcaccaaaatgttctggattatttaggatcccgtgaaggaatgtcagtaccaaaaattcagttccctcttaa

SEQ ID NO: 294065 - DNA, 201 bp, Homo sapiens
  misc_feature (1)...(201): n = A,T,C or G
gtccccagattgtttgacttcacagacacgactcaggcttagtggcatgttggtaagcatcaatcattttgtaaaactatatcaccatgtaaagaaacacntttagaaattgatttgaaacattttcttcccttatttcttgaacatttaactcacctatttgtaatcttattttctgatgactgtattcatagctatgtg

SEQ ID NO: 294066 - DNA, 201 bp, Homo sapiens
agcggtcactggtgaacttacagcagtttcagcagagggagcagtaagcacagaagacgactaaaatgttgccaaataagcagacaatgggaagcagtgamacagtagactgctgctcaggaaaaaaaaaaaaagagagagagagcgtgagaagcactatgacagaggaaccataatccaggaaggaatcctttcatgatt

SEQ ID NO: 294067 - DNA, 201 bp, Homo sapiens
aagagcaaaggtatgtccagactttcctctgttccttcccttagtaggccaagctcaaaagatgtgtttcagtctgagtaatgttttttttctgttttctsatccttgtcatttttttatattattacatattactgatacaagtttttaaaatttacatgtataccaagcgatcttaaaaggttttttgtcttgtggttg

SEQ ID NO: 294068 - DNA, 201 bp, Homo sapiens
ggcttattattttcagctgcattttttaggaagaataactcatggtctgataacgtctgtcaaccttttgaagagtcaattatttcattacttttcttacttttttttttttttttttgaagattatagtttcttaaaaaatacttcatttcaacccatggtaactcatgtcatgttgtattacccctccttatgttggta

SEQ ID NO: 294069 - DNA, 201 bp, Homo sapiens
gacacagaattatattgccaatcacaatgtaaattttgacgggtaatgaatgcctgctgctgatcccctagccattcaaaagtggcttcaagggtctctargtgagacaaaatagttttatcaatatttacctattcctgaaattcatgggttacattatataccatgtggcttatcactgaggctgtgtgaatagattct

SEQ ID NO: 294070 - DNA, 201 bp, Homo sapiens
ttctcagaagtttccccagttaccaccagatacttaagaaaccgattccatgcggttgcgagggcttccacagctgcaagccaaatagatgcctgttgatycaatttctttagctgtccccaggtagtgttaggtgccttccaagtcatcaccttcattgttgtggtcgattctctaacaacaggtcctgttctcgaaaag

SEQ ID NO: 294071 - DNA, 201 bp, Homo sapiens
gccacctaatcatacaaatgttcgctgaccgggggtataatctaagaactgtcacttgggcggcctctaatctacttaagggggatgggaggtgctgttgsctgaacggggccaacagatgcaggtccctttaaggttggaggaaagaaaggcaatggcttttctgtagggggaggaaaaggctccagtctgtccttatcc

SEQ ID NO: 294072 - DNA, 201 bp, Homo sapiens
ttgccacagatttttacctcaagtatccacagatctaacacctcagactttcagtgaaaaagttctacaagggaaaaatcattgggtgattgatttctatsctccttggtgtggaccttgccagaattttgctccagaatttgagctcttggctagggtaagtcatacctgtcttaaataagttgtagccacattcatgtt

SEQ ID NO: 294073 - DNA, 201 bp, Homo sapiens; identical to SEQ ID NO: 60578

SEQ ID NO: 294074 - DNA, 201 bp, Homo sapiens
ctccataacatcaaaatacaagatgaagcagcaagtcccgacatagaagctgcagcaagttttccagaagatctagctaagatcattgatgaaggtggctrtactaaacaacaaattctcaatgttaatgagacagccttccattggaagaagatgctatctgggacttttttttcatgcctgctaacaccatatccattc

SEQ ID NO: 294075 - DNA, 201 bp, Homo sapiens; identical to SEQ ID NO: 60580

SEQ ID NO: 294076 - DNA, 201 bp, Homo sapiens
aacatcccattgagctgtgatgatacagtatttaaaatattttaactttattcttattactcagcaatcagtgggaacttggcaaatatgagaagtgctckatgaagacaaagtacaggtgtacctcattttattacactttgatttattgcacttcatagataatgcacttttttttccttaacaaattgaaggttttta

SEQ ID NO: 294077 - DNA, 201 bp, Homo sapiens
ttcagatgattaaaggaaaagtgaaagctggaaaagtagactgtcaggcttatgctcagacatgccagaaagctgggatcagggcctatccaactgttaarttttatttctacgaaagagcaaaggtatgtccagactttcctctgttccttcccttagtaggccaagctcaaaagatgtgtttcagtctgagtaatgttt

SEQ ID NO: 294078 - DNA, 201 bp, Homo sapiens
gaattgatctctttaccattatgtaatagccttctttgtctctttgatctttgttggtttaaaatctgttttatcagagactaggattgcaacccatggtkttttgttttgttttgttttgttttgttttttggtttccatttgcttggtagatcttcctccatccctttattttgagcctgtgtgcatctttgcacatga

SEQ ID NO: 294079 - DNA, 201 bp, Homo sapiens
tgttgatcacactaggagctgcagactggagctattcctactcagccatcttggaatgccctctcaaactttatccaggaacatctgttcttgcacagttkcgatgttttgaggcttttggagtcagtgatgctttttttttttttttttaacaattgtttcatgtttccgtgacactattattagtatttattttaggta

SEQ ID NO: 294080 - DNA, 201 bp, Homo sapiens
ttgttttgttttttggtttccatttgcttggtagatcttcctccatccctttattttgagcctgtgtgcatctttgcacatgagatgggtctcctgaatasagcacactgatgggtcttgactctttatcaaatttgccagcctgtgtcttttaattggggcatttagcccatttacatttaaggttaatattgttatgtg

SEQ ID NO: 294081 - DNA, 201 bp, Homo sapiens
tcaaaaaatagtaagatagctgaaaattctactttgggaaataggacaatcaaaatgtagcctagacactgaaatgcttttaaaaatttggacaagtaaamccacttaacaaaaaatagtgactgtggtccatgcaaaaacatgtatacaaatatttatagctgtatcattcataatagcaaaaaaaagaaatgtctgtca

SEQ ID NO: 294082 - DNA, 201 bp, Homo sapiens
atctgtatgtttttcagccgtctctagcagtatttaaaggacaaggaaccaaagaatatgaaattcatcatggtaagaatggaaaaaaatgataaaaaaaracttagcttcattttcaaatagaagttttctaattgtgctttttaaacttattttttacggacatgcttattgtaaataacttttctcagtaaatatgag

SEQ ID NO: 294083 - DNA, 201 bp, Homo sapiens
caaactgcagaccccaatagacaaagccttacaacctacctcaagaatattttttacgaatctgaaaggtaggaaagagttatgagtctgtattttcttgkttccactgaacaaacatgtttttctagtgtttcgctatattagttttctcaagatattttattttgaaaggtgtaacttttatctcattaaatatttgaa

SEQ ID NO: 294084 - DNA, 201 bp, Homo sapiens
gagaaacattttaggcagtaaataaaatagtaaatattatgtgtcctataatttgacctaagctgtgtgcctttggaatcagctctaagccagggcccccygggagtcatgttaagaaacacgtatcataaagtgacatacatcaaggttatcttatatagtcataacagtattattgggtctttcaaaaacagctggcag

SEQ ID NO: 294085 - DNA, 201 bp, Homo sapiens
agtaaataaaatagtaaatattatgtgtcctataatttgacctaagctgtgtgcctttggaatcagctctaagccagggccccctgggagtcatgttaagwaacacgtatcataaagtgacatacatcaaggttatcttatatagtcataacagtattattgggtctttcaaaaacagctggcagattgagcttttaatgg

SEQ ID NO: 294086 - DNA, 201 bp, Homo sapiens
aatgcatattgcttttaaatgagtgctaatgtaattactcctccagggaaggtttgccgctaagtacagtttgtcttacttagcatattacttgttgcagraatgatgggggcgttttttgtgtcatttggctcggtgcttatgaatattttttctttcctagtggtgtccaccatgtcgagctttactaccagagttacg

SEQ ID NO: 294087 - DNA, 201 bp, Homo sapiens
aaaaacaaaacaacaaaaaaaatcattttgttggtattttatataaacttaagaaacctccccacacaaacacacacagccatattgtcatctctgaagayagcagccacatgtgtcttattccctgcagtgttggcagaacctagcacattgttgacccgtagaagcacagtgtgtatttcaattgacaaacagccagaa

SEQ ID NO: 294088 - DNA, 201 bp, Homo sapiens
aaatgtgatatgatgaagtaatgattgtttttgccctgcagagagtatgtctaaataaccgattcccttctctttttgtgttttgtttctacttacaccamacatgaactttgcaataaaattacactggtaacttacaattgtttttctactatttttaaaaaatggcctctacttaaattcagtataagcaccttctga

SEQ ID NO: 294089 - DNA, 201 bp, Homo sapiens
catttaactcacctatttgtaatcttattttctgatgactgtattcatagctatgtgttttttcctgaataattagttacgttcaataaattttaacgtgrtatcaattctaagtgtcatttactttgtaagtattctgtaatttataagttcctcttcaactgaagttacatgttagtgtttttgtcatttcccaacttt

SEQ ID NO: 294090 - DNA, 201 bp, Homo sapiens
ctgccaatgacaaagaaccatggcttgttgatttctttgcccccgtaagttatttttatctgtcagattctaacattgtcagatcttctcctgttatggcraaaagacattttctagataactttgaatcattagtacaaaaactgtgtcattccattatggccactaatgcatattgcttttaaatgagtgctaatgtaa

SEQ ID NO: 294091 - DNA, 201 bp, Homo sapiens
tatatttttgtggaatgaaaaggaagtattagaaatgagctgaagaccattcacaggtaaagagaaaaatttttaaatatacatttaggattaaatgaaamacagaaatgaggtgcgaggagcgttagatttttcaaagcattacgatctctttggaactaaaatatagtggttgaaatgtgatatgatgaagtaatgatt

SEQ ID NO: 294092 - DNA, 201 bp, Homo sapiens
tctacatcattatatttttcaaaggtatatttttgtggaatgaaaaggaagtattagaaatgagctgaagaccattcacaggtaaagagaaaaatttttawatatacatttaggattaaatgaaaaacagaaatgaggtgcgaggagcgttagatttttcaaagcattacgatctctttggaactaaaatatagtggttga

SEQ ID NO: 294093 - DNA, 201 bp, Homo sapiens
attcctactcagccatcttggaatgccctctcaaactttatccaggaacatctgttcttgcacagtttcgatgttttgaggcttttggagtcagtgatgctttttttttttttttttaacaattgtttcatgtttccgtgacactattattagtatttattttaggtacattatgggttaactgcttttgcagcattattt

SEQ ID NO: 294094 - DNA, 201 bp, Homo sapiens
atggctgagcgcctgaacctcccttcctgtgcgctcttaagacctggatattgtgttctcgctccccaccttcctcctccctgttattcacaccacccttyctctgcccagcgattccctctcagttacttacactttctccctaagtccgacctgagacttcagacaccagcaacacttaacagccctgttcccccgtgt

SEQ ID NO: 294095 - DNA, 201 bp, Homo sapiens
gctataactgggtagaaagaggaagcacctgtagctcattgccacctttgtgttctgatgctcgtcagaggtcttttctcagtgtataaattgctgagggkgtgtgtgcaagctacttactaccactcatgaccttttttctgctatcttcagtgatttcacaaatctagctacatggatgtagaaagagtgaaaaataga

SEQ ID NO: 294096 - DNA, 201 bp, Homo sapiens
ggtgggcatgggcccggggctagggctttgctggagccggtggtggcctgggccctccggtcagggaggggcggaatggctgagcgcctgaacctcccttyctgtgcgctcttaagacctggatattgtgttctcgctccccaccttcctcctccctgttattcacaccacccttcctctgcccagcgattccctctcagt

SEQ ID NO: 294097 - DNA, 201 bp, Homo sapiens
ctatttttaaaaaatggcctctacttaaattcagtataagcaccttctgaggaaactccgggaagaagatcgactgctgtgtagattgtctattataacartatatttcactgtcatttctggtagggttatatgagaagtaaaaaaccctatgtttccttctagtccctcccaaggacatttcctacaagtgaattctgc

SEQ ID NO: 294098 - DNA, 201 bp, Homo sapiens
aaattcatcatggtaagaatggaaaaaaatgataaaaaaaaacttagcttcattttcaaatagaagttttctaattgtgctttttaaacttattttttacrgacatgcttattgtaaataacttttctcagtaaatatgaggacagatattttgaattatatgtagtcactttattctctttacccttctttttaacataa

SEQ ID NO: 294099 - DNA, 201 bp, Homo sapiens
gttgtatgtatattaacagacagtagctgtagttgtatagtttagaagtggaaagttgcattttgaaatgtaataattctattctgggtcactgttaggcrcaacatcccattgagctgtgatgatacagtatttaaaatattttaactttattcttattactcagcaatcagtgggaacttggcaaatatgagaagtgct

SEQ ID NO: 294100 - DNA, 201 bp, Homo sapiens
agggctttgctggagccggtggtggcctgggccctccggtcagggaggggcggaatggctgagcgcctgaacctcccttcctgtgcgctcttaagacctgkatattgtgttctcgctccccaccttcctcctccctgttattcacaccacccttcctctgcccagcgattccctctcagttacttacactttctccctaag

SEQ ID NO: 294101 - DNA, 201 bp, Homo sapiens
ctgggccctccggtcagggaggggcggaatggctgagcgcctgaacctcccttcctgtgcgctcttaagacctggatattgtgttctcgctccccaccttyctcctccctgttattcacaccacccttcctctgcccagcgattccctctcagttacttacactttctccctaagtccgacctgagacttcagacaccagc

SEQ ID NO: 294102 - DNA, 201 bp, Homo sapiens
acctcccttcctgtgcgctcttaagacctggatattgtgttctcgctccccaccttcctcctccctgttattcacaccacccttcctctgcccagcgattmcctctcagttacttacactttctccctaagtccgacctgagacttcagacaccagcaacacttaacagccctgttcccccgtgtcttcatctttacccct

SEQ ID NO: 294103 - DNA, 201 bp, Homo sapiens
ttaagacctggatattgtgttctcgctccccaccttcctcctccctgttattcacaccacccttcctctgcccagcgattccctctcagttacttacactytctccctaagtccgacctgagacttcagacaccagcaacacttaacagccctgttcccccgtgtcttcatctttacccctctcccctctcccactctgca

SEQ ID NO: 294104 - DNA, 201 bp, Homo sapiens
tgagacttcagacaccagcaacacttaacagccctgttcccccgtgtcttcatctttacccctctcccctctcccactctgcagtgatggcaatgcgaaascttgcgccttgcatttacctggcgcttccacctgcccggtagctcgggccacgggcagttcggccacacccacgctgagaacaacccctgggcgagaaac

SEQ ID NO: 294105 - DNA, 201 bp, Homo sapiens
gagacttcagacaccagcaacacttaacagccctgttcccccgtgtcttcatctttacccctctcccctctcccactctgcagtgatggcaatgcgaaagsttgcgccttgcatttacctggcgcttccacctgcccggtagctcgggccacgggcagttcggccacacccacgctgagaacaacccctgggcgagaaaca

SEQ ID NO: 294106 - DNA, 201 bp, Homo sapiens
acgggcagttcggccacacccacgctgagaacaacccctgggcgagaaacatcttatcccaaagtgttgattgagactatgccctctctttttctgatggktgttttcttgtttggatacttgttaatctctacatcattatatttttcaaaggtatatttttgtggaatgaaaaggaagtattagaaatgagctgaagac

SEQ ID NO: 294107 - DNA, 201 bp, Homo sapiens
tatttttagatgctgctgttaattctggagaactgtggtttgtaaatttttactccccaggctgttcacactgccatgatttagctcccacagtatgtatytttcacatcctcattactagttttatttctaattgatctgcaatttatatgttagaatttttttttctatgaatagtaatcaaaaataattatcaaatac

SEQ ID NO: 294108 - DNA, 201 bp, Homo sapiens
gccacacccacgctgagaacaacccctgggcgagaaacatcttatcccaaagtgttgattgagactatgccctctctttttctgatggttgttttcttgtktggatacttgttaatctctacatcattatatttttcaaaggtatatttttgtggaatgaaaaggaagtattagaaatgagctgaagaccattcacaggta

SEQ ID NO: 294109 - DNA, 201 bp, Homo sapiens
ttttaaatgagtgctaatgtaattactcctccagggaaggtttgccgctaagtacagtttgtcttacttagcatattacttgttgcagaaatgatgggggsgttttttgtgtcatttggctcggtgcttatgaatattttttctttcctagtggtgtccaccatgtcgagctttactaccagagttacgaagagcatcaaa

SEQ ID NO: 294110 - DNA, 201 bp, Homo sapiens
ctttggaactaaaatatagtggttgaaatgtgatatgatgaagtaatgattgtttttgccctgcagagagtatgtctaaataaccgattcccttctctttktgtgttttgtttctacttacaccaaacatgaactttgcaataaaattacactggtaacttacaattgtttttctactatttttaaaaaatggcctctact

SEQ ID NO: 294111 - DNA, 201 bp, Homo sapiens
caattatctaaaaaaatcacccatactcttaacattgttcataaccctgctatgtatttactctatataaccatttaaacattttgtgagtgcccatatgyatatgtaggcatatgtatatgtgtgcacatgcatacatattgtaatggccattgtaatagacatacacgtgtaaatttatatgtctgtgttttaatcaaa

SEQ ID NO: 294112 - DNA, 201 bp, Homo sapiens
gaaattacagtaagacattaaaacatgcatggtattctaaatacgtgcaactaattcaggctaattagaaacaggtacaggactcagtgttcacctacatktcaagtataagatagacctgtggggaaaaagttaatctgtaccttacaggcaaagtaattacattttactttgctaatagaagctgttaactggagttgt

SEQ ID NO: 294113 - DNA, 201 bp, Homo sapiens
cgtgcaactaattcaggctaattagaaacaggtacaggactcagtgttcacctacatttcaagtataagatagacctgtggggaaaaagttaatctgtacmttacaggcaaagtaattacattttactttgctaatagaagctgttaactggagttgtatgtatattaacagacagtagctgtagttgtatagtttagaag

SEQ ID NO: 294114 - DNA, 201 bp, Homo sapiens
tggaaaggagtcaccattctagtgtcattaagaacatctgtgattcatggaaggaggtcaaaatatcagtgttacaggagttgggaagaagttcattccamccttcatggatgactttgaggtgttcaaggcttcaatggaggatgtaactgtagatgtgatagaaatagcaagagaactggaattagaagtggagcctga

SEQ ID NO: 294115 - DNA, 201 bp, Homo sapiens
ttttttgttccttggttggtttgtcaccccacctggagagtgcagcagcaggatcatagctcatcacagccttgaactcctgggctcaagcaatcctgctrcctcagtctcccgactagctgagactgcgggcatgtgccaccatgtccagctatttttatagagacagggtcttgctgtgtttcccaggctggtctcaaa

SEQ ID NO: 294116 - DNA, 201 bp, Homo sapiens
actttgctaaagaagtggatgggttacttcgaattggagctgttaactgtggtgatgatagaatgctttgccgaatgaaaggagtcaacagctatcccagyctcttcatttttcggtctggaatggtaagggataaagttagcattttttaaatttgtgaaacattatgacaagttaaatagtagagaaaataacagtatg

SEQ ID NO: 294117 - DNA, 201 bp, Homo sapiens
ctcatcacagccttgaactcctgggctcaagcaatcctgctgcctcagtctcccgactagctgagactgcgggcatgtgccaccatgtccagctatttttatagagacagggtcttgctgtgtttcccaggctggtctcaaactcctgggctcaagtgatcctcctgtctcagcctcccaaaaggctagatgacaagcatg

SEQ ID NO: 294118 - DNA, 201 bp, Homo sapiens
ctgtaataataaacattttggattatgaatttttttttttgagatggagtctcactctgttgcccaggctggagtgcaagggtgcagtctcggctcactgyaacctctgcctcctgggctcaagcagttctcctgcctcagcctcccgagtagctgggactacaggcacccgctcccatgtctggctaatttttgtatttt

SEQ ID NO: 294119 - DNA, 201 bp, Homo sapiens
agtgatcctcctgtctcagcctcccaaaaggctagatgacaagcatgagccactgcgcccagcctattttctaattaaggtatgtacattgttttgtttgttttttttttttagacataatgctattacataatacactgtatatagtgtaaatataacttttatatgcactggaaaaccagaaaatttgtgtgactcctt

SEQ ID NO: 294120 - DNA, 201 bp, Homo sapiens
tttgtcctacctgttttatagtccttttttctttcctttttgcttcttttggattaagcaagtgatttttaaaatttcatttcccatctctactagctctktggttacctgtccttttattgttcatttaatgggtaccctagaaattttgtacatgtatcctgacttactcatttgctacctaacgcaagagtactaaac

SEQ ID NO: 294121 - DNA, 201 bp, Homo sapiens
tatagtccttttttctttcctttttgcttcttttggattaagcaagtgatttttaaaatttcatttcccatctctactagctctttggttacctgtccttwtattgttcatttaatgggtaccctagaaattttgtacatgtatcctgacttactcatttgctacctaacgcaagagtactaaacagaaattattttacta

SEQ ID NO: 294122 - DNA, 201 bp, Homo sapiens
ttggattaagcaagtgatttttaaaatttcatttcccatctctactagctctttggttacctgtccttttattgttcatttaatgggtaccctagaaattktgtacatgtatcctgacttactcatttgctacctaacgcaagagtactaaacagaaattattttactacctctgaaactttgctgttatgtattctaatc

SEQ ID NO: 294123 - DNA, 201 bp, Homo sapiens
cgtagaaagaattataaaaagtagatttctactattagggaaaaaccatttctcaagttactaagtacaattttttgcacttaatatttctaaatttattragtaatttataatattagaaatctactttttaactttgctgtagaactaaggcatgaagttttaattttttggtagaaaaattgtgtttttagctaagta

SEQ ID NO: 294124 - DNA, 201 bp, Homo sapiens
tcattttacagataaaatataaaatgtactattggctagatattatatgttgttcaaatctgtaattttagcaaatatgtattaatgttttgaattgttaraaacctcaaccttttcaaacaaaatgattttccaaggtaatgtcttgtttagggcttagattaaatttaatccccgcaatccttactgtattatgtaggt

SEQ ID NO: 294125 - DNA, 201 bp, Homo sapiens
agggagcataagatgtgtaaaacaacccagttggggaaaagagaaagagttagaaaatacttcttgaaagaagtcatatccaatctgtcatgaaaatgaayaggaagccttaggagatcactgtgtatttggggaactggcaatacttcatgaatctgacaaaaagatcaataattgggtcaagtggtgtggggaaatata

SEQ ID NO: 294126 - DNA, 201 bp, Homo sapiens
aaaattactttttctctgtagctagacatcctagaaattaaagggagagaatgaaagaaagagggagcgagggagtgtgtgtgtgtttttgtgtgtgtgtktgtatgtgtgtgtgtgtagaaggatttccatatctatcaatagagtccagctcaattaattgccttcgaatgaacatggtaatttgggggaaaggcaaat

SEQ ID NO: 294127 - DNA, 201 bp, Homo sapiens
tttactgtcacccttactgtatccttatatttattgcctgcaatcagcatgtaattaggttttgtatttatctagttgctattttttatcttagtccattyacatttaatgttattcttgatatatttggccctatgcttaccatcttgttagttttatatttgtcctacctgttttatagtccttttttctttccttttt

SEQ ID NO: 294128 - DNA, 201 bp, Homo sapiens
ttacatttaatgttattcttgatatatttggccctatgcttaccatcttgttagttttatatttgtcctacctgttttatagtccttttttctttcctttktgcttcttttggattaagcaagtgatttttaaaatttcatttcccatctctactagctctttggttacctgtccttttattgttcatttaatgggtaccc

SEQ ID NO: 294129 - DNA, 201 bp, Homo sapiens
ccttttttctttcctttttgcttcttttggattaagcaagtgatttttaaaatttcatttcccatctctactagctctttggttacctgtccttttattgytcatttaatgggtaccctagaaattttgtacatgtatcctgacttactcatttgctacctaacgcaagagtactaaacagaaattattttactacctctg

SEQ ID NO: 294130 - DNA, 201 bp, Homo sapiens
ctgcttcatccagttttttcccatattatttgatgaaaactctgtcctttattattcaagccaaatgccctggagttattcttgatttctctttttctcayaccttataaccaattcatcaagaaaatctatggctttatctttaaaatgtgtttatacacatcaaatggatggatggatacagatacgtaatttttcata

SEQ ID NO: 294131 - DNA, 201 bp, Homo sapiens
actttttgcctcccatttacaacatggtttgttgtttctttccattttaggatggtcttgttaatgtaggatggatggactgtgccacccaggataacctytgtaaaagcttagatattacaacaagtactactgcttattttcctcctggagccactttaaataacaaagagaaaaacagtattttggtatgaatcactt

SEQ ID NO: 294132 - DNA, 201 bp, Homo sapiens
tctcaagcctccacaatggcagacacccctcccccagccaggctaccacctcacagttcaatcttagactgctgcactagcagtgagcaaggctccatggktgtgggaccctctgagccaggcccaggagagaatctccttgtctgcagattgctaagaccttgggaaaagtgcagtatttgggcgagagtgtcccgtttt

SEQ ID NO: 294133 - DNA, 201 bp, Homo sapiens; identical to SEQ ID NO: 60600

SEQ ID NO: 294134 - DNA, 201 bp, Homo sapiens; identical to SEQ ID NO: 60601

SEQ ID NO: 294135 - DNA, 201 bp, Homo sapiens; identical to SEQ ID NO: 60602

SEQ ID NO: 294136 - DNA, 201 bp, Homo sapiens
acttttcagccaggatgtaacattggagaagctatccgcgtgattgcagagagaggacttggaggtaaatattatttagaagcgaattaaatgtgactctyatccttaacccttattgacccaatgtcctactcagtagcttcaaagtatgtagttttcatatacacatttggccaaattatgtttctgaagaattctgca

SEQ ID NO: 294137 - DNA, 201 bp, Homo sapiens; identical to SEQ ID NO: 60603

SEQ ID NO: 294138 - DNA, 201 bp, Homo sapiens; identical to SEQ ID NO: 60604

SEQ ID NO: 294139 - DNA, 201 bp, Homo sapiens
aggtacttttcagccaggatgtaacattggagaagctatccgcgtgattgcagagagaggacttggaggtaaatattatttagaagcgaattaaatgtgastcttatccttaacccttattgacccaatgtcctactcagtagcttcaaagtatgtagttttcatatacacatttggccaaattatgtttctgaagaattc

SEQ ID NO: 294140 - DNA, 201 bp, Homo sapiens
gggcatgatcctgtgaccggaagcccgcttacagtcagggtggaggacagacctactcatgaaacaaacacagtgacatatagtgacacagaagcaaatgycaaatatgcttgctccagatgctaaggcacaagatggccaaggatggcggagttcatggagaaagcatcatgagtgttttggccttctgatttgatctcc

SEQ ID NO: 294141 - DNA, 201 bp, Homo sapiens
gttctttagtagtgatttgtgagattttggtgtgcccattacggaatggaaaaatcaacgaaataagttctatgatgcacctactagacacctactctgcrctagatggtgggggaattaagagcatgggcatgatcctgtgaccggaagcccgcttacagtcagggtggaggacagacctactcatgaaacaaacacagt

SEQ ID NO: 294142 - DNA, 201 bp, Homo sapiens
gattatctcattgtagggctctttattagggataagaaaaaacacagacgctctcactggcttactatccactggcaatagcacagaaataaagcataatyacacacaatgcctgcagatttctctgggaagcctgtttcctcccactctcagctctgtgttttagtagtgtaaatgcacatcagtactaggagaaaagaa

SEQ ID NO: 294143 - DNA, 201 bp, Homo sapiens
tccatttcatgcaggtgtattgggctgatgtatctatgacaagtggtaggtgggtattttaagaaagcttgtgtcatcatcttcaggtaacaggaatgtawgagagttgggtgccaaaacttgtggccgccctgtacaagagagaaccagactccaatgtcattgtggtggactggctgtcacgggctcaggagcattacc

SEQ ID NO: 294144 - DNA, 201 bp, Homo sapiens
ccaataagaaagtcaacagaattactggtaagaaagcaatttcgttggtcttatcataagaggtgaaaagactgtcattctgagagagaatcagaacaaaytttgttaaatacccacatgtgtggtgttcttcccggagacatgaccagcacttgattatctcattgtagggctctttattagggataagaaaaaacacag

SEQ ID NO: 294145 - DNA, 201 bp, Homo sapiens
atgcaggtgtattgggctgatgtatctatgacaagtggtaggtgggtattttaagaaagcttgtgtcatcatcttcaggtaacaggaatgtatgagagttrggtgccaaaacttgtggccgccctgtacaagagagaaccagactccaatgtcattgtggtggactggctgtcacgggctcaggagcattacccagtgtcc

SEQ ID NO: 294146 - DNA, 201 bp, Homo sapiens
ctatatttggaaaacaatatttatattcattttgtttcttttagttttatttttggcagaactgtaagcaccttcattttctttttcttccaaaggaggartttaactaccctctggacaatgtccatctcttgggatacagccttggagcccatgctgctggcattgcaggaagtctgaccaataagaaagtcaacagaa

SEQ ID NO: 294147 - DNA, 201 bp, Homo sapiens
aaattaaaataagtagaattagttttcagtatttcctatatttggaaaacaatatttatattcattttgtttcttttagttttatttttggcagaactgtmagcaccttcattttctttttcttccaaaggaggagtttaactaccctctggacaatgtccatctcttgggatacagccttggagcccatgctgctggcat

SEQ ID NO: 294148 - DNA, 201 bp, Homo sapiens
ggcatacacacagagagaaagaacccaccactgtttatacatcttctcgacatattcagaaataatctacaaaaggaaatccagccatcctgagtggaaaytgctgcataaggctagtttaagagactcaaattcattttagaaggagccaagcctccttttatgtctctctaagtaaagataccatgactgtagaatagg

SEQ ID NO: 294149 - DNA, 201 bp, Homo sapiens
gagtaagttctttagtagtgatttgtgagattttggtgtgcccattacggaatggaaaaatcaacgaaataagttctatgatgcacctactagacacctamtctgcgctagatggtgggggaattaagagcatgggcatgatcctgtgaccggaagcccgcttacagtcagggtggaggacagacctactcatgaaacaaa

SEQ ID NO: 294150 - DNA, 201 bp, Homo sapiens
ctaccctctggacaatgtccatctcttgggatacagccttggagcccatgctgctggcattgcaggaagtctgaccaataagaaagtcaacagaattactrgtaagaaagcaatttcgttggtcttatcataagaggtgaaaagactgtcattctgagagagaatcagaacaaattttgttaaatacccacatgtgtggtg

SEQ ID NO: 294151 - DNA, 201 bp, Homo sapiens
tagctgccagtgcattcaaatgatgagcagtgacatgcgaatgtcatacgaatggaaatttacaaatctgtgttcctgcttttttcccttttaaggcctcvatccagctggacctaactttgagtatgcagaagccccgagtcgtctttctcctgatgatgcagattttgtagacgtcttacacacattcaccagagggtc

SEQ ID NO: 294152 - DNA, 201 bp, Homo sapiens
tcataaaatgctatctggccacatgttgtcataccttgaatgtagctgcaaagccaatggaaagattttagatgttactggaacagaagatgttaattagsataaatcttccaaaatgttcagaacataatgttagcttaatgttttactttaataatgttagcttgtgttaaatttatgatttttgtttgtttgtttttt

SEQ ID NO: 294153 - DNA, 201 bp, Homo sapiens
cacaaaattaaaataagtagaattagttttcagtatttcctatatttggaaaacaatatttatattcattttgtttcttttagttttatttttggcagaamtgtaagcaccttcattttctttttcttccaaaggaggagtttaactaccctctggacaatgtccatctcttgggatacagccttggagcccatgctgctg

SEQ ID NO: 294154 - DNA, 201 bp, Homo sapiens
agctgccagtgcattcaaatgatgagcagtgacatgcgaatgtcatacgaatggaaatttacaaatctgtgttcctgcttttttcccttttaaggcctcgrtccagctggacctaactttgagtatgcagaagccccgagtcgtctttctcctgatgatgcagattttgtagacgtcttacacacattcaccagagggtcc

SEQ ID NO: 294155 - DNA, 201 bp, Homo sapiens
tgccagtgcattcaaatgatgagcagtgacatgcgaatgtcatacgaatggaaatttacaaatctgtgttcctgcttttttcccttttaaggcctcgatcsagctggacctaactttgagtatgcagaagccccgagtcgtctttctcctgatgatgcagattttgtagacgtcttacacacattcaccagagggtcccct

SEQ ID NO: 294156 - DNA, 201 bp, Homo sapiens
tcagccggctcatcagtcggtccgcgccttgcagctcctccagagggacgcgccccgagatggagagcaaagccctgctcgtgctgactctggccgtgtgrctccagagtctgaccgcctcccgcggaggggtggccgccgccgaccgtaagttttgcgcgcaaactcccctccacctgcagacccggcgggtggccactg

SEQ ID NO: 294157 - DNA, 201 bp, Homo sapiens
tctcagatgccctacaaaggtaggctggagactgttgtaaataaggaaaccaaggagtcctatttcatcatgctcactgcatcacatgtactgattctgtmcattggaacagagatgatgactggtgttactaaaccctgagccctggtgtttctgttgatagggggttgcattgatccatttgtctgaggcttctaattc

SEQ ID NO: 294158 - DNA, 201 bp, Homo sapiens
ccagtgcattcaaatgatgagcagtgacatgcgaatgtcatacgaatggaaatttacaaatctgtgttcctgcttttttcccttttaaggcctcgatccarctggacctaactttgagtatgcagaagccccgagtcgtctttctcctgatgatgcagattttgtagacgtcttacacacattcaccagagggtcccctgg

SEQ ID NO: 294159 - DNA, 201 bp, Homo sapiens
atagaggttgaggcacctgtgcttcaaggaaaccttaactcttcaaaatcaggcaatgcgtatgaggtaaagagaggactgtgggaccataatcttgaagwcacagacaggcttcactcatccctgcctcctgcaccagtgggttcaaggctctgtcagtgtcccctaggggcacctcaccactcccagcttcttcagctc

SEQ ID NO: 294160 - DNA, 201 bp, Homo sapiens
cgaagcattggaatccagaaaccagttgggcatgttgacatttacccgaatggaggtacttttcagccaggatgtaacattggagaagctatccgcgtgaytgcagagagaggacttggaggtaaatattatttagaagcgaattaaatgtgactcttatccttaacccttattgacccaatgtcctactcagtagcttca

SEQ ID NO: 294161 - DNA, 201 bp, Homo sapiens
tcatcatcttcaggtaacaggaatgtatgagagttgggtgccaaaacttgtggccgccctgtacaagagagaaccagactccaatgtcattgtggtggacbggctgtcacgggctcaggagcattacccagtgtccgcgggctacaccaaactggtgggacaggatgtggcccggtttatcaactggatggaggtaagact

SEQ ID NO: 294162 - DNA, 201 bp, Homo sapiens
aagattcatttttctgggactgagagtgaaacccataccaatcaggcctttgagatttctctgtatggcaccgtggccgagagtgagaacatcccattcaytctgtgagtagcacaggggggcggtcatcatggcaccagtccctctcctgccataacccttggtctgagcagcagaagcagagagcgatgcctagaaaac

SEQ ID NO: 294163 - DNA, 201 bp, Homo sapiens
caatcttagctcactgcaacctctgctttccggttcaagcgattctcctgcctcagcctcctgagtaactgggattacaggcacccgccaccacgcccaamtaatttctgtatttttcttagtagaaacagggtttcaccatgttggccaagctagtctcaaactcctgacctcaggtgattcacccaccaaggcctccca

SEQ ID NO: 294164 - DNA, 201 bp, Homo sapiens
tggcagaactgtaagcaccttcattttctttttcttccaaaggaggagtttaactaccctctggacaatgtccatctcttgggatacagccttggagcccrtgctgctggcattgcaggaagtctgaccaataagaaagtcaacagaattactggtaagaaagcaatttcgttggtcttatcataagaggtgaaaagactg

SEQ ID NO: 294165 - DNA, 201 bp, Homo sapiens
catgttgaagctcaaatggaagagtgattcatactttagctggtcagactggtggagcagtcccggcttcgccattcagaagatcagagtaaaagcaggaragactcagaaaaagtaattaaatgtatttttcttccttcactttagacccccacctgatgtcaggacctaggggctgtatttcaggggccttcacaattc

SEQ ID NO: 294166 - DNA, 201 bp, Homo sapiens
acacacattcaccagagggtcccctggtcgaagcattggaatccagaaaccagttgggcatgttgacatttacccgaatggaggtacttttcagccaggawgtaacattggagaagctatccgcgtgattgcagagagaggacttggaggtaaatattatttagaagcgaattaaatgtgactcttatccttaacccttat

SEQ ID NO: 294167 - DNA, 201 bp, Homo sapiens
aatttctgccgagatacaatcttggtgtctcttttttacccagatgtggaccagctagtgaagtgctcccacgagcgctccattcatctcttcatcgactstctgttgaatgaagaaaatccaagtaaggcctacaggtgcagttccaaggaagcctttgagaaagggctctgcttgagttgtagaaagaaccgctgcaac

SEQ ID NO: 294168 - DNA, 201 bp, Homo sapiens
agggtgatcttctgttctagggagaaagtgtctcatttgcagaaaggaaaggcacctgcggtatttgtgaaatgccatgacaagtctctgaataagaagtsaggctggtgagcattctgggctaaagctgactgggcatcctgagcttgcaccctaagggaggcagcttcatgcattcctcttcaccccatcaccagcagc

SEQ ID NO: 294169 - DNA, 201 bp, Homo sapiens
cagcttctcatttggcactgtttcttgtaagtacaaaatagttagggaacaaacctccgagatgctacctggataatcaaagattcaaaccaacctcttcmagaagggtgagattccaagataatctcaacctgtctccgcagccccacccatgtgtacccataaaatgaattacacagagatcgctataggatttaaagc

SEQ ID NO: 294170 - DNA, 201 bp, Homo sapiens
agaagggtgagattccaagataatctcaacctgtctccgcagccccacccatgtgtacccataaaatgaattacacagagatcgctataggatttaaagcktttatactaaatgtgctgggattttgcaaactatagtgtgctgttattgttaatttaaaaaaactctaagttaggattgacaaattatttctctttagtc

SEQ ID NO: 294171 - DNA, 201 bp, Homo sapiens
gctgttattgttaatttaaaaaaactctaagttaggattgacaaattatttctctttagtcatttgcttgtatcaccaaagaagcaaacaaacaaacaaamaaaaaaagaaaaagatcttggggatggaaatgttataaagaatcttttttacactagcaatgtctagctgaaggcagatgccctaattccttaatgcaga

SEQ ID NO: 294172 - DNA, 201 bp, Homo sapiens
atcttttatcatctcttggtgaaagcccagtaacataagactgctctaggctgtctgcatgcctgtctatctaaattaactagcttggttgctgaacaccrggttaggctctcaaattaccctctgattctgatgtggcctgagtgtgacagttaattattgggaatatcaaaacaattacccagcatgatcatgtagtat

SEQ ID NO: 294173 - DNA, 201 bp, Homo sapiens
tttgtgaatttctgccgagatacaatcttggtgtctcttttttacccagatgtggaccagctagtgaagtgctcccacgagcgctccattcatctcttcaycgactctctgttgaatgaagaaaatccaagtaaggcctacaggtgcagttccaaggaagcctttgagaaagggctctgcttgagttgtagaaagaaccgc

SEQ ID NO: 294174 - DNA, 201 bp, Homo sapiens
accgggttaggctctcaaattaccctctgattctgatgtggcctgagtgtgacagttaattattgggaatatcaaaacaattacccagcatgatcatgtaktatttaaacagtcctgacagaactgtacctttgtgaacagtgcttttgattgttctacatggcatattcacatccattttcttccacagggtgatcttct

SEQ ID NO: 294175 - DNA, 201 bp, Homo sapiens
cagatgtggaccagctagtgaagtgctcccacgagcgctccattcatctcttcatcgactctctgttgaatgaagaaaatccaagtaaggcctacaggtgmagttccaaggaagcctttgagaaagggctctgcttgagttgtagaaagaaccgctgcaacaatctgggctatgagatcaataaagtcagagccaaaagaa

SEQ ID NO: 294176 - DNA, 201 bp, Homo sapiens
actgcatcacctgcagccacatagttcttgattctccaagtgccagcatactccgggacacacagccaacagggctgccccaagcacccatctcaaaaccytcaaagctgccaagcaaacagaatgagagttataggaaactgttctctcttctatctccaaacaactctgtgcctctttcctacctgacctttagggcta

SEQ ID NO: 294177 - DNA, 201 bp, Homo sapiens
aactgttctctcttctatctccaaacaactctgtgcctctttcctacctgacctttagggctaatccatgtggcagctgttagctgcatctttccagagcrtcagtactgagaggacactaagcatgtgaccttcactactcctgttctgaattccaggaatatgcccttttcaaccctccacacatcccctgccagacag

SEQ ID NO: 294178 - DNA, 201 bp, Homo sapiens
ggagatatagaagttcaactacctgcttccagaggctgtccctagtatagaatactttaggggctggctttacaaggcagtccttgtggcctcactgatgrctcaatgaaataagttcttttttaaaaaaaattttatttatttccataggttattgggggaacaggtggcgtttggttacatgagtaagttctttagtag

SEQ ID NO: 294179 - DNA, 201 bp, Homo sapiens; identical to SEQ ID NO: 60633

SEQ ID NO: 294180 - DNA, 201 bp, Homo sapiens
caaactcctgacctcaggtgattcacccaccaaggcctcccaaagtgctgggattacaggcatgagccaccatgcctggcctccaagaactcttttttccyccatcatcatggttctattttagtcctgctgcctttccttttaacctctccccaggcccatttgctcagggtttttggtagagaccagaggaggggcagg

SEQ ID NO: 294181 - DNA, 201 bp, Homo sapiens
ccgatcgtgaagcggcggcgcccagttcccgctttttctctctgccgggttcccgcgctatcccttccactctggctgggaccgcgttcccgggctcgcakgctccgccggggaggttccggggtgtgggggccgggacggcggaggcggggagtaagggcccggctggcggtgacctgcagtcacctctctgccggaggg

SEQ ID NO: 294182 - DNA, 201 bp, Homo sapiens
taattctcaattcaatgtctcttcatcttttagtagctgtggggttttgttgttgttcttctgtttttgcttagtatctgactactttttaattataaaawgagatgtatctaaacaaaatagagattgttatcagaagttcacaacatttattaaaaattttttcacctggacaagagtctaaagcagcataaaaatatg

SEQ ID NO: 294183 - DNA, 201 bp, Homo sapiens
atgttgaagctcaaatggaagagtgattcatactttagctggtcagactggtggagcagtcccggcttcgccattcagaagatcagagtaaaagcaggagwgactcagaaaaagtaattaaatgtatttttcttccttcactttagacccccacctgatgtcaggacctaggggctgtatttcaggggccttcacaattca

SEQ ID NO: 294184 - DNA, 201 bp, Homo sapiens
cctaacaaagcaaatttttccgtctgccctttccccctcttctcgttggcagggttgatcctcattactgtttgctcaaacgtttagaagtgaatttaggkccctccccccaacttatgattttatagccaataggtgatgaggtttatttgcatatttccagtcacataagcagccttggcgtgaaaacagtgtcagact

SEQ ID NO: 294185 - DNA, 201 bp, Homo sapiens
tatttaaacagtcctgacagaactgtacctttgtgaacagtgcttttgattgttctacatggcatattcacatccattttcttccacagggtgatcttctrttctagggagaaagtgtctcatttgcagaaaggaaaggcacctgcggtatttgtgaaatgccatgacaagtctctgaataagaagtcaggctggtgagca

SEQ ID NO: 294186 - DNA, 201 bp, Homo sapiens
cagtcctgacagaactgtacctttgtgaacagtgcttttgattgttctacatggcatattcacatccattttcttccacagggtgatcttctgttctaggragaaagtgtctcatttgcagaaaggaaaggcacctgcggtatttgtgaaatgccatgacaagtctctgaataagaagtcaggctggtgagcattctgggc

SEQ ID NO: 294187 - DNA, 201 bp, Homo sapiens
taggggcacctcaccactcccagcttcttcagctctggcctgtcctgctgcctgcaagggttttgcttaattctcaattcaatgtctcttcatcttttagyagctgtggggttttgttgttgttcttctgtttttgcttagtatctgactactttttaattataaaaagagatgtatctaaacaaaatagagattgttatc

SEQ ID NO: 294188 - DNA, 201 bp, Homo sapiens
ggaccataatcttgaagacacagacaggcttcactcatccctgcctcctgcaccagtgggttcaaggctctgtcagtgtcccctaggggcacctcaccacycccagcttcttcagctctggcctgtcctgctgcctgcaagggttttgcttaattctcaattcaatgtctcttcatcttttagtagctgtggggttttgtt

SEQ ID NO: 294189 - DNA, 201 bp, Homo sapiens
ggactgtgggaccataatcttgaagacacagacaggcttcactcatccctgcctcctgcaccagtgggttcaaggctctgtcagtgtcccctaggggcacytcaccactcccagcttcttcagctctggcctgtcctgctgcctgcaagggttttgcttaattctcaattcaatgtctcttcatcttttagtagctgtggg

SEQ ID NO: 294190 - DNA, 201 bp, Homo sapiens
  misc_feature (1)...(201): n = A,T,C or G
agtaatcatggactttcattgtgttagtttgagacaactggatgtttccatttgccatcctcagcaacaagaagaaagtagtctcagattaaccaggtaantattttgtatttcacttaaaaaatcttgactgaaatatgcctatgtgatgacactcaaccaaattatttcattaaccagtccacaagatctccttaaata

SEQ ID NO: 294191 - DNA, 201 bp, Homo sapiens
  misc_feature (1)...(201): n = A,T,C or G
gagaaccagactccaatgtcattgtggtggactggctgtcacgggctcaggagcattacccagtgtccgcgggctacaccaaactggtgggacaggatgtngcccggtttatcaactggatggaggtaagactgggagaaggagacttatgtgtccaaaacagtgtttttgactggagccagaaaaccggctgttctttct

SEQ ID NO: 294192 - DNA, 201 bp, Homo sapiens
tacaaggcagtccttgtggcctcactgatggctcaatgaaataagttcttttttaaaaaaaattttatttatttccataggttattgggggaacaggtggygtttggttacatgagtaagttctttagtagtgatttgtgagattttggtgtgcccattacggaatggaaaaatcaacgaaataagttctatgatgcacct

SEQ ID NO: 294193 - DNA, 201 bp, Homo sapiens
  misc_feature (1)...(201): n = A,T,C or G
cctttgagatttctctgtatggcaccgtggccgagagtgagaacatcccattcactctgtgagtagcacaggggggcggtcatcatggcaccagtccctcncctgccataacccttggtctgagcagcagaagcagagagcgatgcctagaaaacaagtctttagttaaaaaaatcagaatttcaaaattgaggtctttcc

SEQ ID NO: 294194 - DNA, 201 bp, Homo sapiens
tacaaatctgtgttcctgcttttttcccttttaaggcctcgatccagctggacctaactttgagtatgcagaagccccgagtcgtctttctcctgatgatrcagattttgtagacgtcttacacacattcaccagagggtcccctggtcgaagcattggaatccagaaaccagttgggcatgttgacatttacccgaatgg

SEQ ID NO: 294195 - DNA, 201 bp, Homo sapiens
cctgtgaacctaaaacatatcattccaatgaataaaatcaagcaaccctccagttaacctcatatccaatttttcctttccagaaagaagagattttatcracatcgaaagtaaatttgccctaaggacccctgaagacacagctgaggacacttgccacctcattcccggagtagcagagtccgtggctacctgtcattt

SEQ ID NO: 294196 - DNA, 201 bp, Homo sapiens
tcgaccttcattttgagttctttgttggacatttttgtgcatttttaaaatatcccctaaataataaagctatttatatttggagaggagaaaaaaaagtrgggggcagggagagctgatctctataactaaccaaatttattgcttttttgtttaggcctgaagtttccacaaataagacatactccttcctaatttaca

SEQ ID NO: 294197 - DNA, 201 bp, Homo sapiens
ttcccttttaaggcctcgatccagctggacctaactttgagtatgcagaagccccgagtcgtctttctcctgatgatgcagattttgtagacgtcttacasacattcaccagagggtcccctggtcgaagcattggaatccagaaaccagttgggcatgttgacatttacccgaatggaggtacttttcagccaggatgta

SEQ ID NO: 294198 - DNA, 201 bp, Homo sapiens
tgtatctatgacaagtggtaggtgggtattttaagaaagcttgtgtcatcatcttcaggtaacaggaatgtatgagagttgggtgccaaaacttgtggccrccctgtacaagagagaaccagactccaatgtcattgtggtggactggctgtcacgggctcaggagcattacccagtgtccgcgggctacaccaaactggt

SEQ ID NO: 294199 - DNA, 201 bp, Homo sapiens
ctaaatagctgccagtgcattcaaatgatgagcagtgacatgcgaatgtcatacgaatggaaatttacaaatctgtgttcctgcttttttcccttttaagkcctcgatccagctggacctaactttgagtatgcagaagccccgagtcgtctttctcctgatgatgcagattttgtagacgtcttacacacattcaccaga

SEQ ID NO: 294200 - DNA, 201 bp, Homo sapiens
gaggttgaggcacctgtgcttcaaggaaaccttaactcttcaaaatcaggcaatgcgtatgaggtaaagagaggactgtgggaccataatcttgaagacasagacaggcttcactcatccctgcctcctgcaccagtgggttcaaggctctgtcagtgtcccctaggggcacctcaccactcccagcttcttcagctctgg

SEQ ID NO: 294201 - DNA, 201 bp, Homo sapiens; identical to SEQ ID NO: 60650

SEQ ID NO: 294202 - DNA, 201 bp, Homo sapiens
ctgcttttttcccttttaaggcctcgatccagctggacctaactttgagtatgcagaagccccgagtcgtctttctcctgatgatgcagattttgtagacrtcttacacacattcaccagagggtcccctggtcgaagcattggaatccagaaaccagttgggcatgttgacatttacccgaatggaggtacttttcagcc

SEQ ID NO: 294203 - DNA, 201 bp, Homo sapiens
cttgcaatgttgcccaggctggtctcaaactcctggcctcaagtgatcctcctgcctcagcctcccaaagttctgggattgcagctgtgagccaccacgcscagtttacgatttatttttaagagccccttgcatactttatagacattgggacctacctaggatattctcgttatttttgtgcacgtaatagaacttaga

SEQ ID NO: 294204 - DNA, 201 bp, Homo sapiens
acttcaggaagggtggcttttgtggaatccagatggaaacctgagggaagggatgatattaaagaacagtggccccaggtaaaacatatggcacccatgtrtaaggtgattcttagaatctgtagaggtgtctttcgtggtatagaggttgaggcacctgtgcttcaaggaaaccttaactcttcaaaatcaggcaatgcg

SEQ ID NO: 294205 - DNA, 201 bp, Homo sapiens
gactctctgttgaatgaagaaaatccaagtaaggcctacaggtgcagttccaaggaagcctttgagaaagggctctgcttgagttgtagaaagaaccgctrcaacaatctgggctatgagatcaataaagtcagagccaaaagaagcagcaaaatgtacctgaagactcgttctcagatgccctacaaaggtaggctggag

SEQ ID NO: 294206 - DNA, 201 bp, Homo sapiens
gcttttttgtttaggcctgaagtttccacaaataagacatactccttcctaatttacacagaggtagatattggagaactactcatgttgaagctcaaatrgaagagtgattcatactttagctggtcagactggtggagcagtcccggcttcgccattcagaagatcagagtaaaagcaggagagactcagaaaaagtaa

SEQ ID NO: 294207 - DNA, 201 bp, Homo sapiens
gcaatagcacagaaataaagcataattacacacaatgcctgcagatttctctgggaagcctgtttcctcccactctcagctctgtgttttagtagtgtaaatgcacatcagtactaggagaaaagaagaaggaccaattccagaggccacttcgaaagaagaccgtcatctaggcaaaggtgtggcatacacacagagaga

SEQ ID NO: 294208 - DNA, 201 bp, Homo sapiens
tgtctttttaaatgcaactattcctggaaggcaagaatatctcacaccttctaagatactgccattttgccaggagtttgtttcacacttgaatttcaagsttggcctcttgtttagaggcagacctaaaggaatggtcggaaaatgagagaggaggtcttcggataaatccggtgagagggaccaacttcaggaagggtg

SEQ ID NO: 294209 - DNA, 201 bp, Homo sapiens
aagaaaatccaagtaaggcctacaggtgcagttccaaggaagcctttgagaaagggctctgcttgagttgtagaaagaaccgctgcaacaatctgggctawgagatcaataaagtcagagccaaaagaagcagcaaaatgtacctgaagactcgttctcagatgccctacaaaggtaggctggagactgttgtaaataagg

SEQ ID NO: 294210 - DNA, 201 bp, Homo sapiens; identical to SEQ ID NO: 60654

SEQ ID NO: 294211 - DNA, 201 bp, Homo sapiens
catgttcgaatttcctccccaacagtcttccattaccaagtaaagattcatttttctgggactgagagtgaaacccataccaatcaggcctttgagatttytctgtatggcaccgtggccgagagtgagaacatcccattcactctgtgagtagcacaggggggcggtcatcatggcaccagtccctctcctgccataacc

SEQ ID NO: 294212 - DNA, 201 bp, Homo sapiens
agccacacacattcattaccatattgtcaaaggctggtttcatgccaccataacagagttgatagcccacagagcctaaaatatttactccctggcccttyacagaatgttcacaacttacataaaggcaaggaccatctgtcttatttatttatttatttaatttgagatgaagtctagctttctcctaggctggaggag

SEQ ID NO: 294213 - DNA, 201 bp, Homo sapiens
ctttaaatggaatcatacaatatgtgtcttttgcgactatcttctttcacttatcataactcaatacggctttagattatttgacctcgatgttctgcctytgaacataaaatattatccttgcattccttgatgagtttgaggattgagaataatttgcatgagacaaaaattagaaactagttagagcaagtaggcttt

SEQ ID NO: 294214 - DNA, 201 bp, Homo sapiens
ggcctcccaaagtgctgggattataggtgtgagtcaccacacccggccctagatgcagttttatacatgcatttgtattacacataaatagcatgcatatkctgccagagcatctacaactttaaatctacatgtgaatgtgaaaataaaacctcattaaattagtaaataactctagctgcttgtaaagcacgtccagtc

SEQ ID NO: 294215 - DNA, 201 bp, Homo sapiens
tgtctcttttttacccagatgtggaccagctagtgaagtgctcccacgagcgctccattcatctcttcatcgactctctgttgaatgaagaaaatccaagwaaggcctacaggtgcagttccaaggaagcctttgagaaagggctctgcttgagttgtagaaagaaccgctgcaacaatctgggctatgagatcaataaag

SEQ ID NO: 294216 - DNA, 201 bp, Homo sapiens
attcagggagagctttaggaaaccttgtatttattactgtatgatgtagattttctttaggagtcttcttttattttcttatttttggggggcggggggggaagtgacagtatttttgtatttcatgtaaggaaaacataagccctgaatcgctcacagttattcagtgagagctgggattagaagtcaggaatctcagct

SEQ ID NO: 294217 - DNA, 201 bp, Homo sapiens
cccaccaccatgcccagctaatttttgtatttttagtagcgacagggtctcaccatgttggccaagctggtcttgaattcctgatctcaggtgatccaccygcctcggcctcccaaagtgctgggattacaggtgtgagccaccatgcccagcctaccctttactactaatcaaagaaataaaagtaaggcaacttgatac

SEQ ID NO: 294218 - DNA, 201 bp, Homo sapiens; identical to SEQ ID NO: 60660

SEQ ID NO: 294219 - DNA, 201 bp, Homo sapiens
ctcttctatctccaaacaactctgtgcctctttcctacctgacctttagggctaatccatgtggcagctgttagctgcatctttccagagcgtcagtactragaggacactaagcatgtgaccttcactactcctgttctgaattccaggaatatgcccttttcaaccctccacacatcccctgccagacagcaagtgcta

SEQ ID NO: 294220 - DNA, 201 bp, Homo sapiens
tattttactccttgaactacccctgaatcttcacttctccttttttctctactgcgtctctgctgactttgcagatgccatctgcagagcatgtaacacargtttagtagttgccgttctggctgtgggtgcagctcttcccaggatgtattcagggaagtaaaaagatctcactgcatcacctgcagccacatagttctt

SEQ ID NO: 294221 - DNA, 201 bp, Homo sapiens
aaagatcttggggatggaaatgttataaagaatcttttttacactagcaatgtctagctgaaggcagatgccctaattccttaatgcagatgctaagagayggcagagttgatcttttatcatctcttggtgaaagcccagtaacataagactgctctaggctgtctgcatgcctgtctatctaaattaactagcttggtt

SEQ ID NO: 294222 - DNA, 201 bp, Homo sapiens
atcgaaagtaaatttgccctaaggacccctgaagacacagctgaggacacttgccacctcattcccggagtagcagagtccgtggctacctgtcatttcartcacagcagcaaaaccttcatggtgatccatggctggacggtaagggaggctctttggggaagagtggattggggtggtgaggtatcctgactggcctgc

SEQ ID NO: 294223 - DNA, 201 bp, Homo sapiens
tttctcctgatgatgcagattttgtagacgtcttacacacattcaccagagggtcccctggtcgaagcattggaatccagaaaccagttgggcatgttgasatttacccgaatggaggtacttttcagccaggatgtaacattggagaagctatccgcgtgattgcagagagaggacttggaggtaaatattatttagaag

SEQ ID NO: 294224 - DNA, 201 bp, Homo sapiens
gatgatgcagattttgtagacgtcttacacacattcaccagagggtcccctggtcgaagcattggaatccagaaaccagttgggcatgttgacatttaccygaatggaggtacttttcagccaggatgtaacattggagaagctatccgcgtgattgcagagagaggacttggaggtaaatattatttagaagcgaattaa

SEQ ID NO: 294225 - DNA, 201 bp, Homo sapiens
ggccccagtgtctgttgttcccctctatgtgctcatgcaaagttttattaggacacagccacacacattcattaccatattgtcaaaggctggtttcatgycaccataacagagttgatagcccacagagcctaaaatatttactccctggccctttacagaatgttcacaacttacataaaggcaaggaccatctgtctt

SEQ ID NO: 294226 - DNA, 201 bp, Homo sapiens
acttgtggccgccctgtacaagagagaaccagactccaatgtcattgtggtggactggctgtcacgggctcaggagcattacccagtgtccgcgggctacrccaaactggtgggacaggatgtggcccggtttatcaactggatggaggtaagactgggagaaggagacttatgtgtccaaaacagtgtttttgactggag

SEQ ID NO: 294227 - DNA, 201 bp, Homo sapiens
tttttacccagatgtggaccagctagtgaagtgctcccacgagcgctccattcatctcttcatcgactctctgttgaatgaagaaaatccaagtaaggccyacaggtgcagttccaaggaagcctttgagaaagggctctgcttgagttgtagaaagaaccgctgcaacaatctgggctatgagatcaataaagtcagagc

SEQ ID NO: 294228 - DNA, 201 bp, Homo sapiens
ctgtaagcaccttcattttctttttcttccaaaggaggagtttaactaccctctggacaatgtccatctcttgggatacagccttggagcccatgctgctrgcattgcaggaagtctgaccaataagaaagtcaacagaattactggtaagaaagcaatttcgttggtcttatcataagaggtgaaaagactgtcattctg

SEQ ID NO: 294229 - DNA, 201 bp, Homo sapiens
ctgccctcccctgtaaatgtggccattagcatgggctaggctatcagcacagagctcagagctcatttggaaccatccacctcgggtcaacaaactataasccttgtgccaaatccagcctacttcctgcttttgtaaatagtttttttaaaacttttaagttcaggggtacgtatgtaggtttgctaaaaaggtaaactt

SEQ ID NO: 294230 - DNA, 201 bp, Homo sapiens
ggagactgttgtaaataaggaaaccaaggagtcctatttcatcatgctcactgcatcacatgtactgattctgtccattggaacagagatgatgactggtrttactaaaccctgagccctggtgtttctgttgatagggggttgcattgatccatttgtctgaggcttctaattcccattgtcagcaaggtcccagtgctc

SEQ ID NO: 294231 - DNA, 201 bp, Homo sapiens
ggtgtctcttttttacccagatgtggaccagctagtgaagtgctcccacgagcgctccattcatctcttcatcgactctctgttgaatgaagaaaatccargtaaggcctacaggtgcagttccaaggaagcctttgagaaagggctctgcttgagttgtagaaagaaccgctgcaacaatctgggctatgagatcaataa

SEQ ID NO: 294232 - DNA, 201 bp, Homo sapiens
ttcaagacatgagtatcatgattttttaaggtctggatgaagagaccatttggatttactaataaggtaaattccaacttttatggcaataaaaacaacaraaacacttatcagtgtaaagctttgggatcatctatccattaaatgagtttgtcaccacagtgaactaaataccttttatcaacagagactttctaacct

SEQ ID NO: 294233 - DNA, 201 bp, Homo sapiens
agactcgttctcagatgccctacaaaggtaggctggagactgttgtaaataaggaaaccaaggagtcctatttcatcatgctcactgcatcacatgtactkattctgtccattggaacagagatgatgactggtgttactaaaccctgagccctggtgtttctgttgatagggggttgcattgatccatttgtctgaggct

SEQ ID NO: 294234 - DNA, 201 bp, Homo sapiens
ttattgttaatttaaaaaaactctaagttaggattgacaaattatttctctttagtcatttgcttgtatcaccaaagaagcaaacaaacaaacaaacaaamaaagaaaaagatcttggggatggaaatgttataaagaatcttttttacactagcaatgtctagctgaaggcagatgccctaattccttaatgcagatgct

SEQ ID NO: 294235 - DNA, 201 bp, Homo sapiens
aaatgtgctgggattttgcaaactatagtgtgctgttattgttaatttaaaaaaactctaagttaggattgacaaattatttctctttagtcatttgcttstatcaccaaagaagcaaacaaacaaacaaacaaaaaaagaaaaagatcttggggatggaaatgttataaagaatcttttttacactagcaatgtctagct

SEQ ID NO: 294236 - DNA, 201 bp, Homo sapiens
ggaatctcagcttctcatttggcactgtttcttgtaagtacaaaatagttagggaacaaacctccgagatgctacctggataatcaaagattcaaaccaasctcttcaagaagggtgagattccaagataatctcaacctgtctccgcagccccacccatgtgtacccataaaatgaattacacagagatcgctataggat

SEQ ID NO: 294237 - DNA, 201 bp, Homo sapiens
ttctgccgagatacaatcttggtgtctcttttttacccagatgtggaccagctagtgaagtgctcccacgagcgctccattcatctcttcatcgactctckgttgaatgaagaaaatccaagtaaggcctacaggtgcagttccaaggaagcctttgagaaagggctctgcttgagttgtagaaagaaccgctgcaacaat

SEQ ID NO: 294238 - DNA, 201 bp, Homo sapiens
gtggtaggtgggtattttaagaaagcttgtgtcatcatcttcaggtaacaggaatgtatgagagttgggtgccaaaacttgtggccgccctgtacaagagmgaaccagactccaatgtcattgtggtggactggctgtcacgggctcaggagcattacccagtgtccgcgggctacaccaaactggtgggacaggatgtgg

SEQ ID NO: 294239 - DNA, 201 bp, Homo sapiens
cctgcttttttcccttttaaggcctcgatccagctggacctaactttgagtatgcagaagccccgagtcgtctttctcctgatgatgcagattttgtagasgtcttacacacattcaccagagggtcccctggtcgaagcattggaatccagaaaccagttgggcatgttgacatttacccgaatggaggtacttttcagc

SEQ ID NO: 294240 - DNA, 201 bp, Homo sapiens
  misc_feature (1)...(201): n = A,T,C or G
aagactcgttctcagatgccctacaaaggtaggctggagactgttgtaaataaggaaaccaaggagtcctatttcatcatgctcactgcatcacatgtacngattctgtccattggaacagagatgatgactggtgttactaaaccctgagccctggtgtttctgttgatagggggttgcattgatccatttgtctgaggc

SEQ ID NO: 294241 - DNA, 201 bp, Homo sapiens
tcttttttacccagatgtggaccagctagtgaagtgctcccacgagcgctccattcatctcttcatcgactctctgttgaatgaagaaaatccaagtaagrcctacaggtgcagttccaaggaagcctttgagaaagggctctgcttgagttgtagaaagaaccgctgcaacaatctgggctatgagatcaataaagtcag

SEQ ID NO: 294242 - DNA, 201 bp, Homo sapiens
ggtgccaaaacttgtggccgccctgtacaagagagaaccagactccaatgtcattgtggtggactggctgtcacgggctcaggagcattacccagtgtccrcgggctacaccaaactggtgggacaggatgtggcccggtttatcaactggatggaggtaagactgggagaaggagacttatgtgtccaaaacagtgtttt

SEQ ID NO: 294243 - DNA, 201 bp, Homo sapiens
gccctgctcgtgctgactctggccgtgtggctccagagtctgaccgcctcccgcggaggggtggccgccgccgaccgtaagttttgcgcgcaaactccccwccacctgcagacccggcgggtggccactgccacccgaactgaggatgagaagaaggaagttggaaggggcggtggatgcgcccagggactctcccagcct

SEQ ID NO: 294244 - DNA, 201 bp, Homo sapiens
tcataaatgcacaggactatatccttgggtgattctactctaacaccacatctcacctattttagacatgccaaatgaaacactctttgtgaatttctgcygagatacaatcttggtgtctcttttttacccagatgtggaccagctagtgaagtgctcccacgagcgctccattcatctcttcatcgactctctgttgaa

SEQ ID NO: 294245 - DNA, 201 bp, Homo sapiens
ccaagtaaggcctacaggtgcagttccaaggaagcctttgagaaagggctctgcttgagttgtagaaagaaccgctgcaacaatctgggctatgagatcartaaagtcagagccaaaagaagcagcaaaatgtacctgaagactcgttctcagatgccctacaaaggtaggctggagactgttgtaaataaggaaaccaag

SEQ ID NO: 294246 - DNA, 201 bp, Homo sapiens
tgaaatcacaaacgtacacacacataccctgactaaggagagcttcaagaaaggctggaagacttaggagaggtcaatggtgacaatcttaattcagagtkaaggttgtctctctgtcaactttgctcaacgttggagcatctgttgttctcttgcaatccacattcgttttcgaaaacacttcagaaacaaaaatagcat

SEQ ID NO: 294247 - DNA, 201 bp, Homo sapiens
  misc_feature (1)...(201): n = A,T,C or G
cctgaaatagggcctacaatcataaatgcacaggactatatccttgggtgattctactctaacaccacatctcacctattttagacatgccaaatgaaacnctctttgtgaatttctgccgagatacaatcttggtgtctcttttttacccagatgtggaccagctagtgaagtgctcccacgagcgctccattcatctct

SEQ ID NO: 294248 - DNA, 201 bp, Homo sapiens
ttgcagagagaggacttggaggtaaatattatttagaagcgaattaaatgtgactcttatccttaacccttattgacccaatgtcctactcagtagcttcraagtatgtagttttcatatacacatttggccaaattatgtttctgaagaattctgcaatgttcagcatgaccaccttagagccaggcagacagccatttt

SEQ ID NO: 294249 - DNA, 201 bp, Homo sapiens
gtgggtgggccgctaccaccaagaatatctcctgaaatagggcctacaatcataaatgcacaggactatatccttgggtgattctactctaacaccacatstcacctattttagacatgccaaatgaaacactctttgtgaatttctgccgagatacaatcttggtgtctcttttttacccagatgtggaccagctagtga

SEQ ID NO: 294250 - DNA, 201 bp, Homo sapiens
ttattacagcttcataaacatactcataaatataagaagcacaaaagtcaaaaattccctgtgaacttgcaactttcactctcttgaaggtgggtgggccrctaccaccaagaatatctcctgaaatagggcctacaatcataaatgcacaggactatatccttgggtgattctactctaacaccacatctcacctatttt

SEQ ID NO: 294251 - DNA, 201 bp, Homo sapiens
agtgaaatgaaagtctctaaatacaaatttactagaggatgtgtaaatttcctacttttcattacatactctggacccaacagagggaaattggagctgtyagtgagccatacatgcaatctggtacaggatctatggattgaatagactttttttcatggaactacacaaagccagtcttagtcatttcaaagaaaattt

SEQ ID NO: 294252 - DNA, 201 bp, Homo sapiens
taggggcagaaccctcaattgtacataatatcaatgataaaatacaattcatttaacaattaccctcttaagatgtggtttctagaaatacaaattgtccytaacttacagttttccaactttacaattgggctgtaacaccattttaagttgagaagcacgtgatggtttgacttaaaactttttgacattatgatgggt

SEQ ID NO: 294253 - DNA, 201 bp, Homo sapiens
atactttatagacattgggacctacctaggatattctcgttatttttgtgcacgtaatagaacttagagcatattgttactattttcgattgtcctaaaawcttacaaggaattcattcttatggcattgctgattatttctatgttcatttgatataaaagagtgttagtaggggcagaaccctcaattgtacataatat

SEQ ID NO: 294254 - DNA, 201 bp, Homo sapiens
gaagtctttccaagccacaccagtggttccatgtgtgtgcacttccggtttgagtgctagtgagatacttctgtggttctgaattgcctgactatttgggrttgtgatattttcataaagattgatcaacatgttcgaatttcctccccaacagtcttccattaccaagtaaagattcatttttctgggactgagagtgaa

SEQ ID NO: 294255 - DNA, 201 bp, Homo sapiens
tccacctcctgggttcaagcaattctcctgcctcagcctcccaagtagctgggattacacgtgtccgccaccacacctggctaatttcgtatttttagtaragaaagggtttcaccatgttggtcaggctggtcttgaactcctaacctcaggttatccacctgcctcggcctcccaaagtgctgggattataggtgtgag

SEQ ID NO: 294256 - DNA, 201 bp, Homo sapiens
tttctgccgagatacaatcttggtgtctcttttttacccagatgtggaccagctagtgaagtgctcccacgagcgctccattcatctcttcatcgactctstgttgaatgaagaaaatccaagtaaggcctacaggtgcagttccaaggaagcctttgagaaagggctctgcttgagttgtagaaagaaccgctgcaacaa

SEQ ID NO: 294257 - DNA, 201 bp, Homo sapiens
ttacacagaggtagatattggagaactactcatgttgaagctcaaatggaagagtgattcatactttagctggtcagactggtggagcagtcccggcttcrccattcagaagatcagagtaaaagcaggagagactcagaaaaagtaattaaatgtatttttcttccttcactttagacccccacctgatgtcaggaccta

SEQ ID NO: 294258 - DNA, 201 bp, Homo sapiens
ggagaggagaaaaaaaagtggggggcagggagagctgatctctataactaaccaaatttattgcttttttgtttaggcctgaagtttccacaaataagacmtactccttcctaatttacacagaggtagatattggagaactactcatgttgaagctcaaatggaagagtgattcatactttagctggtcagactggtgga

SEQ ID NO: 294259 - DNA, 201 bp, Homo sapiens
ttctaggaaacccaggaaaacatagtaaaaaatggaatataaaatctaaagagaataaagaatagagaatcgtatgtgtgctatgattgtagctaaataaygttcaagtatcaacacaaattgaaaaggaatacatgaaaatgaaaattatatttctgaatgattgacttcaggattttcttttagaattgtattaaatag

SEQ ID NO: 294260 - DNA, 201 bp, Homo sapiens
tgaatcgtggtttatcaagtcattaaaatcaatctagcctttaaaaactataattctaggaaacccaggaaaacatagtaaaaaatggaatataaaatctraagagaataaagaatagagaatcgtatgtgtgctatgattgtagctaaataatgttcaagtatcaacacaaattgaaaaggaatacatgaaaatgaaaat

SEQ ID NO: 294261 - DNA, 201 bp, Homo sapiens
gctcaggagcattacccagtgtccgcgggctacaccaaactggtgggacaggatgtggcccggtttatcaactggatggaggtaagactgggagaaggagmcttatgtgtccaaaacagtgtttttgactggagccagaaaaccggctgttctttcttccttttctcttagatttaaatattttctgggggcattcaaatc

SEQ ID NO: 294262 - DNA, 201 bp, Homo sapiens
ggccaagctagtctcaaactcctgacctcaggtgattcacccaccaaggcctcccaaagtgctgggattacaggcatgagccaccatgcctggcctccaaraactcttttttcctccatcatcatggttctattttagtcctgctgcctttccttttaacctctccccaggcccatttgctcagggtttttggtagagacc

SEQ ID NO: 294263 - DNA, 201 bp, Homo sapiens
cttttttgtttaggcctgaagtttccacaaataagacatactccttcctaatttacacagaggtagatattggagaactactcatgttgaagctcaaatgraagagtgattcatactttagctggtcagactggtggagcagtcccggcttcgccattcagaagatcagagtaaaagcaggagagactcagaaaaagtaat

SEQ ID NO: 294264 - DNA, 201 bp, Homo sapiens
tctcctgatgatgcagattttgtagacgtcttacacacattcaccagagggtcccctggtcgaagcattggaatccagaaaccagttgggcatgttgacakttacccgaatggaggtacttttcagccaggatgtaacattggagaagctatccgcgtgattgcagagagaggacttggaggtaaatattatttagaagcg

SEQ ID NO: 294265 - DNA, 201 bp, Homo sapiens
aaagattgatcaacatgttcgaatttcctccccaacagtcttccattaccaagtaaagattcatttttctgggactgagagtgaaacccataccaatcagrcctttgagatttctctgtatggcaccgtggccgagagtgagaacatcccattcactctgtgagtagcacaggggggcggtcatcatggcaccagtccctc

SEQ ID NO: 294266 - DNA, 201 bp, Homo sapiens; identical to SEQ ID NO: 60641

SEQ ID NO: 294267 - DNA, 201 bp, Homo sapiens
ttttcccttttaaggcctcgatccagctggacctaactttgagtatgcagaagccccgagtcgtctttctcctgatgatgcagattttgtagacgtcttasacacattcaccagagggtcccctggtcgaagcattggaatccagaaaccagttgggcatgttgacatttacccgaatggaggtacttttcagccaggatg

SEQ ID NO: 294268 - DNA, 201 bp, Homo sapiens; identical to SEQ ID NO: 60642

SEQ ID NO: 294269 - DNA, 201 bp, Homo sapiens; identical to SEQ ID NO: 60643

SEQ ID NO: 294270 - DNA, 201 bp, Homo sapiens
tttatttttaagagccccttgcatactttatagacattgggacctacctaggatattctcgttatttttgtgcacgtaatagaacttagagcatattgttrctattttcgattgtcctaaaaacttacaaggaattcattcttatggcattgctgattatttctatgttcatttgatataaaagagtgttagtaggggcag

SEQ ID NO: 294271 - DNA, 201 bp, Homo sapiens
actccactgacctcaataatggcatcataaaatgctatctggccacatgttgtcataccttgaatgtagctgcaaagccaatggaaagattttagatgttmctggaacagaagatgttaattaggataaatcttccaaaatgttcagaacataatgttagcttaatgttttactttaataatgttagcttgtgttaaattt

SEQ ID NO: 294272 - DNA, 201 bp, Homo sapiens
cttcacaattcagggagagctttaggaaaccttgtatttattactgtatgatgtagattttctttaggagtcttcttttattttcttatttttggggggckgggggggaagtgacagtatttttgtatttcatgtaaggaaaacataagccctgaatcgctcacagttattcagtgagagctgggattagaagtcaggaat

SEQ ID NO: 294273 - DNA, 201 bp, Homo sapiens
aaatattatttagaagcgaattaaatgtgactcttatccttaacccttattgacccaatgtcctactcagtagcttcaaagtatgtagttttcatatacayatttggccaaattatgtttctgaagaattctgcaatgttcagcatgaccaccttagagccaggcagacagccattttatcttttatttactatactgtag

SEQ ID NO: 294274 - DNA, 201 bp, Homo sapiens
agtgattcgatctcagctcactgcaacctctacctcccgagttcaagcaattcttctgtctcagcctcccgagtagctggggctgcaggtgcccaccaccrtgcccagctaatttttgtatttttagtagcgacagggtctcaccatgttggccaagctggtcttgaattcctgatctcaggtgatccacctgcctcggcc

SEQ ID NO: 294275 - DNA, 201 bp, Homo sapiens
tttttttttttttttttgagatggagtctctctctattgcccaggctggagtgcagtgattcgatctcagctcactgcaacctctacctcccgagttcaarcaattcttctgtctcagcctcccgagtagctggggctgcaggtgcccaccaccatgcccagctaatttttgtatttttagtagcgacagggtctcaccat

SEQ ID NO: 294276 - DNA, 201 bp, Homo sapiens
tttgacattaaagaaaatgagcaatggtaacaggaaaccactctatagatgtacatataatatgtacagaaaatataagtagtaagaagtccatgacaaastgttagctcttttttttttttttttttttttttttgagatggagtctctctctattgcccaggctggagtgcagtgattcgatctcagctcactgcaacc

SEQ ID NO: 294277 - DNA, 201 bp, Homo sapiens
ttccaagaattattttatttatttatttatttatttatttatttatttatttatttttgagacacagtctcgctcagttacccaggctggagtgcagcggmgcaatcttagctcactgcaacctctgctttccggttcaagcgattctcctgcctcagcctcctgagtaactgggattacaggcacccgccaccacgccca

SEQ ID NO: 294278 - DNA, 201 bp, Homo sapiens
aacttacataaaggcaaggaccatctgtcttatttatttatttatttaatttgagatgaagtctagctttctcctaggctggaggagaggggcatgatctyggctcaccacaacctctgcctcccgggttcaaatgattcccctgcctcagcctccggagtagctgggataacaggcatgcaccatcatgcccagctaatt

SEQ ID NO: 294279 - DNA, 201 bp, Homo sapiens
tgaggcagtgggtaaatgaatcgtggtttatcaagtcattaaaatcaatctagcctttaaaaactataattctaggaaacccaggaaaacatagtaaaaartggaatataaaatctaaagagaataaagaatagagaatcgtatgtgtgctatgattgtagctaaataatgttcaagtatcaacacaaattgaaaaggaat

SEQ ID NO: 294280 - DNA, 201 bp, Homo sapiens
gcataaattagaaacccagtatccaacattgaggcagtgggtaaatgaatcgtggtttatcaagtcattaaaatcaatctagcctttaaaaactataattstaggaaacccaggaaaacatagtaaaaaatggaatataaaatctaaagagaataaagaatagagaatcgtatgtgtgctatgattgtagctaaataatgt

SEQ ID NO: 294281 - DNA, 201 bp, Homo sapiens
gcttcaagaaaggctggaagacttaggagaggtcaatggtgacaatcttaattcagagttaaggttgtctctctgtcaactttgctcaacgttggagcatstgttgttctcttgcaatccacattcgttttcgaaaacacttcagaaacaaaaatagcatcagcggtggttgcctgtgaacctaaaacatatcattccaat

SEQ ID NO: 294282 - DNA, 201 bp, Homo sapiens
aaaaatacgctataagtatcagactttcccttagcaattatataaaatctccttgcagttttctgaaaggcacagaagtgcagtttgatttggttgtcttrtcaaaggacatttatgcatgaaaataggctgcaggagtattctatataagatagcaggcagttctgcacgtctgtttatatgccattcacaccatgaaca

SEQ ID NO: 294283 - DNA, 201 bp, Homo sapiens
tgacaagtggtaggtgggtattttaagaaagcttgtgtcatcatcttcaggtaacaggaatgtatgagagttgggtgccaaaacttgtggccgccctgtamaagagagaaccagactccaatgtcattgtggtggactggctgtcacgggctcaggagcattacccagtgtccgcgggctacaccaaactggtgggacagg

SEQ ID NO: 294284 - DNA, 201 bp, Homo sapiens
cacttatgtgattaattagtttaattgagttgtagccaacacatgcttttcctagctgtaaatatattaaggaaggattatttccaagtagactggaaacratgccctcccatcccctccactttcactctactcacccaatatatcatgcctctcccatcacagcaactttctccctctttctcctccagatgcattcat

SEQ ID NO: 294285 - DNA, 201 bp, Homo sapiens
tttttccatcctaaaaccagtgggggacaggcgggaattgtaaaacactcagaagataataaattgccctttttcctgtgctttttctcagaaactgggcraatctacagaacaaagaacggcatgtgaattctgtgaagaatgaagtggaggaagtaacttttacaaaacatacccagtgtttggggtgtttcaaaagtg

SEQ ID NO: 294286 - DNA, 201 bp, Homo sapiens; identical to SEQ ID NO: 60661

SEQ ID NO: 294287 - DNA, 201 bp, Homo sapiens; identical to SEQ ID NO: 60662

SEQ ID NO: 294288 - DNA, 201 bp, Homo sapiens; identical to SEQ ID NO: 60663

SEQ ID NO: 294289 - DNA, 201 bp, Homo sapiens; identical to SEQ ID NO: 60665

SEQ ID NO: 294290 - DNA, 201 bp, Homo sapiens
ttgaatgaagaaaatccaagtaaggcctacaggtgcagttccaaggaagcctttgagaaagggctctgcttgagttgtagaaagaaccgctgcaacaatcygggctatgagatcaataaagtcagagccaaaagaagcagcaaaatgtacctgaagactcgttctcagatgccctacaaaggtaggctggagactgttgta

SEQ ID NO: 294291 - DNA, 201 bp, Homo sapiens
agagtgagaacatcccattcactctgtgagtagcacaggggggcggtcatcatggcaccagtccctctcctgccataacccttggtctgagcagcagaagyagagagcgatgcctagaaaacaagtctttagttaaaaaaatcagaatttcaaaattgaggtctttcctctatttgatattgagaaaaaaatgcttcaaat

SEQ ID NO: 294292 - DNA, 201 bp, Homo sapiens
aaagattcatttttctgggactgagagtgaaacccataccaatcaggcctttgagatttctctgtatggcaccgtggccgagagtgagaacatcccattcrctctgtgagtagcacaggggggcggtcatcatggcaccagtccctctcctgccataacccttggtctgagcagcagaagcagagagcgatgcctagaaaa

SEQ ID NO: 294293 - DNA, 201 bp, Homo sapiens
accaagtaaagattcatttttctgggactgagagtgaaacccataccaatcaggcctttgagatttctctgtatggcaccgtggccgagagtgagaacatyccattcactctgtgagtagcacaggggggcggtcatcatggcaccagtccctctcctgccataacccttggtctgagcagcagaagcagagagcgatgcc

SEQ ID NO: 294294 - DNA, 201 bp, Homo sapiens
gaatggaaatttacaaatctgtgttcctgcttttttcccttttaaggcctcgatccagctggacctaactttgagtatgcagaagccccgagtcgtctttstcctgatgatgcagattttgtagacgtcttacacacattcaccagagggtcccctggtcgaagcattggaatccagaaaccagttgggcatgttgacatt

SEQ ID NO: 294295 - DNA, 201 bp, Homo sapiens
ctccccaacagtcttccattaccaagtaaagattcatttttctgggactgagagtgaaacccataccaatcaggcctttgagatttctctgtatggcaccrtggccgagagtgagaacatcccattcactctgtgagtagcacaggggggcggtcatcatggcaccagtccctctcctgccataacccttggtctgagcag

SEQ ID NO: 294296 - DNA, 201 bp, Homo sapiens
ccgactcggggggttgccaggtctgcgtttggccaccctttctgtcctgggggctgaggtcagctccgggcgcccggccccgccgcgcggctgcgagcacktggggttgacgggcgccgcgtggaggcagcgagcacaacggtggtcaccgccgccagggaaccgcccgctcgctggggtccaggcgttcggggccaaatg

SEQ ID NO: 294297 - DNA, 201 bp, Homo sapiens; identical to SEQ ID NO: 60676

SEQ ID NO: 294298 - DNA, 201 bp, Homo sapiens; identical to SEQ ID NO: 60678

SEQ ID NO: 294299 - DNA, 201 bp, Homo sapiens
tgtgaatttctgccgagatacaatcttggtgtctcttttttacccagatgtggaccagctagtgaagtgctcccacgagcgctccattcatctcttcatcractctctgttgaatgaagaaaatccaagtaaggcctacaggtgcagttccaaggaagcctttgagaaagggctctgcttgagttgtagaaagaaccgctg

SEQ ID NO: 294300 - DNA, 201 bp, Homo sapiens
gagagggagagtatggtcagtgcttagcagctgaagttccacttgcctggccatcgtgaatttccaggctgtcttctgagttgaacatgatggcaaaggasagcaaaatagcagatgtcactgaaggagagctcagcgagggagtgattgattaatagctgtattgaaaggtgggagtcaggtacgggggaagagcggcga

SEQ ID NO: 294301 - DNA, 201 bp, Homo sapiens
aggagagcaaaatagcagatgtcactgaaggagagctcagcgagggagtgattgattaatagctgtattgaaaggtgggagtcaggtacgggggaagagckgcgatggaaaattttcgctttctttcagcagcttatttttaactcagctttctgttcttgctttattatggaggaaaaattgggccatagagtttactgc

SEQ ID NO: 294302 - DNA, 201 bp, Homo sapiens
aatctgggctatgagatcaataaagtcagagccaaaagaagcagcaaaatgtacctgaagactcgttctcagatgccctacaaaggtaggctggagactgytgtaaataaggaaaccaaggagtcctatttcatcatgctcactgcatcacatgtactgattctgtccattggaacagagatgatgactggtgttactaaa

SEQ ID NO: 294303 - DNA, 201 bp, Homo sapiens
ggaatttaggaataaagattccatagtcaggaaaggcacaatttataacttgcgtgttacccaaaactctcccctaagggcttaatatggacatttctgaygaggcctgatgggcaggtggtacggtgatgctaagttaaattcagaatgaaggcctgcctttccttccctccttccttccccttccccttcttccttcct

SEQ ID NO: 294304 - DNA, 201 bp, Homo sapiens
ctcagatcataatgttattctttcatgttttcttctgggagttttgcgatatattttttatttaaatttatgtggaatttgggggcataacattggagagrttgaatttttttttctaagtagataatatggttaagcattctgctataggtatttcttttttttgaaacagtcttgctctgtcacccaggctggagggca

SEQ ID NO: 294305 - DNA, 201 bp, Homo sapiens
ccgaaggagtcccgctgaccctggtctttggcactaaatgtttcacgtgtgcatgtgaagagacccccccaaacaggctttgtgtgagcaacaaggctgtktatttcacctgggtgctagtgggctgagtccaaaaaaggagtcagcaaagggcgggaattatcattagttcttataggttttgggataggcggtggagtt

SEQ ID NO: 294306 - DNA, 201 bp, Homo sapiens
tttgttatacattgctattatactcacccagagacagttacttttttttttttttttttttgcaacggagtttcgctcttgtcacccatgctagagtgcartggcacagtcttggctcactgcaacctctgcctcctgggttcaagcaattcttctgactcagcctcccaagtagctggaactccaggcgtgcaccaccac

SEQ ID NO: 294307 - DNA, 201 bp, Homo sapiens
agagagcatattatttctacaaaaactgttttaggaggactttgttatacattgctattatactcacccagagacagttacttttttttttttttttttttgcaacggagtttcgctcttgtcacccatgctagagtgcaatggcacagtcttggctcactgcaacctctgcctcctgggttcaagcaattcttctgactc

SEQ ID NO: 294308 - DNA, 201 bp, Homo sapiens
tagagagcatattatttctacaaaaactgttttaggaggactttgttatacattgctattatactcacccagagacagttacttttttttttttttttttttgcaacggagtttcgctcttgtcacccatgctagagtgcaatggcacagtcttggctcactgcaacctctgcctcctgggttcaagcaattcttctgact

SEQ ID NO: 294309 - DNA, 201 bp, Homo sapiens
tctctactgaaaatacaagattagccaggtgtggtggcgcatgcctgtaatcccagctactcgggaggctgaggcaggagaatcgcttgaacccgggaggyggagggttgcagtgagccaagatggcgccattgcactccgcctgggcaacaagagcgaaactccatctcaaaaaaaaaaagaaatagcacttggctgcat

SEQ ID NO: 294310 - DNA, 201 bp, Homo sapiens
tgcatctattctaaatatagatagctctcagtgtgatcctgatgggagatcatatctatcttctgtttaagaaccctccccaaaggccttctcatcccgcmtaaagtcagtgaagacctgtgggcccttgggatctatctgtctgttgacttcctctatcccactcttcccctcactcgctgttccatatttcttgcatat

SEQ ID NO: 294311 - DNA, 201 bp, Homo sapiens
tttatgagcacatattactcttcacaatattatgaagaatattactcttcataatattgactccttcatagatcttagtctgaaaaggacacaacacatayactatgatttcttttaataaagtgatgagtaattcttaaattcaggattttgtgatactgactttattaacttcttcacacaggaaacctggacaagcat

SEQ ID NO: 294312 - DNA, 201 bp, Homo sapiens
tctgaggacctgaggttgtaggtagatctcttcacgaagtgaggatgaggacaggggactggtctcccgaaggagtcccgctgaccctggtctttggcacyaaatgtttcacgtgtgcatgtgaagagacccccccaaacaggctttgtgtgagcaacaaggctgtttatttcacctgggtgctagtgggctgagtccaaa

SEQ ID NO: 294313 - DNA, 201 bp, Homo sapiens
gactctgttagataacccacatattataagatctttatattttggtggacaaaaatacaaactattcccagctccatgtgagtgcaggaattgtttggccyattgctttctgatggatcttttccccagcctctgctagtttcttttcatgcgtatagaaatcagtacccttcccaaagttcaaagggacccttcagcaga

SEQ ID NO: 294314 - DNA, 201 bp, Homo sapiens
tgacttgccaccaagggaatgtgggtgaatgaccaaggcaggcgtccccatggagatcagacaccaaaggaacgtgggtgaataatcagagaggcatcccygcaatgattaaacaccaagggaaggctgccttcccgagtccgtgaccggcaccggagttttgggtccacggataaaatgtgtctcctttgtctctatcag

SEQ ID NO: 294315 - DNA, 201 bp, Homo sapiens
ggcaggtggaaatgcgaatgtggagttctggaaaggaatttgggattgcagtgtagacttgagcttacttgtagcatctgaggtctagctgagaactcctmagtagatgagaattcactagagaggctatagatagtgaggcaagtttaaagagaagggtagagacacggagaagggggttggggagcagccaaagcaggc

SEQ ID NO: 294316 - DNA, 201 bp, Homo sapiens
gctgcctacacgaaaaactatggacttctacttttcagaatttccctgctgaaaaaaggagacacttctggacatacacattcagagcacagtatagcctrtgtgatttgtgtaaagctccaaactgttctctctagtatgtgtgatatgcagtagggagaggccagtacatttcagtaaaattgcaaggacagtttcagc

SEQ ID NO: 294317 - DNA, 201 bp, Homo sapiens
aaagagggttgttggatttctttcggcagaggtgtctgtgctgcatcaatcagttatggtccaggaaatatagtcacaacaaagcatacacgtgaccaccaggggcgcatccctgcatatcagggagtattcccagagaagggaagttgacacaaaccggattgcctctccagtggtgtgcaccacaaaaccagactggag

SEQ ID NO: 294318 - DNA, 201 bp, Homo sapiens
gggatgaaattgaacaagtctcagaaaggcaggaattggcacagctcttgggacctcagtggcaggagtttgtgaaccctttcttcaggacattggagacycactgcccttcagactctctccccattgacattttaaatccccataaaagagggttgttggatttctttcggcagaggtgtctgtgctgcatcaatcagt

SEQ ID NO: 294319 - DNA, 201 bp, Homo sapiens
agtagctgggattacaggcatgcaccaccacgcccggctaattttgtatttttagtagaaatggggtttctccatgttggtcaggctggtctcaaactccygacctcaggtgatccgcccgccttggcctcccaaagtgctagtattacaggtgtgagccaccgcatctggccgggaaatattttttaaaaatttcttgaa

SEQ ID NO: 294320 - DNA, 201 bp, Homo sapiens
tttatattttggtggacaaaaatacaaactattcccagctccatgtgagtgcaggaattgtttggcctattgctttctgatggatcttttccccagcctcygctagtttcttttcatgcgtatagaaatcagtacccttcccaaagttcaaagggacccttcagcagatctctaaagctctctcatcgcaccgcacctccc

SEQ ID NO: 294321 - DNA, 201 bp, Homo sapiens
tcagtttgatttatagctttccagattagcatgtgtgtgcatgactttgtcattttaccttttttttttttttttttttgagaaagagtcttgcttttttgcccaggccggaatgtggttgcaggatcttgactcaccgcaacctccgcctcccaggttcaagcaattctcctgcctcagcctcccgagtagctgggatta

SEQ ID NO: 294322 - DNA, 201 bp, Homo sapiens
ccagcctctgctagtttcttttcatgcgtatagaaatcagtacccttcccaaagttcaaagggacccttcagcagatctctaaagctctctcatcgcaccscacctccctgctcctgtacactgcccaacaaattctagcccccgcagcctccccagctctgatctcaactgaccactctccactccaatctcagatgtcc

SEQ ID NO: 294323 - DNA, 201 bp, Homo sapiens
cactacaagataaccagtgttttcagtttgatttatagctttccagattagcatgtgtgtgcatgactttgtcattttaccttttttttttttttttttttgagaaagagtcttgcttttttgcccaggccggaatgtggttgcaggatcttgactcaccgcaacctccgcctcccaggttcaagcaattctcctgcctca

SEQ ID NO: 294324 - DNA, 201 bp, Homo sapiens
agttgtgagagattccctaggccagcagtgctgatgcaagaaggtgaacatgtagactgctgtattctgtacacacacacacacacacacacacacacacmgtcccctccctcctgggaaagcaaaagttgttgttgttttttgagacagagtctcgctctgttgcccaggctggagtgcagtggcacgcggttttggctc

SEQ ID NO: 294325 - DNA, 201 bp, Homo sapiens
gaaaaaaaaaaccaaaaaatacctgacctacagtgagcaaacagtgtcacctataataaatttaaaacttttttattgtggtaaatatatataacaaaattaatcatttttcggtacaattcagtggcattacatacatccagtgctgtgcaaccatcaccactatccatttatagaaccttttcatcatctcagaaaata

SEQ ID NO: 294326 - DNA, 201 bp, Homo sapiens
tctctacaaaaaaataaaataaaatacaaaaattacccaggcatggtggcttatgcctatagtcccagctacttgaggtgctgagacaggaggatcacttkagcctggcaggcggagattgcagtgagctgagatcacaccactccagcctgggtgacagagtgagtccctgactcaaaataaataaataaataaataaat

SEQ ID NO: 294327 - DNA, 201 bp, Homo sapiens
cattgatcattttaaaagatgagcaaaggaaagactgcttcttttttaaaaaagaaaatttgatgacttactgttagaacacatttccacatggacccccygcttctaaatgggtgtatatccagatcatccagtctgtgtgcacagagtccttgcatttctaagttcaaaatagtaatttaaatgaaagtaggccatcat

SEQ ID NO: 294328 - DNA, 201 bp, Homo sapiens
tatcagaacagagtgacttaaaacaacaaaaatgtctagtctcataattctgtgggttataagtttggggtctaggtgtcagcagggccatgctgtctgaygctctggagaaaccttcctagcttctggtgtcgacagcaatccatgacgttccctggcttatagcacatcactccaccacacggctgtcttcctgtgtgt

SEQ ID NO: 294329 - DNA, 201 bp, Homo sapiens; identical to SEQ ID NO: 60687

SEQ ID NO: 294330 - DNA, 201 bp, Homo sapiens
aaaactacatggaattctctcacgtaaagaaaccaaaacgttttagagacggatgtgtcatgttttagatacaaataaagacctgttgccatatatctgartatttacatcagtcatgggactgaagatattaaattaaaaggctagaattttgcatctacttttaaggtgtctttacaaaaaacaaatgatcgtgtacac

SEQ ID NO: 294331 - DNA, 201 bp, Homo sapiens
aatcttgcacgtaatgaaattgcccttataccccataaatttacataaataaaagatcatgtcatctgttaaaaaattttttaataaagtaactcagttamatttatggtatgtcaccatttcttggcaggactttgtgtcattgtatcaagattttgaaaacttttatacaaggaatctgtacatgaggataagagacaa

SEQ ID NO: 294332 - DNA, 201 bp, Homo sapiens
aaatattttatggtgaaatggaaaaaaacgaaacagaactgattagatagaatggagatagaggagatttactgtcttttttccattcctttttacttagkattattttgttttctctcaccgtgactttccaggtaaagagtgtgtacaacagttagctgaaaacaccaggtatttcaggagacgcctgaaagagatggg

SEQ ID NO: 294333 - DNA, 201 bp, Homo sapiens
tctgaaggtttcctcagaacaccctccccatccttctcagttccagctctccaagtcccgctcatcttccaagatctgtctcattgcacatcttcctcgcwagccttctccagagtcattcagctcactccctaagcttcagttaaatcccttagccctgcttccatccagattcctgccctgaaaactttctacctggtt

SEQ ID NO: 294334 - DNA, 201 bp, Homo sapiens
caatacaatatcttaacattttttaaaagttgttttcatttttaattaaagcgatgtgcttgtgctccaacctctacctatctttcccctctttctggggsggaaatgttgccaactgtgccatcaaaaatacgcatacagctgtgtgtcatgcttttactaaaatatgaatttagagtataacattgttgagatgtaaat

SEQ ID NO: 294335 - DNA, 201 bp, Homo sapiens
aatgactcactgggattagagatacagtttgattctgtatttttcgataaacacacagaagctaacttaatggcagggtatttaacatgagacactggtcrttttataaggaagctaatgaactgagttagccaccaccgtcctttagtcaagtttcgatggttttgaacatttgttacattttggatttcaattcaaggt

SEQ ID NO: 294336 - DNA, 201 bp, Homo sapiens
atctgcttaccatgtagttagcactgttctaactgcttttcattaaattctcagaacaagtattaaatgttagacattattttccctcttttacaaaaggrggaagctgagaggttaaggaaacaaagaggttaagttgcttacccaaggacacatagttactagtgttggagccagtttgaactcatggatccagttcca

SEQ ID NO: 294337 - DNA, 201 bp, Homo sapiens
tggctgtgaaccaaaggatagaaaaataatactctgggagatcattaaagtacaatatatttgtgcttttggtttttttagtacaatttttaatatttttkagataaaactgtttcatagccacatttgtgtccccctaatttgttctggtacataagcttcttgtgtgtgcattttaaagatttggtgaaattaaaagat

SEQ ID NO: 294338 - DNA, 201 bp, Homo sapiens
acattccatcctgagatggacaaacatccaaaccatgtcagtgaatatattacatttatcattaaaactttgttattgttggattccagagtacattaagkacctggtattgaaagtaaggcttaaacatgtatatgtggttgcttattgttaaatgttttcatctttttgtgtgaagaaatgttgctctttggtgagagt

SEQ ID NO: 294339 - DNA, 201 bp, Homo sapiens
gtgtgaagaaatgttgctctttggtgagagtacagagccttcagaaaagctgcagcatgtaagggaaggtgagatccagtttccacacgactttgtgagcrctcctttccccttcctcccaactttttccgcatttcccctccagtttctatccttttcccaaggaagaacaggacatatgactaggttgacagatcttga

SEQ ID NO: 294340 - DNA, 201 bp, Homo sapiens
agtgtgtacaacagttagctgaaaacaccaggtatttcaggagacgcctgaaagagatgggcttcatcatctatggaaatgaagactctccagtagtgccyttgatgctctacatgcctgccaaaattgggtacgttttgttgcagatcacagaccagtctgtccttatccttatctgtgatgtgagaccagggcttatgt

SEQ ID NO: 294341 - DNA, 201 bp, Homo sapiens
ggggtctaggtgtcagcagggccatgctgtctgatgctctggagaaaccttcctagcttctggtgtcgacagcaatccatgacgttccctggcttatagcrcatcactccaccacacggctgtcttcctgtgtgtcaaacattgtcgtcttctggccgggcacagtggctcatgcctgtcatctcagcactttgggaggcc

SEQ ID NO: 294342 - DNA, 201 bp, Homo sapiens
aaatattgcttttgttgctaataaaaatttgtctgtaaggaaatatttctcttaatattggagttaatactttgaacattaatgtgcagtgtttagaaagrttataaagaaatgagattggccgggcgccgtagctcatgcctgtaatctcagcactttgggaggctgaggcaggcagatcctttgaggtcaggagttcaa

SEQ ID NO: 294343 - DNA, 201 bp, Homo sapiens
agtggtagatatgctgtgtgggagatgcagagttgaacaataggtgatctttgcctttgaaaaaacagtccagtggtaggggtaagattcccgggaagaastagtctcagaggcacagataaattcttcctttgttcagcttgtcttttctcaatttcctcctccattctcttctacaacctcctccttcactcactccca

SEQ ID NO: 294344 - DNA, 201 bp, Homo sapiens
cagtgaatgcaagaattgtctctacttatctgcctctgtgaactccccaggagctgatagactacctgcgaacacattctcatagtgcagtgtatgccacrtcattgtcacctcctgtagtggagcagatcatcacctccatgaagtgcatcatggggcaggatggcaccagccttggtaagtctttcttttcttgaaaca

SEQ ID NO: 294345 - DNA, 201 bp, Homo sapiens
atcctactggctctgacagacctctactttgtcttgtgtattttaggctttaaaggagatagatgaagttggggacctattgcagctgaagtattcccgtyatcggttggtacctctactggacaggccctttgacgagacgacgtatgaagaaacagaagactgagcctttttggtgctccctcagaggaactctccctc

SEQ ID NO: 294346 - DNA, 201 bp, Homo sapiens
tcggtcagggcacagcagggatgacttgtctttgctctgttgtctggggctggcctggaagactcaagtgtctggaaagactgagatggttggtggttggratcatctggaagcttttccactcacatgtcacctgggctggagtgacttggagccaggctcagctgaggctgttgaccagagcaccttcatgcatgtatc

SEQ ID NO: 294347 - DNA, 201 bp, Homo sapiens
gtacagagccttcagaaaagctgcagcatgtaagggaaggtgagatccagtttccacacgactttgtgagcactcctttccccttcctcccaactttttcygcatttcccctccagtttctatccttttcccaaggaagaacaggacatatgactaggttgacagatcttgaaaggcaacttcactaggatctcaggtgag

SEQ ID NO: 294348 - DNA, 201 bp, Homo sapiens; identical to SEQ ID NO: 60685

SEQ ID NO: 294349 - DNA, 201 bp, Homo sapiens
ataagcaatgctgaacatcaggaattgtagatatccgtacagagagttccagtaaaattttatgagtccacgaccccttttctaagcagtctggtccatgytggtctcatacctcatatgcaggattcattcattcattaaatatttgtttcataccttgtttgtaacacttctgtctgccttctaaatgtatcctcagtc

SEQ ID NO: 294350 - DNA, 201 bp, Homo sapiens
gtgagaaaatgaaacatggtaattatatataggctttggatcagcacaagttttctagtttttgcctctagccacccccaaagcttagtgatgtgacacarcagccatctgattatgctcacagatgccacaggtcaagaattcggtcagggcacagcagggatgacttgtctttgctctgttgtctggggctggcctgga

SEQ ID NO: 294351 - DNA, 201 bp, Homo sapiens
cccacagataaacagaacatgatactaaaactacatggaattctctcacgtaaagaaaccaaaacgttttagagacggatgtgtcatgttttagatacaamtaaagacctgttgccatatatctgaatatttacatcagtcatgggactgaagatattaaattaaaaggctagaattttgcatctacttttaaggtgtctt

SEQ ID NO: 294352 - DNA, 201 bp, Homo sapiens
taagcacagtagattaaaagaacagttcattgttagttatttctcagggttctagggattggcaagcacagttgggtgcttcttacccaaggttcctctcmcggttgcactcagtggtggctgtatggctggagacatgaagccttcttcattcgcatgtttcacctaggctgcggtggctggagctctgtgtggcctctc

SEQ ID NO: 294353 - DNA, 201 bp, Homo sapiens
attttaattcagcggaagatttcagattgttccaatttgattcagagaactgacaaccctggaagttatgaaaactttccaaatacttattactgtaagcmcagtagattaaaagaacagttcattgttagttatttctcagggttctagggattggcaagcacagttgggtgcttcttacccaaggttcctctcacggtt

SEQ ID NO: 294354 - DNA, 201 bp, Homo sapiens
cccactcccctaaaaccttaaacttccttaaaccagctaagtttttgaagcaaactcatattttagatttcttatataataactttctatataaatgaaayttttctgtggatactgtcactctagtaaattatcagcaatcaaagcagcttcttgattattttttaaagcagcttcttgattattgagcacaaaaggcct

SEQ ID NO: 294355 - DNA, 201 bp, Homo sapiens
tgttacattttggatttcaattcaaggtggcaataattcacctattttgccctgcttttttctgcccaactctaattatgtcctttgctatctgaggcatsgtttctgaatgagaaatatatctctgcatttccggaataaagttaggaaagaggaagatgccgtataactgttcttttttgtgctctgtagatatgcaaa

SEQ ID NO: 294356 - DNA, 201 bp, Homo sapiens
acatgtggagttagctgtagcaccataaatgcaagagaattcttaatttaaattaatataaatcaacatattctttcatttgtttatgatagactataaartactgtcttatcaggagataaggcaggctagcagttgacttggtaatatttagagatgtagtaaccaaagcaaaatgtaatattcccctgcttagaaatt

SEQ ID NO: 294357 - DNA, 201 bp, Homo sapiens
gtgagctgtcaattttaactttaaaaggagttaaaggaaactcctattagaagtctccaatgcctgcatcaccaaagagttgaaatctttgaggacagcargtcctctgtaatgagtgctttttcactcctcctggtttctgttcttgttttcccctttgcagcgcctttggacgggagatgctgaagcggaacatcggtg

SEQ ID NO: 294358 - DNA, 201 bp, Homo sapiens; identical to SEQ ID NO: 60697

SEQ ID NO: 294359 - DNA, 201 bp, Homo sapiens
tgtggaaggaatatataggtaatcctgctttattattcttacctttgtgacttggccccatgaagtcatagaattttttaactgaagggaacattagtctrtccccctctggaaactaaggagacagtgtttataagtcgctaaaatacctggaaacagagtcagcattagaacagaagtctttttgtctagttcttcgtt

SEQ ID NO: 294360 - DNA, 201 bp, Homo sapiens
aaccatgcatcactggttctgggagccagactgtcaggagcaaccattagaatcttcaaacacaacagtgagtttgctgaagaattcactgctggccttgrttttgctattctttcgatccatggtgggagttaacattagttatattagcacttgaaagtataaatgaagacaaagtagcaacatttaaaatgttcttcc

SEQ ID NO: 294361 - DNA, 201 bp, Homo sapiens
gctgagattataggtgtgagccaccgcacccagccacccaggctggtctcagactcctgaccacaagcatcctcctgcttcagcctaccaaagtgctgggrttacagccactgtagcagactattttgtgataatttctaagtacagtgaaatatgcggttgtactgatactatgggtgtgatccagtcttactccaaaaa

SEQ ID NO: 294362 - DNA, 201 bp, Homo sapiens; identical to SEQ ID NO: 60692

SEQ ID NO: 294363 - DNA, 201 bp, Homo sapiens; identical to SEQ ID NO: 60694

SEQ ID NO: 294364 - DNA, 201 bp, Homo sapiens
ttgatgagctagatgctgtgttaaggagttatgaaacaatcacacattgctgtttagtgatgacagtagacacacagttttcacaatagtaacagttgaamaatagagcagtaatttttcctctctgctattcagatgagtgggaggagcacaaacctttatttgaggtaaggtgtggcaatttgcccgagggaaactttt

SEQ ID NO: 294365 - DNA, 201 bp, Homo sapiens
tttacaacttggaggacaagattttcatttcagttttcactctaaggggaagcatatcttgattcttacatagctgcatctgaagaattccagagttattygaggtactcaggaattttctttaacaggaattcttgggaaatgtgtaagcagctatgttcttaagatagtattttagaactaggatgttcagaaaagtca

SEQ ID NO: 294366 - DNA, 201 bp, Homo sapiens
gccgaggcgggtggaacacgaggtcaggagatcgagaccatcctggctaacacggtgaaaccccgtctctactaaaaatataaaaattaggcgtagtggcwggcgcctgtggtcccagctactcgggaggctgaggcaggagaatggcgtgaacccgggaggcggagcttgcagtgagccgagattgcgccgatgcactcc

SEQ ID NO: 294367 - DNA, 201 bp, Homo sapiens
catttcagtaaaattgcaaggacagtttcagcagaactgattttaaggagcaacagaaacatagcacttgaaaatgaatagggttcgtttaatggacaaarcatgataacagttctttgattgctgaagaataatgggtggttcacattagacattaagtttttaaaaataaagttccaaaccattcaccagctgggcagg

SEQ ID NO: 294368 - DNA, 201 bp, Homo sapiens
tttatattccaaatcaaactataattgaaatattattaaatattgtttaatctgttaaagacagtaacttatccagttttaatgatcctttgaatctgatactgaatttccatgtgaggtggttaattgctcagtttgatggcagggtggggcagtatattgattaagagcataggttctggaagcagacacttgtcttat

SEQ ID NO: 294369 - DNA, 201 bp, Homo sapiens
atttatattccaaatcaaactataattgaaatattattaaatattgtttaatctgttaaagacagtaacttatccagttttaatgatcctttgaatctgatactgaatttccatgtgaggtggttaattgctcagtttgatggcagggtggggcagtatattgattaagagcataggttctggaagcagacacttgtctta

SEQ ID NO: 294370 - DNA, 201 bp, Homo sapiens
tattaccagtaacaggaatgagagagggggacatcactacacgtcctatggacattaaaggataataagggagtattaagaacaacttcatgccaaaataytcaacaacttagataaaatacacaaaattccttgtaagacataaatgtatggttctttgacttcacgttataatacgttgctgtcctgcattttgaagta

SEQ ID NO: 294371 - DNA, 201 bp, Homo sapiens
gatgataaatgcaaaaattaatgaattagaaaatagacaataggaaaattagtgaaaccaaagctgattctttgagaaaatgaatatagttgataaatctstggccagaatggtcaggataagaagagataaggtgcatattaccagtaacaggaatgagagagggggacatcactacacgtcctatggacattaaaggat

SEQ ID NO: 294372 - DNA, 201 bp, Homo sapiens
aaggaatattcaacctgtattagaaaaaaagtaaagcagccagactccatcttaaaaaaaaaaagtaaagcttgtagcttaaaaaattagaaaaagaaaaacaaattaaacccaaactaagcagaaggaagaatataatgatgataaatgcaaaaattaatgaattagaaaatagacaataggaaaattagtgaaaccaaa

SEQ ID NO: 294373 - DNA, 201 bp, Homo sapiens
taaggaatattcaacctgtattagaaaaaaagtaaagcagccagactccatcttaaaaaaaaaaagtaaagcttgtagcttaaaaaattagaaaaagaaaaacaaattaaacccaaactaagcagaaggaagaatataatgatgataaatgcaaaaattaatgaattagaaaatagacaataggaaaattagtgaaaccaa

SEQ ID NO: 294374 - DNA, 201 bp, Homo sapiens
ataaggaatattcaacctgtattagaaaaaaagtaaagcagccagactccatcttaaaaaaaaaaagtaaagcttgtagcttaaaaaattagaaaaagaaaaacaaattaaacccaaactaagcagaaggaagaatataatgatgataaatgcaaaaattaatgaattagaaaatagacaataggaaaattagtgaaacca

SEQ ID NO: 294375 - DNA, 201 bp, Homo sapiens
gaactctgaaacacatctggtcccaagcattttgaataaggaatattcaacctgtattagaaaaaaagtaaagcagccagactccatcttaaaaaaaaaaagtaaagcttgtagcttaaaaaattagaaaaagaaaaacaaattaaacccaaactaagcagaaggaagaatataatgatgataaatgcaaaaattaatgaa

SEQ ID NO: 294376 - DNA, 201 bp, Homo sapiens
gaaattgataacacaaagatatctggaaaacctttgaatatttgaaaattaaacaatatatttctaaataacccatgggccaaagaagaaaaaacaggggraaataaacatattttgaactaaatggaaatgtaacctattatagtttgttggatgaagctaaagcaatgctcagatggaaatgtatagcattaaacgttt

SEQ ID NO: 294377 - DNA, 201 bp, Homo sapiens
gtactttggcctggatcccgaggatgtggatgttatgatgggaacgttcacaaagagttttggtgcttctggaggatatattggaggcaagaaggtaaacragccatgagaatgagcgattagagataaagtcactggcaattagatttggtacctcaggcctagcagatggggccctgaactgggatgtccgcaaatttg

SEQ ID NO: 294378 - DNA, 201 bp, Homo sapiens
tgtttctcttgggtttatacttactagtggaattgctaggtcatatggtaactctgtgtttgactttttgaggaattgctaaactgttttccaaagagacygtactgttttacaatctctccatcgatgtatgagggttcctattcatttttatatcatcttccagtcatcttgtttgtagcccaactttaacccttgatt

SEQ ID NO: 294379 - DNA, 201 bp, Homo sapiens
tcacctagagaggcctcttctccctctggaattttaattctgctagtcctctttgctatgcatagaagacagctcttcaatctttaaagccatttatttakttgaataatctatttagttttatctagttgttactgtgaaagcactagcttgcctctctctattaaagctaacctggaagtctcattattttttgaattt

SEQ ID NO: 294380 - DNA, 201 bp, Homo sapiens
aaatccctgacttgtccattacacaatcttgcacgtaatgaaattgcccttataccccataaatttacataaataaaagatcatgtcatctgttaaaaaawtttttaataaagtaactcagttaaatttatggtatgtcaccatttcttggcaggactttgtgtcattgtatcaagattttgaaaacttttatacaaggaa

SEQ ID NO: 294381 - DNA, 201 bp, Homo sapiens
agggtttgcccatgtgccatagaaatttgcaccgctttgagcaagacagttaattggttgatttaattagattcagtttttggaagaaagaagcagtgttyattggtagaataggcaattcagagggatgggtagaggcactgtttgcattctgagtgggtgtgccatacttgattaaataaatggtttgtggactcaaag

SEQ ID NO: 294382 - DNA, 201 bp, Homo sapiens
tgggagttatttatatcctactgctcaaggtcatcgccagggtctgattttgcaattcaaaaaattgtaacctctggcataaatgggttattaacagagcktcaaagtacgtgaagcagagattgatgaaactaaaagaagtagacaaatagaaaattgtaattagagacattaacccctctctctctttttttttttttt

SEQ ID NO: 294383 - DNA, 201 bp, Homo sapiens
acttttcaccttggagaggctcgcgtgtcagttggcgtgcccatctgcctccctgtatcatcagtcactctgttttgacagaagccacattccaaagtcayttcttttcacaggttctgaaggtggaaaaaaagaaaccccagccacttcctagttgaacctaaattctttaaaatacatttaattttgaataaggctttg

SEQ ID NO: 294384 - DNA, 201 bp, Homo sapiens
gagcaagaaatatttctggtgataaagaggaacattgtgtaatgattaaggaattaattcatcaagaggttataattttaaatgtgtaggtgcttatcccwtttatgcctaatgttccattattggaacgctaagcatgtgggagttatttatatcctactgctcaaggtcatcgccagggtctgattttgcaattcaaaa

SEQ ID NO: 294385 - DNA, 201 bp, Homo sapiens
tgatcctgcctgtgtgggtgtgcctgaaatcaaggcggatatctttaaaagagacccacccatagcattcctgacctgtaaactcgctgcatgttggattragactgcggtgggtgggctctgtaatttccaggctttttaatgatgtgtacagttgagagtaaatagtttaaataatttcatagttagggagagttcagc

SEQ ID NO: 294386 - DNA, 201 bp, Homo sapiens
aaaaatacagcatgcaaataataatcagaagaaatgtgaagtgcctgtattaatataaacaaagatttcagagcaagaaatatttctggtgataaagaggaacattgtgtaatgattaaggaattaattcatcaagaggttataattttaaatgtgtaggtgcttatcccttttatgcctaatgttccattattggaacgc

SEQ ID NO: 294387 - DNA, 201 bp, Homo sapiens; identical to SEQ ID NO: 60683

SEQ ID NO: 294388 - DNA, 201 bp, Homo sapiens
aaaaaatacagcatgcaaataataatcagaagaaatgtgaagtgcctgtattaatataaacaaagatttcagagcaagaaatatttctggtgataaagaggaacattgtgtaatgattaaggaattaattcatcaagaggttataattttaaatgtgtaggtgcttatcccttttatgcctaatgttccattattggaacg

SEQ ID NO: 294389 - DNA, 201 bp, Homo sapiens
aaaaaaatacagcatgcaaataataatcagaagaaatgtgaagtgcctgtattaatataaacaaagatttcagagcaagaaatatttctggtgataaagaggaacattgtgtaatgattaaggaattaattcatcaagaggttataattttaaatgtgtaggtgcttatcccttttatgcctaatgttccattattggaac

SEQ ID NO: 294390 - DNA, 201 bp, Homo sapiens
atttaaacccacctgtgttgataaacattaaatataaatggtttgtacattccaatgagaagacaaagattgtcggataaaattaagtaggtttcctaatrtaaaatagcaacctattttaaatatgaagacacagaggttaaaaggaaaaggatagaaaaaaaatacagcatgcaaataataatcagaagaaatgtgaag

SEQ ID NO: 294391 - DNA, 201 bp, Homo sapiens
ttggtactctcatcctgaaaggccccttgaggttatttattctcatgtttaacatgacacttaggaatggtatattgaaaacgtggtggattaactcaagyaggagaattgagtttttgttttttggttgtttatatggtcacacttagctgtgtgactgtgagcatgtcaaataatctttctgatcctccaagtttcttt

SEQ ID NO: 294392 - DNA, 201 bp, Homo sapiens
tcttggattcaagcgattctcctgcctcagcctcccaagtagctgggactacagctgtgtgccaccacgcctggctaattttttgtatttttagcagaggyggggtttcaccatgttggccagcctgggcaacatagtgaggcctcgtctcaatttgattttattttttaaattaaaaacaatttgtggccaggcgcagtg

SEQ ID NO: 294393 - DNA, 201 bp, Homo sapiens
ctggctgggcatctctgtttctctttctctctgtctccccctctccttacgtctttctctcctccttccatagtctcttatccctcagttcccatccccccgcccatgttctgtttttgcaacaggccagttagattgttttacatagcagctgacttcaaaagtgtaaaagcagattttgctaggcctcctaaggcctag

SEQ ID NO: 294394 - DNA, 201 bp, Homo sapiens
attctgcaatttagggagggcctgatgttatcttagctccatgtggtattggataggcaattatgactgtgtacagggtatccaagatgtcttaactcacrtttgacacttcagctgggtggcaggaagggctaagggctggctgggcatctctgtttctctttctctctgtctccccctctccttacgtctttctctcct

SEQ ID NO: 294395 - DNA, 201 bp, Homo sapiens
gtattgggttggggtaggtgtgttgattttgagagtgcatgttaagaactgaaggggaactacttgagatgacttaagaagcatcccatgcaaatatcttkttttgccctaataaaatattcagaaagatatatctgcctttattcattcaaccaatacatattgagtgctatctctctgatgggcagcacactgagcttt

SEQ ID NO: 294396 - DNA, 201 bp, Homo sapiens
taaaacaccaggcatgcctgcatcctactggctctgacagacctctactttgtcttgtgtattttaggctttaaaggagatagatgaagttggggacctaytgcagctgaagtattcccgtcatcggttggtacctctactggacaggccctttgacgagacgacgtatgaagaaacagaagactgagcctttttggtgct

SEQ ID NO: 294397 - DNA, 201 bp, Homo sapiens
tttagtagatacggggtttcactgtgttagccaggatggtctcgatttcctgacctcgtgatccgcctgcctcggcctcccagagtgctgggattacaggygtgagccactgcacctggccggtatgattttttaaaatgaaaaaggaagtcaagagaaaggtgttcacacttcagcgttgctttgtgttcaaatgcttct

SEQ ID NO: 294398 - DNA, 201 bp, Homo sapiens
cccagagtgctgggattacaggcgtgagccactgcacctggccggtatgattttttaaaatgaaaaaggaagtcaagagaaaggtgttcacacttcagcgktgctttgtgttcaaatgcttctttcaatccctatgagttatgttcagatttagtaggaaatcaaggacctttctcccataatctctaacaatttagcatt

SEQ ID NO: 294399 - DNA, 201 bp, Homo sapiens
caggcgtggtgatccgcacctgtaatcccggctacttgggaggctgaggcaggagaattgcttgaacccaggaggtggaggttgcagtgagctgagattgygccactgcactccagcctgggcgacagtgcgagactctctctctcaaaaaaagaaaaaaagctcaaacgtattatctcttttgatcctcacaacaatgtc

SEQ ID NO: 294400 - DNA, 201 bp, Homo sapiens
tgggtgtgcctgaaatcaaggcggatatctttaaaagagacccacccatagcattcctgacctgtaaactcgctgcatgttggattgagactgcggtgggkgggctctgtaatttccaggctttttaatgatgtgtacagttgagagtaaatagtttaaataatttcatagttagggagagttcagcactggtattaaaca

SEQ ID NO: 294401 - DNA, 201 bp, Homo sapiens
accagcctggccagcatggtgaaaccctgtctctactaaaaatacaaaatagtcaggcgtggtgatccgcacctgtaatcccggctacttgggaggctgargcaggagaattgcttgaacccaggaggtggaggttgcagtgagctgagattgcgccactgcactccagcctgggcgacagtgcgagactctctctctcaa

SEQ ID NO: 294402 - DNA, 201 bp, Homo sapiens
aagcaaaaagttttcatctatgagatcaaaagtaaagtagcttggtttttgtgtattaaaatccaagtatcccaaaggttaaagcaagggataatcttacratgtttgggaatgaatacttaagatgaagggggacagaaaaattcatgtcagttactaacaatttttccccttgttttgggtttcactttctttttactt

SEQ ID NO: 294403 - DNA, 201 bp, Homo sapiens
ccatgcctatctgaatgcctgtcctttgtcacatacaactgtgtctttccgaactattccagtctgtaacactgaagcagctttccaaaactaacattacsgggataggatattctaaaatatctttaccccttggatatgtataacaattgattgtatagttatgtaaattttattaatttgtttttatttgtttatatc

SEQ ID NO: 294404 - DNA, 201 bp, Homo sapiens
aaaaaaaaccaaaaaatacctgacctacagtgagcaaacagtgtcacctataataaatttaaaacttttttattgtggtaaatatatataacaaaattaatcatttttcggtacaattcagtggcattacatacatccagtgctgtgcaaccatcaccactatccatttatagaaccttttcatcatctcagaaaataatt

SEQ ID NO: 294405 - DNA, 201 bp, Homo sapiens
caaggtgtgtggatctcttgaggtcaggagtttgagaccagcctggccagcatggtgaaaccctgtctctactaaaaatacaaaatagtcaggcgtggtgrtccgcacctgtaatcccggctacttgggaggctgaggcaggagaattgcttgaacccaggaggtggaggttgcagtgagctgagattgcgccactgcact

SEQ ID NO: 294406 - DNA, 201 bp, Homo sapiens
tggtctcaaactcctgggctcaagttatctgcccaccttggcctcccaaagtgctaggattacaggcatgcgccactgcacccagcctggaccacacttayataaacatcttagttttttgcatgatttacttgtgttatcactaccaacaaaggttaatttgaactacgtgtttctgcaggggcctactgctgataatta

SEQ ID NO: 294407 - DNA, 201 bp, Homo sapiens
cattaaaattgaccaagaagcaaaaagttttcatctatgagatcaaaagtaaagtagcttggtttttgtgtattaaaatccaagtatcccaaaggttaaarcaagggataatcttacaatgtttgggaatgaatacttaagatgaagggggacagaaaaattcatgtcagttactaacaatttttccccttgttttgggtt

SEQ ID NO: 294408 - DNA, 201 bp, Homo sapiens
aaaaaaaaaccaaaaaatacctgacctacagtgagcaaacagtgtcacctataataaatttaaaacttttttattgtggtaaatatatataacaaaattaatcatttttcggtacaattcagtggcattacatacatccagtgctgtgcaaccatcaccactatccatttatagaaccttttcatcatctcagaaaataat

SEQ ID NO: 294409 - DNA, 201 bp, Homo sapiens
aggatacattatgcctttatggcatttgatattttataaagtgctcggctggatgcggtggctcacgcctgtaatcccaacactttgggaggccaaggtgkgtggatctcttgaggtcaggagtttgagaccagcctggccagcatggtgaaaccctgtctctactaaaaatacaaaatagtcaggcgtggtgatccgcac

SEQ ID NO: 294410 - DNA, 201 bp, Homo sapiens
ctgccagaggctggtgaataggcagtggcacatagaatcgcgctggtgccgacccagcactgaggtctgcaggggcttgcctcctacgctggtgcaaagcrtggcccctgccatccagctgttgtatgtgcttctcactggcagaccctacatcacatccgcaacccgatcacaagggtgtccaggaaatacagtttttag

SEQ ID NO: 294411 - DNA, 201 bp, Homo sapiens
aaaaaaaaaaccaaaaaatacctgacctacagtgagcaaacagtgtcacctataataaatttaaaacttttttattgtggtaaatatatataacaaaattaatcatttttcggtacaattcagtggcattacatacatccagtgctgtgcaaccatcaccactatccatttatagaaccttttcatcatctcagaaaataa

SEQ ID NO: 294412 - DNA, 201 bp, Homo sapiens
agtttctaactggcactccagaaatgacaagccttgtgatctaatcctgtggttaaaggagcattgtgcagtggcgacatatagtaaggatacattatgcytttatggcatttgatattttataaagtgctcggctggatgcggtggctcacgcctgtaatcccaacactttgggaggccaaggtgtgtggatctcttgag

SEQ ID NO: 294413 - DNA, 201 bp, Homo sapiens
actctatactaaaaaacatttaactgtgtgctttaaatgggtgaattttatggcacgtgatatatatctcaataaagctgtttaaaaaatcacctggtgaygtgaatccattggtcaaaaataaaataaagagaaaaaaaaaaccaaaaaatacctgacctacagtgagcaaacagtgtcacctataataaatttaaaact

SEQ ID NO: 294414 - DNA, 201 bp, Homo sapiens
ttttccattttcattaattgtgttcagaattacagatgtccactaattaataaaaaattgagcttttagcttttatttcttggttatccagttgttttgtratgattttcaagaggaagatgggagtagaacatttttatttccccctgcctttaaaacagagtttctaactggcactccagaaatgacaagccttgtgat

SEQ ID NO: 294415 - DNA, 201 bp, Homo sapiens
caggcggagattgcagtgagctgagatcacaccactccagcctgggtgacagagtgagtccctgactcaaaataaataaataaataaataaataaataaawaaaatgttttgcaagcataccttctgagtacagttacactttgccttattcttagattttacatgttacacatatttttggttctgtgaacagattatat

SEQ ID NO: 294416 - DNA, 201 bp, Homo sapiens
agcatcatccttctgtatattttccattttcattaattgtgttcagaattacagatgtccactaattaataaaaaattgagcttttagcttttatttcttsgttatccagttgttttgtgatgattttcaagaggaagatgggagtagaacatttttatttccccctgcctttaaaacagagtttctaactggcactccag

SEQ ID NO: 294417 - DNA, 201 bp, Homo sapiens
attgctaggaagaggttactcttgatagatgaatgtgctgcttttggtaagaattagtttgttatttatatttaaattttgtaggccgggcctggtggctyaaacctgtaatcctaccattttgggaggccaagacgggtggatcacttgagcccaggagttcaagaccagcttgggcaacatggtgaaaccctgtctcta

SEQ ID NO: 294418 - DNA, 201 bp, Homo sapiens
caagtcctctcgtctagctatttgaaatatacaatacattgtttttaactatagtcaccctactctgctatcaaacattagaacttatttcttctaactcwatatttgtacccatttaccagcttttcttcatctcccccgctccccctacctcatctcaacacacatccttccagtattgttttactcgctacctccatg

SEQ ID NO: 294419 - DNA, 201 bp, Homo sapiens
ccccccactttagagctgttcaaagaaagtgaccattgatcattttaaaagatgagcaaaggaaagactgcttcttttttaaaaaagaaaatttgatgacytactgttagaacacatttccacatggaccccccgcttctaaatgggtgtatatccagatcatccagtctgtgtgcacagagtccttgcatttctaagttc

SEQ ID NO: 294420 - DNA, 201 bp, Homo sapiens
ctggccccaccatctaattttaaatattttcattcctcctaaaagaaatgctatactcagtagcattcattggatactgtttcccttccccctacaagtcmttggcaaccagtagtctactttttgtctttatagatttgcctattttggacattaaatataaaaggaattgtataacatttggtcttttctgtctggctt

SEQ ID NO: 294421 - DNA, 201 bp, Homo sapiens
cgtgccactatgcctggctactctttgtatttttagtagagacggggtttctccatgttggccaggctggtgtggaactcctgacctcaggtgatccaccygccttggcctcccaaagcactgggattacagtcttgagccactgcacctggcctagatattcttagatatattcatgatgcatcccatctagatgcttgt

SEQ ID NO: 294422 - DNA, 201 bp, Homo sapiens
caccatgcctggccccaccatctaattttaaatattttcattcctcctaaaagaaatgctatactcagtagcattcattggatactgtttcccttccccctacaagtccttggcaaccagtagtctactttttgtctttatagatttgcctattttggacattaaatataaaaggaattgtataacatttggtcttttctg

SEQ ID NO: 294423 - DNA, 201 bp, Homo sapiens
ttagttaggacttacgggaaacatgttgttaaaatcaatctgtcctgttagctaatatttcttttattttcattttgagcttttagataagattctttatstttctgtgagataatgtgaaaaaaaacacaaaagaaataaattcaaataccagtatactctggtttttaaaaatatcttcactgactttttttttcttta

SEQ ID NO: 294424 - DNA, 201 bp, Homo sapiens
caaattacttagtacataacctacaaatggccttgcccactataaagttgttaaaatgtttagtattaaccgttttgtaaaactctgattgtcttattgtrttgccttctacctctaaaactgttaacttaaatccaagccaagcctttaccagagattacctttatttgctagctgtcttcatctgtgggtagatacatt

SEQ ID NO: 294425 - DNA, 201 bp, Homo sapiens; identical to SEQ ID NO: 60681

SEQ ID NO: 294426 - DNA, 201 bp, Homo sapiens
attctaatattaagccactgattattttaaaacaatcagattaagttgtagtacctctgaaataattaaaggaaaatttgattcttagaaaatctcaattyattggaaagccatggaattaataaaataaaaaaagaaaatctcaggcaatataaactaaggaatggcaaatggaaaatgtattgattggtggaaaagtaa

SEQ ID NO: 294427 - DNA, 201 bp, Homo sapiens
ctaaaataatgttacagacataagtaagaaatggattgtggtgacacataagctgttaaagaaacccatagcctaatttatagtgtatcaggtttgcaagyggtttaaaacaatagcggtttactgaatgttcttactagcgtgaggggagagcttgtgagaagtaggaagaggccagagaaggtcctggggtctggcaca

SEQ ID NO: 294428 - DNA, 201 bp, Homo sapiens
tacatactctgctggttgacaaaaactagctccctaaaataatgttacagacataagtaagaaatggattgtggtgacacataagctgttaaagaaacccrtagcctaatttatagtgtatcaggtttgcaagcggtttaaaacaatagcggtttactgaatgttcttactagcgtgaggggagagcttgtgagaagtagg

SEQ ID NO: 294429 - DNA, 201 bp, Homo sapiens
tttttatatctatttatttagatagctagatacatggatatatagatagattgatgcatagatggatgcagggtctctgttgcccaggctggagtgcggtrgtgcagtcagctcacttcagcctcaaacttcggtactccagccatcctcccacctcagcctcctaagtagttaggactataggtgcacgccaccatgccc

SEQ ID NO: 294430 - DNA, 201 bp, Homo sapiens
tttctagtgctcagatcatgcctagctcatagcagggactcaataagtattgaatgaataactttaatgttttatttaatggaaaaaagatctaaagcatrtaagctaaatcttaagttttgataaagctagatgttgaatacagttttatttctatttttttgatgataattactgtgtcatatttcatacatactctgc

SEQ ID NO: 294431 - DNA, 201 bp, Homo sapiens
ttccaaatacttattactgtaagcacagtagattaaaagaacagttcattgttagttatttctcagggttctagggattggcaagcacagttgggtgcttyttacccaaggttcctctcacggttgcactcagtggtggctgtatggctggagacatgaagccttcttcattcgcatgtttcacctaggctgcggtggctg

SEQ ID NO: 294432 - DNA, 201 bp, Homo sapiens
tccatctgcttacaccttacctccaccctgtttaaaatgctctttttccacgattttattctgattgtagcagtgtgatctgatacagtatatctatttgyttatctgttgtctgcctctctcacaggagtgtatttctagtgctcagatcatgcctagctcatagcagggactcaataagtattgaatgaataactttaa

SEQ ID NO: 294433 - DNA, 201 bp, Homo sapiens
gcaggattattgctcaaactggattctgcaagaatggagaaggaggcgcaacgtcaggactttatcagaaaggactccaagaggagcctgactcaagtttsgtcaaaggagagagtctttgtcaggttcagaatgacctcattaacatgaactctttaagcccctgttctcagactttgtccatggaccacctgcatcaga

SEQ ID NO: 294434 - DNA, 201 bp, Homo sapiens
attggtttccttacatattcttcattgttgagctttttaagatatatctttctattacatttgatactgtgttggattatagttcagaagaaaatttggcwtatttattttttgagatggagtttcgctctgtcacccaggctggagtgcagtggcgtgatctcagctcactgcaacctccgcctcccaggttcaagcaat

SEQ ID NO: 294435 - DNA, 201 bp, Homo sapiens
ccctggggccttattattattattattattattattattattattattattattttgagatggagcctcaatctgtcacccaggctggagtgcagtgatgygatctcggctcactgcaacctccgcctccaagttcaaatgattctcctgtctcagcctcccaaagtgctggaattacaggcgtgacctaccacgcctggg

SEQ ID NO: 294436 - DNA, 201 bp, Homo sapiens
aggatttacagccaaggaacagggtgggagtgagtagatagaaaaatactaagaggaaacatcaggggtaagggggatgcttgccttcagcattcttgttraaggtaggccagggtgataagataccaggggtagtcatgtaggggattttctctaatctgacttagcaggattattgctcaaactggattctgcaagaat

SEQ ID NO: 294437 - DNA, 201 bp, Homo sapiens
ccttaactaaagtcacttcacagtgaccaaactgaggaggaggaagagagtggtggagatgggggaatgagggtcggaatagtggggctatcactctttgyggagagaactgtcttgttctttaacgtatcctgaaagtctggcatacaacccagtatgtatcgagtactcactaagatatatttgaatgaatgaatgaaa

SEQ ID NO: 294438 - DNA, 201 bp, Homo sapiens
tccgggctttctgatgttccccaaacacattgccatcaagcacccctccctggggccttattattattattattattattattattattattattattattttgagatggagcctcaatctgtcacccaggctggagtgcagtgatgcgatctcggctcactgcaacctccgcctccaagttcaaatgattctcctgtctc

SEQ ID NO: 294439 - DNA, 201 bp, Homo sapiens
ctgaccaacatggcgaaaccctgtctctactgaaatacaaaaaaatttagccaggcatggtggcgcatgcctgcaatcccagctacttgggaggctgatgsaggagaatggcttgaacctgggaggtggagattgcagggagccgagatcacgccattgcactgcagcctgggagacaagagtgaaactcccatctcaaaa

SEQ ID NO: 294440 - DNA, 201 bp, Homo sapiens
gaactcctgagacttcaagtgatcttcccacccacccacctcggcctcccaaagtgctgggattacaggtgtgagctaccacacccggcccctatatcctrttttatagtgtttcttgtttattattttctctttggatttgtttcattttgatccttgaaaatatgcaaaggatggaatcttaattttggaattgttttt

SEQ ID NO: 294441 - DNA, 201 bp, Homo sapiens
atccgggctttctgatgttccccaaacacattgccatcaagcacccctccctggggccttattattattattattattattattattattattattattattttgagatggagcctcaatctgtcacccaggctggagtgcagtgatgcgatctcggctcactgcaacctccgcctccaagttcaaatgattctcctgtct

SEQ ID NO: 294442 - DNA, 201 bp, Homo sapiens
cgcctgtaatcccagcactttgggaagctgaggcgggtggatcacctgaggtcaggagtttgagaccagcctgaccaacatggcgaaaccctgtctctacygaaatacaaaaaaatttagccaggcatggtggcgcatgcctgcaatcccagctacttgggaggctgatggaggagaatggcttgaacctgggaggtggag

SEQ ID NO: 294443 - DNA, 201 bp, Homo sapiens
aatcagtgggttcttcaagtactttattgtaacattgcttgaatagttgaatgttaagccagaatgaccaaattatggaaccaaattaactagataggtayattttaatagatacatttttaaataatgtcagaacgctttatagagttttgtacttctttgttttgaaaggaactgggtccttgcaggcagctactgatg

SEQ ID NO: 294444 - DNA, 201 bp, Homo sapiens
cagattcctggccacaagcgatccttccaccttagcttcccgaagtgttggggttacaggcatgaaccattgtacctggcctctttttttttttttttttttcttttttaaaaaattcctttctaaagggaaaagaacctaaggtgggtggcttcctataaccatttttttttttttttgatatggagtctcattctgttg

SEQ ID NO: 294445 - DNA, 201 bp, Homo sapiens
aatccgggctttctgatgttccccaaacacattgccatcaagcacccctccctggggccttattattattattattattattattattattattattattattttgagatggagcctcaatctgtcacccaggctggagtgcagtgatgcgatctcggctcactgcaacctccgcctccaagttcaaatgattctcctgtc

SEQ ID NO: 294446 - DNA, 201 bp, Homo sapiens
gtttgaagctagcaattaggatgcccagtgtctattgtttgttgaagaataattctaactttctaaaccttcacataattggaattgcttttctcccccccagaattatgtctgagggctttatttttcatcaaatagacttgatcctagctgttccccaactttatagcagatacttaatatgtataaaccagtgacctg

SEQ ID NO: 294447 - DNA, 201 bp, Homo sapiens
atgcagtggcacatgcctggagtcccagctactcaggaggctgaggcacgaggatcgcttgagcccaagagtcctgggctgtagcacactgtgccagagaygtgtctgcaccaagttcagccatcagtatgatgacctcccagaagtaggggaccaccaggttgcctaaggaggggtgaattggcccaggttggaaacgaa

SEQ ID NO: 294448 - DNA, 201 bp, Homo sapiens
tcagattcctggccacaagcgatccttccaccttagcttcccgaagtgttggggttacaggcatgaaccattgtacctggcctctttttttttttttttttttcttttttaaaaaattcctttctaaagggaaaagaacctaaggtgggtggcttcctataaccatttttttttttttttgatatggagtctcattctgtt

SEQ ID NO: 294449 - DNA, 201 bp, Homo sapiens
tgttggtcaggctggtctcagactcctgacctaagtgatccatccgcttcggccttccaaagtgctggaattacaggcgtgaaccactgtgtctagcaccrcgttatttataatagccaaaaagtagaaacaatccaaatgtctatcaactgatgagtagataaaatatggtatatccatataaaaggatattattcagca

SEQ ID NO: 294450 - DNA, 201 bp, Homo sapiens
gcaggcggatcacctgaggtcgggaattcaagaccagtctgaccaacatggagaaaccctgtctctaataaaaatatgaaaattagctgggtgtggtggcrcatgcctgtaatcccagcactttgggaggccaaggcaggcggatcacctgaggtcgggaattcaagactagcctgaccaacatggagaagccctgtctct

SEQ ID NO: 294451 - DNA, 201 bp, Homo sapiens
aaattagctgggcatggtggcagagtcctgtaatcccagctacttgggaggctgaggcaggagagtcgcttgaacctgggaggcagaggttgcagtgaggygagatcacaccattacactccagcctgggcaacaagagtgaaactctgcctcaaaaaaaaaaaaaaaaaaaaaagagagatggtatcaggtactgcaaat

SEQ ID NO: 294452 - DNA, 201 bp, Homo sapiens
ttggaaaaaaaaaaaaaatacttgtttccgccgggtgcgatggctcacacctgtaatcccagcactttgggaggccgaggcaggcggatcacctgaggtcrggaattcaagaccagtctgaccaacatggagaaaccctgtctctaataaaaatatgaaaattagctgggtgtggtggcgcatgcctgtaatcccagcact

SEQ ID NO: 294453 - DNA, 201 bp, Homo sapiens
gcaggtcactaaggccatcccggattgaaggggtggggaactagattccacctccccagtggaggcatgtcaaagaatttgtggctggtttttttttttttgagatgcagtctcaaggagaagtaccatgcttttttaaacaaccagatcttgggagaactcagagcgagaactcactcattacccaaggatggcagcaag

SEQ ID NO: 294454 - DNA, 201 bp, Homo sapiens
aattagccaggtgtggtggcgggcacttgtaatctcagctacttgggaggctgagacaggagaatcacttgaacctaggaggcggaggttgcagtgagccragatcacaccattgcactccagcctgggtgacagagtgagactctgtctcaaaaaaaaatttttttttttaattaaaaaaaagaaatgagataatcagta

SEQ ID NO: 294455 - DNA, 201 bp, Homo sapiens
tatacacacatatatatacatacagctagcatttctctaggtacttcacataggcacacttaccttactgattcagcacacaggtttaggtgactaagaartggctaagagctatcaaagttaacattggataatttatttgccctgttccagaacatggatctgtgtgacacattacccccagataaatgacttatctgt

SEQ ID NO: 294456 - DNA, 201 bp, Homo sapiens
ggagttcaagaccagcctgaccaacatggtgaaacactgtctctgctaaaaaatacaaaaattagccaggtgtggtggcgggcacttgtaatctcagctasttgggaggctgagacaggagaatcacttgaacctaggaggcggaggttgcagtgagccgagatcacaccattgcactccagcctgggtgacagagtgaga

SEQ ID NO: 294457 - DNA, 201 bp, Homo sapiens
ggtttctccgtgttggtcaggctggtctcgaactcccgacctcaggtgacctgcctgccttgacttcccaaaatgctgggattacaggcgtaagccaccgygcccagtcgactgttttcttaaatcagaattttaccttaacattttttctgatctgtgctagatccttgttatctctaatgagagatttttggaaatagt

SEQ ID NO: 294458 - DNA, 201 bp, Homo sapiens
ccatgttggtcaggctggtctcagactcctgacctaagtgatccatccgcttcggccttccaaagtgctggaattacaggcgtgaaccactgtgtctagcmccgcgttatttataatagccaaaaagtagaaacaatccaaatgtctatcaactgatgagtagataaaatatggtatatccatataaaaggatattattca

SEQ ID NO: 294459 - DNA, 201 bp, Homo sapiens
cacgcccagctaattttttatatttttagtagagatggggtttcaccatgttggtcaggctggtctcagactcctgacctaagtgatccatccgcttcggmcttccaaagtgctggaattacaggcgtgaaccactgtgtctagcaccgcgttatttataatagccaaaaagtagaaacaatccaaatgtctatcaactga

SEQ ID NO: 294460 - DNA, 201 bp, Homo sapiens
cgttgcccaggctggggtgcagtgtggctcactgcaacctccaccccactggttcaagcagttctcctgcctccgccttccgagtagctgggactacaggyacatgccaccacgcccagctaattttttatatttttagtagagatggggtttcaccatgttggtcaggctggtctcagactcctgacctaagtgatccat

SEQ ID NO: 294461 - DNA, 201 bp, Homo sapiens
cctgggctcaagcgatccacccgccttgagcccaaagtgctgggattacggcgtgagccactgcgcccagccatgcctatcaaatctttctgctgaacctrctgactgagatcagagctactaccctggagcttagctaaggagtaaaggggagctgagatttcggccgtaagtccctctctcctaccattctatgccacc

SEQ ID NO: 294462 - DNA, 201 bp, Homo sapiens
tttttttttggcgagatagggtctcgctccagcctggcctgcagtagcacagtcatagcttactgcggcctcaacttctcgggctcaagcgatcctcccayctcagcctcccaagtagctgggtccacaggtgtgcaccactacagtgggctaatttttttttttgagacagagtcttgctctgtcacccaggctggagtg

SEQ ID NO: 294463 - DNA, 201 bp, Homo sapiens
ccacacccggctaattttgtatgtttagtagagaccgggtttctccgtgttggtcaggctggtctcgaactcccgacctcaggtgacctgcctgccttgayttcccaaaatgctgggattacaggcgtaagccaccgcgcccagtcgactgttttcttaaatcagaattttaccttaacattttttctgatctgtgctaga

SEQ ID NO: 294464 - DNA, 201 bp, Homo sapiens
gggattacaggcgtgagccaccacgcctagccggaggtttgttttttaatgtggtctattgtaaatccatctgctactttccgttaatttcttttctttctttttttttttttttttggcgagatagggtctcgctccagcctggcctgcagtagcacagtcatagcttactgcggcctcaacttctcgggctcaagcgat

SEQ ID NO: 294465 - DNA, 201 bp, Homo sapiens
gtttttgagacagagtcttgctctgtctcccgggctggagtgtagtggtgcgatctcagctcacagcaacctccgcttcccaggttcacatgattctcctstttcagcctcccaagtagctgggaccacaggagtctgccaccacacctggccattttttttgtattttttgtagagatggggtttcaccatgttgcccag

SEQ ID NO: 294466 - DNA, 201 bp, Homo sapiens
gcctggtatgtcataaatactcagtagatgggcactcttgctgctgttgtgattattcatcatctttatcatcatcatgtaaacatatttgactatctgtrttggaccagaatgatgcttaacaaagggacagttgttagaaagtggacttcaaaaagtgatagcatccagctttgccccctgtgttcttaatgcctgtat

SEQ ID NO: 294467 - DNA, 201 bp, Homo sapiens
agataatctctgcgttaggtttttttttttttgagacagagtctcactctgtcgcccaggctggagtgcagtggcgccatctcagttcactgcagcctccrcctcccgggttcaagcgattctccagcctcagcctcctgagtagctgggattacaggcatgcgccaccacgcctggctgatttttgcatttgtagtagag

SEQ ID NO: 294468 - DNA, 201 bp, Homo sapiens
ggtttactaataggcagagctggctggtgtgtggtttccatggacacttttttagtgtgtttgatacatatgccatgagaacgaccctggctcactttctrtggaattttcttgtttatagatgggaggctttactcttactatcctacataccctcttaactcagaggtaatataccttcgaggtttttcttgaattaca

SEQ ID NO: 294469 - DNA, 201 bp, Homo sapiens
ctcctgccgtgagtactctgagtgctggcatcacaactgtcgcactgccagaggctggtgaataggcagtggcacatagaatcgcgctggtgccgacccarcactgaggtctgcaggggcttgcctcctacgctggtgcaaagcatggcccctgccatccagctgttgtatgtgcttctcactggcagaccctacatcaca

SEQ ID NO: 294470 - DNA, 201 bp, Homo sapiens
gaagaacaaaaggtaactgttagagagtttttgattctgtaaatagaagccttttatggaaatcttagtatttttgcacaaaagctttttctcagaaattkgggtacacattaaaattaaactattccagatgcagttaaatgaaaacattctacaaagaaagctgaaaaataacaaggttaaagatatcaaagcattcat

SEQ ID NO: 294471 - DNA, 201 bp, Homo sapiens
tttttattgcaaagcttgaggcagctattcttccttttttaaaaaaataatttttacttctcattatagaaataatacatgtttaatgtgggatcataaarcattgagataatctctgcgttaggtttttttttttttgagacagagtctcactctgtcgcccaggctggagtgcagtggcgccatctcagttcactgcag

SEQ ID NO: 294472 - DNA, 201 bp, Homo sapiens
agcaatccaaacaccttgtttaattcagctgtgttcatttatttttaactttttttttttttttttttaagacggagtctcactctgtcccccaggctggrgtgcaatggcgcaatctcagctcactgcaacctccgtctcctaggttcaagcgattctcctgcctcagcctcccaagtagctgggattataggtgcccgc

SEQ ID NO: 294473 - DNA, 201 bp, Homo sapiens
tgtcctagtgagaaagtttttaaaataagtatggcatttaaaagtaatctgtgaaggtctaaatactttatagttttgtagatttaaatttttctcccackttttcctttacttagcaagttttgaataaaagtaaagctgaaataaatttgttccttaaagactgctagagttggtttacttgtcccagttttttttccc

SEQ ID NO: 294474 - DNA, 201 bp, Homo sapiens
caacttggaggacaagattttcatttcagttttcactctaaggggaagcatatcttgattcttacatagctgcatctgaagaattccagagttatttgagrtactcaggaattttctttaacaggaattcttgggaaatgtgtaagcagctatgttcttaagatagtattttagaactaggatgttcagaaaagtcagact

SEQ ID NO: 294475 - DNA, 201 bp, Homo sapiens
ccaggagttcaataccagctgggcaacatagtgagacttcatctctacaaaaaagtaaaaaaattagctgggtgtggtggtggcacatgcctgtagtcccractatgggggaggctgagatgagaggattgcttgagcctgggagatcaaggatgcagtgagccgtgattacaccactgcattgcagcctgggcaacagag

SEQ ID NO: 294476 - DNA, 201 bp, Homo sapiens
ttagggctatgctccttttgagttaattgtataaggtatgaggtttaggtcgggtcatttttttggccagtggatgtcctagtgagaaagtttttaaaatragtatggcatttaaaagtaatctgtgaaggtctaaatactttatagttttgtagatttaaatttttctcccacgttttcctttacttagcaagttttgaa

SEQ ID NO: 294477 - DNA, 201 bp, Homo sapiens
cataatgttgctacttcctcatttcactgagagagtggtattcataaccacatcctggttttcttcctcatttcattataaaagagagcccagtttaactrtgttaattctttgatgtaaggaaataccgtatgttgctttgaatacaactaaatcacatgatcataccaataaagatgagttaccatgagtttgttctat

SEQ ID NO: 294478 - DNA, 201 bp, Homo sapiens
attaccaaatttcttcctgtggatttaacatttgatgaaataaatgccatgttttggttgcacctgaaatatagtagtttgtgtgtttgtttttaaaactycacgttaacagctctttttaaaagagcttccatttctttatagaagttttgagatttaggttttccttttactttcctgagttagttaataagtgtgaaa

SEQ ID NO: 294479 - DNA, 201 bp, Homo sapiens
ttttgcatgtccaccaggaatgtattaaggtttttctgagtcttatagttttatattttacgtttagggctatgctccttttgagttaattgtataaggtrtgaggtttaggtcgggtcatttttttggccagtggatgtcctagtgagaaagtttttaaaataagtatggcatttaaaagtaatctgtgaaggtctaaat

SEQ ID NO: 294480 - DNA, 201 bp, Homo sapiens
ttattattccatgatcttaattaccaaatttcttcctgtggatttaacatttgatgaaataaatgccatgttttggttgcacctgaaatatagtagtttgkgtgtttgtttttaaaactccacgttaacagctctttttaaaagagcttccatttctttatagaagttttgagatttaggttttccttttactttcctgag

SEQ ID NO: 294481 - DNA, 201 bp, Homo sapiens
tgcttgaacccaggaggcgaatgttgcagtgagtctagattgcgtcactgcactccagcctgggtaacagagcaagactccatctcaaaaaaaaaaaaaaagaaaaaagaaaaaatttatcacgttcatcgttgtcaaagtctacatgtacctttgagaaaccaacacacttttccaccttggctgtgccattttgcatgt

SEQ ID NO: 294482 - DNA, 201 bp, Homo sapiens
tatatttacctttaaaaaaattattttttggctgggtgtgatggctcacacctgtaatcccaacacgttgggaggccaaggtgggtggatcgcttgaggtyaggagtttgacaccagcctggtcaacatggtgaaaccccgtctctactgaaaatacaaaaattagcgggatatggtggtgcacacctgtaatcccaacta

SEQ ID NO: 294483 - DNA, 201 bp, Homo sapiens
ctctgtcttttttacgcatttatttccgaatgactcactgggattagagatacagtttgattctgtatttttcgataaacacacagaagctaacttaatgrcagggtatttaacatgagacactggtcattttataaggaagctaatgaactgagttagccaccaccgtcctttagtcaagtttcgatggttttgaacatt

SEQ ID NO: 294484 - DNA, 201 bp, Homo sapiens
atgcatgtcttcagtttcactagatagtgccaaattgttttccaaagttattgtactggtttgtacacctaccggctgtgtttgagaattcttttttttttgagactgagtctcgttctgtcacccaggctggaggagtgcagtggcgtgatctcagctcactgcaagctccgcctcctgggttcacgccattcttctgcc

SEQ ID NO: 294485 - DNA, 201 bp, Homo sapiens
gcattttgtgatttgtgtaactaaccctttcccctccagcttcttacctttctgttcctgtgatgttgcagggttgcctgattctgagtgatgaactgaaycatgcatcactggttctgggagccagactgtcaggagcaaccattagaatcttcaaacacaacagtgagtttgctgaagaattcactgctggccttggtt

SEQ ID NO: 294486 - DNA, 201 bp, Homo sapiens
aggcacccgccaccacgcccggctaattttttgtatttttagtagatacggggtttcactgtgttagccaggatggtctcgatttcctgacctcgtgatcygcctgcctcggcctcccagagtgctgggattacaggcgtgagccactgcacctggccggtatgattttttaaaatgaaaaaggaagtcaagagaaaggtg

SEQ ID NO: 294487 - DNA, 201 bp, Homo sapiens
ctcccaagtagctgggcctacaggcacccgccaccacgcccggctaattttttgtatttttagtagatacggggtttcactgtgttagccaggatggtctygatttcctgacctcgtgatccgcctgcctcggcctcccagagtgctgggattacaggcgtgagccactgcacctggccggtatgattttttaaaatgaaa

SEQ ID NO: 294488 - DNA, 201 bp, Homo sapiens
caggttcacgccattctcctgcctcagcctcccaagtagctgggcctacaggcacccgccaccacgcccggctaattttttgtatttttagtagatacggkgtttcactgtgttagccaggatggtctcgatttcctgacctcgtgatccgcctgcctcggcctcccagagtgctgggattacaggcgtgagccactgcac

SEQ ID NO: 294489 - DNA, 201 bp, Homo sapiens
aagctctacctcccaggttcacgccattctcctgcctcagcctcccaagtagctgggcctacaggcacccgccaccacgcccggctaattttttgtatttktagtagatacggggtttcactgtgttagccaggatggtctcgatttcctgacctcgtgatccgcctgcctcggcctcccagagtgctgggattacaggcg

SEQ ID NO: 294490 - DNA, 201 bp, Homo sapiens
atttaacgggtaggagttagaaaatacatttgcaggtgaatttcattgaggtatgattttttttttgtttttgtttttgtttttttttttcagacagtttygctcttgtcacccaggctggagtgcaatggcgcgatctcggctcactgcagcctccaccccctgggttcaagcgattctcctgccccagcctcccgagta

SEQ ID NO: 294491 - DNA, 201 bp, Homo sapiens
agcctgggttacagagtgagacactgtttctaacaataacaacaacaacaacaacaaatgttgcccaaataaaaattcaaaacgttatagattttttttttactatcttgtctttgatatgcaatattatgtttataatgaaatgtcttgaaatcttttagtagtactatcataccagcaaacagcattagttattattat

SEQ ID NO: 294492 - DNA, 201 bp, Homo sapiens
atcattctcttaactctgccggtggtgagactctaccccaggctccaggttggattaggtggccccttcgaccctttcctgaacacgagtgctatcacacraggggattgtttagcctggtggtgacttgcgatgactctatactaattaaccatgctgaatcatcaaccaagttcaggcagttctaaaatattttgaaaa

SEQ ID NO: 294493 - DNA, 201 bp, Homo sapiens
agaatttgaggctgcagtgagctatgatcatgccacttctctccagcctgggttacagagtgagacactgtttctaacaataacaacaacaacaacaacamatgttgcccaaataaaaattcaaaacgttatagattttttttttactatcttgtctttgatatgcaatattatgtttataatgaaatgtcttgaaatctt

SEQ ID NO: 294494 - DNA, 201 bp, Homo sapiens
cgcctggcccacatttttttaatccagtctactgttgatggacatttagattgatcctatgtctttgctgttgtgaatagtgctacaatgaacatacacawgcttgcatcttgtatgaatttttcctcaacaacatgagattgactgttcctactcactggccaacataggctatggtgaatcattttaaatctttccaaa

SEQ ID NO: 294495 - DNA, 201 bp, Homo sapiens
gggtacttttctctgccccattctgccagaagtgtgtgctgtccccaggggaagcgatgaggggcccttcggactccagtgggagccgcccaagggctccsgagggtcccttctcaaacccctgaggttattgcttccttttaaagtcctgcagtcgtccaaagaaaaccacccatggggtccttaagaagcaaagaaaat

SEQ ID NO: 294496 - DNA, 201 bp, Homo sapiens
ctggagaacctgggaacccgctctagagacttcggctcagccccttttatttcctcacactctaattggctacttttccctgggctccgcctcctcctcgrtctggaccattaaacaggcaagccctaccccggacctggatgcggcctccaatcaggtgccaggccctggagtccctctagagaagccccctctccaccg

SEQ ID NO: 294497 - DNA, 201 bp, Homo sapiens
agccaagcatggtggtgtgcacctgtatgtagtcctggctacttgagaggctgaggtggggagatagcttgagtccaagaatttgaggctgcagtgagctrtgatcatgccacttctctccagcctgggttacagagtgagacactgtttctaacaataacaacaacaacaacaacaaatgttgcccaaataaaaattcaa

SEQ ID NO: 294498 - DNA, 201 bp, Homo sapiens
tctgaattattacttataataattcagaaatagtgaatgtgtggcgcatattgaagaatgatgagagattgtcaaaaaatctattctataaacactcacaraggaatcagctaattaaataagcgagctgcctgtcttgggctaggacataaactccaaaacttcccacgaggcaagggcaaagagggcgccacctgtcct

SEQ ID NO: 294499 - DNA, 201 bp, Homo sapiens
atgctaacgctccattaaacgttttttacattattataacttctgctgttaacaggtagaatgacagaatacaaaatgagacattttacatttatattccrtatggtttactctgtaaaatattttatggtgaaatggaaaaaaacgaaacagaactgattagatagaatggagatagaggagatttactgtcttttttcc

SEQ ID NO: 294500 - DNA, 201 bp, Homo sapiens
tgcctcccacgctccagtgattctcccacctcagcttcttgagtagctgggactagaggcgcacgctaccacaactggctaatttttgtttttttttttttgtagagacagggtttcgccttgttgcccaggttgatcttgaactcctgagctcaagcgatccacctgccttggcctcccaaaatcctgggattataggca

SEQ ID NO: 294501 - DNA, 201 bp, Homo sapiens
gctaacgctccattaaacgttttttacattattataacttctgctgttaacaggtagaatgacagaatacaaaatgagacattttacatttatattccatrtggtttactctgtaaaatattttatggtgaaatggaaaaaaacgaaacagaactgattagatagaatggagatagaggagatttactgtcttttttccat

SEQ ID NO: 294502 - DNA, 201 bp, Homo sapiens
ggcacaatctcagctcgctgcaacctttgcctcccacgctccagtgattctcccacctcagcttcttgagtagctgggactagaggcgcacgctaccacarctggctaatttttgtttttttttttttgtagagacagggtttcgccttgttgcccaggttgatcttgaactcctgagctcaagcgatccacctgccttgg

SEQ ID NO: 294503 - DNA, 201 bp, Homo sapiens
ttttcgataaacacacagaagctaacttaatggcagggtatttaacatgagacactggtcattttataaggaagctaatgaactgagttagccaccaccgycctttagtcaagtttcgatggttttgaacatttgttacattttggatttcaattcaaggtggcaataattcacctattttgccctgcttttttctgccca

SEQ ID NO: 294504 - DNA, 201 bp, Homo sapiens
atcttgaacttctgggcttaagtgatccgcctgcctcagcctcctaaagtgctgggattataggcatgagccactgtgcctgggccagattttttttttttcttttcagagacaggatcttgctctgttgcccagggttgagtgcagtggcacaatctcagctcgctgcaacctttgcctcccacgctccagtgattctcc

SEQ ID NO: 294505 - DNA, 201 bp, Homo sapiens
tgcccaactctaattatgtcctttgctatctgaggcatggtttctgaatgagaaatatatctctgcatttccggaataaagttaggaaagaggaagatgcsgtataactgttcttttttgtgctctgtagatatgcaaagcctagagaagctattgaaagatgccattgtttatggtcagcctcggacacgaaggccctgg

SEQ ID NO: 294506 - DNA, 201 bp, Homo sapiens
aggtcttactctgtcacccaggctgaagtgcagtggcacaatctcagctcactgcagcctcgacctccctgtgctcaggtgatcctcccacctcagcctcyggagttgctggaactacaggcacgtaccaccatgccctgctaatttttgtgttttgttgtagagactgggttttgcccccaggctgatcttgaacttctg

SEQ ID NO: 294507 - DNA, 201 bp, Homo sapiens; identical to SEQ ID NO: 60689

SEQ ID NO: 294508 - DNA, 201 bp, Homo sapiens
ctttcattgagtatttcacctacttttcttcattaagtagagataaaaacagaattattggtttataaaatacttttagaatttataatgctttccttttycctttttcttttctttctttgtgtgtttttttttttttttttttttttttttttttgagacaaggtcttactctgtcacccaggctgaagtgcagtggca

SEQ ID NO: 294509 - DNA, 201 bp, Homo sapiens
tatgtgatacctagaataagcatagaaacagaaagtagattagtagttgccggaggcggaggggatagggaaatggaaagtgaatgctaatgggtatgagrtttcctttcagggttatggaaatgttctaaaattagtggtaaaagtggcacaactctggatatactaaaaaccactgaattgtgctttaaaacggtgaat

SEQ ID NO: 294510 - DNA, 201 bp, Homo sapiens; identical to SEQ ID NO: 60691

SEQ ID NO: 294511 - DNA, 201 bp, Homo sapiens
agaatctgtggtgtggtcgaaatggtgaaccataaagacagaggcctgggtctgaatatttctcggcttactttgttagacctcagggaaaacatttaacytcccagtttccttgtcagtaaaatggagataaatatgcccagcttgtaagattgtagtaagggtttaaaaagtaatatatgtccatgctacaacgtgggt

SEQ ID NO: 294512 - DNA, 201 bp, Homo sapiens; identical to SEQ ID NO: 60693

SEQ ID NO: 294513 - DNA, 201 bp, Homo sapiens
agttgtgccagctgtggggtactacaaagcattgtatttttcaatttttaaactatgaagttgccttttctgggtctttgtagtcagaaaaaaatcatacrgtgaattttgatgcaggtaagaatctgtggtgtggtcgaaatggtgaaccataaagacagaggcctgggtctgaatatttctcggcttactttgttagac

SEQ ID NO: 294514 - DNA, 201 bp, Homo sapiens
caagactctgtctcaaaaaaaaaaaaaaaaaaaaaaaaaaaaaagttgctgggttcgttggcttacgcctataatcccagcactttgggaggccaaggtgrtggatcacttgaggttgggagttcaagaccagcctggccaacatggtgaaaccccatctctactaaaaatacaaaaattagctgagcatgatggcgggca

SEQ ID NO: 294515 - DNA, 201 bp, Homo sapiens
ttgcttgaaccttggaggtggaggcctcagtgaggagagatcacaccattgcactccagcttggatgacagagggagactccatctcaaaaaaaaaaaaaagattttatgataggatgtctcccacccctattaagtattccccagacttaatgttgcttaaatttgggggagttttttttaaggacttcatttcagggca

SEQ ID NO: 294516 - DNA, 201 bp, Homo sapiens
taccgctgttgtgatagcacattgacgttcagctcttatttgcttttatatttttcacattttgaaatgaagaatattttttcttgtgctacaatacatcmgtaatactggtggttttctctctccaaacactgattttttaaaaaaatgaagtttaagatgccaggtgtggtggctcatgcctgtaatcctaacactttg

SEQ ID NO: 294517 - DNA, 201 bp, Homo sapiens
gtcaatgagaaaagaatagtctcttcaacaaacagtactaggtcagctggatgcagaagagtgaagttttaaccctacagcatggataaaccttgaaaacrttaggctaaatgaaagaagccaaaacaaagactacgtaacttacaattccatttataagagatgtccagaacaggcaaatcatagggtcagaaaatagat

SEQ ID NO: 294518 - DNA, 201 bp, Homo sapiens
accatgttggttgaccttgtatctcagattagtgtccctattccagtgccattgaagtgaggagtcctctagaacttagaaggaaaggactgacattgccrgtgaatgcaagaattgtctctacttatctgcctctgtgaactccccaggagctgatagactacctgcgaacacattctcatagtgcagtgtatgccacgt

SEQ ID NO: 294519 - DNA, 201 bp, Homo sapiens
tctcagatgtcctcagctggcaagactgggccctccttccctgtgcagcagcctgcaacctgccttcaggcagcacagtctggcattccccgtggttcaawgtctaaaagtcattgtttatgtactttgtccagtttcctattgtttacagcaggaagataaatccagcctctagtactccatggccagaagaagtctcat

SEQ ID NO: 294520 - DNA, 201 bp, Homo sapiens
tagtgccagtgttaggtttgcaagagtttccctgttacctgttttccctgtttttcatgccaggaaagcttttccttcaaatagtcccatggctagttccytcacttccattttatcctctgttctacccagggcaccccagctaatttgcagcatgtctccccctttcctttttgcttttgtttctgttggtatttgtca

SEQ ID NO: 294521 - DNA, 201 bp, Homo sapiens
ccacaatttaattttgtaatgtttttctcttctgaaaaagaaaccatgaaccattagcagtcactccttcctcatccaccctccccaccctcggcagccamtaatctactttctgtctctgtagatttactattcgggacttttcatataaatggatgtttcatgtaaatgggatcatacagtgtatgttcttctgtgtct

SEQ ID NO: 294522 - DNA, 201 bp, Homo sapiens
agtgagccaagatcacaccattgcactccagcctgggcaacaagagagaaactccgtctaaaaataaataaaatacatacatacatacatacatacatachgaagagcactacttagctcccccagaatcatctgaacctgggaggtggaagttgcagtgagctaagattgcaccactgcactccaccctggacaatggag

SEQ ID NO: 294523 - DNA, 201 bp, Homo sapiens
tcacttgaaccagagaggtggaggttgcagtgagccaagatcacaccattgcactccagcctgggcaacaagagagaaactccgtctaaaaataaataaaatacatacatacatacatacatacatacagaagagcactacttagctcccccagaatcatctgaacctgggaggtggaagttgcagtgagctaagattgca

SEQ ID NO: 294524 - DNA, 201 bp, Homo sapiens
cgccactgcactcctgccttggcgacagagcaagactctgtctcaaaaaaaaaaaaacaaaaaaactggaggctttgagtcaggacgtaatttacttctgyagggaacatctcctgaatcttgattaggtcgtatgcagatttttttcttagaaattactgaatgtgtaagcacagtcacaaccttagactatcttatttg

SEQ ID NO: 294525 - DNA, 201 bp, Homo sapiens
aatcacttgaaccagagaggtggaggttgcagtgagccaagatcacaccattgcactccagcctgggcaacaagagagaaactccgtctaaaaataaataaaatacatacatacatacatacatacatacagaagagcactacttagctcccccagaatcatctgaacctgggaggtggaagttgcagtgagctaagattg

SEQ ID NO: 294526 - DNA, 201 bp, Homo sapiens
atcacttgaatccaggaggcggaggtttcagtgagcagagatcacgccactgcactcctgccttggcgacagagcaagactctgtctcaaaaaaaaaaaaacaaaaaaactggaggctttgagtcaggacgtaatttacttctgcagggaacatctcctgaatcttgattaggtcgtatgcagatttttttcttagaaatt

SEQ ID NO: 294527 - DNA, 201 bp, Homo sapiens
caagcatctatggccaatttgttttcaacaagggagccaagaccagtcaatgagaaaagaatagtctcttcaacaaacagtactaggtcagctggatgcaraagagtgaagttttaaccctacagcatggataaaccttgaaaacattaggctaaatgaaagaagccaaaacaaagactacgtaacttacaattccattta

SEQ ID NO: 294528 - DNA, 201 bp, Homo sapiens
cggcggctcacgtctataatcctagcactttgggaggccaaggcgggcggatcacctgaagtcaggagttgagaccagcctgaccaacatggtgaaacccsgtctctactaaaaatacaagaattatctggggcgtggtggcacatgcctgtaatccctgctacttgggaggctgaggcacgagaatcacttgaaccagag

SEQ ID NO: 294529 - DNA, 201 bp, Homo sapiens
gctgcatcacccaggctggagtgaagtagcagaaccacaactcaccacagccttgacctcctaggttcaaatgattctcctgcctcagtctcctgagtagstaggactgtaggcatccaccaccatgccggactagtgttttttattttttatagagacaaagtctcgctgtgttgcccaggttggtcttgaactcttagg

SEQ ID NO: 294530 - DNA, 201 bp, Homo sapiens
ctggtgaatttctgtgatgattttttttaacctagagatttcagcttttctttccttcctactctattgatgttttaagaattttcttttttctttctcaygttcacctgttaactcagaatttcaatgtgcctttaaaaaaaagtctgtgtaactataaccagtgtctatggcagtaatccatgccttctgaccacaact

SEQ ID NO: 294531 - DNA, 201 bp, Homo sapiens
aagaacacaactggctgggcacggcggctcacgtctataatcctagcactttgggaggccaaggcgggcggatcacctgaagtcaggagttgagaccagcytgaccaacatggtgaaaccccgtctctactaaaaatacaagaattatctggggcgtggtggcacatgcctgtaatccctgctacttgggaggctgaggca

SEQ ID NO: 294532 - DNA, 201 bp, Homo sapiens
caccatgttgcccaggctggtcttgaactcctgggctcaagcaatccacccaccttggcctcccagtactgggattataggcataagccaccacgcctggyccacatttttttaatccagtctactgttgatggacatttagattgatcctatgtctttgctgttgtgaatagtgctacaatgaacatacacaagcttgca

SEQ ID NO: 294533 - DNA, 201 bp, Homo sapiens
agaagactgctttaggattgactttaaaagtatttgtgagctgtcaattttaactttaaaaggagttaaaggaaactcctattagaagtctccaatgcctgcatcaccaaagagttgaaatctttgaggacagcaagtcctctgtaatgagtgctttttcactcctcctggtttctgttcttgttttcccctttgcagcgc

SEQ ID NO: 294534 - DNA, 201 bp, Homo sapiens
gattgattgtttggtttgtcttctttaattctgtgtatgattctacatttaaaaagaacacaactggctgggcacggcggctcacgtctataatcctagcwctttgggaggccaaggcgggcggatcacctgaagtcaggagttgagaccagcctgaccaacatggtgaaaccccgtctctactaaaaatacaagaattat

SEQ ID NO: 294535 - DNA, 201 bp, Homo sapiens
ggataaatttctagcagtctcagaatgcatggttaaaagagtatacatttttaatacttttccaaattgcctctaagcattatatgaacttttttttttttcacttttattttaggttcaggggtacatgtacaggtttgttatataggtaaattgcatgtctcgggggtttgtgtacagattatttcgccacccaggtaa

SEQ ID NO: 294536 - DNA, 201 bp, Homo sapiens
catataggagaagactgctttaggattgactttaaaagtatttgtgagctgtcaattttaactttaaaaggagttaaaggaaactcctattagaagtctccaatgcctgcatcaccaaagagttgaaatctttgaggacagcaagtcctctgtaatgagtgctttttcactcctcctggtttctgttcttgttttcccctt

SEQ ID NO: 294537 - DNA, 201 bp, Homo sapiens
agttgcagtaagctgagatcttgtcacagcactccagcctgggcaatagagactgtctcaaaataaaaaaaaaaaagtagcgtactaagaatattctggtmcctgtcattttggtgcattaagctaggggattgattgtttggtttgtcttctttaattctgtgtatgattctacatttaaaaagaacacaactggctggg

SEQ ID NO: 294538 - DNA, 201 bp, Homo sapiens
aggataaatttctagcagtctcagaatgcatggttaaaagagtatacatttttaatacttttccaaattgcctctaagcattatatgaacttttttttttttcacttttattttaggttcaggggtacatgtacaggtttgttatataggtaaattgcatgtctcgggggtttgtgtacagattatttcgccacccaggta

SEQ ID NO: 294539 - DNA, 201 bp, Homo sapiens
cgaagtcctgacctcatgatcagcctgcctcggcctcccaaaatgctggaactacagacgtgagccactgcgccaggcagcagaagtttttgacgatttcyagacaatgtgtgtaaagacctttagagtctaaagttaatgtttgcattttgcagtcttaggcagatacaatgaggtataaaacacctctatccaaacaac

SEQ ID NO: 294540 - DNA, 201 bp, Homo sapiens
ccaagcttaacatttcaaggaccagattttaattaaatacaggttcattttgaagcctctgaaccactattacatatcagggacactttttttttttttttgagacagagccttgctctgttgctcaggctggagtacagtcgtgtgatcttgccttactacagcttctgcctccaagcttcgagagattctcatgcctca

SEQ ID NO: 294541 - DNA, 201 bp, Homo sapiens
ataccacattctcacttattttttaatttttttaattttttttttttttgagatggagtctcactctgtcgcccaggctggagtacagtggcgtgatctcrgctcactgcaatctccgcctccacggttcaagtgattctcttgcctcagcctcccaagtagctggaattacaggcatgcaccaccacgcccagctaattt

SEQ ID NO: 294542 - DNA, 201 bp, Homo sapiens
gggacggagtttcactgtgttggccagactggtcttgaactcccgacttcagttgatcctcccgccttggcctcccaaagtgctgggattacaggtgtgarccatcatgcctggcctctttttacaatacacggtgattgttgtttgtcattacatgtaactctatctcattcttaaataccagtgtggcagttagtgcct

SEQ ID NO: 294543 - DNA, 201 bp, Homo sapiens
agatcacttgaggttaggtgttcgagaccagcctggccaacatggcgaaaccctgtctctactaaaaatacaaaagttagctgggcgtggtgatgtgcacycgtaaccccagctatcaggaagctgagacaggagaatcgcttgaacccgggaagcagagattgcagtgagccaagatcgtgccgttgcactccagcctgg

SEQ ID NO: 294544 - DNA, 201 bp, Homo sapiens
actcgatgactatagtgtatcttgccataagactaacagtatttaagtgaataaatcaagatctctgactggttaacgaagagacttaatagataagccartccttacaatatagtggacaggtgctgaagtacagctatgaatagatgctgtgggagcacagaggagggtggccctgagccagacctttcctccctcagt

SEQ ID NO: 294545 - DNA, 201 bp, Homo sapiens
aacccacatattataagatctttatattttggtggacaaaaatacaaactattcccagctccatgtgagtgcaggaattgtttggcctattgctttctgayggatcttttccccagcctctgctagtttcttttcatgcgtatagaaatcagtacccttcccaaagttcaaagggacccttcagcagatctctaaagctct

SEQ ID NO: 294546 - DNA, 201 bp, Homo sapiens
cagatccgttactcaaatacatttactcgatgactatagtgtatcttgccataagactaacagtatttaagtgaataaatcaagatctctgactggttaamgaagagacttaatagataagccagtccttacaatatagtggacaggtgctgaagtacagctatgaatagatgctgtgggagcacagaggagggtggccct

SEQ ID NO: 294547 - DNA, 201 bp, Homo sapiens
tcttggaatcagtaggatcctttcaaagcttgcttttaaggttagggtgggttcagaccaatttttagtctagggttcatttatctccactactaaggtgwtaggagtagagtccccttctgaggactctgttagataacccacatattataagatctttatattttggtggacaaaaatacaaactattcccagctccat

SEQ ID NO: 294548 - DNA, 201 bp, Homo sapiens
caagaccagcctggccaacatggtgaaaccccatctctactaaaaatacaaatattagctgggcctggtggtgggctcctgtaatcccagctagctgggaygctgaggcaggagaatcgcttgaatctgggaggcagaggttgcaagtgaaccaagatcgcaccactgcactccagcaacaagagcaagactccatctcac

SEQ ID NO: 294549 - DNA, 201 bp, Homo sapiens
acctttttgaacatatagatcatatttataatggcctttaacatccatatctgctaatactccgttatttttggtcggtttttattgactgacttttcccytggttgtacgtcatattttcctgtttctttgaatgcctggaattttaaaattatatgttggacattaattttacattgctagtttctatatcttgttgtt

SEQ ID NO: 294550 - DNA, 201 bp, Homo sapiens
tttctccatgttggtcaggctgatctcaaactcccgacctcaggtgatctgcccacctcagcctcccaaagtgctggaattatacagacatgagccaccgygcccggccagctttgacttttgtcttaaattattacatcttgtcacagaggtcaggtgaataaatggtcgatgggttctcccagcttaatttcagactta

SEQ ID NO: 294551 - DNA, 201 bp, Homo sapiens
tgttacagcatattgatcttttatatctattccttccttcctgagaataagatttattgtaaagaggttgaagactaaaaatgacctgttaaagttatctrcattttccaagaaattaactacatatttacttttctctgtctcttccatgccaagctgtagatttttttacagtagagttcctaaaaatagttttattct

SEQ ID NO: 294552 - DNA, 201 bp, Homo sapiens
cattaaacgttttttacattattataacttctgctgttaacaggtagaatgacagaatacaaaatgagacattttacatttatattccatatggtttactstgtaaaatattttatggtgaaatggaaaaaaacgaaacagaactgattagatagaatggagatagaggagatttactgtcttttttccattcctttttac

SEQ ID NO: 294553 - DNA, 201 bp, Homo sapiens
aaattttaaactaacattttgcctccacagcttgttcatgatcagatatttaaaaacgggaggaccaaataccacattctcacttattttttaattttttwaattttttttttttttgagatggagtctcactctgtcgcccaggctggagtacagtggcgtgatctcggctcactgcaatctccgcctccacggttcaag

SEQ ID NO: 294554 - DNA, 201 bp, Homo sapiens
ttttaaatagagacagcgtctcgccatgttgcccaggctggtctcaaactcctgtgctcaagcgatcctcctgccttggcctcccaaagtgttgggattayaggagtgagccaccatgaccccaagggcagtttttgatcaggggatttttcatacagcttgtgcagctggtgctcaaagtgtgatgaatgaatgaaacca

SEQ ID NO: 294555 - DNA, 201 bp, Homo sapiens
ctgattgtggtgcagacagcacattcctggatgaggggatagtataggcaaaggcatgaagaatgtttgggagaatctggaatgtagacagaagagaaatygtgttttgaaaatcaaagtaagaagtttggtaggcaatgaggagtattgtttttgtttttgtttttaaatagagacagcgtctcgccatgttgcccaggc

SEQ ID NO: 294556 - DNA, 201 bp, Homo sapiens
ctcctactagactgagttgatggcagttatgaccgctggtagctgaagttttatttaaatattcaaactaaaaactctttatctgcagggacctctcctartgtagatgcatagtcgaaacttgataattgacgtgtattgctggtggtgagggaagtgctgattgtggtgcagacagcacattcctggatgaggggatag

SEQ ID NO: 294557 - DNA, 201 bp, Homo sapiens
acttgttcacaggcctgtatcctcctactagactgagttgatggcagttatgaccgctggtagctgaagttttatttaaatattcaaactaaaaactctttatctgcagggacctctcctagtgtagatgcatagtcgaaacttgataattgacgtgtattgctggtggtgagggaagtgctgattgtggtgcagacagca

SEQ ID NO: 294558 - DNA, 201 bp, Homo sapiens
tgcgatggatcagttgagggtcaggagttttagaccagcctggccaacaaagtgaagccctgtctctactaaaaatacaaaaaattagccaggcatggtgrcacttgcctgtaatcccagctactcaggaagctgaggcaggagaatcgcttgagcctgagaggcagagattgcagtgagctgagatcgcaccactgcact

SEQ ID NO: 294559 - DNA, 201 bp, Homo sapiens
gtctgttctaagtcacacctatctaggagggcttatggagtttatttcagtaataatatagtagttccttctaaccttaagattacatgcatggctgagawtcttgagaaatttggattaagacttgataaaatattccttttaaaaatgactgaaaagcaattggtacaccttaaatctgtttggcagtgattaatgtag

SEQ ID NO: 294560 - DNA, 201 bp, Homo sapiens
tacttgttcacaggcctgtatcctcctactagactgagttgatggcagttatgaccgctggtagctgaagttttatttaaatattcaaactaaaaactctttatctgcagggacctctcctagtgtagatgcatagtcgaaacttgataattgacgtgtattgctggtggtgagggaagtgctgattgtggtgcagacagc

SEQ ID NO: 294561 - DNA, 201 bp, Homo sapiens
gctaaatagtactagtttaagacaaaaatgtctgctgcctttatattccttactttattacatggatcttttcctggctttcaaaaaaacaaaaaaaaaaagcagtcttgagcgttcagaaaatttatagaacactgtctgttctaagtcacacctatctaggagggcttatggagtttatttcagtaataatatagtagt

SEQ ID NO: 294562 - DNA, 201 bp, Homo sapiens
tgacagcttaccatacccttcctaggttgtacagtattgtagttacttgttcacaggcctgtatcctcctactagactgagttgatggcagttatgaccgmtggtagctgaagttttatttaaatattcaaactaaaaactctttatctgcagggacctctcctagtgtagatgcatagtcgaaacttgataattgacgtg

SEQ ID NO: 294563 - DNA, 201 bp, Homo sapiens
tgctaaatagtactagtttaagacaaaaatgtctgctgcctttatattccttactttattacatggatcttttcctggctttcaaaaaaacaaaaaaaaaaagcagtcttgagcgttcagaaaatttatagaacactgtctgttctaagtcacacctatctaggagggcttatggagtttatttcagtaataatatagtag

SEQ ID NO: 294564 - DNA, 201 bp, Homo sapiens
aagctctgcctcctgggttcacaccattcttctgcctcagcctcccaagtagctgggactacaggcacctgccaccacgcccggctaattttttttttttktttgagacaagtcttgctctgtcgcccaggctggagtgcagtggctcggtctcggctcactgcaagctccgcctcccgggttcacaccattctctggcct

SEQ ID NO: 294565 - DNA, 201 bp, Homo sapiens
ttgaagtataatgctaaatagtactagtttaagacaaaaatgtctgctgcctttatattccttactttattacatggatcttttcctggctttcaaaaaaacaaaaaaaaaaagcagtcttgagcgttcagaaaatttatagaacactgtctgttctaagtcacacctatctaggagggcttatggagtttatttcagtaa

SEQ ID NO: 294566 - DNA, 201 bp, Homo sapiens
atacaatgaggtataaaacacctctatccaaacaactgagttggactgggctgaagatttaagtccttcagttcggtgtagtatcccaagagtgggatccrttgtatgtttgttagaggccactccctctagctttatctgctaagcactgtgagattgtgcttaatttcactttgcttttctagttcaggcctccagcct

SEQ ID NO: 294567 - DNA, 201 bp, Homo sapiens
gcatggttgtctggggaagagggcttcttcattcacttcacttttctctgcatgttcctttgtacctctgaagggttttttgtttgtttgtttgtttgttkattttttgagacagagtctcgctttgtcaacccaggctggagtgcagtggtgcgatctcggctcactgcaagctctgcctcctgggttcacaccattctt

SEQ ID NO: 294568 - DNA, 201 bp, Homo sapiens
taaaagctcatcagctaaactggaaatcatattactactgaagcagctgagtgcatgctctattctttgaagtataatgctaaatagtactagtttaagasaaaaatgtctgctgcctttatattccttactttattacatggatcttttcctggctttcaaaaaaacaaaaaaaaaaagcagtcttgagcgttcagaaaa

SEQ ID NO: 294569 - DNA, 201 bp, Homo sapiens
ttgttttaggaatggcaaacatatgagcatggttgtctggggaagagggcttcttcattcacttcacttttctctgcatgttcctttgtacctctgaaggkttttttgtttgtttgtttgtttgtttattttttgagacagagtctcgctttgtcaacccaggctggagtgcagtggtgcgatctcggctcactgcaagct

SEQ ID NO: 294570 - DNA, 201 bp, Homo sapiens
aaaaaaagaagaagttttcaaagagaaacttcacaggaatgaaatgtgttctttctctctctatagtataatccaaccaaagtaaaatatgagaaaaggtrtacttccaaataataaaaataaggctgggcacagtgactcacgcctgtaatcccagcattttgggaggctgaggtgggtggatcacttgaggtcagacgt

SEQ ID NO: 294571 - DNA, 201 bp, Homo sapiens
tatgtaagtttatttctatcagtggagaacatactttgtcatgtcctggtttaaactgtcctagaaaaggcatatttgttaaaaaaaaaaaaaaaaaaaaragaagaagttttcaaagagaaacttcacaggaatgaaatgtgttctttctctctctatagtataatccaaccaaagtaaaatatgagaaaaggtgtactt

SEQ ID NO: 294572 - DNA, 201 bp, Homo sapiens
ggtggaggttgtagtgagctgagatcgtgccgctgcactccagcctgggcaacagagcaagactccatctcaaaataaataaataaatattttttttttttaaaaaagatcctgtggtttaaatgttgagcatgatggaaatttgaaatgtttttaacccaggtttgcttatctttttttgaaagcattacctgatttcat

SEQ ID NO: 294573 - DNA, 201 bp, Homo sapiens
aggtggaggttgtagtgagctgagatcgtgccgctgcactccagcctgggcaacagagcaagactccatctcaaaataaataaataaatattttttttttttaaaaaagatcctgtggtttaaatgttgagcatgatggaaatttgaaatgtttttaacccaggtttgcttatctttttttgaaagcattacctgatttca

SEQ ID NO: 294574 - DNA, 201 bp, Homo sapiens
aaacacctctatccaaacaactgagttggactgggctgaagatttaagtccttcagttcggtgtagtatcccaagagtgggatccattgtatgtttgttasaggccactccctctagctttatctgctaagcactgtgagattgtgcttaatttcactttgcttttctagttcaggcctccagcctggaggtgaatgtcct

SEQ ID NO: 294575 - DNA, 201 bp, Homo sapiens
tgtagtatcccaagagtgggatccattgtatgtttgttagaggccactccctctagctttatctgctaagcactgtgagattgtgcttaatttcactttgsttttctagttcaggcctccagcctggaggtgaatgtcctgtgtagaaaactggccataaatttagggctgttatgaaatttagtctgtcatgccaaccca

SEQ ID NO: 294576 - DNA, 201 bp, Homo sapiens
ctcatagatacattatacatagttgggtgattcacacatcagctcctctccccagacaaacaagctgtaatacagaatgtggccaaccgattctatttacrgtaaacaacactcttgttttaggaatggcaaacatatgagcatggttgtctggggaagagggcttcttcattcacttcacttttctctgcatgttccttt

SEQ ID NO: 294577 - DNA, 201 bp, Homo sapiens
ctgaaaacaccaggtatttcaggagacgcctgaaagagatgggcttcatcatctatggaaatgaagactctccagtagtgcctttgatgctctacatgcckgccaaaattgggtacgttttgttgcagatcacagaccagtctgtccttatccttatctgtgatgtgagaccagggcttatgtattttgttagggaaaatg

SEQ ID NO: 294578 - DNA, 201 bp, Homo sapiens
gccaccgtgcctggcctaaaattctttttttttttttttcttgtttccagtgaggttggaacttagaaaattcctttttttttttgacacggagtcttgckctgtcacccaggcaggagtgcagtggcgtgatcttggcttactgcagcctccacttcccagattcaagcaactctcctccctcagcctcccaagtagctg

SEQ ID NO: 294579 - DNA, 201 bp, Homo sapiens
ttgatctcggctccccacaacttccatctccaaggttcaagcaattctcctgcctcagcctcctgaatagctgagattataggcatgcgccaccacacccrcctagttttgtatttttagtagagatgggttttctccatgtgatcaggctgggcttgaactcccaacctcaggtgattcgtccgcctcggcctcccaaag

SEQ ID NO: 294580 - DNA, 201 bp, Homo sapiens
acctaggaggtggaggttgtagtgagctgagatcgtgccgctgcactccagcctgggcaacagagcaagactccatctcaaaataaataaataaatatttwttttttttaaaaaagatcctgtggtttaaatgttgagcatgatggaaatttgaaatgtttttaacccaggtttgcttatctttttttgaaagcattacct

SEQ ID NO: 294581 - DNA, 201 bp, Homo sapiens
tcgctcttattgcccaggctggagtgcaatggcttgatctcggctccccacaacttccatctccaaggttcaagcaattctcctgcctcagcctcctgaakagctgagattataggcatgcgccaccacacccgcctagttttgtatttttagtagagatgggttttctccatgtgatcaggctgggcttgaactcccaac

SEQ ID NO: 294582 - DNA, 201 bp, Homo sapiens
gaacctaggaggtggaggttgtagtgagctgagatcgtgccgctgcactccagcctgggcaacagagcaagactccatctcaaaataaataaataaatatwttttttttttaaaaaagatcctgtggtttaaatgttgagcatgatggaaatttgaaatgtttttaacccaggtttgcttatctttttttgaaagcattac

SEQ ID NO: 294583 - DNA, 201 bp, Homo sapiens
tgaaaacaagtagccctgcttatctcttagtgttagatttgactgttgcttacaaaattcttttttttttttttttttgagatggggtttcgctcttattkcccaggctggagtgcaatggcttgatctcggctccccacaacttccatctccaaggttcaagcaattctcctgcctcagcctcctgaatagctgagatta

SEQ ID NO: 294584 - DNA, 201 bp, Homo sapiens
ttgaacctaggaggtggaggttgtagtgagctgagatcgtgccgctgcactccagcctgggcaacagagcaagactccatctcaaaataaataaataaatattttttttttttaaaaaagatcctgtggtttaaatgttgagcatgatggaaatttgaaatgtttttaacccaggtttgcttatctttttttgaaagcatt

SEQ ID NO: 294585 - DNA, 201 bp, Homo sapiens
agtacttttttgggacaggctttctctttgttgatttatattttttgctttttttattagaacaaaagaaattatgctagcattttagaatctatttaagraaatcaaataatgataaaaatcagtgttaggtggtgttcttatgcagtccttcttgctccccttcttttactgttcatctgaagggcatataatttataa

SEQ ID NO: 294586 - DNA, 201 bp, Homo sapiens; identical to SEQ ID NO: 60696

SEQ ID NO: 294587 - DNA, 201 bp, Homo sapiens
agctactcaggaggctgaggcacgagaatcgcttgaacctaggaggtggaggttgtagtgagctgagatcgtgccgctgcactccagcctgggcaacagarcaagactccatctcaaaataaataaataaatattttttttttttaaaaaagatcctgtggtttaaatgttgagcatgatggaaatttgaaatgtttttaa

SEQ ID NO: 294588 - DNA, 201 bp, Homo sapiens
tttatataatgctgggccacacttttttttttttttctgtatcacctaggctgtagggaagtggcatgatcatggctcactgccatctcgaccttctgggytcaggtgatcctcccacctatctcctgaggacctgggactacaggcatgtgccaccatgtccagctagtgtttttgttttttgtttttgtagaggcaaga

SEQ ID NO: 294589 - DNA, 201 bp, Homo sapiens
tgctgaataattttgtactccattgtatcctcataatttcaattgtagtgtcccatagccctccaaaaaaggcagtcagaatcagattttttattttatttatttatttatttttatttttatttttattttttgagacagagtcttgctctgttgcccaggctggagtgcagtggcactatctcggctcactgcaagctc

SEQ ID NO: 294590 - DNA, 201 bp, Homo sapiens
ttgcaggcagcgggtggatctcacaaagtacattgtcaagggtggggagaattataaagaaccttcttaagggtgggggagattacaaagtacattgatcrgttagggtggggcagaaacaaatcacaatgatggaatgtcatcagttaaggctattttcatttcttttgtggatcttcagttgcttcaggccagctagat

SEQ ID NO: 294591 - DNA, 201 bp, Homo sapiens
cgagattgtctaaaaaaaataagaagaataaaaaataaagagcactgtatttcattgttttgtgttagttgctgggcacaggacagcagtagtctttttamataattgacatatcataaaggttacctatttaaagtgtacgatacaatggtttttagtatatctacagagttgtgcagccagcaccacaatttaattttg

SEQ ID NO: 294592 - DNA, 201 bp, Homo sapiens
gcagtcgtgaggctgagatgagaatgcggattaaaatgcctggcgtgctcaccgtaacaccacggggaaggctgtgtgccttttctcatccgcttttgttrtgtgtgactccaaagaatgcccgcgctgaaatttggcgtgaattaaactgaagcccaggcctctaccttgtttgtctaagactgagctaggttgcagaag

SEQ ID NO: 294593 - DNA, 201 bp, Homo sapiens
tccaaatgggattttaggagtctttttctcaaatcatgtgtaagacatggtttaaaaataaaatctgctaaagtaatcagaatgcatatttgaattggaarcacaggtcttctaggagtgctgatgagatggatacttgggcttaaagtttagttctacaagtgcagaaaggaacggggcatggtttacatagttatcact

SEQ ID NO: 294594 - DNA, 201 bp, Homo sapiens
cccagaaaggtggagtgacttaggagtcccacaggtaggtcataacaaagtggggactaagtcagaatccctgcatgcctatgccctctacccgcatgtcrctttaacaaaggatgttggagcagacagacatctccattttataatgaggaaacagagggaaaatggctccaggggtgccaagatggagccaggctggaa

SEQ ID NO: 294595 - DNA, 201 bp, Homo sapiens
accgcccgcccaggccgacaacgactcccggcatgcagtgctttgcgccgggcacgctctgcgcctgcgtgctgcgcgctgcccgctggggctcgaagttscgggagggttgggccagaggaggcggtcctggtagggagtgcgtagcagggtggagtcgctgtccggtcgcgcttcacttctgctccgccctccctgctc

SEQ ID NO: 294596 - DNA, 201 bp, Homo sapiens
cacttgtacacttgcacccttgcacacctgacacactcttacactcacacattggctgtgagctgcccagtgtgggggcgggggtgtcaagggagggaggrggattctcagggcctctgacctggaccatgtgaaagaagggggtgaagatcgcaatctcagaattcagccccccagcgggtcccccgctgcgttccgaga

SEQ ID NO: 294597 - DNA, 201 bp, Homo sapiens
tcccttgtgggacaaggtggcaaggtgtgcagtagcaggaggcctgggaagggcccaggtccagactgtgtaccctagcctgggctctccagtgcctgacmctgggaggtgggtggctagtgggtccccaccccatactgggccctctggatggctgactagggtaggagctgccttggtggccacggtgtgagatgcagg

SEQ ID NO: 294598 - DNA, 201 bp, Homo sapiens
ggggagagggagctttggtgaaatgtctatagtcagaggggtagtaaacagggcatctgagaagttctttcaagttctcccctatccatagggatacacaygttttggtgggaagattcatgagtgctaatcactggcgagtctttcctgggttccactttgaaatgctggctcccgaagaagtaccagagaaattaactt

SEQ ID NO: 294599 - DNA, 201 bp, Homo sapiens
cttgcacatctctgacagaatcacgtggctttttgaggccactggggcagcctgcaaaggtggctgctgggatggctacctccctccaacctcagggcccttggttgaaggaaggggctcatggagcctgggggagaagggatagacatccagccaggggcagatgggaagtgaacttccctgagggggtttggcgaaggg

SEQ ID NO: 294600 - DNA, 201 bp, Homo sapiens
agcccaccatgccaggccacatagccacttctgcctggaagagggcagaagaaattggggcagtgctcctactacgcccaccacagcccagatgaacctgwatagatagccccagctcctaagaggaggtggctcacctggtggacccccaagagcacctgcctgatgtcctcaaatgtggtgtgtctgtgagcagtagtg

SEQ ID NO: 294601 - DNA, 201 bp, Homo sapiens
ccacccagctgtcagcgcaatcacagattttctttgggctgcacagaacctgtctgtcctgaagcaagtgggagaggagatgcagctgacctgggcccagmacgccatcacttgtggctttaacggtgagtcctcacctctgtgagctgccccacagtggcctcttagaggtatggccctcgcacacaggggcctgggtat

SEQ ID NO: 294602 - DNA, 201 bp, Homo sapiens
gataaggtccaaaaaggcttatagggcttgagctgagcagaagcaggggggaagaggtgtagtgatggtgctggaagaggagaaggaggagtttgctggcyctgtcccctctggtccaggggtcctgggccctctccctgcctcactgctcccctctggacagctggccatcattgagtatctagaggagatgcgtcccac

SEQ ID NO: 294603 - DNA, 201 bp, Homo sapiens
tgggggccaacaggtaagaaggctgtgcccagaccacaatgtgggaattggaggccttgaacaggcaccaggcaggggaaaaaggggaggctctgccccaragaagtgaacctgtgtcttgtggactatcactgcaggaggctgctggctctcccttgtgggacaaggtggcaaggtgtgcagtagcaggaggcctgggaa

SEQ ID NO: 294604 - DNA, 201 bp, Homo sapiens
ccggacgaaagacacgggcctgattcgtcgagtctcactgagccttagtcgtcggcaggtcccaggcgcgaagtttctcggcctggaggagggggtcgcgygaagtgccagatgcaggcggggaaggtctgtgacgcgcacccgggtggagggaagctggttagacacctggagaccctggggggcggggtcagaagtgag

SEQ ID NO: 294605 - DNA, 201 bp, Homo sapiens
ccctgcatggcatctccaccccggaaacacagggtgagggtgggaggaagggggttgttttttcccttgggactgacacttctcccaacactgctctccaragccccttggcaaccatgtttaaagcagggtcacaaaatccacatgcccctggtaactggcaggggaacagctggcccttctcagttcttattttatttg

SEQ ID NO: 294606 - DNA, 201 bp, Homo sapiens
ctgcctactccagctgggaaaccaaggccagcacagcgccagccatcagagtgagagctgtcaccgtggccagtggcagggcttgtccactcgagtggggmaatggtgattgtctgtgcggagcctcaggaaacagcagctcatccctaacagctctctcgagacctggctgccacattctcaccagcagccatgcccagt

SEQ ID NO: 294607 - DNA, 201 bp, Homo sapiens
cggcaggtcccaggcgcgaagtttctcggcctggaggagggggtcgcgcgaagtgccagatgcaggcggggaaggtctgtgacgcgcacccgggtggaggraagctggttagacacctggagaccctggggggcggggtcagaagtgagctgcaccgcccgcccaggccgacaacgactcccggcatgcagtgctttgcgc

SEQ ID NO: 294608 - DNA, 201 bp, Homo sapiens
tttgctggccctgtcccctctggtccaggggtcctgggccctctccctgcctcactgctcccctctggacagctggccatcattgagtatctagaggagaygcgtcccactccgcgacttctgcctcaggacccaaagaagagggccagcgtgcgtatgatttctgacctcatcgctggtggcatccagcccctgcaggtg

SEQ ID NO: 294609 - DNA, 201 bp, Homo sapiens
atctttctagtccagcccctcgctttacccggacgaaagacacgggcctgattcgtcgagtctcactgagccttagtcgtcggcaggtcccaggcgcgaastttctcggcctggaggagggggtcgcgcgaagtgccagatgcaggcggggaaggtctgtgacgcgcacccgggtggagggaagctggttagacacctgga

SEQ ID NO: 294610 - DNA, 201 bp, Homo sapiens
cctgcttgtgggtcgtgacggagggcagcagcatttaccatgcttctggtcactcgtagtacagatccaaaggtgtaatccaaaggcatttagccattagrtaaggcatttcttcagggattctaagctaattaatgtctgccacactctagtggtcaccagcagtccctgtcccttggcaccaggagtccctgtagcctg

SEQ ID NO: 294611 - DNA, 201 bp, Homo sapiens
tcactctctcgccaggctggagtgcagtggagcgatctcggttcactgcaacctccgcctcccaggttcaagggattctcctgcctcagcctcccaagtarctgggactgcaggcccacgccaccacacccagctaatttttgtatttttagtagagacagggtttcaccatgttggccagaatggtcttgatctcttgac

SEQ ID NO: 294612 - DNA, 201 bp, Homo sapiens
gtaaatcaggttcattaaaatataactcagatgttaccaggtgcatagtgaaaaagtttatttatgacagattcgaaaactcagaagagatgacaaagaaygcacaaaagcatcacaaaactgttacctaatataaaacgcaagaactgagctacttgaagaagcacagctcagaatcatcagtgtaatcgcagtaacaca

SEQ ID NO: 294613 - DNA, 201 bp, Homo sapiens
caccactgtttaaggccctgggggggcagagttaaacacaacacagccttgctgaactccaggagcccacagagtgccagggcatacacctttatcaccawccagggggcatgagggccccattgggggggtccagatcttgaggtctctaagagttcaggggtgagtgaggcagagcatcgtgcatctggggtagggagc

SEQ ID NO: 294614 - DNA, 201 bp, Homo sapiens
tttaacggtgagtcctcacctctgtgagctgccccacagtggcctcttagaggtatggccctcgcacacaggggcctgggtatctgaaccagcctcccagrctgctttgggcctgacagttgcatggatgagggcaggactggggaggcaatgggctgggtgggcatccagaccttagctccagcacttctgggaacctcg

SEQ ID NO: 294615 - DNA, 201 bp, Homo sapiens
tgaaatccacccctttaggtttcctttccctgctcagaagctgtgccagaggggacatttcctgggaggctgagggtcaccacgataccatgacagagtckggcaaggtatggaaggcactctcaggctagctgcccctttgggggcctcttggacctcaggagctcaaaccagcataattttggagccaagggacctcat

SEQ ID NO: 294616 - DNA, 201 bp, Homo sapiens
cttccccattggctcctgaaatccacccctttaggtttcctttccctgctcagaagctgtgccagaggggacatttcctgggaggctgagggtcaccacgrtaccatgacagagtctggcaaggtatggaaggcactctcaggctagctgcccctttgggggcctcttggacctcaggagctcaaaccagcataattttgg

SEQ ID NO: 294617 - DNA, 201 bp, Homo sapiens
aagtgagctgcaccgcccgcccaggccgacaacgactcccggcatgcagtgctttgcgccgggcacgctctgcgcctgcgtgctgcgcgctgcccgctggkgctcgaagttccgggagggttgggccagaggaggcggtcctggtagggagtgcgtagcagggtggagtcgctgtccggtcgcgcttcacttctgctccgc

SEQ ID NO: 294618 - DNA, 201 bp, Homo sapiens
aatcagaatgcatatttgaattggaaacacaggtcttctaggagtgctgatgagatggatacttgggcttaaagtttagttctacaagtgcagaaaggaayggggcatggtttacatagttatcactggtaagagaaggcagaaattgcctaagagatttcaggtttcctgcttgtgggtcgtgacggagggcagcagcat

SEQ ID NO: 294619 - DNA, 201 bp, Homo sapiens
cagggggcatgagggccccattgggggggtccagatcttgaggtctctaagagttcaggggtgagtgaggcagagcatcgtgcatctggggtagggagcaygtggtgacaaggaaagctgagagaaggggatagtgccacggtgagccttgaccacccagaagtgttagagaagcctccccctctttggccttaatgtcac

SEQ ID NO: 294620 - DNA, 201 bp, Homo sapiens
acgctctgcgcctgcgtgctgcgcgctgcccgctggggctcgaagttccgggagggttgggccagaggaggcggtcctggtagggagtgcgtagcagggtrgagtcgctgtccggtcgcgcttcacttctgctccgccctccctgctccccataacagacccctccctccactaaggcttccaaacgtcgccccaagcctc

SEQ ID NO: 294621 - DNA, 201 bp, Homo sapiens
gagaggctgttctttgactccgctatgtgcggtctctcctagctctggccttgaaaggcatcgactacgagacggtgcccatcaatctcataaaggatggrggccaacaggtaagaaggctgtgcccagaccacaatgtgggaattggaggccttgaacaggcaccaggcaggggaaaaaggggaggctctgccccagaga

SEQ ID NO: 294622 - DNA, 201 bp, Homo sapiens
aggtgtaatccaaaggcatttagccattaggtaaggcatttcttcagggattctaagctaattaatgtctgccacactctagtggtcaccagcagtccctrtcccttggcaccaggagtccctgtagcctggctaggtaaggaaagggagttgcatctccaaataaggaagatccagttgtggccacccaattcctcctct

SEQ ID NO: 294623 - DNA, 201 bp, Homo sapiens
tatgctaggggtggcagaggggagagggagctttggtgaaatgtctatagtcagaggggtagtaaacagggcatctgagaagttctttcaagttctccccyatccatagggatacacatgttttggtgggaagattcatgagtgctaatcactggcgagtctttcctgggttccactttgaaatgctggctcccgaagaag

SEQ ID NO: 294624 - DNA, 201 bp, Homo sapiens
aggggagagggagctttggtgaaatgtctatagtcagaggggtagtaaacagggcatctgagaagttctttcaagttctcccctatccatagggatacacatgttttggtgggaagattcatgagtgctaatcactggcgagtctttcctgggttccactttgaaatgctggctcccgaagaagtaccagagaaattaact

SEQ ID NO: 294625 - DNA, 201 bp, Homo sapiens
gtttgtccaaggtcatgcagagctggttcctgcaccaggtccagactccagatgccagctcccagcccgctccaccactcaaaatactgcatcaaaaccargccacgctctgttggggggacaccaaacctggccccagcaggagcgtaagaaacttcctgcgagttggaaaaaaatgccttttttttttttttttttttt

SEQ ID NO: 294626 - DNA, 201 bp, Homo sapiens
agagccgaagcagattgttggtacccccagtagagtcgcagtggacacacccagtccagccactgactctggggtatgcaccctgatgggaacccaccggracctctttcaggtgaccatggctgatctgtgcttggtgcctcaggtggcaaatgctgaaaggtaagagagagccccgccaccctcccttctcgtggctct

SEQ ID NO: 294627 - DNA, 201 bp, Homo sapiens
ccaaggtcatgcagagctggttcctgcaccaggtccagactccagatgccagctcccagcccgctccaccactcaaaatactgcatcaaaaccaggccacrctctgttggggggacaccaaacctggccccagcaggagcgtaagaaacttcctgcgagttggaaaaaaatgcctttttttttttttttttttttgagacg

SEQ ID NO: 294628 - DNA, 201 bp, Homo sapiens
aatggtattttaaaagaaaaaccactcagcaggacacaagaattaaagtaacaatttggtaagactcttagaaatcacagatgttgatagcatttctcatsataggggacatgtaaaacaagctgaccataataaatgattagttgggatacttttgtattttaaagaaaaaagataaaacagtgacacggtttcccttcc

SEQ ID NO: 294629 - DNA, 201 bp, Homo sapiens
aaaatactgcatcaaaaccaggccacgctctgttggggggacaccaaacctggccccagcaggagcgtaagaaacttcctgcgagttggaaaaaaatgcctttttttttttttttttttttgagacgcagtctcgctctggagtgcagtggtgcgatctcggcccactgtgacctccacctctcaggttcaagctattctc

SEQ ID NO: 294630 - DNA, 201 bp, Homo sapiens
aaatactgcatcaaaaccaggccacgctctgttggggggacaccaaacctggccccagcaggagcgtaagaaacttcctgcgagttggaaaaaaatgcctttttttttttttttttttttgagacgcagtctcgctctggagtgcagtggtgcgatctcggcccactgtgacctccacctctcaggttcaagctattctct

SEQ ID NO: 294631 - DNA, 201 bp, Homo sapiens
ggatagtgccacggtgagccttgaccacccagaagtgttagagaagcctccccctctttggccttaatgtcaccttagaagggctctttcctttaagagtrcggcgagaggctgttctttgactccgctatgtgcggtctctcctagctctggccttgaaaggcatcgactacgagacggtgcccatcaatctcataaagg

SEQ ID NO: 294632 - DNA, 201 bp, Homo sapiens
gtgccacggtgagccttgaccacccagaagtgttagagaagcctccccctctttggccttaatgtcaccttagaagggctctttcctttaagagtacggcragaggctgttctttgactccgctatgtgcggtctctcctagctctggccttgaaaggcatcgactacgagacggtgcccatcaatctcataaaggatggg

SEQ ID NO: 294633 - DNA, 201 bp, Homo sapiens
gggggcggggtcagaagtgagctgcaccgcccgcccaggccgacaacgactcccggcatgcagtgctttgcgccgggcacgctctgcgcctgcgtgctgcscgctgcccgctggggctcgaagttccgggagggttgggccagaggaggcggtcctggtagggagtgcgtagcagggtggagtcgctgtccggtcgcgctt

SEQ ID NO: 294634 - DNA, 201 bp, Homo sapiens
gcgagaggctgttctttgactccgctatgtgcggtctctcctagctctggccttgaaaggcatcgactacgagacggtgcccatcaatctcataaaggatrggggccaacaggtaagaaggctgtgcccagaccacaatgtgggaattggaggccttgaacaggcaccaggcaggggaaaaaggggaggctctgccccaga

SEQ ID NO: 294635 - DNA, 201 bp, Homo sapiens
cttagaagggctctttcctttaagagtacggcgagaggctgttctttgactccgctatgtgcggtctctcctagctctggccttgaaaggcatcgactacragacggtgcccatcaatctcataaaggatgggggccaacaggtaagaaggctgtgcccagaccacaatgtgggaattggaggccttgaacaggcaccagg

SEQ ID NO: 294636 - DNA, 201 bp, Homo sapiens
aaatgctgaaaggtaagagagagccccgccaccctcccttctcgtggctctgcccacagtcaggccccactcagctggcgagatagcatctcatgcagacrcttcgccaaccagccaaggagcccaccatgccaggccacatagccacttctgcctggaagagggcagaagaaattggggcagtgctcctactacgcccac

SEQ ID NO: 294637 - DNA, 201 bp, Homo sapiens
tcttaagagggagttactcaaggtagaagactggctgtgagaggatgaggcgggccagcatcagttgagggattgtgctagatgatgtctgcgcagtcaargcaatccatcttctctggccctctcaacccacagagttggttgtcagggcaactggagcatggcctgggagggcacttcagctccgggggacagactcat

SEQ ID NO: 294638 - DNA, 201 bp, Homo sapiens; identical to SEQ ID NO: 60723

SEQ ID NO: 294639 - DNA, 201 bp, Homo sapiens
gctcagagcttcctgagaaggcgtctgcagggggatctctgtgccatggggcactcctcagctcactcccactaaaccgtcttaagagggagttactcaargtagaagactggctgtgagaggatgaggcgggccagcatcagttgagggattgtgctagatgatgtctgcgcagtcaaggcaatccatcttctctggccc

SEQ ID NO: 294640 - DNA, 201 bp, Homo sapiens
gtggccacctgagctccttcccttggcccttagttgccttcttgagggagtaattgcatgtcttcaaccaagacactggtcaccactgtttaaggccctgsgggggcagagttaaacacaacacagccttgctgaactccaggagcccacagagtgccagggcatacacctttatcaccatccagggggcatgagggcccc

SEQ ID NO: 294641 - DNA, 201 bp, Homo sapiens
ctgggggagaagggatagacatccagccaggggcagatgggaagtgaacttccctgagggggtttggcgaaggggtagcccccacccagctgtcagcgcartcacagattttctttgggctgcacagaacctgtctgtcctgaagcaagtgggagaggagatgcagctgacctgggcccagaacgccatcacttgtggctt

SEQ ID NO: 294642 - DNA, 201 bp, Homo sapiens
cacttcagctccgggggacagactcatgcaggcctagggcagacaagaattggaggtgggatgggtgaaagagccgaagcagattgttggtacccccagtrgagtcgcagtggacacacccagtccagccactgactctggggtatgcaccctgatgggaacccaccggaacctctttcaggtgaccatggctgatctgtg

SEQ ID NO: 294643 - DNA, 201 bp, Homo sapiens
catggctgatctgtgcttggtgcctcaggtggcaaatgctgaaaggtaagagagagccccgccaccctcccttctcgtggctctgcccacagtcaggcccyactcagctggcgagatagcatctcatgcagacgcttcgccaaccagccaaggagcccaccatgccaggccacatagccacttctgcctggaagagggcag

SEQ ID NO: 294644 - DNA, 201 bp, Homo sapiens
acgaacccaggaggcggaggttgcagtgagctgggatcgcaccattgcactctagcctgggtgacaagagcaacacttcatctcaaaaaaaaaaaaaaaamaaaaaaactttgtcaattggagagtaaaaaatgacatatcactgttttcatttgcatgactgtatgagttaggttgaacattttttcatatgttagccat

SEQ ID NO: 294645 - DNA, 201 bp, Homo sapiens
aagttttctcctttgctactgaggccaagacctgccacttcacattgcctaccaaccctgggcacctggaacttaaacaggaacttaaaacataagacaggaacttaaaacataaaaaagcctgcacgtagtagacagaaggaagtacagggtcagaagcctcatccaccacatttctagtccgcagaggtaaccacggtc

SEQ ID NO: 294646 - DNA, 201 bp, Homo sapiens
tcagactacatctgttactaccatagaattaaacaacagaacatgttgagtatttgcatggagctcgcctgggaaccagatttctgatgaagatttttcayaggaaacccagcccagtctttctgtggggactgcccgttcttttttggagttttcctggttctcagcgcactgtggacatgtgcacaggactggctgatt

SEQ ID NO: 294647 - DNA, 201 bp, Homo sapiens
agccttctctcttaatcatgacaccacagtgcctcacaagcttgccttggctcactcctcagactacatctgttactaccatagaattaaacaacagaacwtgttgagtatttgcatggagctcgcctgggaaccagatttctgatgaagatttttcataggaaacccagcccagtctttctgtggggactgcccgttctt

SEQ ID NO: 294648 - DNA, 201 bp, Homo sapiens
tctctcagtatttagtcttccaagtggcataccaaatgcttcaatccttactgccatcagccatccagagttatcattggggctaagtgcctgctgctgcytggtgggcaacatcagcttttaactcagcctaatcattggtgagccaggcctaagcatttacaggaacccctgtgaatcaagggccctactgaacagcag

SEQ ID NO: 294649 - DNA, 201 bp, Homo sapiens
gcgatctcggctcactgcaagctctgcctcccgggttcacgcctcagcctccctagtagctgggattacaggcacgtgccaccatgcctggctaatttttygtatttttagtagagacagggttttaccatgttagccaggatggtctccatctcctgacttcgtgatccgcctgcctcggcctcccaaagtgctgggatt

SEQ ID NO: 294650 - DNA, 201 bp, Homo sapiens
tggctgcgttcccaaagccctcatgtatggtgtagaaaggtgtatgtggttgtataaaagaggactttgcattgtgtttgaaagcctgtttattcaaatcrcttatttacttgcaaaataacttaagcaatgaggataggttttagatgtggtcttaatttagtaagaaagccttcaacttttatatactagttagtataa

SEQ ID NO: 294651 - DNA, 201 bp, Homo sapiens
gaaagtgactcagtatgtattagtgcaatttcatgctgctgataaagacatacctgagactgggcaatttacaaaagaaagagatttaattggacttaaakttccacatggctggggaggcctcacaaccccggtggaaggcaaggaggagcaagtcacattttatgtggatggcggcaggcaaagagagagcttgtgcag

SEQ ID NO: 294652 - DNA, 201 bp, Homo sapiens
cggaggactgtctctcctaacacaagcaataaaagccaggaggaaatatgaatgttacaactggttttacttgggaaacttttgaagtaaaaatctggagyccaggctgggtgcggtggttcacacctataaccccagcactttggggggctgaggcaggtggatcacctgaggtttggagtttcgagaccagcctggcca

SEQ ID NO: 294653 - DNA, 201 bp, Homo sapiens
ctcggcttcaggtagcagagaaggttgtttctcccagagtgggagctgccacttcttcacgtaaaaccaagatgcctctagggccaggctagctatactcytttttttttttttttttttttttagagatgagatctgactctgttgcccagtctggagtggagtggtacaatcatagctcactgcatcctcaaactcctg

SEQ ID NO: 294654 - DNA, 201 bp, Homo sapiens
tacagtatttacctcaaccatgccctccagggtcctggattcagccacttgtgaataagtcctgggggcaccgaggaatcttatttcagacatctgggctrcagtctaagaccagtctattaaccactgtgacctgtgcacaggggttcagattgatctctgatctttggtgtcattaccagtaattacaatagcccacta

SEQ ID NO: 294655 - DNA, 201 bp, Homo sapiens
ctcacttctgaccccgccccccagggtctccaggtgtctaaccagcttccctccacccgggtgcgcgtcacagaccttccccgcctgcatctggcacttcrcgcgaccccctcctccaggccgagaaacttcgcgcctgggacctgccgacgactaaggctcagtgagactcgacgaatcaggcccgtgtctttcgtccgg

SEQ ID NO: 294656 - DNA, 201 bp, Homo sapiens
caaataaaataagaactgagaagggccagctgttcccctgccagttaccaggggcatgtggattttgtgaccctgctttaaacatggttgccaaggggctytggagagcagtgttgggagaagtgtcagtcccaagggaaaaaacaacccccttcctcccaccctcaccctgtgtttccggggtggagatgccatgcaggg

SEQ ID NO: 294657 - DNA, 201 bp, Homo sapiens
gcgcaaagcactgcatgccgggagtcgttgtcggcctgggcgggcggtgcagctcacttctgaccccgccccccagggtctccaggtgtctaaccagcttycctccacccgggtgcgcgtcacagaccttccccgcctgcatctggcacttcgcgcgaccccctcctccaggccgagaaacttcgcgcctgggacctgccg

SEQ ID NO: 294658 - DNA, 201 bp, Homo sapiens; identical to SEQ ID NO: 60740

SEQ ID NO: 294659 - DNA, 201 bp, Homo sapiens; identical to SEQ ID NO: 60742

SEQ ID NO: 294660 - DNA, 201 bp, Homo sapiens
aggaaggggcagagctggaccagagcctggaatctctgcccgctccttgtcttctgactgggctgtgctgcttgggcccagggttgtcccaggtcctgctkcgaggaggcggccaggtcctgctcggctggacactccattacttcccgtttttcctgatgggccgggtcctctacttccaccactacttcccagccatgc

SEQ ID NO: 294661 - DNA, 201 bp, Homo sapiens; identical to SEQ ID NO: 60745

SEQ ID NO: 294662 - DNA, 201 bp, Homo sapiens
caggggtcaatgacacagatttccgagtctatctgcttggcaacccggtgagtgcctaaacattcccggctcaggccctggagcacttgcccgtggagagyggctgcgttctcatctgcccattcccatttctgcacaggtggtttggtggctgaatctgttgagcatcgccctctacctcctctcagggagcatcattgc

SEQ ID NO: 294663 - DNA, 201 bp, Homo sapiens
ttcacaccttgtccttagcttggcagatgggtatatattttgtgcccattggaacaatttcctctttcctctttcccttctttttccctagaaggttggartggaccccttatgggagatggaggcttgtctgggagaagtaaagcaagtgtcgtaggtaggcagacagcagctgcctgattcttccctgcaagggaaggg

SEQ ID NO: 294664 - DNA, 201 bp, Homo sapiens
cttgggttcaagtggttctcctgcctcagcctcccaagtggctgggattacaggcacccaccgctacgctcagctaattttttgtattttttagtaaagayggggttttaccatgttggccaggctggtcttgaactcctgacctcaggtgatccacccgcctcggcctcccaaagtgctggggttacaggcatgagccac

SEQ ID NO: 294665 - DNA, 201 bp, Homo sapiens
caagtggtaagtctctagggttttgctgtcccaatcgagggtcctgattttcctttcactctacaaggagtatgccagaagcttttgttttcctgtgttcrcctgctgtctgcttgttcttagtggcagatggagggagagtagatatcaggtgtattatggagcacagaactccgggggagcttcggtgttttatgtgtt

SEQ ID NO: 294666 - DNA, 201 bp, Homo sapiens
actggaattatcggatacaaatttttaaaaatcagaggtgtgtatgtgtgtgggtgtatatatatatatatatatagagagagagagagagagagagagasagagacagagagagaagcaattagctatggtttttttttgagtcagctggattttgaatacttaaaatttttattttattaaataaatttcatttgtcat

SEQ ID NO: 294667 - DNA, 201 bp, Homo sapiens; identical to SEQ ID NO: 60737

SEQ ID NO: 294668 - DNA, 201 bp, Homo sapiens
gtggcccccaggctgctagggccgcaggccgggacgtggccgctgaggctgtggcgcgaagccccaaacggcctgcttggggctcacggcgcttcgaggckgtcggctggtgggccctgctggccttggtgacgctgctgtccttcgccacccgcttccaccgcttggacgagccgccgcacatctggtgagtgatgggag

SEQ ID NO: 294669 - DNA, 201 bp, Homo sapiens
tctaaagtcccctcactttctttgtatttttttcttggcttttatggcagaatggaacaggggactcaaatgatttctggcggattgaggtcgtaaacagraaatttggaaaccggatcaaagtgctgagaagtcgaattcgcttcatccatttggtcacaggttgtgtcctgggctcctcgggaaaggttctgcccaagt

SEQ ID NO: 294670 - DNA, 201 bp, Homo sapiens
tctgttttcctaaactacccacctcaagcttatgtgtgccttcattttgttcttcttcccacctaatctagccaaacccactaatcaactaattcaacaaytctttatcaagtatgccaggaaccacatggggccctgtggacatattggcgaggagacagacttggtccccatcccgacagcagctgctccaggcgtcca

SEQ ID NO: 294671 - DNA, 201 bp, Homo sapiens
aggcccatgcattatgcatttttggtttggttttaagctgtccaaattattctaagtcatgtacacccagggcagagaaaactagatgttctgtgttctcwtgtgttgataaattgctgcaggtgtcatgtagaagacactacagttacagacctggtgaccagaacatctacactgtgcaaagggagagaaaggccaaac

SEQ ID NO: 294672 - DNA, 201 bp, Homo sapiens
aattgtggggctctttttccttcctgagtgtttaggttgtgctgttcctagacctcggccataatacaagagaggatttgtttcaagcagtgagctctgtrgacaaaagattctttgctctgtggcagctgcaggagaaaatgttgcattggcaacattttctatggacagttgtcaagggaacccaaagtctgtgggtgc

SEQ ID NO: 294673 - DNA, 201 bp, Homo sapiens
agaaagagatttaattggacttaaagttccacatggctggggaggcctcacaaccccggtggaaggcaaggaggagcaagtcacattttatgtggatggcrgcaggcaaagagagagcttgtgcagagaaaatcccattttaaaaatggttttaaaaaccatcagatctctggccaggtgcggtggcttatgccgaggtgg

SEQ ID NO: 294674 - DNA, 201 bp, Homo sapiens
gagaatagcttgaacctgagaggtggaggtcacagtgggccgagatcgcaccactgcactccagagcgagactgcgtctcaaaaaaaaaaaaaaaaaaaaaggcatttttttccaactcgcaggaagtttcttacgctcctgctggggccaggtttggtgtccccccaacagagcgtggcctggttttgatgcagtatttt

SEQ ID NO: 294675 - DNA, 201 bp, Homo sapiens
actatggacactctcccctgaagaataccctgcgccctcagacagtgcttttcctgccgttccaggggtttcacaggccgcctcctccatggagccacgcmatggtcccttgaggctaagagcccccaagacagggcacagcacagccgctccaagtctgagaactgccctgtcccctgctgcgcttgcgtttggctttgg

SEQ ID NO: 294676 - DNA, 201 bp, Homo sapiens
agagaatagcttgaacctgagaggtggaggtcacagtgggccgagatcgcaccactgcactccagagcgagactgcgtctcaaaaaaaaaaaaaaaaaaaaaggcatttttttccaactcgcaggaagtttcttacgctcctgctggggccaggtttggtgtccccccaacagagcgtggcctggttttgatgcagtattt

SEQ ID NO: 294677 - DNA, 201 bp, Homo sapiens
taagagcccccaagacagggcacagcacagccgctccaagtctgagaactgccctgtcccctgctgcgcttgcgtttggctttggttccagctgccaaatwgaactccgtcttgttgattttcaggcccttctctgccccctggtggttctggctcagcctgactggcgttagtcttgctggtgctttaggggtcaagttt

SEQ ID NO: 294678 - DNA, 201 bp, Homo sapiens
acaccattgcagacctttggtacctgttcggagacctcagtctttcattggtgagcacccaagggtttgctgtggaaatgtttttgctccctgatgttgcygagtaggagctggtggccttctctgtctctactgcaggtggcagagtggctgtgttctgggtcccaggtgggctggaccccccaacctccgcagacagca

SEQ ID NO: 294679 - DNA, 201 bp, Homo sapiens
tctggggcagagcctcccctttttcccctgcctggtgcctgttcaaggcctccaattcccacattgtggtctgggcacagccttcttacctgttggccccyatcctttatgagattgatgggcaccgtctcgtagtcgatgcctttcaaggccagagctaggagagaccgcacatagcggagtcaaagaacagcctctcgc

SEQ ID NO: 294680 - DNA, 201 bp, Homo sapiens
ggagcagccccgtaaacatttcatagactggaattatcggatacaaatttttaaaaatcagaggtgtgtatgtgtgtgggtgtatatatatatatatatakagagagagagagagagagagagagagagagacagagagagaagcaattagctatggtttttttttgagtcagctggattttgaatacttaaaatttttat

SEQ ID NO: 294681 - DNA, 201 bp, Homo sapiens
ctgaaacgacagacagcaggagcagccccgtaaacatttcatagactggaattatcggatacaaatttttaaaaatcagaggtgtgtatgtgtgtgggtgtatatatatatatatatatagagagagagagagagagagagagagagagacagagagagaagcaattagctatggtttttttttgagtcagctggattttg

SEQ ID NO: 294682 - DNA, 201 bp, Homo sapiens
gctgaaacgacagacagcaggagcagccccgtaaacatttcatagactggaattatcggatacaaatttttaaaaatcagaggtgtgtatgtgtgtgggtgtatatatatatatatatatagagagagagagagagagagagagagagagacagagagagaagcaattagctatggtttttttttgagtcagctggatttt

SEQ ID NO: 294683 - DNA, 201 bp, Homo sapiens
tgacaatagtacacacccaaaagtaacaaagcacacaaggaaatagggcactgtgtgcaagaacaagctgaaacgacagacagcaggagcagccccgtaarcatttcatagactggaattatcggatacaaatttttaaaaatcagaggtgtgtatgtgtgtgggtgtatatatatatatatatatagagagagagagaga

SEQ ID NO: 294684 - DNA, 201 bp, Homo sapiens
atggagcggactggtgagcaactgtgttgcagatgcaggtgccttgtccttggcacagtaacatcctggggttttgggtgtagagcctggagaggtagcasagggctggcccatgtttatcttgtgtagtgcttgggtggtgggtgttacagaaaggcttagggtttccacatattcttctctctcctcttggccattttt

SEQ ID NO: 294685 - DNA, 201 bp, Homo sapiens
gactaaaaatgctggaataatataaagacttcttaagagcataaaaaggctgacaagatattaaagagttaccaggccaaagcctaagtgaaatgaggaayccagagaaataagtgagacactgaagccacttttgctttgatcccacaatcttgacttttggctgtctcttgagagaagaggttttaaagtcaaacctag

SEQ ID NO: 294686 - DNA, 201 bp, Homo sapiens
gtgttctcactgaaaatgactaaaaatgctggaataatataaagacttcttaagagcataaaaaggctgacaagatattaaagagttaccaggccaaagcytaagtgaaatgaggaatccagagaaataagtgagacactgaagccacttttgctttgatcccacaatcttgacttttggctgtctcttgagagaagaggt

SEQ ID NO: 294687 - DNA, 201 bp, Homo sapiens
ccgccctctgattggcccgagggtacggagggggcgggatctataggaggagggccacggtggaggggaacttgaggtatcgggtgggttggcctctggcraggtgcattctctgggagggggatcgttttgctctggtggtggggcagtgggattcttagtatctgaggaagcagccctcatgtcttccaggttatgcta

SEQ ID NO: 294688 - DNA, 201 bp, Homo sapiens
tttcatttggccacattatagaaaatataatagcatgaatttttcatttagaaagtttgaggcatgatcttaattacttttttttttcccaagatagagtyttgctctgttgcccaggctgtagtgcagtggcgcgatctcagctcactgcaacctctgcctcctaggttcaagcgattctcctgccttagcctcctgagt

SEQ ID NO: 294689 - DNA, 201 bp, Homo sapiens
tactcatgataaataaataatttttcttgtaggaattttaatcataattgctcttgtaaaacagacacacaaagactgctctcctaccacacatctacacrgagtacacacacgagcatcatagaaccttaacttccttgagcaaatccaggctggatggacgatatcgagctttttctcaggaatgtagacttcatttta

SEQ ID NO: 294690 - DNA, 201 bp, Homo sapiens
ccaccacgcctggctaattttttgtatttttagtagagacagggtttcaccgtgttagccaggatagtctcgatctcctgacctcatgatccacctgcctyggcctcccaaagtgctgggattacaggcatgagccaccgcgcccagcctgtatcctcctctttaagttggggaaaatgagtagtacctctctccatcaaa

SEQ ID NO: 294691 - DNA, 201 bp, Homo sapiens
ttactgcaaactccgcctcccgggttcacgccattctcctgcctcagcctcccgagtagctgggactacaggcacccgccaccacgcctggctaatttttygtatttttagtagagacagggtttcaccgtgttagccaggatagtctcgatctcctgacctcatgatccacctgcctcggcctcccaaagtgctgggatt

SEQ ID NO: 294692 - DNA, 201 bp, Homo sapiens
ggttctgctcggcgcttggccctatatcagaaaaacctgggccccacatttctgtcagccctctagatctctgtcttgactagctttctttgctaccttcrtgcaggggaacagtggcctcaaacccaaggacaatgagttcacgtccaaaccctggcactggcctatcaactatcaggtaggatccaaggctggggctcc

SEQ ID NO: 294693 - DNA, 201 bp, Homo sapiens
gcctggagaggtagcagagggctggcccatgtttatcttgtgtagtgcttgggtggtgggtgttacagaaaggcttagggtttccacatattcttctctcycctcttggccattttttatgattatgactgatatattaaaagctatatataatgcatgcatagtgcctaaggaataatgaggtctcacatgcctagcacc

SEQ ID NO: 294694 - DNA, 201 bp, Homo sapiens
ctggagaggtagcagagggctggcccatgtttatcttgtgtagtgcttgggtggtgggtgttacagaaaggcttagggtttccacatattcttctctctcytcttggccattttttatgattatgactgatatattaaaagctatatataatgcatgcatagtgcctaaggaataatgaggtctcacatgcctagcacccc

SEQ ID NO: 294695 - DNA, 201 bp, Homo sapiens
ctgtgtcttcctaataacttttgaacaccacataccatacataattggatgtgacaaccaaacgtgagaatttcccattcttctggcttgtctgtttattytgatggacaggtaggggatggaagagggccagcagcttaaaaaaacaaaaaaccaaacaggtatccagctactgaagtatcaagcaatcccttttcccaa

SEQ ID NO: 294696 - DNA, 201 bp, Homo sapiens; identical to SEQ ID NO: 60738

SEQ ID NO: 294697 - DNA, 201 bp, Homo sapiens
atgagactcctgggttagagacaaaggactttattacaggaaataggatgcatgttagaagcagtttcccttgccatccaagtcccacagggtgacgctaygggtttaaatggatgactgcacaggcagtgggttgcatccaagtgaaggaacgacaagcttggaaaatctgctgttttatagaaggcagtacgcagacct

SEQ ID NO: 294698 - DNA, 201 bp, Homo sapiens
tgtggcccccaggctgctagggccgcaggccgggacgtggccgctgaggctgtggcgcgaagccccaaacggcctgcttggggctcacggcgcttcgaggmggtcggctggtgggccctgctggccttggtgacgctgctgtccttcgccacccgcttccaccgcttggacgagccgccgcacatctggtgagtgatggga

SEQ ID NO: 294699 - DNA, 201 bp, Homo sapiens
catcttcttgtgcttcagtatcctcttcttttttttttttttttttttgagatggagtcttgctctgtcacccaggctggagtgcagtggcgtgatctcarcttactgcaaactccgcctcccgggttcacgccattctcctgcctcagcctcccgagtagctgggactacaggcacccgccaccacgcctggctaatttt

SEQ ID NO: 294700 - DNA, 201 bp, Homo sapiens
gatgatcggggtgtgaagcctgctttcatatagagtgtcactttggacaagttcatcttcttgtgcttcagtatcctcttcttttttttttttttttttttgagatggagtcttgctctgtcacccaggctggagtgcagtggcgtgatctcagcttactgcaaactccgcctcccgggttcacgccattctcctgcctca

SEQ ID NO: 294701 - DNA, 201 bp, Homo sapiens
taaccccagcttctctaggcatcagcataggtgttctttagtgacaaccatgtcccacctctccatggtgctgggtggggtgcccctctgatgagaggctkggtggcaccttccacatgcctacgtggtaaaccttctcatattgaactgtgcatgcttacttcccgccgtctctttggtacttgattgctagctcctgga

SEQ ID NO: 294702 - DNA, 201 bp, Homo sapiens
ggacagaggagaggaagacatcctgagcagcaagctctctgaccctaaagaatgacttctccttggtggctctccaagccagctctgtgggaaggtcactyagagagaatatggtgacagcaccaggcccttcagagccagtttttggtttcccgcaccgctttctgagtgttgcattcgttcatctatgacagatggtag

SEQ ID NO: 294703 - DNA, 201 bp, Homo sapiens
taggggtctttcctctttggtctcagagtacctggttagtacctctagcagataccacatggtactataactgtttaccagtaggcccttgattaatactmgcctggtgagtgattttggatatcaatgcttgtttctttttggcagatcccctagacccttccttcccagtggagtttgtaagacatggagacattattc

SEQ ID NO: 294704 - DNA, 201 bp, Homo sapiens
cgcgagaggggttgatagtgagctgcttggggaaattgttgccatggggccagtgggatttggggctgatgctttcaaaggaggaatcagacaagtaaaayggtaattgatgctgtggcagtagctgtgatttgtaaggaaactgtagaaagaggaaaagaatagagctgaggtcagatcactggggaatgcaagaggagg

SEQ ID NO: 294705 - DNA, 201 bp, Homo sapiens
agaagttgggttggaagggcagatactgaattccacgcgagaggggttgatagtgagctgcttggggaaattgttgccatggggccagtgggatttggggmtgatgctttcaaaggaggaatcagacaagtaaaacggtaattgatgctgtggcagtagctgtgatttgtaaggaaactgtagaaagaggaaaagaataga

SEQ ID NO: 294706 - DNA, 201 bp, Homo sapiens
tggagaggtagcagagggctggcccatgtttatcttgtgtagtgcttgggtggtgggtgttacagaaaggcttagggtttccacatattcttctctctcctcttggccattttttatgattatgactgatatattaaaagctatatataatgcatgcatagtgcctaaggaataatgaggtctcacatgcctagcacccca

SEQ ID NO: 294707 - DNA, 201 bp, Homo sapiens
gtcacaaccaggttaggttggccccaggccatcactctgctgtggtgctgctccatcacctccaaaccagctcctaacaagtttattcattcattcattchtttattcagaaaatgtgtaaagatcatccagccactgtgtgtgaggtgctggaatatacagatgaatataatatggtccccaccctctgtggtcaatgga

SEQ ID NO: 294708 - DNA, 201 bp, Homo sapiens
gccatcggctatctgcactcccacaggcacctctaccccgagggcattggtgcccgtcagcagcaggtcagtgagccttttgtgcacttgtacggcagcartgctgttcgccatgacagttcactctcttgcctcctatcctttgctcatcctgttcgccctgcttgaaacattcttcctagccctgcacccttctgtttt

SEQ ID NO: 294709 - DNA, 201 bp, Homo sapiens; identical to SEQ ID NO: 60734

SEQ ID NO: 294710 - DNA, 201 bp, Homo sapiens
aggatcctctgtgtgctgtagtgacggctagaagagttaatatatgcatcgtacttggaatgatgcgtgacgcatacatagtaagcactcggtaaatgctkccttcgacaagggcagaggtgacacaaaggagagggctgcctgagtccaggggcacctaaggattctccttttactcctgcctgactggtcacttgtgaa

SEQ ID NO: 294711 - DNA, 201 bp, Homo sapiens
atgattatgattagatctctagtttagaaaggtaactttagtggaaatgtgatagctcacaaggaaccagtttggaggcaataattatgacaaaggacagkgaacagaggcaaaaagcatggaatctttactttgcaaagatttgttctttgcaaaaagttgtctctctccaaatgctttatttttatttcccttttagtt

SEQ ID NO: 294712 - DNA, 201 bp, Homo sapiens
gttcaattaattttaggattgggtaaaatgtactacaaatctcattcactagtaatacttaatgtatatcaatagttatatataacaagcctttatattaytggaggggagaatcggcgtgggtaatcccaaggaatagatttacctccacgttattcacggttgagtttggaatgggtaataagatagatttgtatgtga

SEQ ID NO: 294713 - DNA, 201 bp, Homo sapiens
ttcaaagggccgcagtgacgctggggccgtgcagctgtcccctttgtgtctgatgccctggatgcacttttgaccttggaggcacaacctctccaccatgyagaggcctgtaaactattcccagccccttgctgaactggattcataaggcactgggtggcagtccactgaactttctgggtctttcttaggctataccag

SEQ ID NO: 294714 - DNA, 201 bp, Homo sapiens
agggggagtgtgggaatggggggcagggaacccctctttagtcaccatggccccctgtcagaacagctctccgggtgagggaggggggaaccggggggcartgggggacagggcacccctctttagtcactgtggccccctgccggaagagctctcgacgggtggggtgggaagggtgggaatgggaagtgtgtggctgag

SEQ ID NO: 294715 - DNA, 201 bp, Homo sapiens
gctacatgggaatgagaggagtaaggcttcctgacttgaaatggactgactgaaccctggggccacactaaaccagaaatgttatagttagcagccctggygtggtggcaggtgcaaataaagggactttgggtggtgaggagaggggaggatgatcagaccctcccctgtggtgtagatactcagaactgaggtgaggaa

SEQ ID NO: 294716 - DNA, 201 bp, Homo sapiens
tctctggggcagagcctcccctttttcccctgcctggtgcctgttcaaggcctccaattcccacattgtggtctgggcacagccttcttacctgttggccyccatcctttatgagattgatgggcaccgtctcgtagtcgatgcctttcaaggccagagctaggagagaccgcacatagcggagtcaaagaacagcctctc

SEQ ID NO: 294717 - DNA, 201 bp, Homo sapiens
atgaatatacaactcccctggctactcacatcttttcagtttgtcccttacagcatttaattaaggttgttgtcaatgggactctaagcagcagaataagrccagcttacagtatttacctcaaccatgccctccagggtcctggattcagccacttgtgaataagtcctgggggcaccgaggaatcttatttcagacatc

SEQ ID NO: 294718 - DNA, 201 bp, Homo sapiens
cacatggtcatgatccgggtatgtgtccccttctcatttcatggcgtctctaagagcttttgggcagccatgaatttggatcacaagtcaatgccatgctmcagatccattcccccttgtggaggaatttgaaagcatctttactacggttttctgtgatcctcaaaggcatttccctcaccacagaatgaggatggtggt

SEQ ID NO: 294719 - DNA, 201 bp, Homo sapiens
ggtggccaattgcacaccctgagtggggagcatggattctattatctgaacttctattgaaaaaattaaacagtacttccgttaaaaaaaaaaaaaaaaaaggccgggcgcagtggttcacgcctgtaatccccagcactttgggaggccgaggtgggcggatcatgaggtcaggagatcgagaccatcctgtctaacacg

SEQ ID NO: 294720 - DNA, 201 bp, Homo sapiens
atgtggaggaccatatcaatcccaagtgtgagtgaggtcactttctgggctggctctggagggaagcatttataagaaacccttatcttagaaaagtaagygtttgtaaactgtgctatcccttcaacttgctgctgtttgttccttgttaacactctctttctatgagttgtctgtacctacatagcatactccttttcc

SEQ ID NO: 294721 - DNA, 201 bp, Homo sapiens
ctctctagtcttgtcctgggactagaggcaccttcccagaacagctgcagccttagataccctggggagaaggcctgagcactcagcccgaggtccctgaygcagcaccttcccgtgggccttctgcttaatgcatcagcagccgctcatctagggcccaggttttcctggctcccccaggtgcacccagatcagtgtgtg

SEQ ID NO: 294722 - DNA, 201 bp, Homo sapiens
ggtgcttctatgaatatgggcttcagctgtagcacttggcagaaacgtgatgtgtcccacaaactgctggtggaggaagaagatgttcgtcagccaattcracctccagccagcttcttgagcctatttggtttaaaaaaaaaaagtcttctaatcagaagccactgattttataataaataacacttgttttgaatgcct

SEQ ID NO: 294723 - DNA, 201 bp, Homo sapiens
tgaatgtttgccaggctttggtgctggatagggacaaagagaacattgtttcccttctctttacatctccagggtcctgtggtgttccttccccagatgcyaggattgtttctttccttccattgctacataatgagtgtgtcctaccctagtaactataacttcaccttttctccatttatcccctaccaatacgcaggc

SEQ ID NO: 294724 - DNA, 201 bp, Homo sapiens; identical to SEQ ID NO: 60732

SEQ ID NO: 294725 - DNA, 201 bp, Homo sapiens
cctggtgcctgttcaaggcctccaattcccacattgtggtctgggcacagccttcttacctgttggcccccatcctttatgagattgatgggcaccgtctygtagtcgatgcctttcaaggccagagctaggagagaccgcacatagcggagtcaaagaacagcctctcgccgtactcttaaaggaaagagcccttctaag

SEQ ID NO: 294726 - DNA, 201 bp, Homo sapiens
ttttttttttttagagatgagatctgactctgttgcccagtctggagtggagtggtacaatcatagctcactgcatcctcaaactcctgggctcctcctgyctcagcctcctgagtagctggcactacaggcacgtgccaccatgtccagctaattaaaacagattttttaagagctgagttctcactatcctgccaaggc

SEQ ID NO: 294727 - DNA, 201 bp, Homo sapiens; identical to SEQ ID NO: 60733

SEQ ID NO: 294728 - DNA, 201 bp, Homo sapiens
cattccaggcgaagacagaagatacttccttctttattccattgaatccatgtggagaccttgagaaggacaagttgtttttcgtcttttgctgttacacrtagtgctttgataatgacagtgttaacacaagcttcttctgaagccctcaggaggcgggggagtaagtgggccctgtggtgaactctgtcttgagtcggc

SEQ ID NO: 294729 - DNA, 201 bp, Homo sapiens
tcgagatcaccccattgcactctaacctgggcgacaaagcaagactctgtctcaaaaaaaaaaaaaaaagaaaaactagtgtgtgcatgtatttatgtacrtgtctgtgtgttcattctccagagcatcattaaataagaatcaaagttccagacatctctcaattggctcccttaattcagccactcctgaagagtttaa

SEQ ID NO: 294730 - DNA, 201 bp, Homo sapiens
agcagtttgggatgctgaggtgggaggattatttgagcccaggagtttgagaccagcctgggcaacatagtgagaccctgtctctgaaaaaacaaaacaamaaaaaaaaaaactgatgaaatcaggaaaacaatacatgaataaaataatatcataaagagaaactaagaaccaaaatttggagctggagagcacaataat

SEQ ID NO: 294731 - DNA, 201 bp, Homo sapiens
ttttcctgtcaaattttccttgtattcttttttttttctgagacggagtttcacttctgttgcccaagctggagtgcaatggtgtgatctcggctcactgygatctctgcctcctgggttcaagcgattctcctgcctcagcctcccaagtagctgggattacaggcatgcaccaccacacccggctaattttttgtgttt

SEQ ID NO: 294732 - DNA, 201 bp, Homo sapiens
acatcagaacatccacatatatgaggcaaatattgacataactgaaggtatacaattatagtaggagattttaatacccaactttcaataatggatagaasaaccagacaaaaggttagtaaggaaacagaagacttgaacaacatgacacaccaattagaacctaatggacaagtacataacactccactcagcagcaga

SEQ ID NO: 294733 - DNA, 201 bp, Homo sapiens
ctcaaaaataaaaatactaaaaaaaaacctattactataaaaccatgctaatggatacaaaatatccaaaagatataattcatgagataaataacaaaaakcaggggtaggggaagatgaagtagagtttttgtatatgattgacattatcatcttaaaataggttgttacaactatttttatgatttttatgcaatttcc

SEQ ID NO: 294734 - DNA, 201 bp, Homo sapiens
tgtagaagaacatagttagccaatctttctcgtaacttccctacttacccacaaatagtaaccacaaaccatttttgttgctgtacaaaggtttaaaattrcaatagaacatttattcccattacttgaacactgaagtattctccttgtgcatcaatgagaagagaaaccatcggtcaataacatgaaaagttactgaaa

SEQ ID NO: 294735 - DNA, 201 bp, Homo sapiens
ttaagttgaaatgaaaacatgctagtcaacaacacaaaagtatacaaaaataaaaagctctctggcaaaggtgaatatatagccatatacataatactgtkatgggtggcacataaatcatttttaattgtggtataggatttaaagataaaagctggccaagtgtgatggctcacacctgtaatctcagcactttgggag

SEQ ID NO: 294736 - DNA, 201 bp, Homo sapiens
ttgcctcatgcccataatcccagcactttgggaggctatggcagggggatcacttgaagccaggagttggaaaccagcctggataacagtgagatcccatygctagccaaaaaaaaaaaaaaaaaaaaaaaaaaaaaattaactaccagtgagtgtttttatgcaactacatgagttatcagtctttcttcatttatagat

SEQ ID NO: 294737 - DNA, 201 bp, Homo sapiens
gttttccaatgacatttatgacataccaccagatgtgagtgtacactttaggtttatacttttgaaaatccatattgcctcatgcccataatcccagcacwttgggaggctatggcagggggatcacttgaagccaggagttggaaaccagcctggataacagtgagatcccatcgctagccaaaaaaaaaaaaaaaaaaa

SEQ ID NO: 294738 - DNA, 201 bp, Homo sapiens
accaagaatactatctcttgcaaacctgtgcttcaaaaactaaggagaagctgggcatggtggctcacatctgtgaccccagcactttgggaggccgaggygggcagatctcctgaggtcaggagttcaagaccagcctggccaacgtggtgaaaccctgtctctactaaaaatacaaaaattagctgggcatggtggcag

SEQ ID NO: 294739 - DNA, 201 bp, Homo sapiens
agcagtgagccaagattgcaccactgcagtccagcctgggcgaaagagcgagactctgtctcaaaaaaaaaaaaaaaaaaaaggaaaaagaaaaaaaaaaacctgtcaaccaagaatactatctcttgcaaacctgtgcttcaaaaactaaggagaagctgggcatggtggctcacatctgtgaccccagcactttgggag

SEQ ID NO: 294740 - DNA, 201 bp, Homo sapiens
ttgccatgtactctcagtggttaacataagaagtcactctccaatgtctgttatattctgttttccaatgacatttatgacataccaccagatgtgagtgwacactttaggtttatacttttgaaaatccatattgcctcatgcccataatcccagcactttgggaggctatggcagggggatcacttgaagccaggagtt

SEQ ID NO: 294741 - DNA, 201 bp, Homo sapiens
gggactgatgatcgaggcttgtgcccatgcaaccttcttctgcaaactattatataatttgaggtaagccgagtatccaaattcaggaagatggacaagartctcactgctgagaattcaaatgtcttaaattttttttatattggagggtaagtttggctggtggattgtcatcctatcttttccaacccagagtcaatg

SEQ ID NO: 294742 - DNA, 201 bp, Homo sapiens
attagccgggcgtggtggcgggcgcctatagtcccagctacttgggaggctgaggcaggagaatggcgtgaacccgggaggcggaggtagcagtgagccamgattgcaccactgcagtccagcctgggcgaaagagcgagactctgtctcaaaaaaaaaaaaaaaaaaaaggaaaaagaaaaaaaaaaacctgtcaaccaa

SEQ ID NO: 294743 - DNA, 201 bp, Homo sapiens
cccaaagtgccgggattacaggcgtgagccactgcacctgcccctaaaatattatttctatacaataaatggcacacagttaaaagagtacaatttgatgytttgacacgtatacaactgtgaaaccatcacaaggtaatgaacgtatcccatcacccccaaaagttgccacttgtctttggtaatccctttctgtccact

SEQ ID NO: 294744 - DNA, 201 bp, Homo sapiens
tttgggaggctgaggggggcggatcacgatgtcaggacatcgagaccatcctggctaacatggtgaaaaaccgtctctactaaaaatacaaaaaattagcygggcgtggtggcgggcgcctatagtcccagctacttgggaggctgaggcaggagaatggcgtgaacccgggaggcggaggtagcagtgagccaagattgc

SEQ ID NO: 294745 - DNA, 201 bp, Homo sapiens
ttggtggcttctcagcagaaacattacaggccagaagggagtgcttgatatattcaaagtgctgaaaggggaaagaaaaaaaaaacctgttggtcaggtgyggtggctcacgcctgtaatcccagcactttgggaggctgaggggggcggatcacgatgtcaggacatcgagaccatcctggctaacatggtgaaaaaccg

SEQ ID NO: 294746 - DNA, 201 bp, Homo sapiens
cagtttgggatgctgaggtgggaggattatttgagcccaggagtttgagaccagcctgggcaacatagtgagaccctgtctctgaaaaaacaaaacaacamaaaaaaaaactgatgaaatcaggaaaacaatacatgaataaaataatatcataaagagaaactaagaaccaaaatttggagctggagagcacaataattg

SEQ ID NO: 294747 - DNA, 201 bp, Homo sapiens
aaaggaatgcactcacatctaatagcaataaaaattgacatctgtctcagattggtatcagtaagatgaagaaataggaagctccagactctgtaacctcragacactaacttaacaacaatatatggtccaaaaagcctttatgaaacctccagcaagcacttaagaaattgtagtgccctggagaggtacaaatccaag

SEQ ID NO: 294748 - DNA, 201 bp, Homo sapiens
ctgaagagtttaaggtgggcatcattggaggtggccaccttgggaagcagctggctggcacactgctgcagcttggccccatccctgctgaaagcctgcgratctccactcggaggccagagactctgggtgaggagcagtgtgtggtagaaagggggcttggttgtgctgtgtaggtgtcaacaaagccattttgaaagg

SEQ ID NO: 294749 - DNA, 201 bp, Homo sapiens
tctagccattccttatctattggcaaggaatgcaaatggaatcagttctttcttttggggctgaggtaatagtggaatgctcccttacaggaagctacccrggacttcacaggccctgtgccagtgacttccttgaaaccaggaatattgatttgcagaaaagctgtcagtccagtcttgattctgatatctttctacaat

SEQ ID NO: 294750 - DNA, 201 bp, Homo sapiens
gtcctccaaagaggaatccttgcatacagcgtgtggagttctcagcttgctagccctaagaaaggttagaagcatggccttttctcctgttctttaaagcractttttttctccatgtatgtgttttatatccatgtctcctccctgtgcccttggtggtgaagtatctttccagatctttgatacagggaagctttccat

SEQ ID NO: 294751 - DNA, 201 bp, Homo sapiens
catttttcatgaagatagaaaaaaaatccaaaaattgatatggatgaagcttgaggacattatgctaagtgaaattagccatgtacaaaaagacaatactrcataattctacttatatgaggtatctaaagtagtggaacagaaagtagaatggtagtttccaggggctggggagagagaaaaattgtatagagtttcagg

SEQ ID NO: 294752 - DNA, 201 bp, Homo sapiens
tatccctcccaggtgagctccagaagctgggaatcaaatgcttttaccataacgctgatctggtgagttgggccgatgtgatattcctctgctgcttgccrtctcagctgcctaatatctgcgtagaaatttacaccagccttgagaaggccagcattgtgtacagctttgtagctgccatcccactacccaggtatcttg

SEQ ID NO: 294753 - DNA, 201 bp, Homo sapiens
cccagctactcaggcggctgaggcaggcaaatcacttgaacccaggaggcggagcttgcagtgaggtgagatcacatcattgcactccagcctcagcaacrgagtaagactctgtctcaattaatcaatcaataagaaataatgatgttaagcccctccactttcccacagtagaaggttaccccagcaggctttgagcac

SEQ ID NO: 294754 - DNA, 201 bp, Homo sapiens
aagattctgtcagcgtctggggggccaataagggagtcatagctgctctccaagatcctacgattcttcaagctacctgtccctacagtcctgctggtcayggctcaacatatttctggcattcttttgaaaattactttcctgttggcccattgctatcttattaaatcaatctctctctctctgtgtgtgtgtgtgtgt

SEQ ID NO: 294755 - DNA, 201 bp, Homo sapiens
gcgggcagatgacgaggtcaagagattgagaccatcctggccaacatagtgaaaccctgtctctattaaaaatacaaaaattagctgggcatgatggtgcrtgcctgtagtcccagctactcaggaggctgacgcaggagaattgcttgaacccaggaggcagaggttgcagtgagctgagatcacaccactgcactccag

SEQ ID NO: 294756 - DNA, 201 bp, Homo sapiens
atgtgttttttaaccacaataaaaaaaaaaattgaaagctgtctgcacagaaacaaacaaaacatgaggggactggcccacaatgtgttatagacattacrgtatgctgtataatagtggctgttcacagtggtgtcctgagccagtgaaatgattaaatattcagactgtttaaccaggcaagcataatacatgtaacaa

SEQ ID NO: 294757 - DNA, 201 bp, Homo sapiens
agatgtgagccaccgtacccagcatgtgttttttaaccacaataaaaaaaaaaattgaaagctgtctgcacagaaacaaacaaaacatgaggggactggcmcacaatgtgttatagacattacagtatgctgtataatagtggctgttcacagtggtgtcctgagccagtgaaatgattaaatattcagactgtttaacca

SEQ ID NO: 294758 - DNA, 201 bp, Homo sapiens
gaaaacaatatatgaaacttgcaggtggcattttatatttggaaggatcaggcactaagagaaaatgctctttcaaccaggagagaaggcttaaatagagwgtgacttatgttgcttagaagcaaaatccagagctttaagacactggtttttacagaaatacagaacaaatataaggctgtcatatagcaacgaaagtat

SEQ ID NO: 294759 - DNA, 201 bp, Homo sapiens
atcaagtcttgctctattgcccaggctggagtgcagtagtggatcttggctcactgcaacctccacctcccgggttcaagagattctcctgcctcagcctyctgagtagcagagactacaggtttacaccatcatgctgggctaatttttatatttttaatagagatggggtttcaccatgttggccaggctggtcttaaa

SEQ ID NO: 294760 - DNA, 201 bp, Homo sapiens
accaaatttgaattgaacatgtttatagatacagcacatgtccaaggaggcaggcttctcagtgaatttactgactggcttactgataaggatgcataaayctattggtggtactcaatatgactgggagaaaacaatatatgaaacttgcaggtggcattttatatttggaaggatcaggcactaagagaaaatgctctt

SEQ ID NO: 294761 - DNA, 201 bp, Homo sapiens
agggccgcccctactgggaggtgaggagcccctctgcccggccagccgccccgtccgggagggaggtgggggggtcagccccccgcccggccagccgcccygtccgggaggtgaggggcgcctctgcccggccgcccctactgggaagtgaggagcccctctgcccagccaccaccccgtctgggaggtgtacccaacagc

SEQ ID NO: 294762 - DNA, 201 bp, Homo sapiens
aaaaataagaaagggccgcccctactgggaggtgaggagcccctctgcccggccagccgccccgtccgggagggaggtgggggggtcagccccccgcccgrccagccgccctgtccgggaggtgaggggcgcctctgcccggccgcccctactgggaagtgaggagcccctctgcccagccaccaccccgtctgggaggtg

SEQ ID NO: 294763 - DNA, 201 bp, Homo sapiens
aggagaatggcgtgaacctgggaggcggagcttgcggtgagtcgagatcaccccattgcactctaacctgggcgacaaagcaagactctgtctcaaaaaawaaaaaaaaagaaaaactagtgtgtgcatgtatttatgtacatgtctgtgtgttcattctccagagcatcattaaataagaatcaaagttccagacatctc

SEQ ID NO: 294764 - DNA, 201 bp, Homo sapiens
tgagcaaactttataggggtaaatgcctacgttaaaaataagaaagggccgcccctactgggaggtgaggagcccctctgcccggccagccgccccgtccrggagggaggtgggggggtcagccccccgcccggccagccgccctgtccgggaggtgaggggcgcctctgcccggccgcccctactgggaagtgaggagcc

SEQ ID NO: 294765 - DNA, 201 bp, Homo sapiens
ggttgcaacaaaagcagtactatgagcaaactttataggggtaaatgcctacgttaaaaataagaaagggccgcccctactgggaggtgaggagcccctcygcccggccagccgccccgtccgggagggaggtgggggggtcagccccccgcccggccagccgccctgtccgggaggtgaggggcgcctctgcccggccgc

SEQ ID NO: 294766 - DNA, 201 bp, Homo sapiens
cgtgaacctgggaggcggagcttgcggtgagtcgagatcaccccattgcactctaacctgggcgacaaagcaagactctgtctcaaaaaaaaaaaaaaaaraaaaactagtgtgtgcatgtatttatgtacatgtctgtgtgttcattctccagagcatcattaaataagaatcaaagttccagacatctctcaattggct

SEQ ID NO: 294767 - DNA, 201 bp, Homo sapiens
aaatgctgggattacaggtgtgagccgctgtgcccagcctcacatttttttttctaactctgattctcccacttctctcttatacagacacacgatattayattgagggcgaatctcaacaacccaggctaatcttttcatctcaagattcttaatttactggcattttcaaagtctctcttgtgtttttgttacccttat

SEQ ID NO: 294768 - DNA, 201 bp, Homo sapiens
ctccttcctgtaagaaacactctttgatctcctcctatcattcctacactgattcccttttcctccacctcagtctggacttttttttttttttttttttttgaggatcctgcagagagagaaccttactctcttgattgagccttgaaggttgagaatggcttccttgacagcagagtctagagctttcataatctgtcc

SEQ ID NO: 294769 - DNA, 201 bp, Homo sapiens
atctgtcaattaactttctatgtattcatctatccatcattccatccattcatcaatgctttcatcattcatacatctatcaatctatccactctccaacygttatccatctatctcaaaccatccatccattaaccatccacccatctattaagtcttccatccatccatccatccatccatccatccatccatccatct

SEQ ID NO: 294770 - DNA, 201 bp, Homo sapiens
cactctgcttgtcttgcctgctcatcctcattgcctggaaatgaatgaataaggcaggaaagctgcccccaggtcctacaccaattcctttcctggggaasctgctgcaagttcgaactgacgctacgtttcagtctttcatgaaggtgagtctgtctgtctcctctaatagggctaaaagcaactaatcctattgccaga

SEQ ID NO: 294771 - DNA, 201 bp, Homo sapiens
agaatccatctctaactgcccacatccttcaattccaagcagactcaccacatactgtctgtctatctatctatctatctatctatctatctatctatctwtctttctattaccttttcttccttttgtccactgatccatattcatcagaaaatccactcattattctttctataaaaacatctttcactctattatcta

SEQ ID NO: 294772 - DNA, 201 bp, Homo sapiens
cattgcctggaaatgaatgaataaggcaggaaagctgcccccaggtcctacaccaattcctttcctggggaacctgctgcaagttcgaactgacgctacgwttcagtctttcatgaaggtgagtctgtctgtctcctctaatagggctaaaagcaactaatcctattgccagattcacatagaaccttatgacttctaaag

SEQ ID NO: 294773 - DNA, 201 bp, Homo sapiens
tcagagaccacttactagaaactttaatcagtggatctcaggctgtctgtgagctcttgatatcctatgcagattttggtgacatgtgactttgtgatttktcttgaagacaggctcaaatttcattacatttgtatatccgtattatggtaaaaaatacataatataaaagttaccatattcatcattttaagtgtccag

SEQ ID NO: 294774 - DNA, 201 bp, Homo sapiens
cttccctagcaaaaacacctcctgcttttgtttattttttctctgttctcagctatattttctggccccttccagctaagatccatgaagagattaaccargtgattggaccacaccggctcccaagggtggatgaccgggtcaagatgccctacacagatgccgtcatccacgaaatacagagactggtagacatcgtgc

SEQ ID NO: 294775 - DNA, 201 bp, Homo sapiens
ctccaagctcagggagaaatacagccctgtgttcactgtgtacatgggtccccggccagtggtggttttatgtggacatgaagcagtgaaggaagccttgrtagaccaagcggatgagttcagtggccgtggagaactggcttcaataaagcaaaacttccaaggtcatggtaggtagcaacaacaacaaaaacaataaaa

SEQ ID NO: 294776 - DNA, 201 bp, Homo sapiens
ccttccttctgccctcccctgtgcctccaggaaagcgcatctgcctgggcgaggccatggaccgcatggaactctttctctacttcacctccacccttcaraacttctctctacactcgctggtgccgcctgtggacatcgatatcacccccaagctctcaggctttggcaacatccccccgacctacgagctctgtcttg

SEQ ID NO: 294777 - DNA, 201 bp, Homo sapiens
acaacaacacatttaagtaataataataaaaaataatgattaagctcaactagcttttcttgagtgcttactgtatgccaggcattgtgctaattattttrtatggataatgataatgaatcctcatgagtgaatgaaacggttcccaaaccaatttgcagattggtcaatctagactcaaaacacaaaaataaagtggct

SEQ ID NO: 294778 - DNA, 201 bp, Homo sapiens
cctcctactgtgttttccttcactccaagctcagggagaaatacagccctgtgttcactgtgtacatgggtccccggccagtggtggttttatgtggacaygaagcagtgaaggaagccttggtagaccaagcggatgagttcagtggccgtggagaactggcttcaataaagcaaaacttccaaggtcatggtaggtagc

SEQ ID NO: 294779 - DNA, 201 bp, Homo sapiens
ggccccttccagctaagatccatgaagagattaaccaagtgattggaccacaccggctcccaagggtggatgaccgggtcaagatgccctacacagatgcygtcatccacgaaatacagagactggtagacatcgtgcccatgggtgtcccccacaacctcatccgggacactcagtttcgaggctaccttctgcccaagg

SEQ ID NO: 294780 - DNA, 201 bp, Homo sapiens
ttcagctcccatctgtgaaacagggattaatgcctccaaacaattggaagagtggcttacaaacagtaagtgttattaagggtgagttttcactttttttstcaccagtgtctggcacctaataggcatttgacaaacccttgaggaactgaaatgaacacaaccttgaaactcatggatcctatagaaccattccctctt

SEQ ID NO: 294781 - DNA, 201 bp, Homo sapiens
ggtggagccttgggtgagtcacttcagctcccatctgtgaaacagggattaatgcctccaaacaattggaagagtggcttacaaacagtaagtgttattamgggtgagttttcactttttttgtcaccagtgtctggcacctaataggcatttgacaaacccttgaggaactgaaatgaacacaaccttgaaactcatgga

SEQ ID NO: 294782 - DNA, 201 bp, Homo sapiens
cactccaccatttagaaatggtggagccttgggtgagtcacttcagctcccatctgtgaaacagggattaatgcctccaaacaattggaagagtggcttayaaacagtaagtgttattaagggtgagttttcactttttttgtcaccagtgtctggcacctaataggcatttgacaaacccttgaggaactgaaatgaaca

SEQ ID NO: 294783 - DNA, 201 bp, Homo sapiens
tcaggacagtggttgggaatctggactccactccaccatttagaaatggtggagccttgggtgagtcacttcagctcccatctgtgaaacagggattaatscctccaaacaattggaagagtggcttacaaacagtaagtgttattaagggtgagttttcactttttttgtcaccagtgtctggcacctaataggcatttg

SEQ ID NO: 294784 - DNA, 201 bp, Homo sapiens
ccaacttgggcaacaagagtgaaactctgtctcaaaaaaaaaaaaaagctaagctaaaggttagataatgtcacacagtaagtggtaggatcactttattwtgaacctatgccatccgactctaaactgtcttctgtgtcttctgtgttatttctgctcttattttaatggattagtgatattctcttttttttttttttt

SEQ ID NO: 294785 - DNA, 201 bp, Homo sapiens
gcctatgcttggtactccaatcagcccctcctactgtgttttccttcactccaagctcagggagaaatacagccctgtgttcactgtgtacatgggtccccggccagtggtggttttatgtggacatgaagcagtgaaggaagccttggtagaccaagcggatgagttcagtggccgtggagaactggcttcaataaagca

SEQ ID NO: 294786 - DNA, 201 bp, Homo sapiens
acctggagtcaggacagtggttgggaatctggactccactccaccatttagaaatggtggagccttgggtgagtcacttcagctcccatctgtgaaacagrgattaatgcctccaaacaattggaagagtggcttacaaacagtaagtgttattaagggtgagttttcactttttttgtcaccagtgtctggcacctaata

SEQ ID NO: 294787 - DNA, 201 bp, Homo sapiens
agtgtatgtcatttggaacctggagtcaggacagtggttgggaatctggactccactccaccatttagaaatggtggagccttgggtgagtcacttcagcycccatctgtgaaacagggattaatgcctccaaacaattggaagagtggcttacaaacagtaagtgttattaagggtgagttttcactttttttgtcacca

SEQ ID NO: 294788 - DNA, 201 bp, Homo sapiens
catggagatgggaggggctgtcaccatctttctggcactctgcttgtcttgcctgctcatcctcattgcctggaaatgaatgaataaggcaggaaagctgyccccaggtcctacaccaattcctttcctggggaacctgctgcaagttcgaactgacgctacgtttcagtctttcatgaaggtgagtctgtctgtctcctc

SEQ ID NO: 294789 - DNA, 201 bp, Homo sapiens
cttcgggatgggaaagcggagcattgaggagcgaattcaggaggaggccagctacctactggaggagttccggaagaccaagggtatgggggccacaaggsggaggaccactgggtgactgggtggttatggagctctcagtcatgagaggatgagctttggtgggagaaaggtctggaaaggaagaagagggaaaatatt

SEQ ID NO: 294790 - DNA, 201 bp, Homo sapiens
agatcctgtctcaaacaaacaaaaaacaacaacaacaaaaagtgtatgtcatttggaacctggagtcaggacagtggttgggaatctggactccactccaycatttagaaatggtggagccttgggtgagtcacttcagctcccatctgtgaaacagggattaatgcctccaaacaattggaagagtggcttacaaacagt

SEQ ID NO: 294791 - DNA, 201 bp, Homo sapiens
  misc_feature (1)...(201): n = A,T,C or G
ataataaaaaataatgattaagctcaactagcttttcttgagtgcttactgtatgccaggcattgtgctaattattttatatggataatgataatgaatcntcatgagtgaatgaaacggttcccaaaccaatttgcagattggtcaatctagactcaaaacacaaaaataaagtggctcacacatgcaattaagtagtag

SEQ ID NO: 294792 - DNA, 201 bp, Homo sapiens
tagtacagagttgaacacagcaaggggagggaggcagaagcctgagactgagatcttggcaggtgtagctctggccaatggagaacgatggaggattctcygacgcttccccctgaccatccttcgggacttcgggatgggaaagcggagcattgaggagcgaattcaggaggaggccagctacctactggaggagttccg

SEQ ID NO: 294793 - DNA, 201 bp, Homo sapiens
gcaacattttaagtgtatgttggcatggcacagtggctcatgcctgtaatcccagcactttgggaagccgaggcaggcggatcacttgaggccaggagttygagaccagcctggccaacatggtgaaaccctgtctctactaaaattcaaaaattagccaggcgtggtggcgggtgcctgtaatcccagctactcgggagg

SEQ ID NO: 294794 - DNA, 201 bp, Homo sapiens
actggctgttaagaacaaaataagacatattttctatttttccagccagatagtctctgaacctttgccattgatctatgaaagcagccatagacaatatrtaaatgaatgagtgtgcatgtgagcctgaaaaactgtttacggacactgaaatttgaattttgttttatcttcatataacacaaaagagtcttttttccc

SEQ ID NO: 294795 - DNA, 201 bp, Homo sapiens
aggaggccagctacctactggaggagttccggaagaccaagggtatgggggccacaagggggaggaccactgggtgactgggtggttatggagctctcagwcatgagaggatgagctttggtgggagaaaggtctggaaaggaagaagagggaaaatattaagaatccactaagatttctggcagcttccatattaagagt

SEQ ID NO: 294796 - DNA, 201 bp, Homo sapiens
gaggtgaagtcacacaggccaggtgcggtggctcacgcctgtaattccagcactttaggaggccgaggcaggcggatcacgaggtcaggagatcaagaccrtcctggctaacacggtgaaaccctgtctctattaaaaatattttaaaaattagctgggcgcagtggcaggcacctgtagtcccagctactcgggaggctg

SEQ ID NO: 294797 - DNA, 201 bp, Homo sapiens
agcgttcaagactccaagctgcctgtctcccgatgtctgatgagtaattgagcatcaccagtgtgtcagttgttaagttaaagaagcgaccaaacaggccrggtgcggtggctcacacctataatctcagcactttgggaggccaaggtgggtggatcacgaggtcaggagttcgagatcagcttgaccagcatggtgaaa

SEQ ID NO: 294798 - DNA, 201 bp, Homo sapiens
ttaaaaatgcaaaaagtagccaggtgtggtagtgcacacctgtaatcccagctacctggggggctgaggcatgagaatcatttgatcccaggaggcagaarttgcagtgagccaagattgcaccactgcactccagcctggggacagagcaagactccgtctaaaaaaaaaaaaaaagaaagaaaaaatatcaaatcaata

SEQ ID NO: 294799 - DNA, 201 bp, Homo sapiens
gtccccatcactgtctagtacagagttgaacacagcaaggggagggaggcagaagcctgagactgagatcttggcaggtgtagctctggccaatggagaaygatggaggattctctgacgcttccccctgaccatccttcgggacttcgggatgggaaagcggagcattgaggagcgaattcaggaggaggccagctacct

SEQ ID NO: 294800 - DNA, 201 bp, Homo sapiens
cagactcagcccatgctggcccctggagcccatcactgacaaagaccccttgcctattcccacagctatatgacatgtactctggaatcatgcagtatttkccaggaagacacaatctcatctactacttggtagaagagctcaaggacttcattgcctccagggtcaagatcaacgaagcatcctttgacccccaaaacc

SEQ ID NO: 294801 - DNA, 201 bp, Homo sapiens
aaagcggagcattgaggagcgaattcaggaggaggccagctacctactggaggagttccggaagaccaagggtatgggggccacaagggggaggaccactrggtgactgggtggttatggagctctcagtcatgagaggatgagctttggtgggagaaaggtctggaaaggaagaagagggaaaatattaagaatccacta

SEQ ID NO: 294802 - DNA, 201 bp, Homo sapiens
tagcactaaacagggcataaaccaactggctgttaagaacaaaataagacatattttctatttttccagccagatagtctctgaacctttgccattgatcwatgaaagcagccatagacaatatataaatgaatgagtgtgcatgtgagcctgaaaaactgtttacggacactgaaatttgaattttgttttatcttcata

SEQ ID NO: 294803 - DNA, 201 bp, Homo sapiens
cagaaaaatcacttgaacccgggaggtggaggttgcagtgagccgagatcatgccattgcactccagcctgggtgacaggctgtttaaaaaaaaaaaaaaragaagggagcaaacatgcatggctttcacttgagatctctttctgctggagctaggaatgcaggatttgtcctggcttccctagcaaaaacacctcctgc

SEQ ID NO: 294804 - DNA, 201 bp, Homo sapiens
cattttaagtgtccagttcagtagtgttaagtatattcatgttgtgaaaaaaatcttttgaacatttttatcttgcaaatctgaaaccctatactcatttyattatgttttaaaaggagttcagtcccaccaaaaaataaggtctagaaacactggggtctatagagaaaagacagagaggctgaaaaaaaaccagaaaaa

SEQ ID NO: 294805 - DNA, 201 bp, Homo sapiens
gaggctgaggcagaaaaatcacttgaacccgggaggtggaggttgcagtgagccgagatcatgccattgcactccagcctgggtgacaggctgtttaaaamaaaaaaaaaaagaagggagcaaacatgcatggctttcacttgagatctctttctgctggagctaggaatgcaggatttgtcctggcttccctagcaaaaa

SEQ ID NO: 294806 - DNA, 201 bp, Homo sapiens
agctaagatccatgaagagattaaccaagtgattggaccacaccggctcccaagggtggatgaccgggtcaagatgccctacacagatgccgtcatccacraaatacagagactggtagacatcgtgcccatgggtgtcccccacaacctcatccgggacactcagtttcgaggctaccttctgcccaaggtggggttgca

SEQ ID NO: 294807 - DNA, 201 bp, Homo sapiens
aaacactggggtctatagagaaaagacagagaggctgaaaaaaaaccagaaaaatagataagaggtagaaatagagacacatttcctctacatccaaggckccttgcctggtctacatgggtgattaacaggtctacataaaagcttcaaatgcccatgtaccccagaaattttcataaaattgtgtatttatgaatatgt

SEQ ID NO: 294808 - DNA, 201 bp, Homo sapiens
tggtaggtagcaacaacaacaaaaacaataaaaccggaaatgactgcaatgcactccctatatgccaggttctttggtaagtagtccacatgacttactgyattgactcccttaggagagctgttaacattatactaatgttgtcaatgaaaaagctaagataggccgggtgtggtggcttatgcctgtaatcccagcact

SEQ ID NO: 294809 - DNA, 201 bp, Homo sapiens
gcatgcctctttcccattttgtaaaaaacccatgtatgagagccaagctgggaccatggctttttggtgcttttaagtaaagaccaaatgtcctggcagcrttcaagactccaagctgcctgtctcccgatgtctgatgagtaattgagcatcaccagtgtgtcagttgttaagttaaagaagcgaccaaacaggccaggt

SEQ ID NO: 294810 - DNA, 201 bp, Homo sapiens
ggacagaacctgttgacctggcaccatggagatgggaggggctgtcaccatctttctggcactctgcttgtcttgcctgctcatcctcattgcctggaaaygaatgaataaggcaggaaagctgcccccaggtcctacaccaattcctttcctggggaacctgctgcaagttcgaactgacgctacgtttcagtctttcat

SEQ ID NO: 294811 - DNA, 201 bp, Homo sapiens
tcatttgatcccaggaggcagaagttgcagtgagccaagattgcaccactgcactccagcctggggacagagcaagactccgtctaaaaaaaaaaaaaaaraaagaaaaaatatcaaatcaatatttattggatgcttctgtgtgccaagcactgtcctagttccttgtacaccagactttatgtaatgtttacaactcta

SEQ ID NO: 294812 - DNA, 201 bp, Homo sapiens
cccatattcatgatcattgcctccaacataaacaatttctactgcccaggtgcccccatcgaccccatcttcttgctgagccgcaccgtttccaacgtcaycagttccgttgtcttcagaagtcgcttcgactatgaggacaagcagttcctgaatctgctgcggttgatcaatgagagtttcattgagatgagcactccc

SEQ ID NO: 294813 - DNA, 201 bp, Homo sapiens
gggctcaaatgcttctctcacctcagcctcccacgtggctgggattacaggcatgagccactgcacgccactcaacactccacaaatgttgatgccattakgttttgtgaactagtgtccctggcacccgagacttgtactccacactcgaggaccaaatagactggggtgggaaggggtttatagtttcattattatttc

SEQ ID NO: 294814 - DNA, 201 bp, Homo sapiens
ctgcacgccactcaacactccacaaatgttgatgccattatgttttgtgaactagtgtccctggcacccgagacttgtactccacactcgaggaccaaatrgactggggtgggaaggggtttatagtttcattattatttcccctcagggcacggaggtcttccccctccttggctccatcctgcatgaccccaacatctt

SEQ ID NO: 294815 - DNA, 201 bp, Homo sapiens
gcctacctccctgcccccattccccccaggacgcccattcgatccctccctgctgctggcccaggccacctccaacgtagtctgctccctcctctttggcytccgcttctcctatgaggataaggagttccaggccgtggtccgggcagctggtggtaccctgctgggagtcagctcccaggggggtcaggtgagtgggtg

SEQ ID NO: 294816 - DNA, 201 bp, Homo sapiens
cctgcctccctgtctctctctggttgggttcagccccaacctgctcccctctgcctggctccatcacagcctacctccctgcccccattccccccaggacrcccattcgatccctccctgctgctggcccaggccacctccaacgtagtctgctccctcctctttggcctccgcttctcctatgaggataaggagttccag

SEQ ID NO: 294817 - DNA, 201 bp, Homo sapiens
ccctcctcttgcttgcagagtgggtacgtgaggagctgaatcgggagctgggggctggccaggcaccaagcctaggggaccgtacccgcctcccttacacygacgcggttctgcatgaggcgcagcggctgctggcgctggtgcccatgggaataccccgcaccctcatgcggaccacccgcttccgagggtacaccctgc

SEQ ID NO: 294818 - DNA, 201 bp, Homo sapiens
tctccaacggggagcggtggaggcagctgaggaagtttaccatgcttgctctgcgggacctgggcatggggaagcgagaaggcgaggagctgatccaggcrgaggcccggtgtctggtggagacattccaggggacagaaggtcagcatggcggggtcaccccagggtctccagccgagtgaaagggaaaactctcctact

SEQ ID NO: 294819 - DNA, 201 bp, Homo sapiens
tcagggttctaggctgagcaaggtggctcacgcctataatcccagcactttgggaggctgaggcgggctgatcacttgagaataggagtttaagaccagcytggccaacacagtgaaaccccatctctactgaaaatacaaaaattagcgggtgtggtggcatgcacttgtaatcccagcactcaggtggctgaggagtga

SEQ ID NO: 294820 - DNA, 201 bp, Homo sapiens
cagaactcttcatgttgcaaagctgaaactctatacccattaaacaactgcctgttcctccctcctccaacccctggcaatcacctttttttttttgagaygaagtctcactctgtcacccaggctagagtgcggtggctcgatctcggctcactgcaagctccgcctcccgggttcatgccattctcctgcctcagtctc

SEQ ID NO: 294821 - DNA, 201 bp, Homo sapiens
tctacagcccctgttcggcgtcagagtccccactagacccagtggaaggggttagagaccaagtaggggccagtttccaattcaccctgtcagggagtgarccggatctgacgttccttgtgacttaagggtccggcttgggaattaaagtttgtttctggcctttagcctactgcgtgtgtgacccgtgtcagtcactgt

SEQ ID NO: 294822 - DNA, 201 bp, Homo sapiens
gagtccacccctcccctgaggctgggcgggagctgaaaaacatggccaccgcccaccctggctgttgacatcaggaccagatgtggagctgggaggagggrcagggctggtgacgccctgggcctcatttccaaaaagggccaaggtgtccggcggtgggaagtgggcaaggagggggtaacccaagctggactgtggacc

SEQ ID NO: 294823 - DNA, 201 bp, Homo sapiens
agtgagaattgtttgagcccaggaggtagaagttgcagtgagctgacatcacaccactgcactccagcctgggcgacagagcgagacactgtttcaaaaaraaaaaagtgagaattctagagggaagagtgggtgggccaagcagacaggctgagttagatctttgaggcatcgatgggcatggcgtttgagatgtcgagg

SEQ ID NO: 294824 - DNA, 201 bp, Homo sapiens
ccacccctcccctgaggctgggcgggagctgaaaaacatggccaccgcccaccctggctgttgacatcaggaccagatgtggagctgggaggaggggcagrgctggtgacgccctgggcctcatttccaaaaagggccaaggtgtccggcggtgggaagtgggcaaggagggggtaacccaagctggactgtggaccttgg

SEQ ID NO: 294825 - DNA, 201 bp, Homo sapiens
taacatacagagaagcagtttgaaaactgaggagcaagtccaggactaagggaagccctcttgacccttagcccctgctgcagacacattctctcctctgtctctctctctcaatctcagtgcccttcactggagagcagctccgatgcagaaccaaaagggggcgatgtttccccagaaaccccagcagtttatgcaagc

SEQ ID NO: 294826 - DNA, 201 bp, Homo sapiens
aacatacagagaagcagtttgaaaactgaggagcaagtccaggactaagggaagccctcttgacccttagcccctgctgcagacacattctctcctctgtctctctctctcaatctcagtgcccttcactggagagcagctccgatgcagaaccaaaagggggcgatgtttccccagaaaccccagcagtttatgcaagca

SEQ ID NO: 294827 - DNA, 201 bp, Homo sapiens
acagtgaaaccccatctctactaaaaatacaaaaaatgagccaggcatggtggcgggcgcctgtagtcccagctactcaggaggctgaggcaggagaattkcttgaacccgggaggcagaggttgcagtgagacgagatcacgccactgcactccagcctgggcaacagagcgagattccgtctcaaaaaaaaaaagaaag

SEQ ID NO: 294828 - DNA, 201 bp, Homo sapiens
tgcagccctgggtatcacaagcaggtgctggcgaactccaggcatctgtgccagctgggggcacccttctgcaccctgggcttactgttggctcctccacstgctgttccccccgtgggcctgggtgtgaggaatactgactcagccctctctctctctctctcctcaccagggaagcgtgtctgccttggagagggcctg

SEQ ID NO: 294829 - DNA, 201 bp, Homo sapiens; identical to SEQ ID NO: 60781

SEQ ID NO: 294830 - DNA, 201 bp, Homo sapiens; identical to SEQ ID NO: 60783

SEQ ID NO: 294831 - DNA, 201 bp, Homo sapiens
agaagaggctggagggttgcaggctcagagagggggtcccgctgaaggaatctgccagcagagaatgcaggatgggaggatgggtggagctcagttgggasttcctgggactggggaggaaggagagcaagaaagaaggcagaggcagccccagccttaggggatagcaggtgggagtgggcagaggcctgaagtttccca

SEQ ID NO: 294832 - DNA, 201 bp, Homo sapiens
gagtgggcagaggcctgaagtttcccattcaaaaggattctgggtgacttcaaggacgtagaaaaaagggtggggtcttgggggagagatggggcggataytcagcagtgtctgctccagaatttcagggttttgtggtgactgaaaggggtggctggatatttggggggcagggagggccctaaggaattaagggagacc

SEQ ID NO: 294833 - DNA, 201 bp, Homo sapiens
tgaaggatgtactgggggaggaggcccgggagcctagtgcaaaaagagaactgagcctcagctatttctgctgggatgggggcaggttcctggtagagggygtagaagctagacccggtggctcctcaagtgacaggggccatgatggagacaccttggatcgaagaggtcacagcaccctcctctttcttcctccctacc

SEQ ID NO: 294834 - DNA, 201 bp, Homo sapiens
ggaggggtcagggcaagaggggtcagggccaggctgagggaagccctgggactgtaggaatttagaggaggtacctgacccggcatgtttggtgagggagmttcaggaagtcttcctggaagagaggctgtcggagctgagactcataagatgagtggggagggtgttccaggcagaaagaccagcacctacaaaagcatg

SEQ ID NO: 294835 - DNA, 201 bp, Homo sapiens
acgccactgcactccagcctgggcaacagagcgagattccgtctcaaaaaaaaaaagaaagaaaggaagaagggggaatgggggagaggggccggtccctytttgagtctagccttctgcgcaggggttttcttctccaacggggagcggtggaggcagctgaggaagtttaccatgcttgctctgcgggacctgggcatg

SEQ ID NO: 294836 - DNA, 201 bp, Homo sapiens
cagggtctccagccgagtgaaagggaaaactctcctactgtggctgggggtggccccaacccaggtcctggaatgggcaggaggggaagccttgaactctrgggctggcctgggggttctgttcactgccaccttctgtctctgtcccactgtctctccgaggctgtcatgacatctctctgtgtgtctctggtgctatca

SEQ ID NO: 294837 - DNA, 201 bp, Homo sapiens
  misc_feature (1)...(201): n = A,T,C or G
tctacttcccaaccttcccaaaaatttatctaaaccccgtgacaaaactttaacttgtgtttccgaccccaggcttggctgttctggacatttacttcccnaaggctgtgttctctcagcccctctgcctggtttctttcaggaggaacaaaacccaggcacagaattcaccaacaagaacatgctgatgacagtcattta

SEQ ID NO: 294838 - DNA, 201 bp, Homo sapiens
  misc_feature (1)...(201): n = A,T,C or G
gtccctatctgtctgtatccttctttgcctgtttagctctctccctgcgctgtccatccatctttccctgcctccctgtctctctctggttgggttcagcnccaacctgctcccctctgcctggctccatcacagcctacctccctgcccccattccccccaggacgcccattcgatccctccctgctgctggcccaggcc

SEQ ID NO: 294839 - DNA, 201 bp, Homo sapiens
ctggatgcttcgggccccgcacgtgaccttgtcgatgccttcctgctgaagatggcacaggtgtgggaagggtgcagggaccccctctctgaatgggcgtsgtgacctggcaggtccccagccaggtgtccctggggacctcaattgggttcctctctctttctctctctgcatgtctctgtgagtatgagtgtctctgtg

SEQ ID NO: 294840 - DNA, 201 bp, Homo sapiens
gagaaggcgaggagctgatccaggcggaggcccggtgtctggtggagacattccaggggacagaaggtcagcatggcggggtcaccccagggtctccagcmgagtgaaagggaaaactctcctactgtggctgggggtggccccaacccaggtcctggaatgggcaggaggggaagccttgaactctagggctggcctggg

SEQ ID NO: 294841 - DNA, 201 bp, Homo sapiens
atcacaagcaggtgctggcgaactccaggcatctgtgccagctgggggcacccttctgcaccctgggcttactgttggctcctccacctgctgttcccccygtgggcctgggtgtgaggaatactgactcagccctctctctctctctctcctcaccagggaagcgtgtctgccttggagagggcctggcaaaagcggagc

SEQ ID NO: 294842 - DNA, 201 bp, Homo sapiens
tgagtctagccttctgcgcaggggttttcttctccaacggggagcggtggaggcagctgaggaagtttaccatgcttgctctgcgggacctgggcatgggraagcgagaaggcgaggagctgatccaggcggaggcccggtgtctggtggagacattccaggggacagaaggtcagcatggcggggtcaccccagggtctc

SEQ ID NO: 294843 - DNA, 201 bp, Homo sapiens
cacccagaagagttcaacccagaccgtttcctggatgcagatggacggttcaggaagcatgaggcgttcctgcccttctccttaggtatctgctgcagccytgggtatcacaagcaggtgctggcgaactccaggcatctgtgccagctgggggcacccttctgcaccctgggcttactgttggctcctccacctgctgtt

SEQ ID NO: 294844 - DNA, 201 bp, Homo sapiens
acatacagagaagcagtttgaaaactgaggagcaagtccaggactaagggaagccctcttgacccttagcccctgctgcagacacattctctcctctgtctctctctctcaatctcagtgcccttcactggagagcagctccgatgcagaaccaaaagggggcgatgtttccccagaaaccccagcagtttatgcaagcag

SEQ ID NO: 294845 - DNA, 201 bp, Homo sapiens
catacagagaagcagtttgaaaactgaggagcaagtccaggactaagggaagccctcttgacccttagcccctgctgcagacacattctctcctctgtctctctctctcaatctcagtgcccttcactggagagcagctccgatgcagaaccaaaagggggcgatgtttccccagaaaccccagcagtttatgcaagcagc

SEQ ID NO: 294846 - DNA, 201 bp, Homo sapiens
ttatgcaagcagctccctcctccaccttcactgcagaatcaaacctatggcagttaggatccagtgctgctatgctgctattttctttttcttcttcttctttttttttttttttttttttccgagatggagtctcgctctgttgcccaggctggagtgcactggcgtgatctcggctcactgcaacctccgcctcccagg

SEQ ID NO: 294847 - DNA, 201 bp, Homo sapiens
tatgcaagcagctccctcctccaccttcactgcagaatcaaacctatggcagttaggatccagtgctgctatgctgctattttctttttcttcttcttctttttttttttttttttttttccgagatggagtctcgctctgttgcccaggctggagtgcactggcgtgatctcggctcactgcaacctccgcctcccaggt

SEQ ID NO: 294848 - DNA, 201 bp, Homo sapiens
cagtgctgctatgctgctattttctttttcttcttcttctttttttttttttttttttttccgagatggagtctcgctctgttgcccaggctggagtgcastggcgtgatctcggctcactgcaacctccgcctcccaggttcaagcaattctcttgcctcagcctcctgggtagctgggattacaggtgtatgccaccac

SEQ ID NO: 294849 - DNA, 201 bp, Homo sapiens; identical to SEQ ID NO: 60786

SEQ ID NO: 294850 - DNA, 201 bp, Homo sapiens
acaccttggatcgaagaggtcacagcaccctcctctttcttcctccctacccccagctgagtaagaagtacggaccggtgttcaccatctacctgggaccstggcggcctgtggtggtcctggttgggcaggaggctgtgcgggaggccctgggaggtcaggctgaggagttcagcggccggggaaccgtagcgatgctgg

SEQ ID NO: 294851 - DNA, 201 bp, Homo sapiens
ctagacaggggatcctgacgcccttgaggaagtgagagaagaccagcgcagtcgtagtgggttaagtaacaaagctgagaagccagggaaatccctggtcwtgcagggcctgtgagtcacgtcagagtgtttgggcttttgtttttcctgggagcagtcgattttaagcagggaacagctgtattcagagttgggaagatc

SEQ ID NO: 294852 - DNA, 201 bp, Homo sapiens
tgggaagatcctgtggttgctgcctgaaggggatgaaactggaggctaggagcccagggtgatagggaggatccagggtgatggggaggctgggaggtccrcggtgatggaccagggctggggccaggggatggggaggaaggagtaattgggagaggcctggggctctggccgaggaatggatggtgggctgaaacaggg

SEQ ID NO: 294853 - DNA, 201 bp, Homo sapiens
agaccatcctggctaacacagtgaaaccccatctctactaaaaatacaaaaaatgagccaggcatggtggcgggcgcctgtagtcccagctactcaggagrctgaggcaggagaattgcttgaacccgggaggcagaggttgcagtgagacgagatcacgccactgcactccagcctgggcaacagagcgagattccgtct

SEQ ID NO: 294854 - DNA, 201 bp, Homo sapiens
cacctcagccttgcaaagtgctgggattacaggcatgagccaaggcacccagcccaactctagcattttcgggtcaggcagctgctgtgggccatggggaygggctgacctggaatatgggagtggaggtcctggtagtgttgcaggagtggaattagctgtgacttccagcagtgacttgggttctctgagtctgtttcc

SEQ ID NO: 294855 - DNA, 201 bp, Homo sapiens
acctggatgcttcgggccccgcacgtgaccttgtcgatgccttcctgctgaagatggcacaggtgtgggaagggtgcagggaccccctctctgaatgggcrtggtgacctggcaggtccccagccaggtgtccctggggacctcaattgggttcctctctctttctctctctgcatgtctctgtgagtatgagtgtctctg

SEQ ID NO: 294856 - DNA, 201 bp, Homo sapiens
tgtctctctctctcaatctcagtgcccttcactggagagcagctccgatgcagaaccaaaagggggcgatgtttccccagaaaccccagcagtttatgcamgcagctccctcctccaccttcactgcagaatcaaacctatggcagttaggatccagtgctgctatgctgctattttctttttcttcttcttctttttttt

SEQ ID NO: 294857 - DNA, 201 bp, Homo sapiens
acttttatgtaaattcacaattttatgtgaattatggtcatttattaggaagccttgcaatatcaagttatgttaataaagtccactttattaattatatragaacaatatttcttttccttttttttttcttttctttttaaagagacaggatctctttctgttgcccaggctagagtacagttgcaaaatcatagctca

SEQ ID NO: 294858 - DNA, 201 bp, Homo sapiens
gtttcactcttgttgcccaagctggagtgcaatggcgcgatctcggctcactgcaacctccgcctcccggattcaagcgattctcctgcctcagcctcccygagtagctgggattacaggcatgcaccaccacacctggctaattttgtatttttagtagagacggggtttcaccatgttggccaggctggtctcaaactc

SEQ ID NO: 294859 - DNA, 201 bp, Homo sapiens
ccttgaactcctaggctcaagtgatcctcccacgtcagcctcctgagcagctgggacaacgggctcataccaccatgcctggctaattttttaatttttcstagagacaaggtcttgttatattgcccaggctggtctcaaactcctgggctcaaatgcttctctcacctcagcctcccacgtggctgggattacaggcat

SEQ ID NO: 294860 - DNA, 201 bp, Homo sapiens
tcctcaccagggaagcgtgtctgccttggagagggcctggcaaaagcggagctcttcctcttcttcaccaccatcctacaagccttctccctggagagccygtgcccgccggacaccctgagcctcaagcccaccgtcagtggccttttcaacattcccccagccttccagctgcaagtccgtcccactgaccttcactcc

SEQ ID NO: 294861 - DNA, 201 bp, Homo sapiens
gatggggtgggaagctggtacagcccactttgcaggaggtgggggaatcgggaattcttttatatccatgaagtttgagatgtctgttagctctcccaggkgtagaacagagggagcagataggctcaaggttggatttggaacgtcctagaaaccttccagaacaaggcaaaggaggaactgagaactggcatttacttc

SEQ ID NO: 294862 - DNA, 201 bp, Homo sapiens
tcctaggctcaagtgatcctcccacgtcagcctcctgagcagctgggacaacgggctcataccaccatgcctggctaattttttaatttttcctagagacraggtcttgttatattgcccaggctggtctcaaactcctgggctcaaatgcttctctcacctcagcctcccacgtggctgggattacaggcatgagccact

SEQ ID NO: 294863 - DNA, 201 bp, Homo sapiens; identical to SEQ ID NO: 60793

SEQ ID NO: 294864 - DNA, 201 bp, Homo sapiens
cgagccgcgaggagctctggccccggggtgtccctcagggtgctggccaggctgcctttgttccgctttacacatggccctgtgtgatctcatgtccatcygtatgccagggctgcccagagccccagccagactgcttgtcagagccctgcttggcttctcgccctggatgtcccacagcaaactaatcctgtctgaact

SEQ ID NO: 294865 - DNA, 201 bp, Homo sapiens
ctcagcaccgcccactcacttggcactggaatgtgcattaacttttaattggctccccacttagaagaaagcacacattcatcagtttcccccacagcaaygggaaagccaggcctgggaacacatggaggagggcaccgccgagccgcgaggagctctggccccggggtgtccctcagggtgctggccaggctgcctttg

SEQ ID NO: 294866 - DNA, 201 bp, Homo sapiens
aaaaactagaggaacagatgggtggagtcgcatccttcctctgcaggcatttggccacccactcccattatggagcatttcctcaggaccaggcacagcgyggagccctttgcatagctcactgaattggggcagcaaccctggggctggggactaccattatctccaccagcccagcaaagaggggaggagggtacagcc

SEQ ID NO: 294867 - DNA, 201 bp, Homo sapiens
tgagaagagtggtgttcatcatgataggtagtgcctccctgggctcttgacaccagagtgctgttctttttttcttctccttttttttttttgagatggartctcgctctgttgcccaggctggagtgcagtggcgcgatctcggctcactgcaagctccacctcctgggttcacgccattctcctgcttcagcctcccga

SEQ ID NO: 294868 - DNA, 201 bp, Homo sapiens
tgctccccaccccgctgggatcatctccttccctccccaatcccgccaccttcctgccacccctaccctccttcctggttctcgtcctgtgtcctgtggcrtctggcacttggtcagccacaggagttgaggtcctgagcactcagccttgctctctgtcctctccctgctcgtccccttggcctcgtgcatgttccttat

SEQ ID NO: 294869 - DNA, 201 bp, Homo sapiens
ttatcacctgatgttgcatctcccccttgcctttattccgtttccactcctccttccctagttcatcccccatcctccctcctgacccccactccagggascccacactgacctggggccccttgcccctgtgcaggatcgggcaccacagcaccagtgacgacagttcagcgtaccgctcggtggatgaggtcaattact

SEQ ID NO: 294870 - DNA, 201 bp, Homo sapiens
ccacctagtgacatctgcatacatttcctgggccactcctagctgcaggggagactgagaaatgtattaataatactttagtcccggcagttgctgcctgygggagattgagacctctgttaacagaggaggggaatagtatactgggaaggcaaccaggagcctctgccagtagccccgagtcctgatcctcagggggct

SEQ ID NO: 294871 - DNA, 201 bp, Homo sapiens
accaccatgccgcctgcctgccgccggggctgagccagcggaaacctgggtgctgcttctgatgcaggtggtctcctctgctctcttccccagcacccccmcaggcagcagcagcagttttcatctctggatgacaagccccagttcccaggggcctcggcggagtttatagataagttggaattcatccagcccaacgtc

SEQ ID NO: 294872 - DNA, 201 bp, Homo sapiens
tgcctgcctcggactcccaaagtgctgggattacaggcatgagccaccacgcccagccttcctggctaatttaaaaatttttcagagacgggggttttgcytaggctggactcactatgttgcctaggctgatctcgaaccactggccttaagtgatcctcccacctcagcctcccaaagtactgggattacaggcatgag

SEQ ID NO: 294873 - DNA, 201 bp, Homo sapiens
caacgccacaaaggaggcccgacggcgggctgtggcagagaaccagccctttctcatcgaggccatgacctacaggtgcctgccgctccccccgtcagcayccccacagcactgacagccaccatagcatcttcctcatatcgatcactgtctccaaaacatggtcttatcacctgatgttgcatctcccccttgccttta

SEQ ID NO: 294874 - DNA, 201 bp, Homo sapiens
cacatgaaggggcagccccgaatctagcctacgtgagtgccggaccgctgagtggttgttagccaagatggcggtagcgatcgctgcagcgagggtctggmggctaaaccgtggtttgagccaggctgccctcctgctgctgcggcagcctggggctcggggactggctagatctgtgagtacctgggccccaggcggttt

SEQ ID NO: 294875 - DNA, 201 bp, Homo sapiens
tgtggccatggggacagaggttattatttgctcttgttcctgttttcaagagcaggatgcccgtgttttgtgtgtgtgtgagagacagcaagtgaatgggaaaaaaaaaagtgcaggagcctggccaacatggcaaagccctgtccctactaaacatacaaaaattagcttggcatggtggtgcacacctgtaatcctagc

SEQ ID NO: 294876 - DNA, 201 bp, Homo sapiens
ggcgggctgtggcagagaaccagccctttctcatcgaggccatgacctacaggtgcctgccgctccccccgtcagcacccccacagcactgacagccaccrtagcatcttcctcatatcgatcactgtctccaaaacatggtcttatcacctgatgttgcatctcccccttgcctttattccgtttccactcctccttccc

SEQ ID NO: 294877 - DNA, 201 bp, Homo sapiens
gtcctgtagggagcagccaagccagccgggtgtggtgcactgtaggggtggctggggtccgtcactggagtgacactgaagtatggaccagaggatgtgagggggggagctgtgtggtgtcttgaggcaggtgtgagcctggcgtgtttgaggagctgggaggagcccagaggggcaggtgtggagtgagcaggtgtggag

SEQ ID NO: 294878 - DNA, 201 bp, Homo sapiens
atgacctacaggtgcctgccgctccccccgtcagcacccccacagcactgacagccaccatagcatcttcctcatatcgatcactgtctccaaaacatggycttatcacctgatgttgcatctcccccttgcctttattccgtttccactcctccttccctagttcatcccccatcctccctcctgacccccactccaggg

SEQ ID NO: 294879 - DNA, 201 bp, Homo sapiens
tatcacctgatgttgcatctcccccttgcctttattccgtttccactcctccttccctagttcatcccccatcctccctcctgacccccactccagggagcccacactgacctggggccccttgcccctgtgcaggatcgggcaccacagcaccagtgacgacagttcagcgtaccgctcggtggatgaggtcaattactg

SEQ ID NO: 294880 - DNA, 201 bp, Homo sapiens
cgaactgggaggctcagggataaccccagtgatgtctcagatgtggcctgtggagccaggctgctggggccatgtgtgtcctggctctgtgtccttggcaygttgccctccacttccttgtctttgaaaggggatgctggtggtgcccatttcagaaactggtttgagactgggcatggtggctcacacctgtaatcccag

SEQ ID NO: 294881 - DNA, 201 bp, Homo sapiens
gttgccctccacttccttgtctttgaaaggggatgctggtggtgcccatttcagaaactggtttgagactgggcatggtggctcacacctgtaatcccagsactttgggaggccgaggtggcagatcacttgaggtcaggagcttgagaacagcctggccaaacatggtcaagccctgtctctactaaaaatacaaaaatt

SEQ ID NO: 294882 - DNA, 201 bp, Homo sapiens
tagcctgcccactgccccatgtccccacaggtgatggaggcctttgagcaggccgagcggaagcccaaacccaaccccaacctgctcttctcagacgtgtrtcaggagatgcccgcccagctccgcaagcagcaggagtctctggcccgccacctgcagacctacggggagcactacccactggatcacttcgataagtga

SEQ ID NO: 294883 - DNA, 201 bp, Homo sapiens
gaggcaggagaattgcttgaacctgggaggtagaggttgcagtgagctgagatcgtaccattgcactccagcctgggcaacgagagcaagactccatctcaaaaaaaaaaaattagccaggcgtggtggtgcgtgcctgtagtcccagctactcaggaaggtgaggcagaagaatcgcttgaacccgggaggtggaacttg

SEQ ID NO: 294884 - DNA, 201 bp, Homo sapiens
ttgaacccgggaggtggaacttgcagtgattggagatggcgccactgcactccagcctgggcaacagagcaagactatctcttaaaaaaaaaaaaaagctsgtttgaggattaggtggcaaaccgtggtggagtgtacatgccctgcccagagtcagtgtgccaccctccctgacccggtcattaggacccagggcccgtg

SEQ ID NO: 294885 - DNA, 201 bp, Homo sapiens
ccttgtatttctttgctcctttgccacaattctgattttaaaatgaattgtgtaaaaaatttgtttgattcctgtgtctcttgatcgaatatcaagacagrgaattcgtgtgttctggacactgtacagaggagacgattaatatttgttgaattaatgaggggaaaaaaggagggagagaggtacagacagggcactttg

SEQ ID NO: 294886 - DNA, 201 bp, Homo sapiens
cctgacaagtttgtacttttagcacgttcccctgcccctgcccagtccttctcacatgggtggacctagtaccacattctgagaaagcctgattccaaggycctgtatcagtcccttggaccttctttgaccctctacaagacctttctttccctccttaaccagagcaactcctgtttctatctgttacatatgcagcac

SEQ ID NO: 294887 - DNA, 201 bp, Homo sapiens
cctggcctcaactgatccacccacctcagcctcccaaagtgctggggttacaggcgtgagccaccatgtgtggccgggcaggtgatttttcttgtctttcrcctctttccacttcagtccccctggccatctttcccttccttgaatgtgcctcctcccacctggaggcctttgtaggtatgaggtccttcagatgatggc

SEQ ID NO: 294888 - DNA, 201 bp, Homo sapiens
tccacaccccttagctcatagtgttcttttgttgaggaacaagaagcagtttgagcctcttaggtgggaggtgggcagggaagctttctcagaggaggggrcatttagggggcatttgagctaaaggtaatagggtttccacaaggctggggcgtggccctaaccttccctctgggtccctgctaagtcacttcaaataca

SEQ ID NO: 294889 - DNA, 201 bp, Homo sapiens
agtcttgctctgtcacccaagctggagtgcagtggcacgatctcggctcactgcaacctccacttcccaggttcaagtgattctcctgcctcagcctcccraatagctgggactactggcgtgcgccaccatacccagttaatttttgtatttttagtagagatggggtttcaccatgttgaccaggctggtcttgaactc

SEQ ID NO: 294890 - DNA, 201 bp, Homo sapiens
ttcttttcatggtaccaggctgccaggaggagaaaggatggagcttagattcaagtcttgcaacattcttcttagtccagtattggcttattttgttttayatttttttgagacggagtcttgctctgttacccaggctggagtgcagtggcgtgatttctgctcactgcaacctctgcctcctgggttaagcgattgtcc

SEQ ID NO: 294891 - DNA, 201 bp, Homo sapiens
gctgggactactggcgtgcgccaccatacccagttaatttttgtatttttagtagagatggggtttcaccatgttgaccaggctggtcttgaactcctgayctaaggtgatctgcccgcctcggcctcccaaagtgctgggattacaggcataagccactgcgcctggctgcgcctggctaatttttaaatctttgtagag

SEQ ID NO: 294892 - DNA, 201 bp, Homo sapiens
ggggtaggccttgctgagccgggactcggatgtccattcgatgtacactttgaggcccaggagtgtgagcagtgctgacaggcagagaaggcacttggggyagcgcatgacccggcccagggaaggggcggccgcgggagctacaagggagccacaggggagccacggaggccattggggtgtggggatgggcctccagag

SEQ ID NO: 294893 - DNA, 201 bp, Homo sapiens
tttgagcgtctggttgaatgggacgtcgaggaagtcccagagcagcaggtcactgtagcgacggctctcccatgccactagtgagtctaggtcaggccccrcctcacctaccggagaccctagcaggaagagcagccggatccctggagctggactgccccacgtctctctcacggcctgtcgttctgcaaagcgccctgg

SEQ ID NO: 294894 - DNA, 201 bp, Homo sapiens
gggatttgagggttttcattacacttctgctaggataatcatttccattgtcgaggtgggaacacaaaggcttggagtggttaattccttgccaaggcccygcaggaggaagcagggtcctgcatgggaggccggctagcctgcccactgccccatgtccccacaggtgatggaggcctttgagcaggccgagcggaagcc

SEQ ID NO: 294895 - DNA, 201 bp, Homo sapiens
cagagtgctgggattacaggtgtgagccaccatgcctggctaagatgatgcagttttatccaggtggagatgaagaaatagtcagggaaaggttgagaggstgcatattgtagacagattggattactgggttcactggggaagattggattagaaggaggagtggggctgctttacttgtccccgacttcttgcccctgc

SEQ ID NO: 294896 - DNA, 201 bp, Homo sapiens
ggtttcaccatgttgaccaggctggtcttgaactcctgacctaaggtgatctgcccgcctcggcctcccaaagtgctgggattacaggcataagccactgygcctggctgcgcctggctaatttttaaatctttgtagagatggggttttgccatgttttccaggctggtcttgaactcctggactcaagcgatcttcctg

SEQ ID NO: 294897 - DNA, 201 bp, Homo sapiens
actatctcttaaaaaaaaaaaaaagctcgtttgaggattaggtggcaaaccgtggtggagtgtacatgccctgcccagagtcagtgtgccaccctccctgrcccggtcattaggacccagggcccgtgcagcccagtggtgagggcagcacccggcatagggcagcaccgtgtgtcctgtccctgcccttctctgtgcctc

SEQ ID NO: 294898 - DNA, 201 bp, Homo sapiens
aactcacggtggggcagtggcggcccagccaggccagcagcagcaggtctttgagcgtctggttgaatgggacgtcgaggaagtcccagagcagcaggtcrctgtagcgacggctctcccatgccactagtgagtctaggtcaggccccgcctcacctaccggagaccctagcaggaagagcagccggatccctggagctg

SEQ ID NO: 294899 - DNA, 201 bp, Homo sapiens
ctgcatgggaggccggctagcctgcccactgccccatgtccccacaggtgatggaggcctttgagcaggccgagcggaagcccaaacccaaccccaacctrctcttctcagacgtgtatcaggagatgcccgcccagctccgcaagcagcaggagtctctggcccgccacctgcagacctacggggagcactacccactgg

SEQ ID NO: 294900 - DNA, 201 bp, Homo sapiens; identical to SEQ ID NO: 60806

SEQ ID NO: 294901 - DNA, 201 bp, Homo sapiens
gagatggagtctcactctgtcacccaggctggagtgcagtggtgcgatcttggctcactgcaacctccacctcccaggttcaagcgattctcctgcctcarcctcctgagtagctgggactataggtgcgtgccaccacgcctggctaatttttgtatttttagtagagatggggtttcaccatcgtgatcagcctgacag

SEQ ID NO: 294902 - DNA, 201 bp, Homo sapiens
acaggtctgaccacattgctcccttgagaagactgtcggcaggttaccactattctcagagtaaaatcaatgtatcgttccctttgttatctgggtgccayctcctctccctcctcatctttccccacccctaccactgtatgtcccagcccttctggcctcatggtctatcattccctctgcctggaaccctccacccac

SEQ ID NO: 294903 - DNA, 201 bp, Homo sapiens
ccttgctctctgtcctctccctgctcgtccccttggcctcgtgcatgttccttatctcagccctggcctgacctgccttctctgtgtccccacagcagcaygaggccccgggtatggcatcatgtcaatccgcgtggatggtaatgatgtgtttgccgtatacaacgccacaaaggaggcccgacggcgggctgtggcaga

SEQ ID NO: 294904 - DNA, 201 bp, Homo sapiens
agtggtgttgcctcattgaggcacctcccccatccatgtgaggcaggagaggcaagcattaccatcaactctaaaagccaggtaagaacctgagtcaacaraggtgaggtcatgggcccaggccacattctcctaaggagtggagccgagtctttttatggcagtctgacccagagacagctctcgctgtttcccaccctt

SEQ ID NO: 294905 - DNA, 201 bp, Homo sapiens
cgaagtcagggatctcggtggcggcggcggccccccaagcctggcagccccccgtttcagtgctgtccccactgggcagggaccccagccgccactgctgytggttccagtaagcaaagggcagcgggatagtctggcccaggcgggtggagaggttggcaggtagggtgggctcagggttggctggcgtggggcttggcg

SEQ ID NO: 294906 - DNA, 201 bp, Homo sapiens
ctgtcctctccctgctcgtccccttggcctcgtgcatgttccttatctcagccctggcctgacctgccttctctgtgtccccacagcagcacgaggccccrggtatggcatcatgtcaatccgcgtggatggtaatgatgtgtttgccgtatacaacgccacaaaggaggcccgacggcgggctgtggcagagaaccagcc

SEQ ID NO: 294907 - DNA, 201 bp, Homo sapiens
atcatgtcaatccgcgtggatggtaatgatgtgtttgccgtatacaacgccacaaaggaggcccgacggcgggctgtggcagagaaccagccctttctcaycgaggccatgacctacaggtgcctgccgctccccccgtcagcacccccacagcactgacagccaccatagcatcttcctcatatcgatcactgtctccaa

SEQ ID NO: 294908 - DNA, 201 bp, Homo sapiens
tgggaggccggctagcctgcccactgccccatgtccccacaggtgatggaggcctttgagcaggccgagcggaagcccaaacccaaccccaacctgctctkctcagacgtgtatcaggagatgcccgcccagctccgcaagcagcaggagtctctggcccgccacctgcagacctacggggagcactacccactggatcac

SEQ ID NO: 294909 - DNA, 201 bp, Homo sapiens
ttgtctgggacccttcagaagagggctctgttgctgtccccaccccattcaggggcctgaagcctgtgtgaccacactctggatttcccaaccacatgccyactgcatttgtctgctcacaaacatagccaacgtgtgcaccaggttccactgtgccaatgcttcacgttcatcatctaataaggaccctcattgtggcca

SEQ ID NO: 294910 - DNA, 201 bp, Homo sapiens
agtcccttcccttataagagcttttttgggaagcaaacccactgggtgccaggcctgcaccctcatagtgtggagaacaaggaatcggagccccttcctgycctccggggcctgtagcctgatctagggttggtctgggccctggcttttttgccctagggcagctgagatgcatgagtttgtgtctctccaggcctcagc

SEQ ID NO: 294911 - DNA, 201 bp, Homo sapiens
gtgcctccacccgcagctgccgaaggagaaggtgctgaagctctacaagagcatgacactgcttaacaccatggaccgcatcctctatgagtctcagcggsaggtgcgtggggacaggactaggggcggggggctggaattacctgaggtcccctacctgtgtttgggccaaaggaatggctcccaaggaggacagattct

SEQ ID NO: 294912 - DNA, 201 bp, Homo sapiens
ccaggcctgcaccctcatagtgtggagaacaaggaatcggagccccttcctgccctccggggcctgtagcctgatctagggttggtctgggccctggcttytttgccctagggcagctgagatgcatgagtttgtgtctctccaggcctcagcactgtgcccagcacagcaggaggctccacaccccttagctcatagtgt

SEQ ID NO: 294913 - DNA, 201 bp, Homo sapiens
cgggccaatgccaacagggtcgtcatctgttacttcggcgagggggcagccagtgagggggacgcccatgccggcttcaacttcgctgccacacttgagtrccccatcatcttcttctgccggaacaatggctacgccatctccacgcccacctctgagcagtatcgcggcgatggcattggtatgggctctgctggctgc

SEQ ID NO: 294914 - DNA, 201 bp, Homo sapiens
gcctcctcccctcctaggtgtgctgatgtatcgggactaccccctggaactattcatggcccagtgctatggcaacatcagtgacttgggcaaggggcgcmagatgcctgtccactacggctgcaaggaacgccacttcgtcactatctcctctccactggccacgcagatccctcagggtgaggatgcatgccctgtacc

SEQ ID NO: 294915 - DNA, 201 bp, Homo sapiens
ttgcttagcccttgaggcggcgcctcagctaccacctgtctttgatggagttatgataacagtgcctgccccgtctggatgccttatgggttcagtgagcrcataggtgtaaataaagtgctttgagtggcacctcagcatgtagttattctctgattgacctatagcagccatgccagtcttcagggtcccagggcgcca

SEQ ID NO: 294916 - DNA, 201 bp, Homo sapiens
gcggcaggtgctttccccgcctctccaccagcctgtgaggtggatgccatccccacgagggcacgcaggttcacagagactggctcctgtccaaggccgcrtggctggaaagagacagaaccagattcaaacaccagcagtttaaccctagagaccctcatcctacctcctatgtgggtaaccactatacatcctgcctcc

SEQ ID NO: 294917 - DNA, 201 bp, Homo sapiens
atgccggcttcaacttcgctgccacacttgagtgccccatcatcttcttctgccggaacaatggctacgccatctccacgcccacctctgagcagtatcgyggcgatggcattggtatgggctctgctggctgctccccaccccgctgggatcatctccttccctccccaatcccgccaccttcctgccacccctaccctc

SEQ ID NO: 294918 - DNA, 201 bp, Homo sapiens
ccccacaggtgatggaggcctttgagcaggccgagcggaagcccaaacccaaccccaacctgctcttctcagacgtgtatcaggagatgcccgcccagctycgcaagcagcaggagtctctggcccgccacctgcagacctacggggagcactacccactggatcacttcgataagtgagacctgctcagcccacccccac

SEQ ID NO: 294919 - DNA, 201 bp, Homo sapiens
gcaacatcagtgacttgggcaaggggcgccagatgcctgtccactacggctgcaaggaacgccacttcgtcactatctcctctccactggccacgcagatycctcagggtgaggatgcatgccctgtaccttgcacatgtgcagaccaatgtcacacccctgtccaggcctcagctcttttgcctgccttctgggtggaat

SEQ ID NO: 294920 - DNA, 201 bp, Homo sapiens
cttgcccctgtgcaggatcgggcaccacagcaccagtgacgacagttcagcgtaccgctcggtggatgaggtcaattactgggataaacaggaccaccccrtctcccggctgcggcactatctgctgagccaaggctggtgggatgaggagcaggagaaggcctggaggaagcagtcccgcaggaaggtgagggtgccccg

SEQ ID NO: 294921 - DNA, 201 bp, Homo sapiens
ctcatatcgatcactgtctccaaaacatggtcttatcacctgatgttgcatctcccccttgcctttattccgtttccactcctccttccctagttcatccyccatcctccctcctgacccccactccagggagcccacactgacctggggccccttgcccctgtgcaggatcgggcaccacagcaccagtgacgacagttc

SEQ ID NO: 294922 - DNA, 201 bp, Homo sapiens
tgctgcaggtcacccacagggctgaactgtccccctgtactgcccactcggctaaccattgcctcctcccctcctaggtgtgctgatgtatcgggactacyccctggaactattcatggcccagtgctatggcaacatcagtgacttgggcaaggggcgccagatgcctgtccactacggctgcaaggaacgccacttcgt

SEQ ID NO: 294923 - DNA, 201 bp, Homo sapiens
ccccggtcccctctccacccccagggccggatctccttctacatgaccaactatggtgaggagggcacgcacgtggggagtgccgccgccctggacaacayggacctggtgtttggccagtaccgggaggcaggtacgtctgtccgtggtttggccctgtggtccccattgaagtgtacactttagtttttctgagtgttc

SEQ ID NO: 294924 - DNA, 201 bp, Homo sapiens
  misc_feature (1)...(201): n = A,T,C or G
ggaggactgtgaattcatggaggtgttggaagctgggcaggatttggatggctctctgtcattgcccagcataaccaattgtgggaccccggtcccctctncacccccagggccggatctccttctacatgaccaactatggtgaggagggcacgcacgtggggagtgccgccgccctggacaacacggacctggtgtttg

SEQ ID NO: 294925 - DNA, 201 bp, Homo sapiens
ggcccagccaggccagcagcagcaggtctttgagcgtctggttgaatgggacgtcgaggaagtcccagagcagcaggtcactgtagcgacggctctcccakgccactagtgagtctaggtcaggccccgcctcacctaccggagaccctagcaggaagagcagccggatccctggagctggactgccccacgtctctctca

SEQ ID NO: 294926 - DNA, 201 bp, Homo sapiens
tctggttgaatgggacgtcgaggaagtcccagagcagcaggtcactgtagcgacggctctcccatgccactagtgagtctaggtcaggccccgcctcaccyaccggagaccctagcaggaagagcagccggatccctggagctggactgccccacgtctctctcacggcctgtcgttctgcaaagcgccctggttctgact

SEQ ID NO: 294927 - DNA, 201 bp, Homo sapiens
gtctctctcacggcctgtcgttctgcaaagcgccctggttctgacttgacggccaacagcaggtaggggacatcagtatctgagcagctggagacttggcygccaccacctccaggcagccactgtgggaagctccggcaggctgctgacagcaagaagcggcggaggtccttggggtaggaggcgaagtcagggatctcg

SEQ ID NO: 294928 - DNA, 201 bp, Homo sapiens
atgtgtggccgggcaggtgatttttcttgtctttcacctctttccacttcagtccccctggccatctttcccttccttgaatgtgcctcctcccacctggwggcctttgtaggtatgaggtccttcagatgatggctgacatgacacttcctcagagaagcgttccagaccccaaacaccaggtctctgtctgtgaaacag

SEQ ID NO: 294929 - DNA, 201 bp, Homo sapiens
ggttggcaggtagggtgggctcagggttggctggcgtggggcttggcggggtgccccgagggctggggtaggccttgctgagccgggactcggatgtccaytcgatgtacactttgaggcccaggagtgtgagcagtgctgacaggcagagaaggcacttggggcagcgcatgacccggcccagggaaggggcggccgcgg

SEQ ID NO: 294930 - DNA, 201 bp, Homo sapiens
gctccctctgatctgcctgccccagcccctgtgttgtcgaccggcggggcccagccctgcccagccagtccagaggggcggggaggggagtggagcgggascagggagggccccaggggccggggcggggctgaggcaggagagagggagggagggagggagggaggagggcaggaggccgacctgagagatggggctctg

SEQ ID NO: 294931 - DNA, 201 bp, Homo sapiens
ggcgtacgcagccaagcgggccaatgccaacagggtcgtcatctgttacttcggcgagggggcagccagtgagggggacgcccatgccggcttcaacttcrctgccacacttgagtgccccatcatcttcttctgccggaacaatggctacgccatctccacgcccacctctgagcagtatcgcggcgatggcattggtat

SEQ ID NO: 294932 - DNA, 201 bp, Homo sapiens
acagtacacggtagtccctctccaaaagaaagacctgggtgaagttcttaccttgcaggaaggaagcagagccatctggccgcgacagcaggttctgttcscaggcaaagtgccggaggctgcagccaggaccccgagggctggaccctgttccattttcagcacggattttggcgtcagtatgcatctcctcctccatcg

SEQ ID NO: 294933 - DNA, 201 bp, Homo sapiens
gtacacggtagtccctctccaaaagaaagacctgggtgaagttcttaccttgcaggaaggaagcagagccatctggccgcgacagcaggttctgttcgcargcaaagtgccggaggctgcagccaggaccccgagggctggaccctgttccattttcagcacggattttggcgtcagtatgcatctcctcctccatcgcgc

SEQ ID NO: 294934 - DNA, 201 bp, Homo sapiens
tggtttgttctcagactctggcctcccctcttagtgcccgtctgaagacttcagccttcggtcctcttccatcagcatgctgtctcccctgtgcctcagtytccctctctggagtatctgctggggccacagtttggttttattgttctttgagacagggtatcactttgttgcccaggctggagtgcaatggtgcagtca

SEQ ID NO: 294935 - DNA, 201 bp, Homo sapiens
acagtcctgccctgacacagtggtttgttctcagactctggcctcccctcttagtgcccgtctgaagacttcagccttcggtcctcttccatcagcatgcygtctcccctgtgcctcagtttccctctctggagtatctgctggggccacagtttggttttattgttctttgagacagggtatcactttgttgcccaggct

SEQ ID NO: 294936 - DNA, 201 bp, Homo sapiens
tttagtttttctgagtgttcttccaggagcagcatagtgccaggaaggtctaaggagctggaagaagagctttccaagcaagaaagagacaagccagggtyaggactctggagggggcagtcttcccactctgaaggccagaaagtgtagtggctcagggtctgtgctcttaaccctttgttaccagttgtcaggttttgg

SEQ ID NO: 294937 - DNA, 201 bp, Homo sapiens
catagctcactgaattggggcagcaaccctggggctggggactaccattatctccaccagcccagcaaagaggggaggagggtacagccgagacccagctscagtatgtggagcacactggggtgccgtgaagatagctgtccagcctctagaggctgacagtcctgccctgacacagtggtttgttctcagactctggcc

SEQ ID NO: 294938 - DNA, 201 bp, Homo sapiens
ggagcagtgagtggggtcttccagggagcttgttggtgtggggccctgcatggggactaccctcagagtgtcagcgagcactgatagggccaggaaggcayatcttaaccctttgtcttagatgcttggggcaagttgcttaactgccctgtgcctctgtttcctcattcgtaagggggatggtagcccttcccaagacag

SEQ ID NO: 294939 - DNA, 201 bp, Homo sapiens
tttgtgggccctgagggagacgacttgaagagagagatgggggttccttattagctgccactggtattcaggggaggctccttggaggaacaggggaagaycgcaagaccttctccctcagggtttggagaatgaaactgactttgtaagggagggactttcttctgggcaaagatccctcttcaagaagaagaaagaaga

SEQ ID NO: 294940 - DNA, 201 bp, Homo sapiens
ttagccaggcgtggtggtgcacacctgtagtcccagctactcaggaagctgagtgggaggattgcttgagcccagaggttcaagactgcagtgagctatgmttccaccaccgaactccagtttgggtgacagagtaagatcctgtctctgagaccaacaagaaaagaggtagcatgtgtcaagcaagagcagcagttccca

SEQ ID NO: 294941 - DNA, 201 bp, Homo sapiens
tggcactggcagggagtggcgcccggtgaaaaggagtgttaagaggaagcacgtgccaggtgtggtggctcacgcctgtaatcccagcacttcgggaggcygaggcgggaggattgcttgagcccaggagtttgataccagcctgggcaacatggcgagacccccatctctaaaaaattaaaaaattagccaggcgtggtg

SEQ ID NO: 294942 - DNA, 201 bp, Homo sapiens
ctggtcctcaccgatgcccttccgtggtggaacaggtgcttcctttgggcttctatcacagcaactcgatccctctggcagttctaagcagtctggcagcrtcttcttaaaggcaggaaccccagcatggcctggcccaggactggccttcaggaggactgtgaattcatggaggtgttggaagctgggcaggatttggat

SEQ ID NO: 294943 - DNA, 201 bp, Homo sapiens
tttgagctaaaggtaatagggtttccacaaggctggggcgtggccctaaccttccctctgggtccctgctaagtcacttcaaatacacgaagttcctgccrtgtgccggtgccactccaagtgcagggaacaaaagcaacgcaaacctcagccctcctggtgctgccattgtggtgggggagacggacagtaacagagatg

SEQ ID NO: 294944 - DNA, 201 bp, Homo sapiens
gcagtgagaaagtgctggagttggggctcagaccctgtgagtcaggccccagagttcactggggccacatgctcaaccaccatgccgcctgcctgccgccrgggctgagccagcggaaacctgggtgctgcttctgatgcaggtggtctcctctgctctcttccccagcacccccccaggcagcagcagcagttttcatct

SEQ ID NO: 294945 - DNA, 201 bp, Homo sapiens
  misc_feature (1)...(201): n = A,T,C or G
tccacgcccacctctgagcagtatcgcggcgatggcattggtatgggctctgctggctgctccccaccccgctgggatcatctccttccctccccaatccngccaccttcctgccacccctaccctccttcctggttctcgtcctgtgtcctgtggcgtctggcacttggtcagccacaggagttgaggtcctgagcactc

SEQ ID NO: 294946 - DNA, 201 bp, Homo sapiens
tcaggtgatctgcctgcctcggactcccaaagtgctgggattacaggcatgagccaccacgcccagccttcctggctaatttaaaaatttttcagagacgrgggttttgcctaggctggactcactatgttgcctaggctgatctcgaaccactggccttaagtgatcctcccacctcagcctcccaaagtactgggatta

SEQ ID NO: 294947 - DNA, 201 bp, Homo sapiens
caaccaccatgccgcctgcctgccgccggggctgagccagcggaaacctgggtgctgcttctgatgcaggtggtctcctctgctctcttccccagcacccbcccaggcagcagcagcagttttcatctctggatgacaagccccagttcccaggggcctcggcggagtttatagataagttggaattcatccagcccaacg

SEQ ID NO: 294948 - DNA, 201 bp, Homo sapiens
cttcagcagggccagaccacgtggctgtccagagcccccatggaccagcatggcttgcagcctgctcctggactgtctactgctcacagctggaccaggcycttggccccacatgctctaggagggcaaacgccctgtggtgtttgtctaaggtctagtgtcatccgtgcggaaaaagatttccagacaccaggcagcaag

SEQ ID NO: 294949 - DNA, 201 bp, Homo sapiens
atggcatcatgtcaatccgcgtggatggtaatgatgtgtttgccgtatacaacgccacaaaggaggcccgacggcgggctgtggcagagaaccagcccttyctcatcgaggccatgacctacaggtgcctgccgctccccccgtcagcacccccacagcactgacagccaccatagcatcttcctcatatcgatcactgtc

SEQ ID NO: 294950 - DNA, 201 bp, Homo sapiens
gatgtgtttgccgtatacaacgccacaaaggaggcccgacggcgggctgtggcagagaaccagccctttctcatcgaggccatgacctacaggtgcctgcygctccccccgtcagcacccccacagcactgacagccaccatagcatcttcctcatatcgatcactgtctccaaaacatggtcttatcacctgatgttgca

SEQ ID NO: 294951 - DNA, 201 bp, Homo sapiens
gccaggctgcctttgttccgctttacacatggccctgtgtgatctcatgtccatctgtatgccagggctgcccagagccccagccagactgcttgtcagarccctgcttggcttctcgccctggatgtcccacagcaaactaatcctgtctgaacttgacctcgacatcttcctcccaggcgtgctcctttgcctcaccta

SEQ ID NO: 294952 - DNA, 201 bp, Homo sapiens
ctttattccgtttccactcctccttccctagttcatcccccatcctccctcctgacccccactccagggagcccacactgacctggggccccttgcccctrtgcaggatcgggcaccacagcaccagtgacgacagttcagcgtaccgctcggtggatgaggtcaattactgggataaacaggaccaccccatctcccggc

SEQ ID NO: 294953 - DNA, 201 bp, Homo sapiens
ctccctctgatctgcctgccccagcccctgtgttgtcgaccggcggggcccagccctgcccagccagtccagaggggcggggaggggagtggagcgggagsagggagggccccaggggccggggcggggctgaggcaggagagagggagggagggagggagggaggagggcaggaggccgacctgagagatggggctctgg

SEQ ID NO: 294954 - DNA, 201 bp, Homo sapiens
cactagagccctggtctgtgctccagacttcttcttcttatttttttcttttttgagacggagtcttgcactgttgcccaggctagagtgcagtggtgctrtcgcagctcactgcagcctccttctcccagcttcaagcaattctcctgcctcagcctcccgattagctgagactacaggtgtgcaccaccacgcccagct

SEQ ID NO: 294955 - DNA, 201 bp, Homo sapiens; identical to SEQ ID NO: 60837

SEQ ID NO: 294956 - DNA, 201 bp, Homo sapiens
ggcctctggaacttctgaccaaccagcttcaagttggggttctcatgaccccccgctttgggttcaattaatttgctacagcagctctcagaactaaaagaaacacatttaccagtttattatagaggatattacaaagaatatagatggggagatgtataggctgaggtacaggggaaggagcatggagttgccatgccc

SEQ ID NO: 294957 - DNA, 201 bp, Homo sapiens
aaaaaaaaaaaaaaaaagaaaagaaaattaattgagttactgagattatttacgtttaatgattattgataatggtgggtttacttatttattttttgactgatagcatacctgatttatttatttttttcacatttctgttttttattttaaatttttttttccttttctatgtttagatgtttatttttaattttttta

SEQ ID NO: 294958 - DNA, 201 bp, Homo sapiens
gggcctctggaacttctgaccaaccagcttcaagttggggttctcatgaccccccgctttgggttcaattaatttgctacagcagctctcagaactaaaagaaacacatttaccagtttattatagaggatattacaaagaatatagatggggagatgtataggctgaggtacaggggaaggagcatggagttgccatgcc

SEQ ID NO: 294959 - DNA, 201 bp, Homo sapiens
ctgaatagccatgtagatagcttgggaagttaatctctccgagcctcagtttttctgtaaaagggtatacaagtgatatcttacagagtattggtaaggastgtaatgtttaggatgctcagcagttggtaagaatttgattaaagatagctgttagttattattaataagctttctctctctaccccagctgtgttctct

SEQ ID NO: 294960 - DNA, 201 bp, Homo sapiens
tttgctgagaattttaattgtaaagggatgctggattttgtctaatgctttttctccatctattgagatcatgtgattttggtttttaactctgcttatgwggtataccacatttattgacttgcatatgttaaaccatccctgcatccctggcatgaaacccacttgatcatggtgggttatctttttgatatgttgttg

SEQ ID NO: 294961 - DNA, 201 bp, Homo sapiens
catttcttggacatttgtaattcgttactggtgacctaagacctcagtgctagcctgccatacttttcctcgggttctaatttacatgtgccttctggttycttctggggaaatctgtgtagagtggaggagctttgggtcggtcagggtggcacttggctaccttattctatgcaaaagaatgaattccagactaaagta

SEQ ID NO: 294962 - DNA, 201 bp, Homo sapiens
attcccacaacaccttcctcaggttcagcactttgctatgcctgacagaattcagggaaacactttacttgtatttaacaatttattataaaagatgtaaytgagaaacagccagatggatgagatgactagggcaaggtatggggcggggttggaagtcaggagaggtagggcatggagttttcatggtccctgggtaca

SEQ ID NO: 294963 - DNA, 201 bp, Homo sapiens
gagaaggaagcaagcgcagtacgcttttaataaagctcacccctcctgcccccacaagaaaaacccctgagattcttactctgccttcagaacgacttagrtgtggcaggtttcatcctccgtgctttacataatttcctttatttacataaaatgtacaacttagatattgttaggtaccctcccccctttttatagatg

SEQ ID NO: 294964 - DNA, 201 bp, Homo sapiens
actctggagaggggctgaggccaggaacccgggttcctatcgcgggtcgctctgggccggtgggttcccgggtccagagagggcggccgccggcccaagcsgtccaaccgagctgcgtgccacggtccccgcgccttgggctccttgtccggtcatcagagcctgacggccttggcttctcggcttctcggtttctcggtt

SEQ ID NO: 294965 - DNA, 201 bp, Homo sapiens
ccaaacgagttgggcctaaatggccattaagccacttaaaatatgatgaagaaactggatgggttttaagacgcttggcaaaggaaaggatggtggagcasgcatttgctctctcaggcaaggcttgagaaggaagcaagcgcagtacgcttttaataaagctcacccctcctgcccccacaagaaaaacccctgagattc

SEQ ID NO: 294966 - DNA, 201 bp, Homo sapiens
ggtgggtcataggaagaaaagtgatcttcagtcaggagacttgggttctgggctctgtctgatgactggctctgtgatgtgagccaggtgacttctctaascctgagttgcctcatctgtaaagataattccagtcttggaggatttttatggagtaaaaaaggacagagcggtcctgtgtatcccctgcaaatggttaga

SEQ ID NO: 294967 - DNA, 201 bp, Homo sapiens
aaaagaaatgaggctgaagaagtagagctcagatcacagaagacttggtaagccctctaggagtggcgtcaacagtctggccaggcctgctcttttagcartgctctagggcattacactgtgctgatgtctgtctctgctaatctggggtgcctgtgtcagccatgtaagaaaatgatcacccagattgaataagtgtcc

SEQ ID NO: 294968 - DNA, 201 bp, Homo sapiens
tgcagtcacagcactggtggcaaggcataggagagctgggctacaaagaagcattcagtgtctcctggggcggcagggaggtgggggttgtaattgtgaastcaccaaaccccaggtgggcagtaagtgggtgggtcataggaagaaaagtgatcttcagtcaggagacttgggttctgggctctgtctgatgactggctc

SEQ ID NO: 294969 - DNA, 201 bp, Homo sapiens
ccaaaccagtgggcttgatgacagtgagctatttctggtggctcagggttggggcttgggccgaagatgtggaggccctggcttcccttcctgaggacagrctgaggtggaaccttttggctctgccagcttctccatgtgcagtcacagcactggtggcaaggcataggagagctgggctacaaagaagcattcagtgtc

SEQ ID NO: 294970 - DNA, 201 bp, Homo sapiens
gggtctctctggatctgcaggtgcctggtagtggatgaggctgaccggatggttgagaaaggccattttgctgagctctcacagctgctagagatgctcartgactcccaatacaacccaaagagacaaacgcttgttttttctgccacactcaccctggtgcatcaggctcctgctcgaatccttcataagaagcacacc

SEQ ID NO: 294971 - DNA, 201 bp, Homo sapiens
tcggtgcccaagtcagcaaattcagaggcagacttaactgctgtctgctcagcatggaagccaggagccaaaccagtgggcttgatgacagtgagctattyctggtggctcagggttggggcttgggccgaagatgtggaggccctggcttcccttcctgaggacagactgaggtggaaccttttggctctgccagcttct

SEQ ID NO: 294972 - DNA, 201 bp, Homo sapiens
ttcttactctgccttcagaacgacttaggtgtggcaggtttcatcctccgtgctttacataatttcctttatttacataaaatgtacaacttagatattgwtaggtaccctcccccctttttatagatgagagcactgaagttcagagaggagtgggtggcactatccaaggtcacacaggcagtaagtgttggatttgga

SEQ ID NO: 294973 - DNA, 201 bp, Homo sapiens
ttatagattgtcagggttttatttttaggcattcaaataaaaaatattgctacactgtcttctggcttttcattgtttctgataagtctgctgttcttcttatcaaaagtttcatgtgtctgtttttgctctcttttttccttatagtatcttatttttgtgtgtgtggttattttttactgagagctgcttatttccttt

SEQ ID NO: 294974 - DNA, 201 bp, Homo sapiens
agctgggattacaggcatgcgccaccatacccagctaattttgtatttttagtagagacgtggtttctccatgttagtcaggctggtctcaaactcccgamctcgggtgatccgcccatctcggcctcccaaagtgctgggattacaggtgtgagccactgtgcccggctttttttctttttttaagtcaaaggctcactc

SEQ ID NO: 294975 - DNA, 201 bp, Homo sapiens
gttatagattgtcagggttttatttttaggcattcaaataaaaaatattgctacactgtcttctggcttttcattgtttctgataagtctgctgttcttcttatcaaaagtttcatgtgtctgtttttgctctcttttttccttatagtatcttatttttgtgtgtgtggttattttttactgagagctgcttatttcctt

SEQ ID NO: 294976 - DNA, 201 bp, Homo sapiens
ggttatagattgtcagggttttatttttaggcattcaaataaaaaatattgctacactgtcttctggcttttcattgtttctgataagtctgctgttcttcttatcaaaagtttcatgtgtctgtttttgctctcttttttccttatagtatcttatttttgtgtgtgtggttattttttactgagagctgcttatttcct

SEQ ID NO: 294977 - DNA, 201 bp, Homo sapiens
gtaagaaccttacaagagtattttccatttctcccctcctttgtgctttttgttgtatacttcatatgtgttagagattctagaatacatttttattatatttgctttaaacaattatttttaaagatgtttaaataagaaaaataaggggttttgtttttttgtttgtttttagagacagtgtctccctctgtcacccat

SEQ ID NO: 294978 - DNA, 201 bp, Homo sapiens
tgtaagaaccttacaagagtattttccatttctcccctcctttgtgctttttgttgtatacttcatatgtgttagagattctagaatacatttttattatatttgctttaaacaattatttttaaagatgtttaaataagaaaaataaggggttttgtttttttgtttgtttttagagacagtgtctccctctgtcaccca

SEQ ID NO: 294979 - DNA, 201 bp, Homo sapiens
tgtttccttctttggcactgaatttgtgtgtgtgtgtgtgtgtgtgtgtgtgtgtgtgtgtgtgtgtcagagagagagatactattaagatctacccatasgccgggtgcagtggctcacacctgtaatcccagcactttgggaggccagggcaggtggatcacgaggtgaagagatagagaccatcctggccaacatggt

SEQ ID NO: 294980 - DNA, 201 bp, Homo sapiens
taacttgtatgtctgcatcctgtgtgatttttactttatactttaaagaggttgttctgttttaatacgtctccagggtttgtttcaagatttagagctcsttttagcagttcttgtagtggtggcttggtaatggcaaattgtctctacatttgtttatctgaaaacaattgtatctttccttcatatatgatgcttagt

SEQ ID NO: 294981 - DNA, 201 bp, Homo sapiens
gttgaagagccttgttttgtcatattaccagggttggttttctggttccttctcatttgggtaggctgtttcagagggaaggtctagggctgaaggctgtkgttcagattcttttgtctcatggagtgttcccttgatgtagtactcccccttttcctatggatgtggcttcctgtgagccaaactgcagtgattgttgtc

SEQ ID NO: 294982 - DNA, 201 bp, Homo sapiens
atctttttgcagtgaatttcccaggtgttctttgtgcttcttgtatttggatatctaggtctctagcaaggctggagaagttttcctcaattattcctccmaatatgttttccaagcttttagcattctctccttcctcaggtacaccgattattaggtttggtcatttaacataatcccagacttcttagagcctttgtt

SEQ ID NO: 294983 - DNA, 201 bp, Homo sapiens
atcttgctgcttgttattggtctgttcagggtatctcattcttcctgacttaagctaggagggttttttttccaggaatttatccatcttttctaggtttyctagtttatctgtgtaaaggtgttcatagtagccttgaatgatctttcttatttcagtggtttcagttgtaatatctcctgttttgttttatagtgaggt

SEQ ID NO: 294984 - DNA, 201 bp, Homo sapiens
cctaggtgaagatctttttgcagtgaatttcccaggtgttctttgtgcttcttgtatttggatatctaggtctctagcaaggctggagaagttttcctcarttattcctccaaatatgttttccaagcttttagcattctctccttcctcaggtacaccgattattaggtttggtcatttaacataatcccagacttctta

SEQ ID NO: 294985 - DNA, 201 bp, Homo sapiens
atcacatgtgtaccctgtgttccaggcaaagctgtctgttctgtggtattctttgttcttctctaggtgggagcaactgtgtgatagccatctttgtatcytcagttctttgtagggcctagttgcttagaaaatatttgttacatcagaaccctctgcttctcagacaccaacctaatagaacatgtatctccttttcag

SEQ ID NO: 294986 - DNA, 201 bp, Homo sapiens
ttgacttcctctttactgatttggatgccctttattttttttctcttgtcttattgctctggctaggacttccaggacgatgttgaagaggagtggtaagmgtaggtgggcatccttgtcttgttccagttctcagagggaatgctttcaccttttccccattcagtattatgttgactgtgggtttgtcatagaaggctt

SEQ ID NO: 294987 - DNA, 201 bp, Homo sapiens
ctgtgtgatttttactttatactttaaagaggttgttctgttttaatacgtctccagggtttgtttcaagatttagagctccttttagcagttcttgtagtggtggcttggtaatggcaaattgtctctacatttgtttatctgaaaacaattgtatctttccttcatatatgatgcttagttttgctggatacaaaattc

SEQ ID NO: 294988 - DNA, 201 bp, Homo sapiens
tattttttttttttgcaaccattttaaaagggattgagttcttgatttgattctccacttggtcgctgttggtgtataaaagagctactgatttgtgtacrttaatcttgtatccggaaactttgctgaattgtttatcagttttaggagctttctggaggagtccttaggattttcaaggtaaatgatcatatcatcagc

SEQ ID NO: 294989 - DNA, 201 bp, Homo sapiens
attttttcatgtttgttggccatttgtgtatcttcttttgataattgtctatttatgttgttaacccactttttgatgggatttttttttcttactgattygtttgagtttgctgtagattctggatattagtcctttgtcagatgtatagattgtgaagattttctgccactgtatgggttgtctatttagtttgctgac

SEQ ID NO: 294990 - DNA, 201 bp, Homo sapiens
tggttttgctttgcatttccctgatcattagtgatgttgagcattttttcatgtttgttggccatttgtgtatcttcttttgataattgtctatttatgtygttaacccactttttgatgggatttttttttcttactgatttgtttgagtttgctgtagattctggatattagtcctttgtcagatgtatagattgtgaa

SEQ ID NO: 294991 - DNA, 201 bp, Homo sapiens
agtagagacagggtttcaccacgttggccaggttggtcttgaactcctgaactcaagtaatctgcccacctcggcctcccaaagtgttgggattacaggcrtgagccactgtgccagtttagtggtgatttgtgagattttggtgcacctatcacccgagcaatatacgctacaccatatttgtagtatttcatcccttgc

SEQ ID NO: 294992 - DNA, 201 bp, Homo sapiens
ccccagcgcgcacgagtacgtgcgtggaggtcccgccccggaactgcagttgctgctgcagctgaggtacagcggcggtttctgaggttcttcactcgcgrctgacggagctgcggtggcgtctccacacggtgagtaccaaaacgagcggggttggagccgactctggagaggggctgaggccaggaacccgggttccta

SEQ ID NO: 294993 - DNA, 201 bp, Homo sapiens
ctgttccccgtgcagacaaaatacatggatgtggtcaaggtagaaagcagttaaaaccccagtgctaatgaagggattgtgctgctcccttgcagagcacyttgctgtgggactctggcagcataacccttgaaaactaaggaatggttctgccaacagctgaacaaggagacttgtagaaaggattgagagcaacatacc

SEQ ID NO: 294994 - DNA, 201 bp, Homo sapiens; identical to SEQ ID NO: 60839

SEQ ID NO: 294995 - DNA, 201 bp, Homo sapiens
attgagagcaacatacctgggaaaagggagaaaaggggagtgactgaaggtgggaggcattttctccctgaaccatttcttccttctctggccctgaagtyccccctcctcaccagacagtgcagtggtcatggctgtctggatatcctgtcagagggttgtagacagtgtggttagtgtttcctgctgaggcagatgcta

SEQ ID NO: 294996 - DNA, 201 bp, Homo sapiens
gtctccacacggtgagtaccaaaacgagcggggttggagccgactctggagaggggctgaggccaggaacccgggttcctatcgcgggtcgctctgggcckgtgggttcccgggtccagagagggcggccgccggcccaagccgtccaaccgagctgcgtgccacggtccccgcgccttgggctccttgtccggtcatcag

SEQ ID NO: 294997 - DNA, 201 bp, Homo sapiens
aagcaagcgcagtacgcttttaataaagctcacccctcctgcccccacaagaaaaacccctgagattcttactctgccttcagaacgacttaggtgtggcrggtttcatcctccgtgctttacataatttcctttatttacataaaatgtacaacttagatattgttaggtaccctcccccctttttatagatgagagcac

SEQ ID NO: 294998 - DNA, 201 bp, Homo sapiens
gccatcagtcaatagtttgtcattagtatacaaaaagacattacttttgagattcctttgccaggaaacaggatgaagagcaaatacatatttcactgtaycacaggtgctaattttggtttagcaaatctctatagtcttcccttttttggggaaggagctgggtcaacctttgtggagtcaagatgaatcaaatacagt

SEQ ID NO: 294999 - DNA, 201 bp, Homo sapiens
tctggccaggctgcctgtgttagaatgccggctcattgccttaactatgtgactgagtcaagttatttaacctctgttgtgttctcagctttctcctccayaaaatggaagtagtcaactacctacttcatgggattgttgtgaagactgattgagttaaaaaatgttaagtgcttatagcattgcctggcaaatagaaag

SEQ ID NO: 295000 - DNA, 201 bp, Homo sapiens
ctttaacttttgctttgttggaaccatctctactactgtgggtcttgtcaaaatcagcaaggcgtccttccccctctttgctaacaggccctggtcccagrtgagcctactgccctcggtcagtctttgtttcctctgtctctgtcttgtgccctcagctgcctcctcttacatggacaggcagtggagtacagtgaggaa

SEQ ID NO: 295001 - DNA, 201 bp, Homo sapiens
tggaagcaagctgtggcatctgcgtaaagacttcactttggttacctataggttggcagtcaaaccagtaagggttttcaaaggatgtggctgttcaggtwgattgttgggaaagctggcagttgtgtttagatgtgtacacacagacgggtaatggttgcccactggacttttatcaggaaacaataaatgcatttcaac

SEQ ID NO: 295002 - DNA, 201 bp, Homo sapiens
cctgtgtgatttttactttatactttaaagaggttgttctgttttaatacgtctccagggtttgtttcaagatttagagctccttttagcagttcttgtagtggtggcttggtaatggcaaattgtctctacatttgtttatctgaaaacaattgtatctttccttcatatatgatgcttagttttgctggatacaaaatt

SEQ ID NO: 295003 - DNA, 201 bp, Homo sapiens
tttttgatatgttgttggatttggttagctagtattttgttaaggattttaggatctatgttcatcagggatattggtctgtagttttcttttttggttgygtcctttcctggttttggtattagggtgatgctggcttcatagaatgaattagggagggttccttctttctccgtctcgtagaatagtgtcaaaaggatt

SEQ ID NO: 295004 - DNA, 201 bp, Homo sapiens
ggttacattgggaggagaagaggttctatcccagcttcctgctggcaaagatgtggaagggtacagaggaggtggaattccaggaattgagggagcaaaascatggcacagttcaaggaatgttggcttctctggctcaaaaggaatattagctgtgtggggaaatagggtggagataaggatggaaaagtggaaatcata

SEQ ID NO: 295005 - DNA, 201 bp, Homo sapiens
aaaatacatggatgtggtcaaggtagaaagcagttaaaaccccagtgctaatgaagggattgtgctgctcccttgcagagcaccttgctgtgggactctgrcagcataacccttgaaaactaaggaatggttctgccaacagctgaacaaggagacttgtagaaaggattgagagcaacatacctgggaaaagggagaaaa

SEQ ID NO: 295006 - DNA, 201 bp, Homo sapiens
tcctgtgtgatttttactttatactttaaagaggttgttctgttttaatacgtctccagggtttgtttcaagatttagagctccttttagcagttcttgtagtggtggcttggtaatggcaaattgtctctacatttgtttatctgaaaacaattgtatctttccttcatatatgatgcttagttttgctggatacaaaat

SEQ ID NO: 295007 - DNA, 201 bp, Homo sapiens
tgtcaggttgaagagttgggcctttatcctgtaagtaaagaaaggcaaatctcatttctagaactcttatgaacagttcatagtggctacttaaagtactrtattgaaaaggatacctagatgttatctgggcccagtggagaagactgttgtgcttgattaatggtgtgtgccaggggctcagtgggtgtgttagcaacc

SEQ ID NO: 295008 - DNA, 201 bp, Homo sapiens
atcttttaagtggagcatttagaccatttccattcaatgttagtattgaaatgtgaggtacccttgcgttcctcatgctctttgttgcctgtgtactttakttttgtttttttgtttttgctttttaacttgtatgtctgcatcctgtgtgatttttactttatactttaaagaggttgttctgttttaatacgtctccag

SEQ ID NO: 295009 - DNA, 201 bp, Homo sapiens
ttctgctgggtttgggtttggtttgttcttgtttctctagctccttgagatgtgaccttagattgtctgtttgtgctctttcagacttttcgatgtagccrtttagggctatgaactttcctcttagtgctgcctttgctgtatcctagaggttttgatacgttgtgtcattattgtcattcagtttgaagaatttttaaa

SEQ ID NO: 295010 - DNA, 201 bp, Homo sapiens
tggtctgtagttttcttttttggttgtgtcctttcctggttttggtattagggtgatgctggcttcatagaatgaattagggagggttccttctttctccrtctcgtagaatagtgtcaaaaggattgggaccagttctttgaatgtctggtagaattctgttgcaaatccgtctggttctggacttttttttgttggtaa

SEQ ID NO: 295011 - DNA, 201 bp, Homo sapiens
aggcatgcgccaccatacccagctaattttgtatttttagtagagacgtggtttctccatgttagtcaggctggtctcaaactcccgacctcgggtgatcygcccatctcggcctcccaaagtgctgggattacaggtgtgagccactgtgcccggctttttttctttttttaagtcaaaggctcactctgttgcccaggc

SEQ ID NO: 295012 - DNA, 201 bp, Homo sapiens
ctcagcagttggtaagaatttgattaaagatagctgttagttattattaataagctttctctctctaccccagctgtgttctcttggcaacagatgtggcrgctcggggtctggatattcctaaagtccagcatgtcatccattaccaggtaggggcatctgaaaatttataggcatctgcctgcactgaatggggaattt

SEQ ID NO: 295013 - DNA, 201 bp, Homo sapiens
tccatgccaacattgttttttttttgagatggagtttcgctcttgttgcccaggctggagtgcaatggcgcaatctcggctcactgcaacctctgcctccygggttcaagtgattctcctgcctcagcctcccgagtagctgggattacaggcatgcgccaccatacccagctaattttgtatttttagtagagacgtggt

SEQ ID NO: 295014 - DNA, 201 bp, Homo sapiens
tgcagagtatggcatgttggttggggtcaatgagtcccaaatttggatccagactccacagctgaatagccatgtagatagcttgggaagttaatctctcygagcctcagtttttctgtaaaagggtatacaagtgatatcttacagagtattggtaaggactgtaatgtttaggatgctcagcagttggtaagaatttga

SEQ ID NO: 295015 - DNA, 201 bp, Homo sapiens
aattaattgagttactgagattatttacgtttaatgattattgataatggtgggtttacttatttattttttgactgatagcatacctgatttatttatttttttcacatttctgttttttattttaaatttttttttccttttctatgtttagatgtttatttttaatttttttaaatttttccataagttattggtgta

SEQ ID NO: 295016 - DNA, 201 bp, Homo sapiens
aaattaattgagttactgagattatttacgtttaatgattattgataatggtgggtttacttatttattttttgactgatagcatacctgatttatttatttttttcacatttctgttttttattttaaatttttttttccttttctatgtttagatgtttatttttaatttttttaaatttttccataagttattggtgt

SEQ ID NO: 295017 - DNA, 201 bp, Homo sapiens
ccattaagtctgatcttagctgtaggttttttgtaggtgctttttatcacgttgtggaagttctctttgatttctcatttgctgagaggttttatcagggwtggatgttggatatttttcaaatgcttttttactgcatatattgaaataggtggtttttcatttttagtctgccaatgtggtgaatgacattgattttca

SEQ ID NO: 295018 - DNA, 201 bp, Homo sapiens
aaaattaattgagttactgagattatttacgtttaatgattattgataatggtgggtttacttatttattttttgactgatagcatacctgatttatttatttttttcacatttctgttttttattttaaatttttttttccttttctatgtttagatgtttatttttaatttttttaaatttttccataagttattggtg

SEQ ID NO: 295019 - DNA, 201 bp, Homo sapiens
aatatggtatctctccatttctttagatctttaacttttcttagcaatgttttaaaattttcagtatatagatttttcacatcttatgttagatttatccytaagcattttatatttttgattctattgtaaatggtaatttaaaattttttatttccgattgtttgtcgccaataagtagaaatatgatggatttttgta

SEQ ID NO: 295020 - DNA, 201 bp, Homo sapiens
ttagcatatgcttatttgtctgtttgattattttgcccatttttaaaatagggatgttctgttgtagagttttgggagttcattgtgtattctagatacawgtcctttatcagatgtgagatttgcaaatttttctcccagtttgtggcttatcttttcgttctcttaacagtgtttttcaaagagcagaaagtctttatt

SEQ ID NO: 295021 - DNA, 201 bp, Homo sapiens
acgtgcgtggaggtcccgccccggaactgcagttgctgctgcagctgaggtacagcggcggtttctgaggttcttcactcgcgactgacggagctgcggtrgcgtctccacacggtgagtaccaaaacgagcggggttggagccgactctggagaggggctgaggccaggaacccgggttcctatcgcgggtcgctctggg

SEQ ID NO: 295022 - DNA, 201 bp, Homo sapiens
cagtttgttcatctattgatggacatttgtgctttttcttgtttttggctattacaaatatagttattgtaaatactattgtaccagtctttgtatggatrtgtgctttaatttctattggataaatacctaggtgtggaatggctaggtcttgtggtaaatgtaacttttaaagagttttccaaagtgattataccattt

SEQ ID NO: 295023 - DNA, 201 bp, Homo sapiens
tcccaaagtgctgggattacaggtgtgagccactgtccccggcctaatttgcgttttctagaattttatataatgaaatcatataatatgtactggagggsgtggtatctgagtctttgactcagcataatttgagattacgccatgttattacaattactagcagttcattcctttttagtgatgaatagtattccaatg

SEQ ID NO: 295024 - DNA, 201 bp, Homo sapiens
tattcttacagtaacataagctagagaaaaaatgttattaagaaaattgtaaggaacagaaaatatatttactattcattaaatggaagtggatcatcatraatgtgttcatcttcatcttgactttcagtaggctgagtagaaagaggaggggttggtcttgctgtctcagggtggctgaggtggaagaaattctgtgta

SEQ ID NO: 295025 - DNA, 201 bp, Homo sapiens
aatgtacaacttagatattgttaggtaccctcccccctttttatagatgagagcactgaagttcagagaggagtgggtggcactatccaaggtcacacagkcagtaagtgttggatttggaattcaaaccaggtctagctcatatgtctttgttccatcacatgtgtaccctgtgttccaggcaaagctgtctgttctgtg

SEQ ID NO: 295026 - DNA, 201 bp, Homo sapiens
gcgccttgggctccttgtccggtcatcagagcctgacggccttggcttctcggcttctcggtttctcggtttcgtgcgcgcgttcgtgcctgagacaaagmgagagggccgcgcgggaccggcgtcacgaggagacagaggcccttctactctgcctggcgctctccgtgtcctcgcccggttcgcgtggcacccctcgcc

SEQ ID NO: 295027 - DNA, 201 bp, Homo sapiens
atggagataataacttagaacatttactgagcatttaagatgtgtcatgcactgtgttaagtgctttatgttgatgaaatcggttgtcacaaccaccctgrggtaagtaccattattcccatgttacagatgagaaaactcagcctcacagagcatagacagcttccctaaaattacacaactgaaatggtagtgtatgga

SEQ ID NO: 295028 - DNA, 201 bp, Homo sapiens
taatgttcctctttgtctgttttaaccattgttgctttaaagtttgttttgtctgatataagaatagctacccctacttgcttttggtgtccatttgcatyaaatgcctttttccacccctttactttaagtttatgtgagtccttatgtgttagatgagtctcctgaaggcagcagatagttggttgatgagttctgcat

SEQ ID NO: 295029 - DNA, 201 bp, Homo sapiens
ctgtgtgccactgggaggaagtaaatgagagggtgctaggagaggagtcactgacccagaatatgtatggcctcatttaactcactgaagggagtctttawcattgcagagtatggcatgttggttggggtcaatgagtcccaaatttggatccagactccacagctgaatagccatgtagatagcttgggaagttaatct

SEQ ID NO: 295030 - DNA, 201 bp, Homo sapiens
tcacattcagttactctcctaacatccttaagaggaagcagaatagattcatggttaagagcacagatcctggaaccagaatgcctgaaatcaaatcctakttctgtcactccttaggtggtcaagttatttaatttctctgtactttaattttctcattatttggataataatagaacccattctagggttgttatgaag

SEQ ID NO: 295031 - DNA, 201 bp, Homo sapiens; identical to SEQ ID NO: 60841

SEQ ID NO: 295032 - DNA, 201 bp, Homo sapiens
gaggctgaagaagtagagctcagatcacagaagacttggtaagccctctaggagtggcgtcaacagtctggccaggcctgctcttttagcaatgctctagrgcattacactgtgctgatgtctgtctctgctaatctggggtgcctgtgtcagccatgtaagaaaatgatcacccagattgaataagtgtcccttatgttt

SEQ ID NO: 295033 - DNA, 201 bp, Homo sapiens
gaaaattaattgagttactgagattatttacgtttaatgattattgataatggtgggtttacttatttattttttgactgatagcatacctgatttatttatttttttcacatttctgttttttattttaaatttttttttccttttctatgtttagatgtttatttttaatttttttaaatttttccataagttattggt

SEQ ID NO: 295034 - DNA, 201 bp, Homo sapiens; identical to SEQ ID NO: 60844

SEQ ID NO: 295035 - DNA, 201 bp, Homo sapiens
tggatgcataggaaatttattggatacagtagatgctcagggcagggattagcaaactgtctggttttataaataaagttttgccggaacacacccacacscatttggttttatattgtctgtggttggttttgtactacaaaggtgaagttgagtagagttaatagttgtgacagagaccatctggcctatgaggtcagt

SEQ ID NO: 295036 - DNA, 201 bp, Homo sapiens
ctgtataatgtgaaacacataagtaatttaaaatttactaggagtcacattttttaaaagttaaaaactagtgagatattttatgttctttttttttttttactaaattttcaaaatctggtgtgttttaaacttgcagcacatgtcattttagagtaactacattttaagtgttcagtagacacgtgctttgggtttctg

SEQ ID NO: 295037 - DNA, 201 bp, Homo sapiens
cctcagtgctagcctgccatacttttcctcgggttctaatttacatgtgccttctggttccttctggggaaatctgtgtagagtggaggagctttgggtcrgtcagggtggcacttggctaccttattctatgcaaaagaatgaattccagactaaagtatgttcatctgttgattcacactgtttttactttgttttgtt

SEQ ID NO: 295038 - DNA, 201 bp, Homo sapiens
tcttttttccttatagtatcttatttttgtgtgtgtggttattttttactgagagctgcttatttcctttgaaaattgtgaaaatttttggagatgtatgrtaatggtttctcccttgagaaagcatttattggcttctgcctagggcattatcactttggaacttctttaaattctcagcctgagatgttttgttttgac

SEQ ID NO: 295039 - DNA, 201 bp, Homo sapiens; identical to SEQ ID NO: 60851

SEQ ID NO: 295040 - DNA, 201 bp, Homo sapiens
agattgtcagggttttatttttaggcattcaaataaaaaatattgctacactgtcttctggcttttcattgtttctgataagtctgctgttcttcttatcraaagtttcatgtgtctgtttttgctctcttttttccttatagtatcttatttttgtgtgtgtggttattttttactgagagctgcttatttcctttgaaa

SEQ ID NO: 295041 - DNA, 201 bp, Homo sapiens
ccgtggaaggcagaaacaaggtttatatgagccgttgtggccagagattgacatttggatgtataccacagttcctgtcaggttgtgaatctacaagtccrgaattcaaaacgacttggataagtcatccatctggggctgtgaacagaccactgcccatgcaataataaatagacccttaatgtggggattaggggcatt

SEQ ID NO: 295042 - DNA, 201 bp, Homo sapiens
cggcagctcaggtaatagatggcacttctcttttccccctcactgccttttctgaaatgagccttaggtgacatggtgtgggcaatgccttcttctcatcrcagaatgctatggtgtggtatcatccagaccctggcctttagaaagccaagagtgcatgagggagattagttgagggcctgatggtggtggtggtagtgg

SEQ ID NO: 295043 - DNA, 201 bp, Homo sapiens
gaatacatttttattatatttgctttaaacaattatttttaaagatgtttaaataagaaaaataaggggttttgtttttttgtttgtttttagagacagtrtctccctctgtcacccatgctggagtgcagtggcacgatcatggctcactgcagcctcaaactcccatgctcaagcaatcctcctgcctcagcctcccaa

SEQ ID NO: 295044 - DNA, 201 bp, Homo sapiens
atagacagcttccctaaaattacacaactgaaatggtagtgtatggattccaggctagttctgtgtgttgttaagcattctgctacactgctttggtatgkgcagcagagtcctggaagtaagtccgtggaaggcagaaacaaggtttatatgagccgttgtggccagagattgacatttggatgtataccacagttcctg

SEQ ID NO: 295045 - DNA, 201 bp, Homo sapiens
gtgctttgggtttctggaacagtggtcaggaaactcaggatgatgttctgtggcagtcatatagatggaagagtgaggaactacaggaaaggggaatggarataataacttagaacatttactgagcatttaagatgtgtcatgcactgtgttaagtgctttatgttgatgaaatcggttgtcacaaccaccctggggtaa

SEQ ID NO: 295046 - DNA, 201 bp, Homo sapiens
gtgttttaaacttgcagcacatgtcattttagagtaactacattttaagtgttcagtagacacgtgctttgggtttctggaacagtggtcaggaaactcargatgatgttctgtggcagtcatatagatggaagagtgaggaactacaggaaaggggaatggagataataacttagaacatttactgagcatttaagatgt

SEQ ID NO: 295047 - DNA, 201 bp, Homo sapiens; identical to SEQ ID NO: 60846

SEQ ID NO: 295048 - DNA, 201 bp, Homo sapiens
ttatgttctttttttttttttactaaattttcaaaatctggtgtgttttaaacttgcagcacatgtcattttagagtaactacattttaagtgttcagtaracacgtgctttgggtttctggaacagtggtcaggaaactcaggatgatgttctgtggcagtcatatagatggaagagtgaggaactacaggaaaggggaa

SEQ ID NO: 295049 - DNA, 201 bp, Homo sapiens
attgctgtgagggttaaatgccacagtaaactaaagcttacactgtacattggaagtggtctgcaaatcgtagtttctgctgttcttgagccttttctaartagctcaaaggggtaaggcaaggctaagatcagccctttggagaggtagatcttcatgagtatagggaagaactgtctaattctcaggagttgtgcaaag

SEQ ID NO: 295050 - DNA, 201 bp, Homo sapiens; identical to SEQ ID NO: 60836

SEQ ID NO: 295051 - DNA, 201 bp, Homo sapiens; identical to SEQ ID NO: 60840

SEQ ID NO: 295052 - DNA, 201 bp, Homo sapiens
cacccctcctgcccccacaagaaaaacccctgagattcttactctgccttcagaacgacttaggtgtggcaggtttcatcctccgtgctttacataatttyctttatttacataaaatgtacaacttagatattgttaggtaccctcccccctttttatagatgagagcactgaagttcagagaggagtgggtggcactat

SEQ ID NO: 295053 - DNA, 201 bp, Homo sapiens
ctctgctcagctgggtccatggctgtgcgtgccaacacttctatccttgaagtatccagactccacttctaggatttgctggggatgatgggacagctgcrgcttcctggtcccagacagaaatacacagattctggtccagaccctagtcttgtaagcctctgtccaggtggggctgaaagcagaaccctgaagggctcg

SEQ ID NO: 295054 - DNA, 201 bp, Homo sapiens; identical to SEQ ID NO: 60838

SEQ ID NO: 295055 - DNA, 201 bp, Homo sapiens
gggggaaagccagcagtcatgggcctcacccagctccctcacaaaccgaagggcagtcttactcccaccgtgtcctccccaacagccccagtctgtttccrggaggagggcttgaaaacttgcccaaggttatctgcttcccagctctgaaagaaaaggggctttagttcttcccctacctgtgaagtctggattcgtgcc

SEQ ID NO: 295056 - DNA, 201 bp, Homo sapiens
gccccctttatccttagtaatttttttttgttctaaaatgtcctttggtattgatgcagccagtccagctttattgattaaggggttagcatggtatgtgyttttcaatactattactttcccttatttatatttaatgtgaatttcttataggcagcatataaatgggtcttgctgtttaatcagacagttcgtgtcttt

SEQ ID NO: 295057 - DNA, 201 bp, Homo sapiens; identical to SEQ ID NO: 60843

SEQ ID NO: 295058 - DNA, 201 bp, Homo sapiens
tccttagtaatttttttttgttctaaaatgtcctttggtattgatgcagccagtccagctttattgattaaggggttagcatggtatgtgtttttcaataytattactttcccttatttatatttaatgtgaatttcttataggcagcatataaatgggtcttgctgtttaatcagacagttcgtgtctttgagttgaatt

SEQ ID NO: 295059 - DNA, 201 bp, Homo sapiens; identical to SEQ ID NO: 60845

SEQ ID NO: 295060 - DNA, 201 bp, Homo sapiens; identical to SEQ ID NO: 60849

SEQ ID NO: 295061 - DNA, 201 bp, Homo sapiens
cggaaggggtggcggcctcagggaacacgtggtggttcagggcggtatccatctcgtccacgtactccacttgcagggcaatgctcagggcctgcgacaaygccgtgatctggatgtggtcacactccgtggccatgggctctacttcctgcaggggccaaaatgaaaacaagccagcttaggagggaggcctggcagagg

SEQ ID NO: 295062 - DNA, 201 bp, Homo sapiens
gctttattcaaaccagatcctgaataaagtcaaaactcaaccaacaggtggaagtccaagaatccgagtggaggctcaccgaggcgaaggggccaaccatrggaaaggagagtggatgggactcaggtgggtactgcacatgattctgggggctgctggtccttccgaggtgaatgcactttgtgtcccactcttctgaca

SEQ ID NO: 295063 - DNA, 201 bp, Homo sapiens; identical to SEQ ID NO: 60869

SEQ ID NO: 295064 - DNA, 201 bp, Homo sapiens
gcagagttctttattaatgcagctttattcaaaccagatcctgaataaagtcaaaactcaaccaacaggtggaagtccaagaatccgagtggaggctcacygaggcgaaggggccaaccatgggaaaggagagtggatgggactcaggtgggtactgcacatgattctgggggctgctggtccttccgaggtgaatgcact

SEQ ID NO: 295065 - DNA, 201 bp, Homo sapiens
taagttttcttgtattcttagtgtagtttcgttaccggaaaggggtctcgatccagaccccaagagagggttcttggatcttgcacaggaaagaattcagsgtgagtccgcatagcaaagcaaaagcaagtttattaagtactttactccgtagacagagtagggcgttcccgaaggtaagaggacgaacgcgtccatcct

SEQ ID NO: 295066 - DNA, 201 bp, Homo sapiens
gttagccagtttgtgaatgcaaaggaaaagttactgaaggaaattaaacattttactctaatgaacacatgaatgatatgaaagcgaaacagtttattgcygatttggagaaaattttagtggtttggatagaaaataaaaccggctacagcatcccctaaacccaaaaccgaatccaaagcaaggccctgattctcttct

SEQ ID NO: 295067 - DNA, 201 bp, Homo sapiens
gaagacgccatcaaggactttcatagctagagaggtcaatgtctggcctcaaaggccaagctcactcttttgttagaggctaatgcagctagtgactttgrattgaagccagtgcttgtttaccattctattataaaaatcttaggtctcttaagaattacgctaaatataatctgcctgtgctctgtaagtagaacaaca

SEQ ID NO: 295068 - DNA, 201 bp, Homo sapiens
ctgaagagggaggatcgcttgggctctggagtgtgagtccagcatggacaacatagcaagacatcatctttaaaaaaagaaaaagaaagaaggaaagaaasagagtcaattttaatttttaaaaatgggggagggggagatgtcaaccaaaagcaaaatgatggcaaagtttccattatagtagtggaaacataggtattt

SEQ ID NO: 295069 - DNA, 201 bp, Homo sapiens
gagccattttggtattttcatttattgtaaaagtgacttatgcctgaggcattgtaattcatctagcaccaaaaaacatacgtatgtataagcattctacrtgggtgatatagtttggatatttgtccccacccaaatctcatagttgaattgtaatccccaatgctggagttggggtctggtgggaggtgtttggatcat

SEQ ID NO: 295070 - DNA, 201 bp, Homo sapiens
acggcattgcagtgggaaaattcatgccatagtaaactatgtacatattcaaggatgtaaaggaagacaaaggtttttaaaggaaaaatgaagacaattaygtaattgttttgaagccagattagaaagcaattaaaagacaacagccttaatcaattactcttagaataacttacttttacaaataataataataacaac

SEQ ID NO: 295071 - DNA, 201 bp, Homo sapiens
gttcacgccattctcctgcctcagcctcccgagtagctgggactacagacacccgccaccatgcccggctaatttttttttttgtatttttagtagagacrgggtttcactgtgttagccaggatggtctcgatctcctgacctcgtgatccgcccgcctcagccttccaaattgttgggattacaggcttgagccacaac

SEQ ID NO: 295072 - DNA, 201 bp, Homo sapiens
aatgaggatcactactcctttcctcatgcaaacactgcatgttccagttatttgcttcctgaggcagattataaggatgtagtcactcagctctgtttcaygctctgctgtgaaccctcaaggatggaaagttaatgactctattcccctggcttccccatatgccagttctgcaaatgacctgaattgtgccaagctgac

SEQ ID NO: 295073 - DNA, 201 bp, Homo sapiens
cacaagtaccagatgttaggactcgaacatatcttttcgggtgatgcaattcaacctgcaacaaagacgttttgaggaagagagagtaatcacccctgtcagacactgctgagagctgggaacgttgaggcccgagagggagggctctggatgggcaccaaggaggtcagtggggacgttgtaagtccagtttcttgggga

SEQ ID NO: 295074 - DNA, 201 bp, Homo sapiens
gtgttagagtcagaaaactggaaagggaggagttaggggcctctagggggctgctcgctgtagggagggtaccattttgttattaacaaggtctaggacamatgctaatagaactaatagaaccttctgttctctgagctgtccattgtgacagtcacaggctacacgtggctcttgagctcttgagatgtgactagtgca

SEQ ID NO: 295075 - DNA, 201 bp, Homo sapiens
aagaggaaggcaggaggtgccagggtcttttctgcagtcagatcttgcgggaactaatagagtgagagctaactcattactgtgaggacagtgccaagcacccccatgaccgaaacacccccgactaggcctcatctccaacattggaggttacattttagcacgagatttggagggggcaaatatttaaactatagcata

SEQ ID NO: 295076 - DNA, 201 bp, Homo sapiens
ctgacctggcatctgccacacggcacctgcctggccttgaggataagtaaaccacacttgacttctgcaaggcctatttagatgtggcctctgacctcaaygttagtcccactctgggctgtttgaccttcacacttatttttcctttacagctgcactcctgcagggctctccctgggatgctggctgagctgactccca

SEQ ID NO: 295077 - DNA, 201 bp, Homo sapiens
gactaggtagcttaaaaaacagaaatttatttcccacagttctagaagctgggaagtccaagattaagaggtgtcagcccccttggtgtctggtcagggtkcctttcctggtttgtaaatactgctttctgtgtcctcacatggtagtgggataaggcagctctctggggggcctcttttataaaggcactaatcccattc

SEQ ID NO: 295078 - DNA, 201 bp, Homo sapiens
gaaagacacgtttttgggaaatgtcatctgagtagggattgatatcatcaagacaggtcaggagtcgtgacagagagaaagggaggtcctgagccatgagytaaaagcttcaagaaatggcagggagtgatgggaggattgaggctgatttttgcaccttctgttacttggctgagaccaaggcgcctcttcctggggagg

SEQ ID NO: 295079 - DNA, 201 bp, Homo sapiens
atggcagggagtgatgggaggattgaggctgatttttgcaccttctgttacttggctgagaccaaggcgcctcttcctggggaggtggctgagctctttcyagcaggccctgaaatctccagaactttggtcccagctgcctaagcaccccagtccctgcccccgtggcagccattgtcagatgttcctgccagccctgag

SEQ ID NO: 295080 - DNA, 201 bp, Homo sapiens
ttcacctctgacctatggcctaggatgagtagggggcttcagaagagggaaagaatagcaaagttgaatttgagatgggggtatcagagagtacccactcycataggtttgtgtttgtttgtttgttgttgttgttgttgtttttgtctccaggcagggctgctgtagcagctgtggtcggaggaggtgagtctctatggg

SEQ ID NO: 295081 - DNA, 201 bp, Homo sapiens
tcacctctgacctatggcctaggatgagtagggggcttcagaagagggaaagaatagcaaagttgaatttgagatgggggtatcagagagtacccactccyataggtttgtgtttgtttgtttgttgttgttgttgttgtttttgtctccaggcagggctgctgtagcagctgtggtcggaggaggtgagtctctatggga

SEQ ID NO: 295082 - DNA, 201 bp, Homo sapiens
aggcacagggctttggaggcagccagagctggggctactctcagcttccaccaagtacaaaccatgcaaccccggatgagtcattggagcagtcacagccygggattcctccccgtctaaagcagggcccatggtatccttggggacttttgaagggagtatgtcagctgagctgtgtctcattcctcaaaagtatttgac

SEQ ID NO: 295083 - DNA, 201 bp, Homo sapiens
ctgtgattgcagatggctctctgactgcactgctctggagattttggggagccctagaggacccccgcgtgctgctgcagggccttcagggcctccatccyctcacctctccagaaaagcagctctgatattgtcttctgtcaaccttttgcatggagagatcatgttttccttgccaaaagggaaagtttgaagactgct

SEQ ID NO: 295084 - DNA, 201 bp, Homo sapiens
gggagccggtccactggctgctttacacgttgactgcccttgttttgggatcccatccctgctcagtctttcctgagagcacagcagacccctcctcctcwtcgccccaggaggatgtcagggaagtctgggggactccgtcccatggggccaaccccaaatctccacttcccgcagttgtggctgtggggactgtgctcg

SEQ ID NO: 295085 - DNA, 201 bp, Homo sapiens
tgttagagtcagaaaactggaaagggaggagttaggggcctctagggggctgctcgctgtagggagggtaccattttgttattaacaaggtctaggacaawtgctaatagaactaatagaaccttctgttctctgagctgtccattgtgacagtcacaggctacacgtggctcttgagctcttgagatgtgactagtgcaa

SEQ ID NO: 295086 - DNA, 201 bp, Homo sapiens
acatctctgattcttttcttgtgatgaattccaagaagtaaaatttctaaaccaaataagctttcactacatgctgtcaaataaagtatgggttagaacaygccatacccagcagtgaatgaggatcactactcctttcctcatgcaaacactgcatgttccagttatttgcttcctgaggcagattataaggatgtagtc

SEQ ID NO: 295087 - DNA, 201 bp, Homo sapiens
  misc_feature (1)...(201): n = A,T,C or G
tagggttttaggaagcagaggtggggaacagggttggactgcctgggcctcaggtctctggagggaccagggtctctggccttcaaccccctgttaggagntgctacccctccctgtgccctgtgctcaccctctcttctcccccaggggcagctggactctctgtgacatctaaagttatcgggggctttgctgggacag

SEQ ID NO: 295088 - DNA, 201 bp, Homo sapiens
aactattagggtctcttgtattcagggtagagtggagctcagtcagaaagtgtcggtatggcaaggaccattcataactcttgagttccgacaaaaggtgrtatctggaagattagtaagtgttcaatttaagaaaacattgagtaagctcatcctacatttctatacaaagagtacaacagcaacatattccacaacagt

SEQ ID NO: 295089 - DNA, 201 bp, Homo sapiens
aaagttgtaaatagctcaaaataaaaatttttttggctctgtaaaagatcaggaaaaagtcagaaagattggttcagacttctgttagtttagttcatgcrcttaattcctgttctgtctgatgctcatgaacatttcagctctccatgaaagtcctgaaagattttttctaacatcacaatgtccaaagttatcagaaac

SEQ ID NO: 295090 - DNA, 201 bp, Homo sapiens; identical to SEQ ID NO: 60875

SEQ ID NO: 295091 - DNA, 201 bp, Homo sapiens
gaaagccaaacacccaaccatttcatatttaaccatgcttcctatatgatttttataccaaataaggcaaatatgtcatttttggacttgaggagacctartatctaaaagattaattaggaggtcagaagaagacataatttataatttgattttggaaattttgtcaaatatcagaggtttaaaacacttgatattata

SEQ ID NO: 295092 - DNA, 201 bp, Homo sapiens
tttggacttgaggagacctaatatctaaaagattaattaggaggtcagaagaagacataatttataatttgattttggaaattttgtcaaatatcagaggyttaaaacacttgatattataaaatcaaatcccaggtcaccataagtcatttacttagctgaaacaataactcagaattttttaaaaggcaaaacctttac

SEQ ID NO: 295093 - DNA, 201 bp, Homo sapiens
atattataaaatcaaatcccaggtcaccataagtcatttacttagctgaaacaataactcagaattttttaaaaggcaaaacctttactcattaatagagrgaagatttagctttccaaacaatctctttcctttcccttcttttgtctatagcttattcaaaaggcaaacaaaaatctttttttttttaatataacatga

SEQ ID NO: 295094 - DNA, 201 bp, Homo sapiens
gaaatttatttcccacagttctagaagctgggaagtccaagattaagaggtgtcagcccccttggtgtctggtcagggttcctttcctggtttgtaaatastgctttctgtgtcctcacatggtagtgggataaggcagctctctggggggcctcttttataaaggcactaatcccattcattagggctctgctctcctga

SEQ ID NO: 295095 - DNA, 201 bp, Homo sapiens
tataaaatcaaatcccaggtcaccataagtcatttacttagctgaaacaataactcagaattttttaaaaggcaaaacctttactcattaatagagggaasatttagctttccaaacaatctctttcctttcccttcttttgtctatagcttattcaaaaggcaaacaaaaatctttttttttttaatataacatgaaaat

SEQ ID NO: 295096 - DNA, 201 bp, Homo sapiens
gtttgagaccagcctgagcaacatggtgaaaccctgtctctactaaaaatacaaaaaaattagccacgcatggtggcgggtgcctgtaatcccagctactygggaggctgagtcaggagaatcgcttgaacctgggcagtggaggttgcagtgagccgagattgcaccactgcactctagcctgggtgacagagtgagact

SEQ ID NO: 295097 - DNA, 201 bp, Homo sapiens
tttggggttatgattttaacgaatttggcggggccgtggcattcagaccatagcaccctgctttcaattctttgggatatatacccagaggtggggtttcyggatcatatagaagttcttttaattttttaaggaacttccctactgttttccatagcaactactccatcttacgatcccaccaacagtgtgcaatggttc

SEQ ID NO: 295098 - DNA, 201 bp, Homo sapiens
ggccgtgcgctctggctcacgtctgtaatcccagcactttgggaggctgaggtgggcggatcacgaggtcaggagtttgagaccagccagatcaacatggkgcaaccccgtctctactaaaaatacaaaaattagccagctgggtggtgcgcttttgtaatcccagctactcaggaggctgaggcaggagaattgcttgaa

SEQ ID NO: 295099 - DNA, 201 bp, Homo sapiens
ccagtttcttggggactgggttggggagaaggcttatgggtatgggtttgagagtgcatgagaggagtggtggtgtgtcgtgcctatacacacatcttgaygattcactcatgttctcatgctttgcattagaccctcccactaaccctgtgaggtggctgctctcattatcttacacattttatagaggggacaagaaag

SEQ ID NO: 295100 - DNA, 201 bp, Homo sapiens
ctgatgaccggacaaggagcccaaggcgcggggaccgtggcacgcagctcggttggacggcttgggccggcggccgccctctctggacccgggaacccacmggcccagagcgacccgcgataggaacccgggttcctggcctcagcccctctccagagtcggctccaaccccgctcgttttggtactcaccgtgtggagac

SEQ ID NO: 295101 - DNA, 201 bp, Homo sapiens; identical to SEQ ID NO: 60874

SEQ ID NO: 295102 - DNA, 201 bp, Homo sapiens
tcaggtgccagctgtcctatgcacactgacctggcatctgccacacggcacctgcctggccttgaggataagtaaaccacacttgacttctgcaaggcctrtttagatgtggcctctgacctcaacgttagtcccactctgggctgtttgaccttcacacttatttttcctttacagctgcactcctgcagggctctccct

SEQ ID NO: 295103 - DNA, 201 bp, Homo sapiens
caagcacacaaagtccattcattccagacaagaccccagacatggcagcgagcccagccaagttctgcaaagctgacctgcagctgactgcagatggatgrggggcccagctgagaccagaagaaccacctgcctagattgctgacccacagaatcatgagctacataacttttttaagccactaaattgtgtggtcactt

SEQ ID NO: 295104 - DNA, 201 bp, Homo sapiens
  misc_feature (1)...(201): n = A,T,C or G
ccagagttcttgcctcctcttcgggcagtggcctgcagcagcccctcccagagcagaaatcctagggttttaggaagcagaggtggggaacagggttggantgcctgggcctcaggtctctggagggaccagggtctctggccttcaaccccctgttaggagctgctacccctccctgtgccctgtgctcaccctctcttc

SEQ ID NO: 295105 - DNA, 201 bp, Homo sapiens
attttttaagtgcagttcagcaatgttaggtgtatattcacgttgttgtgaaacatctccagaattttttcatcttgcaaaactggaactctgttcccatyaaacagctccgctccgcccctccccctgccccggtaaccaccattctactttctttgtgaatttgactactctaggtaccacttaatggtagaattatat

SEQ ID NO: 295106 - DNA, 201 bp, Homo sapiens
ttcagcaatgttaggtgtatattcacgttgttgtgaaacatctccagaattttttcatcttgcaaaactggaactctgttcccattaaacagctccgctcygcccctccccctgccccggtaaccaccattctactttctttgtgaatttgactactctaggtaccacttaatggtagaattatatagtatttgtcatgtg

SEQ ID NO: 295107 - DNA, 201 bp, Homo sapiens
aagggaatgtgggggcaggggtggtgagtggcaggggtagacttgctggtgagagcagggggacgctgtcttctggttgccttcattttcttggtgaattrggaccccgacagaggcaagagaggaggtggtgcaggtttgaagatccagggagaagttgtgaaatttgcataatctcagagagcggggagtgaaaggaac

SEQ ID NO: 295108 - DNA, 201 bp, Homo sapiens
acaagaaagctaggtaactgctcaaggtcatgcagctctgagtctgggtgcctaaccacggtgccattctgcctttccctgaatggacagaactaccacarggagctttgctctaaggagcaaagcaaagtgaggtggcagctggaggaagatgtggtgtgaagggaggggctgtccttgttttactggtattgggaacaa

SEQ ID NO: 295109 - DNA, 201 bp, Homo sapiens; identical to SEQ ID NO: 60873

SEQ ID NO: 295110 - DNA, 201 bp, Homo sapiens
atgcagcaaacttcattgttgtgttattttaagaaattgccacagcacctcacctttcagcaaccaccaccctaatcaatcagctggtttcagaaaaaaaraaaagtatattatggcagagggggacacagtcaaaatgttaataattggtgaattattggtgctagagtaagggtacgtgagtgttcattgtactattct

SEQ ID NO: 295111 - DNA, 201 bp, Homo sapiens
aagtactttactccgtagacagagtagggcgttcccgaaggtaagaggacgaacgcgtccatcctaggtacaatgctcgtacctagatcatagggagatgkgctctgctacaagggtgacgtgtgatgagtgttccttgtattgtaattgttttggggcgccatgagctgtgcccatataagatacaaacgtaattgataa

SEQ ID NO: 295112 - DNA, 201 bp, Homo sapiens
aacttttgtatttttagtagagatggggtttcaccatgttggccaggaaaatctaattccaacacatcccaataccaggagcattacttttcccctcaaartgcccttcttggagatgtgaggaattcaaaatcctccttttcatcaaaatttttgactgcatttcttttctttttttttttttttttgagatggagtctt

SEQ ID NO: 295113 - DNA, 201 bp, Homo sapiens
agtatgggttagaacacgccatacccagcagtgaatgaggatcactactcctttcctcatgcaaacactgcatgttccagttatttgcttcctgaggcagwttataaggatgtagtcactcagctctgtttcacgctctgctgtgaaccctcaaggatggaaagttaatgactctattcccctggcttccccatatgccag

SEQ ID NO: 295114 - DNA, 201 bp, Homo sapiens
ggcccaatttaggaatgttagagtccttccaaagattcagggggttagaggtccctctcagtaaagtctctcttggttaaaaatggatttggcactacgargtattaactgctactctctttgggttaatctgcctcgcactctttgctgatggctgtgggtggcaggattgagcatgtacaggatcatgggacattggga

SEQ ID NO: 295115 - DNA, 201 bp, Homo sapiens
atgttagagtccttccaaagattcagggggttagaggtccctctcagtaaagtctctcttggttaaaaatggatttggcactacgaggtattaactgctaytctctttgggttaatctgcctcgcactctttgctgatggctgtgggtggcaggattgagcatgtacaggatcatgggacattgggagcttttttctctct

SEQ ID NO: 295116 - DNA, 201 bp, Homo sapiens
tttggaacaacactcccaaataattcagcaaaagactttgctgataaagcagcatgatgtaaagaagtcagcccaaatccaccaaaacctagatggtgacrgaagtgacctccatcactctaggaattgtccacccctttcccagaaaactcgtgaatgagccatcccttgtttagcatataatcaatataatactgtaag

SEQ ID NO: 295117 - DNA, 201 bp, Homo sapiens
attcagaagtattctttatggaaggctgcagtggcctttctgcaaggttgtggttttcagagcatctttgtaatagctcttttcataggcatgtgtgcctsagagcccctccttggtggcctgcctccattttgttaggatttggcataagcgactccattttaattctgacaactttcatagcaggaaggcttttggcct

SEQ ID NO: 295118 - DNA, 201 bp, Homo sapiens
tccagtcatcccactgagagacgcgggtggcttggtccgggactggagctgcagaagtatgagggatggtcagactggatatttctgaaggtgaataagcrttcacggatagattgctgtgaaggagagaaaccatgtggagtcaaggaggactccaggccacttaccctgagctactgagagaacggggctgccctttac

SEQ ID NO: 295119 - DNA, 201 bp, Homo sapiens
caccctgctttcaattctttgggatatatacccagaggtggggtttccggatcatatagaagttcttttaattttttaaggaacttccctactgttttccwtagcaactactccatcttacgatcccaccaacagtgtgcaatggttccaattatataagggccaacactttttattttcggtttttttgatagcagccat

SEQ ID NO: 295120 - DNA, 201 bp, Homo sapiens
taaccgatgtctccaattgcatccaattgcaaaatgaaatggattcttattgtacttatgcagataactatattgccataaattaagaatatgcagtttcyaaattctggagaaatcaggtagagagaagcaaatatactccaaattttgttcacagtagtatactttactcaattatcaaaagttgtaaatagctcaaaa

SEQ ID NO: 295121 - DNA, 201 bp, Homo sapiens
gtcatcccactgagagacgcgggtggcttggtccgggactggagctgcagaagtatgagggatggtcagactggatatttctgaaggtgaataagcattcrcggatagattgctgtgaaggagagaaaccatgtggagtcaaggaggactccaggccacttaccctgagctactgagagaacggggctgccctttacagag

SEQ ID NO: 295122 - DNA, 201 bp, Homo sapiens
cattacagtcaaagccttggtaaaataaccgatgtctccaattgcatccaattgcaaaatgaaatggattcttattgtacttatgcagataactatattgycataaattaagaatatgcagtttccaaattctggagaaatcaggtagagagaagcaaatatactccaaattttgttcacagtagtatactttactcaatt

SEQ ID NO: 295123 - DNA, 201 bp, Homo sapiens
cgggtggcttggtccgggactggagctgcagaagtatgagggatggtcagactggatatttctgaaggtgaataagcattcacggatagattgctgtgaargagagaaaccatgtggagtcaaggaggactccaggccacttaccctgagctactgagagaacggggctgccctttacagaggctgggcagctgttggagg

SEQ ID NO: 295124 - DNA, 201 bp, Homo sapiens
tcccctctctgggcctttggaagataaggaacctgccatttctcagagggtctgccctgttgctgggattcctcaccagagttcttgcctcctcttcgggcagtggcctgcagcagcccctcccagagcagaaatcctagggttttaggaagcagaggtggggaacagggttggactgcctgggcctcaggtctctggagg

SEQ ID NO: 295125 - DNA, 201 bp, Homo sapiens
cagggacggatccattctatttaggacctgaagcttacataattggtggggcagagagcttaaaaaaagagagttataatacaaaataccagtaacactayaatgtcaccccaaaccaggggaagtatggcagagggaagccagattggaaagcaattacaagacaacagccctaatcaattactcttagaagaacttttg

SEQ ID NO: 295126 - DNA, 201 bp, Homo sapiens
tccccatatgccagttctgcaaatgacctgaattgtgccaagctgactcccctgtgcaaggatgtgaaggtggaagggacacaggggctgtgcttcggctkcttctactgccaagcattgtagtagggacttgtttttttgcagtagcagaagcagagtcccaggatccatttcttacgttactatgcgagatgcagaagg

SEQ ID NO: 295127 - DNA, 201 bp, Homo sapiens
gcaaatatgtcatttttggacttgaggagacctaatatctaaaagattaattaggaggtcagaagaagacataatttataatttgattttggaaattttgycaaatatcagaggtttaaaacacttgatattataaaatcaaatcccaggtcaccataagtcatttacttagctgaaacaataactcagaattttttaaaa

SEQ ID NO: 295128 - DNA, 201 bp, Homo sapiens
atatcagaggtttaaaacacttgatattataaaatcaaatcccaggtcaccataagtcatttacttagctgaaacaataactcagaattttttaaaaggcaaaacctttactcattaatagagggaagatttagctttccaaacaatctctttcctttcccttcttttgtctatagcttattcaaaaggcaaacaaaaatc

SEQ ID NO: 295129 - DNA, 201 bp, Homo sapiens
aagccagatttcaccctttgcgttagtgtactattgatatcaaattcaatccttaataaaacctggccgtgcgctctggctcacgtctgtaatcccagcastttgggaggctgaggtgggcggatcacgaggtcaggagtttgagaccagccagatcaacatggtgcaaccccgtctctactaaaaatacaaaaattagcc

SEQ ID NO: 295130 - DNA, 201 bp, Homo sapiens
tttcaccacgagggactttgttcatggtgtttttttgtttgttttgttattttgttatttttatttttagagagagtgttttgctctgttggctaggctgkagtgcagtggttgggtcatggctcactgcagctgttactggatagaggtcccgatgcatatcctaagagaaggttcttggatatcatgcaagaaagaatt

SEQ ID NO: 295131 - DNA, 201 bp, Homo sapiens
caccctttgcgttagtgtactattgatatcaaattcaatccttaataaaacctggccgtgcgctctggctcacgtctgtaatcccagcactttgggaggcygaggtgggcggatcacgaggtcaggagtttgagaccagccagatcaacatggtgcaaccccgtctctactaaaaatacaaaaattagccagctgggtggt

SEQ ID NO: 295132 - DNA, 201 bp, Homo sapiens
tctctactaaaaatacaaaaattagccagctgggtggtgcgcttttgtaatcccagctactcaggaggctgaggcaggagaattgcttgaacccgggaggyggaggatgcagtgagccaagattgcaccactgcactccagtctgggcaacagagcgagactccatctcaaaaacaaaacaaaacaaaacaaaaaaaactt

SEQ ID NO: 295133 - DNA, 201 bp, Homo sapiens
gctactcaggaggctgaggcaggagaattgcttgaacccgggaggtggaggatgcagtgagccaagattgcaccactgcactccagtctgggcaacagagygagactccatctcaaaaacaaaacaaaacaaaacaaaaaaaactttacagacaaatcaatcttaatcagtttgtctatgaggcaagattctcataaacct

SEQ ID NO: 295134 - DNA, 201 bp, Homo sapiens
  misc_feature (1)...(201): n = A,T,C or G
tgatgcggggacctggggaggcttcctgcagaaggtgccacgtgcagagccctgaggatggggccttcacctctgacctatggcctaggatgagtaggggncttcagaagagggaaagaatagcaaagttgaatttgagatgggggtatcagagagtacccactcccataggtttgtgtttgtttgtttgttgttgttgtt

SEQ ID NO: 295135 - DNA, 201 bp, Homo sapiens
ttcccctttcctgtagttcctcactcttccatctatatgactgccacagaacatcatcctgagtttcctgaccactgttccagaaacccaaagcacgtgtytactgaacacttaaaatgtagttactctaaaatgacatgtgctgcaagtttaaaacacaccagattttgaaaatttagtaaaaaaaaaaaaagaacataa

SEQ ID NO: 295136 - DNA, 201 bp, Homo sapiens
aggatgaggccaggtgaggaagatgtgtcggcttctagggctgctgtcacaaaggtccatggattgaatggcttaaaacaacagaaatttactttctcacmgttctggaggctagaagtctgaaatcagagtgtcccagggccatgctgtctctgaaggcccttcaggagaatgttccatgccactccctagtttctggtg

SEQ ID NO: 295137 - DNA, 201 bp, Homo sapiens
agaatgttccatgccactccctagtttctggtggctgctgtcagtcttcgacgtccttgccttgtggctgcatcactcccatctccatctctgtcttcacrtgggcttctccctgtgtgactccaagtatctgtgtctcttctttttcccttacaaggacctcagtcatattggattaagggcccaccctactccagtatg

SEQ ID NO: 295138 - DNA, 201 bp, Homo sapiens
atagtgccacccactcctctctgaacttcagtgctctcatctataaaaaggggggagggtacctaacaatatctaagttgtacattttatgtaaataaagraaattatgtaaagcacggaggatgaaacctgccacacctaagtcgttctgaaggcagagtaagaatctcaggggtttttcttgtgggggcaggaggggtg

SEQ ID NO: 295139 - DNA, 201 bp, Homo sapiens
ccatgccactccctagtttctggtggctgctgtcagtcttcgacgtccttgccttgtggctgcatcactcccatctccatctctgtcttcacgtgggcttstccctgtgtgactccaagtatctgtgtctcttctttttcccttacaaggacctcagtcatattggattaagggcccaccctactccagtatgaccacatc

SEQ ID NO: 295140 - DNA, 201 bp, Homo sapiens
ttcattacatttgcaaaaaccctgtttccaattaaggtcacattcacaagtaccagatgttaggactcgaacatatcttttcgggtgatgcaattcaaccygcaacaaagacgttttgaggaagagagagtaatcacccctgtcagacactgctgagagctgggaacgttgaggcccgagagggagggctctggatgggca

SEQ ID NO: 295141 - DNA, 201 bp, Homo sapiens
ggcagctggaggaagatgtggtgtgaagggaggggctgtccttgttttactggtattgggaacaatcccagagagagggagactttgatgatgcagaagcragggaggcactgctggagcatgacttggagtaggaatagcaggtgggcccagcgcacagggcggcaggcgcacaagtggggaggcacacaggtggcaggt

SEQ ID NO: 295142 - DNA, 201 bp, Homo sapiens
gtccttgttttactggtattgggaacaatcccagagagagggagactttgatgatgcagaagcgagggaggcactgctggagcatgacttggagtaggaakagcaggtgggcccagcgcacagggcggcaggcgcacaagtggggaggcacacaggtggcaggtgcaggcactgctcatcacagaagtgggagggcaaggg

SEQ ID NO: 295143 - DNA, 201 bp, Homo sapiens
tgcaggcactgctcatcacagaagtgggagggcaagggaatgtgggggcaggggtggtgagtggcaggggtagacttgctggtgagagcagggggacgctstcttctggttgccttcattttcttggtgaattaggaccccgacagaggcaagagaggaggtggtgcaggtttgaagatccagggagaagttgtgaaattt

SEQ ID NO: 295144 - DNA, 201 bp, Homo sapiens
gaatgtgggggcaggggtggtgagtggcaggggtagacttgctggtgagagcagggggacgctgtcttctggttgccttcattttcttggtgaattaggaycccgacagaggcaagagaggaggtggtgcaggtttgaagatccagggagaagttgtgaaatttgcataatctcagagagcggggagtgaaaggaacagaa

SEQ ID NO: 295145 - DNA, 201 bp, Homo sapiens
tgtgggggcaggggtggtgagtggcaggggtagacttgctggtgagagcagggggacgctgtcttctggttgccttcattttcttggtgaattaggacccygacagaggcaagagaggaggtggtgcaggtttgaagatccagggagaagttgtgaaatttgcataatctcagagagcggggagtgaaaggaacagaaaga

SEQ ID NO: 295146 - DNA, 201 bp, Homo sapiens
ttttgcaaataataataataacaacaaagtgagcaatggctagagctgctcttagggtcttggaaggagccagtgcaagtgagggtccctgaactcaggcytcttttgcttcgaggtaaacccatttctgcttctatcatcagtagctacatataattatttatataggagtataaaattttatttattcaatttttgtta

SEQ ID NO: 295147 - DNA, 201 bp, Homo sapiens
cttcgccccaggaggatgtcagggaagtctgggggactccgtcccatggggccaaccccaaatctccacttcccgcagttgtggctgtggggactgtgctygtggcgctcagtgccatgggcttcacctcagtaggaatcgccgcatcctccatagcagccaagatgatgtctacagcagccattgccaacgggggcggag

SEQ ID NO: 295148 - DNA, 201 bp, Homo sapiens
taacagagagggaggctatccatggaaaagaattattcaggaatgaatgacgggatttttaaatcccagaatacacatgccacagtggaccatggcggggycacagatgtacccaggaaggcaaaggaagacaaaggtttttaaaagcaaaacaaggaaagttactaagtggttttgaaacaatgatccttggctacaagt

SEQ ID NO: 295149 - DNA, 201 bp, Homo sapiens
aggagctttgctctaaggagcaaagcaaagtgaggtggcagctggaggaagatgtggtgtgaagggaggggctgtccttgttttactggtattgggaacartcccagagagagggagactttgatgatgcagaagcgagggaggcactgctggagcatgacttggagtaggaatagcaggtgggcccagcgcacagggcgg

SEQ ID NO: 295150 - DNA, 201 bp, Homo sapiens
tcaggggtctgtttgagtctcgtgattccaaagtctgtacttgtatttctttttttctttttctttctttctttctttcttttttttttttttttttttttgcactttgtcttccattctccagctactgatcaagctgggaacggaatgggtacctctgtcatacttttcttattgcatgatgctatcctagagttggaa

SEQ ID NO: 295151 - DNA, 201 bp, Homo sapiens
ttcaggggtctgtttgagtctcgtgattccaaagtctgtacttgtatttctttttttctttttctttctttctttctttcttttttttttttttttttttttgcactttgtcttccattctccagctactgatcaagctgggaacggaatgggtacctctgtcatacttttcttattgcatgatgctatcctagagttgga

SEQ ID NO: 295152 - DNA, 201 bp, Homo sapiens
gttcaggggtctgtttgagtctcgtgattccaaagtctgtacttgtatttctttttttctttttctttctttctttctttcttttttttttttttttttttttgcactttgtcttccattctccagctactgatcaagctgggaacggaatgggtacctctgtcatacttttcttattgcatgatgctatcctagagttgg

SEQ ID NO: 295153 - DNA, 201 bp, Homo sapiens
gaaattgagccccagactttgttcaggggtctgtttgagtctcgtgattccaaagtctgtacttgtatttctttttttctttttctttctttctttctttyttttttttttttttttttttttgcactttgtcttccattctccagctactgatcaagctgggaacggaatgggtacctctgtcatacttttcttattgca

SEQ ID NO: 295154 - DNA, 201 bp, Homo sapiens
catatggggaaattgagccccagactttgttcaggggtctgtttgagtctcgtgattccaaagtctgtacttgtatttctttttttctttttctttctttytttctttcttttttttttttttttttttttgcactttgtcttccattctccagctactgatcaagctgggaacggaatgggtacctctgtcatacttttc

SEQ ID NO: 295155 - DNA, 201 bp, Homo sapiens
aaattagaaaaataaggaaaatgtggtaaagttttcataaagttaaatgtacttacttaaaaggaatgaaatacctttatatctttatataaaggtcatayctttatataaatatctttattctgaaaatatattttaaatattttttggtgatacagtctctcttttatgaactgctggtgtgttaaacaatggcactta

SEQ ID NO: 295156 - DNA, 201 bp, Homo sapiens
ttttctactcttgtattgacctgtgggcagccgcacacccttcaaatagtaccccgagatgagtatgataatcccaccaacaattccatgtccttgagagwtgagcacaattacaccttgtccattcatgaggtaagcagtctcccttctttatctgtgtgctagagagagctggctcctttctctgttattctcacacct

SEQ ID NO: 295157 - DNA, 201 bp, Homo sapiens
agaagttctggtttagggaaaaggcatcacatcatctgctgattaaccacaaacttaatataagattcttaattatgtccacctttgccctttatcttctrgtcactttgaattactcagtggtggctaccaaaaaactaacatttggatgggctctgatcctcacagtgacatcttgttcctttggcatggggttgggga

SEQ ID NO: 295158 - DNA, 201 bp, Homo sapiens
ccagccgggcgtggtggctcacgcctgtaatcccagcactttgggaggccaaggcgggcggatcaggaggtcaggagatcgagactatcctggctaacacrgtgaaaccccgtctccactaaaaatacaaaaaaaaattctctgggcatggtggcgggcacctatagtcccagctactcgggaggctgaggcaggagaatg

SEQ ID NO: 295159 - DNA, 201 bp, Homo sapiens
tatcctcaacaatgacatgagtgagatggagctggtctttgcagaagagaaatataataaatcaggtcaattggataaggtgagaaagaggacaaagcctytgggtcctatgttctccagtttcctgtagagcaggactgtctaagagaactttctgcagtggtggaaatgttccatatttgtgttgtctattaaacaccc

SEQ ID NO: 295160 - DNA, 201 bp, Homo sapiens
tctgtaacaccagccacatatacttcatttctttgctgagtgctgtaacttccctgaggaccagaaatttcacatctagggtcagatcgaatggcatccckctgaggaagtacctaaggcagttaaactgccagttttggtcccaccaagtcatctagtgcatcctgtaagatgcagacagatgctttttgagagatcgta

SEQ ID NO: 295161 - DNA, 201 bp, Homo sapiens
ttccaggagggtgatgtgaactttcctgagaagctaagagctgatcttgattaaggtatccatccataccctctatgctcacctcatagattttactacayggaagtataactacgtaattatttatttgtctgtcttctttactaagcttttatgtttctaaagtgttgagaatattttactcattctggaatctttagg

SEQ ID NO: 295162 - DNA, 201 bp, Homo sapiens
ttactgcatgtcagctgtctctcacagaagggttgttgtagttgtcagagatagtaggtgggaatttttctagccctcatgactcaagccatacatttggyactgcttttattcctctaagaagaccacaaatctgtaacaccagccacatatacttcatttctttgctgagtgctgtaacttccctgaggaccagaaatt

SEQ ID NO: 295163 - DNA, 201 bp, Homo sapiens
tagattccagccgggcgtggtggctcacgcctgtaatcccagcactttgggaggccaaggcgggcggatcaggaggtcaggagatcgagactatcctggcyaacacagtgaaaccccgtctccactaaaaatacaaaaaaaaattctctgggcatggtggcgggcacctatagtcccagctactcgggaggctgaggcagg

SEQ ID NO: 295164 - DNA, 201 bp, Homo sapiens
ggtaatttttttcttctctgacttctactttaaaccttattccttattatacttcagaggatgagaagaatatcgtcgaacgcaatgtgtccacttcaggygtgagcatttactttgaggcttatctttataatgctaccaactgtagcagcactccatggcacctgccacccatgcacatgacctcttcccagcgccggc

SEQ ID NO: 295165 - DNA, 201 bp, Homo sapiens
ggaaaaaggagtgaactaccgaaatgtgtaacaacatgtatgaatctaagaaccattatgctaagtgaaaaaatgctacacacgaaggactacattttgcrtgtgatacaaatgtatttctatgtaccttttgaatgtattcacctggatatcctgtagacactccaaacttaacatgtttaattctctactcattatctt

SEQ ID NO: 295166 - DNA, 201 bp, Homo sapiens
cttgagctcaagtgatcctcctgccttggcttccaaagtgctgggattacaggtatgagccgccatgccctgctaggctttcccagcccggcttgaatctmaactctgtcacttaccccaatgtgagatgttcagcaaccttaagcccagcttaaaaaaaaaaaatccataaaacgagaataatagtattcatcttaccaa

SEQ ID NO: 295167 - DNA, 201 bp, Homo sapiens
gagttagacgtaggctttttttttttttttttttttttttaaatggagacagggtctttctctgtcaaccaggctggagtgcagtagcacaatcatggctyactgcagccttgacctcctaggctcaagcagtcttcccgcctcagcctcccaagtaactgggactgcaggcgtgcactatgacatcctaattttttcttt

SEQ ID NO: 295168 - DNA, 201 bp, Homo sapiens
ctttgatttttttctggggaatccttttcagaaataaaaacctattccaactaaccctgttttcttttttggacaggatcctggggcgtcctttggcagtygattgcaccctgcactagagagaagtccaggaatgatatattcttgggctgtatttctctaccctggagttcatccagttcatcccagaaacactgacct

SEQ ID NO: 295169 - DNA, 201 bp, Homo sapiens
atcttttatggtgggattttgggttggggagtataaactaagagtggaattaagccatagtaaatgtaaactgataatccaaagtgtctgatatattcttrgaacctccttagttagaccaccctaacctgtgcactttttgaaaattgaatagtttgtttttttaagttcatgtccctggactcatggctggtgcttctc

SEQ ID NO: 295170 - DNA, 201 bp, Homo sapiens
ccactctaaaatgaaaaaacgagactaaaagaataaaagtgctaggccgggcatggtggctcacacctgtaatcccagcactttgggaggctgaggcaggyggatcacctcaggttgggagtttgagatcagcctgaccaacatggagaaaccccgtctctactaaaaatacaaaattagccaggcgtggtggtgcatgcc

SEQ ID NO: 295171 - DNA, 201 bp, Homo sapiens
accaccacacccagctttttttttttttttttttagagatgggatctcactatgttacccagattggtcttgaactcctgggcgcaagccatcctcccacytcagcctcccaaagtgctgggattacaggtatgaaccaccatgctcagcctgcttactcattcttaagtaatcagctctgttgtctctgcttttccactt

SEQ ID NO: 295172 - DNA, 201 bp, Homo sapiens; identical to SEQ ID NO: 60896

SEQ ID NO: 295173 - DNA, 201 bp, Homo sapiens
aaggtgaagaaaccgaagaaggtgtactgctatgtgtcaccaaaggttggaccttccattctcgacataaaatccccctgcttgaacctgtgtgtaattgktatttggtagcagaaaccacaaagtaacagtctgagaatcagggcaagattgttaactagttgtatagaaagccactttcaactgttaaaaatttcttgc

SEQ ID NO: 295174 - DNA, 201 bp, Homo sapiens
aacccaggaggtggagctttcagtgagccgagatcgcgccactgcactctagcttggacgacagagcaagactgtgtctcaaaaaaaaaaaaaaaaaaaaagtggagaggggcaaaaagagcccacgtgtgtcatgataagaagctaaccaaggtcagtttctccatagtaatttctagacctcataattggtttgaaaag

SEQ ID NO: 295175 - DNA, 201 bp, Homo sapiens
tgaaccccggaggcggaagttgcagtgatccgagatcgcaccactgcattccagcctgggcaacagagtaagactctgtctcaaaaaaaaaaaaaaaaaaatcaatgagtagtaaagaatgttaatatcatgtaccgtctataaaatcctatgacatttaagggagtaatagaatttattttttcaggtatatattgagtg

SEQ ID NO: 295176 - DNA, 201 bp, Homo sapiens
cattgtgtaggtctgtgacttctgggaccccagggagccagtctggccggcacttctttgtccagtcctgctgcctggtgcctcctgaggtttctgtttcscaatcagggtacgggttccattctccacctccctctccagggcaggaggcaccctccatccctcaatccaaataagctgggagagatgcctcagggagtt

SEQ ID NO: 295177 - DNA, 201 bp, Homo sapiens
tttccaggatgaagaaggtcagttttgaaattttatattcatctttttgaactctcctccccactcgcaccttctccacaaaaaaaaaaaaaaaaaaaaaagcaactcttacctcctactcactccctaaaaaaaaaaacctaggtttttttttccccaaggaaaagggaaccatgagtcaagaaaaaaagggtagtattt

SEQ ID NO: 295178 - DNA, 201 bp, Homo sapiens
gtcactctatttttctgagccttggcggtatgtcagagcaacaagcagctctagcagggtctacgtccttcctattgtctccaccccaacctcactcatcrtcccaaacatctgcttccaattcgggcccttgccttcttgtctgattcctgtacaaaccgcgggtggcacgggtgaggggcaggtctgcaggtgtggact

SEQ ID NO: 295179 - DNA, 201 bp, Homo sapiens
gggtctgtttcgtgtcgaagcccaaactccacatttctggtttgtctctagcagattagtttagactaagaaacagcccaggcactgggccactgtgctckctgactctgccttgttcacttggtgatgctgtgtgtgacagattaacactttataccttggcttacctatcagtcacttggggatttgggatttatggga

SEQ ID NO: 295180 - DNA, 201 bp, Homo sapiens
acattggtgcctgccaggagtccatttttttactcctcaaaatcataagaaaacagtgttgaatgaaactgatgtcgtttgaggacctgctgtaacttgtytaagatcattcagtagtaagattcatgctcttaaccactacatggtagtcatcctagtttagccccaggtggtctttctaaacaccttggttttttttgg

SEQ ID NO: 295181 - DNA, 201 bp, Homo sapiens
tttaaatgttagattccagccgggcgtggtggctcacgcctgtaatcccagcactttgggaggccaaggcgggcggatcaggaggtcaggagatcgagacyatcctggctaacacagtgaaaccccgtctccactaaaaatacaaaaaaaaattctctgggcatggtggcgggcacctatagtcccagctactcgggaggc

SEQ ID NO: 295182 - DNA, 201 bp, Homo sapiens
caagccatcctcccacctcagcttcctgagtagctgggagaagaggcatgagccactgtgcctgaccgttttaccttttaaatgactttagctattaactracttgggtttaaatttcagttatttttctttggtttctttttctttgaagggttctgaatgcttagccttcactaatgttctttcatatagtagttttca

SEQ ID NO: 295183 - DNA, 201 bp, Homo sapiens
cccaaaaagtgctgggattacaggcgtgagccaccacacctggcccttttgcccattatctaatgggattattattatttatttatttatttattattattttcttttttttgagatggagtctcgttctgacgcccaagctggagtgcaatggcacaatctcagctcactgcgacctccgcctcccatgttcaagcaatt

SEQ ID NO: 295184 - DNA, 201 bp, Homo sapiens
ctttgcagaagagaaatataataaatcaggtcaattggataaggtgagaaagaggacaaagcctctgggtcctatgttctccagtttcctgtagagcaggmctgtctaagagaactttctgcagtggtggaaatgttccatatttgtgttgtctattaaacacccaaaatgtgggtgacataataagtgaacttctcattt

SEQ ID NO: 295185 - DNA, 201 bp, Homo sapiens
ccccaaaaagtgctgggattacaggcgtgagccaccacacctggcccttttgcccattatctaatgggattattattatttatttatttatttattattattttcttttttttgagatggagtctcgttctgacgcccaagctggagtgcaatggcacaatctcagctcactgcgacctccgcctcccatgttcaagcaat

SEQ ID NO: 295186 - DNA, 201 bp, Homo sapiens
tctccttgtccttattctccaagtcttgctccccaagagcagcggattcgtttcttttctcagtgcatctccattttacatatgaggcaactgaagagaartttacagcaagtcctcacttgatgttgataggttcttggaaacttctccttcaaacaaaatgatgtatattgataaccagttttaccataggctaattga

SEQ ID NO: 295187 - DNA, 201 bp, Homo sapiens
gatacatcagtattgccagttaagagtagagaaagaatataaactctggaatcacattgcttgactccttcacttataaactagatggctataggcaagtyattttagctttctgtgcttctgtttcctaatctataaaatatggataaagtatgctttcctcatatggttgatgtgagagttaaatgagataatatagat

SEQ ID NO: 295188 - DNA, 201 bp, Homo sapiens
aggcactcagtgctagcccacgaaagcagctggggaggaggctgtaccctgcaaagccacagggatggagctgccccagaccatgggaacccacctcttgygtcagcgtgacctggatgtgagacatggagtcaaaggagatcattttggagctttgagatttgactgccctgctggattttggacttgcatgggccctgc

SEQ ID NO: 295189 - DNA, 201 bp, Homo sapiens
gcctggatttcagaggatgtatggaaactcctgaatgttcaggcagaagtctgctatggggtggggccctcatggagaacctctgctagggtaatgttggrgggaaatgtggggttgaagctcccacacagagtccccactggggcactgtctagtggagctgtgagaagagggccaccgtcctccagaccccagagtggt

SEQ ID NO: 295190 - DNA, 201 bp, Homo sapiens
agaacctctgcctggatttcagaggatgtatggaaactcctgaatgttcaggcagaagtctgctatggggtggggccctcatggagaacctctgctagggyaatgttggagggaaatgtggggttgaagctcccacacagagtccccactggggcactgtctagtggagctgtgagaagagggccaccgtcctccagaccc

SEQ ID NO: 295191 - DNA, 201 bp, Homo sapiens
gtatttgaacatgggtctgtttcgtgtcgaagcccaaactccacatttctggtttgtctctagcagattagtttagactaagaaacagcccaggcactggrccactgtgctcgctgactctgccttgttcacttggtgatgctgtgtgtgacagattaacactttataccttggcttacctatcagtcacttggggatttg

SEQ ID NO: 295192 - DNA, 201 bp, Homo sapiens
gcctcaagccatcctcccacctcagcttcctgagtagctgggagaagaggcatgagccactgtgcctgaccgttttaccttttaaatgactttagctattractaacttgggtttaaatttcagttatttttctttggtttctttttctttgaagggttctgaatgcttagccttcactaatgttctttcatatagtagtt

SEQ ID NO: 295193 - DNA, 201 bp, Homo sapiens
atgtatgtgtagtagtattaaaaatgactcagcactaaaatgtctcaaaaattgtggaataggctagtatttctaactcagaatactgagtctgcacaccrcctaacagctatcccaaagttattggtgagcttagttttttttgtttttgttttttagcttttatttggagtacaggagggtggatttagagatctgcag

SEQ ID NO: 295194 - DNA, 201 bp, Homo sapiens
gccccaaaaagtgctgggattacaggcgtgagccaccacacctggcccttttgcccattatctaatgggattattattatttatttatttatttattattattttcttttttttgagatggagtctcgttctgacgcccaagctggagtgcaatggcacaatctcagctcactgcgacctccgcctcccatgttcaagcaa

SEQ ID NO: 295195 - DNA, 201 bp, Homo sapiens
gatagagctttgaaacctctctccagccccagttttcgctgtcaggaccacagcgaggttctccagcaagtggcttgaaccctaagggctccttccctctrctctggcttcacatagaccttcaagcataataaaccagttccagataatgtggaatagtaaaagtattacaggatactaaaattccttttttcttttatt

SEQ ID NO: 295196 - DNA, 201 bp, Homo sapiens; identical to SEQ ID NO: 60904

SEQ ID NO: 295197 - DNA, 201 bp, Homo sapiens
ccccttggccccaaaaagtgctgggattacaggcgtgagccaccacacctggcccttttgcccattatctaatgggattattattatttatttatttatttattattattttcttttttttgagatggagtctcgttctgacgcccaagctggagtgcaatggcacaatctcagctcactgcgacctccgcctcccatgtt

SEQ ID NO: 295198 - DNA, 201 bp, Homo sapiens
cgccatacactcttctttgtcttactctgagatagctatgaggcagagttggagacaaaaactaaacaagttttcttttaacagctgcagctgtgatcctyggctgtctgttggcattgacgggacctgatgttttacgttattggtacgttatggaaagagctctctctattatatttttgtaaaggttgcttgggtcct

SEQ ID NO: 295199 - DNA, 201 bp, Homo sapiens
tgaacccaggagttcgaggctgcagtgagctatgcctgtgtcactgtgctctagcctgggtgacagagcgagacactgtctctctttctctttttttttgwaaaggtggggttttggcatgtttcccaggctgatcttgaactcctgggctcaagtgatccacccacctctaaaagtgctgggattagcatgagccaccgt

SEQ ID NO: 295200 - DNA, 201 bp, Homo sapiens; identical to SEQ ID NO: 60906

SEQ ID NO: 295201 - DNA, 201 bp, Homo sapiens; identical to SEQ ID NO: 60907

SEQ ID NO: 295202 - DNA, 201 bp, Homo sapiens
tgaattggtccctgagaaccttttggctatttttgatgagaatgagcttgaggtaagtgattgcaattcagactcccattcttaacttggcatttttgtakcttacaggaaccagcttggtgtaccttctcttatgagatgcagctggaaagccatttatgcaagaggtggtttcacttttgtcgctcctccattcattga

SEQ ID NO: 295203 - DNA, 201 bp, Homo sapiens
gacaaagaaaaggacagacatttgatcttattcatatttattgaagttactatatgcaattatgttggtttctttggagctttttttttttttttttttttggagacagggtcttgctctgttgtgcagttggagtgcagtgcagtggtgccatcagggctcactgcagccttaacctcctgggctcaagggatccttctg

SEQ ID NO: 295204 - DNA, 201 bp, Homo sapiens; identical to SEQ ID NO: 60893

SEQ ID NO: 295205 - DNA, 201 bp, Homo sapiens; identical to SEQ ID NO: 60895

SEQ ID NO: 295206 - DNA, 201 bp, Homo sapiens
ccctgatccctaagggctgtcatgctgactgccacaggagtagtaaattggagatggcgaagaaagagaaccaacagtcagtgactaccctcctaatcatrtgacagtgtaaattcttgaagtgcttgtcaaactgttcctaccctgtgtcctcatagaacggtaactggggcacagccccactttagtgtatcttgttcc

SEQ ID NO: 295207 - DNA, 201 bp, Homo sapiens
gatcctttaagctggttccagtagccagttgacccaggttttggctcttgtacttggcaagtctgttggcattatttatttatttatttatttatttattttgagactgggtctggctctgttgcccagggtggagtgcagtggcatgatctcggctcacgtcaacgtctgcctcctgggctcaagccaacccccacctca

SEQ ID NO: 295208 - DNA, 201 bp, Homo sapiens
ggatcctttaagctggttccagtagccagttgacccaggttttggctcttgtacttggcaagtctgttggcattatttatttatttatttatttatttattttgagactgggtctggctctgttgcccagggtggagtgcagtggcatgatctcggctcacgtcaacgtctgcctcctgggctcaagccaacccccacctc

SEQ ID NO: 295209 - DNA, 201 bp, Homo sapiens
aggtaacatcttgggtgtgcatttcctactaaggcccctggccattaaccctgaaatctctcctcctgggcttgtaaataatttttaaggttgaagggatwagtggttctaagcagttacacctttcagggcaagagtattcatgttctgttctgtgtctttctgcctcctcagtactttgaaacagatgacccagaattc

SEQ ID NO: 295210 - DNA, 201 bp, Homo sapiens
tggatcctttaagctggttccagtagccagttgacccaggttttggctcttgtacttggcaagtctgttggcattatttatttatttatttatttatttattttgagactgggtctggctctgttgcccagggtggagtgcagtggcatgatctcggctcacgtcaacgtctgcctcctgggctcaagccaacccccacct

SEQ ID NO: 295211 - DNA, 201 bp, Homo sapiens
ggtgccattgcactccagcctgggcaacaagagcgaaactccgtctcaaaaaaaaaaaaacaacagaagactgtaacttaaatagtgcatggtaatgtgcrgcattgaatttgaaagaaacaaagggaataaaacttaatgactatgagataaatggaatgcaggagttttaaaaagttcttgttaaaaaatttgacgaga

SEQ ID NO: 295212 - DNA, 201 bp, Homo sapiens
gtggatcctttaagctggttccagtagccagttgacccaggttttggctcttgtacttggcaagtctgttggcattatttatttatttatttatttatttattttgagactgggtctggctctgttgcccagggtggagtgcagtggcatgatctcggctcacgtcaacgtctgcctcctgggctcaagccaacccccacc

SEQ ID NO: 295213 - DNA, 201 bp, Homo sapiens
ggatggtagtagaggcagagttagcttttaagtatacgtgtgaccattccagttccacccgactgggctgcagatctggctgtgtgcctgccacttcaggygcagttaatggaataatagcttcctagacttattgagggagacggcttgtcaggttcaaagaattacttttaaaatcttcctgttatagccaagattcag

SEQ ID NO: 295214 - DNA, 201 bp, Homo sapiens
ctcaccctcctgggctcaaatgatcctcccacctcagcctcctgagtagctgggaccataggtgcataccaccacacccagctttttttttttttttttttagagatgggatctcactatgttacccagattggtcttgaactcctgggcgcaagccatcctcccacctcagcctcccaaagtgctgggattacaggtatg

SEQ ID NO: 295215 - DNA, 201 bp, Homo sapiens
ctattgcagggctctctcgcttgtgtgctgtctctctctctctctcttgctcttgctctctctctctctctcacacacacacacacacacacacacacacmcccctcactgtcacttagactgggacactttagacatgccagttaactttgaagtgcacatctttgggatgtgggaggaaatccaagtatccagagaaaa

SEQ ID NO: 295216 - DNA, 201 bp, Homo sapiens
gccactgtgcccggccattttttgtatttttagtagagatgggatttcaccattttagccagggtggtctcgatctcctgacctcgtaatccgcccacctyggcctcccaaagtgctgggattaccggtgtgatccactgtgcccggcctcttttttttttaaaatggagtttcgctcttgtcacccaggctggagtgcaa

SEQ ID NO: 295217 - DNA, 201 bp, Homo sapiens
tactcttcttgttcatctttctgtaagtggtccaggtcagagtactgttgtgtaatatttatttaatactatcaacatattagtaccatgtaatagatcarattttatgaccttaatggactctagtgtatcattttaccttttatttattatttattagatcttgctatgttgcccaggctgatcttgaactcctggcct

SEQ ID NO: 295218 - DNA, 201 bp, Homo sapiens
caggactacacagatggcttgtaatgaggctgtaatgatggatcttgctgttccccaggaggctctgagacctttcaggacaaggtgaactttttccagcragagcttcggcaggtacatatgaaaagaccacattccaaagtcaccctgaaggtcagcagacatgccttgttggaatcggtaggtaaaatttcatctctg

SEQ ID NO: 295219 - DNA, 201 bp, Homo sapiens
ggtacccccggtatatatggtaaacctattaggaacagaaaacagttaaaacttcccaagtgtgatctagtttttcatgtcttggtaaagaagaaatcccrggtgggctgtgcaaacagttcatagaaaggggttaaaaaagatatttaaaaagttttaggctggcattacctgaattggggcaatgattagggagacatg

SEQ ID NO: 295220 - DNA, 201 bp, Homo sapiens
tttttttctttttctttctttctttctttcttttttttttttttttttttttgcactttgtcttccattctccagctactgatcaagctgggaacggaatrggtacctctgtcatacttttcttattgcatgatgctatcctagagttggaagtaaaatatgttatcaggtttaaaaaagaaggtgaccattgtataaccc

SEQ ID NO: 295221 - DNA, 201 bp, Homo sapiens
cccagaggtagaggttgcggtgagctgagatcacgccattgcactccagcctgggcaacaagagtgaaactccgtcccaaaaaaaaaaaaaaaaaaaaaaraaaagtgctataagataaataaaaacaatgttctatggagattcacatgagggaaggaatttctaaatttaatattagggaagattttggagagagtgga

SEQ ID NO: 295222 - DNA, 201 bp, Homo sapiens; identical to SEQ ID NO: 60901

SEQ ID NO: 295223 - DNA, 201 bp, Homo sapiens
  misc_feature (1)...(201): n = A,T,C or G
tcagaataccattaatcctacaaaaaggggtgggatttctaaaggaccacagtttagatgagtcgcaacggagaaacaccagagtagtacaatagagggantgtggagagtataaaatgatgactcaataaacaaaagtggtaagaggagggagggcagagtcattttttattttcattatgcttttcagctctggactgg

SEQ ID NO: 295224 - DNA, 201 bp, Homo sapiens; identical to SEQ ID NO: 60902

SEQ ID NO: 295225 - DNA, 201 bp, Homo sapiens; identical to SEQ ID NO: 60905

SEQ ID NO: 295226 - DNA, 201 bp, Homo sapiens
ttggagaaaacaagcctaacttattgttgttggttggtacacaggatagagctgtggaggacttttactggccttgagggttttatagattaatttctttstttttctttaccagttttcataccttggtcctgaccctgtccataagctgctcacactggtggtggatgatggcattcaacctcctgtggagctcagctg

SEQ ID NO: 295227 - DNA, 201 bp, Homo sapiens
gaaaccccgtctccactaaaaatacaaaaaaaaattctctgggcatggtggcgggcacctatagtcccagctactcgggaggctgaggcaggagaatggcrtgagcccggaaggcagagcttgcagtgagccgagattgcgccactgcactccagcctgggcgaaagagcgagactccatctcaaaaaaaataaaaataaa

SEQ ID NO: 295228 - DNA, 201 bp, Homo sapiens
gtggtggctcacgcctgtaatcccagcactttgggaggccaaggcgggcggatcaggaggtcaggagatcgagactatcctggctaacacagtgaaacccmgtctccactaaaaatacaaaaaaaaattctctgggcatggtggcgggcacctatagtcccagctactcgggaggctgaggcaggagaatggcatgagccc

SEQ ID NO: 295229 - DNA, 201 bp, Homo sapiens
actaaaaatacaaaaattagctgggtgtagtggcgggtgcctgtagtcccagctactcagctgaggcaggagaatcgcttgaacccgataggcagaggttrcagtgagccgagatcgtgccactgcattccagcttgggtgacagagcgtgactctgtctcaaaaaaaaaaaaaaaaaaaaaaaggagagagacagggtct

SEQ ID NO: 295230 - DNA, 201 bp, Homo sapiens
aacgctgtctctactaaaaatacaaaaattagctgggtgtagtggcgggtgcctgtagtcccagctactcagctgaggcaggagaatcgcttgaacccgayaggcagaggttgcagtgagccgagatcgtgccactgcattccagcttgggtgacagagcgtgactctgtctcaaaaaaaaaaaaaaaaaaaaaaaggaga

SEQ ID NO: 295231 - DNA, 201 bp, Homo sapiens
ctgacctcaggtgatctgcccacctcggcctcccaaagttctgggattacagacgtgagccactgtgccaagccccaattttttttttttttttttgagayggagttagtttcgctcttgttacccaggctggagtgcaatggcgcaatctcggctcactgcaacctccacctcccaggtttaagcgattctcctgcctca

SEQ ID NO: 295232 - DNA, 201 bp, Homo sapiens
agagttggcattggaattcattcatttgggtttattgagcaattatagtcaatgccagacactgtttactgtggagtctaaagttgaataagacaaaaatmtgccttcaaggagtaggcattcataacataaaggggaacggtcaaggaggagaaaagttataccagatgaatgtgtaggagtttgaaggagcccagaaaa

SEQ ID NO: 295233 - DNA, 201 bp, Homo sapiens
gaatttgtgagaacaaggagcgaaaggtagcttttttctttgagtacctgctatgtattccagtggttcttaactttttggagataacttatttcttgaawgtttgtggaaagccaggaacaattctttaaaaaatgggcacacatacagtttgtaatacacttaatgagattggtggactctgaagcccatccgtggacc

SEQ ID NO: 295234 - DNA, 201 bp, Homo sapiens
ttctccacccaaaaagtggcctgataacgtcccttcttggaccgtcttctctcaccatggtcacgccaaactcctggttcttccgtaatcaccaacggcgyaatacttctacgtcattcacatactgcttccggcaaaggatagcccggaagcggaaactccttggggaaagggcaatcccccgagccggttcccaggccg

SEQ ID NO: 295235 - DNA, 201 bp, Homo sapiens
ctgcttccggcaaaggatagcccggaagcggaaactccttggggaaagggcaatcccccgagccggttcccaggccgggtggagaccaactctggggtctsttggtgggagagtggggagcccgtcttctgctgagtgctgccgccccttcccaggacagcggaggtggaacttcgtcgcgctgcaacccccggctcgggt

SEQ ID NO: 295236 - DNA, 201 bp, Homo sapiens
ctccgcctcccgggttcacgccattctcccgcctcagcctcccaagtagctgggactataggcgcccgccaccatacccgtctaattttttttttttttttgagacgaatctcactctgtcgcccaggctggagtgcagtggcgcgatctcggctcactgcaagctccgcctcctgggttcacacctttctcctgcctcag

SEQ ID NO: 295237 - DNA, 201 bp, Homo sapiens
aactcctgacctcaggtgatctgcccacctcggcctcccaaagttctgggattacagacgtgagccactgtgccaagccccaattttttttttttttttttgagacggagttagtttcgctcttgttacccaggctggagtgcaatggcgcaatctcggctcactgcaacctccacctcccaggtttaagcgattctcctg

SEQ ID NO: 295238 - DNA, 201 bp, Homo sapiens
tggtctttctgctgagctcatcttccagagggcccattagtttgtctgattggtaacagcataaatgacttcactttcagacccactgcttattattgggrtgacccagagttcattttaattacataatgccaacatgatgataatgatacttgctttaaaaaaaaaaaatctacattttatatagctatttctacttag

SEQ ID NO: 295239 - DNA, 201 bp, Homo sapiens
ttgttccactcttactttcaggagaaaatgaacaggatgcggcagcgcattgctcagcgtctgaaggaggcccagaatacatgtgcaatgctgacaacttwtaatgagattgacatgaggtagtgtctctagtccctcttatcccctaggcccctttttcttagagaacacgaacttgccccactccttatctagtgctga

SEQ ID NO: 295240 - DNA, 201 bp, Homo sapiens
aaaaacatactatgcttagaatttgcactgcatagtcattggctgctggacataaaggtgactggcttacctatcttgggatgcttgtgaggaggtgggcrtaagagagggctagctctcatttggtgtgtcctgagcccatggttcagaaagagttgttaatctgaaagaaaaaagacataagaaagaattcagaagagg

SEQ ID NO: 295241 - DNA, 201 bp, Homo sapiens
tacaggcagccagaactgaagggaaaactttccttgtaggcagcagatgcgttagagggcagagtatgtttttaaaaaataaaaggcagttgtgagaagayagttttcttggcaaactttgtttctgagtggggaagctttgcactgagggtaagtcctggtctttgaaatactgtaaatatgcagaggcaacatcaatag

SEQ ID NO: 295242 - DNA, 201 bp, Homo sapiens
gcttggcctctcatggacctggtgcttattttctttcctttttacttacctacgtcattgtagtgttgacctaacaagcactttgttttcctgttgacacrcttctctgttccttgggagattggagaggggtcagtgctacttttgccatcctcagcagtgtcaggggccctaaaggtctagaagtagaagccctagtcc

SEQ ID NO: 295243 - DNA, 201 bp, Homo sapiens
cctatcctatggaagccagtgtgttgagcccttcttagggctgccaaagaaatggatgctcctatgcccaggctcagtcagggacttgggagatactatayttgggatgggagtaagtggaatgccagctgccatgcataatgcagtggtgttcatggtggttggtcagcccacactgtatcaagctctgcagatttttac

SEQ ID NO: 295244 - DNA, 201 bp, Homo sapiens; identical to SEQ ID NO: 60910

SEQ ID NO: 295245 - DNA, 201 bp, Homo sapiens; identical to SEQ ID NO: 60911

SEQ ID NO: 295246 - DNA, 201 bp, Homo sapiens; identical to SEQ ID NO: 60912

SEQ ID NO: 295247 - DNA, 201 bp, Homo sapiens; identical to SEQ ID NO: 60913

SEQ ID NO: 295248 - DNA, 201 bp, Homo sapiens
tgttactcactggagatacgctgttgttgttgttgttttgagacgtttcgctctatcacccaggctggagtgcagtggcacgatatcggctccacctgccrggttcaagcgattctcgtgcctcagcctcccaagtagctgggattacatttttgtagtttttagtagagatggggtttcaccatgttggccaggctggtc

SEQ ID NO: 295249 - DNA, 201 bp, Homo sapiens
tcacctaattgtgtatatggattgagaaacctgtgtgaaagtcaaaatgcaggctttgtggtcagtttgttttgtaatgttttcacagtaacatccaggaratgagggctcggcacaaagaggcttttttgaagaaacataacctcaaactaggcttcatgtcggcatttgtgaaggcctcagcctttgccttgcaggaac

SEQ ID NO: 295250 - DNA, 201 bp, Homo sapiens; identical to SEQ ID NO: 60915

SEQ ID NO: 295251 - DNA, 201 bp, Homo sapiens
ccagtgtgttgagcccttcttagggctgccaaagaaatggatgctcctatgcccaggctcagtcagggacttgggagatactatacttgggatgggagtawgtggaatgccagctgccatgcataatgcagtggtgttcatggtggttggtcagcccacactgtatcaagctctgcagatttttactctgttaatgcacat

SEQ ID NO: 295252 - DNA, 201 bp, Homo sapiens; identical to SEQ ID NO: 60948

SEQ ID NO: 295253 - DNA, 201 bp, Homo sapiens; identical to SEQ ID NO: 60917

SEQ ID NO: 295254 - DNA, 201 bp, Homo sapiens; identical to SEQ ID NO: 60918

SEQ ID NO: 295255 - DNA, 201 bp, Homo sapiens; identical to SEQ ID NO: 60919

SEQ ID NO: 295256 - DNA, 201 bp, Homo sapiens; identical to SEQ ID NO: 60920

SEQ ID NO: 295257 - DNA, 201 bp, Homo sapiens; identical to SEQ ID NO: 60921

SEQ ID NO: 295258 - DNA, 201 bp, Homo sapiens; identical to SEQ ID NO: 60922

SEQ ID NO: 295259 - DNA, 201 bp, Homo sapiens; identical to SEQ ID NO: 60923

SEQ ID NO: 295260 - DNA, 201 bp, Homo sapiens
aggcagcagatgcgttagagggcagagtatgtttttaaaaaataaaaggcagttgtgagaagacagttttcttggcaaactttgtttctgagtggggaagstttgcactgagggtaagtcctggtctttgaaatactgtaaatatgcagaggcaacatcaataggaaaggctctggaattaggaactttcttatgggctgt

SEQ ID NO: 295261 - DNA, 201 bp, Homo sapiens; identical to SEQ ID NO: 60925

SEQ ID NO: 295262 - DNA, 201 bp, Homo sapiens
cgggttcctggatgacttgcagagcagcctctgcacttgcatgttacctgttagttcttgcctataggcatgtactttacaaggttacaaactatatgtaraacaatttgtattcttgtagtttttaaatatcttcattttttcttggttatacatagaccttatagttattttgacattataaaagtaaaaatacctaaa

SEQ ID NO: 295263 - DNA, 201 bp, Homo sapiens; identical to SEQ ID NO: 60927

SEQ ID NO: 295264 - DNA, 201 bp, Homo sapiens
ccttagcctcccaaagtggaggatacaggcgtgagctatggtgcctggctgattttttaaaatttgagtaaatgttgcactcagtactagaaatatgaatmccggtgttattttggagggcagtttgatagtcataagtctttgaagtgtgtgtaccttttctttttttctttttttcaagatggagtcttgctctgtcac

SEQ ID NO: 295265 - DNA, 201 bp, Homo sapiens
cccatggttcagaaagagttgttaatctgaaagaaaaaagacataagaaagaattcagaagaggcagctgtagttactagtcatcagttggggaaatgcasttaactatgataaggacagctggtgggcagaaagggtctctcaccttgttgagagtgaccagggtggaagacttcagaaaggcatgggaagtcaataaac

SEQ ID NO: 295266 - DNA, 201 bp, Homo sapiens; identical to SEQ ID NO: 60928

SEQ ID NO: 295267 - DNA, 201 bp, Homo sapiens; identical to SEQ ID NO: 60929

SEQ ID NO: 295268 - DNA, 201 bp, Homo sapiens
agctctgaaatagaagctacttaatgaccagacaataacatttgggcaggtttgagagcagagatgtttatcacatctctttccctcttctgcagctcttstgtcttgggaaccagtaatgtctttagggtggtaatcctagcactaaataaggttagaatcaggaaaacaagcattttaaacccaatcagtcccccttgg

SEQ ID NO: 295269 - DNA, 201 bp, Homo sapiens
tggacatttagggaccctgaggactagagaatagtgccttatgtcattgtgtgtgtgtctcatagtgctttgcatattgctgatacccagtagacattcgytacttgattggagctagagtttttgccactaaattttgcttggttgcttctcatttcagacagtgccagtggcatatacttttcttgtttttcagctgct

SEQ ID NO: 295270 - DNA, 201 bp, Homo sapiens
tatataatgttaaaatagaggatgaagagtatcagtaattagaaatatgtttatgtatgcatttcaatattttaaattgcctaggtgtttttttttttccytggaagtttacattttcttgggcttgataggtgctttgaaagtacttgctgaatttattcagtggaaacctgtgaaattgggaagggagctaagttgagc

SEQ ID NO: 295271 - DNA, 201 bp, Homo sapiens
acatattacctcattagtcttggccttcctggggagttgtatgtaacatgtattttctctctcatagtgattgacgacacaaccaaagaggtggtgtatasggattatattgacatcagtgttgcagtggccaccccacgggtatgttggggcaggaggtggggaatgttggtcttagaccctcaccttatctgtgtgaag

SEQ ID NO: 295272 - DNA, 201 bp, Homo sapiens
tattctaacaagaaataaaaagaatattgcttattttgtagattttgtttatactttaaaaaattttttttcaggatggatagctcagttattcagggcawggatgttggtgtgctgtgtgatctcttgttcatatgatgtgtcactgaaatctgtgacttctagaccatgaaggagccctgtaaagagatcaacccacct

SEQ ID NO: 295273 - DNA, 201 bp, Homo sapiens
gtattctaacaagaaataaaaagaatattgcttattttgtagattttgtttatactttaaaaaattttttttcaggatggatagctcagttattcagggcwaggatgttggtgtgctgtgtgatctcttgttcatatgatgtgtcactgaaatctgtgacttctagaccatgaaggagccctgtaaagagatcaacccacc

SEQ ID NO: 295274 - DNA, 201 bp, Homo sapiens
tgaacacttgttcagtggttttcctactatattatgctaccagtgaaagccttgggtaagttaaatatttgtaggggtggtagcttagtaactcacccccktcctcccacgatgtcacacgcttcagagaggtggtttagtgagctctattcctatacttctgggatacttagctgtagctaagggataatactcagtagc

SEQ ID NO: 295275 - DNA, 201 bp, Homo sapiens
agaggggtcagtgctacttttgccatcctcagcagtgtcaggggccctaaaggtctagaagtagaagccctagtccctcctgttgagtggtgctctagggwggtagaaggccatctttgttttgcccaaatgtatacctcttctttttcccattcttctcatgcctccctgactggctctcatctttttcagtggccccct

SEQ ID NO: 295276 - DNA, 201 bp, Homo sapiens
aatgcccatacacccaactacacatacaattccagaatttgtagaccctggcttaattttttttttttttttaaattctaaccccagagagaagcaagtasaggcagccagaactgaagggaaaactttccttgtaggcagcagatgcgttagagggcagagtatgtttttaaaaaataaaaggcagttgtgagaagacag

SEQ ID NO: 295277 - DNA, 201 bp, Homo sapiens
tgttctttctgactacacggggaatgcttgacccagagagatcagattgtcaatgcttgttccactcttactttcaggagaaaatgaacaggatgcggcarcgcattgctcagcgtctgaaggaggcccagaatacatgtgcaatgctgacaacttttaatgagattgacatgaggtagtgtctctagtccctcttatccc

SEQ ID NO: 295278 - DNA, 201 bp, Homo sapiens
agttggtgtaggctcctggctgacctttgatcttaggtcgatgggcctcactgggagcttcggcttggcctctcatggacctggtgcttattttctttccyttttacttacctacgtcattgtagtgttgacctaacaagcactttgttttcctgttgacacacttctctgttccttgggagattggagaggggtcagtgc

SEQ ID NO: 295279 - DNA, 201 bp, Homo sapiens
tgcccaggttggccttgaactcctggcctcaagcagtcctcctgcctcggcctcccaaagcgctgggattatggactgactttaggtgaaggaaactgggktggcttgatatttcaattatgaaatctgtttttaggcccgaaagaatgaacttgccattgaagatatggatggcggtaccttcaccattagcaatggagg

SEQ ID NO: 295280 - DNA, 201 bp, Homo sapiens
gagggctagctctcatttggtgtgtcctgagcccatggttcagaaagagttgttaatctgaaagaaaaaagacataagaaagaattcagaagaggcagctstagttactagtcatcagttggggaaatgcagttaactatgataaggacagctggtgggcagaaagggtctctcaccttgttgagagtgaccagggtggaa

SEQ ID NO: 295281 - DNA, 201 bp, Homo sapiens
ctctcaccttgttgagagtgaccagggtggaagacttcagaaaggcatgggaagtcaataaactgaaagatggggacatgattttctcagctctaggacamactggagaccccgagcctaaagtagccaagtctttgctactaggattcaggtgataagatttccaacccaatcttttcaaacccagaccaaacatcctcc

SEQ ID NO: 295282 - DNA, 201 bp, Homo sapiens; identical to SEQ ID NO: 60908

SEQ ID NO: 295283 - DNA, 201 bp, Homo sapiens
gttctgcccttaccgtcacctaaaatgctctcctcctgggcagagcagtatgtgaggaactcgggggtgcctgtgtttctcataatatttaaagacagttyggttcagagagtagtgagacgcaatgctacataatcacgagctatcgcttattcatttagctcgtagttgagtttctactgtgttaggcactgtgctaga

SEQ ID NO: 295284 - DNA, 201 bp, Homo sapiens
cctattttttaatagtattcttgcatatataatgttaaaatagaggatgaagagtatcagtaattagaaatatgtttatgtatgcatttcaatattttaawttgcctaggtgtttttttttttccttggaagtttacattttcttgggcttgataggtgctttgaaagtacttgctgaatttattcagtggaaacctgtga

SEQ ID NO: 295285 - DNA, 201 bp, Homo sapiens
tcatctagcaattccatctctaggaatctatactgaagaactcctggtatatttatctcagatttaatatctgataatataaatattatcagatttatctyaaaatggcaaagagcaagggattggctaaactatagcatgttcacatgttcacactatgaaaagtgggaaaaagcaggttacaaaataatttcattttct

SEQ ID NO: 295286 - DNA, 201 bp, Homo sapiens
taaataccaaggaaatcacagccattaaactaatcttagggcaagaactatgtcttaattagctttgtatcttggtacctggccctgaccctcacatgtastaaggtgttagtacctgtttggaagaataagtggatggaactgccaaccctggaaagatgaagaacggatatgactttccgtgggcctgaaagaacactg

SEQ ID NO: 295287 - DNA, 201 bp, Homo sapiens
ggcttttcagaaggcttgctgcttaatctgaagggaaccagcctaaaccacaagtggccacttttctaaataccaaggaaatcacagccattaaactaatsttagggcaagaactatgtcttaattagctttgtatcttggtacctggccctgaccctcacatgtagtaaggtgttagtacctgtttggaagaataagtgg

SEQ ID NO: 295288 - DNA, 201 bp, Homo sapiens
cccagcgtttgcagaatctgtcacagagggagatgtcaggtgggagaaaggtaagatttagtttcctattttttttttttttttttttgagacagagtctygctctgttcccagcctggagtgcagtggtatgatctcggctcactgcagcctctgcctcccaggttcaagtgattctcctgcctcagcctcccgaatagc

SEQ ID NO: 295289 - DNA, 201 bp, Homo sapiens
aaagatctgaagggggctgttaaaattgtaccacatcttacctttcatgctaatgtcgaattaggccattagagggagaaagggagaactgagcatttggscctgagataaagttaaattcaattttcatcgtagaactgcattactgcattccgataaatactgaggtttatgcagcaaagtgatgggaaagccatttct

SEQ ID NO: 295290 - DNA, 201 bp, Homo sapiens
gaaccacctcaggctgacaggcagtgcggagggccccaagagcgccttagggttgcctgctccagagagcgggactcctgcgctgcagccgggatactggrcgccgccgtgcgcccaccccctgccagtggttcgctccgaacacccctcgtcgggcggcgggtactgcggcccgccccacttccggttgttgtccggccc

SEQ ID NO: 295291 - DNA, 201 bp, Homo sapiens
aaactcagcagatgtttctttccttgtctgatgcagctttatcctcttttcattttcagtgtctgcagtaaaacccactgttgccccaccactagctgagscaggagctggcaaaggtctgcgttcagaacatcgggtaagcctctgaggaccactttcaggaaagaggcagggggcagtgttgagattagtggagtatgg

SEQ ID NO: 295292 - DNA, 201 bp, Homo sapiens
caaactcagcagatgtttctttccttgtctgatgcagctttatcctcttttcattttcagtgtctgcagtaaaacccactgttgccccaccactagctgasccaggagctggcaaaggtctgcgttcagaacatcgggtaagcctctgaggaccactttcaggaaagaggcagggggcagtgttgagattagtggagtatg

SEQ ID NO: 295293 - DNA, 201 bp, Homo sapiens
ccaccagggcactacacccagcccagccactcaccattcccgtcagcagttcatacagtagagacccaaagctccaccagtcacaggcttccgtcagctcrgaaatcccacccacctctgtgggaacaagaacacaggtgtcccagcctcacctaagagggcctcttccattctcctcagcctacccagacaccacccacc

SEQ ID NO: 295294 - DNA, 201 bp, Homo sapiens
gaccagtgatagacatgggaagaagcctgtctggcaggaaagatagagtgggctggacggtacaggatcgcgtaaagtgtggactttatcctgagagttaygagaacataaagcccctagcacaatgtcggcttgtagtggactctcaataacaaacatgtttttcaagtgggaaccctgaacaatgtcagtaaacatttt

SEQ ID NO: 295295 - DNA, 201 bp, Homo sapiens
ttatgttgagtccctagactaacctcaatgttcacttttcccatgtgatgttccttgagcatcagctccgtgtcaggttttggactgggagtgtgcccacyctccacaggtgtttggattataatgaaagttaagttggaatcctctttttatgggatatagaagggtgctcctagatattctgtttggatgtaagtgcag

SEQ ID NO: 295296 - DNA, 201 bp, Homo sapiens
gcacgatatcggctccacctgccaggttcaagcgattctcgtgcctcagcctcccaagtagctgggattacatttttgtagtttttagtagagatggggtwtcaccatgttggccaggctggtcttgaactcctgacctcaagtgatccgcctgccttggcatcccaatatgctgggactacaggcatgagccactgtgcc

SEQ ID NO: 295297 - DNA, 201 bp, Homo sapiens; identical to SEQ ID NO: 60930

SEQ ID NO: 295298 - DNA, 201 bp, Homo sapiens
atctgagtgagtagttttggcctgtgtttgcatgtttttgcttggaggagaaagggccaccacaggaaagggaagcctggagctcgtgtacttagatactrtagtccttggccatctactcgtggcaagccgtgttctttctgactacacggggaatgcttgacccagagagatcagattgtcaatgcttgttccactctt

SEQ ID NO: 295299 - DNA, 201 bp, Homo sapiens
tgcaatgctgacaacttttaatgagattgacatgaggtagtgtctctagtccctcttatcccctaggcccctttttcttagagaacacgaacttgccccastccttatctagtgctgattctaaaactaacttgtcagggaagaggtatttgtttattgttttttgtttgtttgtttttgtttttgttttttgagatggag

SEQ ID NO: 295300 - DNA, 201 bp, Homo sapiens
ggtgggtggatcacatgaggccaggagttcgagaccagcctggccaacgtggtgaaactctgcctctactaaaaatacaaaaattacccaggcatggtggygtatgcctgtaatcccagctactcggaaggctgaggcacaagaattgcttgaacccaggaggaggttgcagtggctgatatcgcgccactgcactccagc

SEQ ID NO: 295301 - DNA, 201 bp, Homo sapiens
gtccagagtgagggaaaagctctcacctaattgtgtatatggattgagaaacctgtgtgaaagtcaaaatgcaggctttgtggtcagtttgttttgtaatrttttcacagtaacatccaggagatgagggctcggcacaaagaggcttttttgaagaaacataacctcaaactaggcttcatgtcggcatttgtgaaggcc

SEQ ID NO: 295302 - DNA, 201 bp, Homo sapiens
ggtaactgaaatctcatcagatgagacctgctagaaaagatcatctttgaagtcttcaactgtatgaaattgtgccttttctctggtggagcactggtcayagacaccttagccgaacaactgtcacacggaagctagcgcttgtgccatcgatctcgatacaagctttctggacttcctttgcttttttgtttttagagg

SEQ ID NO: 295303 - DNA, 201 bp, Homo sapiens
ttgtattttttgtagagatggggttgttttgccatgatacctgggctggtgtcaaactcctgggctcaagcaatccatccacttgccttagcctcccaaartggaggatacaggcgtgagctatggtgcctggctgattttttaaaatttgagtaaatgttgcactcagtactagaaatatgaatcccggtgttattttgg

SEQ ID NO: 295304 - DNA, 201 bp, Homo sapiens
gttggccttgaactcctggcctcaagcagtcctcctgcctcggcctcccaaagcgctgggattatggactgactttaggtgaaggaaactgggttggcttratatttcaattatgaaatctgtttttaggcccgaaagaatgaacttgccattgaagatatggatggcggtaccttcaccattagcaatggaggcgttttt

SEQ ID NO: 295305 - DNA, 201 bp, Homo sapiens
ccatacccactcagatgccaccggtgccctcgccctcacagcctccttctggcaaacctggtaggcttccaactcccacatgtcatgtgggagaacatctygtctaatatgttccttcaaagggtaaactctagactgatgatggttctgaacaggccaggttggctgctttgtagaaagaattctagactttgtatccaa

SEQ ID NO: 295306 - DNA, 201 bp, Homo sapiens
actcaggaaaactggtggtaaagaagttctcctggtggtcaaggtctccagtgttccctcttgggattgggactgagcataatgtgctaattccccgataygtcaaagactcttgtcattccagctgcccttagttgagggaataaggggtaaatttatatatagtgtgaacttcaaatgtcaaattctaaaagaaaagtg

SEQ ID NO: 295307 - DNA, 201 bp, Homo sapiens
agtggcatatacttttcttgtttttcagctgctcctgctaaggccaagccggctgaagctcctgctgctgcagccccaaaagcagaacctacagcagcggsagttcctccccctgcagcacccatacccactcagatgccaccggtgccctcgccctcacagcctccttctggcaaacctggtaggcttccaactcccaca

SEQ ID NO: 295308 - DNA, 201 bp, Homo sapiens; identical to SEQ ID NO: 60933

SEQ ID NO: 295309 - DNA, 201 bp, Homo sapiens
ttcacactcaggaaaactggtggtaaagaagttctcctggtggtcaaggtctccagtgttccctcttgggattgggactgagcataatgtgctaattcccygatatgtcaaagactcttgtcattccagctgcccttagttgagggaataaggggtaaatttatatatagtgtgaacttcaaatgtcaaattctaaaagaa

SEQ ID NO: 295310 - DNA, 201 bp, Homo sapiens; identical to SEQ ID NO: 60934

SEQ ID NO: 295311 - DNA, 201 bp, Homo sapiens
gggaggatgaggattgcttgagtccaggaggcagaggttgcagtgagccgagattgcaccactgtactccagcctgggcgatagagtgagaccccattacaaaaaaaaaaaaaaaagggtgggcgcagtggctcacgcctgtaatcccagcactttgggaggccgaggtgggtggatcacaaggtcaggagattgagacct

SEQ ID NO: 295312 - DNA, 201 bp, Homo sapiens; identical to SEQ ID NO: 60935

SEQ ID NO: 295313 - DNA, 201 bp, Homo sapiens
cttatatattgtgttgcaactcttgttactcactggagatacgctgttgttgttgttgttttgagacgtttcgctctatcacccaggctggagtgcagtgkcacgatatcggctccacctgccaggttcaagcgattctcgtgcctcagcctcccaagtagctgggattacatttttgtagtttttagtagagatggggtt

SEQ ID NO: 295314 - DNA, 201 bp, Homo sapiens
tttaatgagattgacatgaggtagtgtctctagtccctcttatcccctaggcccctttttcttagagaacacgaacttgccccactccttatctagtgctrattctaaaactaacttgtcagggaagaggtatttgtttattgttttttgtttgtttgtttttgtttttgttttttgagatggagtctcgctgtctcccag

SEQ ID NO: 295315 - DNA, 201 bp, Homo sapiens
ctcaaactcctgacctcaggtgatctgcccacctcagcctgccacaaagtgttgggattacaggcctgagccactgcgtgagccactgcgcctggctcctstcacttcttaagtttaagtgctatctaaaattctcccctcccctcaggatagttgtagaatttatagctctgccgttttctttacatatgtactttctgc

SEQ ID NO: 295316 - DNA, 201 bp, Homo sapiens
ccgggttcctggatgacttgcagagcagcctctgcacttgcatgttacctgttagttcttgcctataggcatgtactttacaaggttacaaactatatgtrgaacaatttgtattcttgtagtttttaaatatcttcattttttcttggttatacatagaccttatagttattttgacattataaaagtaaaaatacctaa

SEQ ID NO: 295317 - DNA, 201 bp, Homo sapiens
taggcagcagatgcgttagagggcagagtatgtttttaaaaaataaaaggcagttgtgagaagacagttttcttggcaaactttgtttctgagtggggaasctttgcactgagggtaagtcctggtctttgaaatactgtaaatatgcagaggcaacatcaataggaaaggctctggaattaggaactttcttatgggctg

SEQ ID NO: 295318 - DNA, 201 bp, Homo sapiens; identical to SEQ ID NO: 60938

SEQ ID NO: 295319 - DNA, 201 bp, Homo sapiens
ctgctgctgcagccccaaaagcagaacctacagcagcggcagttcctccccctgcagcacccatacccactcagatgccaccggtgccctcgccctcacarcctccttctggcaaacctggtaggcttccaactcccacatgtcatgtgggagaacatctcgtctaatatgttccttcaaagggtaaactctagactgatg

SEQ ID NO: 295320 - DNA, 201 bp, Homo sapiens
aagctttctgggaactcctgtgtttagaatccttttgggttactgactcctgtgtgaaaccacagtctgtagatcttcctggaaaatgcccatacacccarctacacatacaattccagaatttgtagaccctggcttaattttttttttttttttaaattctaaccccagagagaagcaagtacaggcagccagaactga

SEQ ID NO: 295321 - DNA, 201 bp, Homo sapiens
atgagagctaagtattttatatatctggtggagtttaccatgctctggtaactgaaatctcatcagatgagacctgctagaaaagatcatctttgaagtcktcaactgtatgaaattgtgccttttctctggtggagcactggtcatagacaccttagccgaacaactgtcacacggaagctagcgcttgtgccatcgatc

SEQ ID NO: 295322 - DNA, 201 bp, Homo sapiens
actgactttaggtgaaggaaactgggttggcttgatatttcaattatgaaatctgtttttaggcccgaaagaatgaacttgccattgaagatatggatggyggtaccttcaccattagcaatggaggcgtttttggctcgctctttggaacacccattatcaacccccctcagtctgccatcctggggatgcatggcatct

SEQ ID NO: 295323 - DNA, 201 bp, Homo sapiens
aattcaagtgttgagtttttattagaattatctattaattaaaatctggatttttatttactttagaatcagactttaaaacgatatacctctaaatatargttcaaacaaggttgttgcttactgaaagatcagttccagtttaaatctcttatttgcattattttcaaacagaataagacctggaagtttgttgaaggt

SEQ ID NO: 295324 - DNA, 201 bp, Homo sapiens; identical to SEQ ID NO: 60978

SEQ ID NO: 295325 - DNA, 201 bp, Homo sapiens
ttaaatctaccaagacatttcttttttttttttttttttttttgagacagtctcgctgcatcgcccatgctggagtgcagtggtgcgatcttggctcaccrcaacctccgcctcccaggttcaagcgattctcctgcctcagcctcccaagtagctgggattacagacatgtgccaccaagcccggctaactttgtatttt

SEQ ID NO: 295326 - DNA, 201 bp, Homo sapiens
gcctacttcacatatgatatggaagcgtggaatgaaataatatccatgaaagttaccttgtcaccagtacctggtgctgatgatagttccttacacagtamtgatgttatgaacatagtaagaaagggtcacctggtttaattttattagttcatgtgtcagttgtgtaaactaatcatcatgagtatgtgaaacattgtt

SEQ ID NO: 295327 - DNA, 201 bp, Homo sapiens
acctcaggtgatccgcctgcctcagcctcccaaagtgctgagattacaggcatgagccaccatccctggcctgacacttcttttttgaaatttttttttttctttgacttctatgagtgagtaccaaattgctgagtgctgctaactttcagagcttagtgtcagaagcttgaaagaagccttcgaggctatccatccttg

SEQ ID NO: 295328 - DNA, 201 bp, Homo sapiens
aaaaaaattgtgtagtatgtagttggctatgatcaaattcatttctctacaccagttgacactttttgttttttttgtttgttgttttttgttttttttttgagaaggagtttcgctcttgttgcccaggctggaatacaatggcacgatctccactcactcaacctctgcctcccgggttcaagtgattcacctgcctca

SEQ ID NO: 295329 - DNA, 201 bp, Homo sapiens
gttgttaccactgttaagctgttgtaggaaattgccaagcaataaatttacattttttacaagtcaatataactcttgtgttctcttgaaatttcagaagytttttatctttatttaagggcatttgtcaaaacaggtcccaattggaaataaaaaccatttgtctcagtaatgtatttgttttcaatttaactagattgc

SEQ ID NO: 295330 - DNA, 201 bp, Homo sapiens
cctagctgtggttaaataattgtatactataaaaaagcataagatcttgtgagttccaaagtgccttgggtatcaagagccaacattctatttcagagatktgaaacttaatgatcctttaatatctttgctggatgttgttagaatggtatttcaaacattttctacaatttgaattaaatattaccttactaaataacg

SEQ ID NO: 295331 - DNA, 201 bp, Homo sapiens
tcaccaatggattccctggcctaaaatagtaccaagtacatgataggaacttaatgatgttttgtttaatgaatgaattaaatgagaaaacagttcatcartggatttataaggtaatatcattagtactaatgacaattttgttagctatagttggaactattgtggtcactaagtttccagttttctcaatacataata

SEQ ID NO: 295332 - DNA, 201 bp, Homo sapiens
gtgtgtacacacacacacatacacatatataaaacctctttccttcagtttcctgatatataaaatgaggacagtcatatcttggtaatttgagtcctatscaactctaaaatttcatatttagggttatttgaaaattaatttctatatggtatataataaaaattttacctaaatataaagtgcctaaatacctgatta

SEQ ID NO: 295333 - DNA, 201 bp, Homo sapiens
gtctctgtaatatggttgtaacttttctataaatctgatattatttcaaaattttttattaccattttataaaagatttttataacttaaaatgcattttsctatgctatattgtatttggtgtttcccaagcctcccctgtacaaaggctacctgttagacattttcagtcaaattttaacatagattagttagtaacta

SEQ ID NO: 295334 - DNA, 201 bp, Homo sapiens
tgccagcactgcactacttagagacaatgaagtatcttgtctacagcttgtcaaaagaggtaccaaaaaaaaaaaaaaaaaagatatatgggagtcagtcyctgtaatatggttgtaacttttctataaatctgatattatttcaaaattttttattaccattttataaaagatttttataacttaaaatgcattttccta

SEQ ID NO: 295335 - DNA, 201 bp, Homo sapiens
ctgcagctaagccatcaaattcagattttaatttttaattttatatttaattttcattttatgtctttttaatattctatgtgtatctgtaaaatttcctmctttcactacttaggagctaaagtctgttgctaattttctttactcttagagccatagataagtatgccaaggagccagtgaccagggaattaacaatag

SEQ ID NO: 295336 - DNA, 201 bp, Homo sapiens
gtgtggtaattagtgtgaataacaagtgtcacttcaaaagtcatcattataccttgcatcatatatgattataaaagataaaagctatggagttttgacakttaagtaattattgaaacaggaaaagcaaaataaatctattgacatttctaatgttatgattgttaaattaatatattatctttctcaggctcctgaaat

SEQ ID NO: 295337 - DNA, 201 bp, Homo sapiens; identical to SEQ ID NO: 60981

SEQ ID NO: 295338 - DNA, 201 bp, Homo sapiens
aatagaaatccacaggtgccagtaaaagattagaagattgttcagactgctaaattgcaggctatttggaggtaaagtactccttgcacagtaattccacytcttcaaagcgtccttgttcgtgagaaatatttgccagcactgcactacttagagacaatgaagtatcttgtctacagcttgtcaaaagaggtaccaaaa

SEQ ID NO: 295339 - DNA, 201 bp, Homo sapiens
tcaatctttatagctgagaagttagcacagagcctgcatctgcaggaaagtcattggtgccctgctaagagcaaagacgttccttttttggaccttggcasactgcccagatatctgagcaaagaatagtaacctatgttcacactataacattgtgaaagtcagcaggactctcccaccctcctgcttttcaactgcaat

SEQ ID NO: 295340 - DNA, 201 bp, Homo sapiens
taagaaaaatatattttaaatcttgtggttgttcaactttaaaacatttttctctcacttttaaaataactgaatctgagtttgtgcttttttcttgtttktgtttagtaggaacctattacttttattaaattaaaagtaaattattattcatttgttagggagtctttaaatgtattctcttaaaggaccagaggctgg

SEQ ID NO: 295341 - DNA, 201 bp, Homo sapiens
tttgttactcctgggaccttggctaggcattgtttcagcatgtcaatctggcatagtgagagcttttagggagtcattgaagaagcactttcttcctctaraagaagttgtttatccagtgagaaaaataacaaacccaaagataagtttttcttacaggactggttgctagatatttttgtcttggaattcagaggcctt

SEQ ID NO: 295342 - DNA, 201 bp, Homo sapiens
  misc_feature (1)...(201): n = A,T,C or G
gaaaacagaatgttatcacttaatctagaaaattgttcctttactaaaatagacatttttctcagctttaaaactatatgtatttcagcttcaggtcattnaaagtttttatgattgaaattaatctggaaaggaagattcagctcttcccactagacactatgttattatgcctctagtattagagacctacaaatagta

SEQ ID NO: 295343 - DNA, 201 bp, Homo sapiens
  misc_feature (1)...(201): n = A,T,C or G
agtatatttctaaatgaagcaatggttttcagtgttgttgttctttattataactgtgctaaagtcagtcatttttgaagttttttttttttagattcaangggtttaaaattcaagtgttgagtttttattagaattatctattaattaaaatctggatttttatttactttagaatcagactttaaaacgatatacctc

SEQ ID NO: 295344 - DNA, 201 bp, Homo sapiens
gtatttgatttcttacaaaatacaggttttaggtttttgttaaaggctctcaattagaaattatttcataagaggatttttttattttgaactaccactgyttattaactacttatgtataccaaggataaataagggtaagaaatgagcaacaatcaatgtcaggtaaaggactatccttttttccccaatgtgtgtgtg

SEQ ID NO: 295345 - DNA, 201 bp, Homo sapiens
taaaaatctgtatttagttgtacacaaattgttaaacagtgaaggaatatgtaatcccagtaaatgtaataggcacattgctataaatggaagctactaasgtatttatatgtacgcctccaggcactgaaaacactttgcaaatgagaactcttccatatattgtactcagttgacttggtgcaaccagcaggtgtcagt

SEQ ID NO: 295346 - DNA, 201 bp, Homo sapiens
tagccttgacctttctgagctgttttgtcatcttttacatgacattactattatacacagggttgtgagggttaaaggagattgcacatggaaaacacctrgcacaatgcctgatacatagtaggggtgaatttttttcttctatgccacagcttcctcatctgtaaaatgaggattaggtttccctggcctacttcacat

SEQ ID NO: 295347 - DNA, 201 bp, Homo sapiens
tttccttaaaatatcaaagtgtattccttttcttacatggtaaatactcaaatgctttatttatgtgtgctaaagctacagactctggcacaactagtttyttctcccattctttttgggacacagaggaaggaagaattgcccacaatgtcaccaaaacagatcagcttcttaaaatatttttccacattcccttctggt

SEQ ID NO: 295348 - DNA, 201 bp, Homo sapiens
cctcccacgtttaccctcatgggaggatgcagtctcagtcacgcgcgtgggggtgatgtcgctaaggggtgattctcccctccctagagttacacacgctmtctctcccgccaattgccgggctccatcaggcaggtcctttcctcctgagcccaaaccatccgtttgttgtcgtcctccaatcacaggggctcatcctca

SEQ ID NO: 295349 - DNA, 201 bp, Homo sapiens
ataatgctatacttaaattacttgtgaaaaacaacacattttaaagattacgtgcttcttggtacaggtttgtgaatgacagtttatcgtcatgctgttastgtgcattctaaataaatatatattcaaatgaaagtgactcagactctgtttctagctaatatttagtgtctattcaggaagcaaacttgcggacaggcg

SEQ ID NO: 295350 - DNA, 201 bp, Homo sapiens
aatatattttaaatcttgtggttgttcaactttaaaacatttttctctcacttttaaaataactgaatctgagtttgtgcttttttcttgtttgtgtttartaggaacctattacttttattaaattaaaagtaaattattattcatttgttagggagtctttaaatgtattctcttaaaggaccagaggctggacttcct

SEQ ID NO: 295351 - DNA, 201 bp, Homo sapiens
ctggatatttttaaggtacagtagtacttaaagatgttaatgggtctttttcattacagtctgaaccaatcagagtccttgtgactggagcagctggtcarattgcatattcactgctgtacagtattggaaatggatctgtctttggtaaagatcaggtaggaacaggtgtctataaatcttaagttattagagtaagaa

SEQ ID NO: 295352 - DNA, 201 bp, Homo sapiens
tcagtttcttaagatgccaaccttggggatattcgagttaaaactagaagtatatttagtataccttttggctgaaggccaaatggcctagtgttaaaatyaatatgaggctgagaatctatatcaccatcatagaataagtttttgggataacaaagaaattgcagttgttacagttctatttagaaatttagtaaccaa

SEQ ID NO: 295353 - DNA, 201 bp, Homo sapiens
gtaataagctttagacagaaagtgtcctggcttcctggaatcaaatgactagtacctttgtgcacacccctgtgtcttttgaggggtggtggtggtagggrctgggtatgtcaggaaacatcagtgaaagacctcccctggaggcttccaacagtaacgttatcttgaccacttgaaatatttctcccgtcttcatacgct

SEQ ID NO: 295354 - DNA, 201 bp, Homo sapiens
atcatagagaccactgcaataacacaggtcatgagagtgacaggacttggtcattgatcacatatgagcaggcttctgtcttagcagccgagtatgttatwttgccatagagacaggagtaattgaagctgactgcgtagaagaggaggtctacttagaatgagattttcaaggagcaggcagaaagaggaggaaaacaga

SEQ ID NO: 295355 - DNA, 201 bp, Homo sapiens
ttacaggcatgcaccaactacgcccagcctgtattagcttttaggatgtgaaaaagtcttgctccctccatgtcctaatggtgtaagaatttcatttaackatattttaaatgtgtaacttgtatctgtctttatgtttttattaaatattaagcattctgctggttgtaacaatgacttctattttcacagcacaccaaa

SEQ ID NO: 295356 - DNA, 201 bp, Homo sapiens
aaaggaatgttatcactgtaagaatattcatttacattattgtagtactcaggtactcttcagtgtcattccagcctcacgtaagaaataggagggaaacsggggtataaaagtattaaagctcaccaaagatacaatagctttttccaaatcatgtaattttttaaaaaatctcctaactagatttcatatactcctccc

SEQ ID NO: 295357 - DNA, 201 bp, Homo sapiens
ttgtactgaatataacctattaaaggaatgttatcactgtaagaatattcatttacattattgtagtactcaggtactcttcagtgtcattccagcctcaygtaagaaataggagggaaacgggggtataaaagtattaaagctcaccaaagatacaatagctttttccaaatcatgtaattttttaaaaaatctcctaac

SEQ ID NO: 295358 - DNA, 201 bp, Homo sapiens
taaggaatacttgttagtcttagtgccaccttaattactagtgtaattattttactgaaatgagaatctttaaaataggatcactattagcattagcttaytaaagatgattgagtaaaagcagaaaaaaaatgacaatttgtactgaatataacctattaaaggaatgttatcactgtaagaatattcatttacattatt

SEQ ID NO: 295359 - DNA, 201 bp, Homo sapiens
taggccatctgggcgtatacgtgcaagtcacaggggatgcaatggcttggcttgggctcagaggcctgacataggcattatgagttctcagaaagttagcmatattaattactgaaaagttaacataaacagatatttgaaagtcaacctggattatctgtgaaaatgaagaagagtgtgttaactttctgtaatgccatt

SEQ ID NO: 295360 - DNA, 201 bp, Homo sapiens
catgttcaagtgagttttgtgccttagcctcccaagtagctaggattacaggcgcctgccaccaagcccagctaatttttgtattttagtagagaaggggrtttaatcacgttggccaggctgctctcaaactcctgacctcagatgatccaccagctttggcctcccaaagtgctggaattacagctgtgagccattgca

SEQ ID NO: 295361 - DNA, 201 bp, Homo sapiens
ctgaggccccgaccggtcggccagccagagcgtggaattggtagcgcctcctagtcccaggatgtttatggctggtgaaaatggttgcactgcccccgctkgccggcctcgcccgcctccccgacccctgcttgggcgggagccgctgttaaccggggttttcgggggaggcgtttggggcctggacggcggcgcggggag

SEQ ID NO: 295362 - DNA, 201 bp, Homo sapiens
ctctttcccataggtttcctttctcaggtcttagagattattatagagatcaattttcctttcaaaatgtaatttttaaaagtgaacataggtcttttttwaaaaaaaatgcaaataatattttatattcctaagtaaaaagaaattactgtggaagaacagccatttagagtaacatttctcatgtcagccttatatcaa

SEQ ID NO: 295363 - DNA, 201 bp, Homo sapiens
tgctaattaatccttgttctcttttcctggtctgtgtcaaggtacctgtgcgtgcacgcagacgggaagggctggggaagcgggaggactgagaaaagccrggtgggttttgccgggactgttggggaagctttagtgttctccgcttctacttcgtttgtgtgtacgtggtttgcgtctcagattcacttattgcgaaac

SEQ ID NO: 295364 - DNA, 201 bp, Homo sapiens
ctgcatgccttttccagagagtcacttctgatagaaccatgctactttgacaattgtcatagaagttttccagaactgggaggcatttacttttttacttrtaaatcaataggttagtattttcatttttatatttcaatttatacttaatgttttgaagctagctgtgttttatttctttttgttcttttagtgaagatt

SEQ ID NO: 295365 - DNA, 201 bp, Homo sapiens
aaacttaataaatagtgaagagagtaatgttgtctagccagctaaggctataatggatgctaatgctctaatattagaggcattgtttttttaaaaaaaaatgattctaaatgtgccattatctatctaaattatgtaaaaatgtccctgatgttcttaaattgaggtacatacttacatttcagggaaagtcatttaagt

SEQ ID NO: 295366 - DNA, 201 bp, Homo sapiens
agaactaaaagaaaaaaggcaggtatgaaagttctttattttcctattccaggtttcatgttcaggcctaggtgttattatgttaaaaaaaaaaaaaaaaagtgccggggtggggcaaggtaacgtttggacaatatgaatttggttgtagtttttataacctctcaacttgagtacaagttggtgacggttttcttctga

SEQ ID NO: 295367 - DNA, 201 bp, Homo sapiens
actcatccatcactggaaaaattgccttcgtgttttcctttccatagtgttagtaacatttattttagagtaattaaaattaattttttttttttttttttgagacagagtctcgctctgtcacccaggctggagtgcagtggcgcaatctcggctcactgcaagctccacctcctaggtttacaccattctcctgcctca

SEQ ID NO: 295368 - DNA, 201 bp, Homo sapiens
ctgcagtacagccctggagggcgtggggacttgggggcggtgaaatagccgctgtaggtccgcctctttcattgaagaaatttaagttcgtgtggttttaycttttccgggagtctccagctggccctcatttgtgtccggagctcaggagttcccaaaccgactcagtcgcaccaagtttccgtcttttggaattgggga

SEQ ID NO: 295369 - DNA, 201 bp, Homo sapiens
aggagatatttcactaacaggcttctacctagagagaatgaataactggtgttctccattctcagaatgcttgggtctattttttttttttttttttttttaaagagacagggtctcactctgttgcccaggctgaagtgcagtggtgtgaccatagctcattgttaccttgaacttgtgaactcaagggatcctcttgcc

SEQ ID NO: 295370 - DNA, 201 bp, Homo sapiens
ttctgaatgttctgttttccataagtagtgttttctttttcctttgagattttaagagctactctattgtataagagtagggttaattttaattgttaatsagaagactggtttatatataaattgtagcagtttttttttaagtaaagcaatgcatgattagcaaaaatcttttttagcgagctgctctgcatatttgtt

SEQ ID NO: 295371 - DNA, 201 bp, Homo sapiens
aatgttgatgattcctaaatcgttctctcaccctatttgtcactgataattgcataacacttttgtctttaatatttcttcaatcaggtatgtttttagcrttgttgaattgatcattgtattttgctttcacacttaaaaaaggctctgattatgtctccatgactaagtacaggaaagaaaagcagcacatttaatttc

SEQ ID NO: 295372 - DNA, 201 bp, Homo sapiens
ctgtcctcctgcgttagcctcctgagtagatgggacttaggcatatgccatagcctatagttgtcatacatttttactttaaatggtagttttccttttamgatgggcagttttgcacaagaatatgacacctcctcaaaattttttgacatgaatgtgctcctgtttatcattgtttaaattttgtacagtgtgagccct

SEQ ID NO: 295373 - DNA, 201 bp, Homo sapiens
tccaatcactggcacttagtagttcatgctccttcataggggaaagagttaacaaatgttaggtttctaactttttttttcatgggttttctcaagctttrtaagagtcctgagatgtagattttttatcctgcccttacaggtgaggaaaattaagtatcttgtccaaagttcacagcttgtataaagcactgattgatt

SEQ ID NO: 295374 - DNA, 201 bp, Homo sapiens
cattaaagaaaagttgattaaaactttccacagagaaaccgaaactttatggaagcatggaaataaccctgggattgatatgctttaacgtcccttaaagytgtttaaattactcctataatgttatttttctttcagattcaaccctatgaaaagataaaggccaggggcttgcctgataatatatcttccgtgttgaac

SEQ ID NO: 295375 - DNA, 201 bp, Homo sapiens
acaaatgttaggtttctaactttttttttcatgggttttctcaagctttgtaagagtcctgagatgtagattttttatcctgcccttacaggtgaggaaarttaagtatcttgtccaaagttcacagcttgtataaagcactgattgattgatagattgattttgaggcagggtctcactttgttgccaggctggagtgca

SEQ ID NO: 295376 - DNA, 201 bp, Homo sapiens
gaaagaatacatcggttgttaaagcaggagaggaagagagacctgccctgtagcgtgactcctctagaaaaaaaaaaaaaaagccggagtattttactaascccctaaaatgtcgagatttgtacaaggtaagaaatgctgctgcttatatcccgagttgcttcaggcaaatttgggtactgacagtggagaggttggtgg

SEQ ID NO: 295377 - DNA, 201 bp, Homo sapiens
ctactgccaggattgttacagaaggacacattacaattttccttaactgttatttgtttttcatgtttaatattgtttataaaaaaagttacttcactgtaaaaaaaaaaaagttgtacataaacttgatcactgtaagataatcaaattgcatttcagttgcaagtacactcttttgttttccctgtcacttagggaacg

SEQ ID NO: 295378 - DNA, 201 bp, Homo sapiens
acacacgtaagcagtggaaagtcttggctgaaattgggaaccagaagatggcaggcagccctatgcccttctccttttaaaatgaaaacgtcgatacaggraagtagaggcaccttggaattgccaatacctctcaaggggttcttgtttagtggagaatatgaaactggagtgaaacgagtcctaactagttgacaccac

SEQ ID NO: 295379 - DNA, 201 bp, Homo sapiens
aagggtggacaaataatccagttgtccctattttatgagaagtaaataagatgattactttctagataaagtataaaacagcctgtgttggtatttttctsccaaagtgtttgggtctggggtgtttctttttctgttttttttttttttttttttctcttttcttttctttttgagacaggatctgcctctgtcacccag

SEQ ID NO: 295380 - DNA, 201 bp, Homo sapiens
agtctgttgcggtgctagctcccgttttcctcttgccccatcaccagctttacctttcttactagtggtgggaagcagacatcttggaatgctaacctggkgcttattttctgggaaagaaagagatccacccctgaatatatccatttgtaagaatgggcagtatttcccagataggttttcagggaaaagaacaatctc

SEQ ID NO: 295381 - DNA, 201 bp, Homo sapiens
ttggctgaaggccaaatggcctagtgttaaaatcaatatgaggctgagaatctatatcaccatcatagaataagtttttgggataacaaagaaattgcagytgttacagttctatttagaaatttagtaaccaagctttaaaatgttgatgttacagtgcaagaacaatagttcatcagcatggttatctggtagattgct

SEQ ID NO: 295382 - DNA, 201 bp, Homo sapiens; identical to SEQ ID NO: 60989

SEQ ID NO: 295383 - DNA, 201 bp, Homo sapiens
ttcttcagaaaatgtatttgcaatcccatatgcccttaatcttgaaaattttggaatgcagaggcaaaaaataagtttgctcttcaactacgtcatgagtwtcttgagggcacaaatgtgttttatatacgatatgcatgttaccagcttttgcagatagttctgagaatacaaatcttgagctaatgtttgttcaccttg

SEQ ID NO: 295384 - DNA, 201 bp, Homo sapiens
aggcacaatgactattaactgaaaccatacttcttagatatttatttatttattcattgagacggagtcttgctctgttgcccaggctggaatgcagtggygcgatcttggctcaccacaacctccgcctcccaggttcaagtgattctcctacctcagcctcctgagtagctggaattataggtgcacgccaccatgccc

SEQ ID NO: 295385 - DNA, 201 bp, Homo sapiens
ctattaactgaaaccatacttcttagatatttatttatttattcattgagacggagtcttgctctgttgcccaggctggaatgcagtggtgcgatcttggytcaccacaacctccgcctcccaggttcaagtgattctcctacctcagcctcctgagtagctggaattataggtgcacgccaccatgcccagctaattttt

SEQ ID NO: 295386 - DNA, 201 bp, Homo sapiens
ccctcccatctataaaaatgtttgactaaggtaatgaaatgtttgactcccaatccactctatgtctaaaggcgtggggaatcaattttatattgctaggmaatagggacaaaacacttcatgaggttagaaatcttggattattcagaggattttagttgaccttcctttagaaacacaactgtccttgtcagaagtgta

SEQ ID NO: 295387 - DNA, 201 bp, Homo sapiens
tttacttgtaaatcaataggttagtattttcatttttatatttcaatttatacttaatgttttgaagctagctgtgttttatttctttttgttcttttagygaagattaattttcattgagaagtagagaaagatattggtaagtaagtgtagcggccaggcgcagtggctcttagctgtaatcccagcactttgggagac

SEQ ID NO: 295388 - DNA, 201 bp, Homo sapiens
agctttaaaatgttgatgttacagtgcaagaacaatagttcatcagcatggttatctggtagattgcttttgcagtcaccataatgcacatctataacagtaaatggacttactttggtcaacggaggttgttggaggagcaagatattttccaactatttttgctagtattgaatgtgctgattatgatgtagctgccat

SEQ ID NO: 295389 - DNA, 201 bp, Homo sapiens
tttttgtagaggcaaggtctcaccatattgcccaagctgttctcaaactcctgggcttaagtgatcctcctgcctcagactcccaaagtgttgggattacwgatgtgagcccttgcatccagccagaactttctattatttatggtgtgtggatcaaagctgatttagcatgaatacatatgattttggagttctgttttc

SEQ ID NO: 295390 - DNA, 201 bp, Homo sapiens
taagaactgttcttggcttctctcttaggacaaagtcattaatcgtacaccataagctcttttggggcagtggccttattttttccatctccttatcctawtgcctagtatggtgctggcaactataatcctaatgcaagttgtagcagtggctaacatgtattcagcacttattgtccaccaagtattattctgagctct

SEQ ID NO: 295391 - DNA, 201 bp, Homo sapiens
cccttcttttagacctctgagtcttgctgaggtcctctaacagtctgatctccctgtggcagtacccagtatccctggatatgaaatgacttttgcaaagyactaaatatcccataagagcttcgtttactttgtttcttccttctctctcccaaaacatttgatttctcattgcccgtagggtcatggatgcttagccag

SEQ ID NO: 295392 - DNA, 201 bp, Homo sapiens
tgttttttcctaatgagaaaattatatatatagttcctagttagaggtacgtttatttgcatatgtggaaaatgtctttcagttcttaatgttttaaaaaytatacataacattctcactataaaaaaaaaagctaaaaaataaaaatctcacgtaatgttctctctgaggagcctcttatttttgatgttaaagctaaaa

SEQ ID NO: 295393 - DNA, 201 bp, Homo sapiens
atttaccaacatgtctggctaatttttgtattttttttgtagagatggggtttcgccatgttgcccaggctggtctcaaacgtctgggctcgagcaatctrcctgccttggcctcccaaaatgctgggattacagacatgaaccactgttcctgacagtggttttggtcttaattcttgcttgcagacctgggaatttttt

SEQ ID NO: 295394 - DNA, 201 bp, Homo sapiens
tgcttgcagacctgggaattttttgttttctactgtacaaacttaacttttcggagacagagcctacttgaaggaaggtacgcagatttattatgttcaayatattttagggttcaagaattagtttttttcagtggagaaatctatcttttgtactttgagagatcatgatatatagtagggattcttgaagtgggggtc

SEQ ID NO: 295395 - DNA, 201 bp, Homo sapiens
aactccgacgggctctcaagtgccgcaacgccccgccccttgccacctccacacgtctcattggccagagcctgcgtccgcctcggctcctgactggcggytgcgcctgtcggtccgtgcggcagggacatttccgcattgaaggggctgctccgaatggagggggaggggaggtgtttaggagaaagtaggggctgtggg

SEQ ID NO: 295396 - DNA, 201 bp, Homo sapiens
actagccaatgataaagccattagagacttgttttgtgtgtatgtggagatacacacacaaatgagattctaaaaagtattccacaaaaaggaattagtgkcatttaaagaaatggctctgaggacatggctgaataccaaagagtctcatcatttctttgacataaagttttaaaacagtaatatatagaaatactgaca

SEQ ID NO: 295397 - DNA, 201 bp, Homo sapiens
aattccatactggttacatgtctataatttcactttagaaatagcaatagcaaatacatggaactttaatggcagttacatatttgatttgatagactccmggttttattgttggaccagggtctctaactactgcctttgtgtccaaagtagaggacagtccagtcccacagaattgaattcattaggaaaatcagagtg

SEQ ID NO: 295398 - DNA, 201 bp, Homo sapiens
gtgtagatagtcaggccctaagacctggttctttggtatcctgtagtaacaacaaggagtacatccctatgtttatctctagtgcacagaatgtggcataytttatgtgcttatcaacaacagtagtaataacaatagcaacaaacatttattcagcactaataagcattcttctcaactcttctacatgtgttttcttac

SEQ ID NO: 295399 - DNA, 201 bp, Homo sapiens
aagtctcctttattcattacatttattctacagacctatcaaatacccactgttttattttaattattgggaatgcaaaaataaagacagtcactcccctyaaagaacttaaaatttggaccatacagtgtttcccaaattttcccgtagaaaatgagtagggtaaatgtaagaggccgtttagttgggaaggaggctgtg

SEQ ID NO: 295400 - DNA, 201 bp, Homo sapiens
caagaaaaggggccttctgtggattggggaaaaatccagagaccccctgaagattcggtaagttttagataaaatgtaggaaaatgtagggtaatcttggrcactggttttaacttaggacggttgggtagtgtaggggacctataacaatcatgtgagacaagacaggacttgctttgaattctctgacccctcatcctg

SEQ ID NO: 295401 - DNA, 201 bp, Homo sapiens
gaatatatccatttgtaagaatgggcagtatttcccagataggttttcagggaaaagaacaatctcacaactacataagtttgagaaaatttacttgatayatcccttcttttggagagtcataaaacatgaatatcttaaaaatatgatgggtcctcccatctgtatgaccatagagacatgtttttgcagcagctatca

SEQ ID NO: 295402 - DNA, 201 bp, Homo sapiens
tgcagatgttttgcctttattttctagtctttagtctgttgcggtgctagctcccgttttcctcttgccccatcaccagctttacctttcttactagtggkgggaagcagacatcttggaatgctaacctggtgcttattttctgggaaagaaagagatccacccctgaatatatccatttgtaagaatgggcagtatttc

SEQ ID NO: 295403 - DNA, 201 bp, Homo sapiens
ttttgcctccataggcttagatcactggagtgtgagcctgtcaagttctttcccagtcacacctacccattacacacacacacacacacacacacacacamgttcctacggtagcagaacaaataacagctaacatccacaaagcacttaaggggtagttttatttttttcagtccattatgtgttagctgttgtacacca

SEQ ID NO: 295404 - DNA, 201 bp, Homo sapiens
cagtggaaagtcttggctgaaattgggaaccagaagatggcaggcagccctatgcccttctccttttaaaatgaaaacgtcgatacagggaagtagaggcmccttggaattgccaatacctctcaaggggttcttgtttagtggagaatatgaaactggagtgaaacgagtcctaactagttgacaccactgaattactgc

SEQ ID NO: 295405 - DNA, 201 bp, Homo sapiens
agtttctatgttaaacaacacatttaatatgttctgtttgacataatagtatgtatcataaatccataataaatagtatcaaaatcatctctatttttttkgataagctacatcagtaattttaactaaaataatttcatacatatttatggcaaaaatctgaaacatgtgaaatctttcagtaaagttgtccaaaccttt

SEQ ID NO: 295406 - DNA, 201 bp, Homo sapiens
atatcctatcaagtagaagaaccatatttacattcttataattttctttatcaaatgtgttgttagtctgcagttttcattgtattaaataactcatctakcctaacaaatttttgttattgcaaagatacactttagctaattctttaaacttcaggattgcaggaggcctctagtctgtcaggtcaatgagaataaaca

SEQ ID NO: 295407 - DNA, 201 bp, Homo sapiens
gtccttggcattaagttgtcaaaatttgggtgaaattttaggaaggatggttgatggccatcataggatctttgatcatctatcattaagcatggcaaaaycttggaaatgtcttttcttaattttttgatggtggaaaataagacagtggattcagttaatcacttgaaggaaatattgtagttcacggtagtgtgagca

SEQ ID NO: 295408 - DNA, 201 bp, Homo sapiens
ttttttttttttttttgagacagagtctcgctctgtcacccaggctggagtgcagtggcgcaatctcggctcactgcaagctccacctcctaggtttacascattctcctgcctcagcctcctgagtagctgggactgtaggcgccggccaccatgcctggctaattttttgtatttttaatagagatggggtttcaccat

SEQ ID NO: 295409 - DNA, 201 bp, Homo sapiens
cgtggggaatcaattttatattgctaggcaatagggacaaaacacttcatgaggttagaaatcttggattattcagaggattttagttgaccttcctttaraaacacaactgtccttgtcagaagtgtaacctgagaatgttaaatccaagaaagcttctaacatctgtactacttttcctaccagaaatttcagaccttt

SEQ ID NO: 295410 - DNA, 201 bp, Homo sapiens
ttttcagagaacagatttcattaattaatagccgtttgttttattcatttattcgcttattcacaaatgtttgagtgctgccaacgctggggagctaaccygttcgtttaaagatgatgaatatggtggggagtatcaggtggaagtttctgcccttatggagtttacagtcttataatagagccagagaacttagcagac

SEQ ID NO: 295411 - DNA, 201 bp, Homo sapiens
aagacatgaaaaatcttatcagtaaactgttataaaaacaacaacaaaagccctatatgtaaatgtaaaccaagcaccttttaatttctctatgaaggttrgataatgctggtggccttgcaagtaggcctccaaaaggggctggccatgctgtggcaccgggtccacttcccgctcttagttctacctctaacaaggaga

SEQ ID NO: 295412 - DNA, 201 bp, Homo sapiens
gatttcattaattaatagccgtttgttttattcatttattcgcttattcacaaatgtttgagtgctgccaacgctggggagctaacctgttcgtttaaagrtgatgaatatggtggggagtatcaggtggaagtttctgcccttatggagtttacagtcttataatagagccagagaacttagcagacagtttggagactg

SEQ ID NO: 295413 - DNA, 201 bp, Homo sapiens
atttggcaaccaatcttcagaactttttcatcttgtaaaactgagactctgtagcattaaagaacagttccccattcccttctaccccctctcccctaatsccctggcaagcaccattctggtttctgtctgtatgaatttgattacttttgatgactcactagtggacaaaagccttttttttttcctccttgctcttac

SEQ ID NO: 295414 - DNA, 201 bp, Homo sapiens
ctagccagggaagattactgagctaattataactggaggggtctccgaggaatacagagatgagaagcattctggggcctggttcttctcaaatcctaaarccaaatttagcctgttgctgattatttagatgatgaggacacttttagcacagggatagtggcatggatttgagtgaggacaagagccatgaaaataatg

SEQ ID NO: 295415 - DNA, 201 bp, Homo sapiens
ttatgttaaaaaaaaaaaaaaaaagtgccggggtggggcaaggtaacgtttggacaatatgaatttggttgtagtttttataacctctcaacttgagtacmagttggtgacggttttcttctgaatacagtgaacaaaattttttttgagctcttactatgtatgatgtactgtattaggatttctggcatatcccttatg

SEQ ID NO: 295416 - DNA, 201 bp, Homo sapiens
tttatcttattgtattgactaaaacttccgaattaatgttaaataataatgtcagcttgggcaacatggcataacctcgtatctacaaaacaaacgataarcaaacaaacaaaaactatctgggtgtggtggctcaagcctgtagtcctagctactgaggaggctgaggtgggaggttcaattgagccatatcaaggctgc

SEQ ID NO: 295417 - DNA, 201 bp, Homo sapiens; identical to SEQ ID NO: 60996

SEQ ID NO: 295418 - DNA, 201 bp, Homo sapiens; identical to SEQ ID NO: 60997

SEQ ID NO: 295419 - DNA, 201 bp, Homo sapiens
ttaactctttccactctgagagtcccggagctgacagcgggcagtactcttaagaattttcttctgtctgatgctgatttactgacctgggccagctgcattggttggggtcattcagaaatgtgcatcagaatcccccggggcacaaaagaaacgtgatgggggcccaggcacgtgtactttgaaatactcctcaggtgg

SEQ ID NO: 295420 - DNA, 201 bp, Homo sapiens; identical to SEQ ID NO: 61001

SEQ ID NO: 295421 - DNA, 201 bp, Homo sapiens; identical to SEQ ID NO: 61000

SEQ ID NO: 295422 - DNA, 201 bp, Homo sapiens
tgatcatgtgacctccagtttatttgcataaaactaatggcctctcctttttcttctccttacttacaaaaacctgacttcattctgaaatttatttttgaaaaaaaaaagaggggatcttggaaggggggccaggggtagtgacatacagatttctgatcatgctcaccacttagtgcacttctttctctgcagagacaa

SEQ ID NO: 295423 - DNA, 201 bp, Homo sapiens; identical to SEQ ID NO: 61002

SEQ ID NO: 295424 - DNA, 201 bp, Homo sapiens
gtgcacttctttctctgcagagacaaggccagtatgacccacctccaggagccagcaacattttgggacttgaggcatctggacatgtggcagagctgggrcctggctgccagggacactggaagatcggggacacagccatggctctgctccccggtgggggccaggctcagtacgtcactgtccccgaagggctcctca

SEQ ID NO: 295425 - DNA, 201 bp, Homo sapiens; identical to SEQ ID NO: 60992

SEQ ID NO: 295426 - DNA, 201 bp, Homo sapiens
tgatatgaggaaataaagagtgaactggaagggtggcacgcggactggggccgccgcggcggggttgaggtgggagtccggacgggcgtcgcagcggggaytactgaggcccgatcagctgacgctcaacctgagggcccctccagggacggagattctgggtatagttacagcgtcagccgtgacacaagccgccagaac

SEQ ID NO: 295427 - DNA, 201 bp, Homo sapiens
atcaccagtttgctgaggtctagggacaataaggtgagtgatgaatgaaaagaaaacatgtgatttaacccagaaaagtgtggttcatttacattaccccragaaaggaagctctaccttagattacggaggttagtttctatgaagaaacctccccctctgaagataaagagggaacccgatttcagagaactgattcag

SEQ ID NO: 295428 - DNA, 201 bp, Homo sapiens
ccaggctgatgatctcctttcccttgtcttagtacaagcaaatgctggtgaatgctttcacggagcaaattctgcctcacttctccacggagggcccccarcgtctgctgccggttctggacagaatctacccagtgaccgaaatccaggaggcccataagtacatggaggccaacaagaacataggcaagatcgtcctgg

SEQ ID NO: 295429 - DNA, 201 bp, Homo sapiens; identical to SEQ ID NO: 60995

SEQ ID NO: 295430 - DNA, 201 bp, Homo sapiens; identical to SEQ ID NO: 60994

SEQ ID NO: 295431 - DNA, 201 bp, Homo sapiens
gggtttaatgttgaggctgagaatcatggttagcagatagagggtctggataacactagataggaggcctatgtacatgttaacaccggacgcccagcagmagtcccagcttcttagaatcatactgagcttctctctggggtcccagtgcaacagaagggaccaattgactcatttattcctcctcaatcccacagaggc

SEQ ID NO: 295432 - DNA, 201 bp, Homo sapiens
aattaacaatatacctatcggacatattctgagatggcacatgactccttcaagggtatttcacacacatgctaggaagtgaggggttaagtgtccctgtstgctttttcagatacgtggcttcagagagagcaagaaggctgaggaggatgaggagggcagggtgaggctctctccccaggctgatgatctcctttccct

SEQ ID NO: 295433 - DNA, 201 bp, Homo sapiens
gggttacttccttaagtgtatttattcagttccattgcagccccgtttccagtctctggtgataagggctttttgccctagtatggggagggtacccctcycagaggaatctttatgacttgctacatgcaagaagagacaggtcagctagccttttctgaaactacaatttctccaatgctttcacctcaaaattaacaa

SEQ ID NO: 295434 - DNA, 201 bp, Homo sapiens
ttgggtggtagcaccctaaatgagtaagtagatgtgcacacctctgtattccaaagccagacgtgtctatttttggctcatccctttccgtttctctttcttttttttttttgagatggagtctcactctgtcactgaggatggcgtgcagtggcttgatctcggctcgctgcaacctccgcctcccaggttcaagtgatt

SEQ ID NO: 295435 - DNA, 201 bp, Homo sapiens
ttttagacaaagaacaataaatttgagaagaaataagacaaaatctggctagggatagtaaatttctagggaagtcactaggagatatatgggggtggggkgtgtaaaactagtggaagataagggttacttccttaagtgtatttattcagttccattgcagccccgtttccagtctctggtgataagggctttttgccc

SEQ ID NO: 295436 - DNA, 201 bp, Homo sapiens
attgcttgagtccaggagtttcaaggctgcagtgagctatgattgcacctgtgcatagccactgtaccccagcctgagcaacatagcaaaacctcatctcaaaaaaaaaaagattatatgctcctgaaatattccatctggcagtctagcaggtaccacctttgggaatgtttccaccatagggttttgcaccagctgagg

SEQ ID NO: 295437 - DNA, 201 bp, Homo sapiens
ttttatagagacaggttttcaccatgttgcccaggctgatctcaaactcccaggctcaagtgattcggccaaagtaagatgcttttgtaatttttagacaragaacaataaatttgagaagaaataagacaaaatctggctagggatagtaaatttctagggaagtcactaggagatatatgggggtggggggtgtaaaac

SEQ ID NO: 295438 - DNA, 201 bp, Homo sapiens
ccactgtaccccagcctgagcaacatagcaaaacctcatctcaaaaaaaaaaagattatatgctcctgaaatattccatctggcagtctagcaggtaccasctttgggaatgtttccaccatagggttttgcaccagctgagggacaggagagcttaagcatccttttttcactaagcctatatgagtcctatctgtggct

SEQ ID NO: 295439 - DNA, 201 bp, Homo sapiens; identical to SEQ ID NO: 60998

SEQ ID NO: 295440 - DNA, 201 bp, Homo sapiens
tgtctatttttggctcatccctttccgtttctctttcttttttttttttgagatggagtctcactctgtcactgaggatggcgtgcagtggcttgatctcrgctcgctgcaacctccgcctcccaggttcaagtgattctccagccttagcctcctgagtagctgagatcacaggcgcaccaccacgcccagctaattttt

SEQ ID NO: 295441 - DNA, 201 bp, Homo sapiens; identical to SEQ ID NO: 60999

SEQ ID NO: 295442 - DNA, 201 bp, Homo sapiens
atgagccaccatgcccagtcaggttttgaaaggtttctaatcacatgtatcgagcaatcatttcagtgtcatgaaaatcctgtgttccacctgttcatctytcccttccttcctaaaccctggcaatcactgatctttttatttgacctatagtttttcctcttccaaaatgtcatatggttggaatcacacagcatgtag

SEQ ID NO: 295443 - DNA, 201 bp, Homo sapiens
agacagaagaaaaatgaacagccttgcagactcatggggacaaaatcaagtatagcaacacacacacacacacacacacacacacacacacacacacacayatatatataatgggagtcccagaaggaaaggagagagagaaagtggaagaaaaacacgaaacaaaacaaaacaatggcccaaaagcctcaaatctgagga

SEQ ID NO: 295444 - DNA, 201 bp, Homo sapiens
ccttggacatctggctctctgtcggaagtcctgaggatgaagaagggaacttgtgagatcaagccctcctcatcacaaagaatctgactgtggctgacacygcccaaaacaagtgcacagaccaggtgcggtggctcacgcctgtaatcccagcactttgggaggccgaggtgggccgatcacctgaggtcaggagttgga

SEQ ID NO: 295445 - DNA, 201 bp, Homo sapiens
cagtcacaggatgagataggaggttggcacaagatacaggtcataaagcttgctgataaaacaggttgcagtaaagaagcctgacaaatcctaccaaaatsaagatggccacgagagtgacctccagttgtcctcactgctacagtcccactagtgctatgacagtttacatatgacatggcaacgtcaggaagttaccct

SEQ ID NO: 295446 - DNA, 201 bp, Homo sapiens
cctccatcctgacctcaccctgtgccctgtgcgcaaacgcctcttctcctttggtgaccctgcccatggcattctaagccagtctatggtattggcttgcyctgggctcagacaggtgggaggtgagcagagaagctacccagcctgtaggcctgacccctctgtgttcacctactctgctctcagccccaccttgtctct

SEQ ID NO: 295447 - DNA, 201 bp, Homo sapiens
ctccctgcaacctctgcctcctggttcaagtgattctcgtgcctcagcctcccaagtagctgggtttacaggcatgcaccaccatgctccattaagttttrtaattttagtaaagacggggtttcgccatgtcggccaggctggtcttgaactcctgacctcaagtgatctgcctgcttcggcctcccaaagtgctgggat

SEQ ID NO: 295448 - DNA, 201 bp, Homo sapiens
ggctggtcttgaactcctgacctcaagtgatctgcctgcttcggcctcccaaagtgctgggattacaggtgtgaggcactgcgcctggcctattcctttaytttcttaataaacttgctttcactttattctgtggactcaccccaaattctttcttgtgtgagatccaagaaccctctcttggggtctggattgggaccg

SEQ ID NO: 295449 - DNA, 201 bp, Homo sapiens
tctccggaccttggttaacgtggacaagctgacttaaaagagctggaatcccagaggggttgcgtagacacaaattgttcgaagggcaaggggaaacctgyaactcagtcagacaaaggcaacacctctgcatttccttttttttttttttttgagacgaagtttcactcttgtcacccaggttggagtgcagtggcacaa

SEQ ID NO: 295450 - DNA, 201 bp, Homo sapiens
gaggtttcgccatgttggctaggttggtcttgaacccctgacctcaggtgatctgcctgccttggcctcctaaattgctaggattacaggtgtgagctgcygggcctggcctcctcattttaaaattaaatttaaattagattcaacatttcaataaagagaaattcaaattgaaacacaggctgttgaaacaaagacaag

SEQ ID NO: 295451 - DNA, 201 bp, Homo sapiens
ggaagtttctgctcttgatagataggaattgcagcccagatggagagagatggaggtccaagttgcttgtgtggaacagtctgaggcctcagacggagcamctttctttctcttcctccttccctggaaatcttaagcatttgaatttctatgaactgcccttgacccactctaccttgctcttacagattcacattgttc

SEQ ID NO: 295452 - DNA, 201 bp, Homo sapiens
aggtgggaggtgagcagagaagctacccagcctgtaggcctgacccctctgtgttcacctactctgctctcagccccaccttgtctctccagtgcagatcrgcctgccctccaccatgcgcatgacagtggctgacggcactgtatacatagcccagcagatgcactttcactggggaggtgcgtcctcggagatcagcgg

SEQ ID NO: 295453 - DNA, 201 bp, Homo sapiens
cagcccacctcaacacgccaccccttggctctgggcagcttagaagcctgagttcaaacacagtgaagatgactaaaggcaatgcaccgggcacgtggagmgcattctaaggaatcaaaagacttcccaaaaatacgatgcgggtgtggtgtctggccgtcccccttctctgtttttgtgaggactgtacaaggtttaacc

SEQ ID NO: 295454 - DNA, 201 bp, Homo sapiens
gcctgagttcaaacacagtgaagatgactaaaggcaatgcaccgggcacgtggagagcattctaaggaatcaaaagacttcccaaaaatacgatgcgggtrtggtgtctggccgtcccccttctctgtttttgtgaggactgtacaaggtttaaccatttccgactaactcttctttttacagaatacactctaggctctg

SEQ ID NO: 295455 - DNA, 201 bp, Homo sapiens
ccttacaacaggacaagtgcccttcttcttcttcttttttttttttttagacaaagtcttgctctgttgcccaggcttgagtacagtagtgtgatgttggytcactgcaacctccgcctcccgggttcaagtgattctgctgccttagcctcccgagtacctgggattacaggtgcctgccaccatgcctggctaattttt

SEQ ID NO: 295456 - DNA, 201 bp, Homo sapiens
atctgcctggggcgcaggccccagaccccagcgtgctggaagcaggtgcgggcaggccagcctccgctgcatcctccagttccttggatcaggctccaacsgtgtccttggctcacctcgtttctgtgttggcaagagtgtaaatatttcacagcctcctcatctttattttgtctgctttctgtaaagttgtggtgaatc

SEQ ID NO: 295457 - DNA, 201 bp, Homo sapiens
cattctctcaaagtggagttaactagaccacatattgttccctgcatctgcctggggcgcaggccccagaccccagcgtgctggaagcaggtgcgggcagrccagcctccgctgcatcctccagttccttggatcaggctccaaccgtgtccttggctcacctcgtttctgtgttggcaagagtgtaaatatttcacagcc

SEQ ID NO: 295458 - DNA, 201 bp, Homo sapiens
ttttgagacagagtttctctctgtctcccaggctggagtgcggttgcgtgatactggcttactgcagcctctgcctcccaggttcaagcgattctcctgcytcagcctcctgagtagctgggattacaggtgcacacaaccatgatcagctaatttttagtagagaagaggtttcaccatgttggccaggctggtctccaa

SEQ ID NO: 295459 - DNA, 201 bp, Homo sapiens
accaaggtcagttacaaaaacaagacgatggccaaatacggacctcttgcgatttatttactagaaaacgcctatatcccctcaggcaagggccacggggrgcatcgtgggagaagccaaaatccaagagtacagcccacctcaacacgccaccccttggctctgggcagcttagaagcctgagttcaaacacagtgaaga

SEQ ID NO: 295460 - DNA, 201 bp, Homo sapiens
cactcaccacgcctccctgcactgagaacgtccactggtttgtgctggcagattttgtcaagctctccaggacacaggtaatgtatggtatcactttgcckaagtcttcccattcgattgcctggttaacaagggttctccccagcatctcaacgaacgtcaacaactaaggggtcctacagtattttctgtgtgcagggc

SEQ ID NO: 295461 - DNA, 201 bp, Homo sapiens
acaggctatgagacccaggcaggggagttccccatggtcaacaatggccacacaggtaagaggaaggggtggtgaggggctccagtccatgggcagcctgmaggggaaggcaggttacacgtgtccctgccaggaatggcttgcacagagacacagagcacggcctcagagctggaggcctcgaacatgagggtcgaacat

SEQ ID NO: 295462 - DNA, 201 bp, Homo sapiens
acggcctcagagctggaggcctcgaacatgagggtcgaacatgagggctgactggccccgaaacctagtggctcttccagagagggcagcatccatctttygactcaactccctgctggtcccttcctgcagcgttatcctcttacccgagctcacccaacccacccagcaggtgacaggcaggacaggccgtgctgctga

SEQ ID NO: 295463 - DNA, 201 bp, Homo sapiens
gaggcaggaggattgtttgagcctgggaggtcgaggctgcagtgagctgaggtcatgccactgcactccaggctgggtgacagagtaagaccctgcctcarttaaaatcttttttaaaaagcacagtaacaggctcagggttgtggctcttttccaattgggcctgtgtgggcctgtcagtgtaaccagaagtaacacatt

SEQ ID NO: 295464 - DNA, 201 bp, Homo sapiens; identical to SEQ ID NO: 61042

SEQ ID NO: 295465 - DNA, 201 bp, Homo sapiens
tggcctggtgaggttcctccagagtgggcgcagccaggcagccccttgaactgtgtctttcctgtcttagaaggggcactggacgaagcgcactggccacwgcactaccccgcctgtgggggccagagacagtcgcctatcaacctacagaggacgaaggtgcggtacaacccctccttgaaggggctcaatatgacaggc

SEQ ID NO: 295466 - DNA, 201 bp, Homo sapiens
caacggaattagggacatcctgggaggttcagaaagtccagccagctctgaacaaccgctctgttcctgagcacagtgatcttacacatggcagtgcctcsgaagcctggggcattctgcttcacttggccaagcagtgcaggcaggtggttcagaggtgaaggaagagagaattcagacaatgaagtccttgtccttccc

SEQ ID NO: 295467 - DNA, 201 bp, Homo sapiens
ttgaggccagcaggctgaggctgcagtaagtcctgatcatgccgctgcactccagtctgagcaacaaaacaaacaaacaaaaacagccaaaagactgtgcratggtagcagttaagtcatgctgaagttgagtttattttttattcactcagcaactattgacagatcaccactttgtgacaggggttcaggcaaggtcct

SEQ ID NO: 295468 - DNA, 201 bp, Homo sapiens
cctgacctcaggtgatccgcctgcccggcctcccaaattgctgggattacaggtgtgagtcactgtgcccggcctgtctcctaggtctaaatgttgccatrtttcccctgctttccctaaaacaattttacgctattcttgcaatagtcactaacagactgcgtatcgttctatttgccacatctgaaatgctttttccac

SEQ ID NO: 295469 - DNA, 201 bp, Homo sapiens
taaatttataaattcttttttttttttttttagggacaggatcttgttatgttgcccaggctggagtgcagtggctattcacaggcatgatcccattaccratcagcacaggagttttgacctgatccatttctgacctgggctgattcacccctccttaggcaacctggttgtcccctgctccagggaggtcaccatact

SEQ ID NO: 295470 - DNA, 201 bp, Homo sapiens
aaatccaagagtacagcccacctcaacacgccaccccttggctctgggcagcttagaagcctgagttcaaacacagtgaagatgactaaaggcaatgcacygggcacgtggagagcattctaaggaatcaaaagacttcccaaaaatacgatgcgggtgtggtgtctggccgtcccccttctctgtttttgtgaggactgt

SEQ ID NO: 295471 - DNA, 201 bp, Homo sapiens
aaaaaaaaaaaaaaagagaaaaacctgacattttcagaaaaacaaaaattgagtttgccacttgatatatttctgcttcttctttctctcctttctactaytggacaaatactcatataaaaagctgaaaagagagcttgtgtgcagatacctgttggaagaatgcacggatagattagttctggaataatgcctgagaca

SEQ ID NO: 295472 - DNA, 201 bp, Homo sapiens
agcactaccccgcctgtgggggccagagacagtcgcctatcaacctacagaggacgaaggtgcggtacaacccctccttgaaggggctcaatatgacaggytatgagacccaggcaggggagttccccatggtcaacaatggccacacaggtaagaggaaggggtggtgaggggctccagtccatgggcagcctgcagggg

SEQ ID NO: 295473 - DNA, 201 bp, Homo sapiens
cagactgtctctgccaaaacacaagacggcacaggctgcctctccttactctctaggctcggcccaatccgctagaaagctgagtggctggattagtagcratggtgctggggcctcttcttcacttacgctcagtgctctgtgtttctctgcaggtgaagaattaccctgaaaacacttattacagcaacttcatttctc

SEQ ID NO: 295474 - DNA, 201 bp, Homo sapiens
agatcagcctggccaacatggtggaaccccgtctctactaaaagtacaaaaaattagccagtcgtggtggtggggcgcttgtaatcccagctaccccagargctgaggtggaagaatcacttgaacctgggacgtggaggttgcagtgagccaagattgcactactgcactccagcctgggcaacagagcaaaaccctgtc

SEQ ID NO: 295475 - DNA, 201 bp, Homo sapiens
cttctctgtttttgtgaggactgtacaaggtttaaccatttccgactaactcttctttttacagaatacactctaggctctgaattccagttttacctacrtaagattgaggaaattcttgactacttaagaagagcattgaactgaggaaagctaagaggaagattcaatattaactagcttgaagcctgacctagccag

SEQ ID NO: 295476 - DNA, 201 bp, Homo sapiens
gctggagtgcagtggcacgatctcagctcactgcaacctccgcctcccaggttcaagcaattctcctgcctcagcctcccgagtagctgggactccaggastgtgccaccacgcccggctagtttttatttttagtagggacagggttttattatgttgcccaggcaggtctcaaactcccaggttcaagcagtctgcctg

SEQ ID NO: 295477 - DNA, 201 bp, Homo sapiens
ccaggctggagtgcagtggcgcgatctcggctcaccgcaacctctgcctcctgggttcaagtgattctcctgccttagcctctcaagtagctgggattaayggcatgtgccaccatgcccggctgattgttttttatttttagtagagatggagtttctccaggtttgtcagggtgggtctcgagctcccaaccttaggtg

SEQ ID NO: 295478 - DNA, 201 bp, Homo sapiens
aggctgaggtgggaggatcacttgagcctgggaggtcaaggttgtggtgagccgagattaccactgtactccaccctgggcaacagagcgagaccgtttctttaaaataaaaaaataaaagggtcacaggacttagtgttcttatcttgcacaatcaagaaaataaaaccagcctggtgaggtggttcatgcctgtaatcc

SEQ ID NO: 295479 - DNA, 201 bp, Homo sapiens
ccggaagcctgttcctttggggttctcacctcacacgacagcatgtcggacattagagtggacccaaagttcacattaattatatatatattaaaaacaatttttttttttgagatggagtcttgctctgtcaccccggctggagtgcagtggtgcaatcttggctcactgaaacctccacttcccagattcaagcaattc

SEQ ID NO: 295480 - DNA, 201 bp, Homo sapiens
cttgagcagcttgggaggtcaaggctgcagtgagctatgattgcaccactgcactccagcctgggtgacagagcaagaccttctctcaatcaatcaatcartcagtcaatcaatcaatcaatcaattccatgtgtaggtttgtgtgttttcagtccatgtgggtaattaccaagagcttgcttgatcgtatagtaatgtca

SEQ ID NO: 295481 - DNA, 201 bp, Homo sapiens
gtttagcatataattaagacataaccataaaaacgggcaaccagctgcccttggggctgctctgcctgtggagcagccattctttattccactacttccgtttttttttttttttggagacagaatcttgctctgaggctggagtgcagtggtgctaccttggctccctgcaacctctgcctcctggttcaagtgattctc

SEQ ID NO: 295482 - DNA, 201 bp, Homo sapiens
tggaggtccaagttgcttgtgtggaacagtctgaggcctcagacggagcacctttctttctcttcctccttccctggaaatcttaagcatttgaatttctrtgaactgcccttgacccactctaccttgctcttacagattcacattgttcactacaattctaaatacaagagctatgatatagcccaagatgcgccggat

SEQ ID NO: 295483 - DNA, 201 bp, Homo sapiens
aggtgcacacaaccatgatcagctaatttttagtagagaagaggtttcaccatgttggccaggctggtctccaactcctgagctcaagtgatctgcccgcmccagcctcccaaaatgctgggattacaggcgtgagccactgcgccgggccaactgttatttcttttaaattacccagtgactcttcccctccataatgca

SEQ ID NO: 295484 - DNA, 201 bp, Homo sapiens
ggggccagagacagtcgcctatcaacctacagaggacgaaggtgcggtacaacccctccttgaaggggctcaatatgacaggctatgagacccaggcaggsgagttccccatggtcaacaatggccacacaggtaagaggaaggggtggtgaggggctccagtccatgggcagcctgcaggggaaggcaggttacacgtgt

SEQ ID NO: 295485 - DNA, 201 bp, Homo sapiens
tcagagctggaggcctcgaacatgagggtcgaacatgagggctgactggccccgaaacctagtggctcttccagagagggcagcatccatctttcgactcractccctgctggtcccttcctgcagcgttatcctcttacccgagctcacccaacccacccagcaggtgacaggcaggacaggccgtgctgctgaagccac

SEQ ID NO: 295486 - DNA, 201 bp, Homo sapiens
cagcactaccccgcctgtgggggccagagacagtcgcctatcaacctacagaggacgaaggtgcggtacaacccctccttgaaggggctcaatatgacagsctatgagacccaggcaggggagttccccatggtcaacaatggccacacaggtaagaggaaggggtggtgaggggctccagtccatgggcagcctgcaggg

SEQ ID NO: 295487 - DNA, 201 bp, Homo sapiens
taatgtcgagctcttgtttccaaagttactctctgatgcttccagattggcaggcggaactcttcctcccctccttgtcctctccttgtggagaaggggcraagcacaaaggccaaaggcagtggctttgttcaccctccctggacagctggtgggaagcaatcattgatggaggatctctatgggcaacgcttgctgagt

SEQ ID NO: 295488 - DNA, 201 bp, Homo sapiens
gcaggcggaactcttcctcccctccttgtcctctccttgtggagaaggggcgaagcacaaaggccaaaggcagtggctttgttcaccctccctggacagckggtgggaagcaatcattgatggaggatctctatgggcaacgcttgctgagtgcgggcttcgtgctgagggcccagaagagggaaggcatatggaagagaa

SEQ ID NO: 295489 - DNA, 201 bp, Homo sapiens
agcaccaaagccccccaaacaccagagtccttggagttgacctcgttgtctttttggcctccttctgggggacctgcttctgctttctggaaggtgcctcygtgggtccccgcccagcaggccctggcctctggcctctggcctggtgaggttcctccagagtgggcgcagccaggcagccccttgaactgtgtctttcct

SEQ ID NO: 295490 - DNA, 201 bp, Homo sapiens
gtctttcctgtcttagaaggggcactggacgaagcgcactggccacagcactaccccgcctgtgggggccagagacagtcgcctatcaacctacagaggaygaaggtgcggtacaacccctccttgaaggggctcaatatgacaggctatgagacccaggcaggggagttccccatggtcaacaatggccacacaggtaag

SEQ ID NO: 295491 - DNA, 201 bp, Homo sapiens
ctggccacagcactaccccgcctgtgggggccagagacagtcgcctatcaacctacagaggacgaaggtgcggtacaacccctccttgaaggggctcaatmtgacaggctatgagacccaggcaggggagttccccatggtcaacaatggccacacaggtaagaggaaggggtggtgaggggctccagtccatgggcagcc

SEQ ID NO: 295492 - DNA, 201 bp, Homo sapiens
gagaaggggcgaagcacaaaggccaaaggcagtggctttgttcaccctccctggacagctggtgggaagcaatcattgatggaggatctctatgggcaacrcttgctgagtgcgggcttcgtgctgagggcccagaagagggaaggcatatggaagagaagagcccagcttcccaaggggcttgcagcggctcccgcctcc

SEQ ID NO: 295493 - DNA, 201 bp, Homo sapiens; identical to SEQ ID NO: 61034

SEQ ID NO: 295494 - DNA, 201 bp, Homo sapiens
agaaaacgcctatatcccctcaggcaagggccacggggagcatcgtgggagaagccaaaatccaagagtacagcccacctcaacacgccaccccttggctytgggcagcttagaagcctgagttcaaacacagtgaagatgactaaaggcaatgcaccgggcacgtggagagcattctaaggaatcaaaagacttcccaaa

SEQ ID NO: 295495 - DNA, 201 bp, Homo sapiens
ggtgtgaagtctagttgaacagtcttctttattatcactcttcatcttttcctgagctcacagttcttggaaacattgactcgatggaagatcactgtgcyccttccgtgctgtcaatctccggaccttggttaacgtggacaagctgacttaaaagagctggaatcccagaggggttgcgtagacacaaattgttcgaag

SEQ ID NO: 295496 - DNA, 201 bp, Homo sapiens
tgtcttagaaggggcactggacgaagcgcactggccacagcactaccccgcctgtgggggccagagacagtcgcctatcaacctacagaggacgaaggtgyggtacaacccctccttgaaggggctcaatatgacaggctatgagacccaggcaggggagttccccatggtcaacaatggccacacaggtaagaggaaggg

SEQ ID NO: 295497 - DNA, 201 bp, Homo sapiens
gttatttcttttaaattacccagtgactcttcccctccataatgcactcacgttgcccccaggtttggaagctggagaattccttactggatcaccgcaayaagaccatccacaacgattaccgcaggacccagcccctgaaccacagagtggtggaatccaacttcccgaatcagggtgagtgagaccgactcttgatca

SEQ ID NO: 295498 - DNA, 201 bp, Homo sapiens
ggacctgcttctgctttctggaaggtgcctccgtgggtccccgcccagcaggccctggcctctggcctctggcctggtgaggttcctccagagtgggcgcrgccaggcagccccttgaactgtgtctttcctgtcttagaaggggcactggacgaagcgcactggccacagcactaccccgcctgtgggggccagagacag

SEQ ID NO: 295499 - DNA, 201 bp, Homo sapiens
cagtccatgggcagcctgcaggggaaggcaggttacacgtgtccctgccaggaatggcttgcacagagacacagagcacggcctcagagctggaggcctcraacatgagggtcgaacatgagggctgactggccccgaaacctagtggctcttccagagagggcagcatccatctttcgactcaactccctgctggtccct

SEQ ID NO: 295500 - DNA, 201 bp, Homo sapiens
gatcaccgcaataagaccatccacaacgattaccgcaggacccagcccctgaaccacagagtggtggaatccaacttcccgaatcagggtgagtgagaccractcttgatcatgctctgcagtttaactcctgttttgctccttcctctaggtggacccatctcttctggtgatataagggaaggagagtcatttcagtag

SEQ ID NO: 295501 - DNA, 201 bp, Homo sapiens
acacacacacacacacacacacacacacacacacacacacacatatatatataatgggagtcccagaaggaaaggagagagagaaagtggaagaaaaacaygaaacaaaacaaaacaatggcccaaaagcctcaaatctgaggaaaaacataaatttatcaatccaagaaactaaaaataccccaagtctgataaataaac

SEQ ID NO: 295502 - DNA, 201 bp, Homo sapiens
caaccctgactggccttgacgttcaggacatgctgcccaggaacctccagcactactacacctaccatggctcactcaccacgcctccctgcactgagaaygtccactggtttgtgctggcagattttgtcaagctctccaggacacaggtaatgtatggtatcactttgccgaagtcttcccattcgattgcctggttaa

SEQ ID NO: 295503 - DNA, 201 bp, Homo sapiens
gaaggggtggtgaggggctccagtccatgggcagcctgcaggggaaggcaggttacacgtgtccctgccaggaatggcttgcacagagacacagagcacgrcctcagagctggaggcctcgaacatgagggtcgaacatgagggctgactggccccgaaacctagtggctcttccagagagggcagcatccatctttcgac

SEQ ID NO: 295504 - DNA, 201 bp, Homo sapiens
tcatggctcagtgcagcctcgacctctgggactcagttgatcctcccacctcagcctcctgagtagctgggactacaggtgcaccaccatgcttggctggttttttgtattttcagtagagacagggtctcaccatgttctcaggctggtcttgaactcctgggctcaagtgatctgcctgcctcaacttcccaaaatttt

SEQ ID NO: 295505 - DNA, 201 bp, Homo sapiens
actcggaaggctgaggcaggagaatcgcttaaacccgggaggtggaggttgtagtgagctgagattgtgtcgctgcactccagcctggacgacagagcgcracaacatctcaaacaacgacaacaacaacaaacttaccccttaaaccattttaaatgtacagttcagtagcattaagaacattcacagtatgatgcaacc

SEQ ID NO: 295506 - DNA, 201 bp, Homo sapiens
tcaggaggtcgagggactcacccaaggccacacactgtctaatggccaagatgggctcacacccccagttgtcaggtttcttggccacatcctccttaggytctgcactctctcactcctgcttgggttgagatacatccctgcctgccacacagcgataggacagtcactggacttggccaggcatggtggctcatgcct

SEQ ID NO: 295507 - DNA, 201 bp, Homo sapiens
ttggtttccagcggttgtggcaggaagagctcaggaccaaatgcctgtacctggaccctggcttggttctgattctgcatttattatttaaaaaaataataaaaaaaacaacttattgtagagacggggcctccctgtgttgcccaggctggtcttgaactcttggccccaagcaatcctcccgccttggcctcccagagt

SEQ ID NO: 295508 - DNA, 201 bp, Homo sapiens
gcccaaccccactcctctcccatgctcagggcctcctttcctgctattctctccctggtcttctgcatcgttgatttctctctctctctctcttttttctytttggagatggagtcttgctctgtcaccaggctggagtgcagtggcatgatctcagctcactacaacctccgcctcccgggttgaagtgattcccctgcc

SEQ ID NO: 295509 - DNA, 201 bp, Homo sapiens
tatttacagtttctgagcctttaaaagaagagcttcgccggaatcagtcttcattacagatgtgcagcaccatgagggccctggtgcttctgctgtccctrttcctgctgggtggccaggcccagcatgtgtctgactggacctactcaggtgagcccctagcttctgcatgctcccccagttaccctcacacccttacaa

SEQ ID NO: 295510 - DNA, 201 bp, Homo sapiens
caggaggtcgagggactcacccaaggccacacactgtctaatggccaagatgggctcacacccccagttgtcaggtttcttggccacatcctccttaggtwctgcactctctcactcctgcttgggttgagatacatccctgcctgccacacagcgataggacagtcactggacttggccaggcatggtggctcatgcctg

SEQ ID NO: 295511 - DNA, 201 bp, Homo sapiens
gtgaacgggatgatctgttaagtcaagggcaacggaattagggacatcctgggaggttcagaaagtccagccagctctgaacaaccgctctgttcctgagsacagtgatcttacacatggcagtgcctcggaagcctggggcattctgcttcacttggccaagcagtgcaggcaggtggttcagaggtgaaggaagagaga

SEQ ID NO: 295512 - DNA, 201 bp, Homo sapiens
cacttgatgccagagtttgagaccaacctgggcaacttggtgagacttcatctctacaaaaaatcaaaacattagccaggagtggtggtgagtgcctgtaktcccagctactcgggaggctgaggtgggaggatcacttgagcctgggaggtcaaggttgtggtgagccgagattaccactgtactccaccctgggcaaca

SEQ ID NO: 295513 - DNA, 201 bp, Homo sapiens
atttctttcattgatcataaaatgtgtcctctgcctagccatgataatggtgaccgcagcagttacacttaggagtacttccctatgtagtggttcaatgycagctgctttccagacgttattccttcttaccctcacaacaatcctgctgattattccctttctacagatgagaaaatggccgcagggtgagcacccggc

SEQ ID NO: 295514 - DNA, 201 bp, Homo sapiens
cactgtactccaccctgggcaacagagcgagaccgtttctttaaaataaaaaaataaaagggtcacaggacttagtgttcttatcttgcacaatcaagaamataaaaccagcctggtgaggtggttcatgcctgtaatcccagcactttgggagcccgaggcaggcagatcacctgaggtcaggagttcgagactagcctg

SEQ ID NO: 295515 - DNA, 201 bp, Homo sapiens
ggcaggagaatggcgtgaacccgggaggcggagcttgcagtgagccgagatcgcgccactgcactccagcctgggcgaaagagcaagtctctgtctcaaamaaaaaaacaaacaaacaaacaaacaacaacaaaaaaaggtttcctaaaaagagaaggcaggggaagggtgctgagggtggcgtgggaaggtggagttttc

SEQ ID NO: 295516 - DNA, 201 bp, Homo sapiens
gcaacgcttgctgagtgcgggcttcgtgctgagggcccagaagagggaaggcatatggaagagaagagcccagcttcccaaggggcttgcagcggctccckcctcccaatttccagaggaccctgtaccttcttcctttagggctctgctcaaatttctgtggtccggaagcctgttcctttggggttctcacctcacacg

SEQ ID NO: 295517 - DNA, 201 bp, Homo sapiens
ggagaatggcgtgaacccgggaggcggagcttgcagtgagccgagatcgcgccactgcactccagcctgggcgaaagagcaagtctctgtctcaaacaaamaaacaaacaaacaaacaaacaacaacaaaaaaaggtttcctaaaaagagaaggcaggggaagggtgctgagggtggcgtgggaaggtggagttttctgga

SEQ ID NO: 295518 - DNA, 201 bp, Homo sapiens
cacccccagctaatttttgtattttttgtagagatggggtttcagcatgttggcctggctggtctcgaactcctgacctcaagtgatccgcccaccttggyctcccaaagtgttgagattatatgcataagccaccgtgcccagcctgatataaagtattttgaaagatttttataatttagcttttgaagttatttggct

SEQ ID NO: 295519 - DNA, 201 bp, Homo sapiens
tgtagagatggggtttcagcatgttggcctggctggtctcgaactcctgacctcaagtgatccgcccaccttggcctcccaaagtgttgagattatatgcrtaagccaccgtgcccagcctgatataaagtattttgaaagatttttataatttagcttttgaagttatttggctattgccattggctacttttcagcaag

SEQ ID NO: 295520 - DNA, 201 bp, Homo sapiens; identical to SEQ ID NO: 61032

SEQ ID NO: 295521 - DNA, 201 bp, Homo sapiens
agagtacagcccacctcaacacgccaccccttggctctgggcagcttagaagcctgagttcaaacacagtgaagatgactaaaggcaatgcaccgggcacrtggagagcattctaaggaatcaaaagacttcccaaaaatacgatgcgggtgtggtgtctggccgtcccccttctctgtttttgtgaggactgtacaaggt

SEQ ID NO: 295522 - DNA, 201 bp, Homo sapiens
cccatctttatatgtaccttttaaaacttaaatttcctccgggtgtggcggctcacgcctgtaatcccagcactttgggaggctgaggcgggcagatcacratgtcaggagatcgagaccatcttggctaacatggtgaaaccccgcctctactaaatatacaaaaaattagccaggcgaggtggcgggcgcctgtagtcc

SEQ ID NO: 295523 - DNA, 201 bp, Homo sapiens
aggactgtacaaggtttaaccatttccgactaactcttctttttacagaatacactctaggctctgaattccagttttacctacataagattgaggaaatycttgactacttaagaagagcattgaactgaggaaagctaagaggaagattcaatattaactagcttgaagcctgacctagccagaagaagtgcctgtccg

SEQ ID NO: 295524 - DNA, 201 bp, Homo sapiens
ccatggatcctgcgagggcaattggctgattggcttaggtgtgcccaagagccctgcaggtgtcagaacaaatccatgtagaaatgcagacgcccacaccrgcttgaatggcataaaggcacacattggaatgtggctcatgagctgggacccaggatcaaccactggtttaaggagaggaccgtgaaatgtccaaacatg

SEQ ID NO: 295525 - DNA, 201 bp, Homo sapiens
ctactaggggtggagcacactgaagagatataagcaagactcatggataataaccaagatggagtcactctggccaatcccaggcatatacagatgcaacmctcctagtagggaattttaccctcccatttgagcaaagcccacggaagacttcccggcttctgccacataaaagacacagaacacagaactctacttcta

SEQ ID NO: 295526 - DNA, 201 bp, Homo sapiens
agttgacatgacgtattaaagatttgttaatttttggttttgcaaggttcttttatttgagacgaagtcgtgccctgtagcccaggctggagtgcggtggygcgatctcggctcactgcaacctccgcctcccgggttcaatcaattctcctgcctcagcctcctcagtagctgggattacaggcatgtgccaccacgcct

SEQ ID NO: 295527 - DNA, 201 bp, Homo sapiens; identical to SEQ ID NO: 61048

SEQ ID NO: 295528 - DNA, 201 bp, Homo sapiens
ccagaaaatgggatcatgccatctgggttgttccttggcttccaggtgcaagctggcccaggccaatggttggggcgtcatggtgtctcatcgttcggggragactgaagataccttcatcgctgacctggttgtggggctgtgcactgggcaggtaagaatgagcgtctcctcctttcttctctgacctcaacttcctag

SEQ ID NO: 295529 - DNA, 201 bp, Homo sapiens
agcgcacacctgtagtcccagctaatcaagaggctgaggcaggaggatcacttaaacccaagagtttgagaccagcctctaggcaagaccagtatagtgaraccctgtctctaaaaacatgagtcagagacctggtgagcatttcacagcaccctggcccctctggtgctcctcaagaagcaagtcttgggctcatctgtg

SEQ ID NO: 295530 - DNA, 201 bp, Homo sapiens
ttaggaggactttaggaggctgaggtgggcagatcccttgaggccaggagtttgagaccagcctgggcaacatggcaaagcccatctctataaaaaaaaaatataaaaattagccaggcatgatggtgcatgcctatagtcccagctgagtttggaggatcatttgagcccacgaggtggaggttgcagtgagctgagatc

SEQ ID NO: 295531 - DNA, 201 bp, Homo sapiens
agccctgctctgtggcagagctagcctctggctgtattcaaattgacttagtgtgtgtgcaacattgacctttctagagatagaacatgtggccaaattasagaaaagcacatagggctagatcacgcattctcagtggggcacccggaaaactccaaaaaggctgcagggaggggacaatgatgaaatcaggttgtgaaa

SEQ ID NO: 295532 - DNA, 201 bp, Homo sapiens
ttggcagctctagctttgcagtcgtgtaattggcccaagtcattgtttttctcgcctcactttccaccaagtgtctagagtcatgtgagcctcgtgtcatytccggggtggccacaggctagatccccggtggttttgtgctcaaaataaaaagcctcagtgacccatgagaatactccgtgtgcctgtgtatgtctggaa

SEQ ID NO: 295533 - DNA, 201 bp, Homo sapiens
cgcttgaacccaggaggtggagattgcagtgagccaagatcacgccatacactctagcctgggggatagagcgagattctgtctcaaaagaaaaaaaaaaagtaccagaacgtcttcaatgccctgtgtggctcgcattggatttctcttgggcagtgctgctggagtaatccacagggcaccaatgcgagcttgtgaggg

SEQ ID NO: 295534 - DNA, 201 bp, Homo sapiens
caaaagcattagaatttttatattccaagaaatggcaatgctgacattttactttgctcctctgcaacactgacggggagaggagaggaagagaaggggcrgtgggtggagggcacctagcatggtgagttgggatgaggagaactaaatacttttctatatctggcttctcagagaagcacaagtttagagggtttaaag

SEQ ID NO: 295535 - DNA, 201 bp, Homo sapiens
tcgcttgaacccaggaggtggagattgcagtgagccaagatcacgccatacactctagcctgggggatagagcgagattctgtctcaaaagaaaaaaaaaaagtaccagaacgtcttcaatgccctgtgtggctcgcattggatttctcttgggcagtgctgctggagtaatccacagggcaccaatgcgagcttgtgagg

SEQ ID NO: 295536 - DNA, 201 bp, Homo sapiens
tgctttcctgccccctcactgtctctcactcgcagtccttaatcaccggttctcttctgagtctctctcatttttccttcttcatcctctgctgggcaggygtctccagacccattaagtatattaatgagttcctggcaccagccctgtgcactcaggtaactgattgaacagcctttagtctgcagttggcgtttccag

SEQ ID NO: 295537 - DNA, 201 bp, Homo sapiens
aacctcggcctcctgggttcaagcgattctcctacctcagcctcccgagtagctgggattacaggcatgcgccaccacgcccggctaattttgtttttttkttgttgttgttgttgttttagtagaggcggtgtttcaccatgttggccaggctggtcttgagctcccgacctcaggtgatccgcccgcctcggcctccca

SEQ ID NO: 295538 - DNA, 201 bp, Homo sapiens
tggcaagtcctccaggcgacctcgcccaagttgggcaagagcggctccccggctggccaccaaaaatcgggcctgatctgatttggtttttttttttttttgagttttgctattgttgcccaggctggagtgcaattgcgcgatctcggatctcggttcaccgcaacctcggcctcctgggttcaagcgattctcctacct

SEQ ID NO: 295539 - DNA, 201 bp, Homo sapiens
ccaccggtagcccccgcctctcgcccgcgctcgcggcccgcgcttctgcctagtaagcggtgactcatttaactccgagaaggcacctcttgaggaacctrcagcagagccgttagatcattggcaagtcctccaggcgacctcgcccaagttgggcaagagcggctccccggctggccaccaaaaatcgggcctgatctg

SEQ ID NO: 295540 - DNA, 201 bp, Homo sapiens
tagtgtgactcacacgatgagcaggatcccctgacttttttttaaccccctagagaaacataccaaactgttagtgagaattgacctctgaagctgtgtgsttgggtaactgcctgcctgttgcagtgatgccttgacaaagctgtgaaagacaccaaattgctcatacagcatgatgggatcagagttgattttctttgc

SEQ ID NO: 295541 - DNA, 201 bp, Homo sapiens
atagtgtgactcacacgatgagcaggatcccctgacttttttttaaccccctagagaaacataccaaactgttagtgagaattgacctctgaagctgtgtscttgggtaactgcctgcctgttgcagtgatgccttgacaaagctgtgaaagacaccaaattgctcatacagcatgatgggatcagagttgattttctttg

SEQ ID NO: 295542 - DNA, 201 bp, Homo sapiens
aggtggaggttgcagtgagctgagatcgtgacactgcattcctgccttggcaacagaatgagactctgtcttaaaaaataaaaattaaaaaattaaaaagkaatactgatttttattggattactttgagccagttctcagtacgtcagttttgttactttatagtctcatcaaaaattcattttgatccatcattagacg

SEQ ID NO: 295543 - DNA, 201 bp, Homo sapiens
gaggtggaggttgcagtgagctgagatcgtgacactgcattcctgccttggcaacagaatgagactctgtcttaaaaaataaaaattaaaaaattaaaaaktaatactgatttttattggattactttgagccagttctcagtacgtcagttttgttactttatagtctcatcaaaaattcattttgatccatcattagac

SEQ ID NO: 295544 - DNA, 201 bp, Homo sapiens
ccaacgtggtgaaaccccgtctccactaaaaaatacaaaaaattagccaggcctggtggtgggcgcctgtagtcccagcaggagaatggtcccgggcggascttgcagtaagccaagatcctgccgctgcactgcagcctgggcaatagagtgagactctgtctcaaaaaaaaagaaaaaaaaaaaatttttttgaatatc

SEQ ID NO: 295545 - DNA, 201 bp, Homo sapiens
acagcagtactttccttgctaggctgtgagcattacctgacatagtcacaagtgtttctcctggtgatgatgaatttgcagttatcaaaatagacctggcrtgaactggttgcagtagcgcacacctgtagtcccagctaatcaagaggctgaggcaggaggatcacttaaacccaagagtttgagaccagcctctaggca

SEQ ID NO: 295546 - DNA, 201 bp, Homo sapiens
tgtggcccccactttcctagcatcagatcctctagaaattctctctctgacaccacaccctctccctgccagaaatgcctgcaaagcttgtccgctgtaascaaatggcctttcttttctcctagatcaagactggtgccccttgccgatctgagcgcttggccaagtacaaccagctcctcaggtaaggagggctcctga

SEQ ID NO: 295547 - DNA, 201 bp, Homo sapiens
caacgtggtgaaaccccgtctccactaaaaaatacaaaaaattagccaggcctggtggtgggcgcctgtagtcccagcaggagaatggtcccgggcggagsttgcagtaagccaagatcctgccgctgcactgcagcctgggcaatagagtgagactctgtctcaaaaaaaaagaaaaaaaaaaaatttttttgaatatca

SEQ ID NO: 295548 - DNA, 201 bp, Homo sapiens
ggggattcaccactgggtttgcccccagttgtgcatacacagggcttcacagaggttcttgtgtagctaaggagctcgggtgccagcagcgacattgcatrataagttgttcacagtcaggagcagaggcagtctgtgctccattagacaggtgagggaaccaagccttcagaatcagaacagccacttggtactgagatg

SEQ ID NO: 295549 - DNA, 201 bp, Homo sapiens
ctttgcagtcgtgtaattggcccaagtcattgtttttctcgcctcactttccaccaagtgtctagagtcatgtgagcctcgtgtcatctccggggtggccmcaggctagatccccggtggttttgtgctcaaaataaaaagcctcagtgacccatgagaatactccgtgtgcctgtgtatgtctggaacaatctgggtctg

SEQ ID NO: 295550 - DNA, 201 bp, Homo sapiens
gaagaatgtcatcaaggagaaatatgggaaagatgccaccaatgtgggggatgaaggcgggtttgctcccaacatcctggagaataaagaaggtaaaggcrctagggaaccgcccccccacccagccctgcagcgccagctccctctgttggggggtcgtccacacctgccactgtggaaatctattctttccacctgtag

SEQ ID NO: 295551 - DNA, 201 bp, Homo sapiens
gtgtctgtccgtctgtcctgctggcagggcagcttagccatggacagcagaccctgagcctgagctctcaacggcacagcctggcgggaggatcctgccaycccgggctgcctccactgggctttctcttggaccccgcttctgctctatttaaggcctgtgccttgggacagctgatctcagctgcttactgtaactgta

SEQ ID NO: 295552 - DNA, 201 bp, Homo sapiens
tactgagatgtatcatgcttcctgtgagctgggaatattcattttaggctgtgtgtgtgcacaggatagagactgtgaccacctttctacaggagaggaarctgatggctggctgaataatctgcccgagagcacacagcaaatggtggggcaagaattcagaccaggaaatctgactccagagtctgtgtgtttaaccac

SEQ ID NO: 295553 - DNA, 201 bp, Homo sapiens
catgtacaggtgcaggtgcacagtgcagacagccaggccctgagcaggcttaggtcaggacagagttaggcctagactccccctacccacccactgcagcsccaccagaggcaggagcctgttccacacagtgctgccctcttctggtgagaaagaatgggaccccctttgacagctgatgcatgactttcttagagcttt

SEQ ID NO: 295554 - DNA, 201 bp, Homo sapiens; identical to SEQ ID NO: 61060

SEQ ID NO: 295555 - DNA, 201 bp, Homo sapiens; identical to SEQ ID NO: 61061

SEQ ID NO: 295556 - DNA, 201 bp, Homo sapiens
tttctatatctggcttctcagagaagcacaagtttagagggtttaaagaaggtggacaaactggagagttctgtgttctcaacttcccaggagtggggctrtgtctttgaccacatctaggatgggaaaacttaaaacttgaggtctgacttttcttttttcctccccatctctttacctttctccttcccaagaattgaa

SEQ ID NO: 295557 - DNA, 201 bp, Homo sapiens
tacaaggaaatgaggaaaatcagatgttttagttctcttacagaccagcagtaatgttgaaaaatataaaagtagccgtaacagaaaacgaagtgatcatytcagccctcccttggagtggggggatatattgcggagctgagttttaatggctatcagttcttgatcagaaaagtgaaatcactccaactccttccgtat

SEQ ID NO: 295558 - DNA, 201 bp, Homo sapiens
aagcctgttttaaagttaatgtcagtaatttgatttgattgttccttccaggtgtctcaaaggctgttgagcacatcaataaaactattgcgcctgccctrgttagcaaggtaggacctgcctcctgataactaatgtgtctaatgccaccagagcgtctcccaggcccaggggctttcctgtttatggaagagcttattc

SEQ ID NO: 295559 - DNA, 201 bp, Homo sapiens
gcgggtgccaggcggagcccggccagacgggcgcggctggagggcagcgcgcaggcgcaggcggcgcacgtggccccggacacgcagcgctgcggcggggycagcgccccaaccccggagtggggccgaggcgcgcagcctctcaacgactcgacgccaacggggtctctcggatcgcggcgcgaggcaggaggggcgggg

SEQ ID NO: 295560 - DNA, 201 bp, Homo sapiens
tggttggggcgtcatggtgtctcatcgttcgggggagactgaagataccttcatcgctgacctggttgtggggctgtgcactgggcaggtaagaatgagcrtctcctcctttcttctctgacctcaacttcctaggaagacccaaaaccagtgaggctccatgtctgtccccgttttgctcatgtcccctgagtcagtgct

SEQ ID NO: 295561 - DNA, 201 bp, Homo sapiens
gctagaaaggatccagggaaggtctaaccaatgacctgccctgaatggtgagctgcaggtgtgtcatttagtgtgattttcctgttgactgactcataggrgccctgctctgtggcagagctagcctctggctgtattcaaattgacttagtgtgtgtgcaacattgacctttctagagatagaacatgtggccaaattac

SEQ ID NO: 295562 - DNA, 201 bp, Homo sapiens
cttttgtcccctgctgcaggagtaggctggggcacattgtttcaaggatcagttggggagccgtccccatcctatgcttttgggcattgtgaggccaggcragcagcaagtcaagggggaagcaaggctgggcattgcggtggagcacactgggaggatcacactgatgaagcgtgtccctcctttccttagtggtgtcta

SEQ ID NO: 295563 - DNA, 201 bp, Homo sapiens
ttttgttttagatctatagatacccaggattgtgggtgacttttgtcccctgctgcaggagtaggctggggcacattgtttcaaggatcagttggggagcygtccccatcctatgcttttgggcattgtgaggccaggcgagcagcaagtcaagggggaagcaaggctgggcattgcggtggagcacactgggaggatcac

SEQ ID NO: 295564 - DNA, 201 bp, Homo sapiens
tggcttaaaaccacataagttggctcctaagtcagtgaagtaaggaagtaaggtgataccacaagaccttgtccctaaaggggcccatcactagttgttgrctgacagcttgctgtgaccaaatgcaggatacagtgtgataggatggtatctcttgataaggggagggatagcaggtgtgaatatagcacctttatctct

SEQ ID NO: 295565 - DNA, 201 bp, Homo sapiens
ttttccaaacctgttgtcaccatctcttcccaggcctggagctgctgaagactgctattgggaaagctggctacactgataaggtggtcatcggcatggaygtagcggcctccgagttcttcaggtctgggaagtatgacctggacttcaagtctcccgatgaccccagcaggtacatctcgcctgaccagctggctgacc

SEQ ID NO: 295566 - DNA, 201 bp, Homo sapiens
atgtacaggtgcaggtgcacagtgcagacagccaggccctgagcaggcttaggtcaggacagagttaggcctagactccccctacccacccactgcagcgscaccagaggcaggagcctgttccacacagtgctgccctcttctggtgagaaagaatgggaccccctttgacagctgatgcatgactttcttagagctttc

SEQ ID NO: 295567 - DNA, 201 bp, Homo sapiens
ttctccttcccaagaattgaagaggagctgggcagcaaggctaagtttgccggcaggaacttcagaaaccccttggccaagtaagctgtgggcaggcaagsccttcggtcacctgttggctacacagacccctcccctcgtgtcagctcaggcagctcgaggcccccgaccaacacttgcaggggtccctgctagttagcg

SEQ ID NO: 295568 - DNA, 201 bp, Homo sapiens
ttgaccaggatgactggggagcttggcagaagttcacagccagtgcaggaatccaggtagtgggggatgatctcacagtgaccaacccaaagaggatcgcmaaggccgtgaacgagaagtcctgcaactgcctcctgctcaaagtcaaccagattggctccgtgaccgagtctcttcaggcgtaagtgtcttcccaggcga

SEQ ID NO: 295569 - DNA, 201 bp, Homo sapiens
gaggtacataaacccatgagtacccactgcctctgcacatgcgcagcccccccattgtcagcatccccactagagtggtcaacatgcgtgaacacgttatyatcaccaaaagtctgtagactccaagcctcttgttttcatcttgtctttgcctgatccagtgtagggtggatatgtagggagccagggcagctttcaaga

SEQ ID NO: 295570 - DNA, 201 bp, Homo sapiens
caagatcacgccatacactctagcctgggggatagagcgagattctgtctcaaaagaaaaaaaaaaagtaccagaacgtcttcaatgccctgtgtggctcrcattggatttctcttgggcagtgctgctggagtaatccacagggcaccaatgcgagcttgtgagggatgcatatttgcctgggtcagaatctacatttta

SEQ ID NO: 295571 - DNA, 201 bp, Homo sapiens
tcgcagtggtggtgctgggtgttcagtcccgctttaatgctgtaagaagcactctacacacacgaacatgttaccatttgaccgttgtttaatggcgtacrtggggacttagccggagcaggatgatgctgtgccttgatggtaatgagtgctcagtaagtaagcatttgtggaagattgaacgcatggcccctgaaatgc

SEQ ID NO: 295572 - DNA, 201 bp, Homo sapiens
  misc_feature (1)...(201): n = A,T,C or G
tgtgtctaatgccaccagagcgtctcccaggcccaggggctttcctgtttatggaagagcttattctgagagctgtagaagcctattggattccctgtcangcacgagaacaatccgtgcatgacataattctaacctgcccgctgcctcaccccacttttgggagcagatggaattgcatcagaagaatgagacacttcg

SEQ ID NO: 295573 - DNA, 201 bp, Homo sapiens
gggcaggtaagaatgagcgtctcctcctttcttctctgacctcaacttcctaggaagacccaaaaccagtgaggctccatgtctgtccccgttttgctcaygtcccctgagtcagtgctcttgtttctgaggctgaacagaatgggggcatgagcgccctgcctgtatgttgtggcccccactttcctagcatcagatcct

SEQ ID NO: 295574 - DNA, 201 bp, Homo sapiens; identical to SEQ ID NO: 61051

SEQ ID NO: 295575 - DNA, 201 bp, Homo sapiens
cggacacctccacacataccttgttctctgtcccttcatacccctgcatagtgtgactcacacgatgagcaggatcccctgacttttttttaaccccctaragaaacataccaaactgttagtgagaattgacctctgaagctgtgtgcttgggtaactgcctgcctgttgcagtgatgccttgacaaagctgtgaaagac

SEQ ID NO: 295576 - DNA, 201 bp, Homo sapiens
  misc_feature (1)...(201): n = A,T,C or G
agagcgtctcccaggcccaggggctttcctgtttatggaagagcttattctgagagctgtagaagcctattggattccctgtcatgcacgagaacaatccntgcatgacataattctaacctgcccgctgcctcaccccacttttgggagcagatggaattgcatcagaagaatgagacacttcgagccctgaggtttctt

SEQ ID NO: 295577 - DNA, 201 bp, Homo sapiens
agacccaaaaccagtgaggctccatgtctgtccccgttttgctcatgtcccctgagtcagtgctcttgtttctgaggctgaacagaatgggggcatgagcrccctgcctgtatgttgtggcccccactttcctagcatcagatcctctagaaattctctctctgacaccacaccctctccctgccagaaatgcctgcaaag

SEQ ID NO: 295578 - DNA, 201 bp, Homo sapiens
aagccaagctccctggagccctgttggcagctctagctttgcagtcgtgtaattggcccaagtcattgtttttctcgcctcactttccaccaagtgtctaragtcatgtgagcctcgtgtcatctccggggtggccacaggctagatccccggtggttttgtgctcaaaataaaaagcctcagtgacccatgagaatactc

SEQ ID NO: 295579 - DNA, 201 bp, Homo sapiens
tttcttttttcctccccatctctttacctttctccttcccaagaattgaagaggagctgggcagcaaggctaagtttgccggcaggaacttcagaaacccyttggccaagtaagctgtgggcaggcaagcccttcggtcacctgttggctacacagacccctcccctcgtgtcagctcaggcagctcgaggcccccgacca

SEQ ID NO: 295580 - DNA, 201 bp, Homo sapiens
ctgttggcagctctagctttgcagtcgtgtaattggcccaagtcattgtttttctcgcctcactttccaccaagtgtctagagtcatgtgagcctcgtgtyatctccggggtggccacaggctagatccccggtggttttgtgctcaaaataaaaagcctcagtgacccatgagaatactccgtgtgcctgtgtatgtctg

SEQ ID NO: 295581 - DNA, 201 bp, Homo sapiens
aaaatataaaaattagccaggcatgatggtgcatgcctatagtcccagctgagtttggaggatcatttgagcccacgaggtggaggttgcagtgagctgaratcgtgacactgcattcctgccttggcaacagaatgagactctgtcttaaaaaataaaaattaaaaaattaaaaagtaatactgatttttattggattac

SEQ ID NO: 295582 - DNA, 201 bp, Homo sapiens
ctggtgatggctgcaaggaggggatggggagggagtgtctgaacttccagctcccgtaggggattcaccactgggtttgcccccagttgtgcatacacagrgcttcacagaggttcttgtgtagctaaggagctcgggtgccagcagcgacattgcataataagttgttcacagtcaggagcagaggcagtctgtgctcca

SEQ ID NO: 295583 - DNA, 201 bp, Homo sapiens
aagacccaaaaccagtgaggctccatgtctgtccccgttttgctcatgtcccctgagtcagtgctcttgtttctgaggctgaacagaatgggggcatgagsgccctgcctgtatgttgtggcccccactttcctagcatcagatcctctagaaattctctctctgacaccacaccctctccctgccagaaatgcctgcaaa

SEQ ID NO: 295584 - DNA, 201 bp, Homo sapiens
gaattgattttgatattacacagttccaaagtcagattccatggtaggggagcaaaggctatgcagataagagtggccccaacccctcattctcccctctmcctcgtagaaactgaacgtcacagaacaagagaagattgacaaactgatgatcgagatggatggaacagaaaataaatgtgagtggcctgaggtggcgtc

SEQ ID NO: 295585 - DNA, 201 bp, Homo sapiens
atggtcccgggcggagcttgcagtaagccaagatcctgccgctgcactgcagcctgggcaatagagtgagactctgtctcaaaaaaaaagaaaaaaaaaaaatttttttgaatatcaggtgcaaaaccaggtgacaatagcctgtcagtttggttactcagaagagctttgctccttataatgaattcagcaattcctact

SEQ ID NO: 295586 - DNA, 201 bp, Homo sapiens
catggcaaagcccatctctataaaaaaaaaatataaaaattagccaggcatgatggtgcatgcctatagtcccagctgagtttggaggatcatttgagccyacgaggtggaggttgcagtgagctgagatcgtgacactgcattcctgccttggcaacagaatgagactctgtcttaaaaaataaaaattaaaaaattaaa

SEQ ID NO: 295587 - DNA, 201 bp, Homo sapiens; identical to SEQ ID NO: 61056

SEQ ID NO: 295588 - DNA, 201 bp, Homo sapiens; identical to SEQ ID NO: 61057

SEQ ID NO: 295589 - DNA, 201 bp, Homo sapiens
gtggcccccactttcctagcatcagatcctctagaaattctctctctgacaccacaccctctccctgccagaaatgcctgcaaagcttgtccgctgtaagsaaatggcctttcttttctcctagatcaagactggtgccccttgccgatctgagcgcttggccaagtacaaccagctcctcaggtaaggagggctcctgag

SEQ ID NO: 295590 - DNA, 201 bp, Homo sapiens
tctagagtcatgtgagcctcgtgtcatctccggggtggccacaggctagatccccggtggttttgtgctcaaaataaaaagcctcagtgacccatgagaawactccgtgtgcctgtgtatgtctggaacaatctgggtctgtccttagtgttcaggggcccctggcgaaagggtgtcggcctttgagaaccaaggtttggt

SEQ ID NO: 295591 - DNA, 201 bp, Homo sapiens
  misc_feature (1)...(201): n = A,T,C or G
agtaactcccacgcccttagcgttccagtaatggaatactaggcataaaaaggttaaggccttccgcagctaggccctaactacttaattaggagaattcncactgctttccagcaggcttttccccccaccctagccagctttcctacatccagtatttagtccagtgctgattctctctagtccacgaacctcggaagt

SEQ ID NO: 295592 - DNA, 201 bp, Homo sapiens
acagggccaccctttctcccctggacatggcctggccaagcctggcctgttcacttctgtcctcatggctctggatgcctaaggatttcgggcttcccgcmcaggcactgaccccttcttcccaccaccctatctccaggaaggcctcctgaatgctccccacactgaccccttcttcccaccaccctatctccgggaagg

SEQ ID NO: 295593 - DNA, 201 bp, Homo sapiens
actttgggaggcggaggtgggtggatcacgaggtcaggagtttgagaccagcctgaccaacatggtgaaaccccatctctactaaaaatacaaaaattagstgggtgtgatgacgggcgcctctaatctcagctacttgggaggctgaggcaggagaatcacttgaacccgggaggcagaggttgcagagagctgagatca

SEQ ID NO: 295594 - DNA, 201 bp, Homo sapiens
cttgtcctcatgcatttagcggctttgctcacactggtccctgcttagcttcatctcagttgcctgaggtcatctgggaagaatgtagagattgtcagtgytgcttgcccagggtggagcaggggtgccactgtctgcccccggctctgggcatctagggcaggagcacttgcaccgttagccttcctcaccggcaatcca

SEQ ID NO: 295595 - DNA, 201 bp, Homo sapiens
ggccatgaagcagaggacagttagggaccctgagcacgcggtggtcaccccggtgctcacccctccctgtgtgtccgaccttggccctgctaagatcctgbgttttgaattctggcaagggttggatgaaagggcagggctccagaaaccagctcagacgtttgcttgggacctgcatgatgagtgggaatcggagggcac

SEQ ID NO: 295596 - DNA, 201 bp, Homo sapiens
ctggggagcagggctccagggatgggcccatgaccagctcctggctatttggggaagaggcagaagggggccaggccagccagtggcctgaagtcataggytatttctgaggcagctgccccctccccatatcccagggtttggcaaggggttcccataagcacctgggcccagggcctggcagcacagccccaggcaggg

SEQ ID NO: 295597 - DNA, 201 bp, Homo sapiens
atcagaagaaaccgcctggggagcagggctccagggatgggcccatgaccagctcctggctatttggggaagaggcagaagggggccaggccagccagtgkcctgaagtcataggctatttctgaggcagctgccccctccccatatcccagggtttggcaaggggttcccataagcacctgggcccagggcctggcagca

SEQ ID NO: 295598 - DNA, 201 bp, Homo sapiens; identical to SEQ ID NO: 61101

SEQ ID NO: 295599 - DNA, 201 bp, Homo sapiens; identical to SEQ ID NO: 61110

SEQ ID NO: 295600 - DNA, 201 bp, Homo sapiens
agttgggcccccccagtgtgcccccatggaggcacaggagtgtgcagagtgaagcccctggaggggcattccctctaagctccagggaagatggaacaggrccaccctttctcccctggacatggcctggccaagcctggcctgttcacttctgtcctcatggctctggatgcctaaggatttcgggcttcccgcacaggc

SEQ ID NO: 295601 - DNA, 201 bp, Homo sapiens
cggtggtgctaggagacaggagaggtgtctccacgggggacacgaggcacgtgcatgtgcgtgtgcagctgtgtggaggcccctcatcactcacagcaccrcccacgttgagcctcctggatgccacccccaagcgtctcccctgactaccacagcggtgccctgggggtcctacttggggagccaaagctgagggcgttg

SEQ ID NO: 295602 - DNA, 201 bp, Homo sapiens
tggccaagcctggcctgttcacttctgtcctcatggctctggatgcctaaggatttcgggcttcccgcacaggcactgaccccttcttcccaccaccctayctccaggaaggcctcctgaatgctccccacactgaccccttcttcccaccaccctatctccgggaaggcctcctgaatgctccccacactgaccccttct

SEQ ID NO: 295603 - DNA, 201 bp, Homo sapiens
caccctggcctcctgagtgaggtcatcagaaggatgatcagaggggggtcgatacacgtgtgctcagtgtcaggcctctgagcccaagcctgcacgtatamatccagatgaagcaagtgaagaatcacaaaagaagtgaaaatggccggttcctgccttaactgatgacattaccttgtgaaattccttctcctggctcag

SEQ ID NO: 295604 - DNA, 201 bp, Homo sapiens
tagaaggagacaatggaagctttggagggggtggagggtaactccaccaggggatgactgccagtgcatcacggacaccgggtgagagggagcctgccccrgtgccaacactcagtgctccgatagcctgcacgtgccacccctcccatgccaggctcacagccagagacaggacagtctccatgcttagcattattgacc

SEQ ID NO: 295605 - DNA, 201 bp, Homo sapiens
gccggagcggggcggtcgcgctgactcagagctcaggaatgcgcgccgcccgcctgcccggcccaagtcacctcctcccggaaggccgccggggtccgccygcggggacacctggggctggggtctccagcgcctcggcccgacggaggacctggtgggagcggacggcagtgtcagcgctgggcggctccgcctctccct

SEQ ID NO: 295606 - DNA, 201 bp, Homo sapiens
cccataccgcagcatctatttctcaagcccaaagggccaccttacccgactggggttggagttcttcgaccagccggcagtccccctggcccgggcatttytgggacaggtaatgtgaacatagcagcgagggccctcctgaagtgcctgtcactgcagttgtccctgaacccctgtccgctgcctgctggattggccctc

SEQ ID NO: 295607 - DNA, 201 bp, Homo sapiens
cacgggctatttttgcggcgcgccgggctaggaatccggggctgggccgcctccgcgggcgactcgggaaactccaggaagaaaagcccggccgccccggsggggcctcgccgcgacccctccccggccccggccccggccccgacacgaccccggccgctctgagcagctccggccccgggtgctgaggactcgccccgc

SEQ ID NO: 295608 - DNA, 201 bp, Homo sapiens
ggagaccttgcctttgccccacttgctcgttatccagcctgggccatgaagcagaggacagttagggaccctgagcacgcggtggtcaccccggtgctcayccctccctgtgtgtccgaccttggccctgctaagatcctgtgttttgaattctggcaagggttggatgaaagggcagggctccagaaaccagctcagacg

SEQ ID NO: 295609 - DNA, 201 bp, Homo sapiens
cgctgcttgggaccgcccaccactccgggcccataccgcagcatctatttctcaagcccaaagggccaccttacccgactggggttggagttcttcgaccrgccggcagtccccctggcccgggcatttctgggacaggtaatgtgaacatagcagcgagggccctcctgaagtgcctgtcactgcagttgtccctgaacc

SEQ ID NO: 295610 - DNA, 201 bp, Homo sapiens
ccagggagcgctgcttgggaccgcccaccactccgggcccataccgcagcatctatttctcaagcccaaagggccaccttacccgactggggttggagttyttcgaccagccggcagtccccctggcccgggcatttctgggacaggtaatgtgaacatagcagcgagggccctcctgaagtgcctgtcactgcagttgtc

SEQ ID NO: 295611 - DNA, 201 bp, Homo sapiens
tccctcaggagaccttgcctttgccccacttgctcgttatccagcctgggccatgaagcagaggacagttagggaccctgagcacgcggtggtcaccccgytgctcacccctccctgtgtgtccgaccttggccctgctaagatcctgtgttttgaattctggcaagggttggatgaaagggcagggctccagaaaccagc

SEQ ID NO: 295612 - DNA, 201 bp, Homo sapiens
aacctggctcagctcccagaaaccaagggctctgtgaaagaccgcactgagagctctgtcaggtttagcgtctaacggagctgaaaagccagaatcgttckcattcgtaatttgagaacggaaagggtttaactttaaggactggttttgcctaatagatctggcacttactcagatacttctggagacaaagacttgaga

SEQ ID NO: 295613 - DNA, 201 bp, Homo sapiens
caacctggctcagctcccagaaaccaagggctctgtgaaagaccgcactgagagctctgtcaggtttagcgtctaacggagctgaaaagccagaatcgttmtcattcgtaatttgagaacggaaagggtttaactttaaggactggttttgcctaatagatctggcacttactcagatacttctggagacaaagacttgag

SEQ ID NO: 295614 - DNA, 201 bp, Homo sapiens
gcgagactccgtctcaaaaataaaaaaaaaatacaatgggcatttgtgatacaacaaaacagcacgtgtggcaggtgcgtcgtaggaacagggcaagggcscagcatggcatcagggaccacaatacgtttgtctctattcagcatccttgtcaggccacagtcatgcccacttgagcccattggtggacaagatgatgtc

SEQ ID NO: 295615 - DNA, 201 bp, Homo sapiens; identical to SEQ ID NO: 61097

SEQ ID NO: 295616 - DNA, 201 bp, Homo sapiens
aatgctccccacactgaccccttcttcccaccaccctatctccgggaaggcctcctgaatgctccccacgctgaccccttcttcccaccaccctatctccrggaaggcctcctgaatgctcccggcgctgaccccttcttcccaccaccctatctccgggaaggcctcctgaatactcccccggcgagcatctaagctcca

SEQ ID NO: 295617 - DNA, 201 bp, Homo sapiens; identical to SEQ ID NO: 61098

SEQ ID NO: 295618 - DNA, 201 bp, Homo sapiens; identical to SEQ ID NO: 61099

SEQ ID NO: 295619 - DNA, 201 bp, Homo sapiens
acttccaaactgtccgtcccacaggggacggggcttgcgtcttgctgcgagcactggagcccctggaaggtctggagaccatgcgtcagcttcgcagcacyctccggaaaggcaccgccagccgtgtcctcaaggaccgcgagctctgcagtggcccctccaagctgtgccaggccctggccatcaacaagagctttgacc

SEQ ID NO: 295620 - DNA, 201 bp, Homo sapiens
tgagcacgcggtggtcaccccggtgctcacccctccctgtgtgtccgaccttggccctgctaagatcctgtgttttgaattctggcaagggttggatgaargggcagggctccagaaaccagctcagacgtttgcttgggacctgcatgatgagtgggaatcggagggcaccagccctgctgtcccaggctcaggccccca

SEQ ID NO: 295621 - DNA, 201 bp, Homo sapiens
cggatgcttatttattttttttcccattacagttttgccgacggatggggcaaaagaagcagcgaccagctagagcagggcagccacacagctcgtccgaygcagcccaggcacctgcagagcagccacacagctcgtccgatgcagcccaggcaccttgccccagggagcgctgcttgggaccgcccaccactccgggcc

SEQ ID NO: 295622 - DNA, 201 bp, Homo sapiens
atgttcatgaagccggggaccctgtacgtgtacatcatttacggcatgtacttctgcatgaacatctccagccagggtgagcagtgctggggcacgggggsttggagggccggcagagccctgtccgctagcagccaggggaccactaggaggactgaggtggggccagcatttgagcgaggaggtgccacttccaggcca

SEQ ID NO: 295623 - DNA, 201 bp, Homo sapiens
tgttcatgaagccggggaccctgtacgtgtacatcatttacggcatgtacttctgcatgaacatctccagccagggtgagcagtgctggggcacggggggstggagggccggcagagccctgtccgctagcagccaggggaccactaggaggactgaggtggggccagcatttgagcgaggaggtgccacttccaggccag

SEQ ID NO: 295624 - DNA, 201 bp, Homo sapiens
tgccccaagagcaggggtgcagagagtgccttttattcagctggtacaacctggctcagctcccagaaaccaagggctctgtgaaagaccgcactgagagytctgtcaggtttagcgtctaacggagctgaaaagccagaatcgttctcattcgtaatttgagaacggaaagggtttaactttaaggactggttttgccta

SEQ ID NO: 295625 - DNA, 201 bp, Homo sapiens
cgccgcatttgctggctttgtccactagtgctcgcccctggctgctgatgcggagcctcacgtggccgcagcccaagagtagggactggcttggccaccthcaggctaagcttcggactcccaggtggctgggagggccaggggtgcacaggtgcatcagagcaggtgctgccttgctggagggccagggctcttctggcc

SEQ ID NO: 295626 - DNA, 201 bp, Homo sapiens
aataaaacagacgcgggtggatcacttgagctcaggagttcgagaccagccttgccaacacagtgaaacctcatctctactaaagatacaaaaattagcckggtgtggtggcacacacctgtaatcccagctacttgggaggctgaggcaggagaatcacttgaacctgggaggcggaggttgcagtgagccaagatcacg

SEQ ID NO: 295627 - DNA, 201 bp, Homo sapiens
cacggtggtgctaggagacaggagaggtgtctccacgggggacacgaggcacgtgcatgtgcgtgtgcagctgtgtggaggcccctcatcactcacagcaycgcccacgttgagcctcctggatgccacccccaagcgtctcccctgactaccacagcggtgccctgggggtcctacttggggagccaaagctgagggcgt

SEQ ID NO: 295628 - DNA, 201 bp, Homo sapiens
catgagcagctgggagcgccgcgtgttctcgttgtacataatctcctccaggtggtggcggccgcggaagtagtgaaggagcctggaagggatgggtgggygtgagcccaacctgacaccagcccccagaggcctctgctgaagagccactgctgggaatcagctctgagctgcccacaggcctgaacagagctggtggtg

SEQ ID NO: 295629 - DNA, 201 bp, Homo sapiens
aaattagctgggtgtggtagtgggcacctgtaatcccagctactagggaggcggaggcaggagaatcgcttgaacccgggaggcggaggttgcagggagcsaagatcgcgccattgcactccagcctgggtgacagagcgagactccatctcaaaaaaaaaaaaaaaggaaaggaaaagaaagggttggttggagtggagg

SEQ ID NO: 295630 - DNA, 201 bp, Homo sapiens
ctcgcacatatgtggggcagagcagccaccctgcccccagcagcagccgtccatcgtcagacgtgatcatttcctgaggcctcgagtgtgtcagggtgtttgtgcctcataacaacccacaggatggtcacccccgctttgcagatgaagaaaccaaagcaggtggtcagatccagtccttgcacttcctgagcctgacct

SEQ ID NO: 295631 - DNA, 201 bp, Homo sapiens
ttggcaggaagtgatcaaaggggtcatgtttttgtcaggatgtgggacttggatgtgttctgtgtgaaggagccagggcacggggctgtggtgatgagggyggccaggctttgactcatttgcaggcggctctgtgggggctcagtgagacaacgaggggcgtgtgccctgcacccacagggatgtagagggtcctgctcc

SEQ ID NO: 295632 - DNA, 201 bp, Homo sapiens
cactggcagctgctctaagccaactcctagcccccaccacttgaccaacacaaacactgagtgggtgaggcagaaggggagcgctggggcctggctaggcyaaggcttcctgcttcctggctgaatgatcgcacccgaggactggctctctggagcttcctttgctggctttatagctgctgccagtcacaagaccagggg

SEQ ID NO: 295633 - DNA, 201 bp, Homo sapiens; identical to SEQ ID NO: 61113

SEQ ID NO: 295634 - DNA, 201 bp, Homo sapiens
gcttgggaccgcccaccactccgggcccataccgcagcatctatttctcaagcccaaagggccaccttacccgactggggttggagttcttcgaccagccrgcagtccccctggcccgggcatttctgggacaggtaatgtgaacatagcagcgagggccctcctgaagtgcctgtcactgcagttgtccctgaacccctg

SEQ ID NO: 295635 - DNA, 201 bp, Homo sapiens; identical to SEQ ID NO: 61116

SEQ ID NO: 295636 - DNA, 201 bp, Homo sapiens; identical to SEQ ID NO: 61117

SEQ ID NO: 295637 - DNA, 201 bp, Homo sapiens
ccaggagccttcgcttgctgtctctgtttctcaaggggcctggcctggtgagggagggggctaggctggaggagggatcccaagggaggtgagggggcttygtcagcctcctcctgccctgcctgtgcagggtgttgcagtcagtccttccactgagtcattgcatgggctctcccaacatccggtgcacactggcagctg

SEQ ID NO: 295638 - DNA, 201 bp, Homo sapiens
atgagaagctgattggagaagaggatgactgcagtgctaagagcagcgtggtcaggttgccaaggatggagcagtgggcacagcagggggacttagggtcrgcggaggagtcggtgaggaaagggaggtttggcaggaagtgatcaaaggggtcatgtttttgtcaggatgtgggacttggatgtgttctgtgtgaaggag

SEQ ID NO: 295639 - DNA, 201 bp, Homo sapiens
gtccggcgacttcctaatggcacagaactccgaggccgcatcgtggagaccgaggcatacctggggccagaggatgaagccgcccactcaaggggtggccrgcagaccccccgcaaccgaggcatgttcatgaagccggggaccctgtacgtgtacatcatttacggcatgtacttctgcatgaacatctccagccagggt

SEQ ID NO: 295640 - DNA, 201 bp, Homo sapiens
gttagggtgagtggacccccatcccttcccgccctgagcagaaactgactgcccacaggtcctagtccggcgacttcctaatggcacagaactccgaggcygcatcgtggagaccgaggcatacctggggccagaggatgaagccgcccactcaaggggtggccggcagaccccccgcaaccgaggcatgttcatgaagcc

SEQ ID NO: 295641 - DNA, 201 bp, Homo sapiens
ccccttcttcccaccaccctatctccgggaaggcctcctgaatgctcccggcgctgaccccttcttcccaccaccctatctccgggaaggcctcctgaatrctcccccggcgagcatctaagctccagtgcccctcctccccagcccgtgatactgaccatggcctttggcaccacagggcttcgtgggctgaggtgaagg

SEQ ID NO: 295642 - DNA, 201 bp, Homo sapiens
ccccacgctgaccccttcttcccaccaccctatctccgggaaggcctcctgaatgctcccggcgctgaccccttcttcccaccaccctatctccgggaagscctcctgaatactcccccggcgagcatctaagctccagtgcccctcctccccagcccgtgatactgaccatggcctttggcaccacagggcttcgtgggc

SEQ ID NO: 295643 - DNA, 201 bp, Homo sapiens
tcctgaatgctccccacgctgaccccttcttcccaccaccctatctccgggaaggcctcctgaatgctcccggcgctgaccccttcttcccaccaccctayctccgggaaggcctcctgaatactcccccggcgagcatctaagctccagtgcccctcctccccagcccgtgatactgaccatggcctttggcaccacagg

SEQ ID NO: 295644 - DNA, 201 bp, Homo sapiens
catggctctggatgcctaaggatttcgggcttcccgcacaggcactgaccccttcttcccaccaccctatctccaggaaggcctcctgaatgctccccacrctgaccccttcttcccaccaccctatctccgggaaggcctcctgaatgctccccacactgaccccttcttcccaccaccctatctccgggaaggcctcct

SEQ ID NO: 295645 - DNA, 201 bp, Homo sapiens
ctcatggctctggatgcctaaggatttcgggcttcccgcacaggcactgaccccttcttcccaccaccctatctccaggaaggcctcctgaatgctccccrcactgaccccttcttcccaccaccctatctccgggaaggcctcctgaatgctccccacactgaccccttcttcccaccaccctatctccgggaaggcctc

SEQ ID NO: 295646 - DNA, 201 bp, Homo sapiens
aagcctggcctgttcacttctgtcctcatggctctggatgcctaaggatttcgggcttcccgcacaggcactgaccccttcttcccaccaccctatctccrggaaggcctcctgaatgctccccacactgaccccttcttcccaccaccctatctccgggaaggcctcctgaatgctccccacactgaccccttcttccca

SEQ ID NO: 295647 - DNA, 201 bp, Homo sapiens; identical to SEQ ID NO: 61105

SEQ ID NO: 295648 - DNA, 201 bp, Homo sapiens
gcggatcacctgaggtcaggagttcgacaccagcctggccaacacggtgaaactctgtctctaccaaaaatacaaaaattagctgggtgtggtagtgggcwcctgtaatcccagctactagggaggcggaggcaggagaatcgcttgaacccgggaggcggaggttgcagggagccaagatcgcgccattgcactccagcc

SEQ ID NO: 295649 - DNA, 201 bp, Homo sapiens
tttgtccactagtgctcgcccctggctgctgatgcggagcctcacgtggccgcagcccaagagtagggactggcttggccacctccaggctaagcttcggrctcccaggtggctgggagggccaggggtgcacaggtgcatcagagcaggtgctgccttgctggagggccagggctcttctggccagggtccaggtcatca

SEQ ID NO: 295650 - DNA, 201 bp, Homo sapiens; identical to SEQ ID NO: 61107

SEQ ID NO: 295651 - DNA, 201 bp, Homo sapiens
tgtctcaccctgtgtcccttggatcagggacagccctctgccctctccataacctcctagtggatgcccttgcagacccctcagccaggcttgggtcatgyactcatccctaaaagggtcactgcagtgagttgccatgaaatcccaggccactctctgggctgaggagggtgtggtctcccccaggaggctctgccaaca

SEQ ID NO: 295652 - DNA, 201 bp, Homo sapiens
tatgtggggcagagcagccaccctgcccccagcagcagccgtccatcgtcagacgtgatcatttcctgaggcctcgagtgtgtcagggtgtttgtgcctcrtaacaacccacaggatggtcacccccgctttgcagatgaagaaaccaaagcaggtggtcagatccagtccttgcacttcctgagcctgaccttaccacac

SEQ ID NO: 295653 - DNA, 201 bp, Homo sapiens
ccatctgctccccaggtcatgcagcctgggcccccatgccgtgcagctcgcacatatgtggggcagagcagccaccctgcccccagcagcagccgtccatygtcagacgtgatcatttcctgaggcctcgagtgtgtcagggtgtttgtgcctcataacaacccacaggatggtcacccccgctttgcagatgaagaaacc

SEQ ID NO: 295654 - DNA, 201 bp, Homo sapiens
tggatgtgttctgtgtgaaggagccagggcacggggctgtggtgatgagggcggccaggctttgactcatttgcaggcggctctgtgggggctcagtgagmcaacgaggggcgtgtgccctgcacccacagggatgtagagggtcctgctcctccctactgaggtgggtcagggtgggcagcaggcaccccacctggtgag

SEQ ID NO: 295655 - DNA, 201 bp, Homo sapiens
ccctggctgctgatgcggagcctcacgtggccgcagcccaagagtagggactggcttggccacctccaggctaagcttcggactcccaggtggctgggagrgccaggggtgcacaggtgcatcagagcaggtgctgccttgctggagggccagggctcttctggccagggtccaggtcatcattgtccccagccaggaatc

SEQ ID NO: 295656 - DNA, 201 bp, Homo sapiens
gggcttctccagcctagcagggccagcccaggccctcgtgccccagatggtcaggaccaggtcacagcttggctatgagcctgtttgtggcttctgtggaytgtggtgaggactgggccaggaaaggctcagggtagcctgggaggaagaagcgcatggcagacagaggtgctggggagggggccacagggcacttcacaa

SEQ ID NO: 295657 - DNA, 201 bp, Homo sapiens
gcatcgtggagaccgaggcatacctggggccagaggatgaagccgcccactcaaggggtggccggcagaccccccgcaaccgaggcatgttcatgaagccrgggaccctgtacgtgtacatcatttacggcatgtacttctgcatgaacatctccagccagggtgagcagtgctggggcacggggggttggagggccggca

SEQ ID NO: 295658 - DNA, 201 bp, Homo sapiens
ccccagtgctctgctgttaactctggggctccgagcagtgacacaactgttggccgttaccaggaccatggtccaggctggggcaccgtggggcagctggrcctactgctcagaaagccggagggtgggagctgagtatgagggtcccttgtggccacctcagcagcccaggtttaggggacttcacgggctctgggattg

SEQ ID NO: 295659 - DNA, 201 bp, Homo sapiens; identical to SEQ ID NO: 61182

SEQ ID NO: 295660 - DNA, 201 bp, Homo sapiens; identical to SEQ ID NO: 61185

SEQ ID NO: 295661 - DNA, 201 bp, Homo sapiens
gtggctgacgtgagtggactggggtggagcccggtgtcccgggtgggcgtggggacccctcctgggcagcagagccttcccgggccagagccaccgccccmcaaagccagttctaccttctccatgctctggagacacggccctcccctgaaccagaagcaggaactccaggggcgctggggcctgggcagggcaggcctc

SEQ ID NO: 295662 - DNA, 201 bp, Homo sapiens
cgagtcccctagtccgtggggtgtgggtggacagccctcctgctactgggactgcttctgagcaggccatcccgagttccctcaggaagccgcaaggtccygactgcagctccgggatgggggagggcacagtgctgggccgtccctgggcgcggggtcctgctgatgcccggtgtgctggcccctccctacagctgttca

SEQ ID NO: 295663 - DNA, 201 bp, Homo sapiens; identical to SEQ ID NO: 61186

SEQ ID NO: 295664 - DNA, 201 bp, Homo sapiens
atgttcttggtgactgtgtggccacgcaccgtcttgggtggtctggcccccacctgtctccctgcgagtcccctagtccgtggggtgtgggtggacagccstcctgctactgggactgcttctgagcaggccatcccgagttccctcaggaagccgcaaggtcccgactgcagctccgggatgggggagggcacagtgctg

SEQ ID NO: 295665 - DNA, 201 bp, Homo sapiens
gcctctgctcatgtgtggggccagcccccacgcgtcccctcgtcagccgcttgctatccttgcagctggcgtgaagttccgtgtcctccggcacgaggccrgcaggcccctccgcctcctgatgcaggtgaggccccttgtggccaggacgcccctacgctgctgcccctgttctgggacggtggggtcagctgggtgtag

SEQ ID NO: 295666 - DNA, 201 bp, Homo sapiens
atttttgtacttttagtagagatggggtttcaccgtgttactcaggctggtctcaaactcttgggctcaagccatgtgcctgcgtcggcctcccaaagtggtgggattacaagtgtgagccaccgggcccagccagcacattctttatgtttttctgcaccatttgagtcagctgcccattttggctctggaattttcagc

SEQ ID NO: 295667 - DNA, 201 bp, Homo sapiens
aaatgaaagtctcttcctgctgccaagctcttatcctttaaatattaaataagctctatttataaagaatgttcttttctcagccgggggtggtggctcaygcctgtaatcccagcactttgggaggccaaggcgggcggatcatgaggtcaggagatcgagaccatcctggctaacacagtgaaatcccgtctctactaa

SEQ ID NO: 295668 - DNA, 201 bp, Homo sapiens
cctgtgccctcaacttgacgccatcctccctctggggacctgtcctcctgcctggtcgctgtggccctgatgggcttggcactgtctcgctcacctgtggycatcccgggcagcccccagcctctgcgatggggtggggcctctggaggggactgtgtcagctgtgggcttccctgcagggctggagccgaatcagggtct

SEQ ID NO: 295669 - DNA, 201 bp, Homo sapiens
ccctcatccactgcacgctgtgtccaccaaggtgattggctctgtccactcatgggatgtgagtgaggcctccccttggcagcaggccaggactgggggggtccctgagtagctgaaacttgtaggtgctccctgggcacagggcttcaggggccaaggcttgtctgccccactgggcaactgtccacccccttagcagga

SEQ ID NO: 295670 - DNA, 201 bp, Homo sapiens
cagtgcgtccacgtgtttggggccgagggctccagtgggtcctgtggccgaggtagtgagaggggaggaagatggtagaggtgggtgcaggcagggggccrcgcggatgccctgtgggcccggccatgtcacccaggcctgcagagagaggcctccagaccagcctcctcagaccccaatcccggagccatctgtgaaggg

SEQ ID NO: 295671 - DNA, 201 bp, Homo sapiens
gaacccgggaggcagagcttgcagtgagccgagatctcaccactgcactccagcctgggcgacaaaacaagactccgtctcagaaaaaaaaaaaaaaaaaagtgttcttttctccttcttgccagtcctgctgtggctgaggccttggcccaggcttggaaggggcctgcgcaatgggcaagtgggggccaaggtgtcact

SEQ ID NO: 295672 - DNA, 201 bp, Homo sapiens
aaatatttaatttaaaaatgaaagtctcttcctgctgccaagctcttatcctttaaatattaaataagctctatttataaagaatgttcttttctcagccrggggtggtggctcatgcctgtaatcccagcactttgggaggccaaggcgggcggatcatgaggtcaggagatcgagaccatcctggctaacacagtgaaa

SEQ ID NO: 295673 - DNA, 201 bp, Homo sapiens
accccaatcccggagccatctgtgaaggggagcccgtgtgctgtccacgctaggacgcggtagaccctggaggagggaaggctggccaaggtgggagcccrtcacgaaagagcctggggagatgcaggtgctgagcctggctgcccccgccccagcgtggcccctgtgtccctgcagcacgtggccgaggagctccagcat

SEQ ID NO: 295674 - DNA, 201 bp, Homo sapiens
gtgcccaccaccacgcccggctaatttctgtatttttagtagagacttggtttcacccccatcgaggctggtcttaagctcctgacctcaagtgatccgcycgcctcggcctcccaaagtgctgggattacaggcgtgagccaccgcgccaggttggtgtttatttttcaaacaaggcgctgggaaacgcaaattctccag

SEQ ID NO: 295675 - DNA, 201 bp, Homo sapiens; identical to SEQ ID NO: 61190

SEQ ID NO: 295676 - DNA, 201 bp, Homo sapiens
ggagggtgtggctgggctgggctgggcggggcggcctggggcaggggtgtggcccctaaatgtccccaacctcagagggacctagagtcctgagcctccaktagcttctctgggcctggcagaggtaagggggaggcaaccctggagtgtctggaggcccatggctggctgaaccctggatgccttttcttccgcgtcccc

SEQ ID NO: 295677 - DNA, 201 bp, Homo sapiens
tcgtgggtggccacggccagcagcacccgggtgcccctcagagaggaaggtacctgcagcctctgctcatgtgtggggccagcccccacgcgtcccctcgycagccgcttgctatccttgcagctggcgtgaagttccgtgtcctccggcacgaggccggcaggcccctccgcctcctgatgcaggtgaggccccttgtgg

SEQ ID NO: 295678 - DNA, 201 bp, Homo sapiens; identical to SEQ ID NO: 61211

SEQ ID NO: 295679 - DNA, 201 bp, Homo sapiens
gccccgaggggagatgcagcttctgcctccccccagcgctcccttctggctgcaggctcacttgcctccttgggaactgggactggcttctcccacaggcragggaatgtctgagacagcactggccctgcctcacaactgcccgcccccaccctctctctgcagacggggttggagctcagaccaccccactgaccgctg

SEQ ID NO: 295680 - DNA, 201 bp, Homo sapiens
caggcggccctgagacccccggccctgagggccccctccccctgcagccacggggcccagtgccaggaagcccggagcatgtgggcgaggacctgacccgrgccctcggtgactacgccagggtggagcagcgcctgggacagttggggcccgcggggggcctggccccgagacccctgcgggagcagctgggcaagatcc

SEQ ID NO: 295681 - DNA, 201 bp, Homo sapiens
tttttggtgccctggactttgctgccaccctggaagtgcacgtggggaggagccgaaggatggggctcggggggcacgttgcagggcagaggcggcggggyggggggagcacccaggctccagtccctggagcctggggagccatggatggagaggagtggggagttagtcagaggcaggcttggcactgactgtggcccc

SEQ ID NO: 295682 - DNA, 201 bp, Homo sapiens
tgtgaaggggagcccgtgtgctgtccacgctaggacgcggtagaccctggaggagggaaggctggccaaggtgggagcccatcacgaaagagcctggggaratgcaggtgctgagcctggctgcccccgccccagcgtggcccctgtgtccctgcagcacgtggccgaggagctccagcatctgctgcagtggctgatggg

SEQ ID NO: 295683 - DNA, 201 bp, Homo sapiens; identical to SEQ ID NO: 61183

SEQ ID NO: 295684 - DNA, 201 bp, Homo sapiens
ggcccaatggcagactccgtgccctgctcagggtggggtccctgctctccccaggaccctgcagcctctgggcccccttcatcgtggcccaggatggggtsggactgctctgcccccaggcgcgtctggccgggccggtcctaaatgctcctctgccacagctccggctcctggtggtcgccgtgcagggcctgatccatc

SEQ ID NO: 295685 - DNA, 201 bp, Homo sapiens
cagcagggcgtgatgggtccctgggctgagctggtgtgaaaggtgggctgtactgggtggtcccctatggtggtcacacagccagacacgctgggcccctygcaggcagaatcactttgtccctctcacgatgtccttggtgcctcacgtcagctggcctccaggcatccacccgccgcctgccctctctgaccactgagg

SEQ ID NO: 295686 - DNA, 201 bp, Homo sapiens
tgggcgacggagggggcggggagagcttcgtgggtggccacggccagcagcacccgggtgcccctcagagaggaaggtacctgcagcctctgctcatgtgwggggccagcccccacgcgtcccctcgtcagccgcttgctatccttgcagctggcgtgaagttccgtgtcctccggcacgaggccggcaggcccctccgcc

SEQ ID NO: 295687 - DNA, 201 bp, Homo sapiens
tgctctgcccccaggcgcgtctggccgggccggtcctaaatgctcctctgccacagctccggctcctggtggtcgccgtgcagggcctgatccatctgctsgtggacctcatcaactccctgccgctgtactcactgggtcttcggctctgccggccctacaggctggcgggtaagtgctgcgtattgggcagctggccct

SEQ ID NO: 295688 - DNA, 201 bp, Homo sapiens
ggctgagctggtgtgaaaggtgggctgtactgggtggtcccctatggtggtcacacagccagacacgctgggcccctcgcaggcagaatcactttgtcccwctcacgatgtccttggtgcctcacgtcagctggcctccaggcatccacccgccgcctgccctctctgaccactgaggaaatgggcatttgaggagttctg

SEQ ID NO: 295689 - DNA, 201 bp, Homo sapiens
ctttgtccctctcacgatgtccttggtgcctcacgtcagctggcctccaggcatccacccgccgcctgccctctctgaccactgaggaaatgggcatttgrggagttctgcagcctgacccagaaggtcccttttcagctagaacccaccgccttgagtgactggatcctccagccccagtgcgggctgcctgcaggggag

SEQ ID NO: 295690 - DNA, 201 bp, Homo sapiens
gttccctcgtccctaagggcgtggtgggcactgggacctccaggcgtcccgctctgttccctcgtccctaaggatgtggtgggcactgggacctccaggcrtcccgctctgttccctcgtccctaaggatgtggtgggcactgcgacctccaggcgtcccgctctgttccctcgtccctaagggcgtggtgggcgctggga

SEQ ID NO: 295691 - DNA, 201 bp, Homo sapiens
ctgaggaaggcgagcggcccagccagccggccagtagtgcccccaccgctagggagtcctcctgccctgtggggccccgccagggaaggcatcagtggagraggagccccagctggctgcatggctccgcaggggcctgtgagaaagggggaggagaggcccagggcctgggaaccgcggtagctcaggtggcttcctact

SEQ ID NO: 295692 - DNA, 201 bp, Homo sapiens; identical to SEQ ID NO: 61210

SEQ ID NO: 295693 - DNA, 201 bp, Homo sapiens; identical to SEQ ID NO: 61184

SEQ ID NO: 295694 - DNA, 201 bp, Homo sapiens
agctgagcacccacaggctgggcctggctgcagtgctctgtgtggcttctgccagcgctgcctgggagcagtcagctgtggggcgggctgtctcctgctgyaggccacgtgggtggcctttcaggaccctctgggcagtgagtgctgcgctctggagtgggcgaggccctatcctggccagtaagacaccctcactgccct

SEQ ID NO: 295695 - DNA, 201 bp, Homo sapiens
ccgtgcgcacgaggtagtttccacagcccagcagcacatcattttacattttcatctttattcttgcttaatacgtgaatcatggtttgtcaaggtttcarttggcgtgaccttgctaatgagattgtacagttctcctcgtgctacacctttaagcacacctctctaatcaggtttcttaaaactaagaagcctggagtt

SEQ ID NO: 295696 - DNA, 201 bp, Homo sapiens
tgtgtggcttctgccagcgctgcctgggagcagtcagctgtggggcgggctgtctcctgctgcaggccacgtgggtggcctttcaggaccctctgggcagkgagtgctgcgctctggagtgggcgaggccctatcctggccagtaagacaccctcactgccctggagcacgcagctgggtgcgtggtggaaggaccccacg

SEQ ID NO: 295697 - DNA, 201 bp, Homo sapiens
tgagcaacgaggcaggtccttcctgcccccagggaggggcttgtgggaggcagggaccttctggggggctgcccgccgtgcgcacgaggtagtttccacarcccagcagcacatcattttacattttcatctttattcttgcttaatacgtgaatcatggtttgtcaaggtttcaattggcgtgaccttgctaatgagatt

SEQ ID NO: 295698 - DNA, 201 bp, Homo sapiens
gccagccggccagtagtgcccccaccgctagggagtcctcctgccctgtggggccccgccagggaaggcatcagtggagaaggagccccagctggctgcayggctccgcaggggcctgtgagaaagggggaggagaggcccagggcctgggaaccgcggtagctcaggtggcttcctactcaacagccaccttggaaggct

SEQ ID NO: 295699 - DNA, 201 bp, Homo sapiens
ggtgagcagaaccacctccagcacctgcttgattcccaggcctcgatcccctctgcatgtgaggctgtggggaggcacctctgacctggtgagagggccgrgtgctccgcctccagctttgctccagagcaaggcccaatggcagactccgtgccctgctcagggtggggtccctgctctccccaggaccctgcagcctct

SEQ ID NO: 295700 - DNA, 201 bp, Homo sapiens
aggcccagggcctgggaaccgcggtagctcaggtggcttcctactcaacagccaccttggaaggctggtgtccctcagcctgagagtgcaggatgcagttyctccacacctccgggacctgtaagcctctctctccccgtttctaggcacccatgtcgttggagaaatatatcctggagagaaaatgctccctgagggagc

SEQ ID NO: 295701 - DNA, 201 bp, Homo sapiens
aggaagccgcaaggtcccgactgcagctccgggatgggggagggcacagtgctgggccgtccctgggcgcggggtcctgctgatgcccggtgtgctggccsctccctacagctgttcatcgggactctgctcttcaccatcctgctcttcctcctgcctaccacagccctgtactacctggtgttcaccctggtgagctga

SEQ ID NO: 295702 - DNA, 201 bp, Homo sapiens
cggtgggggggcagcagcagctctgagccgagcctctcctcttctcttccagcctcccggcatggtgctcaaggccttcttccccacgtgctgcgtctcgrcggacagcgggctgctggtgggacggtgggtgccggagcagagcagcgccgtggtcctggcggtcctgcactttcccttcatccccatccaggtcaagca

SEQ ID NO: 295703 - DNA, 201 bp, Homo sapiens
gcagccagctccaggagttgggcgacggagggggcggggagagcttcgtgggtggccacggccagcagcacccgggtgcccctcagagaggaaggtacctscagcctctgctcatgtgtggggccagcccccacgcgtcccctcgtcagccgcttgctatccttgcagctggcgtgaagttccgtgtcctccggcacgagg

SEQ ID NO: 295704 - DNA, 201 bp, Homo sapiens
atcccctctgcatgtgaggctgtggggaggcacctctgacctggtgagagggccgggtgctccgcctccagctttgctccagagcaaggcccaatggcagrctccgtgccctgctcagggtggggtccctgctctccccaggaccctgcagcctctgggcccccttcatcgtggcccaggatggggtcggactgctctgcc

SEQ ID NO: 295705 - DNA, 201 bp, Homo sapiens
aggacgtggctgtgacagcgtcagggcttgtggtggtcagcgatcccatccatggggctgtccatgcactccagcacacagcccgggaccccgggggccamtgggtgacagtgggcaccttcctgtctccccgagggctggctgtggatgccctcaaccgcctcctggtgacggactacttgcctggggctgtgcacagct

SEQ ID NO: 295706 - DNA, 201 bp, Homo sapiens; identical to SEQ ID NO: 61188

SEQ ID NO: 295707 - DNA, 201 bp, Homo sapiens; identical to SEQ ID NO: 61189

SEQ ID NO: 295708 - DNA, 201 bp, Homo sapiens; identical to SEQ ID NO: 61191

SEQ ID NO: 295709 - DNA, 201 bp, Homo sapiens; identical to SEQ ID NO: 61192

SEQ ID NO: 295710 - DNA, 201 bp, Homo sapiens
tttgccccacagtacgttgagttttctctcactactcgacagagaagagtagcttctgccctcccatctccttcggtagacacaaggcactttttttttttaaggtaaactttgtagatgaagcacaaagaatacacacaaagaaagcgcacagatcgtgagcacgtagctcggtgaatttacccaaagtgagcccaccgc

SEQ ID NO: 295711 - DNA, 201 bp, Homo sapiens
agggcctgatccatctgctcgtggacctcatcaactccctgccgctgtactcactgggtcttcggctctgccggccctacaggctggcgggtaagtgctgygtattgggcagctggccctgggtaggtggaggggaaccacacctgtgggccctgcagaagcaaggacagcatgggccactgtgcctccagcctggaagcc

SEQ ID NO: 295712 - DNA, 201 bp, Homo sapiens
ccaggcatttccgtgtgaggcctcttccagagcccctccaagcttcgggagaggacttacaggtcacaccaccccgacgtgtgcatcctgctctgttcccycgtccctgaggatgtggtgggctctgagacctccaggcatcctggtctgttccctcatccctaagggcgtggtgggctctgagacctccaggcatcccac

SEQ ID NO: 295713 - DNA, 201 bp, Homo sapiens
ggtgtgcgtccctgtggcacggcccctcagagttgggcagccccgaggggagatgcagcttctgcctccccccagcgctcccttctggctgcaggctcacytgcctccttgggaactgggactggcttctcccacaggcaagggaatgtctgagacagcactggccctgcctcacaactgcccgcccccaccctctctctg

SEQ ID NO: 295714 - DNA, 201 bp, Homo sapiens
ttccgtgtgaggcctcttccagagcccctccaagcttcgggagaggacttacaggtcacaccaccccgacgtgtgcatcctgctctgttccctcgtccctraggatgtggtgggctctgagacctccaggcatcctggtctgttccctcatccctaagggcgtggtgggctctgagacctccaggcatcccactctgttcc

SEQ ID NO: 295715 - DNA, 201 bp, Homo sapiens
gctttgatgagggccccgtgcggctgagccactggcagtcggagggcgtggaggccagcatcctcgcggagctggccaggcgagcctcgggacccatttgyctgctgttggccagcctgctgtcgctggtctcagctgtcagtgcctgccggtaggtgtcccgggacaggcaggtggcaaagagtggggtcccatgagtgc

SEQ ID NO: 295716 - DNA, 201 bp, Homo sapiens
gagccaccgtgcctggctgcaggaggctttgatgccggcctggcagccagctccaggagttgggcgacggagggggcggggagagcttcgtgggtggccayggccagcagcacccgggtgcccctcagagaggaaggtacctgcagcctctgctcatgtgtggggccagcccccacgcgtcccctcgtcagccgcttgcta

SEQ ID NO: 295717 - DNA, 201 bp, Homo sapiens
aggctggtcttgaactcctgacctcatgatccgcccacctcccaaaatgctgggattacaggcgtgagccaccgtgcctggctgcaggaggctttgatgcyggcctggcagccagctccaggagttgggcgacggagggggcggggagagcttcgtgggtggccacggccagcagcacccgggtgcccctcagagaggaag

SEQ ID NO: 295718 - DNA, 201 bp, Homo sapiens
gttgaagcccaagggccctgaggggcacgggggtagccccgagctgtggctgagaacagagggcccccttccacaggggacctcatctgcctggcggaggygccccatggggagcagctaggggtcacctgcagttgccccctgccttagacccgggggtgcatactctggaagcctggggtgagaagctaggccagccca

SEQ ID NO: 295719 - DNA, 201 bp, Homo sapiens
caaaatgctgggattacaggcgtgagccaccgtgcctggctgcaggaggctttgatgccggcctggcagccagctccaggagttgggcgacggagggggcrgggagagcttcgtgggtggccacggccagcagcacccgggtgcccctcagagaggaaggtacctgcagcctctgctcatgtgtggggccagcccccacgc

SEQ ID NO: 295720 - DNA, 201 bp, Homo sapiens
aagcccaagggccctgaggggcacgggggtagccccgagctgtggctgagaacagagggcccccttccacaggggacctcatctgcctggcggaggtgccycatggggagcagctaggggtcacctgcagttgccccctgccttagacccgggggtgcatactctggaagcctggggtgagaagctaggccagcccaggag

SEQ ID NO: 295721 - DNA, 201 bp, Homo sapiens
cagaaccgactgagtgagtcctggggtggggtgtgcgtccctgtggcacggcccctcagagttgggcagccccgaggggagatgcagcttctgcctccccscagcgctcccttctggctgcaggctcacttgcctccttgggaactgggactggcttctcccacaggcaagggaatgtctgagacagcactggccctgcct

SEQ ID NO: 295722 - DNA, 201 bp, Homo sapiens
gggagcagctaggggtcacctgcagttgccccctgccttagacccgggggtgcatactctggaagcctggggtgagaagctaggccagcccaggagacccygggcagctttctgggccctgtcggcggggcgaggccctgggcccgtgggagttgctgctggctggcaggcgcttcttggcaccggctctgggagcatgtg

SEQ ID NO: 295723 - DNA, 201 bp, Homo sapiens
tccctgtggcacggcccctcagagttgggcagccccgaggggagatgcagcttctgcctccccccagcgctcccttctggctgcaggctcacttgcctccytgggaactgggactggcttctcccacaggcaagggaatgtctgagacagcactggccctgcctcacaactgcccgcccccaccctctctctgcagacggg

SEQ ID NO: 295724 - DNA, 201 bp, Homo sapiens
cgaggacgccgccttgtcccaacccgacctaacccggcccccgcccgcccgcccgcagggaccacgcgcggggaaacccggagctggcgcggcttcgtccsgggctggcggtgctgggcgcggacgagcgcatcttctcgctgacgcgcaggctggcgcacggcgaggagctgcgggtgagcgcgcgctcccgggaggggc

SEQ ID NO: 295725 - DNA, 201 bp, Homo sapiens; identical to SEQ ID NO: 61269

SEQ ID NO: 295726 - DNA, 201 bp, Homo sapiens
gcaacctggtgcttcccgggtggacacacaggaccactcagtggggcctgtgtgggcgccgagacctgggtgtctgggaagtggggcacacggggcctccsaactatgaataaagctttgaaaggccgttgtcagtgttggcagatgtgccaggagaggagctgttttcgtaggcgtgttttaggaggggtgcgtttatta

SEQ ID NO: 295727 - DNA, 201 bp, Homo sapiens
accgggaccgtctgtgttaccgtcactcccgtccctttcagctgctggagatcgtgggccgggagggggtgtctctgaccgctgtgctgaccacccaccaycactggtgagcgccggcggggcgcggggaggcacgaggacgccgccttgtcccaacccgacctaacccggcccccgcccgcccgcccgcagggaccacgc

SEQ ID NO: 295728 - DNA, 201 bp, Homo sapiens; identical to SEQ ID NO: 61284

SEQ ID NO: 295729 - DNA, 201 bp, Homo sapiens; identical to SEQ ID NO: 61285

SEQ ID NO: 295730 - DNA, 201 bp, Homo sapiens
tgatgagctgggtgatgctgcccaacagatttcagggactcacttgcagatggactttagggttctccatctcctttcttgagagctaccaaaagctgggrtttcagagtattggcttacatgaccaccatgttagtaagagagtgacaggagaaatttattcaaggtggggataatattagattctagaatgttaaacat

SEQ ID NO: 295731 - DNA, 201 bp, Homo sapiens
taggaatatcaggaagttaaaatatctaggtataggagggggtggattacctgtgggtaaaaatagcctggatcatccaggagcagaaataacattgtttytcttttccatctctctggtttagcactcctgtcctcatccctctgagattttgggcacattcaaatctatatcctgggaccctgtaaaggtccatgacat

SEQ ID NO: 295732 - DNA, 201 bp, Homo sapiens
caggaaggcaatctctgttttttaaaaaggcctagaggaggtaccagttggctgagctgaatctgagtgggactggttagtgtttgtcaagggactaaagrcatctggctcagaaagggttaacaaagaagatgattataaaagtctgagcagacaagttggaaaacttcctggtagtggacgaaggcagctgaagcttgt

SEQ ID NO: 295733 - DNA, 201 bp, Homo sapiens
tctctgtaaaatgggtaaccccagggaatcatccttgcacaaggcagaacctctacctagaccaaaattgttcctcctctaactgcagaactaaatgcacyccaggaggagctgaagccctatggtctagttgtgttgggctttccctgcaaccaatttggaaagcaagaaccaggagataacaaagagattcttcctggg

SEQ ID NO: 295734 - DNA, 201 bp, Homo sapiens
agaatctgtctcaaaaaaaaaaaaaaaaaaaaaaagaaaagaaaagaaaagaaaagaaaagaaaagaaaagtcacctgttgaacttttgaataataaagamgactaagccccatttcagaggaacagaaaactctctgaaatgggacctgggcatccctatttttaggaaagggccttcagctgattctgatgtgctgcag

SEQ ID NO: 295735 - DNA, 201 bp, Homo sapiens
tgccaggaattattgttaccagtattatcacttaaaaaaaatcttccagatggattgccacaaagacgagaaaggcaccatctatgactatgaggccatcrcacttaataagaatgaatatgtttccttcaagcagtatgtgggcaagcacatcctcttcgtcaacgtggccacctactgtggtctgacagcgcaatatcc

SEQ ID NO: 295736 - DNA, 201 bp, Homo sapiens
gctgatctggagattaatctgtgagtatctatggggctctaactctgtgtggtgaagaaagttgtgtggaatggcaacttttactaggaccaccctctttkgctcattgacattcattcattaattcattccaggtacacttgatgaatgcccgctacttataaagcaatctaaataataaggatataaagatgaataagg

SEQ ID NO: 295737 - DNA, 201 bp, Homo sapiens
tcaggggcattacaagcagagtttaactttggcctaccgtgatgagcgtctggcagtttccagactctctctccatccctggctgagacttggatggactrtggaggacagaagggatggaggaaaagagacaagtcatgggatagagagaaataaagtgagtcagagagcccaaagtcaaaacatggccatattcctccc

SEQ ID NO: 295738 - DNA, 201 bp, Homo sapiens
gtagtgatgatggaaaccatgtggcccacaaagtctgaaatatttcctatctggccctttacagaaaaaatgtgctaaccccctccccatgccctgcctckgctttttcctgagatttccaggggaatcaatatatacttgagaactaggagcctctcagaagattccagaagtcttcttgataaatacaggacagaagac

SEQ ID NO: 295739 - DNA, 201 bp, Homo sapiens
aaaaacaaaaaaagtaacaaaccaacaggtatgatacagtgtagtaggtaccttttatgaaacactgatttttagacatagagaatgccagagctgaaacmaccctaaagattaccaaagtgaattgttcctaaatgctggactgtgaaccaagaccagtccatgttaagactttatatatcctcaataaattgaagacaa

SEQ ID NO: 295740 - DNA, 201 bp, Homo sapiens
ccactgcactccagcctgggcgacagagtgagaatctgtctcaaaaaaaaaaaaaaaaaaaaaaagaaaagaaaagaaaagaaaagaaaagaaaagaaaagtcacctgttgaacttttgaataataaagaagactaagccccatttcagaggaacagaaaactctctgaaatgggacctgggcatccctatttttaggaaa

SEQ ID NO: 295741 - DNA, 201 bp, Homo sapiens
gccactgcactccagcctgggcgacagagtgagaatctgtctcaaaaaaaaaaaaaaaaaaaaaaagaaaagaaaagaaaagaaaagaaaagaaaagaaaagtcacctgttgaacttttgaataataaagaagactaagccccatttcagaggaacagaaaactctctgaaatgggacctgggcatccctatttttaggaa

SEQ ID NO: 295742 - DNA, 201 bp, Homo sapiens
cgccactgcactccagcctgggcgacagagtgagaatctgtctcaaaaaaaaaaaaaaaaaaaaaaagaaaagaaaagaaaagaaaagaaaagaaaagaaaagtcacctgttgaacttttgaataataaagaagactaagccccatttcagaggaacagaaaactctctgaaatgggacctgggcatccctatttttagga

SEQ ID NO: 295743 - DNA, 201 bp, Homo sapiens
gcgccactgcactccagcctgggcgacagagtgagaatctgtctcaaaaaaaaaaaaaaaaaaaaaaagaaaagaaaagaaaagaaaagaaaagaaaagaaaagtcacctgttgaacttttgaataataaagaagactaagccccatttcagaggaacagaaaactctctgaaatgggacctgggcatccctatttttagg

SEQ ID NO: 295744 - DNA, 201 bp, Homo sapiens
gtggaggtcccctggagacctctctggccacatcagtctctgcttcagagctgggtctgaggctgggacagcgatgggctttagagtaggtggggactggrgtttggaggagaagctgagtggacttgtctcagacacagctcagcaacaaccccttgaagaggaggaaaaaacgaatgtggaagttttaaggatggataa

SEQ ID NO: 295745 - DNA, 201 bp, Homo sapiens
tttggaggagaagctgagtggacttgtctcagacacagctcagcaacaaccccttgaagaggaggaaaaaacgaatgtggaagttttaaggatggataaartcagagagttatcagagaaacataaaacatgaaaaaaaaaatcagagccctaaaacaactggatttggagtcaggcatcttggattctggcctcagttct

SEQ ID NO: 295746 - DNA, 201 bp, Homo sapiens
cgcgccactgcactccagcctgggcgacagagtgagaatctgtctcaaaaaaaaaaaaaaaaaaaaaaagaaaagaaaagaaaagaaaagaaaagaaaagaaaagtcacctgttgaacttttgaataataaagaagactaagccccatttcagaggaacagaaaactctctgaaatgggacctgggcatccctatttttag

SEQ ID NO: 295747 - DNA, 201 bp, Homo sapiens
tggatctgggagacggaggttgcagtgagccgagatcgcgccactgcactccagcctgggcgacagagtgagaatctgtctcaaaaaaaaaaaaaaaaaaraaaagaaaagaaaagaaaagaaaagaaaagaaaagaaaagtcacctgttgaacttttgaataataaagaagactaagccccatttcagaggaacagaaaa

SEQ ID NO: 295748 - DNA, 201 bp, Homo sapiens
atttgacaaaatattagtaattcagtgttggtcccaaaagacaattattgaaatattagtggcccatggaaccctaagacctggaaaaccacattccaatmcaagctatttactttgaagaaaaggaaaccaaaagcataaaaggtaacatgtcttatccatggcagcaaaattttgttatggggctatggggagaaaccg

SEQ ID NO: 295749 - DNA, 201 bp, Homo sapiens
cagctttttgagaaaggggatgtgaatggtgaaaaagaacagaaagtcttcagtttcttgaaggtgagtaaattcctggcataagcctcctcctcttttcyaatattgctaacatagagttggtgtggcagaaatggatccaagggctcatgcccagaggtgggattggtctttgtggagaaaaatctccagatcagcatt

SEQ ID NO: 295750 - DNA, 201 bp, Homo sapiens
ttctctgtaaaatgggtaaccccagggaatcatccttgcacaaggcagaacctctacctagaccaaaattgttcctcctctaactgcagaactaaatgcastccaggaggagctgaagccctatggtctagttgtgttgggctttccctgcaaccaatttggaaagcaagaaccaggagataacaaagagattcttcctgg

SEQ ID NO: 295751 - DNA, 201 bp, Homo sapiens
gtggtaagtgctgacgagacaaaaggaagcagggaagagcatatgagatgcggggccggcgcagggttggattttgggcaggaaggccagcgcaggcctcygtgtcttttgagcccatgtgtgctcacaaggtcaggggcactttgccatccctcaatcctgttttgcagacttccaccctcctccactgccccaggaaga

SEQ ID NO: 295752 - DNA, 201 bp, Homo sapiens
ccgatggccccacgtaagctagcttctccgcggctgcctgtctttgcacaggtgctgttctgtaggaaggagatgagaaaggcctcacccctctgccctgsggtcccctgtacttaaagcatcccagaaagagcgcggtttctcctttcctcagtgctttgcgggtttctgcaacagttttccttcataagctggcatagc

SEQ ID NO: 295753 - DNA, 201 bp, Homo sapiens
ctgcctgtctttgcacaggtgctgttctgtaggaaggagatgagaaaggcctcacccctctgccctggggtcccctgtacttaaagcatcccagaaagagygcggtttctcctttcctcagtgctttgcgggtttctgcaacagttttccttcataagctggcatagcctttgacttggtactccctgtccccccttttgt

SEQ ID NO: 295754 - DNA, 201 bp, Homo sapiens
caaggtggctgggggagcaacaggaccctgctggtgacggagagtgagagtctcccatgtagctgggatgcactggggctgacccaagctcttcttgtgcyaggaggttgcccgggagctggaggagagcaagtaccagtactcagagccacggctctccatctacggccgcagtcctgaggagtggcccaacctggccta

SEQ ID NO: 295755 - DNA, 201 bp, Homo sapiens
ccaggaggttgcccgggagctggaggagagcaagtaccagtactcagagccacggctctccatctacggccgcagtcctgaggagtggcccaacctggccyactggttcatccagcacaaggtctactctcccaacatgcgctggatcatccaggtgccccggatttagtaagtgaggtggcccgctgtctaccctgtgcc

SEQ ID NO: 295756 - DNA, 201 bp, Homo sapiens
cagcaccagtgattaatcatagcaaaattctcctgccacgcacacagcaaagagtctttatcactcaccccaattagcttctgatgtctcccacttttccytgtccttggctcttagaaagaaaagtttcaagatgattcggtcccagtccctgtctctgcaaatgccgccacagcaagattggaagggccccccggcagc

SEQ ID NO: 295757 - DNA, 201 bp, Homo sapiens
tttggtgaggagtgatgaagacattgcttcaggccttgagttttctgggtttctggaggggagcatgcagggagcctggggaactttgctcatgggcatgrtgcaccatgatgctcgtgggcttggctccagctaacctggtgggcagccatctttctgaatttggcccctcacttcttggtgggcacttaggctgatcag

SEQ ID NO: 295758 - DNA, 201 bp, Homo sapiens
cagtctccaaagtagcatagtgagcccaatgtggatgggcagcatgattcttagtcctccctgatctgagggcagaactaaggcatgggaagggcaggggyggttcctcagaggctgtcctcagccaggtgtgcaagtagtggctgtcccatctgggaggctgtgaggatcctgcctagggagagagactgagtgagatgg

SEQ ID NO: 295759 - DNA, 201 bp, Homo sapiens
tctgggcaacaaactccttcttcaaggaatgacaagtggctgaggatagaaaagaggaaggaaaggaggagatgaaggagggagacttccactgagcatcyactctgcttggagtcaggccctttcccaggcataaaccagtttaacccttacttcagccttgggtgttaccacctgatatttactcatgggaaatggagg

SEQ ID NO: 295760 - DNA, 201 bp, Homo sapiens
ctccttcttcaaggaatgacaagtggctgaggatagaaaagaggaaggaaaggaggagatgaaggagggagacttccactgagcatccactctgcttggastcaggccctttcccaggcataaaccagtttaacccttacttcagccttgggtgttaccacctgatatttactcatgggaaatggaggcttgcggttaatt

SEQ ID NO: 295761 - DNA, 201 bp, Homo sapiens
ggtgctgctccctagaatgtaattgttgcttctaaatgaaatggagggaaactggtcaaagctcccgctctgtccatcggcttctttcctgaaaaaaagcytggtccctggactgtcagatgccccagcatcctcctctggggtctgcccatacccaattttgtcttttagtttctcttctcactagaggtgcctttatat

SEQ ID NO: 295762 - DNA, 201 bp, Homo sapiens
gtttcaagcacaaaacagggcggccattcaggcagacactgaactagctgcaggagtttttttttttttttttttttctgtaccccagtggcgcctggagygccagcaagacagaatcattcactcccctggaaagggggctaaagccagggagccaagtggtctggcttggcaggtcccagccccatggagcccagcaaa

SEQ ID NO: 295763 - DNA, 201 bp, Homo sapiens
tagggggagggtcgttggccattgctgaggcttgagtaggaggttttaccctcacagtgtaaacaaagccaccaggaagttcaaactaggtggaacccacygcagctcagcaaagccgctgtggccagactgcctctctagatttcttctctctgggcagggcatctctgaaaaaaaggcagcagccccaatcagggactt

SEQ ID NO: 295764 - DNA, 201 bp, Homo sapiens
gtacctacaattatttatgcatacatagtttatttacttatttttacaaaaatggtagtttacaatatacattatactgcatcttgcattttccacttaasaatacatcttaaagataatgccatatcaatatataaagaacttctttgtccttttaaaaaatatgtacatagtattcctttatgaggatatatcatagct

SEQ ID NO: 295765 - DNA, 201 bp, Homo sapiens
agcctatccccagggttctcctgcagtcttggggttaatgttttctctggacagagatgaccttgatatctatgacccagtggcctgttcttaggcaccayagtcagtccataaacatgggcgcaggtctgctatgagtcaggtctgtgcccgcccctgggtgctgcctacttgatagcactctgtctctctttttttttt

SEQ ID NO: 295766 - DNA, 201 bp, Homo sapiens
gaaaatttcaggccaatatccctgatgaacatcgatgtaaaagtcttcggccgggcgcggtggctcacgcctgtaatcccagcactttgggaggccgaggygggcagatcacgaggtcaggagatcgagaccatcccggctaaaaacggtgaaaccccgtctctactaaaaatacaaaaaattagccgggcgtagtggcgg

SEQ ID NO: 295767 - DNA, 201 bp, Homo sapiens
ccacagaaggcagggaggtgggccggggtgtggtggcgagctgggagagaagctcctgggggaagagtcgggatcaggctttgcttggaggagggatggcyaaagctgggtggagtcacagtggggttgccatctccacaggagctctgtcccagctgggaacctcttggggacttcttctttttggggtcagctttgata

SEQ ID NO: 295768 - DNA, 201 bp, Homo sapiens
tgatgtttgatggttcccccaaggattgattctatgtgtactgtatgcctagcctgtgcagagctgaactgttgaagtcaagacagagatgtgaaagacaktccttgttcttgggagtccaccagggagacagggagtctcatgtgggaattttttttttctttttttttgagatgggtcttgctctgttgctcaggctgg

SEQ ID NO: 295769 - DNA, 201 bp, Homo sapiens
tagttgaaaaatttggctatctaggacagccgcttccctagaatgttttgagtgaaattgagaaacatatgtgctttatgaattgagcatagcacagctaragtgttgctaagtcacttcattttatgaaacttgtgaaaataagaatggggaactttttaaacattcaggatcattgacaaaggagcttcatttgaaata

SEQ ID NO: 295770 - DNA, 201 bp, Homo sapiens
ttccaggtagaggcacgtgatgtgcaaatgtcaggagggagggatggtatgagagagtcgagagagtcagaacagtgtgttgacgtaactgcaagcagtgyggtgtggttggagctcaggcattgggagcggggagcagcgggttgtggggagagtaaggctgcagagatgtggggaggtcctggatcatgcaggggctgt

SEQ ID NO: 295771 - DNA, 201 bp, Homo sapiens
tttctaaaacggcccctgcagatgtccctccttaatctccagatgcagtgaataagatgagttatcactcctgtgatgatgttatggaatatggcacagtwgaccttaagataggggggttattggtaggcctgatttaatcccatgagcccgtaaaaatagagagctttctgagtgtaggaggggagggcagagagattc

SEQ ID NO: 295772 - DNA, 201 bp, Homo sapiens
gtggtaggggaatggaagtggtggcattccaggtagaggcacgtgatgtgcaaatgtcaggagggagggatggtatgagagagtcgagagagtcagaacagtgtgttgacgtaactgcaagcagtgcggtgtggttggagctcaggcattgggagcggggagcagcgggttgtggggagagtaaggctgcagagatgtggg

SEQ ID NO: 295773 - DNA, 201 bp, Homo sapiens
agtgacccctggtcaaagccagcaagcagcctgggactccagccttgtgggcactagacctgaattctgccaacaaccggaatgaacttggaagtgaattmcttcccagaaactccagacaagagtacagtgtggctaacatcttgattttggcctcttgataccctgagcatagagcccagccaagcccacccagacttc

SEQ ID NO: 295774 - DNA, 201 bp, Homo sapiens
tgtggtaggggaatggaagtggtggcattccaggtagaggcacgtgatgtgcaaatgtcaggagggagggatggtatgagagagtcgagagagtcagaacagtgtgttgacgtaactgcaagcagtgcggtgtggttggagctcaggcattgggagcggggagcagcgggttgtggggagagtaaggctgcagagatgtgg

SEQ ID NO: 295775 - DNA, 201 bp, Homo sapiens
gtgtggtaggggaatggaagtggtggcattccaggtagaggcacgtgatgtgcaaatgtcaggagggagggatggtatgagagagtcgagagagtcagaacagtgtgttgacgtaactgcaagcagtgcggtgtggttggagctcaggcattgggagcggggagcagcgggttgtggggagagtaaggctgcagagatgtg

SEQ ID NO: 295776 - DNA, 201 bp, Homo sapiens
tggctgcctgctccaggcagtgctgcatgtgccaactgcaggaaagaggagggaagggtatccaccttggccaagctcacagcacctggcctggctttcgwgtctctgcagcctgaacctagctgggtgcagatgagctccgtgtggagatgcttctgctgtggcctggttctgcagacccaaggccttcctcaccagagg

SEQ ID NO: 295777 - DNA, 201 bp, Homo sapiens
ggtgtggtaggggaatggaagtggtggcattccaggtagaggcacgtgatgtgcaaatgtcaggagggagggatggtatgagagagtcgagagagtcagaacagtgtgttgacgtaactgcaagcagtgcggtgtggttggagctcaggcattgggagcggggagcagcgggttgtggggagagtaaggctgcagagatgt

SEQ ID NO: 295778 - DNA, 201 bp, Homo sapiens
gggtgtggtaggggaatggaagtggtggcattccaggtagaggcacgtgatgtgcaaatgtcaggagggagggatggtatgagagagtcgagagagtcagaacagtgtgttgacgtaactgcaagcagtgcggtgtggttggagctcaggcattgggagcggggagcagcgggttgtggggagagtaaggctgcagagatg

SEQ ID NO: 295779 - DNA, 201 bp, Homo sapiens
cagagggtgtggtaggggaatggaagtggtggcattccaggtagaggcacgtgatgtgcaaatgtcaggagggagggatggtatgagagagtcgagagagtcagaacagtgtgttgacgtaactgcaagcagtgcggtgtggttggagctcaggcattgggagcggggagcagcgggttgtggggagagtaaggctgcaga

SEQ ID NO: 295780 - DNA, 201 bp, Homo sapiens
gcagagggtgtggtaggggaatggaagtggtggcattccaggtagaggcacgtgatgtgcaaatgtcaggagggagggatggtatgagagagtcgagagagtcagaacagtgtgttgacgtaactgcaagcagtgcggtgtggttggagctcaggcattgggagcggggagcagcgggttgtggggagagtaaggctgcag

SEQ ID NO: 295781 - DNA, 201 bp, Homo sapiens
aggcagagggtgtggtaggggaatggaagtggtggcattccaggtagaggcacgtgatgtgcaaatgtcaggagggagggatggtatgagagagtcgagagagtcagaacagtgtgttgacgtaactgcaagcagtgcggtgtggttggagctcaggcattgggagcggggagcagcgggttgtggggagagtaaggctgc

SEQ ID NO: 295782 - DNA, 201 bp, Homo sapiens
tgccaggcagagggtgtggtaggggaatggaagtggtggcattccaggtagaggcacgtgatgtgcaaatgtcaggagggagggatggtatgagagagtcgagagagtcagaacagtgtgttgacgtaactgcaagcagtgcggtgtggttggagctcaggcattgggagcggggagcagcgggttgtggggagagtaagg

SEQ ID NO: 295783 - DNA, 201 bp, Homo sapiens
agttagctatttggtacttagctgtcccattatgaatgtcaatggattagtcttcagtatttttgggggcgaaatcaagctacccctggccagatgttttyccttgaaattgatttgaattttatttgctcgcctattaaaatcctactatccagaaattctgtcatcaataagtggcaacttaaattgtgtaccctggtt

SEQ ID NO: 295784 - DNA, 201 bp, Homo sapiens
accacctgatatttactcatgggaaatggaggcttgcggttaattccctaaacacataaacaagaagtcaaaacacctgtatgaggtcccagagctggccygctactgccccatctcctgactctccactgactttatagagtctgtggatatgactcaacagttcagcagggtctgtagaaagccagaacctcctcattc

SEQ ID NO: 295785 - DNA, 201 bp, Homo sapiens
gtgtcaggctgggcctcagacagcacttgaatcactctaggtggaaacatttgtccgcattgtatatctgttgggatgtgccctcttccttggaaaatagsgcacagcctattaattggtcataaaagttgagcacagcctacttttaaggtaggggatgtattagagtcatcaaagaaagacacagctgttaagatctct

SEQ ID NO: 295786 - DNA, 201 bp, Homo sapiens
atgcgttgattggtgtggtctcccccctcagggccggcagacattccaccgctttgacaagttcaactccaaatacaaccctgtgggggccagtgagctgygtgacctgtatttgaaaactgaaaactatctgggaggagagtactttgctcggatggtcaaggtgagtgaaccctcagtctctctgaggcctctcaggtg

SEQ ID NO: 295787 - DNA, 201 bp, Homo sapiens
ccctccttgtgtccatgtgttctcattgttcagctcccttataagtgagaacatgcggtgtttggttttctcttcctgtgttagtttgctgaggatgatgscttccagctgggcttaatacctaggtgacgggttgataggtgcagcaaaccaccatggcacacgtttacctatgtaacaaacctgcacatcctgcacatg

SEQ ID NO: 295788 - DNA, 201 bp, Homo sapiens
caagctcttcttgtgccaggaggttgcccgggagctggaggagagcaagtaccagtactcagagccacggctctccatctacggccgcagtcctgaggagwggcccaacctggcctactggttcatccagcacaaggtctactctcccaacatgcgctggatcatccaggtgccccggatttagtaagtgaggtggcccgc

SEQ ID NO: 295789 - DNA, 201 bp, Homo sapiens
caagagcccaaacccggacgtctggaccagtgagcagaacccaccctacagctactacctgtactacatgtacgccaacatcatggtgctcaacaacctcygcaggtgcgtgaggcctgccctcgcacatgcttgggttcatgtgttagtacatgcacacatgcacacacatgcacacacacatgcatgtgatccttgtgt

SEQ ID NO: 295790 - DNA, 201 bp, Homo sapiens
cggtaaacaactgacccatccttcctgagctcttctccccaggatttcaacagcaccacagaaatagccattttgctcatggttatttcccaggaccacasgatttgcctaagtcactgggaggctatgtgtctgttctgagccttcccactctcctaaagggcagatgaagatcagagctttgcaccctgtgatgccatt

SEQ ID NO: 295791 - DNA, 201 bp, Homo sapiens
cttcataagctggcatagcctttgacttggtactccctgtccccccttttgtttttgaggcaccatcttgctctgttgcccaggctggggtgcagtggtgmgatcttggttcactgcaacctctgcctcctgggttgaagtgattctcttgcctcagcgtcctgagtagctgggactacaggcacgtgccaccatggctaa

SEQ ID NO: 295792 - DNA, 201 bp, Homo sapiens
tctcaggcagacatgtgtaagaggaaggcatgaataattagaaacttcttaatggtagggccagcaccagtgattaatcatagcaaaattctcctgccacrcacacagcaaagagtctttatcactcaccccaattagcttctgatgtctcccacttttccttgtccttggctcttagaaagaaaagtttcaagatgattc

SEQ ID NO: 295793 - DNA, 201 bp, Homo sapiens
ggaatggaagtggtggcattccaggtagaggcacgtgatgtgcaaatgtcaggagggagggatggtatgagagagtcgagagagtcagaacagtgtgttgrcgtaactgcaagcagtgcggtgtggttggagctcaggcattgggagcggggagcagcgggttgtggggagagtaaggctgcagagatgtggggaggtcct

SEQ ID NO: 295794 - DNA, 201 bp, Homo sapiens
ctggggtgcagtggtgcgatcttggttcactgcaacctctgcctcctgggttgaagtgattctcttgcctcagcgtcctgagtagctgggactacaggcaygtgccaccatggctaattttttatatttttagtagagacaggggttttgccatgttgcctaggctggtctcaaactccagagctcaggtagtgcacccaa

SEQ ID NO: 295795 - DNA, 201 bp, Homo sapiens
ctgcaagcagtgcggtgtggttggagctcaggcattgggagcggggagcagcgggttgtggggagagtaaggctgcagagatgtggggaggtcctggatcmtgcaggggctgtgggtttcccacagaaggcagggaggtgggccggggtgtggtggcgagctgggagagaagctcctgggggaagagtcgggatcaggctt

SEQ ID NO: 295796 - DNA, 201 bp, Homo sapiens
cagtgcggtgtggttggagctcaggcattgggagcggggagcagcgggttgtggggagagtaaggctgcagagatgtggggaggtcctggatcatgcaggkgctgtgggtttcccacagaaggcagggaggtgggccggggtgtggtggcgagctgggagagaagctcctgggggaagagtcgggatcaggctttgcttgg

SEQ ID NO: 295797 - DNA, 201 bp, Homo sapiens
gtgggtcagttggggtgtactccttttctgtgtgtgtggatgggggtgggggttctggtaaagcttatcaggcttcgcagtcacctgtgatgtgggcttcyttctgggaagaaaggaaggagtgggatggggctgtcagcttttcatcctagcctgcccctgtcctctgtccgcctctgtgctgaggcagttcctgctccc

SEQ ID NO: 295798 - DNA, 201 bp, Homo sapiens
gagtggctgtgctgggagtgggagtctgggtgagaggaggtgctagtcactcctgaggaccttctctcttgttttctgggaatcttgtgatgccagtctcsaaagtagcatagtgagcccaatgtggatgggcagcatgattcttagtcctccctgatctgagggcagaactaaggcatgggaagggcaggggcggttcct

SEQ ID NO: 295799 - DNA, 201 bp, Homo sapiens
ccagaaggcagcagatgtgggggcagctgctaaggcctgcagcaccccaagtgggttacttggtccatactaagatatggaattaattattttgttgtggwtgctgttgtttcttgcttttttttttttttttttgagagaaggtcttgctctgtcacccaggctggagtacggtggtgccatcatggctcactgcagcct

SEQ ID NO: 295800 - DNA, 201 bp, Homo sapiens
aacagtgggcaaagactgggaactcggttcctgccaggtggggctggaaaggctggatctagcccccggcagcaccaagcagcagcctcaggtttttttttcggaaatgcaaacacttcaattcacctgctttacctcgcaacagaggtcctcaaaccatgtgtgattaggtacaagcccctaaagtgtatttcccttccg

SEQ ID NO: 295801 - DNA, 201 bp, Homo sapiens
ctagcttcctcactggggcagaagaacattcctaggacaagcctggtaggctgttggcttaggcagcctcccagcatttgggctgtagtgttttttttttgtgtgtgtgtgtgtgtggtttttttttaaactttcttagctgttgctcaccttagatgtcacctgttgcttcttgttggtaggaccagacctcaggcagcc

SEQ ID NO: 295802 - DNA, 201 bp, Homo sapiens
acctgagactggtaatttataaaataatgaggtataattggctcatagttctgcaggctgtacaggaagcatggcagcatctgcttctgaggaagcctcakggaactttgactcatggtgaaggcaaagcaggagcaggcgtcttacatggtgggagcaggagcaagaggcagcgagagtgggtaggggaaggtgctacac

SEQ ID NO: 295803 - DNA, 201 bp, Homo sapiens
gctaccattgactttcttcacagaattagaaaaaaactactttaaatttcatatggaaccaaaaaagagcctgtatagccaagacaattctaagcaagaaraacaaagctggaggcatcacgctacctgacttcaaactatactacaaggctacagtaaacaaaacagcctggtactggtaccaaaacagatatatagacc

SEQ ID NO: 295804 - DNA, 201 bp, Homo sapiens
caagctaccattgactttcttcacagaattagaaaaaaactactttaaatttcatatggaaccaaaaaagagcctgtatagccaagacaattctaagcaaraagaacaaagctggaggcatcacgctacctgacttcaaactatactacaaggctacagtaaacaaaacagcctggtactggtaccaaaacagatatatag

SEQ ID NO: 295805 - DNA, 201 bp, Homo sapiens
cagtgctatccccatcaagctaccattgactttcttcacagaattagaaaaaaactactttaaatttcatatggaaccaaaaaagagcctgtatagccaaracaattctaagcaagaagaacaaagctggaggcatcacgctacctgacttcaaactatactacaaggctacagtaaacaaaacagcctggtactggtacc

SEQ ID NO: 295806 - DNA, 201 bp, Homo sapiens; identical to SEQ ID NO: 61309

SEQ ID NO: 295807 - DNA, 201 bp, Homo sapiens
tataggttcagtgctatccccatcaagctaccattgactttcttcacagaattagaaaaaaactactttaaatttcatatggaaccaaaaaagagcctgtwtagccaagacaattctaagcaagaagaacaaagctggaggcatcacgctacctgacttcaaactatactacaaggctacagtaaacaaaacagcctggta

SEQ ID NO: 295808 - DNA, 201 bp, Homo sapiens
aggaagaatcaatatcatgaaaatggccatactgcccaaagtaatttataggttcagtgctatccccatcaagctaccattgactttcttcacagaattaraaaaaaactactttaaatttcatatggaaccaaaaaagagcctgtatagccaagacaattctaagcaagaagaacaaagctggaggcatcacgctacctg

SEQ ID NO: 295809 - DNA, 201 bp, Homo sapiens
gctgtattcaggagactcatctcaagtgcaaagacagacataggctcaaaataaagggatggaggaatatttaccaagcaaatggaaagaaaaaaaaaaaagcagaagttgcaagtttaacctctgataaaacagactttaaaccaacaaagatcaaaagagacaaggaagggcattacataatggtaaagggatcaatgc

SEQ ID NO: 295810 - DNA, 201 bp, Homo sapiens
tgaggtcttaggtgaacacggggaatgcacttggatcctctggtgaactgaaaacactgacctccaatgaccttcaattattttgttcctaaaataatcamccttgagttctgaagtttggatggggtgcttcctggattgtccagttgttttcctcatttatcttgtgactcatgggggtaaggacaggctgacccccct

SEQ ID NO: 295811 - DNA, 201 bp, Homo sapiens
ctgtttttttttctattttttgtagagatgaggttctgacatattgcaccaggctgatctcgaactcctggcctcaagcgatcctcttcagcctcccaaaytgcttggattataggcatgagccactgcacccggtcttggaatgaattatctaccaactatttaagacactggtagtagttctgcggaagatttttatgg

SEQ ID NO: 295812 - DNA, 201 bp, Homo sapiens
gtgcctacaccaccagggccctgggtttcaagcacaaaacagggcggccattcaggcagacactgaactagctgcaggagtttttttttttttttttttttctgtaccccagtggcgcctggagcgccagcaagacagaatcattcactcccctggaaagggggctaaagccagggagccaagtggtctggcttggcaggt

SEQ ID NO: 295813 - DNA, 201 bp, Homo sapiens
tttcctcatttatcttgtgactcatgggggtaaggacaggctgacccccctgtggtgtgtcattggtaagccagaggacaggaccagaaagcccagaatcygctgagtcatgctgaggtcattgtaccaagctgtgtccagctgagctgagccaggctgaccttcttttgtgcatcccacgtgagcccagcctcatctctg

SEQ ID NO: 295814 - DNA, 201 bp, Homo sapiens
aggaccagaaagcccagaatccgctgagtcatgctgaggtcattgtaccaagctgtgtccagctgagctgagccaggctgaccttcttttgtgcatcccaygtgagcccagcctcatctctgaggagcctgggctttggggatgttttagttttctgctttgctttgtttccccagtgtccagtggtctgtctttctggta

SEQ ID NO: 295815 - DNA, 201 bp, Homo sapiens
agtgctgtggctaacgacatgggctggctggcataatgctcacagaggtccagtggatcaaatatctggtttggcattacttggagatgctcagccagccrtggacagcattccctgccctgaggtcagccgcctcctcaccccagcccgggctgagcgcccagtcggccgcagcagtagctccagagtgtggtctaatgg

SEQ ID NO: 295816 - DNA, 201 bp, Homo sapiens
ctgatgggcccataggtcatttgttaactggggaatggcctgatccaatctgcattttaaaaagatttcctggtgctgtaaggaggtggaatgcgcagcarggctgaaagggagggataccagttccgaagtctggaggagaaatggggggtgggatccagacactggtggggctgcccggatggcccatgaggtgctggg

SEQ ID NO: 295817 - DNA, 201 bp, Homo sapiens
gtggcctggttctgcagacccaaggccttcctcaccagagggggcctctcctaaagtggaacaagagcttacaggagcaggcagccctggggatttagatsagtgcttccagcctgggagcaaggtggctgggggagcaacaggaccctgctggtgacggagagtgagagtctcccatgtagctgggatgcactggggctg

SEQ ID NO: 295818 - DNA, 201 bp, Homo sapiens
ctctcctaaagtggaacaagagcttacaggagcaggcagccctggggatttagatgagtgcttccagcctgggagcaaggtggctgggggagcaacaggaycctgctggtgacggagagtgagagtctcccatgtagctgggatgcactggggctgacccaagctcttcttgtgccaggaggttgcccgggagctggagga

SEQ ID NO: 295819 - DNA, 201 bp, Homo sapiens
ttcaagcaattctttgcctcagcctcccgagtagctgggattacaggcacccgccaccacgtctggccaatttttatatttttagtagagatggggtttcrccatcttggccaggctggtcttgaactcctgacctcgtgatccacctgcctcagcctcccaaaatgctgggattacaggtgtgagccactgcatccagct

SEQ ID NO: 295820 - DNA, 201 bp, Homo sapiens
catggacagaggacccctgggttctgggcatgagtatggggaagaggagcaacttccgaacatgcaggctgtagcttcacccgggccttgaactgcctgcmtctcacagaccactgcattgcattagggcctcctgagctggcctgtggccgtgcctgatggggcattcccctctccagctctgcctgcatcagcccctct

SEQ ID NO: 295821 - DNA, 201 bp, Homo sapiens
cacctgaaccaacatgcatgtccatgtgcccacacacctcaaaacacatagcactttccagcctgctatatgaggcatgtctccacatgatcacacatatscaaacatgcccaccataacacacatgccagtacagacatatgtcatgtacagtatgcaatgcagccacagtccacacgtgtccacacatttatatgtaca

SEQ ID NO: 295822 - DNA, 201 bp, Homo sapiens
aggcctccgtgtcttttgagcccatgtgtgctcacaaggtcaggggcactttgccatccctcaatcctgttttgcagacttccaccctcctccactgcccmaggaagacccctactgcctggatgatgcaccccccaacctggattacttggtccacatgcaggggggcatcctctttgtgtatgataacaagaagatgct

SEQ ID NO: 295823 - DNA, 201 bp, Homo sapiens
ggaccagtgagcagaacccaccctacagctactacctgtactacatgtacgccaacatcatggtgctcaacaacctccgcaggtgcgtgaggcctgccctygcacatgcttgggttcatgtgttagtacatgcacacatgcacacacatgcacacacacatgcatgtgatccttgtgtccgtgtgcacctgaaccaacatg

SEQ ID NO: 295824 - DNA, 201 bp, Homo sapiens
ctgccatccctgatgactggcacagggtttcaacatgaggtctcagtgctggtcaatgaataaatgtagaggcgtgattttagatctctctttgataaccyatgattttacagaagaaaagatcttaggctttgaaggtgtgatgtttgatgatccaggtgccatttagtgaggaaaagttaaacccgcagtgtctgatgt

SEQ ID NO: 295825 - DNA, 201 bp, Homo sapiens
gggtaatttttctgcagaagagacttgcagtgacataatctgatgtctgtttcatgaatgaggaaggtagagtcatcacaaatcagccttgcaaataagcrtgggcttgtggcattttaaaccaaccttgggcccaagagccagtgtaatcatcttttggtgccaaggcaacaggtccagagggacctgaatttggtgccg

SEQ ID NO: 295826 - DNA, 201 bp, Homo sapiens
ggaataataagattaactgagttaataagtatgaagttctttgcagagtatatatatgtatgtatacatatataaaatatatattatatataatatatatwatatataatatatattttatatatatatatatattttatttttaaaattgagacgaggtctcaccctgtctcccaggctggagtgcagtagtacgatcat

SEQ ID NO: 295827 - DNA, 201 bp, Homo sapiens
tctgtccctggtgtgaagctggaggagagactggtggtattccttggggtggggtgagggtgacagtgggggtgagagctagagggggtgaggggtcgggrgggtggttgtattggcagaagactagttaggtggtattcttgttgaactgaggcaatggaagggttagattaaatcagtggtcttcacaggaggtgtaga

SEQ ID NO: 295828 - DNA, 201 bp, Homo sapiens
tggaggagaggagctgacagcacaggatgtctgtccctggtgtgaagctggaggagagactggtggtattccttggggtggggtgagggtgacagtggggktgagagctagagggggtgaggggtcgggggggtggttgtattggcagaagactagttaggtggtattcttgttgaactgaggcaatggaagggttagatt

SEQ ID NO: 295829 - DNA, 201 bp, Homo sapiens
cattgctgggagaggaggacagaggagggatctgttttctggtcccatctgacttgattctgggtgtttgatggggacacagggtgcctgaggaagtgacyggggctggtctctgacagggcagcaggctgttggatccacctgacaagcgagtctttgctgtcccccagtgacatatttaggtcaaagaagctgctgcca

SEQ ID NO: 295830 - DNA, 201 bp, Homo sapiens
ccaagcacagcgaccacatgttttccgacaagagcccaaacccggacgtctggaccagtgagcagaacccaccctacagctactacctgtactacatgtaygccaacatcatggtgctcaacaacctccgcaggtgcgtgaggcctgccctcgcacatgcttgggttcatgtgttagtacatgcacacatgcacacacatg

SEQ ID NO: 295831 - DNA, 201 bp, Homo sapiens
tgccccttttcaaggccactatcaacccccaagatcatcgagagcttcacctcttccttaaatatgtaagtgtgggtggtgccctaggcagggctcatagyggcagaggcaggaatggattcgctgtgagctgggtcaggcttgctcctgcccttcacgatggtatcttaggtcctgccacctgtgttccaggcgtggggt

SEQ ID NO: 295832 - DNA, 201 bp, Homo sapiens
tgtaagtgtgggtggtgccctaggcagggctcatagcggcagaggcaggaatggattcgctgtgagctgggtcaggcttgctcctgcccttcacgatggtrtcttaggtcctgccacctgtgttccaggcgtggggtcaccagccccaagaagctagatttctaaaaagtccccttctcctcaggggcagctctgggagtc

SEQ ID NO: 295833 - DNA, 201 bp, Homo sapiens
tcatagcggcagaggcaggaatggattcgctgtgagctgggtcaggcttgctcctgcccttcacgatggtatcttaggtcctgccacctgtgttccaggcrtggggtcaccagccccaagaagctagatttctaaaaagtccccttctcctcaggggcagctctgggagtcagtgggtgtggggggatgggggtggtggtc

SEQ ID NO: 295834 - DNA, 201 bp, Homo sapiens
agactgggaactcggttcctgccaggtggggctggaaaggctggatctagcccccggcagcaccaagcagcagcctcaggtttttttttcggaaatgcaarcacttcaattcacctgctttacctcgcaacagaggtcctcaaaccatgtgtgattaggtacaagcccctaaagtgtatttcccttccggatccagttgta

SEQ ID NO: 295835 - DNA, 201 bp, Homo sapiens
aatggaagtggtggcattccaggtagaggcacgtgatgtgcaaatgtcaggagggagggatggtatgagagagtcgagagagtcagaacagtgtgttgacrtaactgcaagcagtgcggtgtggttggagctcaggcattgggagcggggagcagcgggttgtggggagagtaaggctgcagagatgtggggaggtcctgg

SEQ ID NO: 295836 - DNA, 201 bp, Homo sapiens
ggatctagcccccggcagcaccaagcagcagcctcaggtttttttttcggaaatgcaaacacttcaattcacctgctttacctcgcaacagaggtcctcamaccatgtgtgattaggtacaagcccctaaagtgtatttcccttccggatccagttgtaggagaaggagaggagcggtctgggagaggcttaaccagggag

SEQ ID NO: 295837 - DNA, 201 bp, Homo sapiens
ggaagggagtagtaggaaggccaaggatgactcccagtttttcagcatgaccagctggattcaggacacaccatttcctgggattccagaatctgggagamaatcaggtttgggctggggtcagagatggagagtccacttttggatatattaaatttgaactgcctttgggttatccagatagagatatcaagaaggcaa

SEQ ID NO: 295838 - DNA, 201 bp, Homo sapiens; identical to SEQ ID NO: 61317

SEQ ID NO: 295839 - DNA, 201 bp, Homo sapiens
ctttacctcgcaacagaggtcctcaaaccatgtgtgattaggtacaagcccctaaagtgtatttcccttccggatccagttgtaggagaaggagaggagcrgtctgggagaggcttaaccagggagggaggcggagggggcgggagccggtcccaccctccggatgcctgggatcgagggggtatcagatggtgatacagg

SEQ ID NO: 295840 - DNA, 201 bp, Homo sapiens
ggtctgggagaggcttaaccagggagggaggcggagggggcgggagccggtcccaccctccggatgcctgggatcgagggggtatcagatggtgatacagrccagtgcctggtgatggatgactttctacagggagaggcacagcggggagcccgagggctggggcacggggaaagaattgagtctgtgtgcccagaaagt

SEQ ID NO: 295841 - DNA, 201 bp, Homo sapiens
acatccagttacttattgagctaattttgaaattggcatgctgggtttggtctggggcattcctaagtagacagctgaccccaagtaccaggtgggcctgrccctcacttcagtgccttctcttccccggtgctggtgactcagggcatcctgcaattcatgcttgttctttctttgctagctgagatgccgcggcagttt

SEQ ID NO: 295842 - DNA, 201 bp, Homo sapiens
ggcttaaccagggagggaggcggagggggcgggagccggtcccaccctccggatgcctgggatcgagggggtatcagatggtgatacaggccagtgcctgstgatggatgactttctacagggagaggcacagcggggagcccgagggctggggcacggggaaagaattgagtctgtgtgcccagaaagtgactggacaag

SEQ ID NO: 295843 - DNA, 201 bp, Homo sapiens
gtggtcactggagccacttccctgcccacgccagcaccctatgccatgcctgagttccagcgggtcaccatcagcggagattactgtgccggggtaaggcrtctgtgagagtgttgaatgtgccttgcatgcaaaggccaggggccccatgggccacagggtcgtgcctccctctggagcctggccctgtccgtggatgtc

SEQ ID NO: 295844 - DNA, 201 bp, Homo sapiens
ggaaagaattgagtctgtgtgcccagaaagtgactggacaagctgagggacatcatcaaatttatgttttagacaaacatattctggctgttgtgtggagwtggcccagaagagaaggtagctggaggtgggggcaggggtgagagtcaggggcctgcctggagacaggaggggagcttgacccagcggaaatagctcaca

SEQ ID NO: 295845 - DNA, 201 bp, Homo sapiens; identical to SEQ ID NO: 61303

SEQ ID NO: 295846 - DNA, 201 bp, Homo sapiens; identical to SEQ ID NO: 61305

SEQ ID NO: 295847 - DNA, 201 bp, Homo sapiens
tgacttgctgtgactgatgtcaaagctgcccacatggctatagaaagtgaatcaaaagtatatagtttcatttgtatttctcttggtccacaggaaaagcmaaagtttctgggacaaaattattataaagaaggacctgaaggaaatgatattcgaaagacaaatgtggctcagatccggatggcattccgatatgagacc

SEQ ID NO: 295848 - DNA, 201 bp, Homo sapiens; identical to SEQ ID NO: 61308

SEQ ID NO: 295849 - DNA, 201 bp, Homo sapiens
gggctggtcacatgtctgcatagcacatctcaaattccaggctccagaaggaaagcaggtgtccaacataaaccatattgtttgtacaagtagtttaggtrcaatgaaccactcttattggtcaaggagtggtgagaaccctcctgaaatctaggttcccagataccaggcaagggccaatcttgcaagcacatctttcca

SEQ ID NO: 295850 - DNA, 201 bp, Homo sapiens
ccctaatgatccgggagaagtatgcgcggctcgcctaccaccgcttcccgcggatcacatcccagtacctgggtcatccgcgggcggatactgcacctccrgaagagggccttccaggtatggagctctggctggaggttgggtcccaagtgtgggcagaccgagagctagtcagggcttttttctggctcggtctatttc

SEQ ID NO: 295851 - DNA, 201 bp, Homo sapiens
cacaacctcacgattggacatgcggaggtgactcaggcccaagtcagggttacagctagcctcccggtaaacaactgacccatccttcctgagctcttctycccaggatttcaacagcaccacagaaatagccattttgctcatggttatttcccaggaccacacgatttgcctaagtcactgggaggctatgtgtctgtt

SEQ ID NO: 295852 - DNA, 201 bp, Homo sapiens
ctgtactacatgtacgccaacatcatggtgctcaacaacctccgcaggtgcgtgaggcctgccctcgcacatgcttgggttcatgtgttagtacatgcacrcatgcacacacatgcacacacacatgcatgtgatccttgtgtccgtgtgcacctgaaccaacatgcatgtccatgtgcccacacacctcaaaacacatag

SEQ ID NO: 295853 - DNA, 201 bp, Homo sapiens; identical to SEQ ID NO: 61316

SEQ ID NO: 295854 - DNA, 201 bp, Homo sapiens
acagcatatttttaatgtgtttattatcataatgaacacagaatttggttcctgccttgtcccttactgttgtatgacaagcattttttgatgctgcaacrtaatatctatgctcctttttccaaaggctgttgttggatgaagggtctgccactttgtctgtaattgactcaaccagtccacactagttgggcacagagt

SEQ ID NO: 295855 - DNA, 201 bp, Homo sapiens
  misc_feature (1)...(201): n = A,T,C or G
acacatgcacacacatgcacacacacatgcatgtgatccttgtgtccgtgtgcacctgaaccaacatgcatgtccatgtgcccacacacctcaaaacacanagcactttccagcctgctatatgaggcatgtctccacatgatcacacatatgcaaacatgcccaccataacacacatgccagtacagacatatgtcatgt

SEQ ID NO: 295856 - DNA, 201 bp, Homo sapiens
  misc_feature (1)...(201): n = A,T,C or G
gtgcacctgaaccaacatgcatgtccatgtgcccacacacctcaaaacacatagcactttccagcctgctatatgaggcatgtctccacatgatcacacanatgcaaacatgcccaccataacacacatgccagtacagacatatgtcatgtacagtatgcaatgcagccacagtccacacgtgtccacacatttatatgt

SEQ ID NO: 295857 - DNA, 201 bp, Homo sapiens
acacatgccagtacagacatatgtcatgtacagtatgcaatgcagccacagtccacacgtgtccacacatttatatgtacacacaccagggcacactccaygtgtacctgtacatccctgagataatggaagcataggacatgctatcacacatgcacggtcacttactgccacaccaacaatgtccacacgtgcatattt

SEQ ID NO: 295858 - DNA, 201 bp, Homo sapiens
gtttccagggtgcactgggtcagcacagctgaccatgggtggtcattccccccggagctggccctgagctgtggctgcaggccccaggcagagccaactgkggggtgccttcctgattcggaaaccccttctcttacagggagcgcggcctgagcacgttcctgttccggccgcactgtggggaagccggctccatcaccc

SEQ ID NO: 295859 - DNA, 201 bp, Homo sapiens
  misc_feature (1)...(201): n = A,T,C or G
cagggtgcactgggtcagcacagctgaccatgggtggtcattccccccggagctggccctgagctgtggctgcaggccccaggcagagccaactggggggngccttcctgattcggaaaccccttctcttacagggagcgcggcctgagcacgttcctgttccggccgcactgtggggaagccggctccatcacccacctg

SEQ ID NO: 295860 - DNA, 201 bp, Homo sapiens
tgctcctcaagaaggtaaccaggtcactctcgggagcccgtcctgagtgactgccctgccctgggctcctgggaggctcaaccagtgaggccagaaggctrggccctcttctgggctgggatgtctgtccttatcttggttttatttttaattatgaaagtaatataatcaaactcatcacaattttgattttccaaaaac

SEQ ID NO: 295861 - DNA, 201 bp, Homo sapiens
ccccatgggccacagggtcgtgcctccctctggagcctggccctgtccgtggatgtctgggagaaggtgaagaggaggcacaggagacaaggagggccctmgcagaggttgtggggtgtgggtgtggtgtctcggtggctgcctgttccccgtgaggagggtcccggggtgcaggctggcacactgtgtctgtgactcgta

SEQ ID NO: 295862 - DNA, 201 bp, Homo sapiens
ttcaggaacctgagcccatggcttagttctgcttttggggtggggttggtggcccagtgaaggcaggaaggaagccactgttgggggaaaattgtgccatscaggagccctttctttggggttcttgaaccctcaaaggcacaatttagtatctttgccttcctctattttctctttctttgacatttatgagctctgtga

SEQ ID NO: 295863 - DNA, 201 bp, Homo sapiens
ggttttcactggggctggtcacatgtctgcatagcacatctcaaattccaggctccagaaggaaagcaggtgtccaacataaaccatattgtttgtacaartagtttaggtgcaatgaaccactcttattggtcaaggagtggtgagaaccctcctgaaatctaggttcccagataccaggcaagggccaatcttgcaagc

SEQ ID NO: 295864 - DNA, 201 bp, Homo sapiens
atgtttgatgatccaggtgccatttagtgaggaaaagttaaacccgcagtgtctgatgttgttagctttggacatgtgtgaacgattgacatggatatccycccttctaatccacatgctttgggggaggatctaggaagcacttatggaagaatatgccattgcagctcaagtgtggaagctgagcacctgcgacctgtg

SEQ ID NO: 295865 - DNA, 201 bp, Homo sapiens
tccctcaatcctgttttgcagacttccaccctcctccactgccccaggaagacccctactgcctggatgatgcaccccccaacctggattacttggtccayatgcaggggggcatcctctttgtgtatgataacaagaagatgctggagcaccaggagccgcacagcctaccctaccccgacctggagacctacacggtgg

SEQ ID NO: 295866 - DNA, 201 bp, Homo sapiens
ttccccttgcctttcccatccccagcagctgctgcagaccttatctttcctctctgatcaaggaaagcacagccaggaatgaagggctgtctgaggatgactgaggttgtcagggtgacatccttgaggacacagaggccagcaggaattttaagagttctgtggggataagatgtcctgaccaaagatctgcttcagggg

SEQ ID NO: 295867 - DNA, 201 bp, Homo sapiens
atgttagctctctatgccttcattttctcatctgtcaagtgggaataataagattaactgagttaataagtatgaagttctttgcagagtatatatatgtrtgtatacatatataaaatatatattatatataatatatattatatataatatatattttatatatatatatatattttatttttaaaattgagacgaggt

SEQ ID NO: 295868 - DNA, 201 bp, Homo sapiens
cacaacaatgtcaatgtacttaaagccactggaactgtatggttaaaaatggttgaaatggtaaacgttgtgttgtacatgctttattagaacaaaaaaaacttttgttaaacaaaacattgaatgatataatgtggagaaagtgctttacaaaatgtgagtagtgatagggaatgttctattattcagtggtgcagcctc

SEQ ID NO: 295869 - DNA, 201 bp, Homo sapiens
tgggggccgcgggtgccaactctggaaactgcactccaagcgtttcaggaaggaagacgtggtcagcaggctcagatgccaggaagaggtgagcgagggargctgcacggcacccagtggctttggcaactaggaggtcattcaggactttgaggggcaggtgaaggcagagcgaggagggttggagagggagcgtgtgca

SEQ ID NO: 295870 - DNA, 201 bp, Homo sapiens
gtggtcagcaggctcagatgccaggaagaggtgagcgagggaggctgcacggcacccagtggctttggcaactaggaggtcattcaggactttgaggggcrggtgaaggcagagcgaggagggttggagagggagcgtgtgcacgtggtgtgtgtgtgtgtgtgtgtgtgtgtgtgtgtgtgtgtgtaggtgatccaagtg

SEQ ID NO: 295871 - DNA, 201 bp, Homo sapiens
ttttgcagaggccaggcctcgctgtcttgatgtctgctccccagacagttgtgtgttgacaggctgttccccaccagctccctcccactcctctcatcagrgagtggcaggtccttgggtctcagagttaagggagccacagacctcactctgattgcctgttgctagcctgctttcttccttcctgtctgtgtcatgact

SEQ ID NO: 295872 - DNA, 201 bp, Homo sapiens
gaacaagtgtaactaggggaatactaaccagataaacagttccttggaaatttttgcaattagtaagatagaagatgacagagagtaagactataaacagytgcaagcgtgtcaaaacctatctctgcaaaggcttttatgtattttgacagtaaaatgtgcatttctccacagtatgatgatacagtcaatttaactacc

SEQ ID NO: 295873 - DNA, 201 bp, Homo sapiens
accaggagccgcacagcctaccctaccccgacctggagacctacacggtggacatgagccacatcctggctctcatcaccgatggccccacgtaagctagyttctccgcggctgcctgtctttgcacaggtgctgttctgtaggaaggagatgagaaaggcctcacccctctgccctggggtcccctgtacttaaagcatc

SEQ ID NO: 295874 - DNA, 201 bp, Homo sapiens
tcatgcaagaattgacatagaagatgtctttcggtgtggccatacagaaggccgcctcgtaaaggtctagagaggggaacgtgcatggtggctgcagaacratgcgttgattggtgtggtctcccccctcagggccggcagacattccaccgctttgacaagttcaactccaaatacaaccctgtgggggccagtgagctg

SEQ ID NO: 295875 - DNA, 201 bp, Homo sapiens
caagaattgacatagaagatgtctttcggtgtggccatacagaaggccgcctcgtaaaggtctagagaggggaacgtgcatggtggctgcagaacgatgcrttgattggtgtggtctcccccctcagggccggcagacattccaccgctttgacaagttcaactccaaatacaaccctgtgggggccagtgagctgcgtga

SEQ ID NO: 295876 - DNA, 201 bp, Homo sapiens
tagctctctatgccttcattttctcatctgtcaagtgggaataataagattaactgagttaataagtatgaagttctttgcagagtatatatatgtatgtrtacatatataaaatatatattatatataatatatattatatataatatatattttatatatatatatatattttatttttaaaattgagacgaggtctca

SEQ ID NO: 295877 - DNA, 201 bp, Homo sapiens
ctgagttccagcgggtcaccatcagcggagattactgtgccggggtaaggcgtctgtgagagtgttgaatgtgccttgcatgcaaaggccaggggccccaygggccacagggtcgtgcctccctctggagcctggccctgtccgtggatgtctgggagaaggtgaagaggaggcacaggagacaaggagggccctagcaga

SEQ ID NO: 295878 - DNA, 201 bp, Homo sapiens
ccagacttctcacctatagaactgtgagctaataaatagctgttgttttaagccatcaagtttgtggcaatttgttctgcagcaatagaaaacaaatccasggtcatccttgggctccatatagcttttccaatttcctgagatacaagctgtggttaacttccagttcttccaagctcaaggggagtgagccctgaggag

SEQ ID NO: 295879 - DNA, 201 bp, Homo sapiens
cactacttaacgcctcagttggcttcattagtctctttttaacagtagctgtagaaaatatggtgaatctgagaaagcaatgcagcttattgctcttcctrtaaaatttcccctagctttcaaaaatttttttggttatgtgtaatggagaacacttgcagatggtacaaaatttaaaagatacaaaaatggtatcaatta

SEQ ID NO: 295880 - DNA, 201 bp, Homo sapiens
ctgctctctctgtagggacccctgttatagtgcccatcgtgcagcatatttctccagataggctgggacctctggtctcaagtacagggaaggtgtcagcycctcttagttccctccttagatgggggtcccaattccaggtgagccaatgcaggggcagcgtgagcagcagcagtgtgagcctatggaagtggaggatgc

SEQ ID NO: 295881 - DNA, 201 bp, Homo sapiens
ctctgtcttctaaggttctcctagctctcagctaggtcaagaagctctttgagagatgaggttttttgtagttgtttttttttgcctctacactgactggmtcactcttcaaatggcctcaaaatctgtctcaggtcttgaaaatgtcatgggcagataacatgtagccttcgggttaacagggagataccctttctcccc

SEQ ID NO: 295882 - DNA, 201 bp, Homo sapiens
caggtcttgaaaatgtcatgggcagataacatgtagccttcgggttaacagggagataccctttctcccctaaagctgcccattggcctccatgattcttycaccaagtataataatctcttagttcttctgtatgctggttgcatatctaggacaacagacaattgctttgggcttttgatttgtaaggaactgactggg

SEQ ID NO: 295883 - DNA, 201 bp, Homo sapiens
gggactacaggtgcgcaccaccatgcccagctaattttttgtgttttagtagagatggggtttcaccacgttggctaggatggtctcaatctcctgacctkatgatccacctgcctcgggctcccaaagtgctgggattacaggcatgagccaccatgcccggccgatatctttcttgatgagacataatttgattccgtc

SEQ ID NO: 295884 - DNA, 201 bp, Homo sapiens
ggactacaggtgcgcaccaccatgcccagctaattttttgtgttttagtagagatggggtttcaccacgttggctaggatggtctcaatctcctgaccttrtgatccacctgcctcgggctcccaaagtgctgggattacaggcatgagccaccatgcccggccgatatctttcttgatgagacataatttgattccgtcc

SEQ ID NO: 295885 - DNA, 201 bp, Homo sapiens
cttatgatccacctgcctcgggctcccaaagtgctgggattacaggcatgagccaccatgcccggccgatatctttcttgatgagacataatttgattccrtcctctcctgtcttttagagtttgtaaggggtgcttaagtgataaaaggggatgcagtctagtctcgggcaggagaagcgggccctgtatctggttatca

SEQ ID NO: 295886 - DNA, 201 bp, Homo sapiens
ccgatgcaatgggtctcatacctgtaaactgggctccaggaaggcagctttctctaagttggaaaatgaagactcaaggtggagggtgtttcccaaagccsataccacaagatattaataggtgtttttttcctatgacagcagttctaggatggtcaaataagtgcgtcgggttaaacaaagttaagcagctttctttac

SEQ ID NO: 295887 - DNA, 201 bp, Homo sapiens
tctcatacctgtaaactgggctccaggaaggcagctttctctaagttggaaaatgaagactcaaggtggagggtgtttcccaaagccgataccacaagatrttaataggtgtttttttcctatgacagcagttctaggatggtcaaataagtgcgtcgggttaaacaaagttaagcagctttctttactgcaggacttctc

SEQ ID NO: 295888 - DNA, 201 bp, Homo sapiens
agactcaaggtggagggtgtttcccaaagccgataccacaagatattaataggtgtttttttcctatgacagcagttctaggatggtcaaataagtgcgtygggttaaacaaagttaagcagctttctttactgcaggacttctcaggtgttgaatttgctagtagaaactgtgcatgaatacccataagggactacagga

SEQ ID NO: 295889 - DNA, 201 bp, Homo sapiens
agatgttaaacgaaatgtccgagttcaaagagttgaagagtaacccccaccgggacttctataacgtgagaaaggtgcgttaggggcgagtgttcacagcygcctcacccggtccccctcccagcccatgggatgccctgagccagtctgaggcttgtcccctgtgagaacttcagggctccttgctaagggcggccttcg

SEQ ID NO: 295890 - DNA, 201 bp, Homo sapiens
tcagtaagacacaacctcacgattggacatgcggaggtgactcaggcccaagtcagggttacagctagcctcccggtaaacaactgacccatccttcctgrgctcttctccccaggatttcaacagcaccacagaaatagccattttgctcatggttatttcccaggaccacacgatttgcctaagtcactgggaggctat

SEQ ID NO: 295891 - DNA, 201 bp, Homo sapiens
tctgagccttcccactctcctaaagggcagatgaagatcagagctttgcaccctgtgatgccattttaatcaaccctgcttggttttagaggattgctccygtgggtcacttgaggcaggctccaccttccccaggaggagtggcagagtccagccagcgctcggagctggaggcccacgtgggagcagtgagcggctgta

SEQ ID NO: 295892 - DNA, 201 bp, Homo sapiens
tgccatccctgatgactggcacagggtttcaacatgaggtctcagtgctggtcaatgaataaatgtagaggcgtgattttagatctctctttgataacccrtgattttacagaagaaaagatcttaggctttgaaggtgtgatgtttgatgatccaggtgccatttagtgaggaaaagttaaacccgcagtgtctgatgtt

SEQ ID NO: 295893 - DNA, 201 bp, Homo sapiens
gggaagctcattagagattcggtgcccagggttttcactggggctggtcacatgtctgcatagcacatctcaaattccaggctccagaaggaaagcaggtrtccaacataaaccatattgtttgtacaagtagtttaggtgcaatgaaccactcttattggtcaaggagtggtgagaaccctcctgaaatctaggttccca

SEQ ID NO: 295894 - DNA, 201 bp, Homo sapiens
agccaagagtctggccaaggccctaatgatccgggagaagtatgcgcggctcgcctaccaccgcttcccgcggatcacatcccagtacctgggtcatccgygggcggatactgcacctccggaagagggccttccaggtatggagctctggctggaggttgggtcccaagtgtgggcagaccgagagctagtcagggcttt

SEQ ID NO: 295895 - DNA, 201 bp, Homo sapiens
tttgggaaagatatttctctaagcctcactttgtaaaatgtaatctgtaaatggaaatgcaaataatacctatctcccagggctgtcgtgaggattaaacmggagaatgcatgtgaagtacttagttcagttctggcatctagtgagtgttcaataaatggtagctacatttatgctgccgagttcagggaaggggaggtc

SEQ ID NO: 295896 - DNA, 201 bp, Homo sapiens
tgtgaagtacttagttcagttctggcatctagtgagtgttcaataaatggtagctacatttatgctgccgagttcagggaaggggaggtcggagagggctrggtggtttcctcatgaagccttgccatgaagaacctaggagcagtagaggcagtgatgaggacagtaggaaaccccactcctgaaagttggtggtggggg

SEQ ID NO: 295897 - DNA, 201 bp, Homo sapiens
ctgtcaaatgtgtactttacatggacagaggacccctgggttctgggcatgagtatggggaagaggagcaacttccgaacatgcaggctgtagcttcaccygggccttgaactgcctgcatctcacagaccactgcattgcattagggcctcctgagctggcctgtggccgtgcctgatggggcattcccctctccagctc

SEQ ID NO: 295898 - DNA, 201 bp, Homo sapiens
cggatggtcaaggtgagtgaaccctcagtctctctgaggcctctcaggtgcctcccaacatctgccttcagagagtgggggccctgtgtgcccctggcccyttcccctccctctgtgtaccatcagctcagggaagggtgaggtgcccaggtgcccagtgctgtggtctggctgcctgctccaggcagtgctgcatgtgcc

SEQ ID NO: 295899 - DNA, 201 bp, Homo sapiens
ctgggttctgggcatgagtatggggaagaggagcaacttccgaacatgcaggctgtagcttcacccgggccttgaactgcctgcatctcacagaccactgsattgcattagggcctcctgagctggcctgtggccgtgcctgatggggcattcccctctccagctctgcctgcatcagcccctctgtggctcctcacatgt

SEQ ID NO: 295900 - DNA, 201 bp, Homo sapiens
gccctgtgtgcccctggccccttcccctccctctgtgtaccatcagctcagggaagggtgaggtgcccaggtgcccagtgctgtggtctggctgcctgctycaggcagtgctgcatgtgccaactgcaggaaagaggagggaagggtatccaccttggccaagctcacagcacctggcctggctttcgtgtctctgcagcc

SEQ ID NO: 295901 - DNA, 201 bp, Homo sapiens
tttagcatcaatacactccttggccagggacagagtttatcaagagtcaggaaaactaattatgagaataataagaataatatcctataattcattatttktagtgcattactgtttatgaagaattttcctatacacactattgcaaccctcacagcagcgtgttaaggcagggggtgttatcttcagaggagataggct

SEQ ID NO: 295902 - DNA, 201 bp, Homo sapiens
cagtccaggtgcaatctgtttttttcctgggagaagacaccgctgctctttttaatattcctggaatctctgaagtgccgaggaaaatgaagcccatttcrgttaaattttaaaaaattgttgaagtgctagccatgtgccagggactgttctagacactcagcagtgaacagcacaaattaaagtctctgcctgcatgga

SEQ ID NO: 295903 - DNA, 201 bp, Homo sapiens
agacatcatatctgagataaagaagtgacatggtttgacatggtggtaagtgctgacgagacaaaaggaagcagggaagagcatatgagatgcggggccgkcgcagggttggattttgggcaggaaggccagcgcaggcctccgtgtcttttgagcccatgtgtgctcacaaggtcaggggcactttgccatccctcaatc

SEQ ID NO: 295904 - DNA, 201 bp, Homo sapiens
atcatatctgagataaagaagtgacatggtttgacatggtggtaagtgctgacgagacaaaaggaagcagggaagagcatatgagatgcggggccggcgcrgggttggattttgggcaggaaggccagcgcaggcctccgtgtcttttgagcccatgtgtgctcacaaggtcaggggcactttgccatccctcaatcctgt

SEQ ID NO: 295905 - DNA, 201 bp, Homo sapiens
cagcaacaagttaggctcaaggtggaattgtgaggtcctgagaagagcttgctcttctgggacagaactgtatttttcttctaaactgcccatgttctggrgagtcttcccgccttttggcttcagcaggacccttggtcattgttacaacctgtgtcatcttagtggagctgctgctggtttctgtctgaacccgatgca

SEQ ID NO: 295906 - DNA, 201 bp, Homo sapiens
tcaagttcatcagagcgtgttgcatgtaacagtgagataagctgtatcattggctgactgatgctggtgaattcacagctaagcctcccaagcctgctggyttcagctgacaaagggttggaagccaggcgtgaacatgcagctggagctgaagctctgcttggcatctgcagagtgagctttccttgtcaggcctggcct

SEQ ID NO: 295907 - DNA, 201 bp, Homo sapiens
gctgaagctctgcttggcatctgcagagtgagctttccttgtcaggcctggcctggcaggtgtctggagggtctgagaggagagacactctggagggacgrgttggcaggtgggagctgtctgccaaggacatccagaaggcagcagatgtgggggcagctgctaaggcctgcagcaccccaagtgggttacttggtccat

SEQ ID NO: 295908 - DNA, 201 bp, Homo sapiens
taggctcaaggtggaattgtgaggtcctgagaagagcttgctcttctgggacagaactgtatttttcttctaaactgcccatgttctggggagtcttccckccttttggcttcagcaggacccttggtcattgttacaacctgtgtcatcttagtggagctgctgctggtttctgtctgaacccgatgcaatgggtctcat

SEQ ID NO: 295909 - DNA, 201 bp, Homo sapiens
ttctttttttgaaagaaatttgtagaagtaaagttgcttagtcaaatggtatggtgctttatggcatttgcggccttttgcctgggctgttgggttgcatrtcttcttctgagatgcgatgtgaggttttgggatggtgcccttgattggtggccttggaataaggggggaggtgaggatccagtttcgtttcagcctgat

SEQ ID NO: 295910 - DNA, 201 bp, Homo sapiens
tgctaggggaggtggcctgactcagggcctggtgggcgctgtgttccaggtggacacacacatccatgcggccgcctgcatgaaccaaaagcatctgctgygcttcatcaagcacacataccagacggagcctgacaggactgtggcagagaagcggggccggaagatcaccctgcggcaggtgtttgacggcctgcacat

SEQ ID NO: 295911 - DNA, 201 bp, Homo sapiens
ggcctagtgtgttcccctcccctgtagctgcacttctccctgctggacagcagcagggctctgtctcatctccattcttgtctgtctggtccacaaaaccrcttctctctttaaaccaactttaaagaaactgtggtcataggtagatgggaaactcctcttccagagctgctcccaacgagggtggcttgtcgaaaaggg

SEQ ID NO: 295912 - DNA, 201 bp, Homo sapiens
ttgtctgtctggtccacaaaaccacttctctctttaaaccaactttaaagaaactgtggtcataggtagatgggaaactcctcttccagagctgctcccarcgagggtggcttgtcgaaaagggtgcagtattaatccattccacaagtgttatgctggggactgtgaggagcccctgcccggacacatacgtggacaaag

SEQ ID NO: 295913 - DNA, 201 bp, Homo sapiens
gtcataggtagatgggaaactcctcttccagagctgctcccaacgagggtggcttgtcgaaaagggtgcagtattaatccattccacaagtgttatgctgsggactgtgaggagcccctgcccggacacatacgtggacaaagagaagcagcacagcatggtgggtgaggggacagaggcaggaaccaggtgcctgggttc

SEQ ID NO: 295914 - DNA, 201 bp, Homo sapiens
tgggattacaggtgcctgccaccacgcctggctaatttttttgtatttttagtagagacgtggttttgccatgttggccaggatggtctcaaactcctgayctcaggtgatctgcccgcctcagcctcccaaaatgctaggattacaggcgtgagccaatgcgcctggccagagtgtacatattaagtgctatacaagtaa

SEQ ID NO: 295915 - DNA, 201 bp, Homo sapiens
tatgtatgtatacatatataaaatatatattatatataatatatattatatataatatatattttatatatatatatatattttatttttaaaattgagaygaggtctcaccctgtctcccaggctggagtgcagtagtacgatcataactcactgcagcctcaacctccctggctcaagagatcctcctgcctcagcctc

SEQ ID NO: 295916 - DNA, 201 bp, Homo sapiens
aggtgcctgccaccacgcctggctaatttttttgtatttttagtagagacgtggttttgccatgttggccaggatggtctcaaactcctgacctcaggtgrtctgcccgcctcagcctcccaaaatgctaggattacaggcgtgagccaatgcgcctggccagagtgtacatattaagtgctatacaagtaattgcaaaaa

SEQ ID NO: 295917 - DNA, 201 bp, Homo sapiens
agaatggaaatcataacaaacagtctctcagaccacagtgcaatcaaattagaactcaggattaagaaactcactcaaaaccacacaactacatggaaacygaaaaatctgctcctgaatgactactgggtaaataaggaaatgaaggcagaaataaagatgttctttgaaaccagtgagaacaaagacacaacgtaccag

SEQ ID NO: 295918 - DNA, 201 bp, Homo sapiens
atgctacccgtaatcattgttgcttcatgttcttttctggaaaggctcggctgaacttaggtagttgaggttacttatccctgctagaccacaggtttcaytcaagtgcacttgtggatggaaatagcaaggttctaccatcatttgtatctttacgtttccttaccaaggagtttgagaaggcttacaacaaatacattc

SEQ ID NO: 295919 - DNA, 201 bp, Homo sapiens
ccaaggcagacggatcacgaggtcaggcatttgagaccagcctggccaagatggcaaaagcccgtctctaccaaaaatacaaaaattagccgggcgaggtrgtgggtgcctgtagtcccagctacttgggaggctgaggcaggagaatcgcttgaacctgggaggtggaggttgcagtgagccgagatcgcaccactgcac

SEQ ID NO: 295920 - DNA, 201 bp, Homo sapiens
gagaactggtaagatttaatgcatcaactaccattacacagtgtccttgtttctcatcaatgcattttatatagcaattattttatctaatcccatgaaamtcactttattggatgcttttgccatatccttattttctagcatcgtagctattaggtcatctaattattaatctgtttgtgtctttgggtttaaatgtgt

SEQ ID NO: 295921 - DNA, 201 bp, Homo sapiens
gttgctctacagcatttacaagacccagtttaatagtttagtgccttttttgtcactcattatttcttctttgttctctgttaaaataataagtgtatgawccattgcacttgccttagagtcttgaaccagtcttggatttcccgccatctgggttctggctggcttgcaatttctcctttgatgttgtaatactttttc

SEQ ID NO: 295922 - DNA, 201 bp, Homo sapiens
ttcatactgttttttaatgtacgtgtgcagtctttcaggcactttgagttgagttgactagccgggggcaaacattcataagacagtgctctgtgggaaarctcaaaccaacagatgaagtcacttgctggatcttaacctatttgtcagtggaggtctgcctgtgtggtctaaatctatttcaaaaattcaacattatga

SEQ ID NO: 295923 - DNA, 201 bp, Homo sapiens
ctcatgggtgaggctgtttctcttacctcctcctctgaactttgcccttggggtcaccaagagcttttgggaggagaatgggaaaggtatcaaccccagakgatttcttaatatagccatctcttgcaggaggactagacatgctcattctcaaccacatcaccaacacttctttgaatctttttcatgatgatattcacc

SEQ ID NO: 295924 - DNA, 201 bp, Homo sapiens
ctctaagggataaaaatcatgttacagatctattggaagggtttttatttcttggtatacaaaatagtagtatgttttacaactgcttgcctctgaaagcwgttgaaatacagcattttacccacagtgattaggctgtgctctccttaaaggcaggcacattgttcattcatctctgattccctggagctaacaaatttt

SEQ ID NO: 295925 - DNA, 201 bp, Homo sapiens
tttccttcaatagtttaggaatatttctttcaacagtttatcccatcttgataggtagacagcttagatagaggataggtagataagatagatagattagatagatagatagatagatagatagatagatagatagatagataggaaggacagacagacaggcatccttaaaataactatttgtcatttatctgaaattca

SEQ ID NO: 295926 - DNA, 201 bp, Homo sapiens
ctttccttcaatagtttaggaatatttctttcaacagtttatcccatcttgataggtagacagcttagatagaggataggtagataagatagatagattagatagatagatagatagatagatagatagatagatagatagataggaaggacagacagacaggcatccttaaaataactatttgtcatttatctgaaattc

SEQ ID NO: 295927 - DNA, 201 bp, Homo sapiens
actgttcactgtttttctatggaactttaattcaatcagggaatacttgacttgaaacaaatgctagctgaaacagttgtatttcattttgtctttattaytttttaaaactttgttgacaaccccagaaagaagatttgggggatgggattgatctgttctgaccagaatgctgaatcccagtgatttccccagattaaa

SEQ ID NO: 295928 - DNA, 201 bp, Homo sapiens
tctttccttcaatagtttaggaatatttctttcaacagtttatcccatcttgataggtagacagcttagatagaggataggtagataagatagatagattagatagatagatagatagatagatagatagatagatagatagataggaaggacagacagacaggcatccttaaaataactatttgtcatttatctgaaatt

SEQ ID NO: 295929 - DNA, 201 bp, Homo sapiens
tttgttgtaggattttttaaattgcaaaacattggaagtaacctaaatgtctggcagtaggaaaataactagttgtactatatatttatatttatatctgkatctgtatccatagctgtatctatatctctggaaggacattttccaaaatattagcatgattatatctaaattacagaacaatgaatgatttttgttttt

SEQ ID NO: 295930 - DNA, 201 bp, Homo sapiens
ctgcatgtactcactcatatgagggaactaaaaaggtttatctcatgaaggtagagagtagaatgatagtttacagagactgggaagaatgtcagcgtgtkggcaggagggtgaagaggggttggctactgattacaaatatgcagttagaaggaataatttctaatgttcgatagtagagtgactatagttagtaactat

SEQ ID NO: 295931 - DNA, 201 bp, Homo sapiens
atatccagagagggagaaggaattttgctgccaacttgggtatggtcctcacttccttttggggttccccagagatgctccaaggaaagaaagtgattgtyacaggggccagcaaagggatcggaagagagatggcttatcatctggcgaagatgggagcccatgtggtggtgacagcgaggtcaaaagaaactctacaga

SEQ ID NO: 295932 - DNA, 201 bp, Homo sapiens
gaagatggaggcagagactggagttgccagcacaactcagctccaactgccagcagacattagaagctagaagagaaaaaagaaggattccctgctatagsttttggggggagcatggctgtgctgataacttggttttggacttctggattccagttctgtaagagaacacatttctgtagtcttacgctaccaagtttg

SEQ ID NO: 295933 - DNA, 201 bp, Homo sapiens
agtcaggggaagagaagacacagacagagagaagaaaaagccatgtaaagatggaaagtagagattgtgatgtagccacaaggaatgccggcagccactakaagctggaagaggcaaggaagcactctccctcagagtctttggggggaatgcggccctgccaacacattgatttcagacttcttgactccagcactgtga

SEQ ID NO: 295934 - DNA, 201 bp, Homo sapiens
cacacaggctgccagggacgaatgggatcccacccaaagccaatcgctgctctgacagggaaattggctagcactgcctgagactactccagcctcccccrtccctgatgtcacaattcagaggctgctgcctgcttaggaggttgtagaaagctctgtaggttctctctgtgtgtcctacaggagtcttcaggccagctc

SEQ ID NO: 295935 - DNA, 201 bp, Homo sapiens
atactgagtgggagggtgctgggcacatccccaatccatcccagggcattggacaaaatcctcacatcagtcatgatgtaggtggctttaatgatttcagytgattaaataatacattcactctaggcaaaggatgtatttcacctttgacgaatgtaactttctagaatgtacccatgatctaaatgtgctcagaaggac

SEQ ID NO: 295936 - DNA, 201 bp, Homo sapiens
tgaaaggtgggccaatgtttcaatgtatagctgtgcctcaggttattgggggtggggggatcccaaactccagattatgaacgggcctcagaaccagagtsgaaaggggcaatttatcccttgccacagttgttctcatttttctaagaaaaaatgccgctttacccttaaatccaattacctcagaaataatcttcagga

SEQ ID NO: 295937 - DNA, 201 bp, Homo sapiens
ttacagatctattggaagggtttttatttcttggtatacaaaatagtagtatgttttacaactgcttgcctctgaaagctgttgaaatacagcattttacycacagtgattaggctgtgctctccttaaaggcaggcacattgttcattcatctctgattccctggagctaacaaattttgcaaataatcaacacattctt

SEQ ID NO: 295938 - DNA, 201 bp, Homo sapiens
cagtttgtggtaatttgttatgacagccctaggaaactaataaattccctcattttgatgactgtattgtgattatgtaggacagtgtccctctgtgtaaraaatgaacactaagtatttgggggagatgggacatgaggtcagcaatgacctcaattacagctattaccctcaaatggctcagcagaaaaaaaaaatagg

SEQ ID NO: 295939 - DNA, 201 bp, Homo sapiens
cttaagtacttcaagaggaatggtcagggagagagagcataacttcatgtctgagaagtttattctataaacaaacttgaacaagtgcttcccaaatatastcattcattcattcattcaaaaaatatgcatgaaggtcaactctgagtcaggcactatgccagatgccaaggctatggcagggagcaagaaggccaaggc

SEQ ID NO: 295940 - DNA, 201 bp, Homo sapiens
cagtgcgtgcaggggacagtggggtaggagaaagaatggaaagagaatacctaaatagcatttgtgaaacaaaccaaagtagaaatattaatacttgaatwtgactaaaaaaaatcactggagtgggcagagaacatttgaaaacatctggaaaaaagtttatctgacattagtcaaaataggtcatcttaggttcaatat

SEQ ID NO: 295941 - DNA, 201 bp, Homo sapiens
ggaaaaaaatggaaacaataataaaactccaaaaactaaggattttcttttcataattaaatctacctaatgaatttaacctgaactgaagtgaggctacktaaatcctttctttatctcagtatgaactttccaatattttagtgcagaaataatacatgctgtcttacaggctgcctcctccaaccctactggagatgc

SEQ ID NO: 295942 - DNA, 201 bp, Homo sapiens
aagttgcagtgagccgagatcatgccattgcactccagcctgggcaacagagcaagactctgcctcggaaaacacacacacacacacacacacacacacamaagtaagttaaaatttaaatcaggtctgaaggtaggcagtatagggccagtatagtatggcagctccatggtcacccaggttccttccttctatctaaac

SEQ ID NO: 295943 - DNA, 201 bp, Homo sapiens
ctcctctgacttttccaacagagcttaccagtatcagagggacacaattgaagtgtttccttcagagccagtgtttctctttggggtttgtgtgagttcaycagagtcggaagctgaaaggagggtgggaaaggtaaggagagatgaaacaatctcacttctgctggcttgccaaggtttgaaaggaactgcctccctgtc

SEQ ID NO: 295944 - DNA, 201 bp, Homo sapiens
ctggaactcagttctcccagagtcccacccaggagccttttaagaaatcatgaaaactttacaagaaggtaccccagatgtccgagagctcataaacacckcagctgctgactaaatacaacattcagttaaaagatgctcaagtaatctttccctggcagaaatagaaagaagaaaaagatttccccaatagtttagttt

SEQ ID NO: 295945 - DNA, 201 bp, Homo sapiens
caaagagttaattttttccaataagttaaccacctttctcagcatctttattaaataacccatcctttcttcattggtttgacatacaacatattatattygaaacatatagaaattccaattccgataactgcaagagtggcacccgaaagaccatccttccccagattacaactataagcttttgacaaaatatcgacg

SEQ ID NO: 295946 - DNA, 201 bp, Homo sapiens
acccatgctaaaaaacacataagactagaaaaaagtataccctccaggccatcccacatgtgaaacacacacacacacacacacacacacacacacacacaaaagactcattccctctcacattcaaggtccatcacaaaaaacaaagtccttccatccggcagtgcgtgcaggggacagtggggtaggagaaagaatgga

SEQ ID NO: 295947 - DNA, 201 bp, Homo sapiens
ggatcaggctctggagagacatggctagttcagtgactgttccagccttactcaggcccctccccaacacagacccttgctctagccattcaggctacctragttgcctccaaaatgccatgctttctagacttcttgcctgaatacatgcagttacctctgcttgggatgcctttctccaacatcctcataacttgtact

SEQ ID NO: 295948 - DNA, 201 bp, Homo sapiens
ttctacaaaaatgagagtaatacccaaattcacaactcagcagctaattgggctctatgaagagactgataagtgggaggcaaaaaaaaaaaaaaaaaaaactggagatgatgactacatagaagtgagggaaaatccctggaatttctatgaacacatgtgttttgattccttgttaaatgtactttcaattgagcaaaa

SEQ ID NO: 295949 - DNA, 201 bp, Homo sapiens
aatatcccccagagataagggaagatatttcatgaattatgatcaagaagccaatttttggctgaaaataaactttccttctccagcagtgtctcatgccyataatcccagcagtttggaagactgaagtgggaggatcacctgaacccaggagttcaagaccagccagggcaacatagagagaccccagtctctacaaat

SEQ ID NO: 295950 - DNA, 201 bp, Homo sapiens
aaattgcatgaaatgatagttctttctatagacaggaaaagatcttggcagctgtgagttctgaggaactggggtgagaatgggggtgggggtggcaagaragggagaatcttatgcgttattgtattagttcattttcacactgctgataaagacatacctgaaactgggaacaaaagaggtttagctggattacagttc

SEQ ID NO: 295951 - DNA, 201 bp, Homo sapiens
gacctctcccatctcactgagacctgttcccttgggttctgtgctctctgtcctcctgctcccagctcaccgttgttctcctttgctggccctccccttcygcccaaccctcaaacatgagtgtaagatttccctcttagccttcactctgtccctggtggcttcatctactcctatggttgcaacattaacttccatgat

SEQ ID NO: 295952 - DNA, 201 bp, Homo sapiens
caaaaccatttaggattcttctatgtaccttgagcataacctgaggcataactaaggataggcaatgtgatgcatgagctccataagtggtataaaaatamctgctctaggaattcagactatggcttcgcaggatatcttgcttctgtatctctgttgccacctagacaaacacattaaatgtcatagtcaatatcttta

SEQ ID NO: 295953 - DNA, 201 bp, Homo sapiens
ttcgcaggatatcttgcttctgtatctctgttgccacctagacaaacacattaaatgtcatagtcaatatctttattgtcatctaggggtgtgtagtgggmtgaatggtggtcctcccccaaaagatatatccacctagatcctgtgaacgtgaccttaagtggacacatagaaagtccttgaggatgtaactaagatctc

SEQ ID NO: 295954 - DNA, 201 bp, Homo sapiens
tatttccagaagtcttgttcagtggaccaagggaggcctaaacgtgtccatcaaaattcttcatgtgctattcatctatcctttaatcctagtccagctgkgctgctcagaatactgaccctctgagccctaaacgggccttttcagagaaaatcccaacacttgtttcaggtcaaggaactagagaaacctgacaggaaa

SEQ ID NO: 295955 - DNA, 201 bp, Homo sapiens
atgtgatgtctgctcctcttggacttctgccatgagtggaagcagtctaaggccctcaccaggtggagatgtcggcaccgtgcttcttctgcaggctgcaraaccataagccaaacagaacccttttctttaaaaactactcagcttcaggggttcctttacagtaacacaaacagactaagacaccgggcatgggacaaa

SEQ ID NO: 295956 - DNA, 201 bp, Homo sapiens
gagatgggacatgaggtcagcaatgacctcaattacagctattaccctcaaatggctcagcagaaaaaaaaaataggttgtgtgtactattcttgcaactyttctttaagtttgaaattatttcaaaagcaaaaaaaaaaaaaaaaaatccccatcctgggagtctagtgacttggaggacatatgaaagtgaattctgtg

SEQ ID NO: 295957 - DNA, 201 bp, Homo sapiens
ctcttggctctgctctcttccatgtgtggcttcatcctcaggctgacaatgagatagctgcagcaattccagcccccatatcaatgcacaaaaaatgtgtyggaagaaaaagaggattgctactctcagaaactcttccagaaaaacaataactttttgagacactccaacaaaattttcttcaaatctcattggtccaaa

SEQ ID NO: 295958 - DNA, 201 bp, Homo sapiens
agttcatccattacacactcaaaaaatgcttactgagcacctaccctgtgccaagcaccgtactaactctggagatgcaggggcaagcaaggtggaaatgrtctctgccttcccagaactatctaatgggaaaggcagacagtgaatggctaggagtaaaaagtgatgagtgcaatgattagagaaatgcctagggttcag

SEQ ID NO: 295959 - DNA, 201 bp, Homo sapiens
ctgtgaactggtgaatggatcaacaaaatgtggtacatccatacaatggaatatgatttgtcaataaatgacacatgttacaatacggaagaatctcaaaracatgttaagtgaaagaagtcagacaaaagattacacgttgtgtagttctactaatataaaatgtccagggcaggcaagtctatacatggaaataaaatt

SEQ ID NO: 295960 - DNA, 201 bp, Homo sapiens
tagacttccattagcgcactggtaatgtcttacacatttcatttatttccacgtcttcttcttctagggcatggagagcatttcaatggtgtttttattcwtagtacctgaccaacagtaaatacctaactaaataaatgttagtagatgattcctccacccagctaccatgtggtatgtacctcttttgcctttttgggc

SEQ ID NO: 295961 - DNA, 201 bp, Homo sapiens
cctggggttgctctaaaagtgtgaaggcaggcaggaatgaagtttttcaatccttgtgcactcccctctgagcaatcaattaaagcagtctaaaatccatytttgaattggtaatcatttcaaaatctcagcaaggcagttagggatggagggtagagaggggatgaacgaaagcatgtaggcctccttttgacctcttct

SEQ ID NO: 295962 - DNA, 201 bp, Homo sapiens
tcctctcagctgtgtggggctctcccactgctccccatgctgccaatgtttcaacagaccttccattgaataactttgtttagttcttacatggccccctytctcttctatgctcagatgtgaatccacaggagctaggcaagagagaaaacctgaaaaactacaactacaacatgcttagaactgtctacttagatcatg

SEQ ID NO: 295963 - DNA, 201 bp, Homo sapiens
ctacacgtgccaggcagtaacaggaaagcacacagagggcaatttatcccatgcctacttcattctcccagatccacgattccgttagctaaaaaatagartaaatctgtccattgagattgacatgaaggattgacaaatgagaacttctcccctcgttagacacacacatgagggaggagaacaggaggaagggaagga

SEQ ID NO: 295964 - DNA, 201 bp, Homo sapiens
aaatctcagggagatgagcattttaaaatgattacgttgctgtcctgaacaaaatcagactctattattaaagaaggaggaatggatattgggtagataamactatttactatcattttccatctagaatattttttgctatatgacataaaacaaagagttaattttttccaataagttaaccacctttctcagcatctt

SEQ ID NO: 295965 - DNA, 201 bp, Homo sapiens
agttcttttttcttctacatcaggtcgcctcttcctagcatcttctccatgtttcttgttgctctacagcatttacaagacccagtttaatagtttagtgycttttttgtcactcattatttcttctttgttctctgttaaaataataagtgtatgatccattgcacttgccttagagtcttgaaccagtcttggatttcc

SEQ ID NO: 295966 - DNA, 201 bp, Homo sapiens
ggcatgtaatctaatttttacttgaattttatcttttttctctttttgtccttcatagacctcgagctctgtctagccctcaactgttctcaaatctccaytgttttctacaagtgaccctcacagctgtgggcctttgttgacaaattgtttcatctcctctgggtcttaaattattttctcttactctaaagtgaaaat

SEQ ID NO: 295967 - DNA, 201 bp, Homo sapiens
gcgtcggtggatatagacacaggacattgagaactatctcttatccaagggtgatttaggctaggcacgggtgattaggcaatgcaggcagaaccggtttkggcccacccttcaactgtggatgttcttcaaatctattcttttattcttgccttagaagatgtgctgatactctgagactttaggaagaactccatttca

SEQ ID NO: 295968 - DNA, 201 bp, Homo sapiens
tgaggcagaagaatcactagaacttgggaggcaaaagttgcagtgagccgagatcatgccattgcactccagcctgggcaacagagcaagactctgcctcrgaaaacacacacacacacacacacacacacacacaagtaagttaaaatttaaatcaggtctgaaggtaggcagtatagggccagtatagtatggcagctc

SEQ ID NO: 295969 - DNA, 201 bp, Homo sapiens
gaacccgggaggcgtaggttgcagtgagccaagatcgcgccactgcactccaacctggcaacagaatgagactccgtaaaaaaaaaaaaaaaaaaaaaaamccaaaaatattttttaggcttggcacagtggctcatgcctataatcccagtattttgggaggccaaggcaggaggatcacttgatgccagggattttagg

SEQ ID NO: 295970 - DNA, 201 bp, Homo sapiens
cctccctgttgcctttagactttagatgtgagtcaaattccagtccctgaactccaggggacatattaaaagttctccaaataatgctattgaggcccctstcatatggcttaagtggaaagggatgaaactgccctgagcgtcggtggatatagacacaggacattgagaactatctcttatccaagggtgatttaggct

SEQ ID NO: 295971 - DNA, 201 bp, Homo sapiens
tcaaatggctcagcagaaaaaaaaaataggttgtgtgtactattcttgcaacttttctttaagtttgaaattatttcaaaagcaaaaaaaaaaaaaaaaaatccccatcctgggagtctagtgacttggaggacatatgaaagtgaattctgtggggctttttctgggttcttcagagatcccctgcaggagacaccactg

SEQ ID NO: 295972 - DNA, 201 bp, Homo sapiens
cacccatgctaaaaaacacataagactagaaaaaagtataccctccaggccatcccacatgtgaaacacacacacacacacacacacacacacacacacacaaaagactcattccctctcacattcaaggtccatcacaaaaaacaaagtccttccatccggcagtgcgtgcaggggacagtggggtaggagaaagaatgg

SEQ ID NO: 295973 - DNA, 201 bp, Homo sapiens
gcctcatagacacaggtaaggtcaatactttgtgtttttttttaattattatactttaagttctagggtacatgtgcagaacatgcaggtttgttacataygtatgcatgtgccatgttggtgtgctgcacccattaactcgtcacttacattaggtatatctcctaatgctatccctcccccttccccccacccaacagg

SEQ ID NO: 295974 - DNA, 201 bp, Homo sapiens
tcacccatgctaaaaaacacataagactagaaaaaagtataccctccaggccatcccacatgtgaaacacacacacacacacacacacacacacacacacacaaaagactcattccctctcacattcaaggtccatcacaaaaaacaaagtccttccatccggcagtgcgtgcaggggacagtggggtaggagaaagaatg

SEQ ID NO: 295975 - DNA, 201 bp, Homo sapiens
gagatgcccacctggctggggctgtggtgtcaccctagcgtgcttcctgaaagttgggctggccaaccaagaaaaaacacaagatgggccaaagccctgtrgtggtcatgctgaggtcagtcctctcagctgtgtggggctctcccactgctccccatgctgccaatgtttcaacagaccttccattgaataactttgttt

SEQ ID NO: 295976 - DNA, 201 bp, Homo sapiens
atcacccatgctaaaaaacacataagactagaaaaaagtataccctccaggccatcccacatgtgaaacacacacacacacacacacacacacacacacacacaaaagactcattccctctcacattcaaggtccatcacaaaaaacaaagtccttccatccggcagtgcgtgcaggggacagtggggtaggagaaagaat

SEQ ID NO: 295977 - DNA, 201 bp, Homo sapiens
cagtcccctaccacaagctacacgtgccaggcagtaacaggaaagcacacagagggcaatttatcccatgcctacttcattctcccagatccacgattccrttagctaaaaaatagaataaatctgtccattgagattgacatgaaggattgacaaatgagaacttctcccctcgttagacacacacatgagggaggagaa

SEQ ID NO: 295978 - DNA, 201 bp, Homo sapiens
aatgaaggattggtcaaggtagatgggctacaaaattcttttaagtagcagagaaaaagcagtagttcagagtgcctattggaagcctgaattgttttctrcaaaggaaggttgaagggacttgagaggctgctggaggtacagcttgtcctggtcctaagtgagagacctagtcacaatggataaaaaggactttgcttc

SEQ ID NO: 295979 - DNA, 201 bp, Homo sapiens
tccccagatctggcccatccttcacagtcccattcttgttcattcagcccctatgttcttctcactctgttgcttgtgcttgattccatttattctggtgrgaatgatcaaatcagagagaattcctggctgggctctaatactcacctccagcagtgaaaagcccattctgtgcaggtaggctccaggtatctgctgaaa

SEQ ID NO: 295980 - DNA, 201 bp, Homo sapiens
ctggaaaggcagtccagggctgatatggtagttctgtcctatgaggctgtccaggaggccttctatctcagaaccaccattcctagagtgcttgtttacayctgcatgtccaagatggctcattggcatgtctgaattctaactcaagaaaatgaaaaaagaaggataccacctggaaggtgtacacttttcttctgccac

SEQ ID NO: 295981 - DNA, 201 bp, Homo sapiens
ccgttagctaaaaaatagaataaatctgtccattgagattgacatgaaggattgacaaatgagaacttctcccctcgttagacacacacatgagggaggaraacaggaggaagggaaggaggagggagtctgttactggacaaaattgcatgaaatgatagttctttctatagacaggaaaagatcttggcagctgtgagt

SEQ ID NO: 295982 - DNA, 201 bp, Homo sapiens
ttccttcaatagtttaggaatatttctttcaacagtttatcccatcttgataggtagacagcttagatagaggataggtagataagatagatagattagatagatagatagatagatagatagatagatagatagatagataggaaggacagacagacaggcatccttaaaataactatttgtcatttatctgaaattcag

SEQ ID NO: 295983 - DNA, 201 bp, Homo sapiens
acagcagtataacttccatggggaatatagagaaactaagactcaaaggggtaaaaggacaccataggagttacaaagcctactacagctctgtaagaagstgaaatgggcagccttattaacccatttctttaatctgtcatttagggaaagtggcttatccaatggttgctgcctattctgcaagcaagtttgctttgg

SEQ ID NO: 295984 - DNA, 201 bp, Homo sapiens
atttagggaaagtggcttatccaatggttgctgcctattctgcaagcaagtttgctttggatgggttcttctcctccatcagaaaggaatattcagtgtcyagggtcaatgtatcaatcactctctgtgttcttggcctcatagacacaggtaaggtcaatactttgtgtttttttttaattattatactttaagttctag

SEQ ID NO: 295985 - DNA, 201 bp, Homo sapiens; identical to SEQ ID NO: 61355

SEQ ID NO: 295986 - DNA, 201 bp, Homo sapiens
agactcaaaggggtaaaaggacaccataggagttacaaagcctactacagctctgtaagaaggtgaaatgggcagccttattaacccatttctttaatctrtcatttagggaaagtggcttatccaatggttgctgcctattctgcaagcaagtttgctttggatgggttcttctcctccatcagaaaggaatattcagtg

SEQ ID NO: 295987 - DNA, 201 bp, Homo sapiens
aaaataaattaagatttaaaagcgatttgcctgtcagtgggaccagggctgagaaaggaaagagcaaggattgttgtcactagttgtaaaccttttgtacyaggtgactttttaagccctcctcatgtattatattaataaatgtaaaaactagtttatttaaaaaaaaaaaaaaaggaaatggctcagttataacacagc

SEQ ID NO: 295988 - DNA, 201 bp, Homo sapiens
tattagttcattttcacactgctgataaagacatacctgaaactgggaacaaaagaggtttagctggattacagttccacttggctggggaggcctcagartcatggtggtagccacaaggcacttcttacatggcagcagtaagagtaaaatgagaaagaagcaaaagcagaaacccctgataaacccatcagatcaaga

SEQ ID NO: 295989 - DNA, 201 bp, Homo sapiens
ttttctcttactctaaagtgaaaatttgatgaatgtttccagatactgcacttggaatcataacttaatttcccttaaccttgtgtaaattctgtcccccmactactcccaactcctatccctcctccaaagcactgatacttattatcacatttaaattttttccccgctctactgataacttacagaatgcaggactgc

SEQ ID NO: 295990 - DNA, 201 bp, Homo sapiens
gtgtgtgtgtgtaatatattctgcaacagagtccttgagttatatatgctcacagacatgcctagtcacacacatttacacatggaactacagatacatayggatgttttcaaaaactgaaatcccagtacctgcttatgaatacatatcctcatacccatgcagactcccagacacatgccctctcatggactcacaaac

SEQ ID NO: 295991 - DNA, 201 bp, Homo sapiens
aaaaaaaaaaagatgaacagacctgcctatagtgggtgtattctctaaaatttgaacatgttaacatgaaaagatcaatttaaacaaccagctgggtaggkaggaaatgtgtccagagaaatggtcatgaaaagatatctgtgggatcaagagaggtccctggtgttctggatggtggtagcatcagaagccatcaccagt

SEQ ID NO: 295992 - DNA, 201 bp, Homo sapiens
caccacttgctagttaggatgtaagttcagctactgtaacgaagacccgaatttacaatggcttaagcaaatctaaatttatttatctcacacaaaacacmctggaaaggcagtccagggctgatatggtagttctgtcctatgaggctgtccaggaggccttctatctcagaaccaccattcctagagtgcttgtttaca

SEQ ID NO: 295993 - DNA, 201 bp, Homo sapiens
ttgctagttaggatgtaagttcagctactgtaacgaagacccgaatttacaatggcttaagcaaatctaaatttatttatctcacacaaaacaccctggawaggcagtccagggctgatatggtagttctgtcctatgaggctgtccaggaggccttctatctcagaaccaccattcctagagtgcttgtttacacctgca

SEQ ID NO: 295994 - DNA, 201 bp, Homo sapiens
cacaaatgttaaacatactcggcaagcatacgtgtagggatagtaatccttctggatcaaggaaaatgcaaggtatattttgaagtgaaactggacatcayaaaagactcagttgctttaaatattcaaaatgaaaatagatcagaaggaataaaagaaccttgtcaataacctttgaatcagacttctcttgagaagctc

SEQ ID NO: 295995 - DNA, 201 bp, Homo sapiens
ggtccttgaaaggtgacctggcttcgcctctcttcccagcaagccccgcggccgcccgcgagcggggcggtgccacgtacggctccggaagaagcgacggmatctgctagggcacaagagagacgggcgctcgggctctcgcagtcctcttccgtcagtgtcttttgcttcgactcccggcggagcgcgcaacgtggagtg

SEQ ID NO: 295996 - DNA, 201 bp, Homo sapiens
gtccttgaaaggtgacctggcttcgcctctcttcccagcaagccccgcggccgcccgcgagcggggcggtgccacgtacggctccggaagaagcgacggamtctgctagggcacaagagagacgggcgctcgggctctcgcagtcctcttccgtcagtgtcttttgcttcgactcccggcggagcgcgcaacgtggagtga

SEQ ID NO: 295997 - DNA, 201 bp, Homo sapiens
tcccagcaagccccgcggccgcccgcgagcggggcggtgccacgtacggctccggaagaagcgacggaatctgctagggcacaagagagacgggcgctcgsgctctcgcagtcctcttccgtcagtgtcttttgcttcgactcccggcggagcgcgcaacgtggagtgacgtgcaggggccaagtgcaacccaggcagcca

SEQ ID NO: 295998 - DNA, 201 bp, Homo sapiens; identical to SEQ ID NO: 61363

SEQ ID NO: 295999 - DNA, 201 bp, Homo sapiens; identical to SEQ ID NO: 61364

SEQ ID NO: 296000 - DNA, 201 bp, Homo sapiens
catggggaaaactgcccccatgatttaattatttccacctggtcccgcccttgacacgtggggattatacaattcaaggtgagatttgggtgggagacacagagctaaaccatatcactcttcatctgttaaaaaaaaatcagtatatttgctctttatgcctcatgggatggtagcaaaagtcatatttgagaagatata

SEQ ID NO: 296001 - DNA, 201 bp, Homo sapiens
tcttttctttctttttttttttgagacagaatcttgctctgtcatccaggctggagtgcagtggcacattcttggctcaccgcaacctccgcctcccataytcaagtgattctcctgcctcagcctcccgagtagctgggattacaggcatgtgccaccacgcctggctaatttttgtatttttagtagagacagggtttc

SEQ ID NO: 296002 - DNA, 201 bp, Homo sapiens
gcatggggaaaactgcccccatgatttaattatttccacctggtcccgcccttgacacgtggggattatacaattcaaggtgagatttgggtgggagacacagagctaaaccatatcactcttcatctgttaaaaaaaaatcagtatatttgctctttatgcctcatgggatggtagcaaaagtcatatttgagaagatat

SEQ ID NO: 296003 - DNA, 201 bp, Homo sapiens
agaattaggtatacagattacagatgcttaactaatatttgattgtttggtatggctaaagctcttcatcatttttaaaaacatttatttcttttttcccytaccatgccaatgtacatcattttattacattaagggactgtatctttaaaaatgcatgcttacaacaaatctagacagatttacagaatggagttatta

SEQ ID NO: 296004 - DNA, 201 bp, Homo sapiens
atgttggccaggctggtctcgaactcctgacctcgtgatctgcctgcctcggcctcccaaagtgctaggattacagacctgagccactgcgcctggccctyttcaagtattttctataggccaaagtatataaagtggagctccacaaagtcccattgaatctcactaggcttgccattggttatttctcctgtaggatat

SEQ ID NO: 296005 - DNA, 201 bp, Homo sapiens
ccagcagagagcctgagcatagatcctttgtgtgccctggcttgtgttctgaagatacagctgataggttagttgggtccagattatagaggactgagtaytcagcaatggtgggtgaattatttaagtctttggtgttcatctatttacaggaatgttttcgatttaaaggattaagtcttagcacattagaaaggaaat

SEQ ID NO: 296006 - DNA, 201 bp, Homo sapiens
gcccctgcggacgcggcccggccgggaagccagaggcccgccagacctccagaccgtgtgccgcagcggagcctgccgggcccgagcctccagccccaatsttgtaacttctcaacgccggactcgctagtttgtgttcgataagtgaactcttaggaagccagctttctcttaagtacaagcgatggtccgggcgcgcaa

SEQ ID NO: 296007 - DNA, 201 bp, Homo sapiens
aggttagttgggtccagattatagaggactgagtattcagcaatggtgggtgaattatttaagtctttggtgttcatctatttacaggaatgttttcgatwtaaaggattaagtcttagcacattagaaaggaaataaaaatgaagattgtactattttatgaactagaggaagggatttggagaccagtgaagagaaggc

SEQ ID NO: 296008 - DNA, 201 bp, Homo sapiens
tttaacaaagtttgcacttactgtccatttagacttctcatgagctcattttaattctccactaaagacagaaattacagcatgcagaaaagttgtccatsatgatgggaataacagcatggaccttgaggaagtcattataattcttatagtcccctcttagggtgttatttcgaatctaaaaacagtgaatgaaaggga

SEQ ID NO: 296009 - DNA, 201 bp, Homo sapiens
ctgagacttataggagaaagcagaagctggattttctcattgtttttaatgatctaagaatgtctgctgttttgaggatccatttttttgagttctgcccwgtctaatttttctttctcttgcttatgtacaggcttctgaacaatgcctttgaggagctggttgccttccagcgggccttaaaggattttgtggcctcca

SEQ ID NO: 296010 - DNA, 201 bp, Homo sapiens
attgtcactaaatgtaagtgggttaaagggggccgcttaggaaatgaatagacagggagatggggaaagcaggagaggcaaagtagatctgggtagcttgyggcttcaaagaggtggagcattggaattacgtggtaaaacttggagggctcagtgtgtacaatgattgggggaccttgagtaatcacatgtattagtaga

SEQ ID NO: 296011 - DNA, 201 bp, Homo sapiens; identical to SEQ ID NO: 61366

SEQ ID NO: 296012 - DNA, 201 bp, Homo sapiens
gtagcttgtggcttcaaagaggtggagcattggaattacgtggtaaaacttggagggctcagtgtgtacaatgattgggggaccttgagtaatcacatgtrttagtagaatgatgaattctgctgagagctggaggagtcttggttcctggcaatctctaattccaacctctaactccacctatttattagttgggattgg

SEQ ID NO: 296013 - DNA, 201 bp, Homo sapiens
cattcccatccttgacttagaaggctttcccacacctttagagtacatccttcaaaatccaaatggaggaatgtctctttattaatccatagaatttggamaatctttatgctgaaaggagctgtagaaagcatcctcagctgctccctgaaggcgtccctgactagtctagccacaggaaactcttttctgactcctagg

SEQ ID NO: 296014 - DNA, 201 bp, Homo sapiens
cattatcacttattggtgttgggaacacttcaaatattctcttccagctgttttgaaatatataatatattgttgttaattatagtcaccctactgtactrttgaacactggaactcactccttctacctaactgtgtgtttgtacttattaaccaacctctcttcacttccccctccctttccagcccctggtaaccatc

SEQ ID NO: 296015 - DNA, 201 bp, Homo sapiens
gctaggtttaacttaacattttaacaaagtttgcacttactgtccatttagacttctcatgagctcattttaattctccactaaagacagaaattacagcmtgcagaaaagttgtccatgatgatgggaataacagcatggaccttgaggaagtcattataattcttatagtcccctcttagggtgttatttcgaatctaa

SEQ ID NO: 296016 - DNA, 201 bp, Homo sapiens
acctatttttggccatgatgcagtaagaagcatagcataatcttcaaagctgttggtttaagaatgtagaatttggagtcagaaaacttttagtcaacttkagcttctctgagctgtagttttcccacctacaaaatagagcaaataatacctaaactttctgcctaaactacctaacttacaaataatacctgtaataat

SEQ ID NO: 296017 - DNA, 201 bp, Homo sapiens
aatgtagaatttggagtcagaaaacttttagtcaacttgagcttctctgagctgtagttttcccacctacaaaatagagcaaataatacctaaactttctrcctaaactacctaacttacaaataatacctgtaataattaaataaaaatatgtgaaagagtcttgtctatgttccatataaatgggagttatgataatgg

SEQ ID NO: 296018 - DNA, 201 bp, Homo sapiens
atccgggaaaagggcagatgggagttccttggacccttttggaaacttttctaagctggaaatcatagaaagaaggggaggggaggggcagggagagaaayggggaggaggaggaagttacttaaaaaagtgaaggaggcttggaggaagctaggggaaggtagctgaaggagtgagagtggggaggccgggagagggagg

SEQ ID NO: 296019 - DNA, 201 bp, Homo sapiens; identical to SEQ ID NO: 61375

SEQ ID NO: 296020 - DNA, 201 bp, Homo sapiens
tgtgtgagccaggcagttccactatctttatttgtgggttccatgtgtctgattctttttgggccctttctttatgaatcttggtgtctccccttcttgtsctatagaagaagcaatttcccctgggttaaactctttattactctcctttctcctaacttgggtataccagctatgcccttgggtagtgctgtggatatc

SEQ ID NO: 296021 - DNA, 201 bp, Homo sapiens
gcagctgcaagaaatggcacgaccagctcatcatgggggttctactatatgaaccaaaggaagaatggacatgaaggtctttgccacatgggtttcctccmcagcaaaaaatacaaacaacattatcatttttaacaaatgcatagatatttatatttcacattctcctttaattcaatattgttttagtatcagctttat

SEQ ID NO: 296022 - DNA, 201 bp, Homo sapiens; identical to SEQ ID NO: 61365

SEQ ID NO: 296023 - DNA, 201 bp, Homo sapiens
tctgattctttttgggccctttctttatgaatcttggtgtctccccttcttgtgctatagaagaagcaatttcccctgggttaaactctttattactctcytttctcctaacttgggtataccagctatgcccttgggtagtgctgtggatatcctggccacagatgatcccaactttagccaggaagatcagcaggacac

SEQ ID NO: 296024 - DNA, 201 bp, Homo sapiens
aaccactaattatgcttctgtgtctgtgagtttgcctattgtggatatttcatacaaatggaatcatataatatgtggcttttgtgtctgtttccacttakcataacgttttcaagcttcatccattttgtagggtgcatccgtactttattcagaagactggtgtttaacttttagcaaaagtttttgcattcccatcct

SEQ ID NO: 296025 - DNA, 201 bp, Homo sapiens
ttgacaggaaggtcagttgaagcctggaaaatcctagtcttaatgaaggcgtttaaaactcatattgaaaaatgtacgttttctcagctcccaaggcaccrcaacttctcaggacaaacaacaacatgcaaattttggaataactaaagaaatcaaacccttggtgtttgtttctaggttataggttgattttagaaaagg

SEQ ID NO: 296026 - DNA, 201 bp, Homo sapiens
gggctttggagttaacacctgtatcaagtcaagactctgctacttaactgtgtgacctgggggaacttacttaatctctcctagtctcctggtttccttgkgcatgacgtgtgaaaataccttctttacaaagttgttgtgataattacatgagataattttgtgaagtaatagcacagtgcctggcacatagcaaacact

SEQ ID NO: 296027 - DNA, 201 bp, Homo sapiens
  misc_feature (1)...(201): n = A,T,C or G
ggctacacctctgggaccttcaggtaaagggtctgccttaaagtatatggaatgctgttgacagcttccatttctggtaatatcctttctccagtttgccntattccagagagttatatctgataggtggagcactctacctgcctgggagacaggataccttcaatacctcttttctatcagataaagctggtgatactt

SEQ ID NO: 296028 - DNA, 201 bp, Homo sapiens
tttgccatattccagagagttatatctgataggtggagcactctacctgcctgggagacaggataccttcaatacctcttttctatcagataaagctggtratacttaaccatcatatgccaaaaatgagagttattggtgacaatgattacagcctcatggctttcctgggagtttctcatttaattacacttcgtcccc

SEQ ID NO: 296029 - DNA, 201 bp, Homo sapiens
agagtctttcatggtttagctcttgcttacctctctagattcttgattgaccttctccctagaacactattacacttcttacaggtctccaaaaatgccatgtgctattttctctaagcctttgcttaccatttctcactgcatgaaacattcttcacccctccccttatcattgcctggccatgtatcttttgggtctcc

SEQ ID NO: 296030 - DNA, 201 bp, Homo sapiens
ggctgctctgtgcctactctgataatggcctgatagtgtaatttgtcttagaaaataattttttgcagttaggaacaatgtacctgtttgtgtgtttcttyaagtattttctttttttttttttttttttttttttttggtgagacggaatcttgctctgtgaccgaggctggagtgcaatggtgcgatctctgctcactg

SEQ ID NO: 296031 - DNA, 201 bp, Homo sapiens
tcaactttttaagttcccacacatgaatgagatcatatggtatttgtctgtctgtgcctggtttattttacttaacataatgacctccagttccatccctkttggtgcaaaggatttcattttttatggctgaatagtattaataaaataatatgaattcctacagtccaacaacatttgatgtgtgtaagtgttcatttt

SEQ ID NO: 296032 - DNA, 201 bp, Homo sapiens
ggatatttcatacaaatggaatcatataatatgtggcttttgtgtctgtttccacttagcataacgttttcaagcttcatccattttgtagggtgcatccrtactttattcagaagactggtgtttaacttttagcaaaagtttttgcattcccatccttgacttagaaggctttcccacacctttagagtacatccttca

SEQ ID NO: 296033 - DNA, 201 bp, Homo sapiens
tcctttcttcttgccctttatccaaaaggcagatgtgaacgtgcatgtaaagtgtaatgggtgtcaggcattgttatctgtgcatgaggcagttctgtttscaagtgacgctgtccagagccactaaataagaatggtggttctcatccttcatgccttttaaaactaccttggtctcaagctagcttcttttattttcta

SEQ ID NO: 296034 - DNA, 201 bp, Homo sapiens
agaagcgaagtgaggatgaatcagagacagaagatgaagaggagaaaagccaagaggaccaggagcagaagaggaagaggtaaggtggggcaagcaaatgrgattaaaaagttagtggccaagaagttgggggtgcacgcctgtaatcttagcaatttgggaggccgaggcgggtgggtcacttgagtccaggagtttgag

SEQ ID NO: 296035 - DNA, 201 bp, Homo sapiens
aggtgcgtgccaccatgcccggctaattttgtatttttagtagagacggggtttcactgtgttgaccaggctggtctcaatctcctgacctcgtgatccgyccatctcggccttccaaagtgctgggattataggcatgagcccggccgggacttcttaatacccccagtgacagcatgcgcagagcatcactgttttgaa

SEQ ID NO: 296036 - DNA, 201 bp, Homo sapiens
cagggtttcatcatgttggtcaggctggtcttgaactcctgacctcgtgatccgcccgcctcggcctcccaaagtgctgggattacaggcctcagccaccrcgcctggccaattttcttcctttttaaggttgaataatattccacaaaattttgttatatctggaatggggtatatttgatgcccacttgataactctgc

SEQ ID NO: 296037 - DNA, 201 bp, Homo sapiens; identical to SEQ ID NO: 61373

SEQ ID NO: 296038 - DNA, 201 bp, Homo sapiens
ttctgtctgaagttctgtgggtcaattccagaggtggggcatgatcagcatatttggatcacagacagaaccagttgtttaattcacaatagctacctgcyccctccccaccaactctaattggctggtctagtttggcagcctaaaaaggcttactcctgctaggggtactagctactgatgttaggaattgaatataac

SEQ ID NO: 296039 - DNA, 201 bp, Homo sapiens
cctgggggagcctaggcttggggtcccttaggtatatggctgggcaggagtccctgctatctgggagctttgaaagcattttaacttagtgacttttttcytggtctgaagggcttcctgttatacaattttaatcatttccttttataaaggaaaatgaaataaggaccccagagataacatgtctcttattagttaaaa

SEQ ID NO: 296040 - DNA, 201 bp, Homo sapiens
ttcttcttcttcttctttttaaaaagttcccaagagctgtaaatgcagtttactattctttaactctaaagtcaactttctgtgtctggaagtgcaggccsctcaacaacagatgacgcagagagatccttcaggtgtcccggggagtgagggagggaccatccctgaggttattaaaagtgtctgaatatggagagaaag

SEQ ID NO: 296041 - DNA, 201 bp, Homo sapiens
gcagggagtaagatagccgggcgaggtggggggtacgggtggagaacaaacctgtgggagaatggagatgagagcaattcgtgaatgcagcctggggaccrgttcccatgagagaagctccaaacctcagtgggaaacctaaagctctcaaactgtcttcatgtactttattatcatttttttaaggtgttgggggtaggg

SEQ ID NO: 296042 - DNA, 201 bp, Homo sapiens
ggagctggttgccttccagcgggccttaaaggattttgtggcctccattgatgctacctatgccaagcagtatgaggagttctacgtaggactggaaggcrgctttggctccaagcacgtctccccgcggactcttacctcctgcttcctcagctgtgtggtctgtgtggagggcattgtcactaaatgtaagtgggttaa

SEQ ID NO: 296043 - DNA, 201 bp, Homo sapiens
tgctccgacaccctaggctgcagtctagtcttgcccatgtcttattggatatgtatatgactagaaggggattcctttatagacttttgcccaggttgttscctttacctggaatagcttcctgtcagaaaaccttatctgtccctgaaggcacttctcacatgccaattcttccatgacttccaactcacctggtcaaag

SEQ ID NO: 296044 - DNA, 201 bp, Homo sapiens
ctagagaaggtacttggctttttttgttactgaataataaaattttatgaagtcatcttatttgccatgacaggtgagtgtggcatttttaagacaggacrgagatcactctgtccctctgtgtgcctttttctaggatgaggagaacaatccccttgagacagaatatggcctttctgtctacaaggatcaccagaccat

SEQ ID NO: 296045 - DNA, 201 bp, Homo sapiens
acaaagcacactgcctgatagatacaagtcttttaaaaagttagctaaatgtataaacaaacaaataaatgagatgaagaattacctgcacatagaaggcytaagtgactggtggttagggaaattaccaactaacagaggaagtagaggaggaaaaggagatttgattcaaaaattgcagtttcattttggtcatgtttt

SEQ ID NO: 296046 - DNA, 201 bp, Homo sapiens
agatgccggagaaggccccagccggccagctcccccgctctgtggacgtcattctggatgatgacttggtggataaagcgaagcctggtgaccgggttcargtggtgggaacctaccgttgccttcctggaaagaagggaggctacacctctgggaccttcaggtaaagggtctgccttaaagtatatggaatgctgttga

SEQ ID NO: 296047 - DNA, 201 bp, Homo sapiens
tcacgaccctctcacgtggatccccttagagttgtgagcccttaaaagggacaggaattgctcacttggggagcttggttgttggagacgtgagtcttgcygaagctcccagccaaataaagcccttccttctttaacttggtgtctgaaggcttttgtctgtggcttgtcctgctacagcccggctaatttttgtatttt

SEQ ID NO: 296048 - DNA, 201 bp, Homo sapiens
tgaccaggctggtctcaatctcctgacctcgtgatccgcccatctcggccttccaaagtgctgggattataggcatgagcccggccgggacttcttaatamccccagtgacagcatgcgcagagcatcactgttttgaaattttagaatatttattaagcttaaacctattttcccacaacttttacctgtgggtgttagt

SEQ ID NO: 296049 - DNA, 201 bp, Homo sapiens
tggtgaccgggttcaggtggtgggaacctaccgttgccttcctggaaagaagggaggctacacctctgggaccttcaggtaaagggtctgccttaaagtayatggaatgctgttgacagcttccatttctggtaatatcctttctccagtttgccatattccagagagttatatctgataggtggagcactctacctgcct

SEQ ID NO: 296050 - DNA, 201 bp, Homo sapiens
aacactgtgacctaaaaaaattaagtaatccacagtgaaaactcattcccctgtctctgtttagtctctgacaggaataaaggatgggataaagggtaggrtagggaatggggtggtggcatcagagagccccctttggccaccagtaggtgcctttattgatgtgttcccatgagaaggaacaaagaaaaggggttggaa

SEQ ID NO: 296051 - DNA, 201 bp, Homo sapiens
ttacagagtgtttgatccactgggaggagatcctacaaaagatcaaactggaataaaggacacactttacaacccataagatgtgacagtgagtacatggkcataggactcaatggctctatccatactgttacaggtagataggcatgagcggggcaggagagtgctctccccgcacccactagaaatgttgagtgatgg

SEQ ID NO: 296052 - DNA, 201 bp, Homo sapiens
gagtgcagtggcatgatcttggctcactgcaacctctgcctcccgggttcaagctattctcctgcctcagcctcctgagtagctgggattacaggcatgcrccaccacaccgggctaatttttcttttgtatttttaatagagatggggtttcaccatgttggtcaggctggtctcaagctcctgaccttgtgatccgcct

SEQ ID NO: 296053 - DNA, 201 bp, Homo sapiens
atgtgccaccacacccggctaattttgtatttttagtagagatggagtttcccatgttggtcaggctggtctcgaactcctgacctcaggtaatctgcccrccttggcctcccaaaatcctgggattacaggcatgagccaccgcacccggcctatttttatttttttatttttttgtatttagtagagacgaggttccac

SEQ ID NO: 296054 - DNA, 201 bp, Homo sapiens
tgctttttgctaggttaagggttgagttgtgagtctgataaactcgtcctcactttttgctaggttaagggttgagttgtaagtctgataaactcttcctygctttttgctaggttaagggttgagttgtgagtctgataaactcttcctcgctttttgctaggttaagggttgtcttggatttcaattagacacctgatt

SEQ ID NO: 296055 - DNA, 201 bp, Homo sapiens
agatttccgtattttccatgtcgtagttttttatctcactatgttggaatttcttattaaagccttctccatgacagctaaaatcatgtgaatcttgttcrcggctatgctcccaggacaaagcacactgcctgatagatacaagtcttttaaaaagttagctaaatgtataaacaaacaaataaatgagatgaagaatta

SEQ ID NO: 296056 - DNA, 201 bp, Homo sapiens
aaataggagtgttcagcaggctgagtgagagattgggagtggagatgatttctctagtgtttgtggaaatggcttcaccttgcttatcttccccatctctrcaaccatcaaccctctgaagtacacactccaaagacggcagactcacaggagaccaaggaatcccagaaagtggagttgagtgaatccaggtgagtacgg

SEQ ID NO: 296057 - DNA, 201 bp, Homo sapiens
agcagtgtgggagaaggatctgagacttagcaaggctccaggcatgagacactgggacaaggacactggttagaaagcagttgtaggtgcgagatgctaasagcttgaaggaaggcaaggttactgtggctgaagagcaaacaccagatccaagaggtattcataattaaaggcaaagtcagtagcatttggtggctaatt

SEQ ID NO: 296058 - DNA, 201 bp, Homo sapiens
tcaagaattctgtgtatcgctgaggaagggactttgttcccttggagagggtgggaaacaaactgctggtcatcaatagaactcaaaactagaggcctgcrgcttttaacattttatattctcatttaatttcaaacttactgaaaagttatgagaaaagcatgaagaacttctggatgtcctttacccagaatcttcagt

SEQ ID NO: 296059 - DNA, 201 bp, Homo sapiens
gcagtcctcctgcctcagcctcctgagtagctaggactacaggcacataccagcacatctggttaactttttgttcaaatggggtcaccatatgttgcccwgtctgggctcaaactcctggcctcaaacaaccctctcgcctcagcctcctaaagtgctgggattacaagtgtgaaccactgcacctggcctcttcttatg

SEQ ID NO: 296060 - DNA, 201 bp, Homo sapiens
aaacagtattaaatttatcagtgtgcactcatgcaagtatagctataaggtgagttcctagaaatgggctccctgggccaaaggatatacgcttttaaggktttagtaagtgctgttaaattgtcccgcattgacgctgaccgggttactattttacagtgaatgggaatgccaatttcccacacgctagtacaatagttt

SEQ ID NO: 296061 - DNA, 201 bp, Homo sapiens; identical to SEQ ID NO: 61368
  misc_feature (1)...(201): n = A,T,C or G

SEQ ID NO: 296062 - DNA, 201 bp, Homo sapiens
ctagagtgcagtggtacaatcacagctgatgacagccttgacctcctgggctcaagtgatcctcctgcctcagcctccctagtagctgagaccacagacaygtgccatcatgcccagctaagtttttatttttaatttttagtagagatgaggtctgtctgttgcccaggctggccttgaactcctggactcaagtgattc

SEQ ID NO: 296063 - DNA, 201 bp, Homo sapiens
agacactatgaaaaaaacagaagaggcattcctagctctctagttaccaagctttttagtgttgggagggtcagcaaaagcttagggtgagtcatgaaggmtgagactaataagcagacaagaggggaggaaagcattcagggctgaggaatagcaggtgcaaaagcacagaggcacacagcagtatgacacttacaggaa

SEQ ID NO: 296064 - DNA, 201 bp, Homo sapiens
agcatcactgttttgaaattttagaatatttattaagcttaaacctattttcccacaacttttacctgtgggtgttagtcttgttttctggaggttgtgtrtcgcctgtcttcctcattaaacagcttactttctttttaactgttcctttccacatgcgaacttctggtgtgtcccaggccctctcattgaacctagaac

SEQ ID NO: 296065 - DNA, 201 bp, Homo sapiens
atctagtggagaaaacatatttaaagaaatgatgacaatgcagtgttacaagggctacaagaaaggtacactagacactatgaaaaaaacagaagaggcaytcctagctctctagttaccaagctttttagtgttgggagggtcagcaaaagcttagggtgagtcatgaaggctgagactaataagcagacaagaggggag

SEQ ID NO: 296066 - DNA, 201 bp, Homo sapiens
catgcccagccaagtgatccttttttttttcaaagaagatacgctgtacatgcactgcaaaaaaaaaaataaataaagagaaagaagctgtacatttatartgacatttccaggataacatttaaaaaattatttccaatattttccaaatattctttataaaataaatacatacgtaaatggctgtcgctaatttctcgg

SEQ ID NO: 296067 - DNA, 201 bp, Homo sapiens
atcaagaagttcagtaaaacccgatccaaggtctgggcatcctttagaaatttgagggtgggaatggatttctaagagttgtgttttggtgcatggctatwtttgtactagatcagaaggaagggttgaggtttggtgttagctttttctatttttgtctcaatcaacaaatgaagggtgtttttgctgtttgttctttag

SEQ ID NO: 296068 - DNA, 201 bp, Homo sapiens
agtttctcggagccaacacaccattgccgcattctcacgtgcaaagtgagagattcctaggaaggagattgaaatccttcccttctggcccctataacctrgactgtagcacgtatttttaccttctcacttcccaggagagcgccgtctggaagcaggggccatggtcctggctgaccgaggcgtggtttgcattgatga

SEQ ID NO: 296069 - DNA, 201 bp, Homo sapiens
tgtcttcctcattaaacagcttactttctttttaactgttcctttccacatgcgaacttctggtgtgtcccaggccctctcattgaacctagaactgagcrtcatacactattttaattgtcttagtgtggggtctgtaagtgaattccaagagaatttggattctctaggtctgctagtgcaggccaggatttcaccagc

SEQ ID NO: 296070 - DNA, 201 bp, Homo sapiens
tatcgcctgtcttcctcattaaacagcttactttctttttaactgttcctttccacatgcgaacttctggtgtgtcccaggccctctcattgaacctagamctgagcgtcatacactattttaattgtcttagtgtggggtctgtaagtgaattccaagagaatttggattctctaggtctgctagtgcaggccaggattt

SEQ ID NO: 296071 - DNA, 201 bp, Homo sapiens
ttgtgtccattctcaatggttctgcccataacataccaattgttaaaactgtcagtatccctcctatgccaccatccacatagtaatatcaacaggatccyagccttgtcacagttagattgtccaagtaagggtacctggcccaagctttgccaattagatacccttcaagaggaatttggattaggttcatccttgcta

SEQ ID NO: 296072 - DNA, 201 bp, Homo sapiens
gcattcccatccttgacttagaaggctttcccacacctttagagtacatccttcaaaatccaaatggaggaatgtctctttattaatccatagaatttggmaaatctttatgctgaaaggagctgtagaaagcatcctcagctgctccctgaaggcgtccctgactagtctagccacaggaaactcttttctgactcctag

SEQ ID NO: 296073 - DNA, 201 bp, Homo sapiens
ataatcccagcactttggaaggccgaggcaggcggatcgcctgaggtcaggagtttgagaccagcctggccaacatggcaaaaccccatctctactaaaawtacaaaaattagctgggtgtggtggcaggcgcctgtaatcacagctacttgggagactgaggcatgagaattgcttgaacccaggaggaggaggttgcag

SEQ ID NO: 296074 - DNA, 201 bp, Homo sapiens
  misc_feature (1)...(201): n = A,T,C or G
ttggctggtctagtttggcagcctaaaaaggcttactcctgctaggggtactagctactgatgttaggaattgaatataacgggtttcctctttattctgnttgtcccaggactgtcctgattgcctgtaatgttaagcagatgagcaaggatgctcagccctctttctctgctgaggatatagccaagatcaagaagttc

SEQ ID NO: 296075 - DNA, 201 bp, Homo sapiens
aaataaaagtttaaaatgcttgtatatacaatatttcctattgtgagtgatagtcaaaagtgaaatgtttaagaaacactgtaatagaaaatgttgaaaargtaggctggggctagattgtgaatgtcagtctgaggaattctggtttctagctgccttccatgaggagccctgagggcttttcaggagggaaatggctaa

SEQ ID NO: 296076 - DNA, 201 bp, Homo sapiens
tatttttactgttaagttctaagtattttcccacagcctgtagggggatattagcctctgctgagatttaccattctgataatagttctcccagcaggtayattttgtagcaagctaaaccttcctagcttgaagtaccactatttaaccttgcaatagaaaggtcagctcctgtaatcttgcgtatgtgtgctgtgctgc

SEQ ID NO: 296077 - DNA, 201 bp, Homo sapiens
gaggagccctgagggcttttcaggagggaaatggctaaccatatacagagaaacaatagactaaagggtgagagagacaaactagtgggcaataaattatktcagtgggctgcaggctctagaggggcagaaaagaaagtgtattattgggttactttcagtgcaactgatagaaatagagcacaacctcatgtaagcaaa

SEQ ID NO: 296078 - DNA, 201 bp, Homo sapiens
gtctcaaactcctgacctcaagtgatccacctgcctcagcctcccaaagtgctgggattacaggtgtgagccaccaggcccgacccttacagagtatatcvtaaagcaacatcatcatatggtgtggtgtcccaaataggtagaacacacggttttgagaaccaagcggtaggagcaggagtggccctgcttacccacact

SEQ ID NO: 296079 - DNA, 201 bp, Homo sapiens
cagagaaacaatagactaaagggtgagagagacaaactagtgggcaataaattatgtcagtgggctgcaggctctagaggggcagaaaagaaagtgtattmttgggttactttcagtgcaactgatagaaatagagcacaacctcatgtaagcaaaagaatgcatttattagttgacataactggaaagaatgtgaggtaa

SEQ ID NO: 296080 - DNA, 201 bp, Homo sapiens
gcaggtggatcatctgaggtcaggagtttgagaccagcctgaccaacatggtgaaacccgatctctacttaaaaatacaaaattagccgggcgtggtggcrcatgcctgtaatcccagccacttgggaggctgagggaggagaatcacttgaaccctggaggtggaggttgcagtgagccgagtttgcaccattacactcc

SEQ ID NO: 296081 - DNA, 201 bp, Homo sapiens
attgaatagtggtgaagtctgggcttttagtgtacccatcacctgaataatgcacattgtaaccaataggtaatttttcaacccaagatgcatttcttatygcacagtttccataggtcaggagtacagctcctggcacagcttacctggattttctgcaaggctgaaatcaaggggttggccagtgctgggtttttacat

SEQ ID NO: 296082 - DNA, 201 bp, Homo sapiens
aacgggtttcctctttattctgtttgtcccaggactgtcctgattgcctgtaatgttaagcagatgagcaaggatgctcagccctctttctctgctgaggwtatagccaagatcaagaagttcagtaaaacccgatccaaggtctgggcatcctttagaaatttgagggtgggaatggatttctaagagttgtgttttggt

SEQ ID NO: 296083 - DNA, 201 bp, Homo sapiens
tgtttgtcccaggactgtcctgattgcctgtaatgttaagcagatgagcaaggatgctcagccctctttctctgctgaggatatagccaagatcaagaagytcagtaaaacccgatccaaggtctgggcatcctttagaaatttgagggtgggaatggatttctaagagttgtgttttggtgcatggctatttttgtacta

SEQ ID NO: 296084 - DNA, 201 bp, Homo sapiens
cactgatggtgtgaatgctgtggataggagctacagtttctcaggcaaataacatggaaacaattaaaagaaatattcaactcatttcaaggagcattggmtctccagccccctttctaaccagatgcagtcatgaggcttttataattttatttatttcctttgcttaggtttttagaataaacttgattaaggcatact

SEQ ID NO: 296085 - DNA, 201 bp, Homo sapiens
cctgcctcagcctcctaagcagctagaattacgggagtgtgccatgcctggctaatttttgtatttttagtagaaacggggtttcaccatgttagccaggstgttcttgaactcatgacctcaggtgatctgcctgccttgacctcccatagtgctgggattacaggtgtgagccaccatgcccagccaagtgatcctttt

SEQ ID NO: 296086 - DNA, 201 bp, Homo sapiens
tgatgtgaaatactgtgcagtcttcaaaaatcacatagactgtatggcacagagaaatatgcagtctgtggttctatggtttagtaaaacagagcaggttrtagtgcagtgtgatccaattttttttttctttgagacagagtctcactctgtcgcacaggctagagtgcagtggcacgatctcggctcactgcagtctcc

SEQ ID NO: 296087 - DNA, 201 bp, Homo sapiens
atgtatgaaccaaataatgtaaattcttggcacattgagaatccacttagtccaggagtccatcatcatttactattgaacccttagagaaggctagaatkacctacaaatgttccagaagaaaacatgccccggggtggaaacaaggaggacaagaagaagcagttaaagagaagcatgtcttccaatctgagaggaagg

SEQ ID NO: 296088 - DNA, 201 bp, Homo sapiens
gttttttatttaaatacttatgggctttttatgctcaacattgtgtttatgagatttatccatgttgtgtataggtgtgtttcatacatttttattgctgkatagtattcatttatgtgaatataccgtgtttaaccattacactattgatggcatttttacactttaaaatttttgactactaggcataatgttgctatg

SEQ ID NO: 296089 - DNA, 201 bp, Homo sapiens
ctgtaagctcctacggagagaggtttgtatacatgataatcattgtcctacccatatgacatagcaaatagtatgtgttcaaaatatatttgttaaatgtrtgaaccaaataatgtaaattcttggcacattgagaatccacttagtccaggagtccatcatcatttactattgaacccttagagaaggctagaatgacct

SEQ ID NO: 296090 - DNA, 201 bp, Homo sapiens
tcccaggaagtgacagagtgtccctgtccatagctctttagttgaagcctttctcagggatacttatctcagttctctctttctttaaataggatgggacrgtgaaaatggcaatcttggacaagatgagtagcaattgcattattcatgcttgactctgccttggtttcagggttttaattatctaaaaagaaaaaaaaa

SEQ ID NO: 296091 - DNA, 201 bp, Homo sapiens
tcacccaggatgaaaaaccgaggcttgaacctctggactttgccacaccccagctggtatactgatagcagcctggaagtggacaactccctatagctcayttcagtttgtcacctatcatctaagttaggctaatgagcaaaggcacagaccctcctctgttggacagctgggggtcaaaatcccaggaagtgacagagt

SEQ ID NO: 296092 - DNA, 201 bp, Homo sapiens
tagtcttattgtaacatggagaaatggaagtgtgaaatagttaaaaccacttgcctggaacattctggtatatatactggtttatactaaaagtagacctrtttgtgaaaactgctacagtgaagagttatttaaaagctgtactatttttgttttctttttatatcttatgaaaggactgaggactattaatttcttcac

SEQ ID NO: 296093 - DNA, 201 bp, Homo sapiens
gggtaaaaactggtagtcttattgtaacatggagaaatggaagtgtgaaatagttaaaaccacttgcctggaacattctggtatatatactggtttatacwaaaagtagacctgtttgtgaaaactgctacagtgaagagttatttaaaagctgtactatttttgttttctttttatatcttatgaaaggactgaggacta

SEQ ID NO: 296094 - DNA, 201 bp, Homo sapiens
ctgcactccagcctgggtgacagagggagactccaactgaaaaaaaagaaaaaaaaaaaaaaagagatcaagaccatcctggccaacatggtgaaaccccmcctttactaaaaatacaaaaattagccaggtgtggtggtgcgtgcctataattccagctactcggcaggctgaggcaggagaatcgcttgaacccaggag

SEQ ID NO: 296095 - DNA, 201 bp, Homo sapiens
tgcttactgtaagattttctcaggcctaattctggtctgctggttcccaaaacttctcttataccaccgtgtttcagtgacatgttgcacaacatctcacrtttgtacaatgtttccatttttcaaaacattttagccgagtgtgatggttcacacctgtaatcccagaactttgggaagccaaagtgggcagattgctta

SEQ ID NO: 296096 - DNA, 201 bp, Homo sapiens
aaaggcatcccagtttggtattcatcggcccctgtgagaaacatttgttaggaatgtgtcagagttctccttctccggactgagtttactgaagttacgtwtttgtcctcagattacttctttcctatccctcctttagtgtgactttggaaaatctccttgaaggtctttgagtcccatttccttcatgtataaaacttc

SEQ ID NO: 296097 - DNA, 201 bp, Homo sapiens
tctgtccactccctaagggtccctgacaccagctgagagagtgaagccttggcctgctggggatgcctccagctgcagaaggcagcctgaccttgaattcragcaggctttaaattcttcgcctcacagaatgaggtaacagaaagatggatgattactgattagaacactgtgacctaaaaaaattaagtaatccacagt

SEQ ID NO: 296098 - DNA, 201 bp, Homo sapiens
tctgaccagttccagggctgtcctccttagcagactgactcagccagcagtgccacctgtgaaacaggtggcaaggctggtcacactgcctctttccacakgctattctgtccactccctaagggtccctgacaccagctgagagagtgaagccttggcctgctggggatgcctccagctgcagaaggcagcctgaccttg

SEQ ID NO: 296099 - DNA, 201 bp, Homo sapiens
acacaaagaaatggtaagtgtttgaagtgatgatatgctaattaccctgatttgatcattactcattgtatgcatgtattaaaatagcactccagctgggygcggtggctcacgcctgtaatcccagcactttgggaggctgaggcaggctgatcacaaggtcaggagattgagaccaacctggctaacattgtgaaaccc

SEQ ID NO: 296100 - DNA, 201 bp, Homo sapiens
gggccagccccaggaaaaactgcagcagttgaagttcagcttctcctcttcctccctaccctaccaactctgtagcacaatctagttgtcaaggaacccaraacatttgtggtttaatgtgtgacctttctcacagtgttttcatcctgataggcctgttacattttgctttcctgtgcattttctcatttggccagcaac

SEQ ID NO: 296101 - DNA, 201 bp, Homo sapiens
aactgcagcagttgaagttcagcttctcctcttcctccctaccctaccaactctgtagcacaatctagttgtcaaggaacccaaaacatttgtggtttaakgtgtgacctttctcacagtgttttcatcctgataggcctgttacattttgctttcctgtgcattttctcatttggccagcaaccctgtgaataaaacact

SEQ ID NO: 296102 - DNA, 201 bp, Homo sapiens
tgccacagttagggagtgtcagctgagctagcaaactcacaacctagggttgctgtgctccgcacaagcagaatagatgcttcctgccctgcccgccttghgccccaacaactcattcaactctgaatttggagtcttatgtcagtgtgtctaattgtcacaacctaagtcacatccttagaaactctacctggggaattt

SEQ ID NO: 296103 - DNA, 201 bp, Homo sapiens
aaatattcacttaatgatatacctgtcctatgaatgttttcttcctttctattttttctcttttttaaactaaaaatgtaattattggaaaacataaagakaaattggaaataaatataaagttataaagaagcactacaatacttaaatctccattggtattagaggttatatagcgttcttctctaagagctaggacaa

SEQ ID NO: 296104 - DNA, 201 bp, Homo sapiens
atataaagttataaagaagcactacaatacttaaatctccattggtattagaggttatatagcgttcttctctaagagctaggacaaagacaagctggaaygtgagttatatgtgctatttcctcagctctggcattaacaccattcaaaataatatttaaaagcaagtagcaggacgggcatggtggctcatgcctgtaa

SEQ ID NO: 296105 - DNA, 201 bp, Homo sapiens
gcctctgagtacatattgggatctaattttgaaagagttaatccacctcaaaaatatgaacactattgagagatccacctatttacccttctttgagaaaytgaaggaaaatatcatgtagtaaaatccatatgaattcttagctccacaggccattaggagaagaagcttttgttcctgcatcattgtaagagagcacat

SEQ ID NO: 296106 - DNA, 201 bp, Homo sapiens
ccccgtctctactaaaaatacaaaaaattagccgggcatggtggcacatgcctgtaatcccagctactcaggaggctgaggcaggagaatctcttgaaccygggaggcagaggttgtggtgagctgagatcacaccattgcactccagcctgggcaacaagggcgaaactccgtctcaaaaaaaaaaaaagcaaaaaacag

SEQ ID NO: 296107 - DNA, 201 bp, Homo sapiens
ccaatggttctctaggccatgagatgtatcacagccacataattataaagagtttaatattttcttttacattttgatgcagctgtgttcaatcttctttwccacagagatggatgtatggatcactgtgttattgtcaacagtacctgtgtgtcctctcctatgcaattcatgcttcttctgtaatagaagaattcttct

SEQ ID NO: 296108 - DNA, 201 bp, Homo sapiens
ccaggagtggtggtgcacgcttgtaatcccagctatttgggaggctgaggcgggaggatcacttgaacctgggaggcggaggttgcagtgagctgagatcscgccatcgcactccagcctgggagacagagcgagattctgtctcaaaaaataaaaataaataaaatcttggcatcagaatttcaggaactgagagcttgt

SEQ ID NO: 296109 - DNA, 201 bp, Homo sapiens
aaaacagccttctattggatgaagatgacatccaggattttaatagctagagagaagtcagtgcctggcttcaaacttcaaaggacaggctaactctcttattaggagataatacagccagtgacttggagttgaagcccagcactcatttaccatttcgaaaatctaaaggcccttaagaattatgcaaaatctactctg

SEQ ID NO: 296110 - DNA, 201 bp, Homo sapiens
gctggtcctttctttctttcagacgggcctttcacagctattctgtccctgtgtacctaaatgaacccaatttgcagcaatgggaaaatggttgaattcayagaaatcaacagtcatgtccgtgggagtttgttaatcccaggatccaattctgtaatgcaaggattagctacaacagtggggtctggtagcaaccatgta

SEQ ID NO: 296111 - DNA, 201 bp, Homo sapiens
ctctgcccttgacttccattacatgcccatgtatctttatgtgttgagctaatgtattgaggtacccatattcttgtttattggaggcaaagaatcggaargaagaagagctatttgttttatccattctccttcactgcctcctctgaccatttcaccaacccccaaacactttcacccagaccgatgttcccctggtat

SEQ ID NO: 296112 - DNA, 201 bp, Homo sapiens
caaagaaaatttactaatgtcccattccttgcaaactagagtttctaataaacatctcttttgatctttagctagctcgagtttctgttgccaataaccaraagagttaaaagcattcagaatgcttttaatataggcataaagatttttaaaaatagagtcggaagagacgttagaagtcactttgtcatttgacagatg

SEQ ID NO: 296113 - DNA, 201 bp, Homo sapiens
gatctttagctagctcgagtttctgttgccaataaccaaaagagttaaaagcattcagaatgcttttaatataggcataaagatttttaaaaatagagtcrgaagagacgttagaagtcactttgtcatttgacagatgaggaaactgagacccagaaagctaaagaacctggtctgatagcacacagatgtgtcagagtg

SEQ ID NO: 296114 - DNA, 201 bp, Homo sapiens
ttctgctctttgtttttgttattaccaagtcctctgaccatctctacctaataaccccaccttagtgtgacatacccagcaactatctactctttgccttrtggtttccactgccacttaccccttcctctgtcctagtctaaacttggcaaaggaaaaagaagaaacctagaatgtcttgagtcatcaaggatgtactgt

SEQ ID NO: 296115 - DNA, 201 bp, Homo sapiens
ggtactccctatgtctgccaggatagagtacctctcatctaagggcctgtttgaaaaactccaaactggatgaactcaggaagtttaatcgatccttcccmggtaacaactctgtattttgacccaacctgaatcacgactttcagtgcacctatagatacatcatttaaatcttctctgtttcagtttgtttatgcaaaa

SEQ ID NO: 296116 - DNA, 201 bp, Homo sapiens
ccatggacccagttctggcccatgcgacataaagagaatctgctggtcatggctctggaaaaacatctgttagtaaaggagacagtctatggtcccttctrttttatcctccctcctgaattgaatgcaaatgttaaggttggatttgaagcagttatcttgagaccatgagggaaagaccaagagaatcacagaatcaca

SEQ ID NO: 296117 - DNA, 201 bp, Homo sapiens
caggctagcactgggagccaagagactaagccaaggcatcctctgcccctactttcccttctgctcccagcacttgcccccaggccagtaggcaggtatgyattgcagtgcctagggcccagctgattgccaccaacacattggggactccattgttgacagctgttgggcactgagtgctggaatctcactccaggagtt

SEQ ID NO: 296118 - DNA, 201 bp, Homo sapiens
aggcccctccttgggctgataagctctttcttccaagactgtctgcagcagaaggcaactggatgcaaagcatgcccacctcaagcaaataggacagggargattttattttctgttatataagtgcctacacaatatcttcaattttgccgcttagtctgcaaagtataaaatatttactctctggacatagaaaaggtt

SEQ ID NO: 296119 - DNA, 201 bp, Homo sapiens
cccaccttggcctcccaaagtgttgggattacaggcatgagccaccgcgcccagccaactactatgttctaaccagcatactgtgtgctcccttcaaaggrctgggagtgctctggggagctggaggtggtcagagctacatctatgagtgaatctcgtggatgggatgacagaattctagtgtgacgaggcgtgtgggta

SEQ ID NO: 296120 - DNA, 201 bp, Homo sapiens
ctgagtacctgggattataggcatgcaccaccaggtccgctaattttttttttcacttttttctagagacagggtctcgctatgttgcccaggctggactkgaagtcgtggcctcaagtgatcctcctgcttccatcttccaaagtattgagattacagacatgaaccaccatgcccagccacaactcttattattttttt

SEQ ID NO: 296121 - DNA, 201 bp, Homo sapiens
tgattccttccgccaagagaaaaccaaaggagaattcatttaaaagaaaccttttagttcccttggcagctatggcccaatgacagtcgtattttctattragtccttttcattgtggatttctccaagatttaaaacactatcacaagaagggtttgactgctttatcagttttgctgccctaatagaatccattaatat

SEQ ID NO: 296122 - DNA, 201 bp, Homo sapiens
aagtgcagagaaagacaaatttaacttacaaaaattttctgcgtatatacttgtaaaggaaaagaatacattcagaaggtagatgaaaggggcttttaggrtttgccagcagtagataagacagatgtagagagcagcagcttggatggagggaactcagaaatgagctgtccaagtaggattttttaaagtataattttt

SEQ ID NO: 296123 - DNA, 201 bp, Homo sapiens
atatcagtgcagtgatcccaatgacaaaggaaactattaagcaggaaagtcaatgtgatgttttgataggaaaaatggagaaccaaagtttcttgaacttractagtgtattagcccattctctcattgttataaagaaatactggacactgggtaatttacaaagcaaagaggtttaattggccacggttctgcaggctg

SEQ ID NO: 296124 - DNA, 201 bp, Homo sapiens
aagacaaatttaacttacaaaaattttctgcgtatatacttgtaaaggaaaagaatacattcagaaggtagatgaaaggggcttttagggtttgccagcartagataagacagatgtagagagcagcagcttggatggagggaactcagaaatgagctgtccaagtaggattttttaaagtataattttttttattaaatg

SEQ ID NO: 296125 - DNA, 201 bp, Homo sapiens
aaatacctataggctcatacctataatcccagcactttatgaggccaaggcaggagaatggcttgagcccaggagttcaagaccaacctgggcaccaacayagcaagaccctgcaaaaaattagctgggcatcgtggtatgtgactgtaatcctacctaataacaaggctgaaacaagaggatcacttgagcccaggtgct

SEQ ID NO: 296126 - DNA, 201 bp, Homo sapiens
gtggatgggtaagtatcagtccagtaggcccagaattgaaaggagagtattggggtttttgaatcccaaggaaaaactcccttgattttttttttttttttctgagacatagtcttaccctgccacccaagctggagtacagtggagtgatcctggctcactgcagcctcgacctccctgggctcaggtgatcctcccacc

SEQ ID NO: 296127 - DNA, 201 bp, Homo sapiens
acttgtaaaggaaaagaatacattcagaaggtagatgaaaggggcttttagggtttgccagcagtagataagacagatgtagagagcagcagcttggatgkagggaactcagaaatgagctgtccaagtaggattttttaaagtataattttttttattaaatgtgataaaacttccttttcaccaggcttcctaaagaca

SEQ ID NO: 296128 - DNA, 201 bp, Homo sapiens
gactacggactggcctaagccattactgctgtccaatacattgtctaaaatatggtcatgaacacttaaaacctcaccaaggaagtcttgatgcttcataygcattatcttaatactctccaaatttcttcaaaagagaactactatgtgacagcaagttagttataaccaggcactaagttttttgctttcccatctcat

SEQ ID NO: 296129 - DNA, 201 bp, Homo sapiens; identical to SEQ ID NO: 61372

SEQ ID NO: 296130 - DNA, 201 bp, Homo sapiens
tatgaactagaggaagggatttggagaccagtgaagagaaggcagaggtctagttggggtattacttgaggttgaggccgaagagagaatctatgaaggaratttgtgagaagctagttacttaggggtcaaagtgggacaaagagatactattaatatttagattagagctgaaaaggtgacccaccagggtttcctcta

SEQ ID NO: 296131 - DNA, 201 bp, Homo sapiens
ctacacatggttctaaggtcattgcatgtgacttaaataaataaaacatttactcctctcaactctatgaaatggaatctactatttttagctattgtacwgatgaggaaacaggtgaagtcccttgcccaaaatccagacaggaagtggtggagccagaatctgtgcccaggtagtctggctccagagcccacaccctaa

SEQ ID NO: 296132 - DNA, 201 bp, Homo sapiens; identical to SEQ ID NO: 61376

SEQ ID NO: 296133 - DNA, 201 bp, Homo sapiens
atgcgatggtgttttttatacatacagttgcatggtcccccgttcagagtttctgaattaaaatctcttgagttggagctcttggtagctatggtttagargggctccacaggtttggttttaatgtgtagccaaggttgaaaaccatagcttttaaaattaatgatagggctgggcgcagtgtctcatgcctgtaatcct

SEQ ID NO: 296134 - DNA, 201 bp, Homo sapiens
cccctggtcctgggacttagggacaagaggagctaggtaaaccattggaaacatggaagtctttcctgcttatgatgcagaagggactgggagttcttgawgcagttcccctgcatcagtgacccctctagcccagccacacttgccttggtcttaggttctggagaaggagaagaaacgtaagaagcgaagtgaggatga

SEQ ID NO: 296135 - DNA, 201 bp, Homo sapiens
taaggacagtaggatcagatgactgttgctgagggcaaaagatgttctggagaaagacaaggaaaggctgagggtgattaacccagcaattaaatcagctwaacataaaagtcagagggctttcttgtcagtacaaggagactctcatctatagctggagaacagacaaggttgaagatcaggctaggcactgaagcacaa

SEQ ID NO: 296136 - DNA, 201 bp, Homo sapiens
gggctaagctcagctggactttttatgagatatgtacaaatgcccctaatttttctgtagcaacaacctgattgattttgggcagtttgcaggtgtcggggataacaaaggaaatacatttcctctgcttaaagatttcatgccctaatgaaagaagggagaaacaccaattaaatagcggtgtgtccttcacagctgaag

SEQ ID NO: 296137 - DNA, 201 bp, Homo sapiens
atttttgtatatggtgataggtaggagaccagtttcattcttctgcatatggttggccagttttcccagcaccatttattgaataggatatcctttccccwttgtttatttttgtcaactttatcaaagatcagttgattgtaggcgtgcagctttatttctgggttctctattccattggtctgtgtgtctttttttgta

SEQ ID NO: 296138 - DNA, 201 bp, Homo sapiens
tgtgaagccatgagaaactgcccccatgatctagtcaccatgccccacttccaacactggggattataactgaacatgagatttgggtggagacacagatytaaaccgtatcaactagcaaagctatcttgatcaattagtcaatacgatttatttacttgctgtctgctctgttcttaatgctgttatggaccaagtgga

SEQ ID NO: 296139 - DNA, 201 bp, Homo sapiens
ctgtctttagagccactgatctccccagggaatcatagtccagcacttacttataggtggatactagtggaaatgtcacaggaggtctttggcagctttgytccctccatctcttcttcaccccaaagatgtcagggaactctcccttaacctcaaaaacccgggctctcctttatcgtcaaaaacctatgataggccaga

SEQ ID NO: 296140 - DNA, 201 bp, Homo sapiens
tttatttataatagcaccaaagtggaaacaacccaaatgtccttcaactgggaaacagttaaactgtgttacatccatgtcatggagtactactcagcaayataaaagaatgaatcattgatacaggaaacaacttgaatgaatctcaagggaattatgctaagccaaaaaaaaaaaaaaaagcaatattaaaaggttatt

SEQ ID NO: 296141 - DNA, 201 bp, Homo sapiens
ctctgtaacatttcttacaattgtgagtctacaagtatctcaaaataaaaagttaagaaatatatgaaacacaacatggtggctggaggttggcaaggtcyatgagaaaaggatacaagatgttactgaaagatagaggaatgtgttcataacagagattgggagtgctgagaatatcaatgtgcagcaagccaactcctt

SEQ ID NO: 296142 - DNA, 201 bp, Homo sapiens
gaacattttctactggcttcccttgaattaaattttaaaaaatgagctcttcttgggggaaactttgaatgtataaacacttttttttatattgaaaatgstacttacttcatttcctgttcatatatgtaaatgacaaaaaaagacttttcttaaaatattcaatatgtcactaaacaactgattcttaaaattaaagac

SEQ ID NO: 296143 - DNA, 201 bp, Homo sapiens
ggagctcttaatatttttgtaacaattgaatataaaagtttaaaatgcatcgtgccactgcaccgcagcctgggcgacagagtgagactccatctcaaatraaataaaataaaataaaagtttaaaatgcttgtatatacaatatttcctattgtgagtgatagtcaaaagtgaaatgtttaagaaacactgtaatagaaa

SEQ ID NO: 296144 - DNA, 201 bp, Homo sapiens
cagttagagtgcttttggctgagagttactgatacccatttaaaaatggcttaaataatgaggatgatataatactttacttacaagaagttatgaggttmatatagtgactcaggctaggcgcagtggcttgtgcctgcaatcccagcactttgggaggccaaggtgggcggatcaagaagtcaagagaccaagactggg

SEQ ID NO: 296145 - DNA, 201 bp, Homo sapiens
acagcctttttgctttggctaaggatcgatttatctgcccactaggatggcacaaaacatacagtaactataaactgaataataactagaaatacatatasccacacaaatagatggcctatatattttgtttaggcagattattcttagaatatttatcagtacatagtgagtcctgaagactttaaaacataagctaat

SEQ ID NO: 296146 - DNA, 201 bp, Homo sapiens
ctaaaacataattagtattctaacagaaagaacatacagaaaaatagtcagtatgtatgcaactaacatatcttccaggcaatgagaatgggacattgtayttgtttcctattgctgcataaaaatttatcactaacttagtgacttaaaacaagatgcgtttcttttttattttttattatctttatttttctatctttg

SEQ ID NO: 296147 - DNA, 201 bp, Homo sapiens
atcacttgaaccctggaggtggaggttgcagtgagccgagtttgcaccattacactccagcctgggcaacgagaacaaaactccatctcaaaaaaaaaaaagggggagggaaagagagagaagtttgttaccacaaagaccagggctggctttggcaggccagggctgggtgtgagggaatgcttgtaggcctctatgctt

SEQ ID NO: 296148 - DNA, 201 bp, Homo sapiens
gtttctacctacacttaaggggagagggtcacatgaaggcatgaacgccaggaagtggggatcctgtgggggtcaccctagcatctatctgccgcatacastatgagtagccaggcctgggtcacatacccagctcagttaccagaagaagaaagatgaaaaagctttctgggaaattaaaaatataattccttcagttca

SEQ ID NO: 296149 - DNA, 201 bp, Homo sapiens
cacctccacagggaagccttccctgatcacctatcctacctatcctagaatgctgcctctgcctcagttccctgctttatttctttcatagaacttattataatttttgtaaaaaatcatatgtatttgtttacttgtttattatgtctctccccccactagcacggagttagagctgaggaggagcagaacccctcactc

SEQ ID NO: 296150 - DNA, 201 bp, Homo sapiens
tcacctccacagggaagccttccctgatcacctatcctacctatcctagaatgctgcctctgcctcagttccctgctttatttctttcatagaacttattataatttttgtaaaaaatcatatgtatttgtttacttgtttattatgtctctccccccactagcacggagttagagctgaggaggagcagaacccctcact

SEQ ID NO: 296151 - DNA, 201 bp, Homo sapiens
gtcacctccacagggaagccttccctgatcacctatcctacctatcctagaatgctgcctctgcctcagttccctgctttatttctttcatagaacttattataatttttgtaaaaaatcatatgtatttgtttacttgtttattatgtctctccccccactagcacggagttagagctgaggaggagcagaacccctcac

SEQ ID NO: 296152 - DNA, 201 bp, Homo sapiens
tcttcctctgatgaggccttcctattctctgagacacaacaatattgaaattagaccaattaataaccctacaatggcctctaagtgcttaagtgaaaggragatttgcacgtctcccactttacagcaaaagctagaaatgattaagtttagtgagtaagacatatttatagctgaggtgggcagaaagctggacctttt

SEQ ID NO: 296153 - DNA, 201 bp, Homo sapiens
cctccatctcccgggttcaagcgattctcctgccttagcctcccacgtagctgggactacaggcacccgccaccaggcctggctaatttttttttttttttgtatttttagtagagacgggggtttcaccatattggccaggttcgtctcgaactcttgacctcgtgatccgcccacctcggcctcccaaagtgctgggat

SEQ ID NO: 296154 - DNA, 201 bp, Homo sapiens
ggccagggcgggacttctgtcctaccgttatatggtttgaatagcttctgaagaatttttcaagttacttagaagaatcatgtgactttatggggggcctyggtcacatggaccggaagctgctttctggtggcagatgtggctctgaagttgtgccagttcttggctgtaagattgctgaggtactttcttttccatttt

SEQ ID NO: 296155 - DNA, 201 bp, Homo sapiens
ttttcttcattattccattttctttcaaagacatacacaggtattaaaataagtaaaaaaaagttcttgagtgtgttggaaagtgttttttttttttttttgagacggagtctctctctgtcgttcaggctggagtgcagtggcacaatttcagctcactacaaggtccgcctcccaggttcacgccattctcctgcctca

SEQ ID NO: 296156 - DNA, 201 bp, Homo sapiens
aactaaacttaagccttaggccatgatttcctgattttataatcaagaatgccttcagccctcatgggcatgccaaagtcaccaaattgtgcctttgctcmaccaggatgtttagtttccactagatagttccactttaagactacagaacttaaacttcctcaggaatgtcagttttgcaatgtggcctctaagtcacgg

SEQ ID NO: 296157 - DNA, 201 bp, Homo sapiens
cttggagacttggaggcagtggaagtagcctcaagttgtggctgaggtcagttaccatctgtgggttttttttgtttgtttgttcgtttgtttttttgagrtggagtcttgttccattgcccagactggagtacagtggcgcagtctcagttcactgcaacctccaccctccacctcccgggttcaagcaattgtcctgcc

SEQ ID NO: 296158 - DNA, 201 bp, Homo sapiens
tttatgtgtttgtccttgaagaagctgtataaccttcagagcttcagtttcctcatttgtaaaatggagacatagcagtatcttctgcgcagaaattattkcagggaggaaaggatataaagtatctaagtgcttggcacaatcccaggcacacagtgtatgtgcaataaatgctagaaatttttattattatcaatcctc

SEQ ID NO: 296159 - DNA, 201 bp, Homo sapiens
ttgttgacattcataccagacgacattagcagacaccgtataaatgatagttattttaacctatttatagtggcattattggtttttctttaatttttcaraaaaccatttgtcaagattacaaagctaagtgctggggacatgaaggtgaataacagttcctgccctccaggaagatcataatttaataatcgagacagc

SEQ ID NO: 296160 - DNA, 201 bp, Homo sapiens
tgaacccgggaggcggagattgcagtgagccgagattgtgccactgcactctagcctggctggagacagagcaagactccatctcaaaaacaaaaaaaaaaggttttattctcttgttgtaaattacatgttttagatttttggttttgtaaagtatcttgtactcaatttaagcaaaattttaaaattagaggcttaaaa

SEQ ID NO: 296161 - DNA, 201 bp, Homo sapiens
ttgacttggagacttggaggcagtggaagtagcctcaagttgtggctgaggtcagttaccatctgtgggttttttttgtttgtttgttcgtttgtttttttgaggtggagtcttgttccattgcccagactggagtacagtggcgcagtctcagttcactgcaacctccaccctccacctcccgggttcaagcaattgtcc

SEQ ID NO: 296162 - DNA, 201 bp, Homo sapiens
cctctaagagagtgcttagcttaggccgggcacagtgtctcacacttgtaatcccagcactttgggaggccaaggcaggcagatcaccttggagaggtcargagttcgagaccagcctggccaacatggcgaaaccccgcctctactaaaaatacaaaaattagctgggtgtggtggcacatgcctgtaatcccagctact

SEQ ID NO: 296163 - DNA, 201 bp, Homo sapiens
atgggcatgcatataactccctatacacacagtgcctgctcaattccaaagggtaaggaaagtaccacatatgaggaaagcccaccctaagggaagagttrtgggaaagaggtgagcctgtaagtcctgggatcaaggttaaagacccccttttttctgtcttcttttgcacccttttctttcttggacattcaggtgtcc

SEQ ID NO: 296164 - DNA, 201 bp, Homo sapiens
actggaacaagtagtacacacgtgggtctaaaaatcacacatacagtgtattgtatgagttatccctaaggcgcgcacacacacgggtaggtattacctgyacatttgaaatctcactccataactaatttttttagcccaggctcttctcattgggttcctggacaaaatcatttctaacccagctaagaaatatggaat

SEQ ID NO: 296165 - DNA, 201 bp, Homo sapiens
  misc_feature (1)...(201): n = A,T,C or G
tttttgtcatctctggaattcctgatttatagtatataaatattcttccgtgagtggtgaagggaaaagcgaaggaaaaatattaaaatccacttactgtntgactctgttgtgtcaagagctgtgctagaaaggcagaatttgctgggggtgctggggagtttcctagagagtcatcactgcccccaccctacaggagac

SEQ ID NO: 296166 - DNA, 201 bp, Homo sapiens
gcaactccaaagcaggagctccaaaattattctcagtagtgacagcatcactagaattagtacacagcttgccaagagcaggcttttgaaggggagaaatrctgatttgaatgtataaatactggcatatttattttaacatttggataaagaattggaagcatcagcaagtgttacgtccaagtgaataagtacactgct

SEQ ID NO: 296167 - DNA, 201 bp, Homo sapiens
gatgtaattacagatttacacatgcttataagaaatagtacagaggccagacacagtggcttatgcctgtaatcccagcactttgggaggccgaggtgggmagatcacaaggtcaggagatcgagaccaacctggccaacatgatgaaaccccgtctctactaaatatagaaaaattagctgagtgtggtggcatgcacct

SEQ ID NO: 296168 - DNA, 201 bp, Homo sapiens
caagggattctcctgcctcagccctccctagtagctgggattatgggcatgcaccgccacgtccggctaattttttttttatttttatttttgtatttttagtagagacagggtttcttcatgttggtcaggctagtctccaacttctgacctcaggtgatgcgcccgcctcggcctcccaaagtgctgggattacaggca

SEQ ID NO: 296169 - DNA, 201 bp, Homo sapiens
tttgccagcaataacaagcacagactttccagtcacaaacagctacctagaaagaaatgacaaagtactgattctttttccaagctgctgatccgataacsaacatgagatttagtatctataatggctgtctcacttcatctcctgtgcctgtcataattcctagcacattaaaggggctcaataaatatttgtggaatg

SEQ ID NO: 296170 - DNA, 201 bp, Homo sapiens
tgtgttctgcctgggaggtgaatcatccctttgcccagtgtatctaccccccattagtcacttaacagggtcttggcgatcacatcaactgttgaggtatygcagtgcttgtgttcaagtaaccctgttagaacaggcagatggttagatgtgagcatgagagggagcccctggaggaggaagtgctggaaaatctagcat

SEQ ID NO: 296171 - DNA, 201 bp, Homo sapiens
cataggaaatcctcatggagttgcctacctggagctcaagacaaggcccgagacatagattgggacctaatctacctagaagtagaggagatttacagctstgggaatggatgacacatttgtgtttgcagcagtaggtgaccatttcctcctacgtgcctgctcaaaggctttcaaattgccactgaaactccttaagct

SEQ ID NO: 296172 - DNA, 201 bp, Homo sapiens
aggtctccaaaaatgccatgtgctattttctctaagcctttgcttaccatttctcactgcatgaaacattcttcacccctccccttatcattgcctggccwtgtatcttttgggtctccatgtagattatacactctggaaagccttccatgacaccaacttagattgtcccctctatgggctttaagagcgtgtggtaca

SEQ ID NO: 296173 - DNA, 201 bp, Homo sapiens
ttcaaactcctttgcttctaagtgtcagaaagcccaatccaaagagcttaagcaaaaagaggaattcgcggctcatataagcaaagaagtctagaggagtstcgtgcccatcattgaaccaatcgttgttctttcaggagaatgcaaggctctgattggccaaacctgggtcacatgtcacccccatttctgctgtcccaa

SEQ ID NO: 296174 - DNA, 201 bp, Homo sapiens
gacaactgtaagagaatcaactaaaaaactatcaatgattagagaatacagccttaagaaggactggtggatgcagaaaaagggttcaggagagagggtarggctttcagggaacctggaatgttggagactctcccgctccagaaggagacaattagaaagggcagagttagtgcagaatggcctgagcccaggagggga

SEQ ID NO: 296175 - DNA, 201 bp, Homo sapiens
attcttttcagcttcctcggtcttcactgtgaaaaagtaaaggttctcatttctacaactgtgtcgagtatacgctgacctgatgttttaattcatggctmatcctcacagtaccaagcatagaatagatgctaaaataaatgtataaactcactgggttgaactgaatgaaatcaaattatcttttagaaaaatttgaat

SEQ ID NO: 296176 - DNA, 201 bp, Homo sapiens
tttgcatagagtttgtacatgttttctgcaaaagcccaggcagaggcctctgggaggggagtttggtgatgaagtcagccagaatgaggcttttgatatayggaacttttgcctgatttcaagcaatatatcttctgctccctttattctttccactttctcagctccaccagccacatggttttcttttttatccaacag

SEQ ID NO: 296177 - DNA, 201 bp, Homo sapiens
ttcttcctttctattttttctcttttttaaactaaaaatgtaattattggaaaacataaagagaaattggaaataaatataaagttataaagaagcactayaatacttaaatctccattggtattagaggttatatagcgttcttctctaagagctaggacaaagacaagctggaacgtgagttatatgtgctatttcctc

SEQ ID NO: 296178 - DNA, 201 bp, Homo sapiens
caccttctcccagaagctccgcctgaaatcactctcagcccatacccaactcccaggctgaattaggtgccctctccacgccaccctcccctcacccttcrctttctccaaggctccctcagcaccctcagccatagcacactattgttaactgtctatttacatattggttcttcccattaactggtctgatttttaaag

SEQ ID NO: 296179 - DNA, 201 bp, Homo sapiens
ctcagtcaaattctttcttctgaagaggcacagacttaagttgctgtggaccctatggattcactgccagtaattcgtggtaactcagatcttttccatcsctaacaacactgcaccacatagagcagcagaatggcttgtagaggtgcaaatgagaggccagcttgaaggtgatactttataatgtatatcctttttttt

SEQ ID NO: 296180 - DNA, 201 bp, Homo sapiens
ctcagcctcccaagtagctgggattgtatgtgcccgccatcacgcccagctattttttgtattttcagtagagacggggttttgccatgttggccaggctvgtctcaaactcctgacctcaagtgatccacctgcctcagcctcccaaagtgctgggattacaggtgtgagccaccaggcccgacccttacagagtatatc

SEQ ID NO: 296181 - DNA, 201 bp, Homo sapiens
atagcagcaaggtagcccaggtatctaagatccaaaaatgataccctgcagtcatgtgttacctcctctgggggacatttgcaattgactattctttttastttcttcttcttcttcttctttttaaaaagttcccaagagctgtaaatgcagtttactattctttaactctaaagtcaactttctgtgtctggaagtgca

SEQ ID NO: 296182 - DNA, 201 bp, Homo sapiens
cgggtaccgtggtgctggacgatgtggagctgcgggaggctcagagagattacctggacttcctggacgacgaggtgagggaggcgccggcgcgcgggctstagcgctcggagcccctgcggacgcggcccggccgggaagccagaggcccgccagacctccagaccgtgtgccgcagcggagcctgccgggcccgagcct

SEQ ID NO: 296183 - DNA, 201 bp, Homo sapiens
gcagaatggcttgtagaggtgcaaatgagaggccagcttgaaggtgatactttataatgtatatcctttttttttttttttttttgagatggagtttcacvttttcacccaggctggagtgaagtggcatgatctctgctcactgcaccctccgcccacggagttcaagtgattctcttgtctcagcctcccaagtagctg

SEQ ID NO: 296184 - DNA, 201 bp, Homo sapiens
ttgtgctgacttcctaaaagagaaaacaccaagttctgggagcaggaaatctaaggccaattcatgctgacttcccaaagctggatcaaaaggaaaacaastgggactgaaggcaggcaacctgaagccaattaacacaaacttcctaaggctaaaccaaacgggaaaaactacatctccctactccgagtaacaaaggat

SEQ ID NO: 296185 - DNA, 201 bp, Homo sapiens
ttcccttgcaacatgtagactaccataccctccttctttcccctccagcccactttccctctttggatattgaagacctcaaattcatctttagagaaagkcacagaccacagattacttctgtgattctgtgtttctttcttctgggcatgtccttaaccttggcaaaataaacttctaaattgatggagccctgcctca

SEQ ID NO: 296186 - DNA, 201 bp, Homo sapiens
ataaataagcaagcgtaaagtaattccaaatgctaagggctacaaaggcaaaaccaaaaacatttggaagctatgaaagaatagcaggtagaacctaaatkagatgggttagcgggtgaaggcagggtgttgtcagggaaagtctctaagggagtggcatttatttttattttatttttattttttttgagacagagtctt

SEQ ID NO: 296187 - DNA, 201 bp, Homo sapiens
atgtatcttttgggtctccatgtagattatacactctggaaagccttccatgacaccaacttagattgtcccctctatgggctttaagagcgtgtggtacagcccctttctgtagttccaatagcactgtattgtcattacctacttacttttctcttatgaaactataagcttcttgaagatagggatggtgtctagcca

SEQ ID NO: 296188 - DNA, 201 bp, Homo sapiens
cttgtgcctgcaatcccagcactttgggaggccaaggtgggcggatcaagaagtcaagagaccaagactgggctaggcgcagtggctcatgcctgtaatcycagcattttgggaggccgaggtgggcggatcacaaagtcaggagatcgagaccatcctggctaacatggtgaaaccctgtctctactaaaaatacaaaaa

SEQ ID NO: 296189 - DNA, 201 bp, Homo sapiens
aggagttaggaagttgagcaaatggtagcaggaaaagtattccaaggaacagcatctgcaaaggtcctggggtaggaaggaagaaactcagtgaatttgargaactgaaagaagcgaggggaggcaaaggaaagtggggaaagataaagctgcttcttaccaactagactttgaactccttaggcccagggcccccatttt

SEQ ID NO: 296190 - DNA, 201 bp, Homo sapiens
ggaggcagaggttacagcaagccaagattctaccactgcactctagcctggcaacagagcaagactctgtctcaaaaaaaaaaaaaaaaaaaaaaaaatawatatatatatatatatgtgtgtatagactcaataacatcagggtccctggtagacttctctgctgttctcttaactttcccttcaagggcaagatggctc

SEQ ID NO: 296191 - DNA, 201 bp, Homo sapiens
aacactgaggatacaatgaacaatggggaaggcaggaaattgagagctggagagacccatcaagctgaaatgcaaactcattagtcagctcagatttgaaraatgccgcattgagaaaagagaatgtagatgcaatgaaggtggcttagtctgctcaggctgtcataacaaaatgccatagacttttcgatggcttaaggc

SEQ ID NO: 296192 - DNA, 201 bp, Homo sapiens
aagtcattctgttgtcttcttcggaccttaagatctccacttttttagaatttcctcttcaggaagtacttgggaagtactcttctgttgattactgtggscaagcttctttacttgaaaagtgaaatacattggaccagatcttctggaggttgtctatggtgatgcttaagagcgtgggctttggagttaacacctgta

SEQ ID NO: 296193 - DNA, 201 bp, Homo sapiens
caggaggcagaggttacagcaagccaagattctaccactgcactctagcctggcaacagagcaagactctgtctcaaaaaaaaaaaaaaaaaaaaaaaaawatatatatatatatatatgtgtgtatagactcaataacatcagggtccctggtagacttctctgctgttctcttaactttcccttcaagggcaagatggc

SEQ ID NO: 296194 - DNA, 201 bp, Homo sapiens
cagcaggaagacattgaggcacaaaataaatggggtattgtatgagaatgcctagctttcaatgagcttatgtctccaagcttggacaaattccggctggrgtaccaacagaatttatatatgagaagactgttggcagcttttcagggactgtggggccggggagagacgccagaagactgtggctgggtacacactatt

SEQ ID NO: 296195 - DNA, 201 bp, Homo sapiens
tgtgtcttgctgctaagttccttggggtagacagatctattgctgagcatgccttctatgaggttgtggatgccatctgtgctatcgcctggaaaaccagyctgactttgaggaggtgctgaaagatagcacagatagagaagttctggaccaaagatggcttcctaatgtgtgctggggcttctggaggtacacatatcg

SEQ ID NO: 296196 - DNA, 201 bp, Homo sapiens
ccaggaggcagaggttacagcaagccaagattctaccactgcactctagcctggcaacagagcaagactctgtctcaaaaaaaaaaaaaaaaaaaaaaaaatatatatatatatatatatgtgtgtatagactcaataacatcagggtccctggtagacttctctgctgttctcttaactttcccttcaagggcaagatgg

SEQ ID NO: 296197 - DNA, 201 bp, Homo sapiens
tccccccactagcacggagttagagctgaggaggagcagaacccctcactcccaaatgcctagagggatctggcaggtagcaaagtgtgaatctggcttgrtaaggactgtgtctatgtgtctaataactgtcttttgctgatacgtgggaaatatcggcccagtgttgacaaaaagcatattttttttcaaaaggctgga

SEQ ID NO: 296198 - DNA, 201 bp, Homo sapiens
cttgctgctaagttccttggggtagacagatctattgctgagcatgccttctatgaggttgtggatgccatctgtgctatcgcctggaaaaccagcctgaytttgaggaggtgctgaaagatagcacagatagagaagttctggaccaaagatggcttcctaatgtgtgctggggcttctggaggtacacatatcgaactg

SEQ ID NO: 296199 - DNA, 201 bp, Homo sapiens
atggagtactactcagcaatataaaagaatgaatcattgatacaggaaacaacttgaatgaatctcaagggaattatgctaagccaaaaaaaaaaaaaaaagcaatattaaaaggttatttactaaatggtccattttcacaatatcattgaaatagcaaaattataaaaatggagaacagattagtccaatggtccccaa

SEQ ID NO: 296200 - DNA, 201 bp, Homo sapiens
ctgcaaggatatgctttcagctaagagtcagcttgaaataagtttgctaaactcattcattttaggtgttaatagcagcaaggtagcccaggtatctaagrtccaaaaatgataccctgcagtcatgtgttacctcctctgggggacatttgcaattgactattctttttactttcttcttcttcttcttctttttaaaaa

SEQ ID NO: 296201 - DNA, 201 bp, Homo sapiens
catggagtactactcagcaatataaaagaatgaatcattgatacaggaaacaacttgaatgaatctcaagggaattatgctaagccaaaaaaaaaaaaaaaagcaatattaaaaggttatttactaaatggtccattttcacaatatcattgaaatagcaaaattataaaaatggagaacagattagtccaatggtcccca

SEQ ID NO: 296202 - DNA, 201 bp, Homo sapiens
agatgcttcagggagagaatttttggcacaaagcacagccttaacaggagtacagaaatagggagcctaagggccatgtatgaggaaagcaagacctctartgtggcttgagaacaaggttactaaggccaagtaactgaaaacattttttaaaaattgcgggtcataggccgggtgtggtgactcatgcctataatccca

SEQ ID NO: 296203 - DNA, 201 bp, Homo sapiens
ttagcagcattgtgtttttctgagcaaagacttcgcacaggggctggggccacctttagggactgctgtggtctgaatgtctccccaaagtcacatgttgsaacttaatcaccaatgtgatagcactaacaagtggggccttcagggggtgattaagtcatgatggtggagctctcataaatgtgatcagtgaccttataa

SEQ ID NO: 296204 - DNA, 201 bp, Homo sapiens
catgcccggctaattttgtatttttagtagagacggggtttcactgtgttgaccaggctggtctcaatctcctgacctcgtgatccgcccatctcggcctkccaaagtgctgggattataggcatgagcccggccgggacttcttaatacccccagtgacagcatgcgcagagcatcactgttttgaaattttagaatatt

SEQ ID NO: 296205 - DNA, 201 bp, Homo sapiens
ctggaggtggaggttgcagtgagccgagtttgcaccattacactccagcctgggcaacgagaacaaaactccatctcaaaaaaaaaaaagggggagggaargagagagaagtttgttaccacaaagaccagggctggctttggcaggccagggctgggtgtgagggaatgcttgtaggcctctatgcttcggcctgggaca

SEQ ID NO: 296206 - DNA, 201 bp, Homo sapiens
agttgtttaaattaataattctctctttctgagagagaagagttttacaataaggataaaacttaatgtcttactgtaacctcagattcttcttggtgggwtagatacattttggccatttgtttttgaaatgaagaatttttaccaccagggttttaggaaacatttttatctatgaattttgtttactggacaccaaga

SEQ ID NO: 296207 - DNA, 201 bp, Homo sapiens
taggaaacatttttatctatgaattttgtttactggacaccaagaaactccatagccaagttttacgttttttctttttatactttaaacacataatacartgtatttactgaaaaaaatttgaaacacattgaaaagtatttagaaaaaaaattaaaatcaattgtaactctatccctcaaggacaaccatcaactgtat

SEQ ID NO: 296208 - DNA, 201 bp, Homo sapiens
atactttaaacacataatacaatgtatttactgaaaaaaatttgaaacacattgaaaagtatttagaaaaaaaattaaaatcaattgtaactctatccctmaaggacaaccatcaactgtatcttaaaatgcttgaatcagctcgtatagatctcacttttttttttgagaccggagtgcagtgtttattttttacttttt

SEQ ID NO: 296209 - DNA, 201 bp, Homo sapiens
gggccaaaggatatacgcttttaagggtttagtaagtgctgttaaattgtcccgcattgacgctgaccgggttactattttacagtgaatgggaatgccartttcccacacgctagtacaatagtttagctttaaagggggctcctcaagggtagcactgccatcagaggcagatgtgtgtgtgagaaagaatattgaggg

SEQ ID NO: 296210 - DNA, 201 bp, Homo sapiens
  misc_feature (1)...(201): n = A,T,C or G
agtttagctttaaagggggctcctcaagggtagcactgccatcagaggcagatgtgtgtgtgagaaagaatattgaggggacgcctctactgtattaatantatggattttcctagtatagctgtttcctgagagcatttgggtttgtttactcctcttccccctttcttctgtctggggcaggttgaaggcattcaaggt

SEQ ID NO: 296211 - DNA, 201 bp, Homo sapiens
gaggatccatttttttgagttctgcccagtctaatttttctttctcttgcttatgtacaggcttctgaacaatgcctttgaggagctggttgccttccagmgggccttaaaggattttgtggcctccattgatgctacctatgccaagcagtatgaggagttctacgtaggactggaaggcagctttggctccaagcacgt

SEQ ID NO: 296212 - DNA, 201 bp, Homo sapiens
tccagttgctctgtgcactttattttcttgtggactcctgtttgtttggctccctgcttggggcctatgtccaagaggtttgtcccaagagagcttcaggrgaaactttggaaaaagctttgctatattatatacacctccttgatgaactgtgctgtgctgtttcacctggtataagcatttcagataatatatacattg

SEQ ID NO: 296213 - DNA, 201 bp, Homo sapiens
cttttccaggataggttcttgcttgttgacaggtgatccactgcaggacctactgtggggacctgaaagaggctgctcaagtgggctgacatgtctcaagkccagtcacccctgagggtatcgctgttgccaccctgcagagattgcagtggtgacccagattcaccagagaaaaccgctaaattatctgcgtgcctcatt

SEQ ID NO: 296214 - DNA, 201 bp, Homo sapiens
tatttctcctgtaggatatctttgaccagctggccaagtcattggccccaagtatccatgggcatgactatgtcaagaaagcaatcctctgcttgctcttrggaggggtggaacgagacctagaaaatggcagccacatccgtggggacatcaatattcttctaataggtacgatgttggggatttgctttagactgttgt

SEQ ID NO: 296215 - DNA, 201 bp, Homo sapiens
aattcgtatgtatgtatagaaagtagaatggtgattaccaggggctaggggcagggggcaaagttgttgtttaatggtgctatgatctgaatgtgtgggtyctctcaaaattcatgtgttgaaacctaactcccaaggcgattatattaagaggtggggcttttggggaggtgattaggtcaggagggcagtgttgtggtc

SEQ ID NO: 296216 - DNA, 201 bp, Homo sapiens
  misc_feature (1)...(201): n = A,T,C or G
gtctcgtttggaacaagcagcagtttgcaaaggcctaagcctagtgcttcactttgacttagtggttctgtttccttttctccgtagttagaggcacgtgntggggcttccttgcctttctgtctccaaactctttctctctcttaactgctgtgggtattttagaaggaagactcgccagccagatgccaaagatgggga

SEQ ID NO: 296217 - DNA, 201 bp, Homo sapiens
ctggggcaggttgaaggcattcaaggtggccctcttggatgtgttccgggaagctcatgcgcagtcaatcggcatgaatcgcctcacagaatccatcaacygggacagcgaagagcccttctcttcagttgagatccaggctgctctgagcaagatgcaggatgacaatcaggtcatggtgtctgagggcatcatcttcct

SEQ ID NO: 296218 - DNA, 201 bp, Homo sapiens
catcgttgtcctcctcctcctcctcctcattcttctttcttcctcttcctcctcttgcccttccctttccccttccttcccttctcttctctctctctctytttttttttgttttgtttagagatagggtctctttctgttgcccaggctggggtgcagtagcacaatcatagctcactacagccttgaactcctgggctc

SEQ ID NO: 296219 - DNA, 201 bp, Homo sapiens
ttgaactcatgacctcaggtgatctgcctgccttgacctcccatagtgctgggattacaggtgtgagccaccatgcccagccaagtgatccttttttttttcaaagaagatacgctgtacatgcactgcaaaaaaaaaaataaataaagagaaagaagctgtacatttatagtgacatttccaggataacatttaaaaaat

SEQ ID NO: 296220 - DNA, 201 bp, Homo sapiens
gttcttgaactcatgacctcaggtgatctgcctgccttgacctcccatagtgctgggattacaggtgtgagccaccatgcccagccaagtgatcctttttyttttcaaagaagatacgctgtacatgcactgcaaaaaaaaaaataaataaagagaaagaagctgtacatttatagtgacatttccaggataacatttaaa

SEQ ID NO: 296221 - DNA, 201 bp, Homo sapiens
agacaagaccacatagctgcaagtaccagacctgagatttctacccaggtctgccctccccaagaccctcaggctgagcacagagacccacagctgttccycactggcagccacacgccacccttctgcaggccttctccccacactcctcactggtcctgccctgagatctccagccccacatggcctgtggccacactt

SEQ ID NO: 296222 - DNA, 201 bp, Homo sapiens
gctggtctcgaactcctgacctcagttgatctgcctgcctcagcctcccaaagtgctgggattacaagtgtgagccaccgtgcccagccagaggcatcagrcttataagaggcattagctcattccatgcggagttgctaacaaataccagttcacagtcctggcctcttacctggagataggctctgatctccaagcccc

SEQ ID NO: 296223 - DNA, 201 bp, Homo sapiens
gcataatcttggctcactgcaacctccgcctcctgggtttaagtgattctcctgactcagtcttctgagtagctgggactacaggtgcccaccaccatgcytggctaatttttgtatttttagtagagatggggtgtcaccatgttggccaggctggtctcaaactcctgacctcaagtgatctgcccacctcggtctccc

SEQ ID NO: 296224 - DNA, 201 bp, Homo sapiens
atgttggccaggctggtctcaaactcctgacctcaagtgatctgcccacctcggtctcccaaagtgctgggattataggcgtgagccaccgcacccagccygaaaaggagtcttaaactccaacaggaggagccccttcaccctgggccaatttgcaggctcttgtctctacccttggtgggtggtgggcgggggtgtttg

SEQ ID NO: 296225 - DNA, 201 bp, Homo sapiens; identical to SEQ ID NO: 61380

SEQ ID NO: 296226 - DNA, 201 bp, Homo sapiens
catctgagtatgggcagcctgcccctgttggctggggtggatgcactgaggctgcgacagagccacactctgggcctggggcttgggttccagcaggtcascttcttgggtctctgtggattgggtgcagaatctgaggctgcagggggagattgaaggaagccatgaggaggcaggtggaggggaagccaaacattcccc

SEQ ID NO: 296227 - DNA, 201 bp, Homo sapiens
gctgatgctaagttggttctccctacaggccgcgtgctggtacactgtgccatgggggtaagccgctctgccacacttgtcctggccttcctcatgatctrtgagaacatgacgctggtagaggccatccagacggtgcaggcccaccgcaatatctgccctaactcaggcttcctccggcagctccaggttctggacaac

SEQ ID NO: 296228 - DNA, 201 bp, Homo sapiens
ccccaggccatgccccaggtaggtggcaggccactcagccacctggagaggtcacagtgggggatgaggaggacagcttggtcttcacttccgccttgccygacagcctcccactgggtgagcctggccaagccggcagcctcctgggtgcctgtttctttttctggtcctggcactgcctaccaaagggaaaagatgttc

SEQ ID NO: 296229 - DNA, 201 bp, Homo sapiens
  misc_feature (1)...(201): n = A,T,C or G
agggttctaggcctcagccccagctgagcttgttaatacctcatgtgaaatagatgaagcccttcctgcagcatccccgtggcacctaggcactgcaccangggcttccccatcagctggatccaccctctgggagcctgcctccagccactgcggtgtccactctgttccaggatggactcactgcagaagcaggacctc

SEQ ID NO: 296230 - DNA, 201 bp, Homo sapiens
gggaggctggaagaggggagtagacagcatgctttataattaaactcaaatcaaaaaatagaaacagcatcaagtgtgcggagacaggcggctgaaagccrgcagcacgaactgcccgtcagagaagtgcacagcctgggccagatactcccacaggtgggtgagtgctcctaatttggggggggtaggatgtggtccctg

SEQ ID NO: 296231 - DNA, 201 bp, Homo sapiens
agctcagacctcagagacccagtgcaggtatggctgcaggcatgggtgtgccctgttcccaccatctgggagtgcaagcggggagtagtatcaaggtatgygtgtatgacaaaggtctgtggatgacagagaagatttctagtaggcccaattgaaggtcctagctgaccacagttagcatggggagagaccttaaagacc

SEQ ID NO: 296232 - DNA, 201 bp, Homo sapiens
gtacacaatatgccacagtcagacctgggctgagctgccttgattcttagcagtgctgggacagaggcctgggcctggagggaaaggtgcctgactgtgcktggcactggccatgccatggaaccagtggacaagttgggagtggcaggggaggctggaagaggggagtagacagcatgctttataattaaactcaaatca

SEQ ID NO: 296233 - DNA, 201 bp, Homo sapiens
cctcatgacccaccctcctcggtttcccaaagtgctgggattataggcttcagccaccgcgcccggccccttctcccactatcaacatacatgtacacaawatgccacagtcagacctgggctgagctgccttgattcttagcagtgctgggacagaggcctgggcctggagggaaaggtgcctgactgtgcttggcactg

SEQ ID NO: 296234 - DNA, 201 bp, Homo sapiens
accatgttggcgaggctggtctcgaactcctaacctcaagtgatctgtctgcctcggcctcccaaagtgctgggattataggcatgagccaccgcacccggcccccaaagtacttttaactagaaaagaaatatatcttcaaatactcaggatacagcataggagcccagggaggctggtgtcctggctttgtgtccatcc

SEQ ID NO: 296235 - DNA, 201 bp, Homo sapiens
acttgcttctgtcacctgtccctgtcaatctctgggaaggagaaatgacactggagaggcagagaggagtgaccacagaggcagaggggtgggcgggctggcccatggctgagacctctctcccagagctggggggagaggacaaagccacgccttgccccagcatcctggagctggaggagctcctgcgggcagggaagt

SEQ ID NO: 296236 - DNA, 201 bp, Homo sapiens
ttgctgagtcacttgcttctgtcacctgtccctgtcaatctctgggaaggagaaatgacactggagaggcagagaggagtgaccacagaggcagaggggtrggcgggctggcccatggctgagacctctctcccagagctggggggagaggacaaagccacgccttgccccagcatcctggagctggaggagctcctgcgg

SEQ ID NO: 296237 - DNA, 201 bp, Homo sapiens
  misc_feature (1)...(201): n = A,T,C or G
ggcatcgaggcggacgacaaccccttcttcgacctcagtgtctactttctgcctgttgctcgatacatccgagctgccctcagtgttccccaaggtgcacntctggatcaggcatggtggagggtggagggtgtgctttaggactctccattattccagtagcactggtgggtgggagtccagagagacaaaccctttcag

SEQ ID NO: 296238 - DNA, 201 bp, Homo sapiens
tcacccacgttgtgaatgccgctgcaggcaagttccaggtggacacaggtgccaaattctaccgtggaatgtccctggagtactatggcatcgaggcggaygacaaccccttcttcgacctcagtgtctactttctgcctgttgctcgatacatccgagctgccctcagtgttccccaaggtgcacttctggatcaggcat

SEQ ID NO: 296239 - DNA, 201 bp, Homo sapiens
ttcagccagcagatgcctgaaacaagctacctgacccgggtggggcctgacatccagtgctggcctgagtcgtgggggtaaggaggaaaacccagggcctrtaggcaggtgtgtggctcagcagtaccaggctcccttgaggaagcagatgggttagtgaccactctctggaggccccaaagatggtaactgaaaggcttg

SEQ ID NO: 296240 - DNA, 201 bp, Homo sapiens
ggcagagaggagtgaccacagaggcagaggggtgggcgggctggcccatggctgagacctctctcccagagctggggggagaggacaaagccacgccttgycccagcatcctggagctggaggagctcctgcgggcagggaagtcttcttgcagccgtgtggacgaagtttggcccaaccttttcataggagatgcgtgag

SEQ ID NO: 296241 - DNA, 201 bp, Homo sapiens
cccgacagcctcccactgggtgagcctggccaagccggcagcctcctgggtgcctgtttctttttctggtcctggcactgcctaccaaagggaaaagatgktcttcccagtatgcaccttccctagtcactggtccaggggatcaggggcagttagcaaagacaggaccccctctccaacacggcaccaggcccatattct

SEQ ID NO: 296242 - DNA, 201 bp, Homo sapiens
aggctggtctcaaactcctgacctcaagtgatctgcccacctcggtctcccaaagtgctgggattataggcgtgagccaccgcacccagcccgaaaaggartcttaaactccaacaggaggagccccttcaccctgggccaatttgcaggctcttgtctctacccttggtgggtggtgggcgggggtgtttgcaaacttca

SEQ ID NO: 296243 - DNA, 201 bp, Homo sapiens
ttcgcctgcctgaaagcagggagtctcccaggagttccaggaaacatttccaggacaactgtcaagtgtagaggcagaggcccaggaaatagtatttgggrcatgagataaggtagacagagagccccctgtttctgggcccagcctccctcctctggatacagacggtggagaagcctgactgaaggtgaatcagagaag

SEQ ID NO: 296244 - DNA, 201 bp, Homo sapiens
ggaatcacccacgttgtgaatgccgctgcaggcaagttccaggtggacacaggtgccaaattctaccgtggaatgtccctggagtactatggcatcgaggyggacgacaaccccttcttcgacctcagtgtctactttctgcctgttgctcgatacatccgagctgccctcagtgttccccaaggtgcacttctggatcag

SEQ ID NO: 296245 - DNA, 201 bp, Homo sapiens
ccacagtgagatctacctccactctcctaaccccttgtgccctctcctccaggtacgcagcccgggacaagagcaagctgatccagctgggaatcacccaygttgtgaatgccgctgcaggcaagttccaggtggacacaggtgccaaattctaccgtggaatgtccctggagtactatggcatcgaggcggacgacaacc

SEQ ID NO: 296246 - DNA, 201 bp, Homo sapiens
taagacccacgttaggagtggggatggcggaagggtgtgaggttcacacgggaatgggggcatgagcctctctcagagccctctagggcagaggtggcacscttgcctcccaccgtctctttccctatgtttctttccttttatattattactgcttttaactgtggaactagaatgcacataagaaaagtgcacagggcc

SEQ ID NO: 296247 - DNA, 201 bp, Homo sapiens; identical to SEQ ID NO: 61390

SEQ ID NO: 296248 - DNA, 201 bp, Homo sapiens; identical to SEQ ID NO: 61379

SEQ ID NO: 296249 - DNA, 201 bp, Homo sapiens
caggcatggtggagggtggagggtgtgctttaggactctccattattccagtagcactggtgggtgggagtccagagagacaaaccctttcagtaaccctyccactccatagggaaaatagctactaccattcagtgagtgtccccttcagggacaccctggaggctagcaattgcagacataactaagatgcagtgtggt

SEQ ID NO: 296250 - DNA, 201 bp, Homo sapiens
ctgagtggatatacaagaaatgtctctgctatctttgtaagtttgctgtaaatctaaaattatttcaaaaataaaaaaattagctgacaattaccaactgytttgcatatgccgggcactgtgccaagttctttagatacaaatttttttttttcaaatttcatccataatgttttatgtcttttgaaaacacatgaatcg

SEQ ID NO: 296251 - DNA, 201 bp, Homo sapiens
ccatcagtgggacccaagatagtggctccagaagccagtcatccccatctgagtatgggcagcctgcccctgttggctggggtggatgcactgaggctgcracagagccacactctgggcctggggcttgggttccagcaggtcaccttcttgggtctctgtggattgggtgcagaatctgaggctgcagggggagattga

SEQ ID NO: 296252 - DNA, 201 bp, Homo sapiens
ttgattcccttgttccctggggaagggttctaggcctcagccccagctgagcttgttaatacctcatgtgaaatagatgaagcccttcctgcagcatcccygtggcacctaggcactgcaccatgggcttccccatcagctggatccaccctctgggagcctgcctccagccactgcggtgtccactctgttccaggatgg

SEQ ID NO: 296253 - DNA, 201 bp, Homo sapiens
agctgggaatcacccacgttgtgaatgccgctgcaggcaagttccaggtggacacaggtgccaaattctaccgtggaatgtccctggagtactatggcatygaggcggacgacaaccccttcttcgacctcagtgtctactttctgcctgttgctcgatacatccgagctgccctcagtgttccccaaggtgcacttctgg

SEQ ID NO: 296254 - DNA, 201 bp, Homo sapiens
actaaaaccccagccttgctactcatgagccgtatggctttgggcatcacttttaaaacattctgagcttcagcttcctcctgggtaaaataggaacagayatcccacgagtgagacatcaggctttttgttgttgttgagatggactctcgctctgttgcccaggctggagtgcagtggtgtgacctcagctcactgcaa

SEQ ID NO: 296255 - DNA, 201 bp, Homo sapiens
ctgcctcccacccctaagagcagttcctgtctctgaaggcatagccagcccaagcagaagggaggcccttcagcagcatcgaccccttcccctgtgctggmtggaggataagcatcttgaggagcaggattagggaaggatcaggggctaagtttagagtttgggggtgactgtgataagaaactttgggttatagctggg

SEQ ID NO: 296256 - DNA, 201 bp, Homo sapiens
cagcacgaactgcccgtcagagaagtgcacagcctgggccagatactcccacaggtgggtgagtgctcctaatttggggggggtaggatgtggtccctgakcatgctgggtaatgagggccaggacacttgtgcctgtgtggggaggggtggggtttgggttgggtagagaaccgactgggtcagagatgaaggcgcagac

SEQ ID NO: 296257 - DNA, 201 bp, Homo sapiens
tggcagagggtgggagtggccctggacacactgcttctgcctgcagcccagggctgtctgaagacctgctctacacctgtgtctgtgtgtgggcctgtgcygcttccctcagcctgagtcttctaggtctttatcctggacctgtcccatcggccttggcccctaactgagggccccggacctgggtcctgctgttggcaa

SEQ ID NO: 296258 - DNA, 201 bp, Homo sapiens; identical to SEQ ID NO: 61417

SEQ ID NO: 296259 - DNA, 201 bp, Homo sapiens
gagaccctggaggaccacaagctgaatgctgttggtctttttttttttctttcttggccttcgatttttttttctgaaaggggataaaatcaaatatgagkgaagaggcatataatatgggtctgcagcatatttttgttgttttatttgtcgaataatgttttattcctttttctaattttaaaattgaatgaattgaaa

SEQ ID NO: 296260 - DNA, 201 bp, Homo sapiens
catgtgcctccatttcttcaacttccattgatgttattttttgaataacccaacataaaaacccctctagcctctctccagccctctcctgctatttgctstcttccctagtggactttcaaaaagctgcctctattacaaattaaaatgtacacagcgtgtgtttaatacgtgcaaatacgcgcacacacacacacacaa

SEQ ID NO: 296261 - DNA, 201 bp, Homo sapiens
atggtgtgtttattcatccagttggaaattggaatttacatatctgatgcaggagttttttcctttgtttttactacttagataaattttttataatatcwttttctcttattttgagacagaatctcactctgtcacccaggcctggagtgcagtgatactgtcatggcttactgcagtctcgatctcccaggctcaagt

SEQ ID NO: 296262 - DNA, 201 bp, Homo sapiens
ttgtgccagttgcacattattgtagtcaccactcatgtttaatgaagttgtataaaccaccttttattaattgataataattctatttgaattacagaggrgatccccctcttggaggaaaggtacaaatgttaaaaagcttatctgtagcctacctaattccgtaaacattgttttgaatctacaacaaaacacataaaa

SEQ ID NO: 296263 - DNA, 201 bp, Homo sapiens
agaagtgagaacatgcagtatttggttttctgttcctgcgttggtttgctaaggataatggcccctcgctccatccatatttctacaaagcacgtgatctcttcttttttatggctgcatagtagaaatgcatctttaaaaaaaattcagatcatactgtatggtcaatttttattctgatattttctacttaacatgttt

SEQ ID NO: 296264 - DNA, 201 bp, Homo sapiens
taaaatatacaaactaaattcatgttttaaaaaacacttcttaagaattacattttaacaggaaagatatgaaaaagaatttcaagctgtgtttatatttwaaattgccaagtcacaactggtttttttttttttttttttttttttgagacagagtcttgctccatcatccaggctggagggcagtggcgccatctcggc

SEQ ID NO: 296265 - DNA, 201 bp, Homo sapiens
gaagtgagaacatgcagtatttggttttctgttcctgcgttggtttgctaaggataatggcccctcgctccatccatatttctacaaagcacgtgatctcttcttttttatggctgcatagtagaaatgcatctttaaaaaaaattcagatcatactgtatggtcaatttttattctgatattttctacttaacatgtttc

SEQ ID NO: 296266 - DNA, 201 bp, Homo sapiens
atgttttaaaaaacacttcttaagaattacattttaacaggaaagatatgaaaaagaatttcaagctgtgtttatattttaaattgccaagtcacaactgktttttttttttttttttttttttttgagacagagtcttgctccatcatccaggctggagggcagtggcgccatctcggctcactgcaacccctgcctcct

SEQ ID NO: 296267 - DNA, 201 bp, Homo sapiens; identical to SEQ ID NO: 61422

SEQ ID NO: 296268 - DNA, 201 bp, Homo sapiens; identical to SEQ ID NO: 61423

SEQ ID NO: 296269 - DNA, 201 bp, Homo sapiens
ccagcttccgaaattctgggaggaaatgggtacttttccagcttcctcacacttggacttctaaagatgggtcattgttatccagtttggccagaatagaygtcatagttaataatcccatctgatgagaatgaaaaaataagcactcaagatagtctgctccactgaatataatttaatcttgagtggttcataagtcag

SEQ ID NO: 296270 - DNA, 201 bp, Homo sapiens; identical to SEQ ID NO: 61424

SEQ ID NO: 296271 - DNA, 201 bp, Homo sapiens
atttgtgtaaataaaattgtaattctgggaggaaatgggtactcttccagcttccgaaattctgggaggaaatgggtacttttccagcttcctcacacttrgacttctaaagatgggtcattgttatccagtttggccagaatagatgtcatagttaataatcccatctgatgagaatgaaaaaataagcactcaagatag

SEQ ID NO: 296272 - DNA, 201 bp, Homo sapiens
cgtgaactcaccaattctgtcatttgtttttgtttaatttaataaaaaataaaattacaaatgatctgatactaaaaatatgtaagtgttaattttgtgcrgtcagggttttcaaggatgaattgcaattcaatttcaaatacaaaagtgcttttattctaaccagtctttgttggtatattctcccctacagaaaccagt

SEQ ID NO: 296273 - DNA, 201 bp, Homo sapiens
tcaaggattctgcaaagcatagatctgcttctatggctgcatctaagagaacctttctattgaatattctcataagaataccatctccaatatcatttgtytttttcacagtctgaacctgagtccgggaaacctggattctagtccctgctctacaactaattagcttttggcattgggcaaaccatttaaccttgcaaa

SEQ ID NO: 296274 - DNA, 201 bp, Homo sapiens; identical to SEQ ID NO: 61419

SEQ ID NO: 296275 - DNA, 201 bp, Homo sapiens; identical to SEQ ID NO: 61418

SEQ ID NO: 296276 - DNA, 201 bp, Homo sapiens
aacctgagtccgggaaacctggattctagtccctgctctacaactaattagcttttggcattgggcaaaccatttaaccttgcaaagcctacatatcttcrcctctaaaatggagatgtaatataataattcctgccctaccagcttcagaagattaagtatcaagtgagataatacatgtgaatgcgttttggacattta

SEQ ID NO: 296277 - DNA, 201 bp, Homo sapiens
ttcttgctgctgctactgctattttaatatgctcagtttcttggtagatctagatgagcagtattcaaaatgtcatctttctgggaattagccatcattartactataaatattcaagagaaattttctctttaataatttgtcaaataaaacagctttaactttttgacctctgaagccagtggcttcggaataataacc

SEQ ID NO: 296278 - DNA, 201 bp, Homo sapiens
cttcatgtcatggagatttgttttacagattattttgtcacccaggtattaagcctaggacccatcagttatttttctgatcctcgcccgccacctacccyctaccctccagaggccccagtgtgtgttgttcccctctatgtgtccatgcgttttcatcatttagctcccacttagaagtgagaacatgcagtatttggt

SEQ ID NO: 296279 - DNA, 201 bp, Homo sapiens
aataataaccatcatttattactatattccactccattgtctttcttaaaatcctcacaattaccctgcaaagtaatattatctctatttaacatgtgaagaaactgaggctcaaagaggtgcatcttgccagacttctcaaagctagtggttgaacaaaaattcaaatctgaggtttttaaactccaaagcctgagcttt

SEQ ID NO: 296280 - DNA, 201 bp, Homo sapiens
ctttgtgtctcagttcctcatccataaagtaatagtaatagcacctacccttgtaattgttcaggggattaaatgaataaataggtgtaaagcccttagarcatagtaagtacatattaaatgttaaatagtttaaaattcatgtataaccattttttctagcctctttcttgcaatattatgtgctgagccaggttttgg

SEQ ID NO: 296281 - DNA, 201 bp, Homo sapiens
catatttacaccatattttctttatctatactagacacttaggttgctcccatgccttggctattgtgaataatgctgcaaagaacatgggagtgcaggtrtctttttgaggttattgatttcatttccttgggttgtataccaggaagtgggattgctggatcatatggtagttctatttttaattttttgaggaacctc

SEQ ID NO: 296282 - DNA, 201 bp, Homo sapiens; identical to SEQ ID NO: 61420

SEQ ID NO: 296283 - DNA, 201 bp, Homo sapiens
aggttacatcccttgacatcgttcattactgagttctttggactggtttgtcatatgaagatataaggtgactgattaaaccatgtcatttcattaaattygtgtaaataaaattgtaattctgggaggaaatgggtactcttccagcttccgaaattctgggaggaaatgggtacttttccagcttcctcacacttggac

SEQ ID NO: 296284 - DNA, 201 bp, Homo sapiens; identical to SEQ ID NO: 61421

SEQ ID NO: 296285 - DNA, 201 bp, Homo sapiens
taagtctagattcaccaatgtcaaacagtttattgcaccaggtaagttatgtattatatgtgcctgctaattttatgttgatttatgggaccctgatagtmccttaaaattttaatatggtttaaaaaaacacataagcagaccctttatattacatatataaagtaacaaatggtgtcaccccaatgaaatctctaaaaa

SEQ ID NO: 296286 - DNA, 201 bp, Homo sapiens
atagtaagtacatattaaatgttaaatagtttaaaattcatgtataaccattttttctagcctctttcttgcaatattatgtgctgagccaggttttggcttttttttttttttctgtttgcagaatgggtatagtagaatagtcattgattactgatcagctagtactagatttaggaaaggcagttttgatcaacaata

SEQ ID NO: 296287 - DNA, 201 bp, Homo sapiens
tgttttaaaaaacacttcttaagaattacattttaacaggaaagatatgaaaaagaatttcaagctgtgtttatattttaaattgccaagtcacaactggkttttttttttttttttttttttttgagacagagtcttgctccatcatccaggctggagggcagtggcgccatctcggctcactgcaacccctgcctcctg

SEQ ID NO: 296288 - DNA, 201 bp, Homo sapiens; identical to SEQ ID NO: 61425

SEQ ID NO: 296289 - DNA, 201 bp, Homo sapiens
cttccagggtaaccattatcacctattggtactaactttcccctacattttttgaatacatatgtgcatatatatatatatgattttctccttttaaaaaggaaaatataaaacaaaggatgcaggctatacatactgtttttgtaccttgcattttttaattaacagtgtatctaagagatcagttcatatcagtatata

SEQ ID NO: 296290 - DNA, 201 bp, Homo sapiens
cctctcctctcacagctgtttggtgatcttctgcacatcctgccctcttctatttgcctgatgctctgttgccatttagcagagtatctcttgttaaatcttttttttttgaaacggagtttcgcactgtcgctcaggctggagtgcagtggcacgatctcggctcactgcaacctctgcctcccaggttcacgcgatcct

SEQ ID NO: 296291 - DNA, 201 bp, Homo sapiens
tactccagcctgggcaacaagagtgaaactccgtctcaaaaaaaaaattaaaaaaaatacagtttttgtcttaacccaatacagtcacagtacaaacattcacacacacacacacacacacacacttgaaccaaaagattaataaaataaaatttttttaggcatatactgtatttctgtttttttttttaaatgctgttg

SEQ ID NO: 296292 - DNA, 201 bp, Homo sapiens
taaacctttttctgaattattttattgctttgtaatttacaagattcttgacattagtggtagtgttcacatttaagctgttataacagccttctaatggyagacttttctaagttttattaattgaaaatgcccacaaaatgattattttactgattcacttgtaattcccccttcctttgacaggatatctatagagaa

SEQ ID NO: 296293 - DNA, 201 bp, Homo sapiens
actccagcctgggcaacaagagtgaaactccgtctcaaaaaaaaaattaaaaaaaatacagtttttgtcttaacccaatacagtcacagtacaaacattcacacacacacacacacacacacacttgaaccaaaagattaataaaataaaatttttttaggcatatactgtatttctgtttttttttttaaatgctgttgt

SEQ ID NO: 296294 - DNA, 201 bp, Homo sapiens
agtccagttcttttaatgcttgccttaaccttccctgaggttttctaatttccctagccagaaacaatcttttgaactcttgtggaatttttaaaactactttttttaccattttaaataagtggcacacatgttattaattagatatgcccagtatgtaactacttgtgttcagatgtaaggaccctaatttaatgtaag

SEQ ID NO: 296295 - DNA, 201 bp, Homo sapiens
tagtcatttcctttgttattggaactatctaacaaactctgtgaattaacaaagaatcctacatattacagagggattttatcatacaaactggcgatcckacagggactggccgtggaggagagtctatctttgggtaagttgttttatttatttatttatttatttatttatttatttacttttaacctctggaagggc

SEQ ID NO: 296296 - DNA, 201 bp, Homo sapiens
ttcgtcttcatggaaaatttgttatttcatgaagtcatcttcatcagtgatcttagctagatcttccagataacttgatgcatgctgcagcttcttttttytttttttttgagacagattctcactctgttgcccaggctggagtgcagtggcatgatctcagctcactgcaaccttcgcctcctgggttcaagcaattct

SEQ ID NO: 296297 - DNA, 201 bp, Homo sapiens
acacaagaagaaaacccatcactgttctgaagagaaagaagatgaggactacatgccaatcaaaaatactaatcaggtacctctaatgtccagacttagaygtggagaaataaatattttatccctctgtaaatgatgtcttagtgatataatttaggaggtaagggatagttctaagcagagatgggtttgttcctaaga

SEQ ID NO: 296298 - DNA, 201 bp, Homo sapiens
tactatagagacaaggtcttactatgttgcgtgggctggtctcaaactcctggcttcaagagatcctccttcctcagcctcccaaagtgttgggattacargtgtgagctatcatgcctggctgtgatacttcttattggacataatgttgtcttttgatagacttcagaaacactgaggagatcttactggctgtgttgc

SEQ ID NO: 296299 - DNA, 201 bp, Homo sapiens
tacgtgagtgatgttgtgtcctcagaggtcacatctggaggtgtacgatattcattggaagatgagtaattttggtcacttggtcatggtagtccactgcytggtgtctccaatagacaatctgtggctagacacttggagatctttcaaatgtcttgttccttgtcaaatttcccccataaatttctcagccattcatga

SEQ ID NO: 296300 - DNA, 201 bp, Homo sapiens
cactgcaagctctgtctcccgggttcacaccattctcctgccttagcctcccaagtagctaggactacaggcgcccgccaccacacctggctaattttttrtatttttagtagagacggggtttcaccatgttagccaggatggtcacgatctcctgacctcatgatccacccacctcagcctcctgaagtgttgggatta

SEQ ID NO: 296301 - DNA, 201 bp, Homo sapiens
atcatacgatgctgttggatagcatttagtagaattcttttaagattgaagtcaatcctctcagaccctgctactactgtatcagccaagtttatgtactrtcctaaaccttttgttgtcatttcaacagttatcatagcatcttcaccagcagtagattccatctcagtaaatcacttggctgggtgcagtggctcatgc

SEQ ID NO: 296302 - DNA, 201 bp, Homo sapiens
tcctcggctcactgcaacctctccctcccgggttcaagcaattctcctgcctcggccttccgaatagctgggattacatgcgcctgccacaacacctggcyaatttttatatttttagtagagacggggtttcaccatgttggccacgatggtctcaatcacgtgacctcatgatccgcctgccttggcctcccaaagtgc

SEQ ID NO: 296303 - DNA, 201 bp, Homo sapiens
tcaggttaggaaatgagtaagaatatgagatttgcttagaaatgaaggactggaaggagcccacagagttattttttaaactatccagtaaggcttagagrgtttcaatcagaaatatgtgttaggggaaaaaatgcactttttctatattaaaaaatattattttcttcttttaaatgtaaagcattcctattgtgaaga

SEQ ID NO: 296304 - DNA, 201 bp, Homo sapiens
cccaaaactcctattaaaggaaaaaaaaaggtaatttaaaatgttttttttctagacttattgcccttttattttattttattttattttattttgagatrgagtcttgctctattgcccagactggagtgcagtggtgcgatcttggttcactgcaacctccacctcctgggttcaagtgattctcctgcctcagcctcc

SEQ ID NO: 296305 - DNA, 201 bp, Homo sapiens
tccctagccagaaacaatcttttgaactcttgtggaatttttaaaactactttttttaccattttaaataagtggcacacatgttattaattagatatgcycagtatgtaactacttgtgttcagatgtaaggaccctaatttaatgtaagctttttgagggcagggattgcctcatatatcttactgtctgtttggtttc

SEQ ID NO: 296306 - DNA, 201 bp, Homo sapiens
gcaattctcctgcctcagcctcctgagtagctgggattacaggcacacgccaccatgcctggctaacttttgtatttttagtggagacagggtttcaccaygttggtcaggctggtcttgaactcctgagcttgtgatctgcctgcctcggcctcctaaagtgctgggattacataggcgtgagccactgcacctggccac

SEQ ID NO: 296307 - DNA, 201 bp, Homo sapiens
ttcttttgctgtttcttctaaacaatattcttctccactattgtccttctggcaaacttactacttattatctaaatctcagatcaagcatcatctcttcwttgaagctctccctcctttctaagcagagttacctgagggttcctctgctgtgtcttaggtcttttataaaccacatgacacattttattttaacattta

SEQ ID NO: 296308 - DNA, 201 bp, Homo sapiens
gagagtgaatgctttcttccttttttttttttttaagtcacttttaaatactttctttcagttgtgaagttatccgagactggaagacaggagagtccctstgttacgcttttattgaatttgaaaaggtatgtcataatacagacataagtttggtatttatttgcttttatatggtattaaaatgtgaaaaattataga

SEQ ID NO: 296309 - DNA, 201 bp, Homo sapiens
ggcagcccttctcccgtattttgtgttggccagtccggtggacggtgcttgcggtcattaattgcctttgggagtgtgtgtgtggggcgtgtgtgtgtgtkattcgagctgcacatacaatacccatagcttttgtgcctttattgtgtttactcgtgagaggaacataggaactattgcttggtgtgtaatcggttaaat

SEQ ID NO: 296310 - DNA, 201 bp, Homo sapiens
taaaaaaaatacagtttttgtcttaacccaatacagtcacagtacaaacattcacacacacacacacacacacacacttgaaccaaaagattaataaaatmaaatttttttaggcatatactgtatttctgtttttttttttaaatgctgttgtggcccactaaatagattttataccccattgatggattatagtcatca

SEQ ID NO: 296311 - DNA, 201 bp, Homo sapiens
gaagtactataatgcatttaagtatgtctttattactagatattttgttgttcctactttgctactaaaagtaatactattatgcatattttttatatgtrtatatatatatatatatatatatattttttttttttttttttttttttttttgagactgagtccccgctctgtcacccaggctggagtgcagtagtgcaa

SEQ ID NO: 296312 - DNA, 201 bp, Homo sapiens
tttctgcagtgaaacaaatgaatattcatactaagtggataaaaaaaggtcataacctaccattaggtttggtgttactgccaaattaattttaacaacaracttaggaacacaactttcactttccaggatgtttttgaattttgagtaaaaaggattgtgaacttgtataatacagtcagtaagtgtatatttatctgt

SEQ ID NO: 296313 - DNA, 201 bp, Homo sapiens
cacagtgtccatggtgaataatggcagtgatcaacatggatctcaggttaggaaatgagtaagaatatgagatttgcttagaaatgaaggactggaaggakcccacagagttattttttaaactatccagtaaggcttagagggtttcaatcagaaatatgtgttaggggaaaaaatgcactttttctatattaaaaaata

SEQ ID NO: 296314 - DNA, 201 bp, Homo sapiens
aggaagtagaagaaataaaggcagaaaaagaggctaaaactcaggctatacttttggagatggtaagataattatctttgttcaaattgttctgtaatatrtctaataatacttactgagtgtttatttctggctcttcagtagtcttaaaatgttaaaaattgagttatgatttttttctgatttaaatttggtatggca

SEQ ID NO: 296315 - DNA, 201 bp, Homo sapiens
cacattcaccaatttttaacattttgctacatctgttttatgattctctctttttctctctctctgattatacaagcacataaacacacattttttttctsgactatttgacagtaagttgcctgttatttccctttacctcttaatcagtgtgtatttcctaagagcagcagtattcaatgtgtataacaatatgtacgt

SEQ ID NO: 296316 - DNA, 201 bp, Homo sapiens
gagtgcagtgatgtgatctcggctcactgcaacctctgcctcccgggttcaagtgattcttctgcctcagcctcctgagtagctgggactacaggcatgcrccaacacgcccagctaatttttgtatttttagtagagacggggtttcaccatattggccaagctggtctcgagctcctgaccttgtgatccgtccgtctt

SEQ ID NO: 296317 - DNA, 201 bp, Homo sapiens
aaatactactactttcttgtgacttttaaataaatttcttcatgttttttcctaagataaaatgtcacataggagggagaagctttggttttgtatatgcyatcataaacatacagtttattattctcagttaattttgagataattatatatgttattgattcacatttataaacttaatgtgtataatgtgccattcac

SEQ ID NO: 296318 - DNA, 201 bp, Homo sapiens
caccagaacctacaagggaacaattagatgtaagtaaagccctcttatgattaaatgtacattcatattaatgatttgtatggatttatctttttcatctrttaaagttaattttttccgaattattatcttgcttaattatattcaacaagtttggagttctttttcttttccacagaggtactcatttttctagctgtc

SEQ ID NO: 296319 - DNA, 201 bp, Homo sapiens
ttttgagttttttgcagctatgccattttcttcttttttttttttctttttatttttttgaaacagagttttgctttgtcacccaggctggagtgtagtcrcatgatctcagctcactgcaacctccgcctcccagtttcaagcgattctcatgcctcagcatcccaagtagctgggattacaggtgcttgccaccacacc

SEQ ID NO: 296320 - DNA, 201 bp, Homo sapiens
atgattcttttgttccctttctctgtctctcgatatatgccatttataaaatagctcttatgctttttataaaataattattgttcttggttaggtggttkttttactaagctctttttttcttttcttaataaataggtgggaaatacaccaagagtgatttcaaggagtatgaaaaagaacaggataaaccacctaatt

SEQ ID NO: 296321 - DNA, 201 bp, Homo sapiens
ctgctaattttaaaattttttttgtagagacaggatctccctatgttggccaggcttaagtttatattaccatcaactgtctgaatgaacaaatagtaaasgctgtatagttcaagaaagctttactgaaattaaaaaaattaattgaaaatacacattttaatgagcacactgtgtatctcagagtattgactctgaaca

SEQ ID NO: 296322 - DNA, 201 bp, Homo sapiens
ggtttggtgttactgccaaattaattttaacaacaaacttaggaacacaactttcactttccaggatgtttttgaattttgagtaaaaaggattgtgaacytgtataatacagtcagtaagtgtatatttatctgttcactgcagttggactgtctctctaaaatcctggctctgacccttgccaacaacttctatacttc

SEQ ID NO: 296323 - DNA, 201 bp, Homo sapiens
aatacatgtggattttagccagtcggttgcaaaggttaaatggaaaggaaaaggtatgatggtttatcttttgtttttgttctgctttttttttttttttragatggagtctcgctctgttgcccaggctggagtgcagtggcacgatcttggttcactgcaacctgtgtctcccaggttcaagccattctcatgcctcag

SEQ ID NO: 296324 - DNA, 201 bp, Homo sapiens; identical to SEQ ID NO: 61431

SEQ ID NO: 296325 - DNA, 201 bp, Homo sapiens; identical to SEQ ID NO: 61433

SEQ ID NO: 296326 - DNA, 201 bp, Homo sapiens
ctcccaggttcaagcagctcttatgcctcagcctcccgagtagctgggactacaggtgtgtgccaccatgcatggctaatttttgcattcttagtagagayggcttcaccacgttggccaggctggtcgtgaactcctgtcctcaggtgatccatccaccttggcctcccaaagtgttggaattacaggcgtgagccactg

SEQ ID NO: 296327 - DNA, 201 bp, Homo sapiens; identical to SEQ ID NO: 61435

SEQ ID NO: 296328 - DNA, 201 bp, Homo sapiens
ctgtcatgttcctctaattttccttttcctccacttatttggtatatgcatcatttttctataccataagttctcacttaacattactgataggttcttgraaactgcaactttaaatgaaatgaaaccagttttaccataggctaattgatacaaatgagatttaagttcctatgccatattttggtcacaaaaaatcac

SEQ ID NO: 296329 - DNA, 201 bp, Homo sapiens
gcccttacaaaataaaacaaaagaacacacatttcgttgtgttgcccaggctggtctcgaactcctgggctcaagcagtcctcccacctcgacctcccaaratgctgggatttcggacatgagccaccacgcccggccaaagctgcctttttttaacatggatttttttttcccccattcgttgtgctcagaagtcatttc

SEQ ID NO: 296330 - DNA, 201 bp, Homo sapiens
actctctttagttatgacagtaaaaaggctactaggcgagtaatcttcagactttccccgtccccaccccagaatgccacgtagcttacttttgtccaccktttttgcctttaaattcttggtagcagtgcagctgattgtgttttgttgacaggcttaagctagcagacctttaacattgagagcggtgagtcacgttta

SEQ ID NO: 296331 - DNA, 201 bp, Homo sapiens
ggaggctgaggtggatggatcacggggtcaggagatcgagaccatcttggccaacgtggtgaaaccccgtctctactaaaatacaaaaaattagccgggcrtggtggcgcgtgcctgtaatcccagctacttgggaggctgaggcaggagaatcgcttgaacccgggagacagtggttgcagtgagcttagatcacgccac

SEQ ID NO: 296332 - DNA, 201 bp, Homo sapiens
tatatatgaaagtgctttgaaaagtacagaagcatcaatttgaagacattgggtggggggtgtttaatgaaattgataaaataccatgacatttgggtggrtgaagttcattgccaaggtctccctttatctctttttcattcaggatttaatacttagttattatcttagagaaagcaaagtaacataacccattaactc

SEQ ID NO: 296333 - DNA, 201 bp, Homo sapiens
catataacgtgcttgcgttatttgaggcttcttttgataagtatgctccaattttgttatttttaaactgtaagtggaagaaccatacattatcgttactytgccagcccagtcatggagactgtagtagattctcagcaagtacatgtttgatacgttcacgtttccattttaatttcaatacatttaaaatattttgaa

SEQ ID NO: 296334 - DNA, 201 bp, Homo sapiens
gtaacataaggaattaagtggaaacatttaaactttaaaagcattttcttttaaagtcgaatgtacaatgttttgaactaaacactgttagtgcaatattaaaaaaaaaataagatccctcaaatttatttggcttcttgcaaaaaataattgtaattcaaaattgttaagatctagtgtgttcaaggatgcaaaagagaa

SEQ ID NO: 296335 - DNA, 201 bp, Homo sapiens
taacataaggaattaagtggaaacatttaaactttaaaagcattttcttttaaagtcgaatgtacaatgttttgaactaaacactgttagtgcaatattaaaaaaaaaataagatccctcaaatttatttggcttcttgcaaaaaataattgtaattcaaaattgttaagatctagtgtgttcaaggatgcaaaagagaac

SEQ ID NO: 296336 - DNA, 201 bp, Homo sapiens
ggtatgaatctaaatggatgccagtaatttaaattaaccttatttagccaaattctagtattttaatgataataagagtatgatggcatattgccctaccttttttttttttttttgagacggagtctcgctctgtctcccaggctgcagtggcgcgatctcggctcactgcaagctctgcctcccgggttcaagccattc

SEQ ID NO: 296337 - DNA, 201 bp, Homo sapiens
ccaaagagcgaaactgcgtctcataaaaacaaagaaaattgccaatgggctgtcattttgtttaaaaaaaaaatttttttttttttttgacttggcactgscccctgctgccttctggagaagtcatcaaattcagtgggaagaaatgtcaaacatatttactgtgtgtcttttgccagccatagaaacttaaaaatttaa

SEQ ID NO: 296338 - DNA, 201 bp, Homo sapiens
agtgggatccacaaacctttgtctgcttctccttaataagatcctgttcttgctgctcttctttcttctcatgactgagaagttgtctctcttgtttctcrtttacacctgttcttattacctgtcttacctttttgttttgtatgatcttgcttttgtaattcatcattttctatgatatggtgctggtgttcttgcaca

SEQ ID NO: 296339 - DNA, 201 bp, Homo sapiens
cctatggactgtaagatacttttggttattctcctcccttcctatatgtatttgttgcataatattttctgattattattttggtcttatacagtctgcaygcttagatttacctaggtgtactaatgccttaaccattgcatcttgtgtaaattgccatcttctgtaactacattcatttgctttgtttcactgtcactc

SEQ ID NO: 296340 - DNA, 201 bp, Homo sapiens
gttggccaggctggtctcgaactcctgaccttgtgatctgcccgccttggcctcccaaagtactgggattacaggcgtgagccactgcacccggctgcctrtagttgttaggtgtgtcatcttgagacatccttccatgacattggatagactgttccttgtgctgaggataccctgtccctccttgttaactttcctctc

SEQ ID NO: 296341 - DNA, 201 bp, Homo sapiens; identical to SEQ ID NO: 61438

SEQ ID NO: 296342 - DNA, 201 bp, Homo sapiens
ttctgcgcgcccagcccttcccctgtccgccagcttgcaagtgtgtcttccgggacgccgcgcagtgctcggggggcgacgtggcgcgcatctccgcgctrggcctgcccaccaacctcacgcacatcctgctcttcggaatgggccgcggcgtcctgcagagccagagcttcagcggcatgaccgtcctgcagcgcctca

SEQ ID NO: 296343 - DNA, 201 bp, Homo sapiens
gatctaaaacacttctgatattaatcattgaaataaatatgagctatacattcatttaagaaagaaataaaaacaagtaaggtaattatttacccagttgktttatttcaggctcctgggtagtgggagcgtatctcagcaactggcggaacgaggcaggaaccagccctagacaggatgccatcgtatcgcagggtgtac

SEQ ID NO: 296344 - DNA, 201 bp, Homo sapiens; identical to SEQ ID NO: 61434

SEQ ID NO: 296345 - DNA, 201 bp, Homo sapiens; identical to SEQ ID NO: 61436

SEQ ID NO: 296346 - DNA, 201 bp, Homo sapiens
gagttcaaattcaccgtaatgaaagattgtaaattgggagacataatctccttcattgtgttattccttgttaaatcataaaaatacaccagtgtattgcrtatgttaaagataaatgccactttgaaattcaataagaaattttcttatagttctgtaacatgttctttcaaaggggtagaacataaaattcactcattt

SEQ ID NO: 296347 - DNA, 201 bp, Homo sapiens; identical to SEQ ID NO: 61437

SEQ ID NO: 296348 - DNA, 201 bp, Homo sapiens; identical to SEQ ID NO: 61439

SEQ ID NO: 296349 - DNA, 201 bp, Homo sapiens
gtgggaataaagaaagattttatatttttcttgaactgaggagatacaggctttaaaatgacttccctttggaaattcacaatcttgaggtagagcttgattttttttttgttttttttttgtttgtttgttttgagacagagccttgttctgtcacccaggatggagagcagtggtgcgatcttggctcactgcagcctc

SEQ ID NO: 296350 - DNA, 201 bp, Homo sapiens
gaaagattttatatttttcttgaactgaggagatacaggctttaaaatgacttccctttggaaattcacaatcttgaggtagagcttgattttttttttgttttttttttgtttgtttgttttgagacagagccttgttctgtcacccaggatggagagcagtggtgcgatcttggctcactgcagcctccgctcccaggt

SEQ ID NO: 296351 - DNA, 201 bp, Homo sapiens
caggtgtttggagacatgaataagaacagtctgtggtttaagccttacctaatacaatgcctttcgtaaattatactattatgatataatgtaatactatkaatgtattttcctgttatagaaaactgctttatggagtaaatgaaattgctgtaaaagtgccttctgtttttaagcttctaattaaagaggtaagactat

SEQ ID NO: 296352 - DNA, 201 bp, Homo sapiens
agcatcagctcaagttcacacccctctggttttcttttccctgtatttctgacacttgacagtttctctttcttaggagctcagattgggatttaaaagattttttttttaattacaaaaccagaaaagccctgttagaatattatcttgaatcttagaatttatgaaactaattcagtgtgtcttctgcttagatttctt

SEQ ID NO: 296353 - DNA, 201 bp, Homo sapiens
ggagaatggcgtgaacccgggaagcggagcttgcagtgagccgagattgcgccactgcagtccgcagtccggcctgggcgacagagcgagactccgtctcaaaaaaaaaaaaaaaaaaaaaagaatagtaaaagtacactgtaaaaatttaaacttgactcctttttgttttctctctttattcgtatatttcttatagca

SEQ ID NO: 296354 - DNA, 201 bp, Homo sapiens
ctgcattatactcagctgtaatactagatactgtgctatagtgttggtcacatctcttgacctcactctggctactctttggaccttaggaaatggtttawggttagggaagtggaaaggcggccttttcccacagaaaatgtggcatacagtatttggttccccatttgatgtgtaaaaagtgggaataaagaaagattt

SEQ ID NO: 296355 - DNA, 201 bp, Homo sapiens
gcaattaaagattcagaatataatggcctcttaaatatatgagatgattaactttatagttattgtgtttatatttagttttactattttttaatttaaaattatttatttatttatttatttatttatttatttatttatttattgtagagatggggtttcactatgttgcccatgctggtctcaaacttctgggctcaa

SEQ ID NO: 296356 - DNA, 201 bp, Homo sapiens
aattatatttggctttaaaaattgtgggtgagatgttttctttagcatataacgtgcttgcgttatttgaggcttcttttgataagtatgctccaattttsttatttttaaactgtaagtggaagaaccatacattatcgttactctgccagcccagtcatggagactgtagtagattctcagcaagtacatgtttgatac

SEQ ID NO: 296357 - DNA, 201 bp, Homo sapiens
aaatattttgaaaattaggtgacagtatgttgactgctgtctctgtggccagagattgtggaatgattctacctcaggataaagtgattattgctgaagcattacctccaaaggatgggaaagttgccaaaataaattggcattatgcagactccctcacgcagtgcagtcatccatcagcaattgacccagaggtaaggt

SEQ ID NO: 296358 - DNA, 201 bp, Homo sapiens
caattaaagattcagaatataatggcctcttaaatatatgagatgattaactttatagttattgtgtttatatttagttttactattttttaatttaaaattatttatttatttatttatttatttatttatttatttatttattgtagagatggggtttcactatgttgcccatgctggtctcaaacttctgggctcaag

SEQ ID NO: 296359 - DNA, 201 bp, Homo sapiens
aattaaagattcagaatataatggcctcttaaatatatgagatgattaactttatagttattgtgtttatatttagttttactattttttaatttaaaattatttatttatttatttatttatttatttatttatttatttattgtagagatggggtttcactatgttgcccatgctggtctcaaacttctgggctcaagt

SEQ ID NO: 296360 - DNA, 201 bp, Homo sapiens
cctatattcaggttttgtcatttgtgtcaacaatgtcctttatgcctattttcccgtagtcccctagattagaacaaaaaatatctccagacattgccagwtgctcctttggggtgcaaaatcctccagttgagaaccacttatctttagtagatgataaaactagtgaaagtttgatgaggagcaggattttcacagtct

SEQ ID NO: 296361 - DNA, 201 bp, Homo sapiens
ttaaagattcagaatataatggcctcttaaatatatgagatgattaactttatagttattgtgtttatatttagttttactattttttaatttaaaattatttatttatttatttatttatttatttatttatttatttattgtagagatggggtttcactatgttgcccatgctggtctcaaacttctgggctcaagtga

SEQ ID NO: 296362 - DNA, 201 bp, Homo sapiens
cggggtttcaccatgttggccaggccagtctctaactcctgacctcaagtggtccgcccgcctcggcctcccaaattgctgggattacaggcgtgagccastgtgcccagctgaaaaataggaactttatagtggaaaacttgtgtataccaccttaataagtaatgaaagcctttttgaaaaatgtttctgctatgttta

SEQ ID NO: 296363 - DNA, 201 bp, Homo sapiens
agtttcagagacacttatatttcaatttttaagcaggtccgagtgtcatttttaagttgtcattatagggaaaatccaaactattaataaaacctggggaygctataaaaataattcccaaaaactaataatgtttttaaaattacttctgtagatcttaagtaacctaggagacttccagtttctcttcattgatctggc

SEQ ID NO: 296364 - DNA, 201 bp, Homo sapiens
aaataactattattttaaaaataactatattatttattagttgtgtattgctgtataaccatactaataactatgttactaagaactgtattagaaccatrctacaggatgaaaaaccttccatggaaggtttgccacggtatttctaaaaggattttttactacagataacttattataaggtgcatttaatcattagca

SEQ ID NO: 296365 - DNA, 201 bp, Homo sapiens
ggtggcatctggtatcatgaacagcacatcatatgttgccacaagctgaaaaatatttcataataacttcaatttacatgttgctatatactttgaatacktaaaaatctcttatttcctacagaatccttatcatatccccattttatagataaaataatttgactgtaaatgacttgtttagattcacatagctttgtg

SEQ ID NO: 296366 - DNA, 201 bp, Homo sapiens
cttcggaatgggccgcggcgtcctgcagagccagagcttcagcggcatgaccgtcctgcagcgcctcatgatctccgacagccacatttccgccgttgccsccggcaccttcagtgacctgataaaactgaaaaccctgaggctgtcgcgcaacaaaatcacgcatcttccaggtgcgctgctggataagatggtgctcct

SEQ ID NO: 296367 - DNA, 201 bp, Homo sapiens
cagtgaatattaatagcaagagagtttaatgaaagtataaaataataatcgttatggacttacctaatttcagcattgattactggaacatcctccttggyatttgcttttgagtgacctctagaggtcttaagtaccctttgattcactgtatattgtgtagttaccctcccgttaggattgcctttaggttagcgtctc

SEQ ID NO: 296368 - DNA, 201 bp, Homo sapiens
aaagcggcttagtgcttttgacacattgtcttcacattgatacagctttgggctttgaaatacaatttcaggtttcaaggctttttcctgctgttaaaacyagcagtttcatttatattaattttctcaactattctctaatatccttaccacccattgttagaaattaggtgtttcaaagattttagatttcatagatac

SEQ ID NO: 296369 - DNA, 201 bp, Homo sapiens; identical to SEQ ID NO: 61432

SEQ ID NO: 296370 - DNA, 201 bp, Homo sapiens
ggtttaatatttagtgagtaggcgtgatgtttcctcaattagagatgaggaaataatgtcttgtaaagaatggaaaataaatgaaaatataggcagttttmtataaaattgactccttaccgttatccctttctctctttaaggatgaattcaaaatgtggttttgtgcaaaaattcgcgttctttctttggaaacttacc

SEQ ID NO: 296371 - DNA, 201 bp, Homo sapiens
ttaatagcattttaaatgaggtatgtatgtgggactcttaatagggtttgaacctcaattatttatcatatgcagctattgaggatttgaaatgtggctastgagaatgaggaactaaaattttaagctaatttaattttaattaatttaatgctaacaaagtcatgagactagtagctatgatattagaaagcccagcta

SEQ ID NO: 296372 - DNA, 201 bp, Homo sapiens
ccagccctagacaggatgccatcgtatcgcagggtgtactcacactcgcgcagactgggaccatttaaatgtgctggttcacttaacttgcgtagctttgatgtgggaggaaactgaagtacctggagtgaaacccatgcagacagggagagaacatgcaaactccatgtagatagtggtcgcggctgggcctcagctctc

SEQ ID NO: 296373 - DNA, 201 bp, Homo sapiens
ctgtctttacaactatcccattttttaggccttagaaattaatcagattttaaagtgaacacttagattgttttttcttaacttcatctttttttatgaakttgtctttataattgagttttgaccagtacttcgttattagattggtacctctttttttttttttttaaggcaggttcttctgtcacccacgctggagta

SEQ ID NO: 296374 - DNA, 201 bp, Homo sapiens
tttttcctgaaagcagtgtaataccagttgtccctagtagtgcgtatgactagggttgtacaaggggctcaagtcgtttagcaaaatctcatctgtgtatmcacacacacacacacacacacacacacacacaccccaacaccccaaccctcccacccccatatatatagttacctcactgcattacttcagaaggttatc

SEQ ID NO: 296375 - DNA, 201 bp, Homo sapiens
cctgtggtaatctaacagtgctacttaaaagtgacagcttttggccaggtgcggcggcttatgcctgtaatcccaccagcactttgggaggctgaggtggrtggatcacggggtcaggagatcgagaccatcttggccaacgtggtgaaaccccgtctctactaaaatacaaaaaattagccgggcgtggtggcgcgtgcc

SEQ ID NO: 296376 - DNA, 201 bp, Homo sapiens
gtagaatagtactcagcacaaagtaaattctcaatgcagtcattattttagttgcatgaatatatgctccttctcccctccctttttgtttgttttgctgkttgggaggttggggatagcaggtgctttgtagagtcaagactctaccacttgactgtctagagaccatagggatctgtagttgctgatcacagactggaa

SEQ ID NO: 296377 - DNA, 201 bp, Homo sapiens
tatttgaggacatgctatatttcttattttctcaatttttaatactttggatattgcttatttgctcaaagcttcagttaactccagaattaggcctagtrgtattaatagtagtagcagtaaagattacgtgacctttaattttttagacagtaattcttatttaacacaataggctccatacatatatatttattatga

SEQ ID NO: 296378 - DNA, 201 bp, Homo sapiens
tcacggggtcaggagatcgagaccatcttggccaacgtggtgaaaccccgtctctactaaaatacaaaaaattagccgggcgtggtggcgcgtgcctgtartcccagctacttgggaggctgaggcaggagaatcgcttgaacccgggagacagtggttgcagtgagcttagatcacgccactgcactccagcctggcgac

SEQ ID NO: 296379 - DNA, 201 bp, Homo sapiens
atattgcttatttgctcaaagcttcagttaactccagaattaggcctagtagtattaatagtagtagcagtaaagattacgtgacctttaattttttagacagtaattcttatttaacacaataggctccatacatatatatttattatgattttattgcttgtaagtgtgtatgtttagtgtttgctgtatgattttatt

SEQ ID NO: 296380 - DNA, 201 bp, Homo sapiens
cctcctgaggagctggtattacaggcgcacgccaccacacccggctaatttttgtatttttagtagagatggggtttcaccatgttgataagtctggtctygatctcctgccctcaagtgatccacctgccttggcctcccaaagtgctgggattacaggggtgagccactgcgcccagccagcctattattttttaattt

SEQ ID NO: 296381 - DNA, 201 bp, Homo sapiens
cgggttcaagccattctcctgcttcggcctcctgagtagctgggactacaggcgcctgccaccatgcccagctaacttttttgtattttttagtagagacrgggtttcaccgtgttagccaggatgttttgatctcctgacctcatgatccgcccgccttggcctcccaaagtgctgggattacaggcgtgagccaccgcg

SEQ ID NO: 296382 - DNA, 201 bp, Homo sapiens
aacagatccctcaatttaaacattttaagaactaagctcatcatgttctccttcaaccctttttcttctctgtttcttggtaccactatttattcaagtcrgaagtgtgcatgcttgtgtacatgcgtgtgtgtctatttatctgtgccttttcttcctctttccgtagccagccatttgttagattctttcagttttctt

SEQ ID NO: 296383 - DNA, 201 bp, Homo sapiens
agaagagggttctaaatacccaaaggcctagaaattagagattgtgtggacattataagaactgaaagaagaaatttagtatgacaaatacagcaactatraatgatggatagctctctgaagcatgttagggatttgggctcagtccaaaagacagtggaaagccattgaaggctattattattaatttattttatttta

SEQ ID NO: 296384 - DNA, 201 bp, Homo sapiens
atggtttgtgcggcatgtgtgatcctgtccccacagcctgctggtgtgggcacagttctgcatgtctctccttccgctgtatcactgccaagggacagggwgtcctaggggcttgagtgagactgtccgtggtccaagttggggtgtggttgctccctgctgtgcccggcccactgagtctccctcagaggaaaaaggctt

SEQ ID NO: 296385 - DNA, 201 bp, Homo sapiens
agaagttgccaaagtcccactgtatcccttccccaattcctactgccattctgaaattatttttgcatattttatattttttctaagtataaatctataartaagtatccatgaatgatatactgtacatatgttttgctgcttttttcccctctccaaactttgttttcaagatttatccatgttgatatgtgcagatct

SEQ ID NO: 296386 - DNA, 201 bp, Homo sapiens
agatctttttactccacattcttgccaaacttaatattgtcagacttgtaatttttgccagatggatggatatgagtattacattgtggtttttacattcttctcatttcttataaaattgagcatcttttcacattttggagggagggtcatttagcattcttctgtgtattgtgtgtttatatcctcatttttctgttg

SEQ ID NO: 296387 - DNA, 201 bp, Homo sapiens
tcaaaagtctgctaaattttggtgtatatagcttgagagacagtattgtttggccaatgtaatttcaagagttgttgtgtcttggaaaatagtatgtcacrttgtgacctttcttatctctagtaatgcatgttgccttaaattctgttttgtcttataattatatagctctataccagctttcttttgcctgatgtttgc

SEQ ID NO: 296388 - DNA, 201 bp, Homo sapiens
gagcccgcggctgagcgcgcttccgcagggcgccttccagggccttggcgagctccaggtgctcgccctgcactccaacggcctgaccgccctccccgacsgcttgctgcgcggcctcggcaagctgcgccaggtgtccctgcgccgcaacaggctgcgcgccctgccccgtgccctcttccgcaatctcagcagcctgga

SEQ ID NO: 296389 - DNA, 201 bp, Homo sapiens
tgttggtgtatcttcaaagaaattaagaaaatgtgtataatggcatatttcattggccctgagttgctttgatgcttgatcccaccagagcttacttatcmgtgaaatggtttcacatagccagtcacaactgtgacttgatgtgattggtgtcatatgatacaagatgcagatgtcatatgatacaagatgcatcccagt

SEQ ID NO: 296390 - DNA, 201 bp, Homo sapiens
atcctttcagtaccagctacccactttgcatggggccagactttgtttcctgtccttttgtgggtattaaatcccaagttcttagtttactgagatggccycctcccttcatccccccagcagccatagcatcagctcaagttcacacccctctggttttcttttccctgtatttctgacacttgacagtttctctttctt

SEQ ID NO: 296391 - DNA, 201 bp, Homo sapiens
aaagtagctatccatttgggcgacatacaaatgtctgtgaaggtctgagtcttatttttttaagtgctgattattttctgaaggactttcacggttaaagytaatggagtttaaacataacatcacgttgtgtatgtgaatcttttgggtgccccgaacaatgtctcatactccaggagataacagagcacatactttatt

SEQ ID NO: 296392 - DNA, 201 bp, Homo sapiens
gggttcaagccattctcctgcttcggcctcctgagtagctgggactacaggcgcctgccaccatgcccagctaacttttttgtattttttagtagagacarggtttcaccgtgttagccaggatgttttgatctcctgacctcatgatccgcccgccttggcctcccaaagtgctgggattacaggcgtgagccaccgcgc

SEQ ID NO: 296393 - DNA, 201 bp, Homo sapiens
ccagtctggtctcagacttctgggctgaagtgatctgcccacctgggcctcccaaagtgttgggattacaggtttgagccactgcactgtgcacccggcctttttttttttttttttttttttaaagtcgatgtggtctcactgttgcacaggcctgagtgcagtggctcaacttaccctcctgtctcagcctcccaagta

SEQ ID NO: 296394 - DNA, 201 bp, Homo sapiens
tattttattaaaaagacattgcctattatggaaactggtattaggaaaaaaaggatgataatcaataagcaaatgattaaagtagaactattaaccttacrtaaggttattgtaaatatgtaaagaaaagagaattttgaagtttaaatttagtagtagcaatagacctgcaatgtaaagtctaataattattgtagaaaa

SEQ ID NO: 296395 - DNA, 201 bp, Homo sapiens
agctgggtatggtggcacacacctgtaatcccagctacttgggaggctgaggcaggagaattacttgaacccaggaggtggaggttgcagtgagccaagaytgtgccgctgcactccagcctggtgacaagagcgaactccatctcaaaacaaaaacaagaaaaactacatatacattttttaatacataaaagtattttg

SEQ ID NO: 296396 - DNA, 201 bp, Homo sapiens
aacgattctcctgcctcagcttcctgtgtggctgggactccaggcgtgcaccaccatgcctggctaattttttttctatttttagtagagacggggtttcmccaggttggccagcctggtctcaaactcctgacctcaaatgatccaaccgccttggcctcccaaagcgtaatttcttatgaaaccgccaaactggtttcc

SEQ ID NO: 296397 - DNA, 201 bp, Homo sapiens
tgccatcttattattctcttgagaatgcattttcatcagattcagttagtagattctttgcaggaatcttttcaagccatttgtccactgtatgagtgttstttgattaaaaaagttaaaactgcatgataattttatatttcataaatctacttactagactctttggagactatctaaaagactagggtagctcctcat

SEQ ID NO: 296398 - DNA, 201 bp, Homo sapiens
agcaaaagtaaaaacaaaacctcaacagttacagcattagaatatttaggcatgtggtatgtgggcttccatttgcactcttatagtcttgagctctgtaratatccagggaacagcagtggtatgggatgtatttactctctaacattgccacatttaacaggtttcaagtataaataattttaaagcaatagcttgttt

SEQ ID NO: 296399 - DNA, 201 bp, Homo sapiens
tgtacttgcaaataataaagcctcttttcttaaaggattttgaataagtcagcctcttcactaatttctcatcatctttcagcagttgaagtgaattggtraggctttactccatttcagtgctgctaatagtgaggcagggctccgtggctcatgcctataatcccagcactttgggaggccgaggcaggtggatcacct

SEQ ID NO: 296400 - DNA, 201 bp, Homo sapiens
gtttatccaaaaacctgggctcaacagaaaggaatgtctgggttgcgataagaggttgtggagactcaggagttcgagaccagcctggccaacatggtgaygtagcaggacaagctgcagacaaaacccctcagacaccgagttaaagaaggaagggctttattcagccaggagcttcagcaagactcacgtctccaaaaa

SEQ ID NO: 296401 - DNA, 201 bp, Homo sapiens
atcacctgaggtcaggagttcgagaccaggctggccaacatggcaaaaccctgtctctactaaaatacagaaattaactgggcatggtggcgcatgcctgyaatctcagctactcaggaggctgaggcaggagaatcgtttgaacctgagaggcagaagttgcagtgaactgacatgatgccattgcattccagcctgggc

SEQ ID NO: 296402 - DNA, 201 bp, Homo sapiens
ataagacttcctaacaaatacaatgtctcttttgactactattattttcttcttataaccatggcatcatatataccttgtaagtatatacttattagtastttgatttgacatatgatgtggaaatttttgaaaggatataataatatgcaaggggaaataattagaaataattgcttacaaatacattaaaacttcggt

SEQ ID NO: 296403 - DNA, 201 bp, Homo sapiens
gattaatatggctgtgatctcatacatgaagactgatgtctttttaagtgcataaaaagcactaaattatttatgcatatgcaatttccaggcatattatkaactcaaccttcacatcgacgtttgcgcctctagattataccctagaaaattctgggtattaattaatatactttcattttgctcaaaagttcttaactg

SEQ ID NO: 296404 - DNA, 201 bp, Homo sapiens
gacagggtctcattctgtcacccaggctggaggatagtggcacgatctcggctcacttcaatatccaccacctgggctcaagcgattctcctgcctcagcmtcccaagtagctgggagtacaggtgcaggccaccacacctggctaatttttgtattttttgtagagatggggttttaccatgttgcccaggctggtctcg

SEQ ID NO: 296405 - DNA, 201 bp, Homo sapiens
atcactcgaagtattaacttatgtaaacgcgaggaaaagtttactattttctttttttctttttattatttatttatttattttgagacggagtctcgctsggtctcgcaggctggagtgcagtggcgggatctcggctcactacaagctccgcctcccgggttcatgcctttcttctgcctcagcctcccgagtagctgg

SEQ ID NO: 296406 - DNA, 201 bp, Homo sapiens
acaggaacatttcctatgtcaacccttctgaccttcttgacagcctttagagcctcctgtctactcgaggacagatctctggcctcctttccatttctcasatgcctttcttagatgcttggggactgacacctgacctcttctctgttcctcttagcttcactggccccctgtctgcatggggacagctcactgacctcc

SEQ ID NO: 296407 - DNA, 201 bp, Homo sapiens
tggtttatttaatgttttctattattgacgtaatgatttttttctatttgcttacagatagttcactgtttaattggtgagtttttgcttcaattttatasttttattataaattgcctttagggcaatagttcacttgtttttctttttaaggaattgtacctacttctgtgattgtgactggggtccaagtgagttcaa

SEQ ID NO: 296408 - DNA, 201 bp, Homo sapiens
agaaaaacgagtctatgctcaactattcctgtgcataagatacgtttaagttccacgtttataattaattatgttaatggtgactgcattaagttttctayattgcatttgcctaaccctaacattccattataaataaaaggcaataaataagtaaagtaagtaccttcactgaaaagtaagttctaggttgaatgacac

SEQ ID NO: 296409 - DNA, 201 bp, Homo sapiens
ggaaaagattttttatggaataagagagtaacattccagtgagagtgaatagcatgtgttaaattgcacaagttcagagcatattctggaaataacaacayctagtgtcaccagagagagaagtaggtagaagggttgagtaattgtagatgaagttggagagatttccgagcaaggattgcaaagaaccttgaatatggt

SEQ ID NO: 296410 - DNA, 201 bp, Homo sapiens
tcccgagtagctgggactacaggcaccccccaccacgcctggctaatttttttgtatttttagtagagacggggtttcaccgtgttagccaggatggtctygatctcctaacctcgtgatctgcctgcctcggcctcccaaagtgctgggattataggcgtgagccaccacacctggccagatgtaaggatttttatggca

SEQ ID NO: 296411 - DNA, 201 bp, Homo sapiens
agtccttttgtgcctagcttatttcacatagcataaggtcttcaaggtttatccgtgttgcatgatatgtcagaatttctttttctttttaaggctaataytctattgtctgtatagaccacatttcttttttttttttttttttttgagacggacagctctgtcgcccaggctagagtgcagtggcgtgatcttgcctca

SEQ ID NO: 296412 - DNA, 201 bp, Homo sapiens
ctctttgattatgtaatcgaagttgtcagtatacaatttattatttctggccagccgcagtggcccacacctgtaatcccagcactttgggaggccaaggygggtggatcacctgaggtcaggagtttgagaccagcctggccaacatggtgaaaccctgttcctactaaaaatacaaaaattaaccaggcgtgggggcga

SEQ ID NO: 296413 - DNA, 201 bp, Homo sapiens
aggtggaggttgcagtgacccaagattgtgccactgcactccagcctaggcgacagagtaagactccatctcaaaaaaaaacaaaaaacaaaaaaaaaaamcaccaaaaattagctgggtatggtggcacacacctgtaatcccagctacttgggaggctgaggcaggagaattacttgaacccaggaggtggaggttgca

SEQ ID NO: 296414 - DNA, 201 bp, Homo sapiens
taattctctgaggtttttctttctccagatataatttttttatcatcttatatcctgttggagttgctggtgaacttcttacaatatacgctgccttgccrcatgtgaagaaaacaggaatgttttcaataagacttcctaacaaatacaatgtctcttttgactactattattttcttcttataaccatggcatcatata

SEQ ID NO: 296415 - DNA, 201 bp, Homo sapiens
atgctgtttttctattgctgtaatatttatgtgaacattttttgttgtgcaaaatcaatatgattttgctgattacataccacctatggatttgctgaatrccaatgttgacagtggtttatttaatgttttctattattgacgtaatgatttttttctatttgcttacagatagttcactgtttaattggtgagtttttg

SEQ ID NO: 296416 - DNA, 201 bp, Homo sapiens
ggcgcccgccaccatgccccgctaatttttgtatttttagtagagacggggtttcaccatgttagtcaggctggcctcaaactcctgacctcaagtgatcygcctacctcggcctcccaaagtgctaggattacaggggtgagccaccacacccagccttcctttccttttttttttatttttttgagacagagtctcact

SEQ ID NO: 296417 - DNA, 201 bp, Homo sapiens
acatgggtttcaacccggactctctgactccactgtcctgctacttcatctttctttcctcctaaattatactcttggaaagtgagaaaactaatgtattwacaacaattcagcaatcacgaaatgatgctgcctttaaatgcattcggaactgaaagaattctctcacctctgtgatagtctggttaataaacgtttccg

SEQ ID NO: 296418 - DNA, 201 bp, Homo sapiens
taatgtaaatatgaattgctatcattaactggtatctcagggcacagtatatacttagagccagaccgacacagcatagtggcttaagagcatatactccragcttagtggtggctgtgtgaccctctctgcctatttcctcagtagtgaaataggataatagaagaccctcgcctcatagggttattgtgaggatttgag

SEQ ID NO: 296419 - DNA, 201 bp, Homo sapiens
tgagcatgcatctgggccctaaccaggcttcttcgttgatccatggtcctgagggttaaccatgtatcagtatacgcacccctgagaaaacaggatagccagggggcagctgtttgtgaggggtatggatgaagcttagatgtatgcacccgggtatcctcacacatgtgcaggagaccccttgcagtacaggatacagcc

SEQ ID NO: 296420 - DNA, 201 bp, Homo sapiens
atagcataaggtcttcaaggtttatccgtgttgcatgatatgtcagaatttctttttctttttaaggctaatattctattgtctgtatagaccacatttcttttttttttttttttttttgagacggacagctctgtcgcccaggctagagtgcagtggcgtgatcttgcctcactgcaagctccgcctcccaggttcaca

SEQ ID NO: 296421 - DNA, 201 bp, Homo sapiens
caccatggtgaaaccccgtctctactaaaaatacaaaaattagccagacatggtagtgggcacctgtagtcccagctactcaggaggctgatgcaggaaartcactgaaaccggggaggcagaggttgcagtgagccaagattacaccactgcactccagcctgagtgacagagtgagactccatctcaaaaaaaaaaaaa

SEQ ID NO: 296422 - DNA, 201 bp, Homo sapiens
catcagttgtagccacagtgaagctggggtagagtggaaaggggtcaggactagggagtctagagactgcagaggttctattacagactcagtcatgaacwtactctaagactcagggtaagtaactgaatgttctggaagatgattatctcatctaaaagagtggccttcaaactttttggatagcatgctactatcaat

SEQ ID NO: 296423 - DNA, 201 bp, Homo sapiens
gtactttgatttgacatatgatgtggaaatttttgaaaggatataataatatgcaaggggaaataattagaaataattgcttacaaatacattaaaacttyggtttaactccatatttactgataatttgggaaaagtgaagggagatagaggcagaagacagttcattagctatgagaataaaggcaggtaaattaacgc

SEQ ID NO: 296424 - DNA, 201 bp, Homo sapiens
aggcagaggttgcagtgagccaagattacaccactgcactccagcctgagtgacagagtgagactccatctcaaaaaaaaaaaaaaaaaaaaaaaaaaatyagtagctggtgagttaaggcagggtttgaactcaagcccataccttctgttcagctactcggaattttatggaagtatttacaataattggtcagtgagt

SEQ ID NO: 296425 - DNA, 201 bp, Homo sapiens
ttagacggagactcattctgtcgcccaggctggagtgcattggcgcgatctccgctcactgccaacctcagcctccggagttcaagcgattctcctgcctyggcctccggagtagctgggactacaagcgtgggccaccacgccccattaatttttgtatttttggtagagacagggtatcaccatgttggccagggtggt

SEQ ID NO: 296426 - DNA, 201 bp, Homo sapiens
attggtcagtgagtttaagtaattatgacctgagtaaatttagccccctaggtatatataatgtgatggtaacctttcttaagttaggaagaacctaaatrgaaagactttttatccaaagttgcctaagcaggatattcaaagcttgttttgtgataaggttcattggtttgattattctgatcatcatattcagaaata

SEQ ID NO: 296427 - DNA, 201 bp, Homo sapiens
tacctggccatcttaatttgaatagtgaaacacatactccttatctcccttgcctgtttatttttctccatcccactttctttcatatgattgtacaatayattttacttattcgcaatgcttattgtctgtcatctccattagagtgtaaactccaagaagtactcaataaatatttgaatgaatgaatgagtgaatgta

SEQ ID NO: 296428 - DNA, 201 bp, Homo sapiens
  misc_feature (1)...(201): n = A,T,C or G
ctattttattaaaaagacattgcctattatggaaactggtattaggaaaaaaaggatgataatcaataagcaaatgattaaagtagaactattaaccttangtaaggttattgtaaatatgtaaagaaaagagaattttgaagtttaaatttagtagtagcaatagacctgcaatgtaaagtctaataattattgtagaaa

SEQ ID NO: 296429 - DNA, 201 bp, Homo sapiens
aattctctgaggtttttctttctccagatataatttttttatcatcttatatcctgttggagttgctggtgaacttcttacaatatacgctgccttgccgyatgtgaagaaaacaggaatgttttcaataagacttcctaacaaatacaatgtctcttttgactactattattttcttcttataaccatggcatcatatat

SEQ ID NO: 296430 - DNA, 201 bp, Homo sapiens
agccaactgatatttcaaaaatgaacatcaatgcatagctccagtttaaagacttcagtgactccctgccacctccaccctgatctaagggattcaggctrtctgccattcaaggctttttgcaatctgctcccgattcccctttccagtcaacttgcatttgatatctctgactcactcgtccctcaaagcaccatgtat

SEQ ID NO: 296431 - DNA, 201 bp, Homo sapiens
agaggaccttgctgtagctcttctgtggtcactccacacagcaccccactgccttctagatcacattctagaaacctgagaccatggaatttgctacccasagggcaatgagcatgcatctgggccctaaccaggcttcttcgttgatccatggtcctgagggttaaccatgtatcagtatacgcacccctgagaaaacag

SEQ ID NO: 296432 - DNA, 201 bp, Homo sapiens
attgtggtatccttaacctcagaattagtcattcatttttttttggaaagcacaatatacatttttggaattagcttacataagcagtaccaaaaatatgttttttttttgtctgtgatgtaaattattttaatagtcaatctagcagccacaatttataccatttacacaatgcgattggtttttttctttgctttaagt

SEQ ID NO: 296433 - DNA, 201 bp, Homo sapiens
aaatttgactggacagatgacaatttgtccaactgacctaataacgtatgtatttatgtgttattatataatggattaaatacccttacacccagccaggrggagcttctgctttaggctctgttaagaggaccttgctgtagctcttctgtggtcactccacacagcaccccactgccttctagatcacattctagaaac

SEQ ID NO: 296434 - DNA, 201 bp, Homo sapiens
atactatgaaacactggtttgaaacactggttcaaattggttcaaaatattcttcaaatttgactggacagatgacaatttgtccaactgacctaataacrtatgtatttatgtgttattatataatggattaaatacccttacacccagccaggaggagcttctgctttaggctctgttaagaggaccttgctgtagctc

SEQ ID NO: 296435 - DNA, 201 bp, Homo sapiens
cctttcttaagttaggaagaacctaaatagaaagactttttatccaaagttgcctaagcaggatattcaaagcttgttttgtgataaggttcattggtttsattattctgatcatcatattcagaaatatttttacactggcattgtttatagctgatattaatttgtttatccaccaacatttatactatgaaacactgg

SEQ ID NO: 296436 - DNA, 201 bp, Homo sapiens
agggtgacagagcgagaccctgtctcaatcaatcagccaataattgttctttgttaaagatgacagcaacacataatgcaaaaaaagaaattttttaaagaaaaaaatgatcatacagtattagtccttttgtgcctagcttatttcacatagcataaggtcttcaaggtttatccgtgttgcatgatatgtcagaatttc

SEQ ID NO: 296437 - DNA, 201 bp, Homo sapiens
aaaaacaaaacctcaacagttacagcattagaatatttaggcatgtggtatgtgggcttccatttgcactcttatagtcttgagctctgtaaatatccagrgaacagcagtggtatgggatgtatttactctctaacattgccacatttaacaggtttcaagtataaataattttaaagcaatagcttgtttttctttgtt

SEQ ID NO: 296438 - DNA, 201 bp, Homo sapiens
aagattacaccactgcactccagcctgagtgacagagtgagactccatctcaaaaaaaaaaaaaaaaaaaaaaaaaaatcagtagctggtgagttaaggcrgggtttgaactcaagcccataccttctgttcagctactcggaattttatggaagtatttacaataattggtcagtgagtttaagtaattatgacctgagt

SEQ ID NO: 296439 - DNA, 201 bp, Homo sapiens
ttgtcttctaccacttcagcctgattctgtatctgattttctaccccagccagttcgggagagctaaggaggggatgcctactctattggttcacatccckctcttttcccaatggcaggttaatggtagcattacttgaacagaaccagagcttgcttcggtgtctgtctgacagttacaggttcaaacagtgggttctc

SEQ ID NO: 296440 - DNA, 201 bp, Homo sapiens
taaaacaaacatggttctcgcctggtggagcctatacttgggagagaagctaaacaaatatttaatcatatacgtgttaagtgctttgaagcaagagctcrgtatgcgttgcagtatacctaaggacttagtctgacgtagggagtgcaagaaggcttcccttaaggagggatacagatgttgaatgctgacatgtacaag

SEQ ID NO: 296441 - DNA, 201 bp, Homo sapiens
gattagaggagctccctgagattttagttttatgtacatgtagaagtcctctttcatcttcaccattgtcaaaggcacacttctaaatgttgaagaccaamaaaaaaaaaattgtattactaagttcctgatgtcattattgttagtgttattatgactaataatagtaactacatttataatcaccttgtatgtgtaaag

SEQ ID NO: 296442 - DNA, 201 bp, Homo sapiens
tgggccagaaatggctattttctttgtgtgatcacaaaaaatgatgcagctatgatggtaacgaagtctcattcattcagctcaggcttttgtcagattaytgacttgatcacaggattatttttcagaagtttgaggaaaaaaggacactgcttctctagaccaattttttgtttgtttttgtttgtttgtttgttttgg

SEQ ID NO: 296443 - DNA, 201 bp, Homo sapiens
tggacaatgaagcagaagaaactgatatagataagctactatgtaaagctttgatgtccagttttgctttatactgtcaatttgtttagaaggaatgagaggggtgttgatttttagtattacagtttctaattcaaaacctggttctaatttgaggtccttggaacttaccaggaattctctatggatttgaagagtcaa

SEQ ID NO: 296444 - DNA, 201 bp, Homo sapiens
tggtaacgaagtctcattcattcagctcaggcttttgtcagattattgacttgatcacaggattatttttcagaagtttgaggaaaaaaggacactgcttytctagaccaattttttgtttgtttttgtttgtttgtttgttttggggacagggtctcgccttttttcccaggctggagtgcagtggcacactcacagctc

SEQ ID NO: 296445 - DNA, 201 bp, Homo sapiens
atggaaattgttattgtcactttaaagaaaagttacagagcagtatatatgagactccattttttaaaaaaattatgaaattctgcatacaaagacacctgtacctgtttgttgactcatagacaatgtctgaatgggttttgaagtcagagagacttgggttcgttttccagaagtacattttacgtttgtttggtagga

SEQ ID NO: 296446 - DNA, 201 bp, Homo sapiens
gtcaatgttttggattttagagatatgatttaagaagtgatttttattatatagtggacatcagttcttattacaaatcctataatgggttatcaaattgrtgatttatatgaatttctaaacctgtacccacgtaatgatattttgtagttagattttggagaaatgagaaacattaaagtatccaaggaggaggtgttt

SEQ ID NO: 296447 - DNA, 201 bp, Homo sapiens
aattactttaacagaataaattgtttagaaggacctattagtgatcttttccccttattattgttacataatttattgttttcagaatttaacacttaagktcctaaaattgctttcaattgattatatatgttagcacttttcttgggaagtttgtattctttgtaagaaatatctatacttggttaagtcttcacttgg

SEQ ID NO: 296448 - DNA, 201 bp, Homo sapiens
caagacagagttggaaattatgtcccttttaaggtggtcatgtaggagtgttgtcaaagctatcacaaattattgaccatagcatcatccataattaataracatttcttgtgtatgttcaattaatattcaacaaatatgtgtcggtcaaaggcctgcagtaagtgatagataaattttctcagttgtctgatgtacctt

SEQ ID NO: 296449 - DNA, 201 bp, Homo sapiens
taagttcctaaaattgctttcaattgattatatatgttagcacttttcttgggaagtttgtattctttgtaagaaatatctatacttggttaagtcttcayttggttaggtatatcacataaagaaagtgtcctttctccatagctgaatcacttaatgatttaggttatagctcaagtagcttgataatcttcggttttc

SEQ ID NO: 296450 - DNA, 201 bp, Homo sapiens
tttttagtacttatgcatatatgtacatgcttaaagcatatatgtacatgcttagtacttatgtatatatgtacatgcttaaaaaattcatgtctgaaacrttgttggtcttgtgctttcagaggaagcttggaagggaagagagaacaaaagagttataaagctgtcctggaagacccaatgttgaagttctcaggacta

SEQ ID NO: 296451 - DNA, 201 bp, Homo sapiens
accatttgtaataatgactatagtaaaaataatctcattttctcaaaaacagtaagaacacccttatttatttaatcactaggaacaaaagaaaacttccrtcttttaaatgtatgtgttttagaggaagaaaaacggtgtcctaaagagttgaagaatgcatttgttactttacaaatcaaaatataggatcctagatat

SEQ ID NO: 296452 - DNA, 201 bp, Homo sapiens
ttttttttttttttgtgacagtgtacttttcttccaaactctttgtgacttcctgtgaattctgttaagaaacctgtgttcctttaaaaagagagaatgawtttttttttttcctgtttcttgacctatccccatcctagaatgggcatcctagtgaggattatttcttcatgagtaattgaaacagtttgtcctactttt

SEQ ID NO: 296453 - DNA, 201 bp, Homo sapiens
gtttttgcagaagggaagcctttggccttgccagtgagaacatcctacaaagcatttagtacaagatggaagtaagtttttttgtggcatatggtatgttrcagactgttcttacctttctttatggatgctgcaagtataatttagtaggattatagaggaatttcttaatacctataggcattgatcaaatcatttgaa

SEQ ID NO: 296454 - DNA, 201 bp, Homo sapiens
ttgagaaaaatggtgatcactatctagtaaaaatttcatagctcttgggaagtatttacagaattgcctgagatggaagcctggttttttttttctttttkgctttgttttactccaatgcttatgtccttcatgcttggaggacttttatatttttcaagacatgagtatataatgagaaaacagactctgtacttacta

SEQ ID NO: 296455 - DNA, 201 bp, Homo sapiens
agccccaaagctctttgggcagaatatcagagtatacttacatttgttttccattatgtctgtcaccctttcacatagaaagcctttcaataagtataaakagacattgaatgaataaatgctagcttctattgaacattcatagctcttatactcaagaagctcatttgtctagtaaaatagagaagagtacggagcaat

SEQ ID NO: 296456 - DNA, 201 bp, Homo sapiens
aaaaatggtgatcactatctagtaaaaatttcatagctcttgggaagtatttacagaattgcctgagatggaagcctggttttttttttcttttttgcttkgttttactccaatgcttatgtccttcatgcttggaggacttttatatttttcaagacatgagtatataatgagaaaacagactctgtacttactattgaa

SEQ ID NO: 296457 - DNA, 201 bp, Homo sapiens
cattatgtctgtcaccctttcacatagaaagcctttcaataagtataaatagacattgaatgaataaatgctagcttctattgaacattcatagctcttayactcaagaagctcatttgtctagtaaaatagagaagagtacggagcaatgaactgtgagttctaatgatcgtggaagtctgtctatttccaaggatcact

SEQ ID NO: 296458 - DNA, 201 bp, Homo sapiens
atgactgtcctatgaagtaaacacttggtattttggttcacttgatgtatcttaaatggaaaattcaggttaatgacaacagatgtaaaagattaataccmaaggtagtgacaaattattcacaaagtatgtggatatctaacctttatatttatttctgtttccctttgctataacaatagaagcgtggatggttaaatt

SEQ ID NO: 296459 - DNA, 201 bp, Homo sapiens
tccctttgctataacaatagaagcgtggatggttaaatttaaatcaggaggtaatccagaaagcattagtatttacttttgttaaaaggaacatcgcattytacacccgtaaaggcagatttttttttttttaacattgatcctggctgcccgttagaatcacctggggagcttgtaggtgaggtggcaaggggaaagttc

SEQ ID NO: 296460 - DNA, 201 bp, Homo sapiens
ttatagttttataaaattaataaaaaaatttaatataattaataactaattatttcacttacattgagcagtaaaggtaaacggctttatggtttgaagarccagaagagactgtgttagctggagtttagtgagttcgttggagaggtgaaggagattattctgaagaggaaggcagctatggatcatttagcaattgtg

SEQ ID NO: 296461 - DNA, 201 bp, Homo sapiens
tagcaattgtgatagctagttctagactttttctgctgcctaaagtccagccaagagctgactttgccatctctaaactctacacacctgctcccttgcartggaacaattaattgtattatttgcttggactctctgataagtaagcgctgtgctagctagtctcttaggatggccctcaatgaaatatgccttctgata

SEQ ID NO: 296462 - DNA, 201 bp, Homo sapiens
gcagagtactagcaattttttctttcttatagaattacttttatccaggtcagtcactgtagttcctgaaatgatgattggtgtatctggaagatactcakgagtgattcatgggatgattttatttccctttcattcatttagccatgacacactgaggtcatcttaaagtagcagattgttatcttcatctagcaaaaa

SEQ ID NO: 296463 - DNA, 201 bp, Homo sapiens
tgtctggatagttttagtaaaggaggaaaaaagttcccaccacattctcccacatccaaacttaatttaccattgccagttctttgctcataggaaattarcagtggatcaactattgtatcataaatacaaaactaatattcgagaaacgacagaattgagtttcacttaaagctcttagtacatcagtagagaggatag

SEQ ID NO: 296464 - DNA, 201 bp, Homo sapiens
attctcccacatccaaacttaatttaccattgccagttctttgctcataggaaattagcagtggatcaactattgtatcataaatacaaaactaatattcragaaacgacagaattgagtttcacttaaagctcttagtacatcagtagagaggatagcagactggtggtaggagtataggctttagaatcatatagtctg

SEQ ID NO: 296465 - DNA, 201 bp, Homo sapiens
cacggtgactcactcctgtaatccaagcactctgggaggctgaggtgggtggatcacttgaggccaggagtttgagaccagcctggccaacatggtgaaaycctgtctctactaaaaaagaaaatacaaaaattagccaggtgtgatggtgcacgcttgtaatctcagctactagggaggctgaggtatgagaattgcttg

SEQ ID NO: 296466 - DNA, 201 bp, Homo sapiens
taatttttaagtaacataaatgaagagctcttctgtataatttttccatattccagaatacaacaacctctcaagtctctgcagccagttttatccccttycttgttcctgcccacagtcacatgaataggttctctcatctggagagacagtttgcttgctactccagccctgcagtcacagggaggaggaagcagcagc

SEQ ID NO: 296467 - DNA, 201 bp, Homo sapiens
ttggaactctggtcttccagctcctactctagcactcttttctgtaggtcacattgtctgatcttcttttggtttccttgtgactatttctaggtctcttyccatgttgctagcatatttgtctattattccaccagagccaccacgatatttagttcctgctttttgtaatcatgctaagcttattaataacttttcata

SEQ ID NO: 296468 - DNA, 201 bp, Homo sapiens
agtgattgacattgttcctgttctcatatagacactgaaggtatgggagaatattaatataatctcaccttgcttcatccaattcacaaggaataacaggrataaagtggattattaataaacattccacaatttaaatcatatatagtaactctagattttagattaaaaaaaaaggcacacctttagttaaaagagcag

SEQ ID NO: 296469 - DNA, 201 bp, Homo sapiens
agacctcacaggactctaccaactgctattctagaaaattgaagtcttttatcaccgttgcctaaaattaaagcatacatgcatatgtgtgagcttaaacyttagagtattaatgtgcaaacccagaaaaataccttattacctgtaactgtcattttttcatgttggttagatacattgaaagatgggaagaaaagagaa

SEQ ID NO: 296470 - DNA, 201 bp, Homo sapiens
atcactatactacattagtgtcaatcaaacttttcctggccacggcccatctctgtgtgtgtacaccttatttttttctttttttaagctcaactagttamaacatgcttgaagtcagaaactcttaacttctgtgtctttgcatttctgtagcaggggatttacccgttgtagttggtcatttatattttatcttactcc

SEQ ID NO: 296471 - DNA, 201 bp, Homo sapiens
gtgagccagtgtgtatgtttaaataaagatggcttcaatgagagtcctgccaaaagttgtaacaagaatagtttacttttttgtatatttgctctaaaatrccagatgttaggcctaatgttccacatctagagaacagaaacaataattatattaatcaaattaggagagaaggacatcaatttgtgatttgtctaattt

SEQ ID NO: 296472 - DNA, 201 bp, Homo sapiens
tgtctcaaaaaaaaaaaaaaaattaataaaataaaagaaaacttagttagttgttctaacttatcagacagattcagttcttttttaccagaatttcataytctttatcctaagggatgaacttaaaaatgtttgtgatatttcttagatttccttaaatatataatttgtgctccaaaataagggttacctatggatgtt

SEQ ID NO: 296473 - DNA, 201 bp, Homo sapiens
ttatatttttctcttcttaaacttagatatcactgggtatagaaaacgtaatgttagagtttgcccagcctttttcatatttttacattttaatttctttraaagaaattaccattaccaccgcattactattacaaaatagactataatatgcttcataaagctgaagaatttaagtaacctcttcagacctttatcatt

SEQ ID NO: 296474 - DNA, 201 bp, Homo sapiens
gttttgggtcaaggctaatcacccgcttagacttcattgtattttcactttatcatcaccttagtatagtcatgtgcctcatcatatcatttcagtcaacygcagatcacatgtacaatgatggttccgtaagattatagtactttatttttactgtactttttctcttttaggtatgtttagatacacagatacctaact

SEQ ID NO: 296475 - DNA, 201 bp, Homo sapiens
acccgcttagacttcattgtattttcactttatcatcaccttagtatagtcatgtgcctcatcatatcatttcagtcaactgcagatcacatgtacaatgrtggttccgtaagattatagtactttatttttactgtactttttctcttttaggtatgtttagatacacagatacctaactattgtgttacagttgcccac

SEQ ID NO: 296476 - DNA, 201 bp, Homo sapiens
tagaagtcctctttcatcttcaccattgtcaaaggcacacttctaaatgttgaagaccaaaaaaaaaaaaattgtattactaagttcctgatgtcattatkgttagtgttattatgactaataatagtaactacatttataatcaccttgtatgtgtaaagtgctttaatatcaacaaaacctcttagcatagattgcaaa

SEQ ID NO: 296477 - DNA, 201 bp, Homo sapiens
attattgttagtgttattatgactaataatagtaactacatttataatcaccttgtatgtgtaaagtgctttaatatcaacaaaacctcttagcatagatkgcaaactaaaatagagaagggattaagatcatggctttagagaccattttttattcaaatcccagctgtgatcttgaactagctatttaacctttactaa

SEQ ID NO: 296478 - DNA, 201 bp, Homo sapiens
actacagtgtgacacaaagacatggagtgaatgcatgctgttggaaaaatgatgccaatagactgcttgggtgcagggttgctacaaaccttcattctgtwaaaaaaaaaaaaaaatgcaatgtgtgcaaggtacaataaaatgagttatgcctatagtattaaataaggaaatatgggttgctggcaggtggtctctgtc

SEQ ID NO: 296479 - DNA, 201 bp, Homo sapiens
agcctccctggtagctaggagtacaggcatgcaccaccatacccagctaatttttaatttatttttttgtagagatgaggtccgactatgttgcccaagckgttctcaaactcctggcctcaagcaatcctcctgcctcggccttttgagtgctgggattacaagcacgagccaccatgtctggccttgaagtgatcttta

SEQ ID NO: 296480 - DNA, 201 bp, Homo sapiens
tatttaaatagcttttaaaactccttgctttttaattcttggagaagttagggctaaattatgccttttttttttttttgtgacagtgtacttttcttccmaactctttgtgacttcctgtgaattctgttaagaaacctgtgttcctttaaaaagagagaatgaatttttttttttcctgtttcttgacctatccccatc

SEQ ID NO: 296481 - DNA, 201 bp, Homo sapiens
tcctggcctcaagcaatcctcctgcctcggccttttgagtgctgggattacaagcacgagccaccatgtctggccttgaagtgatctttacagtgctttcragggttgtatacgtgggaaagatagaggtcatatagtttgggtcatgtacagttgcacaagtaggcctttcactggtgatctcttacactgcagtccatt

SEQ ID NO: 296482 - DNA, 201 bp, Homo sapiens
ctaggggtaatatgctacaccatataacctcggtgtgctataggctataccatctagatttgtgtgtttacatttcatgatgtttacacgactaaattgcytaatgatgcatttctcagaatgtacacctgtcgttaagtgacatgtgaccatgtttgcttttttattttaaaggggacacaattatataaataacttttt

SEQ ID NO: 296483 - DNA, 201 bp, Homo sapiens
agacctgaatagcttttgttgtgagtagtgagtttttaaaattttacttgtaaatttaaattatcttttaacttttcttaatctttcacctacccatcaargaaaaaaacgttagctgtgtaaacagacaagtaagtgtgatatataaaggagtcgccaggagctgttaatccaagataaataggataaatgtgggataac

SEQ ID NO: 296484 - DNA, 201 bp, Homo sapiens
ccagctactcgggaggctgaggcaggaaaataggaaaatctcttcagcctgggaggcggaggttgtggtgagccgagatcacgccactgcactccagtctrggcaacagagtgagaccctgtctcaaaaaaaaaaaggtactgcatagtttatatttgatttgagacgcttattgtctttttttgaagaattacacttttt

SEQ ID NO: 296485 - DNA, 201 bp, Homo sapiens
gaaggaaaaaccattctttttatttttgaaataaaatagttctcatgaacatgtgtgcaaaataccttcaagattataaacccaaactactgaataaaccmaaaatgttaaatttgagaaagcagttataagtgcatagtagacactactgaataaacagtagtgctgtctataataaaataatagtgctgtgtaaaacac

SEQ ID NO: 296486 - DNA, 201 bp, Homo sapiens
ttttgggagtaagaatagatgttaatacttgaattttattgatgtgggttcagaaaggacatagtttgaaaatggagtattaaggttggaactctggtctwccagctcctactctagcactcttttctgtaggtcacattgtctgatcttcttttggtttccttgtgactatttctaggtctctttccatgttgctagcat

SEQ ID NO: 296487 - DNA, 201 bp, Homo sapiens
ctaccctgaacattctctttttccctagcatgtttcgccaagggatgcatgacttgaaagtctggcctaatgtagaagcagatggatcagaacccacaaawactcctggcagaacaagtagcactctctcagaagatcagatgagccgtcttgccaaggtaaaaaaagtcatttggaacaggtgcaaagctctgactgatg

SEQ ID NO: 296488 - DNA, 201 bp, Homo sapiens
aaatagttctcatgaacatgtgtgcaaaataccttcaagattataaacccaaactactgaataaaccaaaaatgttaaatttgagaaagcagttataagtrcatagtagacactactgaataaacagtagtgctgtctataataaaataatagtgctgtgtaaaacacactacatgtatataataaaataaaaatgtgtta

SEQ ID NO: 296489 - DNA, 201 bp, Homo sapiens
ttattatttttcagaataacttatgcttttattctttcccttttgcagctatataaattacctttttgaatggaacccccgacccaggccttgggggttcytgcattaggatcattcatggatattcattaagcccattttttttcacattgtcagctgagaaatggccaagacttttgaattattagttaggatttttca

SEQ ID NO: 296490 - DNA, 201 bp, Homo sapiens
acctgaatagcttttgttgtgagtagtgagtttttaaaattttacttgtaaatttaaattatcttttaacttttcttaatctttcacctacccatcaaagraaaaaacgttagctgtgtaaacagacaagtaagtgtgatatataaaggagtcgccaggagctgttaatccaagataaataggataaatgtgggataacat

SEQ ID NO: 296491 - DNA, 201 bp, Homo sapiens
gcccaggagtttgagacccgcctgggcaacatggcgagactccatctttatttaaaataaatataaaaaaaaatgtatgcatagtttgaaaccacataaartatcttctattattgtgttaatagtcaacaaatgttaaatcagcataaatgatgacagacttttgatacatggcatagtagtagattaatatttcttcta

SEQ ID NO: 296492 - DNA, 201 bp, Homo sapiens
atatttctaagtggtaggctatttattgaaagttaagagtctgtttgttatttgagtgtatgtgtaatgtctatatgtggccctcactgaagtatacttaygaaatacttcagaaatgtccatttgtacaatagatgcaaaattaagacaattttaccatcaggctgggtaataacaaatatgcagttatagatttgcttt

SEQ ID NO: 296493 - DNA, 201 bp, Homo sapiens
aatttgtaaacataattattgcttacacaataagaaacccagattattagtctgtttccacactgctataaagaaatgcccaagactagggagctttgttrttatgtaacagagatattacaaaggaacacatatgcaagtataattttattatttttcagaataacttatgcttttattctttcccttttgcagctatat

SEQ ID NO: 296494 - DNA, 201 bp, Homo sapiens
aaaactagtcttgaatttcattgacccacctgtgctctcttgttccactgcagtcagcattgctgcacaactacccattaaaacacatgatatttaaaaawcaaagaatacaggcacttgctatatgacaaatgtttgcagcttgtaagattagttaattattgtaatagcaagagtcagcagaatgccccataattttca

SEQ ID NO: 296495 - DNA, 201 bp, Homo sapiens
aaaactaaggtaagggtagagtagggttgggcatccactttgtttgaattgctgaaagagctaggcagtatactctttttttttttcttcaggttgggggkatataatcttgaagtgaagacttggcagaactggtatttgaaagattgccatcatacagaaggagaatttgcctgttacaggaggattctataaccagga

SEQ ID NO: 296496 - DNA, 201 bp, Homo sapiens
ggctgcgtgggaagattacttgagcccaggagtttgagacccgcctgggcaacatggcgagactccatctttatttaaaataaatataaaaaaaaatgtaygcatagtttgaaaccacataaagtatcttctattattgtgttaatagtcaacaaatgttaaatcagcataaatgatgacagacttttgatacatggcata

SEQ ID NO: 296497 - DNA, 201 bp, Homo sapiens
cttctctttgcatggaatgagttccctcttatttccccaacttttgagtgtgtgtgtgtgtgtgtgtgtgtgtgtgtgtgtgtgtatgtaagagagagagwgtgtgtgtgtgtgtgtgtgtgtgtgtgtatgattctgtctatattaatttggtcctcgggcattttgtcttaatttgagatctcccacagaatctgagac

SEQ ID NO: 296498 - DNA, 201 bp, Homo sapiens
cgccatgttgcccaggctagtctcaaactcttgagctcaagtggtctgcctgcctcagcctctcaaaatgctgagattacaggtgtgagccaccatgcccrgtctgtaccttgttttttttttaaagtattaaatgtgaaaatgtatgaaatgctttagatttgcctgtccatctacacacacttctagtttttttctttc

SEQ ID NO: 296499 - DNA, 201 bp, Homo sapiens
tctggttgaaactgatagctatcacctcacttaaaaattatttagatgcacattttctccaggttgatgaatcctacatcatgttcataatttcacagatyagcagttctgttatcatttggggctttccataaatgtgttatctctggagacagaactgcatatactgtatactttcatgtcagtagtattcttagaagc

SEQ ID NO: 296500 - DNA, 201 bp, Homo sapiens
agattatttaacattgtttattaatttattagaaaaaatacatcaaaacaagggaaatgtgagtgaaactgttctgtcaccagtgcattttaataaaatcrtattttacattttaaactatatgtcatttcattaaaggcagtattttctgcccatatagagtttgtattgcaaaaacatgctaatggagatggtactttc

SEQ ID NO: 296501 - DNA, 201 bp, Homo sapiens
tgagacacttcctggcacatagtaggcaccaaataaacatatgtggttttatatgagtgccgagtaccatttctttaggaagtttattttctctgataatkgcctttagtaaaaatatttaaattgcttcttaaattctaaattacattatttttattcacatgaaaaataaatcttgccaatttttttctagagtgacac

SEQ ID NO: 296502 - DNA, 201 bp, Homo sapiens
agtgtaaagattgctgggccagtgtattgaatctaatggaaatagactttcttgtcacctgtcttgtgacagatagccttagtgaagattacttgtcacarctaggctgataaatgtgttttctggtgttgtgactgagaacaagcctgttaaacaacggctgtgggaatttgtggttttctgtaagactcaattactgaa

SEQ ID NO: 296503 - DNA, 201 bp, Homo sapiens
attttcaatttactatagctttgagtgtaattctcttcatcactgaagaaaaggaaatattcactaacagaaacacaggtttgtgatttgtgttttattaraagattgagttagtgtcatgatactgtgttaaatgaagaataaccttggtcacagaaactgcatcttgaatgcagctcagtgtcgtcttaaatacacagc

SEQ ID NO: 296504 - DNA, 201 bp, Homo sapiens
attcagagcacacactaagtatgaagaaattcagttcagcctgcagttatagttatttgttaaatgcagaaacacattttaaatgtaaactttgggtgggrctgagatgatatacagctgtatctgacaataaaacagactataattacaataatgtggtagtgacacacatgtgtaaaccaatatactggttgaacagaa

SEQ ID NO: 296505 - DNA, 201 bp, Homo sapiens
aatggtaaaaatgaaaatacctttgtacatcatcttaagagagcttatatataaactaaatgggcaggctccatcgtctacctttctttttcttttcttcrcatgtttatgtcttttttgttattagtcagacatttttagccctctgtatgctcattcttgtagttctatttctattgaaacttcctccaaaacttttct

SEQ ID NO: 296506 - DNA, 201 bp, Homo sapiens
aacagttttggagggcaagggatggagaagaagctatacaagtaagttgactttggagacaatggccaggggttaggcctgaacctgatggatttatataygtgtgtgttcataccccacttttggtaccaatttactgtattattccgctttcacacttctgataaagacatacctgagactgagaagaaaaagaatttt

SEQ ID NO: 296507 - DNA, 201 bp, Homo sapiens
aattggaacccaaacaccctggctctacagcctgtgctctccagtaatctgtggaagttacacacagagagagaattgctctttacaattctctttacatytttacatggatcagtaaagcatctttaaaagacctagggtcatttaaaaaggccattattattgctgtcttcaaattcttactttttgtctttcttattc

SEQ ID NO: 296508 - DNA, 201 bp, Homo sapiens
gtttgacaccaggctgagtaacataagagaccccgtctcttaaaaaaaaaaaaaaaaaaaaaaaagagttcacatagcaggcctaaggctgctgtgcttaraagggcctgcttgcaaggttggcccttggctgatgtctgagaactgagcttctgaaacaattcctaactgatacagatgtttcactgtgtctagactgtt

SEQ ID NO: 296509 - DNA, 201 bp, Homo sapiens
ccttggggaatgcagactccagttatagagataaaaatgcccacaaaaacatttggcagttagaaaaacatcatttaaatgacagtagtaaaattgagccrgcttctaaaggaatagctgaaagttgccgaaaacttcctgtaaaactttcaacaagatgactttagaggagatgatatccctgtttgatgaagagtatat

SEQ ID NO: 296510 - DNA, 201 bp, Homo sapiens
tcagactgactttttctccttcttccacatactgtctgtcccctttccttttttttttttttttttggtagtttaagggatttacacatctgttattaccmggaaatgacagaagatggaatattagacaaaaggagccattacataacagttttacatacagcttttagggttaggtaattgtaatccacaattctagat

SEQ ID NO: 296511 - DNA, 201 bp, Homo sapiens
tactctatagataggcagctttttgtctgaaatctccgtttgtgccataacaaatcaatccagaaatttgggagttactattaatgcctttctttccttcstacttcctctccaccagcaggtcctgttaattatacttccaagatatttcttatatttgtctccttttcaccatctccactctcattatttactctccta

SEQ ID NO: 296512 - DNA, 201 bp, Homo sapiens
gattttaggccttgacaaaattcttgaaatgtgttaattgggatctacctcaagaggccaaacaggccttggaacttctgggaaaatggaagccgatggaygtagaggactccttggagctgttatcctctcattacaccaacccaactgtgaggcgttatgctgttgcccggttgcgacaggccgatgatgaggtgcatt

SEQ ID NO: 296513 - DNA, 201 bp, Homo sapiens
ctaatttaaccctcatgctcttctctaaggtttatattatgatgtccattttaaagatgaaggggctgtggggcacagagaagttaagtaatttggtgacrtgccaaaagtaatacagctgaaaagtgatagataaaagtaaaatgtttacttgatatttaggaataaattatgtctgtaataattttgcattcttttcct

SEQ ID NO: 296514 - DNA, 201 bp, Homo sapiens
tccagagtacaatgtgactctagtgttgcacagaacacactttaggaagtgttgcattaactagacacaattgaagtgaactgttccataaaaaattgtgygttctcttatggacagagtattttacatctcagtgatctcttttattactttttcagctcccaaattataaccagcccccttccttcagtctcttcacct

SEQ ID NO: 296515 - DNA, 201 bp, Homo sapiens
cttcaccaacccaaaagctctcagaatgctgtgcttttctgagaaaagcagaaaaaatcagagtttttgtggaagcgccattacattggcatgattgattraatcattggctgctggccgattaagtcaatcttcagttctctctgttccccagaggttgagagggtagagcttaaagtcccaccctctaatcacatggct

SEQ ID NO: 296516 - DNA, 201 bp, Homo sapiens
taaaagctgcaagtaataatggtgaataaaagtagttcaatattcatctttgtcttgttgctcattgtgggtacgcttttagtatttcactctaatgtgtrttgcttactggtttcagtcaaatgctctcatttatgtttaaagtttctccctgtctctgtttgttcttttctttttctgtgtgtttaaatcaagaatggc

SEQ ID NO: 296517 - DNA, 201 bp, Homo sapiens
ccaagacaatttgcttaactgacagtcttgtgaaaacttccgtgtgctgcctattcaagggagtgaggttgcagaaagatgtacaaccagccagatcataractgtttgctgctgtttctgtacttacccatttttatgcttctgttttgaggttttgttggattgcctatctttttaagtagttacttcacagagatacg

SEQ ID NO: 296518 - DNA, 201 bp, Homo sapiens
cctgctctttagtattcgaaagttgaatttattggtagttcatcaaaacaaaaattgccatcctaaagtgagtggaggtaaaaaccttaaatagtccttakttataagtatttgcttaaaagagatattctataaaccttggaaagaagaaattagatcataaagggatctcttgctatccaaatttttgcattccttagt

SEQ ID NO: 296519 - DNA, 201 bp, Homo sapiens
tatgtttaaagtttctccctgtctctgtttgttcttttctttttctgtgtgtttaaatcaagaatggcttctatatattatcaaacacgcttttgacactsgttcatatcatatagtgtctcatttttatcaatctactgtaagtatgctgatacatttcctaatgttttatcagccatacacttgtaaaataaatctcaa

SEQ ID NO: 296520 - DNA, 201 bp, Homo sapiens
aggttgcagatgaacagctagttgaaatgacacatgggttgaggtcctgagcacaggagcttctgtccccatggagtttgcagtatagcaccctcctggcwtgtgggtgcattcttcttcaccaacccaaaagctctcagaatgctgtgcttttctgagaaaagcagaaaaaatcagagtttttgtggaagcgccattaca

SEQ ID NO: 296521 - DNA, 201 bp, Homo sapiens
ttgaggtgactgccatattattttttagagtctaacaacatttttggaaccttttcctctggccaaaactttttgtgtggtttgttaatttaaaagaaagatatatatatatgtatttctgatttatgttaacttcatttccatagctggaatgaatggctgaaactaccagtaaaataccctgacctgcccaggaatgcc

SEQ ID NO: 296522 - DNA, 201 bp, Homo sapiens
gggaaagatagaggtcatatagtttgggtcatgtacagttgcacaagtaggcctttcactggtgatctcttacactgcagtccatttcctgtttctgcttytccctgtcatcctttcttttcatttatggtagtaaaaatcttgagaaaggggtgtgttttccagtaatgttaatacatactaaatctaattaattaaatc

SEQ ID NO: 296523 - DNA, 201 bp, Homo sapiens
atatgtaatgaccaagaaatcagatgatgataagtgacttagaaaagttttctactgaatttccccttcctggggaatttaataccgcagccttttttatkttatatggttaactcttttctgtaattaggaaagcacacaggtaatagattgagcagcactccgaatgaaggctggcagtgaaactgaattacttatacc

SEQ ID NO: 296524 - DNA, 201 bp, Homo sapiens
cttactggtttcagtcaaatgctctcatttatgtttaaagtttctccctgtctctgtttgttcttttctttttctgtgtgtttaaatcaagaatggcttcyatatattatcaaacacgcttttgacactcgttcatatcatatagtgtctcatttttatcaatctactgtaagtatgctgatacatttcctaatgttttat

SEQ ID NO: 296525 - DNA, 201 bp, Homo sapiens
tgaggtgactgccatattattttttagagtctaacaacatttttggaaccttttcctctggccaaaactttttgtgtggtttgttaatttaaaagaaagatatatatatatgtatttctgatttatgttaacttcatttccatagctggaatgaatggctgaaactaccagtaaaataccctgacctgcccaggaatgccc

SEQ ID NO: 296526 - DNA, 201 bp, Homo sapiens
gagatcagtacttgtgctggtgttaactcttccattttttagttacttgaaagtcgctctttcctgggtcagtggaattttgtttttgtttttaagctttkgaatagtaaatgtaacaatagtaaatgtttagatatacttacaaccctagtctgttagtcttaaatataccataatgtgttttcatttgatgaactttgt

SEQ ID NO: 296527 - DNA, 201 bp, Homo sapiens
tttgaatttttctttatgattatggttatgctatgctttatgttgtgtgttttatttggagaagaaccgaaaaagaggaaaataatttttctttcccaggytactttatatttttctatttttaagggaagatgctctttatattttatctcactctatattggaggtcttcagtctcaagtcatgcttatttactttctt

SEQ ID NO: 296528 - DNA, 201 bp, Homo sapiens
atttaataccgcagccttttttatgttatatggttaactcttttctgtaattaggaaagcacacaggtaatagattgagcagcactccgaatgaaggctgrcagtgaaactgaattacttatacctccaaagagggatacctgccattaaacatattgtttaattttctgttatataatacttttttccttaggaaacaac

SEQ ID NO: 296529 - DNA, 201 bp, Homo sapiens
ttattgactatttgtgtttatgtttccatgaactgctttttgatgtactttgtcctttttagaaattgagatataattcacatatcataaaattctttgcttttttttttttttgagttgtcgttttcttattgatatataaggagtctttgtagatgaatggaattagccctttgtgggttatgttacaaatactgcttt

SEQ ID NO: 296530 - DNA, 201 bp, Homo sapiens
tttccaacttacggtctactagtcactaattttgtgtgtttcttttttagttctttttttaagctctgttatgtttttaagaagataaaagctctattttrtttttaaaaagagagaatcttggccagatatgtttgggaaatgctagtttaaagctaaatgggcttaaacaaacaaacaaacaaacaaacaaacagcact

SEQ ID NO: 296531 - DNA, 201 bp, Homo sapiens
gtttcctaaaataaaacgaacgtaaactttgccacacccattgactctttttttcacaaaagatttgtctgcagcatgcaatgctgcttgttagcattttwtccacagtagaacttctttcaaaattgaagtcagtcctccctctcaaatactgtcactgctttaacaactatgtttatggagtattttgaatcttttgtt

SEQ ID NO: 296532 - DNA, 201 bp, Homo sapiens
gatactttggaaatgtaagtagtcttcatgatattgttgatttcttagtgaaccatgaaggagctggaaaggtttctcagatatttttctcagttttgggraatctaaaacggactgtttttttttttttttttctgagatggagtcttgctctgtcgcccaggctggagtgcagtggcacgatgtcagctcactgcaagc

SEQ ID NO: 296533 - DNA, 201 bp, Homo sapiens
tggctgaatgaatcttttaactattagctattgattaaagtttgtatgtttgcatatctttcggtataacaaaatattcaactgaaaaaagaatttttaarttacagaatcatagaatccttagataagccctttaagaagccaatctgctacagtctaagttttccctttcagagctaagatattgattcattgattcag

SEQ ID NO: 296534 - DNA, 201 bp, Homo sapiens
aatcttgctattttgaccttcccccatgaagctcaaatgttcttaatgacatctagaatgatgaatcctttccagaagcttttcaatttattttgcccagmtccattacaggaatcactgtctatggaagctatgatctcacaaaatgtgtttcttaaataataagacttgaaagtcgaaatgacttcttgatttttgggc

SEQ ID NO: 296535 - DNA, 201 bp, Homo sapiens
agtgaaccatgaaggagctggaaaggtttctcagatatttttctcagttttgggaaatctaaaacggactgtttttttttttttttttctgagatggagtsttgctctgtcgcccaggctggagtgcagtggcacgatgtcagctcactgcaagctccacctcccaagttcatgccattctcctgcctcagcctcccaggt

SEQ ID NO: 296536 - DNA, 201 bp, Homo sapiens
agtattcaacaaagtaaataactttcttcttgaaaaactaactcttctcatggtttaggtgatactgtatatctcttgtttttctcttcatctgtcttgcmatttcttctcagtttcatttgtcagcactttcctctctccttgatatcttaatgttcctcagggtcctcttctagtctcacttgatactcttgtcctagg

SEQ ID NO: 296537 - DNA, 201 bp, Homo sapiens
tctttttttataaagcacttttttctttaaattgttttaaaaccttaaagtattgcttacacagattgagttttaacatttacaatacatacttcctgttwcacagttttttaaattcaacttttctttatgttctgtaagtaattttttatcaaaaaggcatagtatgaaatgaaacgtgtttgctattgaaatatatac

SEQ ID NO: 296538 - DNA, 201 bp, Homo sapiens
taattatttatactggtatgtaaaaataattttctgtttattttcttattacccttaagaattattttttctcatgctataaacacaaagatgatttaaartaagatatgagcaatcatcaaaagtctagatatagtatttatatctaactgtattccctgacagctgggttcatggaaatgcttgttggcatcaacattt

SEQ ID NO: 296539 - DNA, 201 bp, Homo sapiens
ggttttatagacaggaatccctaccccatactttccttctgttttcttacacagaagaaacatagctctcttcaaagatgtgttattttcttttcctgatrgaaatactcaagtatgtgttagaattttccatgttaaaaattcagaaaaacaaaactgtcccttgaaaccacatctcttgaaacagcaccttgttttctt

SEQ ID NO: 296540 - DNA, 201 bp, Homo sapiens
agtcttgctctgtcgcccaggctggagtgcagtggcacgatgtcagctcactgcaagctccacctcccaagttcatgccattctcctgcctcagcctcccrggtagctgtgactacaggcacccgccatcatgcctggctaatttttctgtatttttagtagaaatggggcttcattgtgttagccaggctggtcttgaac

SEQ ID NO: 296541 - DNA, 201 bp, Homo sapiens
ctagataagagggcttcatctaactttacggagcaaacaaagggcagagccaggtgggtaagacctgcctacagccttctttacctttgggagaatccttwaaactacttatatcactttttaaacttcttggcatgaggctttttactgtctaaatgatttctaatctaatcttactgctcaatttatagccttaaacaa

SEQ ID NO: 296542 - DNA, 201 bp, Homo sapiens
gatctttcacctgagtttcagattcatctattcaaacatgtatttgatctccattgtatgtctgacaggcattttgaacttaatatttcaaaatacaactmtttcctcttactctatagataggcagctttttgtctgaaatctccgtttgtgccataacaaatcaatccagaaatttgggagttactattaatgcctttc

SEQ ID NO: 296543 - DNA, 201 bp, Homo sapiens
attgattagaggagctccctgagattttagttttatgtacatgtagaagtcctctttcatcttcaccattgtcaaaggcacacttctaaatgttgaagacmaaaaaaaaaaaaattgtattactaagttcctgatgtcattattgttagtgttattatgactaataatagtaactacatttataatcaccttgtatgtgta

SEQ ID NO: 296544 - DNA, 201 bp, Homo sapiens
agggcagagccaggtgggtaagacctgcctacagccttctttacctttgggagaatccttaaaactacttatatcactttttaaacttcttggcatgaggstttttactgtctaaatgatttctaatctaatcttactgctcaatttatagccttaaacaaattacaaattagtagatgtccattgtaaaagctcactaca

SEQ ID NO: 296545 - DNA, 201 bp, Homo sapiens
ttgattagaggagctccctgagattttagttttatgtacatgtagaagtcctctttcatcttcaccattgtcaaaggcacacttctaaatgttgaagaccaaaaaaaaaaaaattgtattactaagttcctgatgtcattattgttagtgttattatgactaataatagtaactacatttataatcaccttgtatgtgtaa

SEQ ID NO: 296546 - DNA, 201 bp, Homo sapiens
ataagatcatatatataacttcatttagtgcttacacaaggagtctatcactgactccgtggctctgtcattaggacctagtggaactctgcctagtcaayttctctatcccaggaaataggctgtttctaatttttaaatattttctgattttaggccttgacaaaattcttgaaatgtgttaattgggatctacctcaa

SEQ ID NO: 296547 - DNA, 201 bp, Homo sapiens
gtagtagtatttcctagaaataaatagtaagtgacatagggattaatttttattcttcaggcatttatgtctaacttcacgaaggttatattctacaggattttttttttcattttctttatttttttcttttcttttcttttccttttttcctggagacaggatcacactctgtcacccgggctggctgaagtgcagtgg

SEQ ID NO: 296548 - DNA, 201 bp, Homo sapiens
atttatttattttaattagcgcatcaactagtaatttgttaaggtaggataactttactctcaaattagttgacattacttcacattagtagatctgaccrtccatttagttaaggagtagatttagtgatttttgtaacacttatgtagaaattcataccagttgattttcagttgattttaacttgaacttttcatcat

SEQ ID NO: 296549 - DNA, 201 bp, Homo sapiens
gcaggcagatcacttgagcccaggagtttgagaccagcccgggcaacatggtgaaactccatctcttcaaaaatatatatttgtgtgtgtgtgtgtgtgtrtgtgcgtgcacaaaaattagctgagtgtggtggttcacacttgtaatcacagctacctgggaggctgaggcaggaggattgcttgagcctgggaggcaga

SEQ ID NO: 296550 - DNA, 201 bp, Homo sapiens
atccagaaatttgggagttactattaatgcctttctttccttcctacttcctctccaccagcaggtcctgttaattatacttccaagatatttcttatatwtgtctccttttcaccatctccactctcattatttactctcctagtctaccgtaatagcatcttaactgatctcaggtctgtacttcacaggacaaccagt

SEQ ID NO: 296551 - DNA, 201 bp, Homo sapiens
tcctctttcatcttcaccattgtcaaaggcacacttctaaatgttgaagaccaaaaaaaaaaaaattgtattactaagttcctgatgtcattattgttagkgttattatgactaataatagtaactacatttataatcaccttgtatgtgtaaagtgctttaatatcaacaaaacctcttagcatagattgcaaactaaaa

SEQ ID NO: 296552 - DNA, 201 bp, Homo sapiens
gtaaattattttctgtttatttctttttaatttttgtagtactggagaaaatgaaactgggattgacccatcaagatgcttggctcaataagaaaaccackttaggagcaacctttgtatattggagacttcagagtaaccagcaaggaagagaaatcttaatcttcaagttaccatattttccaaatattacatggtacc

SEQ ID NO: 296553 - DNA, 201 bp, Homo sapiens
atgctgaaccagtacttttgaataatgatgaggtattttgctttttgtgagaaaattatacaaaatacgattttgttttaagactgatttgggaagctgcycttgtgggtcaagtccagccttaacttcattctcccactctccagaggtaatgctctgctgggtactgcccctgtacttaagaagtaggtaactaaattg

SEQ ID NO: 296554 - DNA, 201 bp, Homo sapiens
gcacacttctaaatgttgaagaccaaaaaaaaaaaaattgtattactaagttcctgatgtcattattgttagtgttattatgactaataatagtaactacwtttataatcaccttgtatgtgtaaagtgctttaatatcaacaaaacctcttagcatagattgcaaactaaaatagagaagggattaagatcatggcttta

SEQ ID NO: 296555 - DNA, 201 bp, Homo sapiens
tgccatctcggctcactgcaagctctgcctcacgagttcacgccattcttctgcctcagcctcccgagcagctgggactacaggcacccgccactgtgccyggctaatttttttgtattttttttagtatagtagagacggggtttcaccgtgttagccaggatggtctcgatctcctgacctcatgatccgcccaccttg

SEQ ID NO: 296556 - DNA, 201 bp, Homo sapiens
aaaataataaaatgtgagaatttaaatgcttctctaagcctactctattataacaaatgtattaaaatagaaattttaattgtgctgtttcctttgaacayttgaatttccttttttcatttgttccctttctggtgatttaaacaggattcttgctgtagctaaatccttaggggcctatagttgtgcagacaatccttt

SEQ ID NO: 296557 - DNA, 201 bp, Homo sapiens
tagtttcagccactcagctacatggaaggctgaggcaggaggattgcttgagtccaggagtttgacaccaggctgagtaacataagagaccccgtctcttaaaaaaaaaaaaaaaaaaaaaaaagagttcacatagcaggcctaaggctgctgtgcttagaagggcctgcttgcaaggttggcccttggctgatgtctgag

SEQ ID NO: 296558 - DNA, 201 bp, Homo sapiens
atagtagagacggggtttcaccgtgttagccaggatggtctcgatctcctgacctcatgatccgcccaccttggcctcccaaagtgctgggattacaggcrtgagccaccacgcccggccaacatatattttcaataacaggaaatggctgcagccatagtgtttacttggtggtcagaaagagcaagatacagcagtgag

SEQ ID NO: 296559 - DNA, 201 bp, Homo sapiens
attcaaatctaggtcttctagtcttgatagctaaccttgtctctcatatttggagatgacagtgtcacttttctttttttaggtggcctttttgtttgaawagatgtttggcttgaatgatttttttttttttggagatgaagtttcattcttgttgcccaggctggagtgcaatggtgcgatcttggctcactgcaacct

SEQ ID NO: 296560 - DNA, 201 bp, Homo sapiens
cccagtactttgggaggctgagaagggtggatcatttgaggtcaggagttcgagaccagcctggtcaacatggtgaaaccccttctgtactaaaaatacaaaaaaaaaaaaaagaaaaaattagccaggcatggtggtgcatgcctgtaatcccagctactcgggaggctgaggcaggaaaataggaaaatctcttcagcc

SEQ ID NO: 296561 - DNA, 201 bp, Homo sapiens
cggggtttcaccgtgttagccaggatggtctcgatctcctgacctcatgatccgcccaccttggcctcccaaagtgctgggattacaggcatgagccaccrcgcccggccaacatatattttcaataacaggaaatggctgcagccatagtgtttacttggtggtcagaaagagcaagatacagcagtgagcccctacatt

SEQ ID NO: 296562 - DNA, 201 bp, Homo sapiens
aaatctaggtcttctagtcttgatagctaaccttgtctctcatatttggagatgacagtgtcacttttctttttttaggtggcctttttgtttgaatagawgtttggcttgaatgatttttttttttttggagatgaagtttcattcttgttgcccaggctggagtgcaatggtgcgatcttggctcactgcaacctctgc

SEQ ID NO: 296563 - DNA, 201 bp, Homo sapiens
tgcatgcctgtaatcccagctactcgggaggctgaggcaggaaaataggaaaatctcttcagcctgggaggcggaggttgtggtgagccgagatcacgccmctgcactccagtctaggcaacagagtgagaccctgtctcaaaaaaaaaaaggtactgcatagtttatatttgatttgagacgcttattgtctttttttga

SEQ ID NO: 296564 - DNA, 201 bp, Homo sapiens
gaggaggaaaatatgaagatttgagtcagtggttcaaaagcaaagaatcaggtctaaagagaaatgctagcagagccatgcagaagaagtaatgagtaacrttcagcaggttagagaggggaaaacaggctgagaggaaacacggttctgttgagttgacattttctttgttgttgagaagaatcacaaaccttggtcaaa

SEQ ID NO: 296565 - DNA, 201 bp, Homo sapiens
gatattgaattgaacctgttagaatgtataggtttaaaaagcatacaggagtagatttacagagcagaacttttttagatagaaaggtttgcaagaaaaattgtttgtttaaacaagtagtcacttcccaccgaaattcaattacttctagatatgtgcaaaagaaataaaatgttcaagtgatataaagtgtgtgacaag

SEQ ID NO: 296566 - DNA, 201 bp, Homo sapiens
agagatcacatctataattctagttgatttagtaaatgctagattgaagggtaccttttatttatcagtgtgttttgatttaagatcttcttttgttaccrgtacatgggcatttttatgtaacatgtgaaatacttttatatctctgggttgttttttaatatttaatttttttattgttttatttttgtagagatgggt

SEQ ID NO: 296567 - DNA, 201 bp, Homo sapiens
atgtaaaaaatgaatatgtatttatatttgaaaattatcaataatgagatagtagctaaatccacaagagtggaattattcattcaacagtaatgtattawtaatatgttgagcatctattatgagctagacatggacgtgctgaagatatagtggagaacaagacaggtaagccctcagctctcatgaagttgaccatct

SEQ ID NO: 296568 - DNA, 201 bp, Homo sapiens
caagccctggcaccatgaagaaatgcagagatagcgctctactaccattattggcattaatactagtaatattgaaatggccactaatcatataaaatcawatgtagcactttttcatccctcataatttatttgcgagagctatatcacagtgggtataacagtgttagatctgtggcagagtaatccctgagttaagtg

SEQ ID NO: 296569 - DNA, 201 bp, Homo sapiens
atattgaattgaacctgttagaatgtataggtttaaaaagcatacaggagtagatttacagagcagaacttttttagatagaaaggtttgcaagaaaaattgtttgtttaaacaagtagtcacttcccaccgaaattcaattacttctagatatgtgcaaaagaaataaaatgttcaagtgatataaagtgtgtgacaagt

SEQ ID NO: 296570 - DNA, 201 bp, Homo sapiens
atggtatcttattttacagatgaggaaacaagttaaaggatatgcataagactgtccagcgagtacctgggagagcttggaatgttttaaccacatgactsattgcagagcttgtgcgctttccatcgtgtagtcttctgactactagctagttcactgttctttccagtataccctaatgtatctcattgaaaacccaac

SEQ ID NO: 296571 - DNA, 201 bp, Homo sapiens
aggcatgcgccaccatacccaacataatatttagtttttcaagctaattgttaatcagagctgtaactatttttctttatgtaaatttttttagagggcarattgcaaacgtatcatgcattcattcagttcattagttcagatggttagatatgagtcccagttgacctttttaacatttctcagtctgatatctgttcc

SEQ ID NO: 296572 - DNA, 201 bp, Homo sapiens
tattgaattgaacctgttagaatgtataggtttaaaaagcatacaggagtagatttacagagcagaacttttttagatagaaaggtttgcaagaaaaattgtttgtttaaacaagtagtcacttcccaccgaaattcaattacttctagatatgtgcaaaagaaataaaatgttcaagtgatataaagtgtgtgacaagtt

SEQ ID NO: 296573 - DNA, 201 bp, Homo sapiens
tcttacggtgattttaaatttggaatattttaattggtatatgttgtaaatctatagaaagaagaaatttttgatgctagatttaagaagcttagtctatwagttttcgtttctcatattttataatagaaattagcctagagaaacatacagactaaatcagcttaatttaaaaaaaaaaagttttcttacaggtcctat

SEQ ID NO: 296574 - DNA, 201 bp, Homo sapiens
cacttgcagaggatctgtggactcctgttttccttgtatgagctccttagagctgaaaaggctagggacccttatttctagtagttttaaaagtaattttrtagaccttaatgtaacagccaaagctggatattcatgaagactggaccccttaaggcactgggataagtgcatgttatcctgtggttgttttcttgcttt

SEQ ID NO: 296575 - DNA, 201 bp, Homo sapiens
attgaattgaacctgttagaatgtataggtttaaaaagcatacaggagtagatttacagagcagaacttttttagatagaaaggtttgcaagaaaaattgtttgtttaaacaagtagtcacttcccaccgaaattcaattacttctagatatgtgcaaaagaaataaaatgttcaagtgatataaagtgtgtgacaagttt

SEQ ID NO: 296576 - DNA, 201 bp, Homo sapiens
agcatgttcgcagttgaagattcttccatttgttacatagattctcagttccttgaacagtgcattgcatatcaagggatcaggcattaattggtgaacayagcctggccaacatggtgaaacctgtctctgctaaactcacaaaaatcagccgggcatggtggcatgcacctgtagtcccagctacttgggaggctgagc

SEQ ID NO: 296577 - DNA, 201 bp, Homo sapiens
gtgactggggaggcctcacaatcatgatggaaggcaaggaggagcaagtcatgtcttacgtggatggcagcaagcaaagggagcttgtgcaaggaaactcycccttatatagccatcagatctcatgagacttactcactatcatgagaacagcatgagaaagacctgcccacgtgattcagttacctcccaccatgtccc

SEQ ID NO: 296578 - DNA, 201 bp, Homo sapiens
tagataaatggcagaaaatctgatctattacataagatatacagatgaaaactgataggcaaatgtaaacttacttattttcccccattactagtagatgrtaatatataatacatttcttttaattctttcagcaagatctctgtaccttcttgatatcgagagcctgcaaaaactcaacactggctaattatttatact

SEQ ID NO: 296579 - DNA, 201 bp, Homo sapiens
ttggtggcaaaagttttagaaaatttgggatattacacaaattaaggcattaccactcttagtttaccttttattgatggttgtatgtgttcctctttaasttttcacttttaaaagtgatgataaaatgtgttttattactccaattttattatttttgcatatgtaaattaatctgttttagtgaaatgatatgagtat

SEQ ID NO: 296580 - DNA, 201 bp, Homo sapiens
ttgatggttgtatgtgttcctctttaagttttcacttttaaaagtgatgataaaatgtgttttattactccaattttattatttttgcatatgtaaattawtctgttttagtgaaatgatatgagtatttacaaactgaatctaagtttcatttcacatcacatgaatggctcaaactatttttaaggtatgtgatagtgg

SEQ ID NO: 296581 - DNA, 201 bp, Homo sapiens
tcatccatctatatgatgttttttgggccattatttctcttggttattaccattttttttgtttttgtttttaaatttctttgactcatttttttttcttkggattaatatatttctccaaatttttgtcttatataatttcttctcaatgaccaaactcaatagggtctctctctctcagaacaattttctgaccattta

SEQ ID NO: 296582 - DNA, 201 bp, Homo sapiens
catcatagtcagtgcaacctcaaaggacaaaggcctaggaggaaaggaaacattactgaaaaaggtgtatgttgttcaaaggaactattaataggataggracctcagtgtacaaacatatgagagaaccccttagtaagtatacaagagacgtacaacagatgctgcaaaattgcggaaacgttttagagccatgagagg

SEQ ID NO: 296583 - DNA, 201 bp, Homo sapiens
tttaaatacatggattagttcttataacatgttaatggtttatttttgttatttttaaaatataattttcctgcttccctttgtaaaaaaaaaaaaaaagrtatgtaattaaaacaaaaatggatacacctgagatgaaagataatacacagaagggcttggtagatgatgtttgatacagtgtgtttttgcctttcccta

SEQ ID NO: 296584 - DNA, 201 bp, Homo sapiens
tattaccattttttttgtttttgtttttaaatttctttgactcatttttttttctttggattaatatatttctccaaatttttgtcttatataatttcttytcaatgaccaaactcaatagggtctctctctctcagaacaattttctgaccatttatgtccagaatatccatcttagcatgccactttatgtgaggtttt

SEQ ID NO: 296585 - DNA, 201 bp, Homo sapiens
gaacacttattgtgcactgtaggtttattaattggcctcattgcagtattactgtgtcttggaatagggaagccctaggagagggagagagacagggaaayggctggttgttggattagtcagaacacattcaacattaattgattaagtgtgccatcctatatgggtatgctttgtggcacccctggttacaatagtaac

SEQ ID NO: 296586 - DNA, 201 bp, Homo sapiens
ttttggaatactgtggcttagttcatttgctgtttatggaacagaagtatttgtaacattcaggtacgatcctagaaagctcaacagtctccacttgaccktgaaaaaatttagttgcttttatatacttcagaatggtttttgtgttgagtataaattggaactgtatgtgttccattaattttttttccaaattaagtt

SEQ ID NO: 296587 - DNA, 201 bp, Homo sapiens
ctacagtgtgacacaaagacatggagtgaatgcatgctgttggaaaaatgatgccaatagactgcttgggtgcagggttgctacaaaccttcattctgtaaaaaaaaaaaaaaaatgcaatgtgtgcaaggtacaataaaatgagttatgcctatagtattaaataaggaaatatgggttgctggcaggtggtctctgtcc

SEQ ID NO: 296588 - DNA, 201 bp, Homo sapiens
cacatacactgtgatcattgtctcaaacattctttgctccatggcctattaattttattatccttgaaaacatggctcaaatgtcagatgtccttcgatcsctactgtaagttaggtctccttacactacttcctttcatagtaccctttattcatagtatttacccaagtgaagcttataagctttaagatccatgtagg

SEQ ID NO: 296589 - DNA, 201 bp, Homo sapiens
tacagtgtgacacaaagacatggagtgaatgcatgctgttggaaaaatgatgccaatagactgcttgggtgcagggttgctacaaaccttcattctgtaaaaaaaaaaaaaaaatgcaatgtgtgcaaggtacaataaaatgagttatgcctatagtattaaataaggaaatatgggttgctggcaggtggtctctgtcct

SEQ ID NO: 296590 - DNA, 201 bp, Homo sapiens
taatttataatttaaaaatgggaatagtaagtaggtctggattgaacaactcagctgcactgatgtacagtgatgttatttttcaaaattgtaggaatttygcttgtcttcatatgcacattatcggtagtttagtacccttgagtggcaggtagatttctacgaatcacatgttagagaacctaagtgtactaagttctc

SEQ ID NO: 296591 - DNA, 201 bp, Homo sapiens
acagtgtgacacaaagacatggagtgaatgcatgctgttggaaaaatgatgccaatagactgcttgggtgcagggttgctacaaaccttcattctgtaaaaaaaaaaaaaaaatgcaatgtgtgcaaggtacaataaaatgagttatgcctatagtattaaataaggaaatatgggttgctggcaggtggtctctgtcctc

SEQ ID NO: 296592 - DNA, 201 bp, Homo sapiens
gctctagatcaagggtgagtaagacttttctctaaagctttgcagatagtaaatattttaggcttttcaagtcagatgatctgtgtaaccattcaaccctrccattgtaatgcttaaaccagtgtgtaaatgaatgagtatgactgtgttcaaataaactttacaaaaactgaggggaaccagatttgaccatcaggctgt

SEQ ID NO: 296593 - DNA, 201 bp, Homo sapiens
attgccataatcatatacatttagaacatgttaatatttaaatgctctataggaagagtaaaagataaatgttgattaaagtagtcattgatgctttgacrtaatagtattaacaaggtgtaaattctatttagtctttcatggatatatctttgtaatcactgaactattttataatcacagtttatctcttcctggaag

SEQ ID NO: 296594 - DNA, 201 bp, Homo sapiens
tgttttataactggaacttttgccccatttgcttttattgtggttgtagctgtattttgactgatttcactatcttatttagtactttctatactttcttwtatatatataaattacatattcttgcttgtcattggctaaatccttctccctccaccccaccccatcttatttaacttccttcagatttgataatattat

SEQ ID NO: 296595 - DNA, 201 bp, Homo sapiens
gttgcgtaattgaagataaatcagagagtcttaaaaattcctttaaatgttaccttggaagaacatttagggaaagtcctttcccttttaagaattgcttyagtagtaatcctacagatggtcattttgcccacacttctgtactggaaaatgcctctttttatggaaagccaataatggatacaagtagcttagtctctt

SEQ ID NO: 296596 - DNA, 201 bp, Homo sapiens
atacacacatatctttactaagtaaagggaaataggatcagtggtctatttgtctttatatttttctttaagtcaaagtttttttataaaaacaatttcawgatgttttgtatctcacatggaataaaaaaactaacaacattgttttgacaagattttcttggacagaaatagtgtttccattgttgtatagttaaagaa

SEQ ID NO: 296597 - DNA, 201 bp, Homo sapiens
aatacacttttttggcccaggtctcagttacttgtttaatggaaattgaattaaatttcagaaacagaagctttaagcttttgttaacagttttccactaragggtgctccagatttgctttttcaaaaccaagattttaccctaaaacgtgcataagtaagatgcacatttttttcctattaaaacagcagttcattttt

SEQ ID NO: 296598 - DNA, 201 bp, Homo sapiens
tcaaatgaatgcatttggttttctatctgcttccatttcaagattatttttccacagacttaaaaaacaatttaaccctgcatttacttatgttatcttayagataacatggttacgagttatgggataattgacggttgacttttaactgtgtccaatttgatattagaattgctaggcccatgttataatttaaggtct

SEQ ID NO: 296599 - DNA, 201 bp, Homo sapiens
tacatgagaattcctagcccaaataccttggatattgttagtaccttcgatagaggtagaaaaaattcaatttaatgtgataagtttggttttacatgtgytcagttagaaatgacaaacagtgtcttgaaaaggggatctggtccttgaaaattagagtgcatgaatgtgaaagcaggtcatgtaatggaattcaagatt

SEQ ID NO: 296600 - DNA, 201 bp, Homo sapiens
aatttttttagagggcaaattgcaaacgtatcatgcattcattcagttcattagttcagatggttagatatgagtcccagttgacctttttaacatttctcagtctgatatctgttcctgttgaaccttaagtgttttcttatattttcacgtggcaattctctttagtccttagtagcataccaggcttggtgttttttc

SEQ ID NO: 296601 - DNA, 201 bp, Homo sapiens
gtcttaaaaattcctttaaatgttaccttggaagaacatttagggaaagtcctttcccttttaagaattgctttagtagtaatcctacagatggtcatttkgcccacacttctgtactggaaaatgcctctttttatggaaagccaataatggatacaagtagcttagtctcttactgtatagctctagttagattgttaa

SEQ ID NO: 296602 - DNA, 201 bp, Homo sapiens
atttttttagagggcaaattgcaaacgtatcatgcattcattcagttcattagttcagatggttagatatgagtcccagttgacctttttaacatttctcagtctgatatctgttcctgttgaaccttaagtgttttcttatattttcacgtggcaattctctttagtccttagtagcataccaggcttggtgttttttct

SEQ ID NO: 296603 - DNA, 201 bp, Homo sapiens
acctagctaaagtgttcaataaatcagtgttgaattaatgatgaataaatacttctgctcttccatgaacctgtctgggctaaataattcaagtttcttcmgctttctgcagaaagcagatgtttacgttactctttaaattggtctctcaaaacattttctgttttgtttgtatttctccaaattgtgataataataatt

SEQ ID NO: 296604 - DNA, 201 bp, Homo sapiens
cttttttttttaatatatccattgttttatgtttctgttgtcttcagacttatcagactgactttttctccttcttccacatactgtctgtcccctttccttttttttttttttttttggtagtttaagggatttacacatctgttattaccaggaaatgacagaagatggaatattagacaaaaggagccattacataac

SEQ ID NO: 296605 - DNA, 201 bp, Homo sapiens
gtacctaagttcccgctgtaggtggtacctttgcagacggtgcgatgggggaagcagagaagtttcactacatctatagttgtgacctggatatcaacgtycagcttaagatgtaagagaacactcgggacagggagtgggattgctggggcgtagggacgtgggggcaggggcctgttgggagtgagaggcagaaagtac

SEQ ID NO: 296606 - DNA, 201 bp, Homo sapiens
gttccttgaagatctatatctttgtttctgccatatacatgtatatatgtctagcacatttctgcatcataagccatcggatatttattgaatcaaataaygagtgaatgtattttaggatgaatgaattctatcttgtcacatggtttatgtgggaaaaaaatgcggttgtagatagaccagtatttgctgaagactcag

SEQ ID NO: 296607 - DNA, 201 bp, Homo sapiens
ttttttttttaatatatccattgttttatgtttctgttgtcttcagacttatcagactgactttttctccttcttccacatactgtctgtcccctttccttttttttttttttttttggtagtttaagggatttacacatctgttattaccaggaaatgacagaagatggaatattagacaaaaggagccattacataaca

SEQ ID NO: 296608 - DNA, 201 bp, Homo sapiens
ttccttgaagatctatatctttgtttctgccatatacatgtatatatgtctagcacatttctgcatcataagccatcggatatttattgaatcaaataatragtgaatgtattttaggatgaatgaattctatcttgtcacatggtttatgtgggaaaaaaatgcggttgtagatagaccagtatttgctgaagactcaga

SEQ ID NO: 296609 - DNA, 201 bp, Homo sapiens
tgacattttgataagcacttgactgatttacatgaccaaaaacaaaaacacgtctgtggcattttaaaattctttaccatcctgtgctcttgaatgcataratacttctggatagtctgaaatattgtccaacctgatgtttggagctcagatttttagagatagatctattgccatcggttcagataaaatttttattat

SEQ ID NO: 296610 - DNA, 201 bp, Homo sapiens
gatcttctcatatgtctccattcctatagaatttccctgtatccctgtaaaggactacctcaatagatctgtagtttccaaagatggggatttttttttarttcatatttaaagttgtggttaatttacaatagccttaagtattagaacaattagtgtatgtgttaagaatcttaagaacctagaggacagcctaacata

SEQ ID NO: 296611 - DNA, 201 bp, Homo sapiens
aggtatggtatcaataaagattatgcaattcatgaatatattcttgtcataaaaaattcagtctttataacatagagttaaaaatgaaagtctccttttaycatttttctttcttcaagttttttttcttcctttattcagaagtaagcatgttcgcagttgaagattcttccatttgttacatagattctcagttccttg

SEQ ID NO: 296612 - DNA, 201 bp, Homo sapiens
ttgtaaagcataatataatttcattgttagatactgaatcttttacaccttttaattaagtagtaatcctgttgtttgagttttctgacaagaaggatagmaatatactcttcgtttgtaaacagtgatacatagccaatattggaattccagtaattcctgtaatgaaatgaagaaaactgggataggtttcgtattaaa

SEQ ID NO: 296613 - DNA, 201 bp, Homo sapiens
ctgggcaacagaacgagactccatctcaaaaaaaaagaatagtctttaggagactaagagaaaacatttgcacattttatacatcctgctctttagtattygaaagttgaatttattggtagttcatcaaaacaaaaattgccatcctaaagtgagtggaggtaaaaaccttaaatagtccttatttataagtatttgctt

SEQ ID NO: 296614 - DNA, 201 bp, Homo sapiens
actgggataggtttcgtattaaaagcatggagctcattaaataaaccatgcatgatggcagttttgtgtcagagattgaccggattggtcatctgttcaartatattggtaacaaaacattatttaaataattaaataaaaccaaggaaaatgtatctacacctgtaatattgtgagcttcttatttctttacctcttttg

SEQ ID NO: 296615 - DNA, 201 bp, Homo sapiens
tgggcaacagaacgagactccatctcaaaaaaaaagaatagtctttaggagactaagagaaaacatttgcacattttatacatcctgctctttagtattcraaagttgaatttattggtagttcatcaaaacaaaaattgccatcctaaagtgagtggaggtaaaaaccttaaatagtccttatttataagtatttgctta

SEQ ID NO: 296616 - DNA, 201 bp, Homo sapiens
aaagagtagtttttcagtcataaatcattcagtagtttcttttaatagaaatgaacccccccccccgtgttgacattttatgatcttaaatatgtacaacrtgaaacctcataattgtgcctactcttacatactatacaatgaaaacagatttataaatcaatgtgttacagattagtaaaatttaacaacattaaaatg

SEQ ID NO: 296617 - DNA, 201 bp, Homo sapiens
aatagtctttaggagactaagagaaaacatttgcacattttatacatcctgctctttagtattcgaaagttgaatttattggtagttcatcaaaacaaaarttgccatcctaaagtgagtggaggtaaaaaccttaaatagtccttatttataagtatttgcttaaaagagatattctataaaccttggaaagaagaaatt

SEQ ID NO: 296618 - DNA, 201 bp, Homo sapiens
agacagtcctggagacttccttctccctagctgacttcctatttctttatcaaagaatataggatattttagagtgatattagttcaatcatttttattckttagcagccttagttttgggtactcttcaggaatattcagaagtttgctcaatgattgtggtaaatgttaaatatgatttttatctctttttaacacctc

SEQ ID NO: 296619 - DNA, 201 bp, Homo sapiens
tcagaagtttgctcaatgattgtggtaaatgttaaatatgatttttatctctttttaacacctcatcagtcattctgctacaaaaaaatgttttttctccrtccttttttcttcaacaccactaaatctgtgcttccttcttgctaatttacttaggactgactatcatatgtcatcaggaagaaaaataaaagtcatgtt

SEQ ID NO: 296620 - DNA, 201 bp, Homo sapiens
atttaaaatagtcaaagcccatagaaaactaggtcgaaccatggatatctcagggaggtggcggacaagatggtaaggaatgataactagagaaatgtcaraggtgctctatcttattgaaagcagaaggaaaacaatgtggtttataaactgtcattggtagtggattagtagcaattcaatagaataagaaaacaggca

SEQ ID NO: 296621 - DNA, 201 bp, Homo sapiens
acaaaggcctaggaggaaaggaaacattactgaaaaaggtgtatgttgttcaaaggaactattaataggataggaacctcagtgtacaaacatatgagagraccccttagtaagtatacaagagacgtacaacagatgctgcaaaattgcggaaacgttttagagccatgagaggaagtggctatatagatatatgtgtat

SEQ ID NO: 296622 - DNA, 201 bp, Homo sapiens
ctttaagactttatcttagtgatgatctttcatttgagctactctctgtcccttttacaaaccttgaatagttaatataaattttattagaatcaattcayttatagcctgtgggtcactataatatgaaaaaggttaaattaaaaaagaataaagaataatatttttaaaaaagctcttaaattgtcttttaagagtagc

SEQ ID NO: 296623 - DNA, 201 bp, Homo sapiens
ggtcttgctatgttgcccaggctggtcttgaactcctggattcaagctgtctgcccaccttggcctctcaaagtgctgggattacagacataaacccatcrcacctggccaacatttattttttaatgttgtatttcagagtatgttttagttggttgaaaaaatgccttcaggatataagaattaacctgatagttgttt

SEQ ID NO: 296624 - DNA, 201 bp, Homo sapiens
gcctaggaggaaaggaaacattactgaaaaaggtgtatgttgttcaaaggaactattaataggataggaacctcagtgtacaaacatatgagagaaccccytagtaagtatacaagagacgtacaacagatgctgcaaaattgcggaaacgttttagagccatgagaggaagtggctatatagatatatgtgtattttttt

SEQ ID NO: 296625 - DNA, 201 bp, Homo sapiens
atgttgtatttcagagtatgttttagttggttgaaaaaatgccttcaggatataagaattaacctgatagttgtttggagctaaggttatcggcacttttrttaagctattagatatgatcggccctgttattttatagtttttcttgataattgatcagtttcttcacaaagaatccactgaataacattgtaccacata

SEQ ID NO: 296626 - DNA, 201 bp, Homo sapiens
aagattttacagtgatggtgatatttgattggttagaggatatggaaaccttgaatatgtggagagtgaagggacgatgttttaagaagctgtaatgacgygtgtattatgggactagtggagtttaaggcatacttagtttcccagtcttgagaaggatacatatttttaagatatgtagaagactgctaaagttgtatc

SEQ ID NO: 296627 - DNA, 201 bp, Homo sapiens
ggaaacattactgaaaaaggtgtatgttgttcaaaggaactattaataggataggaacctcagtgtacaaacatatgagagaaccccttagtaagtatacmagagacgtacaacagatgctgcaaaattgcggaaacgttttagagccatgagaggaagtggctatatagatatatgtgtatttttttttttttgagacac

SEQ ID NO: 296628 - DNA, 201 bp, Homo sapiens
aacattgatcctggctgcccgttagaatcacctggggagcttgtaggtgaggtggcaaggggaaagttctggactcgctcatatttaattggtctgagatkgggctcaggcattgatacatttgaaaagctaccaaggtgaatctaatgggcagccaaattggagaacttctaatatatctctttcaaaactgactttgta

SEQ ID NO: 296629 - DNA, 201 bp, Homo sapiens
tttttttttaatatatccattgttttatgtttctgttgtcttcagacttatcagactgactttttctccttcttccacatactgtctgtcccctttccttttttttttttttttttggtagtttaagggatttacacatctgttattaccaggaaatgacagaagatggaatattagacaaaaggagccattacataacag

SEQ ID NO: 296630 - DNA, 201 bp, Homo sapiens
ttttctgtatggcttcctgtatgacaaaataatctgtttttgtgtaactttcattttagaaaataatgttttaatgtttttgcagggtgtaagaaaaaaawtgataatagttttggtgacatcttttccagattatctaaagtctcaagtgtatatcatgcagctaaatgtgggaatactgtttattctcacatacacaca

SEQ ID NO: 296631 - DNA, 201 bp, Homo sapiens
ttgcttttccccttggagttctatgggataatcattctcagtcccctttgtcctgacaactctttagccctatgtatttatctttatgcagacagcttccrgacttacagctttttacctcagtccatttcattaacttcaaattgaaatatcgaactgcttacttgaaattgtcattatatatggccagttgtaaaaggt

SEQ ID NO: 296632 - DNA, 201 bp, Homo sapiens
taaacattccttaagggctattaggttttctttgcttgtttgttttaccaccatgagatgaataatgcctttttttttttaaacttatgtagttcttattkggactcatactattagagagaagaaaatagttaatatatttcaaaaatttctttttcccacttgctataatttgggtatttgactcctccaaatctcatg

SEQ ID NO: 296633 - DNA, 201 bp, Homo sapiens
tgaggcaggagaatcacttgaacccaggaggcagaggttgcagtgagccaagatcactccactgccctccagcctgggcaacagagtgagattctgtctcmaaaaaaaaaaaaaaattaataaaataaaagaaaacttagttagttgttctaacttatcagacagattcagttcttttttaccagaatttcatactcttta

SEQ ID NO: 296634 - DNA, 201 bp, Homo sapiens
atcttgttctgtcgccccccactggagtgcagtggtacaataatggttcactgcagccttgacctcctgggcttgagtgatcctcctgcctcagcctcccyggtagctaggagtacaggcatgcaccaccatacccagctaatttttaatttatttttttgtagagatgaggtccgactatgttgcccaagcggttctcaa

SEQ ID NO: 296635 - DNA, 201 bp, Homo sapiens
acatgatacattagcaaagctagttctgttttaggaccatacatagctaatactctttttggaaaaggagaactatcacacacaggaatttttgtttatgttttttttctttaatttatttaaagtccttactcccagacttgtagtataattttgggtcttgatttcaggtgaacagataagtagaaaataaactatatc

SEQ ID NO: 296636 - DNA, 201 bp, Homo sapiens
gtatattcacagcacctttgacagttaagagatcagtacttgtgctggtgttaactcttccattttttagttacttgaaagtcgctctttcctgggtcagkggaattttgtttttgtttttaagcttttgaatagtaaatgtaacaatagtaaatgtttagatatacttacaaccctagtctgttagtcttaaatatacca

SEQ ID NO: 296637 - DNA, 201 bp, Homo sapiens
ctgaagttcttgatacagagggaagcattcaggtatggtatcaataaagattatgcaattcatgaatatattcttgtcataaaaaattcagtctttataayatagagttaaaaatgaaagtctccttttatcatttttctttcttcaagttttttttcttcctttattcagaagtaagcatgttcgcagttgaagattctt

SEQ ID NO: 296638 - DNA, 201 bp, Homo sapiens
gacctaggtaatcacacaaaaacggggtccgaatgatggagagttagttgaaagagcattttttttttttttttttataatatgtaacagcggattgtacsctgctggcatcacattccttgaagccctctcaagtggatcatctctatttccatagagaagggcttatgtaacctgtggcccccaggccacatgtggccc

SEQ ID NO: 296639 - DNA, 201 bp, Homo sapiens
tgcatacatttctgtgtaggcttcatgcagtttatccagtcagttcctgtggctgaagttcttgatacagagggaagcattcaggtatggtatcaataaasattatgcaattcatgaatatattcttgtcataaaaaattcagtctttataacatagagttaaaaatgaaagtctccttttatcatttttctttcttcaag

SEQ ID NO: 296640 - DNA, 201 bp, Homo sapiens
gcgcggaagggttgtttcggcggggagttccgccgcgtcggaactcgctccgggcgtggattggcggcttgctggcgggggcggaaccggaagttccgtgytgtggggctcagctggttcatttatgttgtttttcctgtacctaagttcccgctgtaggtggtacctttgcagacggtgcgatgggggaagcagagaagt

SEQ ID NO: 296641 - DNA, 201 bp, Homo sapiens
gatacagccttagatgttcctccaccaaattgttcttgtcttcacttcttacatttacctctcttttacctcctgctatcttgtggctcaagcactctcaratcacctggtatacctccagtacagtgaagagacaagggcactgagctggggctatggattgttgcactgtttgtcatttcttctttgtagctttctagt

SEQ ID NO: 296642 - DNA, 201 bp, Homo sapiens
tcttgagaagaaacattaagtctgtttcctaggttcctgttttctagttcttcattacaatagtagatacgatgtagaaatcctgtaattaacattacttwagccttggttgttacaggctcttttggactaggatagattgttgataaccttgataatcaaagttactgccacatgaaaataagagttaagaacaaatat

SEQ ID NO: 296643 - DNA, 201 bp, Homo sapiens
taacagtctaaggatcaccatcttagatttgtaaaactggaggtttattgcagcatgaatatgtagatgaactttttaaatatcatttcttagctctccartttacagtgatggacagtgtttgggacaataacagcttcaacatttattggaatgtatttcatacaatgcttcccatttttaattaaataaccattactg

SEQ ID NO: 296644 - DNA, 201 bp, Homo sapiens
gttcagaagttccagctcaagatactaggaacatagcactgctgtccatttaaagggaatccttactcatcacttgcagtgttcaaggaggaaaagcacasgtctaggcagagagacacctgattctatagtcacttattcttaagttagagaccagttgcctttagcttaagggaattcaactgtgatatatttgggtgg

SEQ ID NO: 296645 - DNA, 201 bp, Homo sapiens
tcccctaaagaatacctgtcctctaaggaatgtgacagtggctctctcaaaagtgtttcagttatcaagtgcctctcatgcataacatggcatcttactaygctgaaggtgatcccaaaattgaaaattctgagtgtttggtatttatatcacagtttctaagtgcaaaccagttgctgcttaaccagagaaacagggttt

SEQ ID NO: 296646 - DNA, 201 bp, Homo sapiens
tattcaattctcgtatttggtaccttttctaaatttattcataatacattcctatatacataaactggaaggaagcctttttaatttttataatagtcacwtttcaaaaagagtttactcataatactaacttatatttttctcttcttaaacttagatatcactgggtatagaaaacgtaatgttagagtttgcccagcc

SEQ ID NO: 296647 - DNA, 201 bp, Homo sapiens
agtttttaacatgggccctaattgccatcattgtttcataaagtttttcattacttacattgttttgtgtaattacgattttataaaatgaaaacagtgamagtttgtatactgattcttggctgcacatctgatctgtgtaagtgatttacctgggtcatagatcacattcagctttacttgataatgaaaagttgtttt

SEQ ID NO: 296648 - DNA, 201 bp, Homo sapiens
atttttgtttatgttttttttctttaatttatttaaagtccttactcccagacttgtagtataattttgggtcttgatttcaggtgaacagataagtagaraataaactatatcttaattctttaatgagaatgtactctcctttaacaaacatgtaattggctttaataataaaaatgttgataaaactctaattcatga

SEQ ID NO: 296649 - DNA, 201 bp, Homo sapiens
tactgtctgtcccctttccttttttttttttttttttggtagtttaagggatttacacatctgttattaccaggaaatgacagaagatggaatattagacmaaaggagccattacataacagttttacatacagcttttagggttaggtaattgtaatccacaattctagatttcttacggtgattttaaatttggaatat

SEQ ID NO: 296650 - DNA, 201 bp, Homo sapiens
taattggctttaataataaaaatgttgataaaactctaattcatgaatttattatttcctgctgtaaatattaagtggcatttagtatttagttgtgaaaycgatacataagtatgtagctgcaaaacaaactattgcaggtttaaagcattactagtactcgtatgttaaatataagtacagatctttttatatgtgtgt

SEQ ID NO: 296651 - DNA, 201 bp, Homo sapiens
gcaaattattatcctataggcttaccagaaccagatcatgatagtttatgatcctgaaatgttgtttgcttcatccaacttttttttttaatatatccatkgttttatgtttctgttgtcttcagacttatcagactgactttttctccttcttccacatactgtctgtcccctttccttttttttttttttttttggtag

SEQ ID NO: 296652 - DNA, 201 bp, Homo sapiens
gctgtcctggaagacccaatgttgaagttctcaggactatatcaagagacatgctctgatctttatgttacttgtcaagtttttgcagaagggaagccttyggccttgccagtgagaacatcctacaaagcatttagtacaagatggaagtaagtttttttgtggcatatggtatgttacagactgttcttacctttcttt

SEQ ID NO: 296653 - DNA, 201 bp, Homo sapiens
acatcatcatgatccactgaaagtaatttaaagtttcacagtctagcatttgtatttaaagaaaaatgaaataaacagaatagcaaatattaacatattgytcacaggatgttgctttgtgaaacttttccgttttatacatctgtgtgcatatgtggctgtgtgtatcaagctgtgatacttttttttttctctttgaga

SEQ ID NO: 296654 - DNA, 201 bp, Homo sapiens
cagtagtgtagggcttgtaggccattagtccgaatgagttttccatattggtagcttgaacaaagggtgatttacattctagatgctgtgaagtgattggrttctgaaaacgatgttcagaatattgatttacactcccccatcactcaaaatgtttaggctaaaaatgatagtttgtatatatttctgatatttctcttg

SEQ ID NO: 296655 - DNA, 201 bp, Homo sapiens
tggcgaagctcatcttgaactcctgacctcaagtgatctgcctgcctcggcctcccaaagtaggatcatttttttcaaaagaactcttctgcagaagcctmgtatataaaacatattaagtgcagttgctttgattgaaagtggtgttgcctggtattggatagcaaaaggtttgagacaaatgattagttggtcattggt

SEQ ID NO: 296656 - DNA, 201 bp, Homo sapiens
ggaaatctgtcaggtttgaaaatgtggagcgttggtgatattttcaagatgaccacccactttttctggtgacatagccttaaagttgttagtgtaacatkctagagaagcttatgccacttggaagtgaagatgactcagacaattaactagtataaagtttctttgtaagcaaatgaagttattacctttttctttcaa

SEQ ID NO: 296657 - DNA, 201 bp, Homo sapiens
actataatatgaaaaaggttaaattaaaaaagaataaagaataatatttttaaaaaagctcttaaattgtcttttaagagtagccattatgattcatattktaggtgaaattctaagtctgagggggaatggccagagtcaagaaatataaagctttatagttgcacagtgtaactacattgtttctctgttaaacacatt

SEQ ID NO: 296658 - DNA, 201 bp, Homo sapiens
acagagcgagactctgtctcaaaaaaaaaaaaaaaaaaaaaaaattttcagtaaaccatattataaacaaatatgatatcatccaagctactgtttcattkgtagatcacaggcagagtagatttaacataattcttaggggccctaggattttcagagtggtaaatgaacattgacatcaactaagtcaccagctgcatt

SEQ ID NO: 296659 - DNA, 201 bp, Homo sapiens
gactctgtctcaaaaaaaaaaaaaaaaaaaaaaaattttcagtaaaccatattataaacaaatatgatatcatccaagctactgtttcatttgtagatcamaggcagagtagatttaacataattcttaggggccctaggattttcagagtggtaaatgaacattgacatcaactaagtcaccagctgcattagcccctac

SEQ ID NO: 296660 - DNA, 201 bp, Homo sapiens
ggctttggcttatggggatgttgtagctggtttgggcttctatccagaccacaaaaacttcctccatatcagcaataaagctgttttgctctcatcattcrtgtattcactagagtagcattttaatttccttcaagaacatttctttgcatttaaaacttggctctttgatgcgagagtcttaacttttggcctatctga

SEQ ID NO: 296661 - DNA, 201 bp, Homo sapiens
acctccaggcaacacacctcttctctttgcatggaatgagttccctcttatttccccaacttttgagtgtgtgtgtgtgtgtgtgtgtgtgtgtgtgtgtrtgtatgtaagagagagagtgtgtgtgtgtgtgtgtgtgtgtgtgtgtatgattctgtctatattaatttggtcctcgggcattttgtcttaatttgagat

SEQ ID NO: 296662 - DNA, 201 bp, Homo sapiens
gccaaagtattcactgggggatgggaaggtagagagaaggaagggaagccttctgctatttctgaaggtacatttaaggatatttatttaaagtgatattwtcatctcactgtacgtagttccttagagactgctctaagcaggcctgcttaatgttgaatctatatctcagttgaaagagaaagaaaattaactttataa

SEQ ID NO: 296663 - DNA, 201 bp, Homo sapiens
ctgggggatgggaaggtagagagaaggaagggaagccttctgctatttctgaaggtacatttaaggatatttatttaaagtgatattatcatctcactgtmcgtagttccttagagactgctctaagcaggcctgcttaatgttgaatctatatctcagttgaaagagaaagaaaattaactttataagagacatgtatat

SEQ ID NO: 296664 - DNA, 201 bp, Homo sapiens
ggcaggcagatcacttgagcccaggagtttgagaccagcccgggcaacatggtgaaactccatctcttcaaaaatatatatttgtgtgtgtgtgtgtgtgtatgtgcgtgcacaaaaattagctgagtgtggtggttcacacttgtaatcacagctacctgggaggctgaggcaggaggattgcttgagcctgggaggcag

SEQ ID NO: 296665 - DNA, 201 bp, Homo sapiens
ctcctgatagtaattggagcctagctcttttccacattctttcatccctaatagaattgtacttttaacttctgaatggagtggagacatctgagcttgcygtgctgtgacagcttgcattagtattaacttatgttccccaaagactaaacagaaaccatcaaaatgagtaattacttttttaaggggaaaaatgtgtcc

SEQ ID NO: 296666 - DNA, 201 bp, Homo sapiens
ttctttaaaaaataatgatttgtctcttgccaagtttcttatcctgctaattgcgtatggtttctattgtgtataggaaagtatcatatgtgaagtgtacwttgccattctgacatttttggtccttctttctactagatgtatattaaaattttcgtcattgtatttattctgcagctcaccaaagctcatcgacaagga

SEQ ID NO: 296667 - DNA, 201 bp, Homo sapiens
ggtacttacattcttaaaattatattcttaacttaaaattattttgactgaatttattattattattcttaaattcttaaaattatgcttagatacttaayttgttcttacagttgtgccacaatagtgtctgctgtctttcactctttttctgatgacacattttaaaaagttgttcagttagattgtcactctctttct

SEQ ID NO: 296668 - DNA, 201 bp, Homo sapiens
aaaaactgtttacaaccaacaagaacaaggtgatatacagagcatataacaaaaacagcaaacttccacactccaaagaatgccattcagaattctaatamgttacaggtcatttatttgccataggaatagctcatgttaccttataatgtctgcatcagtttgattctgcctgttcaaaatgtgccctatttttcttcg

SEQ ID NO: 296669 - DNA, 201 bp, Homo sapiens
cataatcattttccttaatttttattttttataacttgaatttcttagacttctagtagggaatgaaagaaatgaataatttaaatacactattacccccycaccccctgccccattttcttctttttcccatttctaagtttccctaattaatttttagtatagtgtctttccgtttgaattgatttgtgaaaataataa

SEQ ID NO: 296670 - DNA, 201 bp, Homo sapiens
ttattttctcatataaactgatttttaagtgaagcctcaggaatcctatacagtatagttaattgcaatcctcttggtagcatttagcaaactaattaatrcactttttattttattagtagtcttttttaaaactatagactattgtttatctttgtgaataattaagtaaattattttctgtttatttctttttaattt

SEQ ID NO: 296671 - DNA, 201 bp, Homo sapiens
tattgtttatctttgtgaataattaagtaaattattttctgtttatttctttttaatttttgtagtactggagaaaatgaaactgggattgacccatcaakatgcttggctcaataagaaaaccacgttaggagcaacctttgtatattggagacttcagagtaaccagcaaggaagagaaatcttaatcttcaagttacc

SEQ ID NO: 296672 - DNA, 201 bp, Homo sapiens
caaaaaaaaaaaaattgtattactaagttcctgatgtcattattgttagtgttattatgactaataatagtaactacatttataatcaccttgtatgtgtwaagtgctttaatatcaacaaaacctcttagcatagattgcaaactaaaatagagaagggattaagatcatggctttagagaccattttttattcaaatcc

SEQ ID NO: 296673 - DNA, 201 bp, Homo sapiens
cagtggtgcaatctcggctcactgcaactcctgggttcaagcgattctctgcctcagcctgctgagtagctgggattacaggtgcgtgccgccatgcccgsctaatttttgtaattgtagagacagggtttcaccatgttggccaggcaggtctcgaactcctaacctcaagtgatcaacccgcctcggcctcccaaagca

SEQ ID NO: 296674 - DNA, 201 bp, Homo sapiens
cctgagttaaaaatcttgactctgccacttactagctgtataaacttgcataaattacatattctctatgtgtctccggtttcttaagagtggtgatagcmatattaactcatctttaagggttgtttaatcattaagtgaattaacactcataggaaactgtctaatacatagtgcttagtaagtcttagctactattac

SEQ ID NO: 296675 - DNA, 201 bp, Homo sapiens
acagataaaataataatgaaaaagtttgaaatattatgtgaataactacagtgtgacacaaagacatggagtgaatgcatgctgttggaaaaatgatgccmatagactgcttgggtgcagggttgctacaaaccttcattctgtaaaaaaaaaaaaaaaatgcaatgtgtgcaaggtacaataaaatgagttatgcctata

SEQ ID NO: 296676 - DNA, 201 bp, Homo sapiens
gaatgaatacagttttgatgttggacacgtttaattattaaacaaaatggaaatttaaaataaactttaccattaaatactgtcaaagagaatagtgtatrttctctttaatccaagaattacagatgcctcaaactacaattttagaaataagttcatgttatttatgcaaataacaggaaaatgtaattagcacctctt

SEQ ID NO: 296677 - DNA, 201 bp, Homo sapiens
tttgttggattgcctatctttttaagtagttacttcacagagatacgtacatactccacatcgtttgagtcttcatgtttaagtatctgcgaaagccggtrgtcatactctagggaggtgatcgagagtgaggctattgggaatttctgccctagcatggcttccggcccttcgctcagtggttgcagtattttctgttgt

SEQ ID NO: 296678 - DNA, 201 bp, Homo sapiens
taatcctgttgtttgagttttctgacaagaaggatagaaatatactcttcgtttgtaaacagtgatacatagccaatattggaattccagtaattcctgtmatgaaatgaagaaaactgggataggtttcgtattaaaagcatggagctcattaaataaaccatgcatgatggcagttttgtgtcagagattgaccggatt

SEQ ID NO: 296679 - DNA, 201 bp, Homo sapiens
gtctccagtgtaaaccagttaggtacatatgatttgatcattccttacactgattttaacatatatttcctacaggatatacagatagattaggaaatacmatttatattgctcttctgttggtgatttaatgtgatttctagtagaaaatagaagtcattgggaaatagaaccttgcttttagggaaaagtgactatgac

SEQ ID NO: 296680 - DNA, 201 bp, Homo sapiens
aaaagaattgcttagcttagttgaacagagaacacatatttagttgaaggtggtaaaatggttaacagaaattgatcatggacttttcatcagttcatggraaactgaaatcatagcatactccccttgaaccttaagagactatagggatgctgcttttccagtgggtactgaagttgtcaaattcacttttgtaaaact

SEQ ID NO: 296681 - DNA, 201 bp, Homo sapiens
tcatgcttgttcatatttgtcttttagttatttgtgcacattaacaactctagaaatgatgactaagcatgtgcagagctcaatgaggtgtaggaaagaarccttcttaatgtttttgttaattggtagcaatcattatccccagtttaaattccttagagtagccaagtggatcctactttttcaagagatagttattaa

SEQ ID NO: 296682 - DNA, 201 bp, Homo sapiens
gactatagggatgctgcttttccagtgggtactgaagttgtcaaattcacttttgtaaaactggttcctcatatttgttgaattatggactttccttgggratctggtgaagtatattgatctccccccaaaatcagtttcattgtacttagagaccattaaagcccattttgggattctgaaagagtagtttttcagtca

SEQ ID NO: 296683 - DNA, 201 bp, Homo sapiens
gtttcaccatttagaactgctgttttttgttttaatgttcggctttagattcatggaccacaaattgaactgagtgccaaggaaagtttgaggtagtgctrtgttctctggtttggctgcagccccacttctctgtctttccttctatttaagtgattcaaacatttgtttcctgcctgccttttgagaaaatttggagtt

SEQ ID NO: 296684 - DNA, 201 bp, Homo sapiens
acttggggaaaataatttttgagtttgcaaaatcaggtgtttagaatggatgatttttatggtctcatgtagctctttaattgattctaaaagtactgatrtaggaaataattgggattatctacctgggtttcatagttattatcttactagggaataaaattgtgattattaatttgcaactttgaatgtattgtttgc

SEQ ID NO: 296685 - DNA, 201 bp, Homo sapiens
aaagaaataattttctactatatgaagggcactgtgcttaaactttagcacaaaaaattttctacaagattccactttctgctgataccttaaaaagttayccaggctctgaccgtctttgattctgaagacttataaataggatttaacatttttagattaccattactgtgacatgattttaggcatagtttcgtgtga

SEQ ID NO: 296686 - DNA, 201 bp, Homo sapiens
tagacatgaaaggttagtgcaaaagcatgcttctccactgtctccttttcattttagcagctctgcttgatgcctttggaatgtgctttagtttctgtcartttgattaagaggaggcaaagagaaagtaacaactagatgaaaaatgctttgtactctgtgtgacacagataggtatgggaatgttgttgagtagagtat

SEQ ID NO: 296687 - DNA, 201 bp, Homo sapiens
tacttgtcctagagcattgattagaggagctccctgagattttagttttatgtacatgtagaagtcctctttcatcttcaccattgtcaaaggcacacttytaaatgttgaagaccaaaaaaaaaaaaattgtattactaagttcctgatgtcattattgttagtgttattatgactaataatagtaactacatttataat

SEQ ID NO: 296688 - DNA, 201 bp, Homo sapiens
taatgagaaaatcagtgctctttagatttgtttggtgatgcagaagcactttcagagagatgagagtgccatttaatatctgcgatttttaatttaaaatwgtcaaagcccatagaaaactaggtcgaaccatggatatctcagggaggtggcggacaagatggtaaggaatgataactagagaaatgtcagaggtgctct

SEQ ID NO: 296689 - DNA, 201 bp, Homo sapiens
atgttgttcaaaggaactattaataggataggaacctcagtgtacaaacatatgagagaaccccttagtaagtatacaagagacgtacaacagatgctgcmaaattgcggaaacgttttagagccatgagaggaagtggctatatagatatatgtgtatttttttttttttgagacacagtctcactctgtcgtccagact

SEQ ID NO: 296690 - DNA, 201 bp, Homo sapiens
attatttgatcaactttttttttttttttttgagacaggttgtcactgtcgcccaggttggagtgcagtggcatgaccatggttcactgcagtcttgactycccaggctcagatgatccttccacctcagacttgcaggtagctggaactacaggcatatgccaccatgcccagctaattttttgtgtttttttgtagaga

SEQ ID NO: 296691 - DNA, 201 bp, Homo sapiens
tattgaaaaatggtaacatcttctaatttatatggttttgtagttggatctagttgaagggcccttggaagaaagtgagagagcaatcaagtttatacttsgattttatttcaggtggttaagttaaattaatgagatagggctttattctttgagcttttattatgaagtgaaattgctttatttagcattatctttata

SEQ ID NO: 296692 - DNA, 201 bp, Homo sapiens
catctgaaggacagaggacatgatggaagtttgttacttaatagccagcaagttacatatatttgtattgagagtgtataaagattagggaagagtgaccmagggcaggaatcttttttttttttctctctccagcttcctttttagtgtcactcccacctcttcccctgaagccccaaagctctttgggcagaatatcag

SEQ ID NO: 296693 - DNA, 201 bp, Homo sapiens
acctgtgttcctttaaaaagagagaatgaatttttttttttcctgtttcttgacctatccccatcctagaatgggcatcctagtgaggattatttcttcaygagtaattgaaacagtttgtcctacttttacctttctgcttaacagaatgcagattttctctttggaaagatgtaaatcactgacattacagacccaaaa

SEQ ID NO: 296694 - DNA, 201 bp, Homo sapiens
ggcatcctagtgaggattatttcttcatgagtaattgaaacagtttgtcctacttttacctttctgcttaacagaatgcagattttctctttggaaagatrtaaatcactgacattacagacccaaaattaaatataaattgttatgccacctgtgtctattgttcatttttggtctttagtatctatagaagttcgtgga

SEQ ID NO: 296695 - DNA, 201 bp, Homo sapiens
atcaggttttatcctactttatggatgcaaaattgtgacctaaaaagaagagaaaaatcatcatttctgagtttccatttttagggacctaattttatcaytaggaatgaagaatagcagtgtaaaatatttcagtgaacaaaacaaaaagtattgatttgggggtcaaatagaaatccttttaatctaaaacaaattatt

SEQ ID NO: 296696 - DNA, 201 bp, Homo sapiens
gtgtgtgtgtatgattctgtctatattaatttggtcctcgggcattttgtcttaatttgagatctcccacagaatctgagacacttcctggcacatagtargcaccaaataaacatatgtggttttatatgagtgccgagtaccatttctttaggaagtttattttctctgataattgcctttagtaaaaatatttaaatt

SEQ ID NO: 296697 - DNA, 201 bp, Homo sapiens
agcaagggaagaggggaaagctgaggggagagacgccacatgtctgagttagggcgggggctgtggatccagagggcaaggagagaatcccatgatttttytctttggggaaacttgatctttggatctaatcttattatctaggggttttgttttctggtttctttgagtcacttctgcattgaggaaagcagtgtatca

SEQ ID NO: 296698 - DNA, 201 bp, Homo sapiens
ttcctaccctgcccagggaaccactgtccctttaggatctggccagtgatcatttagaagtctcctaaaggagttgtaattgggataatgaataccaaggcctaaggaaagtggggcaatgtgtgtgtaaaaggtaaactcctaggaactctgcaggagtaaaaagagtagcaaaataatcagtctttcttctggtgttgc

SEQ ID NO: 296699 - DNA, 201 bp, Homo sapiens
tgcagctatggtttgtccattttcattgatgtatagtattccgtcataggaacagacccacttttattatccagccacaaaagtttagcagcacacattartagcgtccattgatctaggctggtggctctgccccatgtgcctcctgtcctcctcctgaaactagtgggctagcctgggtatgttctcctcatggcatca

SEQ ID NO: 296700 - DNA, 201 bp, Homo sapiens; identical to SEQ ID NO: 61479

SEQ ID NO: 296701 - DNA, 201 bp, Homo sapiens; identical to SEQ ID NO: 61480

SEQ ID NO: 296702 - DNA, 201 bp, Homo sapiens; identical to SEQ ID NO: 61481

SEQ ID NO: 296703 - DNA, 201 bp, Homo sapiens; identical to SEQ ID NO: 61482

SEQ ID NO: 296704 - DNA, 201 bp, Homo sapiens
ggccttccaaagtgctgggattacaggcatgagccatcacacccagtctttatttcatatacattgttatatctttttttctacttagctgttatgagcayttttctgtgtagttattgtaaacattttaatgaaagcatatgtcccatcatatggatgtattataattaattaaatcagatcgctattgttaacatttag

SEQ ID NO: 296705 - DNA, 201 bp, Homo sapiens
ccaccattataagaaattggaaattttagaagtttttctttttttaatactccaataatcaagctgtttgtgacactgtgtgtgtgtgtgtgtgtatgtgygtgtgtgtgtataaattttcgcaaatgatgctttttatttgcctagtggtagataaataggatggactttaaaaaaatctctattatttttctagggttg

SEQ ID NO: 296706 - DNA, 201 bp, Homo sapiens; identical to SEQ ID NO: 61474

SEQ ID NO: 296707 - DNA, 201 bp, Homo sapiens
tccttaaaactgtgccaggaaggggcaactgaggcagagaaccattagggctatgtcttaggctgtgtccagctcaggtctttgcagtctccttgtctcckttgcctatttgttctgtccaacatttggaaattgcttcccttcttgggtggcagacagcctggctgataaactagagagtgcttctgtgatgtattgatg

SEQ ID NO: 296708 - DNA, 201 bp, Homo sapiens
aagttccaccattataagaaattggaaattttagaagtttttctttttttaatactccaataatcaagctgtttgtgacactgtgtgtgtgtgtgtgtgtrtgtgtgtgtgtgtgtataaattttcgcaaatgatgctttttatttgcctagtggtagataaataggatggactttaaaaaaatctctattatttttctag

SEQ ID NO: 296709 - DNA, 201 bp, Homo sapiens
accccttacataaccatactacattgatcaatactattaactaaactacaaactttattgaaaattcatcaattttcctactaatgtctgtttttttttttctgttcccattgtattttatcaaggatcctgcattttatttagtttttctttctccttagtctcctccaatctgaaatagttcctcagtttttcctcgtc

SEQ ID NO: 296710 - DNA, 201 bp, Homo sapiens
tctggtgaattctctattatgctgcataacatatactacacaaaataactttggttgtttgggtgttgcaggaccacctggcttcatgtgtggatttccayggctcttgcccagaggcgggtacactgtgttccaatgtgccacggaactcacgcagtggcactttgtggcttcatgaaggaagaggcaggccacgcaaca

SEQ ID NO: 296711 - DNA, 201 bp, Homo sapiens
tggattctctaacaactactggggatggggaggcgaagacgatgacctcagactcaggtgaacaacagagaaaggtccccttcacggggctctgcactcastgtggctctggagacctgcatttatatttattcctttagatgccagtccagcaggtcactaggctgcagatttgggcttgaagggtgcagggggtggagg

SEQ ID NO: 296712 - DNA, 201 bp, Homo sapiens
tgtaaatatgacaatatgtgatatacaaaaatatatacatttatataaaatatattaaaaattctaaaaatataaaatatattaaaatataaaatatattwttttatattttataaaatatactattaaaaattattaaataaaataaaatttataaaataaattttataaaaataaaaattattaaaaatataaaatata

SEQ ID NO: 296713 - DNA, 201 bp, Homo sapiens
acaaacatcaccattaacagctgggtggcactttgctcagtgagcagaggtgagcgtttgtctagatagaggaaagaagacaagacagggaaggccaggarcattgggaggtgggtgtcaagcaggagaagcaggagtgggtgggtggaagtacatggtctcccaggtgttcctagaacgccagccctgaaatcagagacc

SEQ ID NO: 296714 - DNA, 201 bp, Homo sapiens
aatttataaaataaattttataaaaataaaaattattaaaaatataaaatatattattaaaaattctaaaaagaaaagagaaaaaataaaccaccccagckaatcccattctcctaatataattattattagctttctagactttccttaattgtatatattgttagttgtaatcatagcacagatatagggcttactttc

SEQ ID NO: 296715 - DNA, 201 bp, Homo sapiens; identical to SEQ ID NO: 61483

SEQ ID NO: 296716 - DNA, 201 bp, Homo sapiens
ggtttacggtgaggtgcccctaatgactgcagaaagtaaactcctactgactccactgttggtttcttagggacagctgaaagtcacatataagtacacartgaacttctattggaacctcccatcagaaattctggtgaattctctattatgctgcataacatatactacacaaaataactttggttgtttgggtgttgc

SEQ ID NO: 296717 - DNA, 201 bp, Homo sapiens
catttgttaaaggtgaggaccctacccttagaaaagtgttgatattagtgaactgaagggagctagtatcggggtgagcctttttaatttttaaaatcctyctcaggtggaattttgtactcatattattaatctttatttcccaccttcttttttaatgtttcattccttttagcagtagcctggaattatgatgtgtcc

SEQ ID NO: 296718 - DNA, 201 bp, Homo sapiens
caacaggtacaataatttacaaaaatatgtttgccacatttcagggcaaggcaaaatgcagtggagacatatgttaaattcttatcattcacatttgttcyttttatctttaggatgaagctcttacaccaagtgtcacgagtctggagaacagatgggttgagtagttgttcttataaattagtatctgtggaacacaat

SEQ ID NO: 296719 - DNA, 201 bp, Homo sapiens
tgaaaattcatcaattttcctactaatgtctgtttttttttttctgttcccattgtattttatcaaggatcctgcattttatttagtttttctttctcctyagtctcctccaatctgaaatagttcctcagtttttcctcgtctttcatgattttgattcttcgaagagtaccagttaggtatatcgtggaatgaacttgt

SEQ ID NO: 296720 - DNA, 201 bp, Homo sapiens
accagttaggtatatcgtggaatgaacttgtggtgagcgattggatttctccactacaaagttactgtctttccctttgtagttaagaattatcttggggragatactttgagactatactgtttatcctcaaatttttgcctgttagtttagcatccactggtgaaccttgtctgcaacagttattaagtggtgtttgct

SEQ ID NO: 296721 - DNA, 201 bp, Homo sapiens
cccttcttgggtggcagacagcctggctgataaactagagagtgcttctgtgatgtattgatgcttggaacctctaaaacctctggttttcgaatctctaratgctaagtggaagacctaccattacggttagtcaaggtccatcggggatgggttttcagtttgtgctggagtgaatcacttcaggatagaatttccatt

SEQ ID NO: 296722 - DNA, 201 bp, Homo sapiens
gagtaaaaatgtgtgtggttagagattctccaagaatgatacttagcacttatgtttcctttccttttgttatagcttatcttccttgccagattttaaamactattatggaaaatctcaagcattcacaaaagtagagagaaagaaaggactctcaggtacctatcacttatattcaagacttctcagtattttatccgt

SEQ ID NO: 296723 - DNA, 201 bp, Homo sapiens
ctctggttttcgaatctctaaatgctaagtggaagacctaccattacggttagtcaaggtccatcggggatgggttttcagtttgtgctggagtgaatcayttcaggatagaatttccatttgaaacaacgtgtcttttgtgattgcgttttagactgttggagcagaactactgagaaaaaccaggcattgtatcttcag

SEQ ID NO: 296724 - DNA, 201 bp, Homo sapiens
tgttcttatggttgcgtgcagctatggtttgtccattttcattgatgtatagtattccgtcataggaacagacccacttttattatccagccacaaaagtytagcagcacacattaatagcgtccattgatctaggctggtggctctgccccatgtgcctcctgtcctcctcctgaaactagtgggctagcctgggtatgt

SEQ ID NO: 296725 - DNA, 201 bp, Homo sapiens
gatggtgtggttcacattgacaggtatctctataggcctctacacacaaacatcaccattaacagctgggtggcactttgctcagtgagcagaggtgagcrtttgtctagatagaggaaagaagacaagacagggaaggccaggagcattgggaggtgggtgtcaagcaggagaagcaggagtgggtgggtggaagtacat

SEQ ID NO: 296726 - DNA, 201 bp, Homo sapiens
tgcaatagttcactggtattctagaaggaatgtctgcgaggagaggcaagaactgaggctaagcaggagccagattacgcaggccttctttagtctgatayggagttcgaagttgctgtggcaggggttggggagctgttgacacgttacagctggggaaggatgggagaaagcttggttcagctgattttgaatgtatca

SEQ ID NO: 296727 - DNA, 201 bp, Homo sapiens
aggaaggggcaactgaggcagagaaccattagggctatgtcttaggctgtgtccagctcaggtctttgcagtctccttgtctcctttgcctatttgttctrtccaacatttggaaattgcttcccttcttgggtggcagacagcctggctgataaactagagagtgcttctgtgatgtattgatgcttggaacctctaaaa

SEQ ID NO: 296728 - DNA, 201 bp, Homo sapiens
ggcacgtgccaccacgcccagctaattttttgtatttttagtggagacggggtttcgcagtgttagccagggtggtctcgatctcctgacctcttgatccktccgccttggcctcccaaagtgctgggattacaggcgtggagagacaattctttaacccttcttgctgacttgtcttcttctgcccctccccactccagc

SEQ ID NO: 296729 - DNA, 201 bp, Homo sapiens
aggtaggagttgccttcctcctggactacttgattttgctgctttgggcaaagtccctgtggcaggcaagttcatttccaggcagctgagtgtctgccccrtgctggcaactgtgtgccccagtgccacagagcttaagtcagtacatgcctcatcactgtcacaccagccccacaagtacaagcgcaagaaaggttttca

SEQ ID NO: 296730 - DNA, 201 bp, Homo sapiens
caaaggagttcatggctaatttccataagaccctcattttggggaagggaaaaactctgactaatgaagcatccacgaagaaggtagaacttgacaactgyccttctgtgtctccttacctcagtaagtgttgcttttttcctttgattaagtagtatgcaaactttttatttaagtataatatgtacttgcctgtatcaa

SEQ ID NO: 296731 - DNA, 201 bp, Homo sapiens
tgcccttctgtgtctccttacctcagtaagtgttgcttttttcctttgattaagtagtatgcaaactttttatttaagtataatatgtacttgcctgtatsaaaacatctcatgtaccccataaatatatatatctcctgtgtcacaaaaactatacattcaaataaaataaatataacatgtacaagaaagtacaaaact

SEQ ID NO: 296732 - DNA, 201 bp, Homo sapiens
attttggaactttacaaatcggaagcatacgttatgtactcttttgtatttggcttctgttgcttaacattacttttgtgagatctgttcttatggttgcktgcagctatggtttgtccattttcattgatgtatagtattccgtcataggaacagacccacttttattatccagccacaaaagtttagcagcacacatta

SEQ ID NO: 296733 - DNA, 201 bp, Homo sapiens
gatcacttgaggttaggagtttgagactagcctggccagcatagtgaaaccctgtctctactaaaaatacaaaatactctgttaaaatactaaaaaaaaamaaaaaattagttgggtgtggtggcacatgcctgtagtcccagctacccaggaggctgaggcaggagaatcacttgaacccaggaggtggaggctgcagtg

SEQ ID NO: 296734 - DNA, 201 bp, Homo sapiens
tatcatttatgattttctcttttttgtatgtatcatgtaagcagcctcatcttttgtggctggagagaggtatgtataagtaatgtaggtaggagttgccytcctcctggactacttgattttgctgctttgggcaaagtccctgtggcaggcaagttcatttccaggcagctgagtgtctgccccgtgctggcaactgtg

SEQ ID NO: 296735 - DNA, 201 bp, Homo sapiens
agcctgtgtctttctccctcctgtgctttgcctcacagagttgtggtcaccaggagatcccccatttttctgcctatttgaatccttccaggccccctccycctgatgtggcgacacctctctcctcagaaccctgataatgttcacctctcttattaggttataaactctgagggcggggctcccgcattcccgtgttta

SEQ ID NO: 296736 - DNA, 201 bp, Homo sapiens
ttcctagcatccttcaggatgtagttcttgtactttttggtactcatattgtctcatctttggccaatgggatcttcttcaagctgggtcctgaatcccartagtcctcgagagcttccctccctgtgctctgctgtgatgaaatgttctaggctcttcttgtacttttcctgccttgggaattggcctattcacaaggaa

SEQ ID NO: 296737 - DNA, 201 bp, Homo sapiens
gtgttgggattacaggtgtgagccactgtgcctggctggaaaggaaatttctaacctggggctctgaattattagttacgtgactgtcagaaatttttttkttgcctcatcataaagaacccaggggctccatgctgctcttgttcccatgtctaggctgagagcctctggaatgtttctagcaggagggagtggattccc

SEQ ID NO: 296738 - DNA, 201 bp, Homo sapiens
aagttcatttatttttttctgaggcagggtctcgctcccaagctggagtgcagtggcgtgaccatggctcactacagcctcgatctctcaggctcaagcartcctccaagctcagcctcccaagtagctgggaccacaggcatgtgtcaccatgcttggctaatttttttttattttttgtaaagacagggtcttcctgtg

SEQ ID NO: 296739 - DNA, 201 bp, Homo sapiens
cctgcaagctgaggaacgaggaagccagcccgggtcccaaaacctcaaaagtagggaagccaacagggcagccttcagtctgtggccaaaggcccgagagyccctggcaaaccactggtgtaggtccaagagtccagaagctgaagaacttggagtctgatgttcagggtcaggaagcccaggagaaagatgaaggccaga

SEQ ID NO: 296740 - DNA, 201 bp, Homo sapiens
tttttgggcttatcgcctgaagttccaccattataagaaattggaaattttagaagtttttctttttttaatactccaataatcaagctgtttgtgacactgtgtgtgtgtgtgtgtgtatgtgtgtgtgtgtgtataaattttcgcaaatgatgctttttatttgcctagtggtagataaataggatggactttaaaaaa

SEQ ID NO: 296741 - DNA, 201 bp, Homo sapiens; identical to SEQ ID NO: 61478

SEQ ID NO: 296742 - DNA, 201 bp, Homo sapiens
tagtcagaaaaagactggttgaattgagtggaggaaaaccaaatatgaaaacatgaccatttttaactaactacggggcagacttctagaaaggaaaagartggtaaatcttgccctaaataacttctttcatgttgcctgaatttgttctcaatactgatgatgtagtcccttggcacttcaagacagccttgactgaaa

SEQ ID NO: 296743 - DNA, 201 bp, Homo sapiens
acttctttcatgttgcctgaatttgttctcaatactgatgatgtagtcccttggcacttcaagacagccttgactgaaaaagaaaataactctgagactcytgtgagaattaagggtctctcaattacttaaatgttagtgtaaataaatccaatatgatggcactttcccaaacaccaaccaggagtcacttgccctaaa

SEQ ID NO: 296744 - DNA, 201 bp, Homo sapiens
ttttatggtcataacctccttccacttggtgattctctcttccaggggactctccctctaaaaatagctcttagaaaagccatgttcccagggctgggtgyggtggctcacacctgtaatcctagcactttgggaggccaaggtggatggatcgcttgaggccaggagttcaagaccagcctggacaacatggtgaaacct

SEQ ID NO: 296745 - DNA, 201 bp, Homo sapiens
taaaataaattttataaaaataaaaattattaaaaatataaaatatattattaaaaattctaaaaagaaaagagaaaaaataaaccaccccagcgaatccyattctcctaatataattattattagctttctagactttccttaattgtatatattgttagttgtaatcatagcacagatatagggcttactttctgtttt

SEQ ID NO: 296746 - DNA, 201 bp, Homo sapiens
atttaagatttaatcataagtgtttccatgtgattatttagcatagaaaatattttggtctccattttatttgtttgagaatatgtttgtctatggagatyatctgtgccctagctttagcattttctgtgttcttctgagaacatgtttagaatttgaggagagacgtgatttgtccacacagagaggatatggtggatg

SEQ ID NO: 296747 - DNA, 201 bp, Homo sapiens
aaattgcttcccttcttgggtggcagacagcctggctgataaactagagagtgcttctgtgatgtattgatgcttggaacctctaaaacctctggttttcsaatctctaaatgctaagtggaagacctaccattacggttagtcaaggtccatcggggatgggttttcagtttgtgctggagtgaatcacttcaggataga

SEQ ID NO: 296748 - DNA, 201 bp, Homo sapiens
aagattctaactctacacattagatttttcctattttggaactttacaaatcggaagcatacgttatgtactcttttgtatttggcttctgttgcttaacrttacttttgtgagatctgttcttatggttgcgtgcagctatggtttgtccattttcattgatgtatagtattccgtcataggaacagacccacttttatt

SEQ ID NO: 296749 - DNA, 201 bp, Homo sapiens
tcatctgtgtaactccattccttactgtttgtttttagggcattactgactgctgtgtcttgcatgtagaccctgcaggaaggctctcgtaggccaattaytctctttgggtggcttgaagaagttacttaccttgcctgctgttgagcagagcaccaaggtgccattagacacgtgagcctggtctaagcagccatggcc

SEQ ID NO: 296750 - DNA, 201 bp, Homo sapiens; identical to SEQ ID NO: 61476

SEQ ID NO: 296751 - DNA, 201 bp, Homo sapiens; identical to SEQ ID NO: 61486

SEQ ID NO: 296752 - DNA, 201 bp, Homo sapiens
ttttgggcttatcgcctgaagttccaccattataagaaattggaaattttagaagtttttctttttttaatactccaataatcaagctgtttgtgacactgtgtgtgtgtgtgtgtgtatgtgtgtgtgtgtgtataaattttcgcaaatgatgctttttatttgcctagtggtagataaataggatggactttaaaaaaa

SEQ ID NO: 296753 - DNA, 201 bp, Homo sapiens
tctgggcttctgtgttgctctctcactttgggcaatttaagagaattcttaagtaacattgatgtaggtgactgttgcctcaggtactgactttaaacccmggctgtgtgtaagctgcaggacataaacacctagaacaaactatggtgggtgagagcacagtgtctttaagaaacaccttgaagggaagggtttaaagct

SEQ ID NO: 296754 - DNA, 201 bp, Homo sapiens
gaagttccaccattataagaaattggaaattttagaagtttttctttttttaatactccaataatcaagctgtttgtgacactgtgtgtgtgtgtgtgtgtatgtgtgtgtgtgtgtataaattttcgcaaatgatgctttttatttgcctagtggtagataaataggatggactttaaaaaaatctctattatttttcta

SEQ ID NO: 296755 - DNA, 201 bp, Homo sapiens
tatttttagtggagacggggtttcgcagtgttagccagggtggtctcgatctcctgacctcttgatccgtccgccttggcctcccaaagtgctgggattamaggcgtggagagacaattctttaacccttcttgctgacttgtcttcttctgcccctccccactccagctcacccctctccaggtggtcgtcgggcagcct

SEQ ID NO: 296756 - DNA, 201 bp, Homo sapiens
aaagccctccactacttctgtctcccgtccttctgtccctctcttgtttgtctcatttgtgacctccttgtggaaccagctccaatcttacgataggcccrtccatgtctcactccctgggcctctccgtgaatgcattatgcttatcatgcaagccctaggggttctcaatccatcattattgtatgacacctcaacagt

SEQ ID NO: 296757 - DNA, 201 bp, Homo sapiens
taagaaattggaaattttagaagtttttctttttttaatactccaataatcaagctgtttgtgacactgtgtgtgtgtgtgtgtgtatgtgtgtgtgtgtrtataaattttcgcaaatgatgctttttatttgcctagtggtagataaataggatggactttaaaaaaatctctattatttttctagggttgagctccaaa

SEQ ID NO: 296758 - DNA, 201 bp, Homo sapiens
cccaagtagctgggaccacaggcatgtgtcaccatgcttggctaatttttttttattttttgtaaagacagggtcttcctgtgttgccaaaggctggtctyaaactcctgggctcaagcagtcctcctgcctcagcctcccaaagttctaggattacagcatgagctaccatgcctggcctaaagtttatattttaaagca

SEQ ID NO: 296759 - DNA, 201 bp, Homo sapiens
atcatgtctgtcaccttcaatggggaaaacaaactttgtaatggtaggaaacacaacaggtacaataatttacaaaaatatgtttgccacatttcagggcaaggcaaaatgcagtggagacatatgttaaattcttatcattcacatttgttctttttatctttaggatgaagctcttacaccaagtgtcacgagtctgga

SEQ ID NO: 296760 - DNA, 201 bp, Homo sapiens
atcatttttttttctttttgaaaatgactaagtataaactaacacatctcctttgtaccccagtaataaatgctgaatctcattcttttttgggcttatcrcctgaagttccaccattataagaaattggaaattttagaagtttttctttttttaatactccaataatcaagctgtttgtgacactgtgtgtgtgtgtgt

SEQ ID NO: 296761 - DNA, 201 bp, Homo sapiens
gtgataaacaatccccattatcttccccaaatgtacttcactggggtgattagtagaattttgccctgatcacatatcttcagtgtcttctttcctgctaygcttcagcttcaaagtagaggggagcctccaattttgctttcatttgaaaagaccatcatggccttcagaatggtttttgactaatgtggtagataaact

SEQ ID NO: 296762 - DNA, 201 bp, Homo sapiens; identical to SEQ ID NO: 61477

SEQ ID NO: 296763 - DNA, 201 bp, Homo sapiens
tttacctagggctagcttggtttagcttttaactcagcacagggagcaaaagagcaaaagtggttatttttcttttccttttttttttttttttttttttkcgcgacagggtcttgctctatcacccaggctggagtgcggaggtgcagtctcggctaactgcagcctccaccccccaggctcaagtgacaatcctccccc

SEQ ID NO: 296764 - DNA, 201 bp, Homo sapiens
aggaaatttctaacctggggctctgaattattagttacgtgactgtcagaaatttttttgttgcctcatcataaagaacccaggggctccatgctgctctwgttcccatgtctaggctgagagcctctggaatgtttctagcaggagggagtggattcccctgaccaggggctctacagaaatggccgtagtgatgggcaa

SEQ ID NO: 296765 - DNA, 201 bp, Homo sapiens
ttacctagggctagcttggtttagcttttaactcagcacagggagcaaaagagcaaaagtggttatttttcttttccttttttttttttttttttttttgygcgacagggtcttgctctatcacccaggctggagtgcggaggtgcagtctcggctaactgcagcctccaccccccaggctcaagtgacaatcctcccccc

SEQ ID NO: 296766 - DNA, 201 bp, Homo sapiens
gaaggctctcgtaggccaattattctctttgggtggcttgaagaagttacttaccttgcctgctgttgagcagagcaccaaggtgccattagacacgtgarcctggtctaagcagccatggccagggtaggggatggttacatggaacaagtcatggcgactttcgcacaggaagggcctatgactgctttactcagaagg

SEQ ID NO: 296767 - DNA, 201 bp, Homo sapiens
cattgtaggaggccagagcaagctcattttcaaaccagatctcactttggaagaggtacaggcagaaaatcccaaagtgtccagaggccggtatcgccctsaggaatgtaaagctttacagagggtcgccatcctcgttccccaccggaacagagagaaacacctgatgtacctgctggaacatctgcatcccttcctgca

SEQ ID NO: 296768 - DNA, 201 bp, Homo sapiens
atctgcatcccttcctgcagaggcagcagctggattatggcatctacgtcatccaccaggtgagcgtgggggcagaccagggcctgccctcgaccctcctyttctctgccagacttggccatgtgactgtttgtctatgttgggtaaaaggaacatcagactatcatcaaaaacgagttctcttacctcatttatccttga

SEQ ID NO: 296769 - DNA, 201 bp, Homo sapiens
atggcatctacgtcatccaccaggtgagcgtgggggcagaccagggcctgccctcgaccctcctcttctctgccagacttggccatgtgactgtttgtctrtgttgggtaaaaggaacatcagactatcatcaaaaacgagttctcttacctcatttatccttgaaaggagtagaggaaattcttgtctcagagtgtggag

SEQ ID NO: 296770 - DNA, 201 bp, Homo sapiens
agaggatttgaaagaacattctgtattagtagctgtggtgctctatggctgccaccacatttctgccctgaactttgccactatttattatgtgaaacatrttatgtttgattttcactttctggattcatctatttgacttccagaagcatgatttggtaggagcacagcataactatcggctgcttttgaagagcttac

SEQ ID NO: 296771 - DNA, 201 bp, Homo sapiens
ttgaagagcttacctctgaggtcagtggagtggatgattaaagatacctctatttggcattaaagtttattgaaagaaaactaagacatcagtttaaacatcagtgtctaaacttttcacagttatccttggccatccaaggaggccaagaagagggataattccccctcaaattcttataaattctaagaatgtcagcaa

SEQ ID NO: 296772 - DNA, 201 bp, Homo sapiens
acgtggcggtggtgagggtactggtagacctcctcagccgtttggtgatgaaaaggaggaaaaagaaaatggtaatctgagcgtggaggcgagttgtggcttttttttttttttttaaatttttaaagaaaggaaaataacacctttaagatgcaagaaaatcaaggagagatcaggatgaataggattcagggtccggat

SEQ ID NO: 296773 - DNA, 201 bp, Homo sapiens
aattttaatgtacagtcgtcctccttattcttgggggatatgttgcaagactgacagtggatgcctgaaaccgtggatagtgccaaaccctatatacgctktttttttctatatatgcatacatatctatactaaagtataacttataagttaggcacagtaagagatgaataatatctaataatagaacagttacaatat

SEQ ID NO: 296774 - DNA, 201 bp, Homo sapiens
gccactgtgaggattagcctccaccagtagcattataacaggattctcttacagggatttctgagaaactttaaagtagcttagaaatattagcaataacyttctctttctataggttgagatttcttgatcctttctggcaagctattaactaagtctcttagaagcttagtgtaaattcataacagagggtaagattgg

SEQ ID NO: 296775 - DNA, 201 bp, Homo sapiens
tttgctatcttaactattattgagtgtgcagtttagtaatgttaagaatatttacatgcaatgtatctatgcataattatgcaatatattggttgcataamtatatgcagtgtatttatgaaatcaatctccagaacttaatcttgcaaaactggaactctctatcattaaacaacaactctttggatttcaaggactgtt

SEQ ID NO: 296776 - DNA, 201 bp, Homo sapiens
tctgtctggttggcaggccagaaacttcagagggtgttgacatgtgttgggttatccaggaaacagactctgagctggagatgcatgttgagaagtggagrtttgcatacagagtgtgtgcgggagctgtctcctgccttcaaccctcccctgcaaaagtgaaagtgaaaaaaaagaaaggtatattcatcatgacacgca

SEQ ID NO: 296777 - DNA, 201 bp, Homo sapiens
atcttaactattattgagtgtgcagtttagtaatgttaagaatatttacatgcaatgtatctatgcataattatgcaatatattggttgcataaatatatrcagtgtatttatgaaatcaatctccagaacttaatcttgcaaaactggaactctctatcattaaacaacaactctttggatttcaaggactgtttctaag

SEQ ID NO: 296778 - DNA, 201 bp, Homo sapiens
ccaaagcaaatcagtgatggttttctattctttgttttaagccatcagtgaacagtggtttctaaaacctggctgtgtgactcagagttacctaggttctygataaaaatataatttttttttttttttttgagatggaatctggctctgtggcccaggctggagtgcagtggcacaatcttggctcactgcaacctacac

SEQ ID NO: 296779 - DNA, 201 bp, Homo sapiens
tgatggttttctattctttgttttaagccatcagtgaacagtggtttctaaaacctggctgtgtgactcagagttacctaggttctcgataaaaatataatttttttttttttttttgagatggaatctggctctgtggcccaggctggagtgcagtggcacaatcttggctcactgcaacctacacctctcaggttcaag

SEQ ID NO: 296780 - DNA, 201 bp, Homo sapiens
tgtgagccactgtgcctggctggaaaggaaatttctaacctggggctctgaattattagttacgtgactgtcagaaatttttttgttgcctcatcataaakaacccaggggctccatgctgctcttgttcccatgtctaggctgagagcctctggaatgtttctagcaggagggagtggattcccctgaccaggggctcta

SEQ ID NO: 296781 - DNA, 201 bp, Homo sapiens
ttctgtgatgtattgatgcttggaacctctaaaacctctggttttcgaatctctaaatgctaagtggaagacctaccattacggttagtcaaggtccatcrgggatgggttttcagtttgtgctggagtgaatcacttcaggatagaatttccatttgaaacaacgtgtcttttgtgattgcgttttagactgttggagca

SEQ ID NO: 296782 - DNA, 201 bp, Homo sapiens
gatctcgaactcctgacctcaggtgatctgtctgccttggcctcccaaagtgttgggattacaggtgtgagccactgtgcctggctggaaaggaaatttcyaacctggggctctgaattattagttacgtgactgtcagaaatttttttgttgcctcatcataaagaacccaggggctccatgctgctcttgttcccatgt

SEQ ID NO: 296783 - DNA, 201 bp, Homo sapiens
aatactgtaattaagagatgaccaccagtgactatcattttgtatgtaaaaggtatgcacacacacatgtattgcataattggtattatattttatatacttttttttttttttttttttagagacagggtctctgatgcccaggctggagtgcagtggcatgatctcagctcactgcagcctccgcctcccgggttcagg

SEQ ID NO: 296784 - DNA, 201 bp, Homo sapiens
aagggtgtagctgcttttcagccttatttgattcaccagctcctattcaagcacaaccaagcgggaatagtgacacagaatgtttctctgcaaatgaaacrctatattccctcatttgtgtgcacacttacctgtcagctttccccaggccctgctgttcatgggtgctcatatctgtggtgctgactgtgctggaggcca

SEQ ID NO: 296785 - DNA, 201 bp, Homo sapiens
tatctaataatagaacagttacaatatgctgtgataaaagatatgaatgtcatctctttctcaaaatatcttaccgtatttttttgtggttaactgaaacygcagaaagtgaaaccaaggactactatattttaaaggaaaactatgtagtcattttatcagaaaacaatattgtttctgttgatgaaaactccattttag

SEQ ID NO: 296786 - DNA, 201 bp, Homo sapiens
tgctgttcatgggtgctcatatctgtggtgctgactgtgctggaggccataagaccagtttgaataaggcagagcacctgccctcacagggctccccgttragtgtcagtgtggggagacaggtagctacagtggagttgcgttaattttgcatttctgcaaatacaactataagcacttggtaaggaggggagagaggga

SEQ ID NO: 296787 - DNA, 201 bp, Homo sapiens
aaaattgcttaaacccaggaggcagaggttgcagtggcccaagatcatgccattacactccagcctgggtgacagagtgagattccgtctcaaaaaaaaaagaaaagaaaagaaaagaaaaaaaagaatgcatctcaaatcaagcaattttcttgatggattatgcttatgtatctcaggaaaagtaaaatgaaaaaagta

SEQ ID NO: 296788 - DNA, 201 bp, Homo sapiens
  misc_feature (1)...(201): n = A,T,C or G
atgtggactacttcgtcaacggaggccaagaccaacctggctgccccaccttcttttacgcaggtcagaaagccagtacaatctggtatttggcaaccccngagattgaaattcaccaacagcttttgtgttgagtcagccagagtgggccatagagggtctacttgacagtgtcctttgctatgtcccataacgctttac

SEQ ID NO: 296789 - DNA, 201 bp, Homo sapiens
tgacctattttcctactccctcaccatgctttctgagactttttcccaaatctactttgaactcttgtggcagggtctgctttttgtagggggaagggaasggatccaaactgagagatgggaatagtagtattcacagtaatcactgtgttatgatgaggactagagtgtgtaaaactgcccggcataaggcctggtaca

SEQ ID NO: 296790 - DNA, 201 bp, Homo sapiens
ttgctaaatatgtgacttattaggtacccatttacctaagcaaggcctctcaggccccttcaaagttggagcctctccctgatgtgacttaaaaaaaaaaacattctatttattcaatcaatatttattaagctacgtggcaggtactgagaatatggcagcaatcaacacattgaatgaggtccctgcctacatggagct

SEQ ID NO: 296791 - DNA, 201 bp, Homo sapiens
tttgtaccagtaccatactgttttggttactgtaggcttgtagtatagtttgaaattgggtagtgtgatatgcccagctttattctttttgcttaggattrccttggctatttgggttctttttttgtgccatatgaattttagaatagatttttataattctgtgaaaaatgacattggtaatttggtagggatagcact

SEQ ID NO: 296792 - DNA, 201 bp, Homo sapiens
gctactctggaggctgaggcaggagaatgccctgaacccaggaggcagagcttgcagtgagcggagatcttgccactgcactccagcctgggtgacagagygagacttcgtctcaaaaaaaaaaaaaaaaaaaaaaaagtgaatcctttctatccttaaatttgctaaatatgtgacttattaggtacccatttacctaag

SEQ ID NO: 296793 - DNA, 201 bp, Homo sapiens
gtgaatagtgttgcaatgaatatactagtgcaggtatccttttggtagaagaatttcttttcctttgggtatatatctagtaatgggattgctgagtcaartggtgattttatttttagttctttgaggaatcttcagatcgctttccatagtggctgaacttatttacattcccaccaacagtgtataagtattcccttt

SEQ ID NO: 296794 - DNA, 201 bp, Homo sapiens
ttttggaaagcacctagcatactgcctggcccataggtactcaataaatgcttgctgaataaatcagtgggtgaatgagagaaagaaagggagaaggaaggaaaaagaaagagaaaggaagaaaggaaagaaaagaaagaaagaaagaaagagagagaaagaaagagagaaagaaagaaagaaagaaagaaagaaagaaag

SEQ ID NO: 296795 - DNA, 201 bp, Homo sapiens
attttacagaacttggtttcctttgccgatcttatgtacatacccattttagctttcccatgcatacttaactgcacttgctttatctccttgggcattcktacttaggattcaatagaaacatgtacagggtaaacaattttttaaaaataaaacttcatggagtatctgaatcatttaattgttttacttgaatggaat

SEQ ID NO: 296796 - DNA, 201 bp, Homo sapiens
agaaaataagtataataacttggcaaattccatagtagattagaaggtgatgattgctaacaaataaatagaccagggtaaggatgattgagagaaatgargtgaggaacacaagcaggttacaactgaaataggatgtgagagtagacaagagagcacttgacaagcaaagacttgaaggaggggaaggaactgccatgt

SEQ ID NO: 296797 - DNA, 201 bp, Homo sapiens
gtgacaggtactattttaggcagtagagtgaacaaaatggattttaaaaatccctgctttgttcaaaagtacattctaatgtggactgaccactaatagamaataagtataataacttggcaaattccatagtagattagaaggtgatgattgctaacaaataaatagaccagggtaaggatgattgagagaaatgaagtg

SEQ ID NO: 296798 - DNA, 201 bp, Homo sapiens
ccaggcccaggcacacaggacacattcaataagccaaaagccttggtaactgagaagaaagaaattgagcgggctgcagtcctcatctctacttcctgacrttaggcagattgattaaatgacactcatcctgaaacaattcagccaaagaagggttccagagggtggcccatttcagagacactcctggctgctgatgcc

SEQ ID NO: 296799 - DNA, 201 bp, Homo sapiens
  misc_feature (1)...(201): n = A,T,C or G
gaagtgatgaaggctgtaataaatgagtgattattgcactagctgatgtataataaaccccatgcctgcaggcccctgtttcttgcttccttccaaggtcntctttcttccttctaagaacagatgacctcaccttggatgttgcttgttttgttttgttttcctccaggggatgcacctcctaccccacagccaaagtgc

SEQ ID NO: 296800 - DNA, 201 bp, Homo sapiens
tttaccagacgttggaattcctaaatgaataccattgccttaaaaatcatattcctcaggtcagaaggctagagtgctctagtacaggagtcctcaacccytgggtgagtgaacattaaacctgagctccatctcctgtcaggtcagctgtggcactggattccaggagtgtgaaccctattgtgaaccgtgcatgcaagg

SEQ ID NO: 296801 - DNA, 201 bp, Homo sapiens
tcatgttgctgcagagaacataatttcattcttttttatagctgtgtagaattccatagggtatatgtaccacagtttctttatccagtctaccattggtkggcacctgggttgattccaagtctttgctattgtgaatagtgttgcaatgaatatactagtgcaggtatccttttggtagaagaatttcttttcctttgg

SEQ ID NO: 296802 - DNA, 201 bp, Homo sapiens
cccataggtactcaataaatgcttgctgaataaatcagtgggtgaatgagagaaagaaagggagaaggaaggaaaaagaaagagaaaggaagaaaggaaaraaaagaaagaaagaaagaaagagagagaaagaaagagagaaagaaagaaagaaagaaagaaagaaagaaagaaagaaagaaagaaaaagaaaatgtccac

SEQ ID NO: 296803 - DNA, 201 bp, Homo sapiens
tctgcactggaagggtgggtgtgtggtgggtccatgaatgttcctgcagctgagaggaaagaggtccctcatatcagtctcttctcacaggcctggacccygctggacctgagtacaccagggccagtgtggaagagcgcttggatgctggagatgccctcttcgtggaagccatccacacagacaccgacagtgagctgg

SEQ ID NO: 296804 - DNA, 201 bp, Homo sapiens
gaaggagaaggagaagaagaggaagaggaggaggaggaggaagaagaagaagaagaagaagaagaagaagaagaagaagaagaagaagaagaagaagaagragacagaatcttagaaaactttcttaatcaatgatacttgctagcaaaggaagaagtattaataatataatatagcaaactcagccctgagaattaaatt

SEQ ID NO: 296805 - DNA, 201 bp, Homo sapiens
ccatggcatttccttgaagctaggatgctggtgattgtaacgatgttaaatgtgaagtaaaaatgtgtccagaatccatgaaatacattacaagctaaacygtcatccttccctatgctatgtgcatcttaactagggtgactatacttcctggtttatgctggttatcctggggtcctgtttgctttatcatgtgtacag

SEQ ID NO: 296806 - DNA, 201 bp, Homo sapiens
ctgctgtccgcaggccgtacgtctcagctccccttctgtcagcgccaccccatctgagttggcatgcgggaggatgttttgtctggtggtggaggtggtgytgccaggaccagatgtcctgacttctaattccagctgctgggcagattcacagcaacctgagctggtgcctctgtgtctgtgcagctaagaatataccca

SEQ ID NO: 296807 - DNA, 201 bp, Homo sapiens
ataacctgccaagaatgagtcagatgatctgaaaagcatatttccgtttatgtgtgtgtttactgcccactggaccgagttgctgggatcccaggactcaycttagaatacagcacatagtgcgtgtatggtgtagatgtccgtggaataaatgggtgcatgaattaataaacacgtggctgggtgctgtgggaccctaag

SEQ ID NO: 296808 - DNA, 201 bp, Homo sapiens
ttgcttctttatttccaggactggtggaacaaggtggtgtcaagatagagccgctccccaaggaagtgaaagtctacctcctgactacttccagtgctccrtactgcagtgagtagggggaaatgcatgagctcagctctgccagggcaccaccagaggagtccagcccagtgtggtagcctgggtgggagtgaatgataa

SEQ ID NO: 296809 - DNA, 201 bp, Homo sapiens
tgtctgtgcagctaagaatatacccagcaggaaagtgtggggaatgcctggagactaacagcatgttaaggtccctgctgagggggttcacagggccatgytttttctgactcttttgtatttattgtgagaccacctccccacaccttcagaagcgtagccctgttggttccaaaaccacagaggggcacataaacaggc

SEQ ID NO: 296810 - DNA, 201 bp, Homo sapiens
tatcaatgtgagaggccatgtatttcttcttttactttttatttttaagtttcttatttaaaaaaacttttagattcaggatttacgtgtgcaggtttatkacatgggtgtagcatgtgatgctgaggttcaggtttctaatgatctcattgcccaagtagcaatcagtacttgataggtagttttgcaacccttgtccct

SEQ ID NO: 296811 - DNA, 201 bp, Homo sapiens
aagtgtggggaatgcctggagactaacagcatgttaaggtccctgctgagggggttcacagggccatgttttttctgactcttttgtatttattgtgagaycacctccccacaccttcagaagcgtagccctgttggttccaaaaccacagaggggcacataaacaggcatgctctgccttgagctgtcacttctagggat

SEQ ID NO: 296812 - DNA, 201 bp, Homo sapiens
gcatctcaaatcaagcaattttcttgatggattatgcttatgtatctcaggaaaagtaaaatgaaaaaagtagaatgtagtaaccatgtacactaatattytgaaaaagtgatttgaggggactcccatgcatgtatttacagcttgctggaatataaaattcaatagagtttcactaaacagcatagatttccatttgtc

SEQ ID NO: 296813 - DNA, 201 bp, Homo sapiens
ctgtgctgcagcctgagactcttcctatgtaatcctctctttcctgcccattctctttcacaggtatcagatgttcaccaccatctaaaggcgcttcctgscttctctagtacctcttattctttacaggtgttagctcgataaatctcttgcatatcttgtcttaccttggcatcttcttctccgaggacctgaactcat

SEQ ID NO: 296814 - DNA, 201 bp, Homo sapiens
agttgtgtagcaaaaaccctcagcttcctagccttttggtgggataattttgggtcttgttttacagaatctcaaagaggtgccccattggggtgagagcmcatggggataacctactcactactattttcctttattctctgacctattttcctactccctcaccatgctttctgagactttttcccaaatctactttga

SEQ ID NO: 296815 - DNA, 201 bp, Homo sapiens
tttggttttttgtttctgcattaattggcttaggaaaatcacctccagctacattcatgttgctgcagagaacataatttcattcttttttatagctgtgyagaattccatagggtatatgtaccacagtttctttatccagtctaccattggttggcacctgggttgattccaagtctttgctattgtgaatagtgttgc

SEQ ID NO: 296816 - DNA, 201 bp, Homo sapiens
ttcagaagcgtagccctgttggttccaaaaccacagaggggcacataaacaggcatgctctgccttgagctgtcacttctagggatggaagcggagtcctycctgctctccctggacagatatgggtagggagggggtagggaccagcagctctccagccactctcaggccatcatggcactgggctcccatgcctagcac

SEQ ID NO: 296817 - DNA, 201 bp, Homo sapiens
gctgggtgattcctgaaactgggggtagtcattcccttcctttgttggggcagacttgggcttgggggctggtgggactacgcttgaagtgagagggcaargaaccccaactgtagggagccacagcctgcaggggataggaagtcagcagccatggtgcatgcttctttaaaaagcaaccggttagttattcacaagcca

SEQ ID NO: 296818 - DNA, 201 bp, Homo sapiens
tccaggaaaaactcctgggcagtggaaatggtttctctccctcccgcactctctcacttcccgctacccctggctgccactcaactgcagcagcctgtcastgcttatatgagtgaaatgggtaccagcttgacaaaatagtaaagtagggtagcttccaatgatagaaccagtcatcattatttcctattcattgtgcat

SEQ ID NO: 296819 - DNA, 201 bp, Homo sapiens
ttgcactgaacacctggtggtgctaactacttgtacttccaagtgtacatcgggcttcctcacctgtgtgccttggtcctaaccatactctcttcccagartgccctctctccacctgtcatccactagtcttcaggtcaaacacttcctgcttcaccatgctcccactgcacgggatataaatgtcatgaaaacaactac

SEQ ID NO: 296820 - DNA, 201 bp, Homo sapiens
tatcacatttctgtgatgaaaatcatattgtcggccgggcgcggtggttcacacttgtaatcccagcactttgggaggccaagctgggtggatcacttgargtcaggagttcaagaccagcctggccaacatgatgaaactccatctctactaaacatgcaaaaaaaaaaaaaaaattagctggaaattagtcagtgtggc

SEQ ID NO: 296821 - DNA, 201 bp, Homo sapiens
tggaaataaactttagacagttttgttatatacatgtaaaagtgtggaggactttatgcttccagagccactctcagttaataagggactggagttgtgtrgcaaaaaccctcagcttcctagccttttggtgggataattttgggtcttgttttacagaatctcaaagaggtgccccattggggtgagagcccatgggga

SEQ ID NO: 296822 - DNA, 201 bp, Homo sapiens
ctggagagagcttggccatacagagtgtcccaaccacaggggaaaggaaagtcaaaatattgcttggccttggttgcaggtctcagcaacgaggtctcaasgtgcagggagagtttaaagaccccaggaccctggagttgtatacagctcaccacatacttcttagttccagccaatttatccaatgttgaatgctgcaaa

SEQ ID NO: 296823 - DNA, 201 bp, Homo sapiens
cctggtgccatatgacatggagcctagagctcagactctgtgttcacctggacctggattcaaatctcagcttctccacttaccagctgtgtgatcaggarcaagttatttaaactctctgaactctatatccttatgtgaaaatgggaaccataacagtacctactttaaagaaccaattgtgagtataaaataaaatgg

SEQ ID NO: 296824 - DNA, 201 bp, Homo sapiens
aaggaaagggaagctctgagagaccaagtggcatgcccaagtctccacagctggatgaaaaggtcagaactcaactccaggtctcctgactgtaaactctrtactccttcctcaccaccaccatgcttccatcttctgagaacctgctgtccgcaggccgtacgtctcagctccccttctgtcagcgccaccccatctgag

SEQ ID NO: 296825 - DNA, 201 bp, Homo sapiens
tatatttaattttaaaatttaggttttccaaactaataatgattttgtcactgagattgttagatgtcctttctaatccagcaacctaactcaagtggttygtcatcctggctgggtgatgggaactagtccctgctaacctcagatgcccctgggaaaacttccctcagatgccaatttgcatttacctttcccccagta

SEQ ID NO: 296826 - DNA, 201 bp, Homo sapiens
ctccataccagctctgagatttccagctcagcgatgcccccaggtccctgggagagctgcttctgggtggggggcctcattttgtggctcagcgttggaakttcaggtaagccagggctcaggccttgggaggaacttatttcagtcagtgatcatatttctccaactacttatgcagtactaacttttggaagatcccct

SEQ ID NO: 296827 - DNA, 201 bp, Homo sapiens
aaggagaactactggctgcaatagtgagtgattgtagcataaggcaaaggactcttggagtggggtggattagctcagttagggccttacagtccattgtyaggacttcaggtttcaatctgagagaaaaggcttggagacttttgcacagagatgtaacatgacttgactgacttaaaaaaaaaatcgtgactgctgtgt

SEQ ID NO: 296828 - DNA, 201 bp, Homo sapiens
aagtgaggaacacaagcaggttacaactgaaataggatgtgagagtagacaagagagcacttgacaagcaaagacttgaaggaggggaaggaactgccatrtagatacataagggaaatgcattccaggcagaaggaacagccgggcaaagaccctcaggcaggaagccatctagagtgaggaagggcaaggagaactact

SEQ ID NO: 296829 - DNA, 201 bp, Homo sapiens
aggaaatgatccattttctagcaaaatatcagtattttcagttttggggtggatataaacttttttatggtgtaaggaaatctactgtctgtatttatatmccttttttattcctgatattgtttacttttaacttccctttgttctgttactctgtcttatcaaaagtacatctagctcattattcttttcaaagagcca

SEQ ID NO: 296830 - DNA, 201 bp, Homo sapiens
tttttaatattctgtacttttcattgtgattattctttaacccatacattccttaaaaggttaaaagggtgtttttctgttggtaggagtgtaaattagtrtagccactatggagaatacgatggaggctcctcagaaaactaaagatagaacttccatatgatccagcaattccactactgggtatatatccaaaagaaa

SEQ ID NO: 296831 - DNA, 201 bp, Homo sapiens
agaaggcaccagaacatgattcacttcttgcagatcagaaattgggggaaaaacggggaggttatgtgtggtctttttccaaatttctatagctttatgcracgctaagatttccttctaattggagaattaacctgggccaactccccaaaccactcacttaaaagatttttcatattccttgtattttacaaactcttc

SEQ ID NO: 296832 - DNA, 201 bp, Homo sapiens
aggcctgcagttacctttgccagagaatttccattgtaaaggtatctattgcaaggtgctgtgaagtaggtgagacttgtcaaggctcttctctgtcatcyatctaggctatgggctgggcactggaaggctatggcagggctcttgactgctcataaggacaagaagtgattaggtggggctaaagagttgaaaatcctt

SEQ ID NO: 296833 - DNA, 201 bp, Homo sapiens
tccacttggcaggtaatttttccattcttttttggccccctgtctagggttttaggaacaaagccttcctggattgacacatttattagaacccttctgcrtgcaacgaatgctaatgtgattgccgtggactggatttatgggtctacaggagtctacttctcagctgtgaaaaatgtgattaagttgagcctcgagatc

SEQ ID NO: 296834 - DNA, 201 bp, Homo sapiens
acacagaacctttattacccaggattgtatttcccttcttcacttcttccttggttttatgacctaagaaacttccatttatgggtgctacttccgtcatrcccagaggttatgggtgtgatggagctatgcacgtctcttcttcaatttctctgatactctccagtccacaatttgttgtaatatatagtcactgagtct

SEQ ID NO: 296835 - DNA, 201 bp, Homo sapiens
gtgtgtggtgggtccatgaatgttcctgcagctgagaggaaagaggtccctcatatcagtctcttctcacaggcctggaccccgctggacctgagtacacsagggccagtgtggaagagcgcttggatgctggagatgccctcttcgtggaagccatccacacagacaccgacagtgagctggggtgaccttcctgggatg

SEQ ID NO: 296836 - DNA, 201 bp, Homo sapiens
  misc_feature (1)...(201): n = A,T,C or G
ttatccatggattcaggtgggagttaaataaccaacaggacttctcaactaagaatgatcaagtaaccataataccataagaagttagtgggcaacaaggngaggaatgaatttaccaatggccacatgttccatccctcatatcctgctgtctttgatggggtctcatgtcaacatgcacacatggtgttcattcttatt

SEQ ID NO: 296837 - DNA, 201 bp, Homo sapiens
gtctctgaccactgaggtgaatggttgtatttttagctactgtaggcaagaggattctcatttatagaccaaaagtatttggttatgagcctcactttctsattcaaatgaatgcagtaataacagtgtgctgagcagtactgggtagggcattgctgcctggctgacttacgggaaagtcatgaagattttttaggatgg

SEQ ID NO: 296838 - DNA, 201 bp, Homo sapiens
caaattaagtccttctgaccagttgggaaaggcgggggcattcctcttcatgtctgctccacggcaaatgcctgtggggtctgtgcttagtgtggtgggtkcagggagaaataacatctgtccctgaccagacaagcttgcagctcaagttagagatgtccacatctcatttcctgtggtcagaagcctctttttagcatt

SEQ ID NO: 296839 - DNA, 201 bp, Homo sapiens
tccacatcccctttcccttcctctaaaggcatttatgtcattaaccttaccacccctgggcacttggaccacaggaactggctcttaattgtaggtgattscagatttctttcaccagacatcatgggaattcaaaagccacacaatgccaagccctgtctcctcaccagccactgctctcttattgctcttctcttccag

SEQ ID NO: 296840 - DNA, 201 bp, Homo sapiens
catgaactctgctgtgaggcactacaagtttctgctggaaggagtgcatttcactcccaaaaccgtggccactagctggtgttccttctggctcacccaargtcacacagctaggtacagccatcaggattccagcacaggcctgcaggtgcccacagagccttgcagattgtggctggatatcagtaagccaagtacctt

SEQ ID NO: 296841 - DNA, 201 bp, Homo sapiens
acgttagaatcacctggagagctttaaaaaatactgacgccaagccccccaacccagaccaatcacatcagggtctctgggcataggctccacagctacaytttaaaagctccccgagtaattccagtcaacatccacagattagcgcttcctcctccatgaagaggttcacataactcttttgaagaaggcaccagaaca

SEQ ID NO: 296842 - DNA, 201 bp, Homo sapiens
gccttgctgtggcagaggcaagccattgtgcccaaagctggtgagcagaaggatcaattcactgcccagccatttcaccatatttaccaactcaaacagtyctctaaaattgttttcaagatgatctttttgaacacattcaatgactgtacatttcctctctttaaatacagccttctggaatttttaaaaatatattta

SEQ ID NO: 296843 - DNA, 201 bp, Homo sapiens
tcttgttttacagaatctcaaagaggtgccccattggggtgagagcccatggggataacctactcactactattttcctttattctctgacctattttccyactccctcaccatgctttctgagactttttcccaaatctactttgaactcttgtggcagggtctgctttttgtagggggaagggaagggatccaaactga

SEQ ID NO: 296844 - DNA, 201 bp, Homo sapiens
ggtggcatccgcctgtaatcccagctactcctgctgaggcaggagaatcgcttgaatccgggaggcggaggttgcagtgagagaagatggcgccactgcastccagcctgggtgacaagagcgagagagcgaaaaaagaaagcctcagaaaaaaaaaagaaaaagaaaagaaaagaaaagaaaagaaatctgtctgagggc

SEQ ID NO: 296845 - DNA, 201 bp, Homo sapiens
actctctgatggatgcaggctgccctatatgaacaatagagcagagtgactcattaatgtggtttgcatctcatgctgaaacacagtcttttcatcttttytttaaagagccaaatgctgggggaggctgataaaatgatggagtcaggcattagctctctcatgtgctgtgggagttcaagccacaggctgaagagctta

SEQ ID NO: 296846 - DNA, 201 bp, Homo sapiens
gactgctcataaggacaagaagtgattaggtggggctaaagagttgaaaatccttccaggagggagtgttcagactagactgaggctagtccgcagggcarctgttcatttggctgcccagggttctatttagaattctctactagtttgctagggataccataaggaagtgccatggactgggtggctagaacaatggaa

SEQ ID NO: 296847 - DNA, 201 bp, Homo sapiens
cacctggtggtgctaactacttgtacttccaagtgtacatcgggcttcctcacctgtgtgccttggtcctaaccatactctcttcccagaatgccctctcyccacctgtcatccactagtcttcaggtcaaacacttcctgcttcaccatgctcccactgcacgggatataaatgtcatgaaaacaactactataggagat

SEQ ID NO: 296848 - DNA, 201 bp, Homo sapiens; identical to SEQ ID NO: 61519

SEQ ID NO: 296849 - DNA, 201 bp, Homo sapiens; identical to SEQ ID NO: 61520

SEQ ID NO: 296850 - DNA, 201 bp, Homo sapiens
ggaaacaagagcaaaactctgtctcaaaaaaaaaaaattattaacactgaatggaaacatttttctatatgtaatcactggatggaaaggatataaaaaaatgcataactgtctatgagatggaatgttgtttaatgctgggtctatgtggtacctaaaatcatcctgtccaggggcacgtggcccacactttgggaaaca

SEQ ID NO: 296851 - DNA, 201 bp, Homo sapiens
ttatttcctgatcccaatctgttgggaaagatttctaaacatttttctatcattttccttttcctggaaaagtcccactatacagtaagttccagaaggayagggactatatcttatttgtctttattttttggaaagcacctagcatactgcctggcccataggtactcaataaatgcttgctgaataaatcagtgggtg

SEQ ID NO: 296852 - DNA, 201 bp, Homo sapiens
ttcttttccacaaataacacaaatggagcaatgcaatgtatacagtttatgtggtttatgccttgtgcaaaggtgcctgacaaaaggctgatgaggctgamatccaagctaagttctgaaccctagcatgaggctgcatctgcctggaacaaaaggcaaagttttataatttacacaaagactgcatatgtgctggcggaa

SEQ ID NO: 296853 - DNA, 201 bp, Homo sapiens
ttaataagggactggagttgtgtagcaaaaaccctcagcttcctagccttttggtgggataattttgggtcttgttttacagaatctcaaagaggtgcccmattggggtgagagcccatggggataacctactcactactattttcctttattctctgacctattttcctactccctcaccatgctttctgagactttttc

SEQ ID NO: 296854 - DNA, 201 bp, Homo sapiens
caaagttttataatttacacaaagactgcatatgtgctggcggaagggctggcaactttggaattgtgtcctccctatgctccaagtactgtgtaataaastcctcatatgagcccttctctagttttgatttcttttctgggtttgagattaatagaggtttccatgacaatgaatatccacttggcaggtaatttttcc

SEQ ID NO: 296855 - DNA, 201 bp, Homo sapiens
gatgatctgaaaagcatatttccgtttatgtgtgtgtttactgcccactggaccgagttgctgggatcccaggactcaccttagaatacagcacatagtgygtgtatggtgtagatgtccgtggaataaatgggtgcatgaattaataaacacgtggctgggtgctgtgggaccctaagatagccttctcaggactctgct

SEQ ID NO: 296856 - DNA, 201 bp, Homo sapiens
gtaagttacacatttttccctattaaaaggtaaacttaggcacattaaaattttaaatagtttatttgaacaaacagtgatttatggtttgggctgcttcrcactgcaagtggctcagggctccaccaaagggatgtgaagaataaattttataaggtgcctatgaatgaagcaaggcaaagaaaatatttgattgattaa

SEQ ID NO: 296857 - DNA, 201 bp, Homo sapiens
cacaaaagatatgtttttggggagactgtggaaatgtgaccccatacacatttatctgaactattactcaaaggaaaaccaaaactactcaatgaggaaayttaccaagtttataacatttactgagttacaaaaacttgtgttacaggatattgttcttgattttcttaggcaaatatgagcatcttaccaacagaatct

SEQ ID NO: 296858 - DNA, 201 bp, Homo sapiens
tctgaactattactcaaaggaaaaccaaaactactcaatgaggaaacttaccaagtttataacatttactgagttacaaaaacttgtgttacaggatattkttcttgattttcttaggcaaatatgagcatcttaccaacagaatctctttggttccttttagcatgaaaaatccctttagaaaactgggaggctgaggcg

SEQ ID NO: 296859 - DNA, 201 bp, Homo sapiens
gacagcatagaagacagagtctgactgagtccaaggaaatgatgagcaggctttccaggagctacccaggccaggcttagagagaatgtgacacctctggygtgtctggagcacagatttggggttgtggggatgctgtgaggctggagaggcaagtcagagccagaccctgccaggccttgaaggacaggtttttatcct

SEQ ID NO: 296860 - DNA, 201 bp, Homo sapiens
  misc_feature (1)...(201): n = A,T,C or G
aagccatccacacagacaccgacagtgagctggggtgaccttcctgggatgagggaatgagctcaaggcagcgcctaggaggctggcatctagctctgtgnccctgggcagagatgccctgaccctctctgagcttctgttgcacagtgaagagtttaccaaaatgctattgaaagtctcttccagctctgtctctgacca

SEQ ID NO: 296861 - DNA, 201 bp, Homo sapiens
gaggaacagtttttccagatatgaaaatccaggagctactattttgttgcagtgtccacttgtttattctaaaaaatcaacaactactttcttggtcataytcaaagctgtaggtgtgggcagaggggctggtgaaggtgacacaaaggactgtggtaaggagctaaccccttggtgcatgacagccaaccagtgccacca

SEQ ID NO: 296862 - DNA, 201 bp, Homo sapiens
cctcttaatgtcctgatgtcctatggtcaagaattctatccaatttgggaaaagaaaattaagcaatgaggtgctcagcctgttcttacttggaggtggayggttggttctcgtgccccacccctcactctctatagtgttccctatggccatccttgccccacacacacccttcccacatacaggttcctccactctcag

SEQ ID NO: 296863 - DNA, 201 bp, Homo sapiens
ctactattttgttgcagtgtccacttgtttattctaaaaaatcaacaactactttcttggtcatattcaaagctgtaggtgtgggcagaggggctggtgarggtgacacaaaggactgtggtaaggagctaaccccttggtgcatgacagccaaccagtgccaccagcagagcccgatcggagccaaaggggaagtacagg

SEQ ID NO: 296864 - DNA, 201 bp, Homo sapiens
gtctttagtccttcttgagtaatttttgtatatggtgagaggtaggggtccagtttcattctcttgcatatggtcagccagttttcccacaccatttatcraatagggtatcttttcctctaaaaaaagtgttaatttttgtcaactttgtcaaaggtctgacggctgtaggagtgcttctttatttcaggggtccctatt

SEQ ID NO: 296865 - DNA, 201 bp, Homo sapiens
cttctaggatttttacagttcgaggtcttacatttaagtctttagtccttcttgagtaatttttgtatatggtgagaggtaggggtccagtttcattctcytgcatatggtcagccagttttcccacaccatttatcgaatagggtatcttttcctctaaaaaaagtgttaatttttgtcaactttgtcaaaggtctgacg

SEQ ID NO: 296866 - DNA, 201 bp, Homo sapiens
acttggtcataaatgctttgcctaggctaatattcaggagagtatttcccagattttcttctaggatttttacagttcgaggtcttacatttaagtctttmgtccttcttgagtaatttttgtatatggtgagaggtaggggtccagtttcattctcttgcatatggtcagccagttttcccacaccatttatcgaatagg

SEQ ID NO: 296867 - DNA, 201 bp, Homo sapiens
tttatatttttagtagagacagggtttcaccatattggctaggctggtctcaaactcctgacctcaggtgatccacccgccttggcctcccaaagtgctgsgattacaggagtgagccaccacgcctgaccttatgagttaaacctttagtttatgtcttagtctacttgtgctactatgacacagtacctgagactgggt

SEQ ID NO: 296868 - DNA, 201 bp, Homo sapiens
ctcaggccatcatggcactgggctcccatgcctagcactcttggtctgctttgacttcagcaatgttgacctgtgccaggcatgcgccagcatgggcagargatcttctaccaaataataatttttaaacaatatattccctcatagaacagtttttcacatagtgtaccttttctccattacttcactccatccttacca

SEQ ID NO: 296869 - DNA, 201 bp, Homo sapiens
agcctgcttccctgacgctgggtgtgtggagagggagcagggccgttgctgtatttaatgagttaattctctctttcttttttttttttttttttttttttgagacagagtttcactcttgtcacccaggctgtaatgcaacggcaccatctcggctcactgcaacctctgcctcccgggttcaaatgcttctcctgcctc

SEQ ID NO: 296870 - DNA, 201 bp, Homo sapiens
gacacaaacaaaagatagccgtatatgatagatgcattttggctcattcaagatcatcccaccatgaatatgtcagcaaacaaggggaagtaaaacattartattacaaaataacaaaaactaacattactgaatgcttcctaggcacaggcactgtcctgagaagttcatacatattaacccacttatttcagacctagg

SEQ ID NO: 296871 - DNA, 201 bp, Homo sapiens
cagcctgcttccctgacgctgggtgtgtggagagggagcagggccgttgctgtatttaatgagttaattctctctttcttttttttttttttttttttttttgagacagagtttcactcttgtcacccaggctgtaatgcaacggcaccatctcggctcactgcaacctctgcctcccgggttcaaatgcttctcctgcct

SEQ ID NO: 296872 - DNA, 201 bp, Homo sapiens
acatactttgggcaccaaaaggagagtaagggggttgtcagggtggggagcccaggaagagaaaaagtgattaacaatgagagtgctgtcctttttccctscaaagtaagtgtggtgggtgtgtcatgcccagggcctcggcttctgaagctttgggggaaagcctgccactgtgaagccagcagactctgtggcccacgg

SEQ ID NO: 296873 - DNA, 201 bp, Homo sapiens; identical to SEQ ID NO: 279538

SEQ ID NO: 296874 - DNA, 201 bp, Homo sapiens
gagcagtctcctacacacacagcctgcttccctgacgctgggtgtgtggagagggagcagggccgttgctgtatttaatgagttaattctctctttctttyttttttttttttttttttttgagacagagtttcactcttgtcacccaggctgtaatgcaacggcaccatctcggctcactgcaacctctgcctcccgggt

SEQ ID NO: 296875 - DNA, 201 bp, Homo sapiens
tcaggttatagttatctgatctgtgatcacatgagggctgtgcacctctacatcagcgccctggagaattcctgtccactgatggcctttccctgtgccarctacaaggccttccttgctggacgctgtctggattgctttaacccttttctgctttcctgcccaaggataggtaaagtgctacccctttgacttcctttg

SEQ ID NO: 296876 - DNA, 201 bp, Homo sapiens
ttggcgacactcactttgagagctccagtgtccatgctgctcaagggagagtctggatgccacataggtaaccagcggctgcagggagaggagcagtctcytacacacacagcctgcttccctgacgctgggtgtgtggagagggagcagggccgttgctgtatttaatgagttaattctctctttctttttttttttttt

SEQ ID NO: 296877 - DNA, 201 bp, Homo sapiens
aggctgtacacccagtctatgttggcgacactcactttgagagctccagtgtccatgctgctcaagggagagtctggatgccacataggtaaccagcggcygcagggagaggagcagtctcctacacacacagcctgcttccctgacgctgggtgtgtggagagggagcagggccgttgctgtatttaatgagttaattct

SEQ ID NO: 296878 - DNA, 201 bp, Homo sapiens
gtcagtatgaaccaaaccctacggttcaagttcatagcagcatgtagggaagctggaacttacacctagttgctatgtgactccacagccaccttgccagsttaggtaacttgtccaaagccatacagctgggaagacaaacctgggttccacccaactctgtctgcgcttcatgatgttttcttgttgctgtttccaccc

SEQ ID NO: 296879 - DNA, 201 bp, Homo sapiens
tgagccactgcgcctggcttttcttaaaatttttaattttgattttttttgagacagggtctcccactgtcacccaggctggagtgtggtggcacagtcayggttcactgcagctacaacctcccatgctcaggtgatcctcccacctcagcctcccaaatagctgggactacaggtacacaccacatgcccaactaattt

SEQ ID NO: 296880 - DNA, 201 bp, Homo sapiens
tgtttcaccatgttggccaggctggtctcgaactcctgacctcagatgatctgcctgccttagcctcccaaagtgctgggattacaggcatgagccactgygcctggcttttcttaaaatttttaattttgattttttttgagacagggtctcccactgtcacccaggctggagtgtggtggcacagtcacggttcactgc

SEQ ID NO: 296881 - DNA, 201 bp, Homo sapiens
cgatcttgactcactgcaacctccgcctcttgggttcaagcaattcttctgcctcagcctcccgagtagctgggactacaggcatccaccaccacaccctgctaatttttttgtatttttagtagagacggtgtttcaccatgttggccaggctggtctcgaactcctgacctcagatgatctgcctgccttagcctccca

SEQ ID NO: 296882 - DNA, 201 bp, Homo sapiens
ttccatgacaatgaatatccacttggcaggtaatttttccattcttttttggccccctgtctagggttttaggaacaaagccttcctggattgacacattyattagaacccttctgcgtgcaacgaatgctaatgtgattgccgtggactggatttatgggtctacaggagtctacttctcagctgtgaaaaatgtgatta

SEQ ID NO: 296883 - DNA, 201 bp, Homo sapiens
cttctgtattcctatctcccttgtactcattctttttctgctcagcacccctccctgctacaaagttccactgggtgactgcatgctctccttgcactcaygggtggtttttcagaggtgctgttgagctctgtatgtgctttctcctacctcaattagttgtccctaaaaggtgaggatttgaggcttctgtctctttta

SEQ ID NO: 296884 - DNA, 201 bp, Homo sapiens
ggcagaagcagcctgtgacaccagcctctgtaaggccagcctgggcctgaaggtggtgctgcaccctgcatgcgtggcagagccaccctcaagtcagctaytgggagggggcctccgccctcctcccctcctgcagtgtcttcccgaggagcctggaggagggtgcctgcttcccgacacatgcaccgatggctcctctgt

SEQ ID NO: 296885 - DNA, 201 bp, Homo sapiens
cagcctccaaggttggggtccctggggaatactgaacctttccctctggtctccttccccttcacagatgcattccagcttctcactgttgctcctaaccrtggcatttccttgaagctaggatgctggtgattgtaacgatgttaaatgtgaagtaaaaatgtgtccagaatccatgaaatacattacaagctaaaccgt

SEQ ID NO: 296886 - DNA, 201 bp, Homo sapiens
ttccccttcacagatgcattccagcttctcactgttgctcctaaccatggcatttccttgaagctaggatgctggtgattgtaacgatgttaaatgtgaartaaaaatgtgtccagaatccatgaaatacattacaagctaaaccgtcatccttccctatgctatgtgcatcttaactagggtgactatacttcctggttt

SEQ ID NO: 296887 - DNA, 201 bp, Homo sapiens
tgcccaaggataggtaaagtgctacccctttgacttcctttgacaatgtggggaagttcaagccctgctagttgtcccctcttaatgtcctgatgtcctayggtcaagaattctatccaatttgggaaaagaaaattaagcaatgaggtgctcagcctgttcttacttggaggtggacggttggttctcgtgccccacccc

SEQ ID NO: 296888 - DNA, 201 bp, Homo sapiens
aagtgtggtgggtgtgtcatgcccagggcctcggcttctgaagctttgggggaaagcctgccactgtgaagccagcagactctgtggcccacggggaactyactgttcctgctcttctaggtgctgggtgtgtcggaatcctcaatccacatcattggtgttagcctgggggcccacgttgggggcatggtgggacagctc

SEQ ID NO: 296889 - DNA, 201 bp, Homo sapiens
cacgatcttgactcactgcaacctccgcctcttgggttcaagcaattcttctgcctcagcctcccgagtagctgggactacaggcatccaccaccacaccctgctaatttttttgtatttttagtagagacggtgtttcaccatgttggccaggctggtctcgaactcctgacctcagatgatctgcctgccttagcctcc

SEQ ID NO: 296890 - DNA, 201 bp, Homo sapiens
aggttgcacctaccccttagtaaaaaaaaaaaggacagtgtgttagggaaactgtaatctttcttttcttatttatttatttatttagagacagagtctcrctctgtcacctaggctggagtgcagtggcacgatcttgactcactgcaacctccgcctcttgggttcaagcaattcttctgcctcagcctcccgagtagc

SEQ ID NO: 296891 - DNA, 201 bp, Homo sapiens
ctagctatgttcccatcaccaaaggagcctgggaaaattccgagactaaagtgattgcaaaatgccaccaggttgcacctaccccttagtaaaaaaaaaaaggacagtgtgttagggaaactgtaatctttcttttcttatttatttatttatttagagacagagtctcgctctgtcacctaggctggagtgcagtggcac

SEQ ID NO: 296892 - DNA, 201 bp, Homo sapiens
accccagggagctcagatgggccatagcactccttcaacttagtgctgagttcacctgcatccagtttatgttcccttccccaatgttagcccataaaatrtggcaaatgagaaagtacaggtagagtagaggcgaaggattgcatctctagctatgttcccatcaccaaaggagcctgggaaaattccgagactaaagtg

SEQ ID NO: 296893 - DNA, 201 bp, Homo sapiens
tttcttcttgtgggttcttggcatcttggcaccttttggtgagccctgttcctaaccccagggagctcagatgggccatagcactccttcaacttagtgckgagttcacctgcatccagtttatgttcccttccccaatgttagcccataaaatgtggcaaatgagaaagtacaggtagagtagaggcgaaggattgcatc

SEQ ID NO: 296894 - DNA, 201 bp, Homo sapiens
gattccactaattcccacccacccaacattaggcctagctcccttggggcctccagggtaagtgaagaaagaagtaggccaggtgcagtggctcacgtctstaatcccagcacttcgggaggctgaggtgggagggttgcttgaggagaggagttcgagactgcagtgagctgattgtgccagtgcattccagcctgggca

SEQ ID NO: 296895 - DNA, 201 bp, Homo sapiens
aagaagaagctctacgaggagattgaccagaatgtgggtttcagccgcacaccaactatcagtgaccgtaaccgtctcctcctgctggaggccaccatccragaggtgcttcgcctcaggcccgtggcccctatgctcatcccccacaaggccaacgttgactccaggtgtgcctgccctcccagtgacatctagccccat

SEQ ID NO: 296896 - DNA, 201 bp, Homo sapiens
caacggacagtccatagacatctcctttcctgtcttcgtggcggtaaccaatgtcatctccttgatctgcttcaatacctcctacaagaatggggaccctkagttgaatgtcatacagaattacaatgaaggcatcatagacaacctgagcaaagacagcctggtggacctagtcccctggttgaaggtgagatgctgcca

SEQ ID NO: 296897 - DNA, 201 bp, Homo sapiens
tcctgctgccctcagagacatgtggtctgggatgaaaggctgggagctccatgttccaaccagctgcagcacgcacataacatgcgctgcagctccaaacrcacacccacatacactgccagacaccaaagtccacagacacaggtgttcagacagaagcgcctgttaggagggaagggatggagaagggctggatttagg

SEQ ID NO: 296898 - DNA, 201 bp, Homo sapiens
ctgcactccagcctgggtgacagagcgggactctgtctcaaaataaataattaattaattaaatataaaaatcatcctgcccccagccccgtggctccatrtctctaccacctacagacacgcattgactcatccacagatctgcctgacttcccagaggagcttcctgctgccctcagagacatgtggtctgggatgaaa

SEQ ID NO: 296899 - DNA, 201 bp, Homo sapiens
gagttgggatcgaaaagtgaggaactgaagaggatcctagaagagacctaacctctccaccaaatttaaagagggcccggggctgcctcctacctccacamgttcgtaggtcctgcccagacttgctctacttccaagtggaaggagccttgttatctctagtcagggacagaagtatggcaggagtgtcacagatggggc

SEQ ID NO: 296900 - DNA, 201 bp, Homo sapiens
cccaggagaaattccggagtgactctatcaccaacatgctggacacactgatgcaagccaagatgaactcagataatggcaatgctggcccagatcaagaytcagagctgctttcagataaccacattctcaccaccataggggacatctttggggctggcgtggagaccaccacctctgtggttaaatggaccctggcct

SEQ ID NO: 296901 - DNA, 201 bp, Homo sapiens; identical to SEQ ID NO: 61529

SEQ ID NO: 296902 - DNA, 201 bp, Homo sapiens
tatggccccatctattcggttcgtatgggcaccaagactacagtgattgtcggccaccaccagctggccaaggaggtgcttattaagaagggcaaggactkctctgggcggcctcaaatggtaagtggtgcccatctcctccctgcccccttcaccaccccctgggattgttcaggtcttcagaccatgcctagaatgggg

SEQ ID NO: 296903 - DNA, 201 bp, Homo sapiens
catctattcggttcgtatgggcaccaagactacagtgattgtcggccaccaccagctggccaaggaggtgcttattaagaagggcaaggacttctctgggyggcctcaaatggtaagtggtgcccatctcctccctgcccccttcaccaccccctgggattgttcaggtcttcagaccatgcctagaatggggcttccagc

SEQ ID NO: 296904 - DNA, 201 bp, Homo sapiens
acagcgagcctggactctgctccaccaccccagtaccccttcacctctgccaagcttgctgctagaaaactcttggctccaactatacggacctgttgacrccctcatcctgccatagacttacccaaactcttcacagctgggtttcccacgctcttcttccaaccaactgcaaattcaccctccaagaagccctctacg

SEQ ID NO: 296905 - DNA, 201 bp, Homo sapiens; identical to SEQ ID NO: 278124

SEQ ID NO: 296906 - DNA, 201 bp, Homo sapiens
aaggaaagcagggaccagaggtgtaagggcaagagtggggtggatggtgtgagattcctacagccttgcctgctctctaaaggcaactctagacatcgcgyccaacaaccgtaagggtatcgccttcgctgactctggcgcacactggcagctgcatcgaaggctggcgatggccacctttgccctgttcaaggatggcga

SEQ ID NO: 296907 - DNA, 201 bp, Homo sapiens
cagcacttagcctagcacccagcacagtaagtgccccttatacagccaggattcatgttacttttcatggaaaatgggggcagtgactactgtcctccatraaagctgctggggagaattagcctagctattgcaggctgggattgctgctttcctggtgctatttccagctactcaggctcacaggggcagttttctaca

SEQ ID NO: 296908 - DNA, 201 bp, Homo sapiens
cgcacaccaactatcagtgaccgtaaccgtctcctcctgctggaggccaccatccgagaggtgcttcgcctcaggcccgtggcccctatgctcatcccccwcaaggccaacgttgactccaggtgtgcctgccctcccagtgacatctagccccatgatgcattcaacactgcttgccagcccacctggctccccctaccc

SEQ ID NO: 296909 - DNA, 201 bp, Homo sapiens
ccactctggagcagcatcggtgagtttgctgtggacaagggcacagaagttatcatcaatctgtgggcgctgcatcacaatgagaaggagtggcaccagcsggatcagttcatgcctggtgagtctgtcctgtcctgcgccctgggccacacagcgagcctggactctgctccaccaccccagtaccccttcacctctgcc

SEQ ID NO: 296910 - DNA, 201 bp, Homo sapiens
gtgccaggctggcccctggggctggggctggatcccacaggagctgctggagggagaggagggttgggcaggggtaagggttaggactagagcgcaatgcmgccttttcttggctactgctgccatctagtggccatctgctatctgtcccccgctcctgttaagaggcaactggtacagagagggggtaagggtgctgat

SEQ ID NO: 296911 - DNA, 201 bp, Homo sapiens
tccctgggcagggccatgtctccccctcaaccagggcagaaccatgcctctcctccctcctgccctaacccctggctgatgccactccttgcctgcagagygtttcttgaatccagcggggacccagctcatctcaccgtcagtaagctatttgcccttcggagcaggacctcgctcctgtataggtgagatcctggcccg

SEQ ID NO: 296912 - DNA, 201 bp, Homo sapiens
tgggcagggccatgtctccccctcaaccagggcagaaccatgcctctcctccctcctgccctaacccctggctgatgccactccttgcctgcagagcgttkcttgaatccagcggggacccagctcatctcaccgtcagtaagctatttgcccttcggagcaggacctcgctcctgtataggtgagatcctggcccgccag

SEQ ID NO: 296913 - DNA, 201 bp, Homo sapiens
taaagagccatgttaaaatacgaaatgatctgctgaataaaatacttgaaaattacaaggtaggtgatagagcagaagagaatatgagttaggctaaaagkaatcacaagagcagggtggagtccattctacacactgtagaagcttcaaaaccaagcagagaacctggcacatagtaggtgtacaataaaaactgactta

SEQ ID NO: 296914 - DNA, 201 bp, Homo sapiens
gaaccatgcctctcctccctcctgccctaacccctggctgatgccactccttgcctgcagagcgtttcttgaatccagcggggacccagctcatctcaccrtcagtaagctatttgcccttcggagcaggacctcgctcctgtataggtgagatcctggcccgccaggagctcttcctcatcatggcctggctgctgcaga

SEQ ID NO: 296915 - DNA, 201 bp, Homo sapiens
aactgcaaattcaccctccaagaagccctctacgcctctgtctgccattaagtctgtcccttctcccctcggatggtgctattttcataggttaattccayctcttttccatccttcctgaatatttcatttcctctgtgtcgttaagggctacctgaaagcagggctgtatctctccccaggcgggttccccataataag

SEQ ID NO: 296916 - DNA, 201 bp, Homo sapiens; identical to SEQ ID NO: 61541

SEQ ID NO: 296917 - DNA, 201 bp, Homo sapiens; identical to SEQ ID NO: 61542

SEQ ID NO: 296918 - DNA, 201 bp, Homo sapiens
gccactgtgccctgccagcctctcagctttgatcaagccaagggttggtttattttttcttggaccaatcagccaggtctgctgaccaactacctagctcscacctctgctggcttcctcccgggggcagagaagatggagaaggctagtcatgtggatcttcagggtcaggaaatggaaaagggaggctttggacccttt

SEQ ID NO: 296919 - DNA, 201 bp, Homo sapiens; identical to SEQ ID NO: 61543

SEQ ID NO: 296920 - DNA, 201 bp, Homo sapiens; identical to SEQ ID NO: 61544

SEQ ID NO: 296921 - DNA, 201 bp, Homo sapiens
ggctgatgccactccttgcctgcagagcgtttcttgaatccagcggggacccagctcatctcaccgtcagtaagctatttgcccttcggagcaggacctcrctcctgtataggtgagatcctggcccgccaggagctcttcctcatcatggcctggctgctgcagaggttcgacctggaggtgccagatgatgggcagctg

SEQ ID NO: 296922 - DNA, 201 bp, Homo sapiens
caacactgcttgccagcccacctggctccccctacccccggcccctgctggccaacctaaagtcagtcaaccatcaactactaaaaatcatcctgccggcygggcacggtggctcacacctgtcatcccaacactttgggaggtcgaggcgggtggatcatgaggtcaggggttcaagaccagcctgaccaatatggtgaa

SEQ ID NO: 296923 - DNA, 201 bp, Homo sapiens
attgggagtaggaggccttagggtctgtcctaccaagtccttgcagtcatggtggagtgcagtggggctgtgcccacatgggagtcagcatgccaggtacytgccttctcctccaggaaggaaagcagggaccagaggtgtaagggcaagagtggggtggatggtgtgagattcctacagccttgcctgctctctaaaggc

SEQ ID NO: 296924 - DNA, 201 bp, Homo sapiens
ccagctccaacaacctgtaattcttcccaaagtagactagtgggatgatgtgaagggagtgaaccttcagacccccacccagcctctaaattaggcaggawgaattaaaggaatgtctcctctaccaggctgcccaggaggtgggatgggaggaccacagtggtctgaggggtcaaggaatcctcactccactcctctctc

SEQ ID NO: 296925 - DNA, 201 bp, Homo sapiens; identical to SEQ ID NO: 278117

SEQ ID NO: 296926 - DNA, 201 bp, Homo sapiens
ggacaggcatagtttagagagtttatcccatccagagttgccttcctgtggtcagaaactgatgagcaaaaagaagcccagagggcaccctgtcagcgaamagaaccccaatgctgctgcattctaattaagggttctttctttctccttgatctactgtatttctgaaggaattgggagtaggaggccttagggtctgtc

SEQ ID NO: 296927 - DNA, 201 bp, Homo sapiens
tccagctccaacaacctgtaattcttcccaaagtagactagtgggatgatgtgaagggagtgaaccttcagacccccacccagcctctaaattaggcaggwagaattaaaggaatgtctcctctaccaggctgcccaggaggtgggatgggaggaccacagtggtctgaggggtcaaggaatcctcactccactcctctct

SEQ ID NO: 296928 - DNA, 201 bp, Homo sapiens
ctcagctttgatcaagccaagggttggtttattttttcttggaccaatcagccaggtctgctgaccaactacctagctcccacctctgctggcttcctccygggggcagagaagatggagaaggctagtcatgtggatcttcagggtcaggaaatggaaaagggaggctttggacccttttgctttggggggcacctctag

SEQ ID NO: 296929 - DNA, 201 bp, Homo sapiens
agtggtgcccatctcctccctgcccccttcaccaccccctgggattgttcaggtcttcagaccatgcctagaatggggcttccagctccaacaacctgtawttcttcccaaagtagactagtgggatgatgtgaagggagtgaaccttcagacccccacccagcctctaaattaggcaggaagaattaaaggaatgtctcc

SEQ ID NO: 296930 - DNA, 201 bp, Homo sapiens
tcagggttccctgggcagggccatgtctccccctcaaccagggcagaaccatgcctctcctccctcctgccctaacccctggctgatgccactccttgccwgcagagcgtttcttgaatccagcggggacccagctcatctcaccgtcagtaagctatttgcccttcggagcaggacctcgctcctgtataggtgagatcc

SEQ ID NO: 296931 - DNA, 201 bp, Homo sapiens
ctatttccagctactcaggctcacaggggcagttttctacaatgacatttcagggttgctgatgagcctcccactcagcagggcccccagcctctcagcattttttttttttttttttttttttgagacagagtctctctctgtcgcccagcctggagtgcagtggccaatctcagctcactgcaacctctgcctcccggg

SEQ ID NO: 296932 - DNA, 201 bp, Homo sapiens
ctgggcttacacacactagtcacctccaacctactctggtcttcaggtgaagaagaagctctacgaggagattgaccagaatgtgggtttcagccgcacamcaactatcagtgaccgtaaccgtctcctcctgctggaggccaccatccgagaggtgcttcgcctcaggcccgtggcccctatgctcatcccccacaaggc

SEQ ID NO: 296933 - DNA, 201 bp, Homo sapiens
accctcatcctgccatagacttacccaaactcttcacagctgggtttcccacgctcttcttccaaccaactgcaaattcaccctccaagaagccctctackcctctgtctgccattaagtctgtcccttctcccctcggatggtgctattttcataggttaattccacctcttttccatccttcctgaatatttcatttcc

SEQ ID NO: 296934 - DNA, 201 bp, Homo sapiens
agaagcttcaaaaccaagcagagaacctggcacatagtaggtgtacaataaaaactgacttaagggctgggcgcggtggctcacgcctgtaatcccaacaytttgggaggccgaggtgggcagatcacctgaggttgggagttcgagaccagcctgaccaacatggagaaactctgtctctactaaaaatacaaaattagc

SEQ ID NO: 296935 - DNA, 201 bp, Homo sapiens; identical to SEQ ID NO: 61527

SEQ ID NO: 296936 - DNA, 201 bp, Homo sapiens
gattctgtctcaaaaaaaaaaaaaaaactgactcaaggagttgggatcgaaaagtgaggaactgaagaggatcctagaagagacctaacctctccaccaawtttaaagagggcccggggctgcctcctacctccacaagttcgtaggtcctgcccagacttgctctacttccaagtggaaggagccttgttatctctagtc

SEQ ID NO: 296937 - DNA, 201 bp, Homo sapiens
gccctgggccacacagcgagcctggactctgctccaccaccccagtaccccttcacctctgccaagcttgctgctagaaaactcttggctccaactatacsgacctgttgacaccctcatcctgccatagacttacccaaactcttcacagctgggtttcccacgctcttcttccaaccaactgcaaattcaccctccaag

SEQ ID NO: 296938 - DNA, 201 bp, Homo sapiens
accaagcagagaacctggcacatagtaggtgtacaataaaaactgacttaagggctgggcgcggtggctcacgcctgtaatcccaacactttgggaggccraggtgggcagatcacctgaggttgggagttcgagaccagcctgaccaacatggagaaactctgtctctactaaaaatacaaaattagccgggcacggtgg

SEQ ID NO: 296939 - DNA, 201 bp, Homo sapiens
tgggagtaggaggccttagggtctgtcctaccaagtccttgcagtcatggtggagtgcagtggggctgtgcccacatgggagtcagcatgccaggtacctsccttctcctccaggaaggaaagcagggaccagaggtgtaagggcaagagtggggtggatggtgtgagattcctacagccttgcctgctctctaaaggcaa

SEQ ID NO: 296940 - DNA, 201 bp, Homo sapiens
tgtcctgcgccctgggccacacagcgagcctggactctgctccaccaccccagtaccccttcacctctgccaagcttgctgctagaaaactcttggctccwactatacggacctgttgacaccctcatcctgccatagacttacccaaactcttcacagctgggtttcccacgctcttcttccaaccaactgcaaattcac

SEQ ID NO: 296941 - DNA, 201 bp, Homo sapiens
gggggcagagaagatggagaaggctagtcatgtggatcttcagggtcaggaaatggaaaagggaggctttggacccttttgctttggggggcacctctagraggaggcagctcggcccaagtccagactgggtagacaaaacatctgcactctccaaatgtgggcttgtggctgggtatgcaggcttgcaatggaagggta

SEQ ID NO: 296942 - DNA, 201 bp, Homo sapiens
tggccttcctgctgcacaatcctcaggtgtgcttccccctcattgatcctagaccccagccagcccaatctctgggctccagagaaagggagagccaattstctcaggctttctgtgcaggaagactaggcctgccctgctccttacccaagcagtagttggctttgaccccagagtagagctgccccatcttctggaagc

SEQ ID NO: 296943 - DNA, 201 bp, Homo sapiens
cccttcagtttgtcaggaaatcagtacattgtgtgatatgctggccacccacaacggacagtccatagacatctcctttcctgtcttcgtggcggtaaccratgtcatctccttgatctgcttcaatacctcctacaagaatggggaccctgagttgaatgtcatacagaattacaatgaaggcatcatagacaacctgag

SEQ ID NO: 296944 - DNA, 201 bp, Homo sapiens
agaagatggagaaggctagtcatgtggatcttcagggtcaggaaatggaaaagggaggctttggacccttttgctttggggggcacctctaggaggaggcrgctcggcccaagtccagactgggtagacaaaacatctgcactctccaaatgtgggcttgtggctgggtatgcaggcttgcaatggaagggtaaacctgag

SEQ ID NO: 296945 - DNA, 201 bp, Homo sapiens; identical to SEQ ID NO: 61538

SEQ ID NO: 296946 - DNA, 201 bp, Homo sapiens
gagtgagtgggaatgagggagtaaagggcattttcctcacggcggaagaatgagggggcatgaggctgagcaaggaagggagtacgaagtcccagacccamttttcctcttccactctggagcagcatcggtgagtttgctgtggacaagggcacagaagttatcatcaatctgtgggcgctgcatcacaatgagaaggag

SEQ ID NO: 296947 - DNA, 201 bp, Homo sapiens; identical to SEQ ID NO: 61539

SEQ ID NO: 296948 - DNA, 201 bp, Homo sapiens
gtaaactgacatggcacactggcaggcatgtcatggaaagctgcttctgcccccctacctgttttagctagtccttaatttggttccatgtccgagccccrcctcctacctcaagaggactgaatcaaatgctctaaatcacttggttaattggcccaatgatagtaaataaattctatctccttatgcagaaggaagccc

SEQ ID NO: 296949 - DNA, 201 bp, Homo sapiens
tggaggccaccatccgagaggtgcttcgcctcaggcccgtggcccctatgctcatcccccacaaggccaacgttgactccaggtgtgcctgccctcccagkgacatctagccccatgatgcattcaacactgcttgccagcccacctggctccccctacccccggcccctgctggccaacctaaagtcagtcaaccatcaa

SEQ ID NO: 296950 - DNA, 201 bp, Homo sapiens
tacaatgaaggcatcatagacaacctgagcaaagacagcctggtggacctagtcccctggttgaaggtgagatgctgccagccctgccttcaggttctagyagaccctgacattgtccccaatcttccttcctttttacttccctgctccagccgcaatgacccatctttttcctgattacctccgccacctctacctcct

SEQ ID NO: 296951 - DNA, 201 bp, Homo sapiens
ggagaggagggttgggcaggggtaagggttaggactagagcgcaatgcagccttttcttggctactgctgccatctagtggccatctgctatctgtccccygctcctgttaagaggcaactggtacagagagggggtaagggtgctgattcatttcccaccctcatgccccctctcccttcagtttgtcaggaaatcagta

SEQ ID NO: 296952 - DNA, 201 bp, Homo sapiens
cggatcagttcatgcctggtgagtctgtcctgtcctgcgccctgggccacacagcgagcctggactctgctccaccaccccagtaccccttcacctctgcmaagcttgctgctagaaaactcttggctccaactatacggacctgttgacaccctcatcctgccatagacttacccaaactcttcacagctgggtttccca

SEQ ID NO: 296953 - DNA, 201 bp, Homo sapiens; identical to SEQ ID NO: 61547

SEQ ID NO: 296954 - DNA, 201 bp, Homo sapiens
tagtcacctccaacctactctggtcttcaggtgaagaagaagctctacgaggagattgaccagaatgtgggtttcagccgcacaccaactatcagtgaccrtaaccgtctcctcctgctggaggccaccatccgagaggtgcttcgcctcaggcccgtggcccctatgctcatcccccacaaggccaacgttgactccagg

SEQ ID NO: 296955 - DNA, 201 bp, Homo sapiens
cacataacccctaaacatccccgtggcacaggccatgtagacctgtcctgaagctgagaaaattggggccaagtgaggccatgcaacttgcccagcatccyctagccagaaaagatgggactgaaatcagaccttgagtgcagaaatgcttttgaagcttcaagtaaaatattgtaaaaatattgggtccaaccagtttta

SEQ ID NO: 296956 - DNA, 201 bp, Homo sapiens
  misc_feature (1)...(201): n = A,T,C or G
gacgggaggatctgttcattgccactaaggtagggcttctctatgcaaggctggcagagcttgggtaatgctacatctctggagggctttctactttcttnatgggagttgatgactttgtttcatactcaaatcggaataaacaagaatattcacagcttcatgagcatgctgaattatattgtgtgcaggtttgtttca

SEQ ID NO: 296957 - DNA, 201 bp, Homo sapiens
acctgagatgtggggtttgtggagcaaacaaggaatcaatacccgaagaactcagagacctcagtgactttcttgttacctttggtttggtatggtgcagytctcttgacacatttgaggggtagctcattatagacctcactttttttctcaaatatttatttatttttttattaaaaaccatatttatttcagaaaata

SEQ ID NO: 296958 - DNA, 201 bp, Homo sapiens
aactaaggctttgtatctagtttccataaacgatgtgggcagctgtccgttagtgacactgactaagaggggaagatacccagagggcaaaaccagagtgwtgtctgtgccttgaaattcattgcatgcagaaaatcataattaaaacaatggctacagctgtattacactcattgccagccagcattgttgtaattatgt

SEQ ID NO: 296959 - DNA, 201 bp, Homo sapiens
catgcttgccagacatcaggaggaataggaacaagaagagctcacatgtgtcgagtactggacgccagccttagctgacacttcctgtgattccacataasccctaaacatccccgtggcacaggccatgtagacctgtcctgaagctgagaaaattggggccaagtgaggccatgcaacttgcccagcatcccctagcca

SEQ ID NO: 296960 - DNA, 201 bp, Homo sapiens
atcctgtgtgggtctccacccaggatgcagtgagccctgagctgcttgtgttcaaagacatcaaggttgtctacctgagatgtggggtttgtggagcaaamaaggaatcaatacccgaagaactcagagacctcagtgactttcttgttacctttggtttggtatggtgcagttctcttgacacatttgaggggtagctca

SEQ ID NO: 296961 - DNA, 201 bp, Homo sapiens
ttgtattctcacttccttacctgtcatcatgatggggattctaagaaagaagacaagaccctaacagtggagttaggagagggttgattgggctctataaracatgaagaaaatgcactcctcacccattctttacccgaaattagtaaactattttctggaggcaatgggagaggacaaccttgcatcagtaaggataca

SEQ ID NO: 296962 - DNA, 201 bp, Homo sapiens
acccttaacatgctacgtgggagtacatgagggaggtagctggattgcacgtcagtgcttctctgaaagatgactttaggttcttgccctttcaagatgtwtctctctgccctctacctcctgtgtacctttgtattctcacttccttacctgtcatcatgatggggattctaagaaagaagacaagaccctaacagtgga

SEQ ID NO: 296963 - DNA, 201 bp, Homo sapiens
tgcggcatttgggcagtcctcttgatatctctgggcctcagttaaggagaggcttggcttgacctctgaggcccccacaggtctgtctttcaagccagtckctttttttccaagccaagagagcagtagatttttttcccttaggtttttaggtgaaagcagtgatcagatgaggaaatactgctgctcagagaaagttcc

SEQ ID NO: 296964 - DNA, 201 bp, Homo sapiens
aaagatgggactgaaatcagaccttgagtgcagaaatgcttttgaagcttcaagtaaaatattgtaaaaatattgggtccaaccagttttagaataccatrcagaactgctgagggacgtagattgtcagtgcagtagacagaagcttcacacccagcagagtcgttctcttataggccatggaggacctggtgatcaccg

SEQ ID NO: 296965 - DNA, 201 bp, Homo sapiens
ggagaaactctgggtgtggaggaagcagcttgagcacaggcataaggcaggaagcagcacggcaggtgcaggggtttgtaggaagcttggtgtattagtcygttctcatgctgctgtacgaacatacctgagactgggtagtttataaagaaaaagaggtttaattgactcacagtttcacatagctggggaggcctcaca

SEQ ID NO: 296966 - DNA, 201 bp, Homo sapiens
tgtttggttgcatggaaaagttatttagtggtgatttctgatattctggtgcacccatcaccagagtagtgtacattgtgcccaatgtgtagtcttttatstctcactcccctcccagccttccccctgagtccccgaagtccattatataattcttatgtctttgcaatgacttttaaaatacaacatcaaagggatgag

SEQ ID NO: 296967 - DNA, 201 bp, Homo sapiens
cagtgcagtagacagaagcttcacacccagcagagtcgttctcttataggccatggaggacctggtgatcaccgggctggtgaagaacatcggggtgtcaracttcaaccatgaacagcttgagaggcttttgaataagcctgggttgaggttcaagccactaaccaaccaggtaagccgatggaagcatcagagagttta

SEQ ID NO: 296968 - DNA, 201 bp, Homo sapiens
gattgttcttagtgttggtgagacatctatgaacaaaacaaattcaaacaaaaatctctatcttcatgaggcttagatcttggtgacacagaaagacagtragcaaatatgtaaaatctatgagatgtcagatagtgatagatgctgtagaggaaaataaaggccgggggagatgagagctatggtgtgttaacaatcttt

SEQ ID NO: 296969 - DNA, 201 bp, Homo sapiens
agagaatatccaggtaggtgtattccttcttttatttggcgggtttcagatcatgtgttagatgggaagggatgactgctgtagcatacagcctcagggtygcggagcttgatgcagcaggggcttctccctctgcactgtgggtgttggtggttgaccttccctcagcgatcaaaggacccaggctccttccatcttagg

SEQ ID NO: 296970 - DNA, 201 bp, Homo sapiens
gctgcaaggctgcctaccctttataaggagtcttctagaactgcttgctgttccccttaaacccaagaatccgcctaccccggccccagcactccccactmcctccagatgacacgctgaggctactttctcctgccctcaggaggggaaggctcttgtggggaagagcctggggtgctccaggtccttgcattggaatca

SEQ ID NO: 296971 - DNA, 201 bp, Homo sapiens
gttgaggcagtaactaactgctgcgtgttggcccattggtcactcaggacttgctgctgactacggaccctggcacgaagctatgctcttcctgaagctcmggggcagcctggcttgctggtcagtgaccagctcagagctttaggttgctctgccctaaagtgtcttaaaatagtaagtggagaaggtgggataggagaa

SEQ ID NO: 296972 - DNA, 201 bp, Homo sapiens
agccagtcaggaagccctgcgttcatgcttccagccattgtcggagtgtcagccgtcacaaggcacttccagccagtcgcaacggcgggtcgccagcgcckcagtagctcgcgcggtgcctgtcggtagtcgcgtgcggggcggcggggcggcggggcggccggcggcggccatgggagatatcccagccgtgggcctcag

SEQ ID NO: 296973 - DNA, 201 bp, Homo sapiens
acattaaaaattttattttcctggcacccagcagtaaccactgttaatgttttatagttcctttttctctcaagcatttcagaatgataaagttggcagcrtggaagctcaggctggggaggtgagaccagtgtcggggaaggttaccaagtgtcagcccatttccagggttcagaccaaaaacagccctttactgcaggg

SEQ ID NO: 296974 - DNA, 201 bp, Homo sapiens
ccgaagtgatctgatggctgaggacagacagcagcggcgggttaggaggggccggaggaagtgcttatgctgtcaggaggaggtgggagccaggtccacargactcaccagggaggagaaaggcatccagtgcagggggctgccccggcccgccccctgtggccccagtgccgctcagaactgctgctgcaaggctgccta

SEQ ID NO: 296975 - DNA, 201 bp, Homo sapiens
ggcaggaggccaggtaggagacattaacagcagtgcaggtggaagatgatgaaggcctgcactggcacagtgggtgagggagggagaagaggaaatggatktggagggtattgggagtcaggacctgtggaagatgcagagtggactacgatagtggagaattcaagaattcctttgcttttgatttggaagcagaatgtt

SEQ ID NO: 296976 - DNA, 201 bp, Homo sapiens
gcatccaatttgcttttattttacttatgaattttgcaacggtattcatgaataagatgaatgtgtgacttttaatatttttgtctgattttgattcaggrttatgctagttttgtagaatgagttgagataagtccgtctttttctgttgtttgaaagtctgtgttaaactgagatgatttttttcttgaaaattttatg

SEQ ID NO: 296977 - DNA, 201 bp, Homo sapiens
ttaattcttttccccgacttactgggagtttagattttgaatctaaactggtattgaatcttaacaaatattgattgagttgacttttgtttttgtacttyaatctgttaatattgatgaattacagattttctaatatcaaaccatccttagatatctgagatacactcaacatgggtgtggtatattatcttttcataa

SEQ ID NO: 296978 - DNA, 201 bp, Homo sapiens
ccatacagaactgctgagggacgtagattgtcagtgcagtagacagaagcttcacacccagcagagtcgttctcttataggccatggaggacctggtgatyaccgggctggtgaagaacatcggggtgtcaaacttcaaccatgaacagcttgagaggcttttgaataagcctgggttgaggttcaagccactaaccaacc

SEQ ID NO: 296979 - DNA, 201 bp, Homo sapiens
aatattgatactctttatcagattaattcttttccccgacttactgggagtttagattttgaatctaaactggtattgaatcttaacaaatattgattgarttgacttttgtttttgtactttaatctgttaatattgatgaattacagattttctaatatcaaaccatccttagatatctgagatacactcaacatgggt

SEQ ID NO: 296980 - DNA, 201 bp, Homo sapiens
tggattttctacacaaatgatcatatcatcagcaaataatggtagtttactttcctttttttccagtctttaagcttaaaattgcttcttcttagttgttyaggtgcttctggaaagcacctccagcacagtggccattcttgttttgtacctgattttaaaggatgtaagatggatattttttaatattgatactcttta

SEQ ID NO: 296981 - DNA, 201 bp, Homo sapiens
gtgttatactactggaaattatatttctctgaaattacattttctacttgtttcacctgctatattcattacacttccagccactttactaaactgtactrttatttctgttaatttgtgttacatttgtttggattttctacacaaatgatcatatcatcagcaaataatggtagtttactttcctttttttccagtctt

SEQ ID NO: 296982 - DNA, 201 bp, Homo sapiens
gagcttcccttgaggaggagtcaggcagaaggatcccagctttggagcctctccctgcaggtgtcctggaactcttctgaggataatgtccctgtcctccyatcagaacttgccgtgttgtatttgtggtcatctcatcttggctattttgggttcaagacagtagctttgtggggctacagaatgggtgccatgctggct

SEQ ID NO: 296983 - DNA, 201 bp, Homo sapiens
gactgtgagaagacactttgttttgttggttttgcaggcttctccagggaaagtgaccgaggcagtgaaagaggccattgacgcagggtaccggcacttcractgtgcttacttttaccacaatgagagggaggttggagcagggatccgttgcaagatcaaggaaggcgctgtaagacgggaggatctgttcattgccac

SEQ ID NO: 296984 - DNA, 201 bp, Homo sapiens
tgcaggtgtcctggaactcttctgaggataatgtccctgtcctcccatcagaacttgccgtgttgtatttgtggtcatctcatcttggctattttgggttyaagacagtagctttgtggggctacagaatgggtgccatgctggctctgggtgggcacgtgtgacgctggtcccctctcctttgtagctgtggtgcacctg

SEQ ID NO: 296985 - DNA, 201 bp, Homo sapiens
tgatttttttttctgtcgtaatccatttatgactaaaaaacatgatgctttttgtttttgagatagagtctcgctctgtcacccagggcagagtgcagtgkcacagtcttggctcactgcaacctctgcctcccaggttcaagcgattctcctgcctcagcctcctgagtagctgagattacaggcatgcgccaccacgcc

SEQ ID NO: 296986 - DNA, 201 bp, Homo sapiens
gtaagttttagaactagcttagaaggttccatgagaaactttattggggttttgattggaactacattaaatctgtagaccagcttggagataattgacayctttgtaatgttaaatcttaacttttctacaagcatggtattcttctctgttaataaattgtcctgaatatggttcatttctaacatcttttcatatggt

SEQ ID NO: 296987 - DNA, 201 bp, Homo sapiens
ggaattcgtgctggcctgcaagcaccacgcgcagccccaattcccaccggcgtctctccctccacacctccccgcaagctgagggagccgactccggcctyggccagcccaggaaggggctcccacagtgcaacggtgggctgaagggctcctcaagtgccgccaaagtgggagcccaggcagaggaggcccggagagcta

SEQ ID NO: 296988 - DNA, 201 bp, Homo sapiens
attctagtcttctttgttctaatgtccagtggggggctgggcgcatgttaaggaattctcattaagcagattctctgatctcctccttgggctgatggctktcattaccaacatattgacagagctgctcagtgaatgccagtaacaatagctgctgtcattgattcttggactcttactgcatgataaaactcacatgtt

SEQ ID NO: 296989 - DNA, 201 bp, Homo sapiens
ttaccgtcctcttggtggctcgtggtaaggatacctcagtggtgtgttagtcagagtccgactgggaagtagatgccaccttctcatttccttgggatgaytgagggagggcttaatggaggttttgacagggtgtggagggatggtactatagggggctgtccacacctctcaagcctgggattgaaggcatggtttatt

SEQ ID NO: 296990 - DNA, 201 bp, Homo sapiens
caagactttgacgcaggtcttctcttgtagagcttttcttgaacactagtggtctgaattttatgtaagctatgattctgttatagattgagtgccacccrtatcttactcagaagaatctgatcagtttttgccaatccagagatgtgtccgtgactgcttaccgtcctcttggtggctcgtggtaaggatacctcagtg

SEQ ID NO: 296991 - DNA, 201 bp, Homo sapiens
gctggcctcttggagattgctctgtccagactcctcacaacagaaacacttaggcctggagctgggccccatggctactcggtgacagccaagactttgaygcaggtcttctcttgtagagcttttcttgaacactagtggtctgaattttatgtaagctatgattctgttatagattgagtgccacccatatcttactca

SEQ ID NO: 296992 - DNA, 201 bp, Homo sapiens
agacctccagccattcagccacctaagccagaagcttggaaatcatcccttcccacatcccgagtccaatccagcaccaaaatctattgattattctgccmggagaagttggactttgtttcatgatttcatttctgccatcactgtcactgccttagttaagtagcattcccgaggtcattagaggagcccctcagctcc

SEQ ID NO: 296993 - DNA, 201 bp, Homo sapiens
aactacattaaatctgtagaccagcttggagataattgacacctttgtaatgttaaatcttaacttttctacaagcatggtattcttctctgttaataaaytgtcctgaatatggttcatttctaacatcttttcatatggttgtatagtttttcctgaagagaatatatgtcttttgttggaattattattgggttcttg

SEQ ID NO: 296994 - DNA, 201 bp, Homo sapiens
tgcagggggctgccccggcccgccccctgtggccccagtgccgctcagaactgctgctgcaaggctgcctaccctttataaggagtcttctagaactgctygctgttccccttaaacccaagaatccgcctaccccggccccagcactccccactacctccagatgacacgctgaggctactttctcctgccctcaggagg

SEQ ID NO: 296995 - DNA, 201 bp, Homo sapiens
caggtgcctcacccttatccaggaacatgggcctcccctctacctcttcccagcctgcagactgcagcaagaaagagtggatgactagatggcttcacgcsaggctcacaggctgctgaaggtgatgcaggcacttcgtttttttaatgcagagaaaagacttgtggggaaataactattgtattttctagactagctttg

SEQ ID NO: 296996 - DNA, 201 bp, Homo sapiens
gtctgtgtaagtgagaaacacaagatagagattcttctgatttttcgtcatatcttttctgcctgcaggaatttcattttcgtttttgtttttggtcccartgaatccaaataaccatcaaatatctcttggattcctgagcttcccttgaggaggagtcaggcagaaggatcccagctttggagcctctccctgcaggtg

SEQ ID NO: 296997 - DNA, 201 bp, Homo sapiens
gggccaaagccgaagtgatctgatggctgaggacagacagcagcggcgggttaggaggggccggaggaagtgcttatgctgtcaggaggaggtgggagccrggtccacaagactcaccagggaggagaaaggcatccagtgcagggggctgccccggcccgccccctgtggccccagtgccgctcagaactgctgctgcaa

SEQ ID NO: 296998 - DNA, 201 bp, Homo sapiens
atgtaaaggagttggaacttagattattcataaattccttcataactgatattgcctgtttttagactgattatactagtaccaaattagtgacttaattytttatgtattatgttgtccacatgcttgggtgaaaggggagatttgtgttggattcctctgactgtgagaagacactttgttttgttggttttgcaggct

SEQ ID NO: 296999 - DNA, 201 bp, Homo sapiens
aggtggtattggaacattcagatgatgtaggtgtccccaaggccgtggactcagagaccatgacacctgctggcctcttggagattgctctgtccagactyctcacaacagaaacacttaggcctggagctgggccccatggctactcggtgacagccaagactttgacgcaggtcttctcttgtagagcttttcttgaac

SEQ ID NO: 297000 - DNA, 201 bp, Homo sapiens
ctgggctcttcattattaggggccacttgatccatctgtgtgcctgatcggtgctgtcttaattactacagttccttgataagcgcccatacctagtaggrcaggtcacctctccctgctgttgtagatttacagtgtacaatttgatgagttttgacagatgcatgtacctgggtcctggctttttattttggcacctta

SEQ ID NO: 297001 - DNA, 201 bp, Homo sapiens
agtgaccgaggcagtgaaagaggccattgacgcagggtaccggcacttcgactgtgcttacttttaccacaatgagagggaggttggagcagggatccgtkgcaagatcaaggaaggcgctgtaagacgggaggatctgttcattgccactaaggtagggcttctctatgcaaggctggcagagcttgggtaatgctacat

SEQ ID NO: 297002 - DNA, 201 bp, Homo sapiens
gacttcctggacacgtgggaggtgagctgagccacaccaccaggcagcctcatcctgtgtgggtctccacccaggatgcagtgagccctgagctgcttgtrttcaaagacatcaaggttgtctacctgagatgtggggtttgtggagcaaacaaggaatcaatacccgaagaactcagagacctcagtgactttcttgtta

SEQ ID NO: 297003 - DNA, 201 bp, Homo sapiens
agcagcaagtgtattcctcccacacgggaggtcaggagagcagctctgtggaccttggctgggctcagttgggatggttggggctactccacttggctccrcacatctcctgtcctcgtgcggttagttagggagtgttctcaagatgatggctgaagcacaagagagcaaggggagcagtgagatgtctggagacctcag

SEQ ID NO: 297004 - DNA, 201 bp, Homo sapiens
cttgtctatttttaatagtgaataaacatcacagacctatccgttatctgttgccccagaaatgctgcatcaatggccaaacaccagacctcagtggtgtrcagcagcaagtgtattcctcccacacgggaggtcaggagagcagctctgtggaccttggctgggctcagttgggatggttggggctactccacttggctc

SEQ ID NO: 297005 - DNA, 201 bp, Homo sapiens; identical to SEQ ID NO: 61575

SEQ ID NO: 297006 - DNA, 201 bp, Homo sapiens
aattagaaataaataaatcacacatataagcaccacatggagacaactgtgattaacaatggaatacatttacttccagcattcatttttttatttttgtsaagatactgtgctcgtttgttttcatttatttgattcccctttcttttactttcttttactttactttcttttactttactttcatgtttttcccttgct

SEQ ID NO: 297007 - DNA, 201 bp, Homo sapiens
ccagggaaagtgaccgaggcagtgaaagaggccattgacgcagggtaccggcacttcgactgtgcttacttttaccacaatgagagggaggttggagcagkgatccgttgcaagatcaaggaaggcgctgtaagacgggaggatctgttcattgccactaaggtagggcttctctatgcaaggctggcagagcttgggtaa

SEQ ID NO: 297008 - DNA, 201 bp, Homo sapiens
agcgccggtgggccagcactgctgggggacctagcacgccctcctcagccgctggcccgagtgctaagcccctcattgcccagggccagcagggcttgccrgccgctccgagtgccgggcccaccaagcccacacccacccggaattcgtgctggcctgcaagcaccacgcgcagccccaattcccaccggcgtctctccc

SEQ ID NO: 297009 - DNA, 201 bp, Homo sapiens
tgtttttcagaactaaaaatcacaaagactatcctttccacatagaatactgaggacgcttccccttccttgtttctgctcagcccagatgcacagacacyattggcaatgttgaccctcctctgtcatcacagcgccagggcagctgtgcctgggacaggagccacacagtcagagggggatgtaagagccaccttctct

SEQ ID NO: 297010 - DNA, 201 bp, Homo sapiens
tctcctaagcgtgcactcaggagaaaggggaggcagttggtggacaggtcaccacctctgtcgcatggaggcatgcccacgtggcctgagggcactgctttgagttgtgtgggaagattctggtcctgactcctgtctagtgacttctgagaggcaggagtgaagactggaacaggtggagcgtgtgcagaacacagagag

SEQ ID NO: 297011 - DNA, 201 bp, Homo sapiens
agtcgggggagtcaaagcttgagagcccactggctgcatgcgctgacatggccacctggtttttgaggagaaacaccaaatacacatgaaaagtgatgtcrtgtagccttgttcaccaaagtgttagcagtggttatctccatactggaaatgtggggcgatgtgcttttctgcattttaaaatttcctgtagtcggcatg

SEQ ID NO: 297012 - DNA, 201 bp, Homo sapiens
taacatcctcagcctaaacaggaatctccgactggccatgttccccatgtaaatatggctccttctttttaaaacagagggaagaatatacagattgaatkattggtgtctgaataggtatttatcatacacattttagattaattaaaccttctcattataattctttcctgtttgaagatgagccactgaatgaagcta

SEQ ID NO: 297013 - DNA, 201 bp, Homo sapiens
cccaggctccttccatcttagggccctttctcccctagggtgttggtgtcttctccatccagcccaagattaggaaggagggaagagcatcttgttgggawgatttgtgtgggccaggctggagcatgtgcaccagtcacatggctgcgctcgcccacaggggaggctggatgtctcctaagcgtgcactcaggagaaagg

SEQ ID NO: 297014 - DNA, 201 bp, Homo sapiens
ctaggaagaatgcattgttactgcgaccagtatcattgccattgcctcattcctcagtttctcatccacctccctgcccagccttccagatgtgcagggaygtgtagaaaccttctagcttggcctcaagagaggactttgctgcgggtgtcaccaaaacgaaaagacatgactggtgcaagagcttcatgggagcctcgc

SEQ ID NO: 297015 - DNA, 201 bp, Homo sapiens
aagggcatttggggaatccaggctgtgattcagggaagttccaagtgtctgatgaagtgtttgttttacatctttgtgtcccttgcaggtctagcactgtrctatgtaggtaacatgtgctccattaaatgtgaattaaactaagttttctacaaacattgtgttttggttccaggtgtttgattttgaattaacacagca

SEQ ID NO: 297016 - DNA, 201 bp, Homo sapiens
tcactcaagccatgtactcttgcctccgagcctgtctagactcagaggaggagtttccaggccttctccctctgccccaccaactgcatgcatggttagtmtgagatggtacagaaaagttatttattctagtcttctttgttctaatgtccagtggggggctgggcgcatgttaaggaattctcattaagcagattctct

SEQ ID NO: 297017 - DNA, 201 bp, Homo sapiens
actgaatgaagctaatttcatgcactggggagtttaaaagtatataccatttaaaatgtttctcttaaaaaataatcattctttgttcctatttttgattkgtttttctgtttttcagaactaaaaatcacaaagactatcctttccacatagaatactgaggacgcttccccttccttgtttctgctcagcccagatgca

SEQ ID NO: 297018 - DNA, 201 bp, Homo sapiens
ccttcttttatttggcgggtttcagatcatgtgttagatgggaagggatgactgctgtagcatacagcctcagggtcgcggagcttgatgcagcaggggcytctccctctgcactgtgggtgttggtggttgaccttccctcagcgatcaaaggacccaggctccttccatcttagggccctttctcccctagggtgttgg

SEQ ID NO: 297019 - DNA, 201 bp, Homo sapiens
ctttcctgtttgaagatgagccactgaatgaagctaatttcatgcactggggagtttaaaagtatataccatttaaaatgtttctcttaaaaaataatcaytctttgttcctatttttgatttgtttttctgtttttcagaactaaaaatcacaaagactatcctttccacatagaatactgaggacgcttccccttcctt

SEQ ID NO: 297020 - DNA, 201 bp, Homo sapiens
ggtgtattccttcttttatttggcgggtttcagatcatgtgttagatgggaagggatgactgctgtagcatacagcctcagggtcgcggagcttgatgcarcaggggcttctccctctgcactgtgggtgttggtggttgaccttccctcagcgatcaaaggacccaggctccttccatcttagggccctttctcccctag

SEQ ID NO: 297021 - DNA, 201 bp, Homo sapiens
ggtcccccagctgccacctccacagggctcttctggaaatggaagaatgggtgaagcacaaaacaggcctgttctcctctggcagcactcagaatggtgaytaaaggcagcagctaggcaagtggctttcttgaaggtgcatctgggtagatggtactgttggcaggcagggcatgagctggtgcttggccctccatgtgc

SEQ ID NO: 297022 - DNA, 201 bp, Homo sapiens
ccgatttcaaatccagaggaatgtgatagtgatccccggatctatcaccccaagtcacattaaagagaatatccaggtaggtgtattccttcttttatttrgcgggtttcagatcatgtgttagatgggaagggatgactgctgtagcatacagcctcagggtcgcggagcttgatgcagcaggggcttctccctctgcac

SEQ ID NO: 297023 - DNA, 201 bp, Homo sapiens
agtactggacgccagccttagctgacacttcctgtgattccacataacccctaaacatccccgtggcacaggccatgtagacctgtcctgaagctgagaarattggggccaagtgaggccatgcaacttgcccagcatcccctagccagaaaagatgggactgaaatcagaccttgagtgcagaaatgcttttgaagcttc

SEQ ID NO: 297024 - DNA, 201 bp, Homo sapiens
catgttagaaaataacttagactacatgggatttccctttgtgtgatagtagactttttgtttccttgcagattttgatccgatttcaaatccagaggaaygtgatagtgatccccggatctatcaccccaagtcacattaaagagaatatccaggtaggtgtattccttcttttatttggcgggtttcagatcatgtgtt

SEQ ID NO: 297025 - DNA, 201 bp, Homo sapiens
tcacatgtgtcgagtactggacgccagccttagctgacacttcctgtgattccacataacccctaaacatccccgtggcacaggccatgtagacctgtccygaagctgagaaaattggggccaagtgaggccatgcaacttgcccagcatcccctagccagaaaagatgggactgaaatcagaccttgagtgcagaaatgc

SEQ ID NO: 297026 - DNA, 201 bp, Homo sapiens
ccagacatcaggaggaataggaacaagaagagctcacatgtgtcgagtactggacgccagccttagctgacacttcctgtgattccacataacccctaaayatccccgtggcacaggccatgtagacctgtcctgaagctgagaaaattggggccaagtgaggccatgcaacttgcccagcatcccctagccagaaaagat

SEQ ID NO: 297027 - DNA, 201 bp, Homo sapiens
tggactcagagaccatgacacctgctggcctcttggagattgctctgtccagactcctcacaacagaaacacttaggcctggagctgggccccatggctastcggtgacagccaagactttgacgcaggtcttctcttgtagagcttttcttgaacactagtggtctgaattttatgtaagctatgattctgttatagatt

SEQ ID NO: 297028 - DNA, 201 bp, Homo sapiens
tcaactctttctgtcacaatgttttatgtcctaaaagatttgggttaaactctagggtgctcatgtagcaccagcgaggttccggtgattgttgcagagtkgaggcagtaactaactgctgcgtgttggcccattggtcactcaggacttgctgctgactacggaccctggcacgaagctatgctcttcctgaagctccgg

SEQ ID NO: 297029 - DNA, 201 bp, Homo sapiens
tgtctctctagtgagggggttgacctgatagacaaccctgtgatcaagaggattgcaaaggagcacggcaagtctcctgctcaggtagggagggagggctsttctgagccaggtggggttctctgaccgctctacatccttggggagtcctggggcttggcaggtcccaggaagggactggctcacccaggtgagtccatg

SEQ ID NO: 297030 - DNA, 201 bp, Homo sapiens
gaggggaaggctcttgtggggaagagcctggggtgctccaggtccttgcattggaatcactcagtgcacccctcctcccgccgcaagacagccactctgcyaggccggggtggatgctgatgctgtggccatgggtcctgttcctcagtgtgtggggacaacaaaaggggagggaagggctgagaagaatactattttcaa

SEQ ID NO: 297031 - DNA, 201 bp, Homo sapiens
ccagggccagcagggcttgccagccgctccgagtgccgggcccaccaagcccacacccacccggaattcgtgctggcctgcaagcaccacgcgcagccccrattcccaccggcgtctctccctccacacctccccgcaagctgagggagccgactccggccttggccagcccaggaaggggctcccacagtgcaacggtgg

SEQ ID NO: 297032 - DNA, 201 bp, Homo sapiens; identical to SEQ ID NO: 61586

SEQ ID NO: 297033 - DNA, 201 bp, Homo sapiens
aaaataatcattctttgttcctatttttgatttgtttttctgtttttcagaactaaaaatcacaaagactatcctttccacatagaatactgaggacgctwccccttccttgtttctgctcagcccagatgcacagacactattggcaatgttgaccctcctctgtcatcacagcgccagggcagctgtgcctgggacagg

SEQ ID NO: 297034 - DNA, 201 bp, Homo sapiens
tactgttatttctgttaatttgtgttacatttgtttggattttctacacaaatgatcatatcatcagcaaataatggtagtttactttcctttttttccastctttaagcttaaaattgcttcttcttagttgttcaggtgcttctggaaagcacctccagcacagtggccattcttgttttgtacctgattttaaaggat

SEQ ID NO: 297035 - DNA, 201 bp, Homo sapiens
cgtgtgagtctacacctcagcctttattattggacgctgtggtatctgagtgtacaggataaatcttaagcctctttgcatctcagttattattcattctrtacttttttattgctttgatcattcaggaagcataccatctagctcagttttctgcagacactaaaaataacctatagtttttttttcccaaaatatgta

SEQ ID NO: 297036 - DNA, 201 bp, Homo sapiens
ggttgtatagtttttcctgaagagaatatatgtcttttgttggaattattattgggttcttgatagtgtgttatactactggaaattatatttctctgaarttacattttctacttgtttcacctgctatattcattacacttccagccactttactaaactgtactgttatttctgttaatttgtgttacatttgtttgg

SEQ ID NO: 297037 - DNA, 201 bp, Homo sapiens
tttgaattccttgcattctttaataattatgtaactattcaagctttattcttgggttaaatttttctaggaattttcccattttatctcatttttccaarttattgacatatagttattggtaatattttcttttaagtccattttatctgcatgttttactgtccattcgtgtcagttttttaaaaagttggcctcttc

SEQ ID NO: 297038 - DNA, 201 bp, Homo sapiens
tggggctactccacttggctccgcacatctcctgtcctcgtgcggttagttagggagtgttctcaagatgatggctgaagcacaagagagcaaggggagcrgtgagatgtctggagacctcagcctgggctcttcattattaggggccacttgatccatctgtgtgcctgatcggtgctgtcttaattactacagttcctt

SEQ ID NO: 297039 - DNA, 201 bp, Homo sapiens
aaatatggctccttctttttaaaacagagggaagaatatacagattgaatgattggtgtctgaataggtatttatcatacacattttagattaattaaacyttctcattataattctttcctgtttgaagatgagccactgaatgaagctaatttcatgcactggggagtttaaaagtatataccatttaaaatgtttctc

SEQ ID NO: 297040 - DNA, 201 bp, Homo sapiens
actcagagaccatgacacctgctggcctcttggagattgctctgtccagactcctcacaacagaaacacttaggcctggagctgggccccatggctactcrgtgacagccaagactttgacgcaggtcttctcttgtagagcttttcttgaacactagtggtctgaattttatgtaagctatgattctgttatagattgag

SEQ ID NO: 297041 - DNA, 201 bp, Homo sapiens
gtgagggggttgacctgatagacaaccctgtgatcaagaggattgcaaaggagcacggcaagtctcctgctcaggtagggagggagggctgttctgagccrggtggggttctctgaccgctctacatccttggggagtcctggggcttggcaggtcccaggaagggactggctcacccaggtgagtccatgactcattaga

SEQ ID NO: 297042 - DNA, 201 bp, Homo sapiens
aaatgtttctcttaaaaaataatcattctttgttcctatttttgatttgtttttctgtttttcagaactaaaaatcacaaagactatcctttccacatagratactgaggacgcttccccttccttgtttctgctcagcccagatgcacagacactattggcaatgttgaccctcctctgtcatcacagcgccagggcagc

SEQ ID NO: 297043 - DNA, 201 bp, Homo sapiens
tggctcacccaggtgagtccatgactcattagaacctcccagcgtcaagcagaatttggtctgcagccgcatttctagtcactcaagccatgtactcttgyctccgagcctgtctagactcagaggaggagtttccaggccttctccctctgccccaccaactgcatgcatggttagtatgagatggtacagaaaagttat

SEQ ID NO: 297044 - DNA, 201 bp, Homo sapiens
ggggcttggcaggtcccaggaagggactggctcacccaggtgagtccatgactcattagaacctcccagcgtcaagcagaatttggtctgcagccgcattyctagtcactcaagccatgtactcttgcctccgagcctgtctagactcagaggaggagtttccaggccttctccctctgccccaccaactgcatgcatggt

SEQ ID NO: 297045 - DNA, 201 bp, Homo sapiens
agtcctggggcttggcaggtcccaggaagggactggctcacccaggtgagtccatgactcattagaacctcccagcgtcaagcagaatttggtctgcagcygcatttctagtcactcaagccatgtactcttgcctccgagcctgtctagactcagaggaggagtttccaggccttctccctctgccccaccaactgcatg

SEQ ID NO: 297046 - DNA, 201 bp, Homo sapiens
cctcctgaccccttatttatgtttcttacacagcccttgtcacactgtcttgtgattttcttctcagtcccttccactagtcaaagcaaccagagtgcagrtatcttatttattcttctcttcccagcttctagctcagcacctgggaaacattgggaaccccgaaaaggctgaaattacttgagttttatcacctgtgtg

SEQ ID NO: 297047 - DNA, 201 bp, Homo sapiens
gacctccagccattcagccacctaagccagaagcttggaaatcatcccttcccacatcccgagtccaatccagcaccaaaatctattgattattctgccargagaagttggactttgtttcatgatttcatttctgccatcactgtcactgccttagttaagtagcattcccgaggtcattagaggagcccctcagctccc

SEQ ID NO: 297048 - DNA, 201 bp, Homo sapiens
gtgagtgttacagctcttaaggtggcgcgtctggagttgttcgttcctcccggtgggttcgtggtcttattggcttcaggagtgatgctgcagacctttgyggtgagtgttacagctcataaaggcagtgtggacccaaagagtgagcagcagcaagatctattgcaaagaccgaaacaacaaagcttccgcagtgtggaa

SEQ ID NO: 297049 - DNA, 201 bp, Homo sapiens
cagcatccagctcagtaaacagcacgtccagtgcccctgtaacccctgccgagcacagcatcattcccattcccagcagctgggattcacgtctgaacttyacacaggtaaaataaaataataatgcaacataaacccctctgtgctcgcctctttcacacagcactgtgtttctgtacatgtgattgtagatagtgctct

SEQ ID NO: 297050 - DNA, 201 bp, Homo sapiens
gatcatttatacagtacttaagctttttattgaagagtagaagtgcacatgtgaaaatggaactgtataaattctcataaactgagcatagctctgggacyagcatccagctcagtaaacagcacgtccagtgcccctgtaacccctgccgagcacagcatcattcccattcccagcagctgggattcacgtctgaacttt

SEQ ID NO: 297051 - DNA, 201 bp, Homo sapiens
catgctggctctgggtgggcacgtgtgacgctggtcccctctcctttgtagctgtggtgcacctgccataagaagtccttggtggaaacagcatgcagaargagtctcaaggccttgaagctgaactatttggacctctacctcatacactggcccatgggtttcaaggtaccgttcagtaggtagttcgttctgcagttt

SEQ ID NO: 297052 - DNA, 201 bp, Homo sapiens
taggctccccccatcaatagaagacaaagactgacctaaggtatctgagatgtcaggaccagggcccatgggcctcaactctttctgtcacaatgttttakgtcctaaaagatttgggttaaactctagggtgctcatgtagcaccagcgaggttccggtgattgttgcagagttgaggcagtaactaactgctgcgtgtt

SEQ ID NO: 297053 - DNA, 201 bp, Homo sapiens
ttctacaaagttgacactattaacatccctcttggagagatgatgaaactaagatacagaaagtttaaggtttaagttagattattggagcccagaagcayatgctcaggtcagacatttgttacactttccttgccctcatcctttagcagattcctgtctttggatttctgggtcgtagaaaaggaaaaggtctcagat

SEQ ID NO: 297054 - DNA, 201 bp, Homo sapiens
ccagggttcagaccaaaaacagccctttactgcaggggcttgcagtaaagacttgagcaggaaattaagggggtggtggatttgagaggttcctggaagtygacccacaggctggggtgggtctcaggcttgggctccagcatggctgaccgagcacgtgtggtcttacagtcttgctaaccatcatgtgggatgggacat

SEQ ID NO: 297055 - DNA, 201 bp, Homo sapiens
ttttgtatggataccttcgtgtgagtctacacctcagcctttattattggacgctgtggtatctgagtgtacaggataaatcttaagcctctttgcatctsagttattattcattctatacttttttattgctttgatcattcaggaagcataccatctagctcagttttctgcagacactaaaaataacctatagttttt

SEQ ID NO: 297056 - DNA, 201 bp, Homo sapiens
caggaggaggtgggagccaggtccacaagactcaccagggaggagaaaggcatccagtgcagggggctgccccggcccgccccctgtggccccagtgccgytcagaactgctgctgcaaggctgcctaccctttataaggagtcttctagaactgcttgctgttccccttaaacccaagaatccgcctaccccggccccag

SEQ ID NO: 297057 - DNA, 201 bp, Homo sapiens
cccgggatccccatggcctagcaaaagtgaatgtgacacggggaccttgggcccagctgagatgcccccattcctctgttaggtctgctacacactgaggrgaaatgccatcctcaggcagtgagacaggaccaggctgacgtgagacctgagggccaaagccgaagtgatctgatggctgaggacagacagcagcggcgg

SEQ ID NO: 297058 - DNA, 201 bp, Homo sapiens
atacattcatttaggttttgttatatacttctttttgtatggataccttcgtgtgagtctacacctcagcctttattattggacgctgtggtatctgagtrtacaggataaatcttaagcctctttgcatctcagttattattcattctatacttttttattgctttgatcattcaggaagcataccatctagctcagttt

SEQ ID NO: 297059 - DNA, 201 bp, Homo sapiens
aactaagttttctacaaacattgtgttttggttccaggtgtttgattttgaattaacacagcacgatatggataacatcctcagcctaaacaggaatctcygactggccatgttccccatgtaaatatggctccttctttttaaaacagagggaagaatatacagattgaatgattggtgtctgaataggtatttatcata

SEQ ID NO: 297060 - DNA, 201 bp, Homo sapiens
atttgtgttggattcctctgactgtgagaagacactttgttttgttggttttgcaggcttctccagggaaagtgaccgaggcagtgaaagaggccattgaygcagggtaccggcacttcgactgtgcttacttttaccacaatgagagggaggttggagcagggatccgttgcaagatcaaggaaggcgctgtaagacggg

SEQ ID NO: 297061 - DNA, 201 bp, Homo sapiens
agtccttggtggaaacagcatgcagaaagagtctcaaggccttgaagctgaactatttggacctctacctcatacactggcccatgggtttcaaggtaccrttcagtaggtagttcgttctgcagtttgcaggaccttcctccccgtgctcacaccctgtcttgcggtggggagagcatggaccagcattcagggcagggg

SEQ ID NO: 297062 - DNA, 201 bp, Homo sapiens
ccacatgcttgggtgaaaggggagatttgtgttggattcctctgactgtgagaagacactttgttttgttggttttgcaggcttctccagggaaagtgacmgaggcagtgaaagaggccattgacgcagggtaccggcacttcgactgtgcttacttttaccacaatgagagggaggttggagcagggatccgttgcaaga

SEQ ID NO: 297063 - DNA, 201 bp, Homo sapiens
ccgccgcaagacagccactctgccaggccggggtggatgctgatgctgtggccatgggtcctgttcctcagtgtgtggggacaacaaaaggggagggaagkgctgagaagaatactattttcaaggaagaaaaatggatcactcagaaaatgtactctgtgatatgggtactgttagagttcatagtcccagggccaagtg

SEQ ID NO: 297064 - DNA, 201 bp, Homo sapiens
aggtcaaaatattctatttatttttcttggactgcaggtgcatcaaattggattaatcataatcactcatcactggtctatgcaaaggcttatttttactygtctatttttaatagtgaataaacatcacagacctatccgttatctgttgccccagaaatgctgcatcaatggccaaacaccagacctcagtggtgtaca

SEQ ID NO: 297065 - DNA, 201 bp, Homo sapiens
gctgttgacttggcaagataacaactgcatcattcacacaagcaaatctgctcttggaggacaaaaagaggtttattttggcttagatgactccgattggycatctccattgaaaccttggcagaagataggtcccttggctactggggagaaaagtcaagtaaacctttagtgccaggaatggtgtttgtaaagattcgg

SEQ ID NO: 297066 - DNA, 201 bp, Homo sapiens
cagagagccctgagagtcgggggagtcaaagcttgagagcccactggctgcatgcgctgacatggccacctggtttttgaggagaaacaccaaatacacawgaaaagtgatgtcgtgtagccttgttcaccaaagtgttagcagtggttatctccatactggaaatgtggggcgatgtgcttttctgcattttaaaatttc

SEQ ID NO: 297067 - DNA, 201 bp, Homo sapiens
agaagctgagaagtcagagagccctgagagtcgggggagtcaaagcttgagagcccactggctgcatgcgctgacatggccacctggtttttgaggagaarcaccaaatacacatgaaaagtgatgtcgtgtagccttgttcaccaaagtgttagcagtggttatctccatactggaaatgtggggcgatgtgcttttctg

SEQ ID NO: 297068 - DNA, 201 bp, Homo sapiens
gggtgtacagtagaagctgagaagtcagagagccctgagagtcgggggagtcaaagcttgagagcccactggctgcatgcgctgacatggccacctggttyttgaggagaaacaccaaatacacatgaaaagtgatgtcgtgtagccttgttcaccaaagtgttagcagtggttatctccatactggaaatgtggggcgat

SEQ ID NO: 297069 - DNA, 201 bp, Homo sapiens
ttcgctgtgctgtgccagggtgtacagtagaagctgagaagtcagagagccctgagagtcgggggagtcaaagcttgagagcccactggctgcatgcgctracatggccacctggtttttgaggagaaacaccaaatacacatgaaaagtgatgtcgtgtagccttgttcaccaaagtgttagcagtggttatctccatac

SEQ ID NO: 297070 - DNA, 201 bp, Homo sapiens
cagcctggagtgacccctttgctgagttccccaccagggtgtcagcccccttctgacctcctgacaaggatgctccccaggcctctccatggttggatgasgcaaagcctgctgtcatctttacccaggccctcctgcagctgtactgtgctcccaagatcagctaagagacctccagccattcagccacctaagccagaa

SEQ ID NO: 297071 - DNA, 201 bp, Homo sapiens
ttagtagagatggggtttcaccatattggccaggctggtctcaaactcctgacctcgtggtctgcccatcttggcctcccaaagtgctgggattacaggcrtgaaccaccgcgcccagccgctataacttttaacaattcccatatgtcctttattccactaagatgagtgcagtatatatttccatctgtccaaggcttc

SEQ ID NO: 297072 - DNA, 201 bp, Homo sapiens
ggaacattcagatgatgtaggtgtccccaaggccgtggactcagagaccatgacacctgctggcctcttggagattgctctgtccagactcctcacaacasaaacacttaggcctggagctgggccccatggctactcggtgacagccaagactttgacgcaggtcttctcttgtagagcttttcttgaacactagtggtc

SEQ ID NO: 297073 - DNA, 201 bp, Homo sapiens
caactcttagaggctaggagtgtcgttttgttcatattggttctcagcatctagtgaaggacgtgcatctgtcagcccttcattcagtaagcactcgatgrattaaactgttgagtctcttgcttccctttatttctgcaacaatttggtgcaggagtccagactttcgtgcacacaggataaggaaaaattagtgaaaac

SEQ ID NO: 297074 - DNA, 201 bp, Homo sapiens; identical to SEQ ID NO: 61612

SEQ ID NO: 297075 - DNA, 201 bp, Homo sapiens
tcctggccagagggactgggaaaagaggaccctgagagacagactctgagagagaaaattatttaaaaagaaaaaaaaaaagagagagagagagagaagckgccccgcccggctcgcagcggcagcatggccgcagcgcgggggcagcagcagcaggcggctgcgcgcggatgtcgcagggtttcgcggcagcatgacgga

SEQ ID NO: 297076 - DNA, 201 bp, Homo sapiens
ttggctaatttttatatctttttgtagagatgaggtctcactatattgcccaggctggtctcaaactcctgggttaagcagtcttcctgccttggccgccyaaactgctgagattacaggcatgggtcactgtacctggtcacaactggattttaaaaatttaatttgaaattacctatcttttaagaggtaaatttatca

SEQ ID NO: 297077 - DNA, 201 bp, Homo sapiens; identical to SEQ ID NO: 61607

SEQ ID NO: 297078 - DNA, 201 bp, Homo sapiens; identical to SEQ ID NO: 61614

SEQ ID NO: 297079 - DNA, 201 bp, Homo sapiens
tgtaggtgtatttctcataaacggcatgtaactagatttaaaaaaaaaaaaaacaggtctcattctgtcacctggactggaatacagtggcataatcacgkctcactgcaacctccaccttctgggctcaagaaatgctcccacctcagcatcctgaatagctaggactacaggcatgcgccaccacacttggctaatttt

SEQ ID NO: 297080 - DNA, 201 bp, Homo sapiens; identical to SEQ ID NO: 61609

SEQ ID NO: 297081 - DNA, 201 bp, Homo sapiens; identical to SEQ ID NO: 61617

SEQ ID NO: 297082 - DNA, 201 bp, Homo sapiens; identical to SEQ ID NO: 61616

SEQ ID NO: 297083 - DNA, 201 bp, Homo sapiens
ggagggcatctcaagaccccccagagtttgtaattgcatattgtggggcagctcctctcctgtaatgaaaatccacatgtatcagtgtttatagttcacayggaccgttctctgtgtctttggcctgggtggttgcgtgtctgcgtgtgctgtgctcgtgttgcgtgaggctgtgggaatgtgatcgtttgtcacacaggg

SEQ ID NO: 297084 - DNA, 201 bp, Homo sapiens
taatcttttttttttaatacatatttcttttgtttctaactctattataatcttatgggaccacatcctacatgtggtccaccatcattgactgaaacgtygttatgtggcacatgactgtcgtgcatttcagggggtgctggagtcaagtggttggggttccacaacctgaaaagactgaaaagcacagcactgggagtt

SEQ ID NO: 297085 - DNA, 201 bp, Homo sapiens
gggtgtgtgacattacagagatgagactccagctgtctctgtgaagctggatgttaaacagcctgtgtaacaaaatgcaaagcaatgatgctgttcctgcygcattgctttgttttgtaatggaaagggtggttaatgtctcataaaaaatcttatgtcaatatataatggagttttgattttttaaaaaataagtaaata

SEQ ID NO: 297086 - DNA, 201 bp, Homo sapiens
ccccatggttgggattactaccccgatgctggtgctgtcacccccaaacacccctggctcctgggggtccaggctgcgctgcctgagtgtccccttttccycacctcatgtccagaaatgcttcccaggggcaggacccacaggcttcttgtggggcaggtccccatcccacatgtggcgaggcccctgatagtggtgtgc

SEQ ID NO: 297087 - DNA, 201 bp, Homo sapiens
tagggtgacccagggctgggcagcgaggccaggggctacccagtgacctcctgtggcttgcagacagtggcatcagtctggagaatggagtgtatgctgcygctgtgctgcctggaagccctgccgctaaagaagggtcccttgctgtgggagacaggatcgttgcggtaagtctcaagccagggtcatctgccgtgcata

SEQ ID NO: 297088 - DNA, 201 bp, Homo sapiens
ggtggccagagccgcctgatcgtgttccttctgtgctgtggtccagggccctgtacgaccggctggcagatgtggagcaagagttgagctttaagaaggaygacatcctctacgtggatgacaccttaccccagggcacgttcgggtcctggatggcttggcagctggacgagaatgcccagaagatccagcgcgggcaga

SEQ ID NO: 297089 - DNA, 201 bp, Homo sapiens
tatggggatcagttactggaggtgagagggagctgccctcctgcatggcgcccatggaaacctgcacttcttccccctctcctcctcctagggaacagcastgctcccaagtccccagggcctcctccctgtccacagccccgacccccccactgagcccatcctggtgtttccccagttcaacggcataaacctgcggag

SEQ ID NO: 297090 - DNA, 201 bp, Homo sapiens
taaggctggggcaggagggtgatgtaggggtggctgtgtgctgagggctctgcagctctcaacagcacggggctgtaatccgtgttgaattggaagggacygtgggtgtagtctggggtggatctgtctgagctggagggtcaagggaggatttccagagtgggcaagtttgggaagtgggaacactttggagggtgggag

SEQ ID NO: 297091 - DNA, 201 bp, Homo sapiens
taagtgaaatgatgccgatcgggcctccccaccccgtggtgtgtcccttacgtctttgcatgtcactggaacctgggaacctggttcagatcattgttctrttgggtggctattgctgtgacttagttgcttgctcctttattgtgatacacgtgttgtacggaggtggacctctttctgctctgggcctctgtttcatca

SEQ ID NO: 297092 - DNA, 201 bp, Homo sapiens
tgcctgcccacctgctgatatctgtccaggccccagtatttggaggcactaggtctgtaccagaggggcctgtctcccttccctggagatacatgtgcccyttttggtgtcaggtttgtaagtggtgatttggatgtttctggaattgggctgttagcaggttttggcttgcctctgagtgctacagacctacctgccatt

SEQ ID NO: 297093 - DNA, 201 bp, Homo sapiens
ggtgatttggatgtttctggaattgggctgttagcaggttttggcttgcctctgagtgctacagacctacctgccattggctcctgtccgctgtatctacrggaagtgttgggacctgaggctggtgatgccctggggtggggcggggtgtgaggggctggctggggctcactgagcatgtaccgggtgtttcagcacact

SEQ ID NO: 297094 - DNA, 201 bp, Homo sapiens
acatatttttttttgagacagagttttgctcttttcgcccaggctggagtacagtggtgcaatcttggctcactgcaatctctgcctcccaagttcaaggygattcttgtgcctcagcctcctgagtagctgagattacaggcgcccaccaccacgcctggctaatttttgtatttttagtagagatagggtttcaccatg

SEQ ID NO: 297095 - DNA, 201 bp, Homo sapiens
cagggaccctgccagtgtcgttattattgttatccctgtttcacagttgaggaaactggatccagacgttggagtgacagacctgtggccacgtggttagyggctggcaccgggactcattcttaccctttgctttttccctctcattcgaagctttctgttgtgaaataaaatatacacaggaagaaagcataaatgtgc

SEQ ID NO: 297096 - DNA, 201 bp, Homo sapiens
ggccagggcacccaggcacagtcgtgggagcttggcaaaggggcagcgagtcaagaagaggtttgaggtcacagggcacaaaccctgtgggacctgcagcsgtgatgaagagtttggattttattctaaggacagtggagaccactgtagagtttaagcagggaagagatgtcacctcattacatagctggaaaaagatgc

SEQ ID NO: 297097 - DNA, 201 bp, Homo sapiens
caccagccatggagctgtcccatgggagggggctggggccagggctgctggaggagggattctgcttcttatcttagcttctgctctctacattttgccamaagtgctggtctaaaaagctgctcctagtgtgagtcagtgctgtatagagcacagtgatgggtcagaaggcataacgtgttttagaaaaatggatttatg

SEQ ID NO: 297098 - DNA, 201 bp, Homo sapiens
ttagtaaagacggggtttcaccatgttggccaggctggtcttgaaactcctgacctcaagtgagccgcctgtcttagcctcacaaagtgcaaggcactgcrcccgggattacaggcgcaaggcactgtccccggccatacttttctcattttaattctacagatactttaactctgactcagtctgtccatttgcacatca

SEQ ID NO: 297099 - DNA, 201 bp, Homo sapiens
aagggccatcggtgccaaggccagggcacccaggcacagtcgtgggagcttggcaaaggggcagcgagtcaagaagaggtttgaggtcacagggcacaaascctgtgggacctgcagccgtgatgaagagtttggattttattctaaggacagtggagaccactgtagagtttaagcagggaagagatgtcacctcattac

SEQ ID NO: 297100 - DNA, 201 bp, Homo sapiens
caaaggaagcattgctgatggccgcttaaggtaagagttgaggcccaggctctggaggcaaggtggggcccttcttcccagtgcagaggacccgaagagarccaggtagcacttaggtgaacgtttcccagccttagactcacacacagtctgtccaaggcctgcagtctcagcagctaataatgctccgaaagaaacagt

SEQ ID NO: 297101 - DNA, 201 bp, Homo sapiens
tatgtttgtaaagactgcgtttggtaactgtcatgtgtggtcatccctgagtctctttctgtggtctttgtttttcttggtcctgccccatgatatgcctrgttattgtttattgagatgtcagaagttatgtttaggggattttcagggctccgagtgatgttgccagcttccagagagggtctgccctctgctctggag

SEQ ID NO: 297102 - DNA, 201 bp, Homo sapiens
gccccagtatttggaggcactaggtctgtaccagaggggcctgtctcccttccctggagatacatgtgccctttttggtgtcaggtttgtaagtggtgatytggatgtttctggaattgggctgttagcaggttttggcttgcctctgagtgctacagacctacctgccattggctcctgtccgctgtatctacgggaagt

SEQ ID NO: 297103 - DNA, 201 bp, Homo sapiens
aataaaaggtctgggagggaaataagaatcaattgcattgctaccacctgtagataacctttctctatctctctctgtccctcaggctggagtgcagtgaygcaatcccagctcactgcaacctccaaaggcctaagcgggaaataagaaccacttgctttggtaccacctgtagataacctctattaacttttttttttt

SEQ ID NO: 297104 - DNA, 201 bp, Homo sapiens
gaccccccagagtttgtaattgcatattgtggggcagctcctctcctgtaatgaaaatccacatgtatcagtgtttatagttcacacggaccgttctctgygtctttggcctgggtggttgcgtgtctgcgtgtgctgtgctcgtgttgcgtgaggctgtgggaatgtgatcgtttgtcacacaggggtgggcccaccatg

SEQ ID NO: 297105 - DNA, 201 bp, Homo sapiens
cttttttaaaaaaccactgtgaaaactcacagatatcccagcagccttgacctgactctgagttattgggaaacaagggggaaaggaacccattttagctstttcaaatggcctgcctcgtgaggttcagagccgttacgcggtgggatgtttcacctcccaaggggctgtcaccgtggctctctctgttcacagggaaca

SEQ ID NO: 297106 - DNA, 201 bp, Homo sapiens
acagtgggtggcagtaccggggggcagatttcacagtgttccagaagcctgctgacatgggtcagattcatgcatggcaggactgggttactgacagctgmtgagcagtgttcttcccctgctccctctgctggggctcagcagggcctggggctccctgattcctgtgtctgtgcattgcagaggtgatgaaggcctccc

SEQ ID NO: 297107 - DNA, 201 bp, Homo sapiens
tagcagagcgtgacagcatccggtatggggtgacctcaagctggtgtgggcttgcgtctccccaggatgaggggacctgctagggtctgttgggagggtcrgaatcatttactgtatgtccaggtaaagtgggagggacctgggctcctcctttctcacccctagttgatgccctagccttgcctcttagttttagaattt

SEQ ID NO: 297108 - DNA, 201 bp, Homo sapiens
ggcggatgtggccaagtgccggcgggactgggccttccaggagcgagacaagattgtagcagagcgtgacagcatccggtatggggtgacctcaagctggygtgggcttgcgtctccccaggatgaggggacctgctagggtctgttgggagggtcagaatcatttactgtatgtccaggtaaagtgggagggacctgggc

SEQ ID NO: 297109 - DNA, 201 bp, Homo sapiens
acccctttggggagaggaaatgctgacccctggcctcaccgccaaagaatattttgaccccaaaggtgcggcctggagcagagaaatcctggctgtcatgrtgctggtggcttttaaacacagtctgtgttgcttaatgacagggacacattctgagaaatgtgttgtcatttggtaatttagttgttgtgtaaacatgag

SEQ ID NO: 297110 - DNA, 201 bp, Homo sapiens
gtaatggagctccatgcagaaccggtgtctatggagcacactgagaattgctggtctggagccatgggctctgatttgcaggctgcctgtgtggaagatgycccccggcctggaaggacagagctgtgctcttcgagcgaacttgatgaccttgtcacagggctgtactgttcgtatctgtgaaatgaggcggtttgacta

SEQ ID NO: 297111 - DNA, 201 bp, Homo sapiens
tacggttttgactgcccccgctaactggctttggacctggggtcttgccttcatctccagtgcaccttagcatcctgtcccgaacgccgagccagtagaastagaggccacctctcagctccctgtggttctgagaccccaagaagcaggcagaaagcggttagggcattggccactgctttgtctttttgtgcctcctct

SEQ ID NO: 297112 - DNA, 201 bp, Homo sapiens
gatgaaagaggccagctgcacaagacctgggctggagcctccagggagaagggccatcggtgccaaggccagggcacccaggcacagtcgtgggagcttgkcaaaggggcagcgagtcaagaagaggtttgaggtcacagggcacaaaccctgtgggacctgcagccgtgatgaagagtttggattttattctaaggacag

SEQ ID NO: 297113 - DNA, 201 bp, Homo sapiens
tgacagatattttttgagcacctactacatgccttggtctatcctaattataagaggatacattgctgaactaaacaaattagcttctagctcatgtcgtktggtttttcaaatgtgggaggcagacaaaaaaaaaaatgaacgaagtgatatcagatggtgccaagaggctatgaaggcagtcaaacagggtgacaggct

SEQ ID NO: 297114 - DNA, 201 bp, Homo sapiens
  misc_feature (1)...(201): n = A,T,C or G
tcacagggtcggcccctgcagctctccacctgcggcccgagatgctggcccccagggtttgcatcccaggtatgtgaaggcaccctacgcttctctgtacnccagctgcccaagcctgcctggacatggaaccatgagtgcataaagaggctcattggtggagaagcttccttgcctgcctgggaggggactggctagagc

SEQ ID NO: 297115 - DNA, 201 bp, Homo sapiens
agactgcggctgcgtcctgggatacaggggaaaggcttgtgtaagtcctgggctggctgggtcctttggggcgtcttttctcaccaagcccatttctaggyactgttccccggagtttgacccccagcaccactgtgagctccatcctgcggaaccccatctacactgtgcgcagtcacagggtcggcccctgcagctctc

SEQ ID NO: 297116 - DNA, 201 bp, Homo sapiens
gaaaagttgggctgatacagaattcttagcactctctcaaccaccccatcaccaccatccccactcctgtccccaagtttccccaattttggcattttgcrttagtgtagttagtacatgcgttataattagtgagccaatgtggatgcattagtattaactataatgcatagtttacattaaggttcagtcttggtgtat

SEQ ID NO: 297117 - DNA, 201 bp, Homo sapiens
ggtgcatgtagctctcatggcctggcattgactgatgatcagctggcttggggtgaagacgagtgaccccttggggttagtaacatggtctcccctctttycccaggttctacctacagcgtcctgtccaccatgccctcagactcagaaagcagcagctccctcagcagtgtgggtgagtaccaccgtctggggaggaca

SEQ ID NO: 297118 - DNA, 201 bp, Homo sapiens
ggccgctctgcctgtggcctgacatgctctctgtcctgctctagatcaatggcattgcactggacaacaagtctctgaatgaatgtgaatctctgctgcgsagctgccaggactccctgaccctgtccctcctgaaggtaagggctggacctggctctgctctcacggtcaggagtatgggcagagccccggctccacata

SEQ ID NO: 297119 - DNA, 201 bp, Homo sapiens
tgcttctgtgctgaccttgcctctcctcggggtttttgttcttcgacaataccctgtctgtctcctgtcttctgggctctttttctcctgcattttccactctctctttctctccatgattcagccagcctggttgttttctactcttttttcctgttcattattccactcttctgttgcatccattatgttcttactttc

SEQ ID NO: 297120 - DNA, 201 bp, Homo sapiens
ctcccaagtgctgtcatgagcacgttcctgacaagtcaggtgttcagattgcagtccctggccaacgtcaggattcttacaggttgaatgttaagctcacygatcttggcctcaggtcctgcctggcttgcctgctcattttcacacgtgcagtggtgggtctgtctcatagcacaggtgcagtttagtgcagccacagtg

SEQ ID NO: 297121 - DNA, 201 bp, Homo sapiens
aacccccctccaaaaaaaaaaaacaaaaaacaaaacaaaaaaaaacaatgctgtccccttaccatctctggtcttcaaagtgaaacaaactcagtgaagtktggttctattttaccttctggccttcagcctctttgggaaagtctgtcatttgcagggcattagcatttgcagtcacagaggatgggacagggattctaa

SEQ ID NO: 297122 - DNA, 201 bp, Homo sapiens
gaagcagcaggagtagcttgagtgtcccagcatttgctggtgtcaccagtaagtgccatggggcactggatgcagggaggtggggcgtgtgtggatggcarggcagggagccaagagggctcacagtagatgatgctggaaatgacctgacggtgatcgtgccatcatggcaccatttacaccttcctgggcccttgttca

SEQ ID NO: 297123 - DNA, 201 bp, Homo sapiens
cctgccatgtacccagattctggactcccagtagaaagcaggtgttcagcataagccactttatttgtacaggctcagtaccagagctgcttatatcaccrgaagaaaagttttacatcagcctagagaactgtttactgttcgggttcctagacgccattcggtagggtcaaccttgcaagcaggcctttctaaggatat

SEQ ID NO: 297124 - DNA, 201 bp, Homo sapiens
gcagaatggcagccttaggggcctggccacagaaggcacctggttcgtccttggtggccagagccgcctgatcgtgttccttctgtgctgtggtccagggycctgtacgaccggctggcagatgtggagcaagagttgagctttaagaaggacgacatcctctacgtggatgacaccttaccccagggcacgttcgggtcc

SEQ ID NO: 297125 - DNA, 201 bp, Homo sapiens
catttgctgaatacattgctgtgctctggacagtgaggccaactttacctttccttaggaagtactaagttaggaaaatgagtgtgatccacatgggaggraggccatcctgatctttaaggcatgagattgatagccgggcctgggagcaggggcactgatttacggttttgactgcccccgctaactggctttggacct

SEQ ID NO: 297126 - DNA, 201 bp, Homo sapiens
ctttcctggtctagcctgggcatttgaggaatccggaagctgaaacccagagaggtggagtgactcaccccagggctcagatcccatgaggtgcttagccraagccagcagcccccctggcaacctcttaactcatcttcttggtttgtttttttctctataacagcaccccaaatgaactttagtgcctgtcatttagag

SEQ ID NO: 297127 - DNA, 201 bp, Homo sapiens
gggtggcccatagggtggggcagagagagtctttatctacctgcatgatctaagaggactttctgggaaggaggagggccagagagtggtttatcctttarctcccatgctggtagaggtctggaggggaggggggcttggtgtaaacacttcagtttcacctctttccttcaggagtaagggtctatgcctctgcacttt

SEQ ID NO: 297128 - DNA, 201 bp, Homo sapiens
gagctgaccctaattccaaagggagtgttccatcgtcccagcttctggttctctaggctgcaaacgcttgataaaccaggctgccactgaatgagccaggkgattcctcggctgttggagctggaagggccagacaagctttcctggtctagcctgggcatttgaggaatccggaagctgaaacccagagaggtggagtga

SEQ ID NO: 297129 - DNA, 201 bp, Homo sapiens
ggaggtctcctccgccacctcccacagacccttggtaagtgaaactgtctggtctccaggtgttgaagcacaacgggtcatccgagattctcaacaaactrtatgacacggccatggacaagttggaggtggtcaagaaggactatgacgcccttcggaagaggtacagtgagaaagtcgccatccacaatgcagacctga

SEQ ID NO: 297130 - DNA, 201 bp, Homo sapiens
gctgggggcagcagtgaagctcagggtcttttggtggaaaggtgtgggaagacttcgaagctgcagaggagacccctttggggagaggaaatgctgacccstggcctcaccgccaaagaatattttgaccccaaaggtgcggcctggagcagagaaatcctggctgtcatggtgctggtggcttttaaacacagtctgtgt

SEQ ID NO: 297131 - DNA, 201 bp, Homo sapiens
ggtctcccctctttccccaggttctacctacagcgtcctgtccaccatgccctcagactcagaaagcagcagctccctcagcagtgtgggtgagtaccacygtctggggaggacaccgggtgggccaggggtctgggtgaaagccaaggcagctggggttcatgggagaggaagctggttctcccttgtcagattactcac

SEQ ID NO: 297132 - DNA, 201 bp, Homo sapiens
cccttgaaagaaaatgttctgctttaaaaataaataaaggaaaaagaatgagcctgaaatgaaccaatcctccctccctctctccctccctcctttccctytctttctctctctttctctttctcctccccttccttccttccttcccttcttccctccttccctccatttctccctcttccttgacttcctctttaagag

SEQ ID NO: 297133 - DNA, 201 bp, Homo sapiens
ataaggttcacattcacatttactggattgggactttagcatcttttggggggccacaactccacccataaaaacacagttcctcccataaccctcatccygtttagggctcagggcaggcccttctgggactgcaattcaaagctcccaacggtatcctattactttgttctgcctgcttttggtgcccggagacatatc

SEQ ID NO: 297134 - DNA, 201 bp, Homo sapiens
acccaccaggtcctggcagccctgaactccgttttgatctcacctgctttggagattttcagaaacttttcgtgggttctcagccctcagcggcggccccrtgcctgggttctcagcccctcagcggcggccccgtgcctgggttctcagcccctcagcggcggccccgtgcctgggttctcagcccctcagcggcggccc

SEQ ID NO: 297135 - DNA, 201 bp, Homo sapiens
ctgtgtatgtgccgccccatcttcctctctggcaggtgcggggggtctcatctctgatgagagtattgagctctgcggaaaggcctctcgcagggcattcyggaacggggtccccaaatgcatgtgccgaacaatttcacatgcaccttctggggacaggaacgtgccttccctcagggtccctgcccctaaaagggctat

SEQ ID NO: 297136 - DNA, 201 bp, Homo sapiens
agtatctggatgctgccctgtgggaacaggttattctgtttgactccaaggctagagtgagaaccagaggttaggagttgcagggaggcggagtagctccyggtgagcacgaccctatcccaaggagctttcacttgtggagcaggccgagggtggccgtcatcgtggtggaagcaagcagtacggggcctgatctctctc

SEQ ID NO: 297137 - DNA, 201 bp, Homo sapiens
aaggtgcggcctggagcagagaaatcctggctgtcatggtgctggtggcttttaaacacagtctgtgttgcttaatgacagggacacattctgagaaatgygttgtcatttggtaatttagttgttgtgtaaacatgagtgtgcttacacaaacttagatggtatctaccccatacctaggctacacgatatggcctgttg

SEQ ID NO: 297138 - DNA, 201 bp, Homo sapiens
gctgggaagctaaacatttgactgtagttaggtgtgtgtgtgtgtgtgcgcactcgtgtgtgcatgtgcatgtggaaatacctaccaagaacataatcctytgatggcgagagggaaaaattctagaccaatagatttagttttttggattctccggagttaaccatgacctggttccccagctttgttcagaggctgttg

SEQ ID NO: 297139 - DNA, 201 bp, Homo sapiens
taaacactgaattgcatactttgtgtggtatgtaaattataactcagagaggaaaaaaaaagactcagaatttcaccttgtcataaatagagaaatccagkctgggtacagtggctcacacctgtaatcccagcactttggaaggagcaggaggatcccttgattccaggagtccaagatcagcctgggcaacatagacta

SEQ ID NO: 297140 - DNA, 201 bp, Homo sapiens
ggaagccctccaggaggcggatgtggccaagtgccggcgggactgggccttccaggagcgagacaagattgtagcagagcgtgacagcatccggtatgggrtgacctcaagctggtgtgggcttgcgtctccccaggatgaggggacctgctagggtctgttgggagggtcagaatcatttactgtatgtccaggtaaagt

SEQ ID NO: 297141 - DNA, 201 bp, Homo sapiens
ctgtgaaaggcagcctagtgattcctcaaaaaactaaacagagctaacaggtgacctcccagcgacactcctaggtgtccaggagaactgaaaatatacgyccacacagaaacttgaggtgtgaatattcatagcagcccaaaaccggtaacaacccaaaggtctactgaccgatgaatggataaataaaatgtgatctat

SEQ ID NO: 297142 - DNA, 201 bp, Homo sapiens
ctggtctccaggtgttgaagcacaacgggtcatccgagattctcaacaaactgtatgacacggccatggacaagttggaggtggtcaagaaggactatgaygcccttcggaagaggtacagtgagaaagtcgccatccacaatgcagacctgagccgcctggagcagctgggggaggagaaccagcggttgctgaagcaga

SEQ ID NO: 297143 - DNA, 201 bp, Homo sapiens
tcgcagaccctctgggggtaggggctgttttctaagttacaggcagagtgggactgagatggtacagtgtgcacagacaggtactgagctgacagactggrattttctgtactaaaatgttactttgtatcaaaagttaaacaggctttagtacaacaaataaaggtcaatttctgtaaggctatgtttgaagatgtgagt

SEQ ID NO: 297144 - DNA, 201 bp, Homo sapiens; identical to SEQ ID NO: 61632

SEQ ID NO: 297145 - DNA, 201 bp, Homo sapiens
gtgtgggcagcggaggctaggggcccatctgtccctagcaccctccagggcagtcccgttttgcagcgggatttggcaaacccccctccaaaaaaaaaaaacaaaaaacaaaacaaaaaaaaacaatgctgtccccttaccatctctggtcttcaaagtgaaacaaactcagtgaagtgtggttctattttaccttctggc

SEQ ID NO: 297146 - DNA, 201 bp, Homo sapiens
tggagtacagtggtgcagtctcggctcactgcaacctccgcctcctgggttcaagtgattgttgtgcttcagcttcctgagtagctgggattacaggtgtscgccagcacacccggctaatttttgtatttttagtagagaaggggtcttgccttattggccaggctggtctcaaactcttgacctcaagcgatccacctg

SEQ ID NO: 297147 - DNA, 201 bp, Homo sapiens
ctttgatactattcgcattttatttttttattattttattttttgaggcagaatctcgctctgtcgcccaggccggagtgcaatggtacgatctcggctcrctgcaacctctgcctcccaggttcaagcgattttcctgcctcagcctgccgagtagctgggattacaggtgcctgtcaccacatctggctaatttttgta

SEQ ID NO: 297148 - DNA, 201 bp, Homo sapiens
agacctcacagtgtgcacctttgacttactgctaagagaaatcattgctttggccacttccctgataattctaagacatcaaaccactaactccatttatytcttttctaactttgatactattcgcattttatttttttattattttattttttgaggcagaatctcgctctgtcgcccaggccggagtgcaatggtacg

SEQ ID NO: 297149 - DNA, 201 bp, Homo sapiens
catggtgaaaccctgtctctattaaaaatacaaaaattagccaggtgtggtggcatgcacctgtaatcccagctacttgggaggctgaggcaggagaatcvcttgaacccaggaggcggaggtgcagtgagccaagatcacgccaccgtactccagcctgggtgacagagcaagatcctgtctcaaaaaataattaaaaag

SEQ ID NO: 297150 - DNA, 201 bp, Homo sapiens
tgtgccacaggatggaccaagaattctccaggaggctcagcatgtctgaagtcaaagatgacaatagcgccacaaagacgctgtcagcggctgcacgccgrtccttttttcggaggaaacacaagcacaaacgcagcgggtccaaggacgggaaagacctgctcgccttggatgccttttccagtgactccattccactct

SEQ ID NO: 297151 - DNA, 201 bp, Homo sapiens
cccgaggccctcccccgcttcctgcgcctgttgttgtgacctgcccccgaccctacctggtggatctgcctggggactgcacactcgtttcaggcaatcartacttttttcctccccattcatcctgacctaatttctcagtagccttttatttctcatcttggaaaactggggaggttttaaggaggagaagagacattc

SEQ ID NO: 297152 - DNA, 201 bp, Homo sapiens
acagccttaaaggcagcaggtctttgtgccaaggcctcctcgggcagttttcatcagctaagcacacacagcttccccgaggccctcccccgcttcctgcrcctgttgttgtgacctgcccccgaccctacctggtggatctgcctggggactgcacactcgtttcaggcaatcaatacttttttcctccccattcatcct

SEQ ID NO: 297153 - DNA, 201 bp, Homo sapiens
cagtgttgtggtcgttaatgatattattctaatcctgtcaagtctgggtttaaatctgcctcatccaggatgtgtagaaattgggacctgcatacgttgtkggtgggaataaatgatacagccactgtgaaaggcagcctagtgattcctcaaaaaactaaacagagctaacaggtgacctcccagcgacactcctaggtg

SEQ ID NO: 297154 - DNA, 201 bp, Homo sapiens
ttgagatgggctggcccaacctcatccctgagaagggaaccagaatgtctgtaccaggcttgtaccagtccctcggggtggagtgcctggtggggctggcyctggctgggagcactctagcacctgccagggagttcctgctggctcagccacacctgatgagaggcagaagtctttgcaagcacacaccgccctggcagg

SEQ ID NO: 297155 - DNA, 201 bp, Homo sapiens
ctcagtcagtgttgtggtcgttaatgatattattctaatcctgtcaagtctgggtttaaatctgcctcatccaggatgtgtagaaattgggacctgcataygttgtgggtgggaataaatgatacagccactgtgaaaggcagcctagtgattcctcaaaaaactaaacagagctaacaggtgacctcccagcgacactcc

SEQ ID NO: 297156 - DNA, 201 bp, Homo sapiens
ctgtagccatctgcggtgagtggcagaagaagaaggcggggttcttatgagcaaaggaacctgttccagagtccatcagtatggcctcctttcattgaccrcagttggctgcttgtttgtgccgaaaccagtggctcacaaagcctggtcgctggaccactggggcacttattagagatgcaggtttgagcctcctcccac

SEQ ID NO: 297157 - DNA, 201 bp, Homo sapiens
attgtcctttgggtgcaggcagcagggaacacccactcataccaccttaaccaatcaggaaatgtatgagctcccatatgaggctgtgctgaggtcagccrgtacatggggatgcagctctgccctcctctgtgtggtgtcttcacacagtctcatggcggggtgtctgtagcagcagctccagccatcacatccagacct

SEQ ID NO: 297158 - DNA, 201 bp, Homo sapiens
tttagtttggattctatacttccttgagagaatcatcatttcagaggtgtatgtggctccacctcggtccaagggaagccccacagccttgctagaaagcrcgaggttggcacatctcagtgtaggagaattggtctgtatggctgtcatgaagacactgcgtagaaggcactggcgccgcgtgcccgtgtgtatgaggcg

SEQ ID NO: 297159 - DNA, 201 bp, Homo sapiens
ttgttgtgtaaacatgagtgtgcttacacaaacttagatggtatctaccccatacctaggctacacgatatggcctgttgctcctgagctgcaaacctgtrcagcatggtactgtactggctacggtagccagttgtaacacaatggtaagtatttgtgtgtctatacatagaaaagaaaagctgcagcaacagtacagaa

SEQ ID NO: 297160 - DNA, 201 bp, Homo sapiens
  misc_feature (1)...(201): n = A,T,C or G
cattgagataaatgttaaacgtctgcttttcttgactgttccatatcaaggctcccttgggaataaacagcagggcccagctttgcatttattatcctgantggtagcctggtggagaggaaggacagggtggtgtttaaccatgaggcctgaagttttgttcccttatggaacaataggttcttcgagtaacttgcagtt

SEQ ID NO: 297161 - DNA, 201 bp, Homo sapiens
ggttttcagtttctaaagaggcaaaaatatttttaacctcaaaagaaatcctttggaggaatcttgcgtgtgaagcaggtaaggatggcggtgctgtgtcraaacaaagctcccaggaagctgcccgaggggatggccctctaagggtttgagccccttctctgccctggggtgcgtggtaacttcccccacctgagggca

SEQ ID NO: 297162 - DNA, 201 bp, Homo sapiens
tgtgcatgtcagtggagcttcttggagcaaacagatttaaagactgtaggttttcagtttctaaagaggcaaaaatatttttaacctcaaaagaaatcctktggaggaatcttgcgtgtgaagcaggtaaggatggcggtgctgtgtcgaaacaaagctcccaggaagctgcccgaggggatggccctctaagggtttgag

SEQ ID NO: 297163 - DNA, 201 bp, Homo sapiens
tcctacataagaagcctccttgtgcataaatccacacatacttttgtttgcagatgcagataaatataagtgaaatgatgccgatcgggcctccccacccygtggtgtgtcccttacgtctttgcatgtcactggaacctgggaacctggttcagatcattgttctgttgggtggctattgctgtgacttagttgcttgct

SEQ ID NO: 297164 - DNA, 201 bp, Homo sapiens
gagactctgtctcaaaaaataaaaaacagaaaagtagaaagaagaaaaaagtcacagattatttcttcaacaagagattcaattgccattaccctttggakatatatatatatatatatatatatatatatatatatatataaacatgctttattatttatgtacataatcaaatctcccttaatattatgtttttagcta

SEQ ID NO: 297165 - DNA, 201 bp, Homo sapiens
acgcccagctaatttatttttgtattttttgtagagacggggtttcatcatgttggccaggctggtctcaaactcctgacctcaggtgatccacccgcctyggcctcccaaagtacagggattacaggcgtgagccactgtgcctggccagggttgatttttaatccctgtaaacccagaatcctgccaagcccttctgag

SEQ ID NO: 297166 - DNA, 201 bp, Homo sapiens
ttgccatttgtttttaggttcttacaggctgcttggtagtgaccaagagctgtcggtttctgcagaacttcggcatttctggcctcagtcctgtgttcatkaacaagtcttgtataatccttatggagcaagatgctagtccagggctggagttgagtgataggagatgtcagacatcccctggtagacagcccttgtgga

SEQ ID NO: 297167 - DNA, 201 bp, Homo sapiens
tcagaaacttttcgtgggttctcagccctcagcggcggccccatgcctgggttctcagcccctcagcggcggccccgtgcctgggttctcagcccctcagsggcggccccgtgcctgggttctcagcccctcagcggcggccctctgcctgggttctctgcccctcactctcactttagaagtctccagttgctctgaagg

SEQ ID NO: 297168 - DNA, 201 bp, Homo sapiens
aagaaaaaagtcacagattatttcttcaacaagagattcaattgccattaccctttggatatatatatatatatatatatatatatatatatatatatataaacatgctttattatttatgtacataatcaaatctcccttaatattatgtttttagctatttttaatagtttaagtatactttataaacctcttttgaga

SEQ ID NO: 297169 - DNA, 201 bp, Homo sapiens
gaagaaaaaagtcacagattatttcttcaacaagagattcaattgccattaccctttggatatatatatatatatatatatatatatatatatatatatataaacatgctttattatttatgtacataatcaaatctcccttaatattatgtttttagctatttttaatagtttaagtatactttataaacctcttttgag

SEQ ID NO: 297170 - DNA, 201 bp, Homo sapiens
tcagcctcctgagtagctgagattacaggcgcccaccaccacgcctggctaatttttgtatttttagtagagatagggtttcaccatgttggtcaagcttrtcttgaactcctgacctcaggtgatccacccgcctcggcctcccacagtgttgggattacagacgtgagccaccgtgcccagccagagaaaatcttatat

SEQ ID NO: 297171 - DNA, 201 bp, Homo sapiens
ttagttcactgcaacctccacctccgggttcaagcgattctcctgcctcagcctcccaagtagctgggactgcaggtgcatgccaccgtgcctggcttatwtttgtaatttttgtatagatggggtttcaccatatcggtcaggctggtctcgaactcctgacctcgtgacccgcctgcctcagcctaccaaagcgctggg

SEQ ID NO: 297172 - DNA, 201 bp, Homo sapiens
ttctgtgctgaccttgcctctcctcggggtttttgttcttcgacaataccctgtctgtctcctgtcttctgggctctttttctcctgcattttccactctytctttctctccatgattcagccagcctggttgttttctactcttttttcctgttcattattccactcttctgttgcatccattatgttcttactttcaga

SEQ ID NO: 297173 - DNA, 201 bp, Homo sapiens
cgcccagactggagtgcagtggcgtgatcttagttcactgcaacctccacctccgggttcaagcgattctcctgcctcagcctcccaagtagctgggactrcaggtgcatgccaccgtgcctggcttatatttgtaatttttgtatagatggggtttcaccatatcggtcaggctggtctcgaactcctgacctcgtgacc

SEQ ID NO: 297174 - DNA, 201 bp, Homo sapiens
caccatgagtgggtagggttttctctgccttcctttctcagaaagaaacttcttaatttcttaccacaccgtgcttcccccatgtggttttctttgtgttyatcctgctcagaaggtgcttagcactttttacatctgtagtttggtggtgtggtcggttttggagattcctggccgcagtttctttcatattgcttctgt

SEQ ID NO: 297175 - DNA, 201 bp, Homo sapiens
agtgccaccacccgtccaccaccatgagtgggtagggttttctctgccttcctttctcagaaagaaacttcttaatttcttaccacaccgtgcttcccccrtgtggttttctttgtgttcatcctgctcagaaggtgcttagcactttttacatctgtagtttggtggtgtggtcggttttggagattcctggccgcagtt

SEQ ID NO: 297176 - DNA, 201 bp, Homo sapiens
cagattttagcagcatgtctttttgtttttatttttgtttgagatagcctcactctgttgcccaggctggagtgcagtggcgtgatcttggctcactgcarcctctgcctcccaggtctaagtgattctcctgcctcagccacctgagcagctgggattacagacatgtgccatcacgccctgctagtttttttgtatttt

SEQ ID NO: 297177 - DNA, 201 bp, Homo sapiens
aactagtaagtggtagggccaggatttgaacccaggctgtctaacctcagcatttgcaaatttcaccactgtgcactcctgcaagaggagattttctgagygtgtatgtgaggcacccactccttggcagtcagccccctgagtgagagttgtgggcggtagccgctggtcccacagcctgtgtgggtgctgaactggctg

SEQ ID NO: 297178 - DNA, 201 bp, Homo sapiens
aggctgaggctggaggatcacctaagcccaggagtacagtgctgcgatgagctatgattgtgccactccacttcagcctggcaacaaagcaagagcatatmtcaaaaacaaaaacaaaccaaaaaaccaataccacagactaggtgacttaaataacaagaattcattttctcacagttcttgaggttggaaatccgagat

SEQ ID NO: 297179 - DNA, 201 bp, Homo sapiens
tgcctgtcaccacatctggctaatttttgtatttttagtaaagacggggtttcaccatgttggccaggctggtcttgaaactcctgacctcaagtgagccrcctgtcttagcctcacaaagtgcaaggcactgcgcccgggattacaggcgcaaggcactgtccccggccatacttttctcattttaattctacagatact

SEQ ID NO: 297180 - DNA, 201 bp, Homo sapiens
cggtaagtctcaagccagggtcatctgccgtgcataggcagattacatttgggaggtttgagcaagaagtaatgagcaaagtttttatattttccttgttstgggcattgtactatgtgaacatttaaaaataggtttcttgatggtatgtttctatttactgtagaaaattaggaaataaaaggtctgggagggaaataa

SEQ ID NO: 297181 - DNA, 201 bp, Homo sapiens
cccatggaaacctgcacttcttccccctctcctcctcctagggaacagcactgctcccaagtccccagggcctcctccctgtccacagccccgaccccccmactgagcccatcctggtgtttccccagttcaacggcataaacctgcggagcgccacggagcagcaggcgcggctcatcatcgggcagcagtgtgatacca

SEQ ID NO: 297182 - DNA, 201 bp, Homo sapiens
gcaatataaaaatatgtaaagtgaaaagtggcagtccctttcttccccctttaatcctgctcctagagattgtccctgcccccatttagaagataagcacycagcccaaaccatatgtgcccctacaaatctatatatacctagatagatttcttggtgttgttttgcttatttatgtacagtaatgggatctgcaatttg

SEQ ID NO: 297183 - DNA, 201 bp, Homo sapiens
gtgaggccaggatatctgagtttaacaaacacccaggtgtgtgtggtgcatagaagaccagtactggggaaccactgggctggcctaatccaggacctggytcctctatccgtgtgaatcctggggcctgtgttcatggggccattcgctctctgggccaggccctaccacaggctgaatcctgactatgagaggctgaag

SEQ ID NO: 297184 - DNA, 201 bp, Homo sapiens
accagtggacagtgtgcatcccggcagcgggcctgggctctgcagggaaggggcttagtagaagcagcaggagtagcttgagtgtcccagcatttgctggygtcaccagtaagtgccatggggcactggatgcagggaggtggggcgtgtgtggatggcaaggcagggagccaagagggctcacagtagatgatgctggaa

SEQ ID NO: 297185 - DNA, 201 bp, Homo sapiens
tcggccgaagcttgctccagtagtgattcctgctcagttcctggaggtatagctgagccccagggtgtggggaggggaggcctagagaggggcagttggcygaaggagggctgctaagtggccctgcaccagtgtcccaggcccctgtttagcctggtgcctttgcctttgctgttggactcaagtgggaagtggcccagc

SEQ ID NO: 297186 - DNA, 201 bp, Homo sapiens
tgcctgagtgtccccttttccccacctcatgtccagaaatgcttcccaggggcaggacccacaggcttcttgtggggcaggtccccatcccacatgtggcraggcccctgatagtggtgtgcttgtgtgcaaagtcagctcgtgtgtgtgtgtgtgtgtgtgtgtgtccctaccactgtctcctagacctgcctaagttga

SEQ ID NO: 297187 - DNA, 201 bp, Homo sapiens
aggccccatggttgggattactaccccgatgctggtgctgtcacccccaaacacccctggctcctgggggtccaggctgcgctgcctgagtgtcccctttyccccacctcatgtccagaaatgcttcccaggggcaggacccacaggcttcttgtggggcaggtccccatcccacatgtggcgaggcccctgatagtggtg

SEQ ID NO: 297188 - DNA, 201 bp, Homo sapiens
gcgcctcgtgaatgccagatgaacacaagttcactttattattccccttccacaggcactaccgggaaggcgccgtccccaccacccctcctcactgaccrgcaagtgaatgagaaggtggagaacctctccattcagctgcggctgatgacccgggagagaaacgagctccgcaagcgcctggcctttgctacgcatggc

SEQ ID NO: 297189 - DNA, 201 bp, Homo sapiens
ttctgttctacagacctgtgtgtctgtctccctgacagcagcacacagtcttgattgctgtagctgtatactaagtcttaaattgggtagagagtttcctyccactttagtcattttcaaaatagttttagtgattctgatgcctttttgtatacattttagaatagccgtctatatctacaaaaatcttgttggcatttt

SEQ ID NO: 297190 - DNA, 201 bp, Homo sapiens
gttctctaactggcaggatgctggtgagggggtctgtgttgctgcctgggaagcctcaggcactccctggtaatgccagatgagacaggtatagtgagcawtgaatgctgagctcagctgcactggcctggggaggggctggggcagtgttggaaggcattggagctctgccctggaggctgagtggcattctagagctgg

SEQ ID NO: 297191 - DNA, 201 bp, Homo sapiens
accttgcatgagtataatatcaaagctagcatattgacattggtactgtgtgtgtgtgtgtgtgtgtgtgtgtgtgtgtgtgtgtgtgtgtgtgtgtgtggttaaacacatgttgttctgtgtaaccaccaccgtaatgaagatacgtagctgttctatcagcactgaggtctccctcccactgcccatttgtagtaacac

SEQ ID NO: 297192 - DNA, 201 bp, Homo sapiens
agtacgtaaatgagtaagatgacgacagattgtgatttagagttttaaaggcaattgcaacccccatccagcagtctgttctgcttgtgttatttggacgyccatttggaagaccatttggggtgtcagacatcctcccctcgattacagcagcctcccagggtgtcatttaaacactcagtggcctttagtagtgcattg

SEQ ID NO: 297193 - DNA, 201 bp, Homo sapiens
cgacgaatcaccagggatgcctcccagaaacacagccccggacaaggagcgagttataaagtatccacagacacacttaaacaatatatattctaggtttyctttagcatataaaaatcagtttataagaagaactaggatacacttccagctcataatagtggttaccttcaaggagcccagtggggactgaggttgggg

SEQ ID NO: 297194 - DNA, 201 bp, Homo sapiens
gcaccttgcatgagtataatatcaaagctagcatattgacattggtactgtgtgtgtgtgtgtgtgtgtgtgtgtgtgtgtgtgtgtgtgtgtgtgtgtgtggttaaacacatgttgttctgtgtaaccaccaccgtaatgaagatacgtagctgttctatcagcactgaggtctccctcccactgcccatttgtagtaac

SEQ ID NO: 297195 - DNA, 201 bp, Homo sapiens
ttaggtgcccagtgcaaggggagggaggcccaggggctgcttcctgtctgcttctgctcagaccccttccacgggtgtctccagggggcagtcctcagccrggctctgactgaggctgggggagattcgaggctgtggagaggtaggaaccagtcctctgggtatgtccatttctggaggtggcacagagcccaggcccct

SEQ ID NO: 297196 - DNA, 201 bp, Homo sapiens
tggagcagctgggggaggagaaccagcggttgctgaagcagacagagatgctgacccagcagagggacacggccatccagctgcagcaccagtgcgccctytccctgaggaggtagggctagggccatcgggggccgggggcaaatgggtcctataaggttcccagccaccaccaggggatgagaacagcatgagttattg

SEQ ID NO: 297197 - DNA, 201 bp, Homo sapiens
agaagggcagccccccatgctcctgccgtctgctgccctgaatgcagttacacatgcagctacaggtcctgcttgaggagctgagctcagctgtggtggayagactggacagtgccaggggacaaggcaaggcagcagtggcctttccagaacttagaggcagagggctgttgtagcaagagaagcttcccaggaagcaga

SEQ ID NO: 297198 - DNA, 201 bp, Homo sapiens
ccgcggctgccccatcagctctgagagctgaaatcctcagctccttctcaagttggtctggcttcatggataagagagcactctccaccggcaagagcagrccaggaggggtgggcagtgaggcaccctggggattggccccgccaccccactggctgctgcctgtcaggggtcagctgtggggggccttctggcaggtct

SEQ ID NO: 297199 - DNA, 201 bp, Homo sapiens
atgggaatttcatacaaggaaccaccaagacttctccagacccttgaggcaaaagccagtgtgaagagaaatatttactgcaatgaaatttttgaaaagcytattagaataaatttttaataagtaaagataatgcattagaatttggtaatcatcctagaaaaaccgtgaactcatgttcacatcctggtatctgagcac

SEQ ID NO: 297200 - DNA, 201 bp, Homo sapiens
gcccaggctggtcttaaactcctgggctcaagcgatcctcctgcctcagcctcccaaagtgctaggattacaggcgtgagcccctgcacccagccagcctyagtttcttcatttgcacaatggaatggtggtcatgatgaacaaatgattcaatatagaaaatacatcattgtgcctgcacaaagcaacagtgagttgaga

SEQ ID NO: 297201 - DNA, 201 bp, Homo sapiens
gaaacgtattctcatttcatatacaccttatatacacatagcctgaagataattttgtttttcctttgaggaagcagaataaactgtatcctgcgcctgcrttttgactggcccatcacatgaggtcaggtgtggaattttctgctgtggtgtcatgttggtgctcaaaaagtttcagattttggagatttttggattagg

SEQ ID NO: 297202 - DNA, 201 bp, Homo sapiens
ctctagaacacgcctgcaggccctgcctctgggcctttgaccctgcccccctctctgcccagtgtgctctcgctgctcttcttcatttgcctctgaagtcrccttcttcaagaagcctcttcagccttagcctccctcacagacctccactctgctgctcagatggctctctccagcccattattctgttttattttttat

SEQ ID NO: 297203 - DNA, 201 bp, Homo sapiens
  misc_feature (1)...(201): n = A,T,C or G
aaactcatctcccaagtccttttcccaaaagactgcggctgcgtcctgggatacaggggaaaggcttgtgtaagtcctgggctggctgggtcctttggggngtcttttctcaccaagcccatttctaggcactgttccccggagtttgacccccagcaccactgtgagctccatcctgcggaaccccatctacactgtgcg

SEQ ID NO: 297204 - DNA, 201 bp, Homo sapiens
  misc_feature (1)...(201): n = A,T,C or G
tttggagagggcccctgagctgaggacaggtggaggggagaggacaggtggatgtcatgggtccaggcttctaatgtgtctgctctgctcagggcacaggntgcagggctatgtgacctggtccccatttatagctcagatctagttgccacaggagtgggggtggctctgggtggcttcgtactgctccttatccctcct

SEQ ID NO: 297205 - DNA, 201 bp, Homo sapiens
aaaatgtaagatgtaaaaaagtctattagccctttgctgatatcaattgcttaattttgccgttttgccttcaaagcctaaaatatttactatcttgcccyttatagaaaaagtttaggccaggcatggtggcgcatgcctgtaatcccagcactttgggaagccgaggtgggtggatcacttgaggcagggagttcaaga

SEQ ID NO: 297206 - DNA, 201 bp, Homo sapiens
gagggctcgtgaggtgagactgttttcataatgatactaggatgtcactggtcttttctgcttccatcctcacatgggtgtagagtctagttttctaaagrttccatcctgggtgtgtgacattacagagatgagactccagctgtctctgtgaagctggatgttaaacagcctgtgtaacaaaatgcaaagcaatgatgc

SEQ ID NO: 297207 - DNA, 201 bp, Homo sapiens
tcccagaatgtcatatgaatggttgtgtagtatgtagcttttagagtcaggcttcttttgattaacgcagggcattccagcttcccccacaccctgtgtgygtccgcagttgtattagtcattcatcccttttcattgctgagtaatactccatcataaggacataacacagttgtttattcattccctagctgctctaaa

SEQ ID NO: 297208 - DNA, 201 bp, Homo sapiens
tccacccatttctcctaagccccttgaactcacaggccaactgtcccgtgctcaggctggagggacatcatctctaaagactgctgcctgcctgagtggaraagttgactctcaggccaggctcagggctcacgcctgtaatcttagcactttgggaagccaaagtgggtgtatcacttgagtctaggagttcaagaccag

SEQ ID NO: 297209 - DNA, 201 bp, Homo sapiens
tctttctctgagctaatatttataattttgatgaagtcaaatctatcaaatttttttttttgagatgcccaggctagagtgcagtggtatagtctttgctyactgcaacctctgcttcctgggttcaggtgattcttgtacctcagcctcctgagtagctgggattacaggtgcatgttaccacacctggctaatttttgt

SEQ ID NO: 297210 - DNA, 201 bp, Homo sapiens
taatcgaattctgtgtggagcgtcttggtggtcaacatcttcccatgttacaaaccatgtttcagtggacacacatgtctttgtgttcttttgcacacatrttttgaagtttgagccttacaggtagaattcctgggaccagggcagtgcacatgttctcctaggtcctgctaatctatttgggaaacctctcaggccccg

SEQ ID NO: 297211 - DNA, 201 bp, Homo sapiens
ggagatggaggcgctgcggcaggtaggtgggtgggccggtggctggctttcagcctctcctacagcatcccgggaagaggggctgcagagtgcgtggtgtycggattagaagcctcctgagttggagtaaatggcttctcactggaggcctaagtgcaagctgggttatcagacactgcctgagctcatgcttaatgccca

SEQ ID NO: 297212 - DNA, 201 bp, Homo sapiens
gtggcgccatctgggctcactgagacctcagtctcccaagttcaagcaattctcctgcctcagtctcccatgtagctgggaccacaggcacatgccaccawgtctggctaatttttgtagttttagtagagatggggttttaccatgttggtcaggctggtctcaaactcctgatctcatgtgatctgcctgccttggcct

SEQ ID NO: 297213 - DNA, 201 bp, Homo sapiens
tagagggtgtttttgcatcttttttctttactaaaatagtgtgtattctttagttaaaatagaaaaaaaatcttcaaccaatgtgggcagccacccacctmctcagatccagcctagctttgtggaaatgaccatcctctgtgtaaaccattgggatggatgtgtatccttgtagattttttttttaatgtcacatttaat

SEQ ID NO: 297214 - DNA, 201 bp, Homo sapiens
caccacgcccagctaatttttgtatgtttagtagagacaaggtttcaccatgttggtcaggctggtctcaaactcctgacctcaggtgatccgcctacctyggcttcccaaagtgctgggattacaggcatgtgccactgtgcctggccagggctttttttttttttttttttttttaaagaaagattttagatgtagagt

SEQ ID NO: 297215 - DNA, 201 bp, Homo sapiens
gcggatgtggccaagtgccggcgggactgggccttccaggagcgagacaagattgtagcagagcgtgacagcatccggtatggggtgacctcaagctggtrtgggcttgcgtctccccaggatgaggggacctgctagggtctgttgggagggtcagaatcatttactgtatgtccaggtaaagtgggagggacctgggct

SEQ ID NO: 297216 - DNA, 201 bp, Homo sapiens
tgccgggttcctcccacgccttgtaaacttgaagaggcccttgcagggtaaatggtgctgtttgacttgagtgtttgcttgagggatttgtggggcttccyggccctctgcatgatttatctcagaggaaatgaggcagccctaggggagggggcgccatggttgagagcagcacacaggtgttttgtccatatgtgtgtt

SEQ ID NO: 297217 - DNA, 201 bp, Homo sapiens
aaagcagactcatttggagccaatggggttctcacttggcttaggggatgtttagacagtaaaacatttgaggtaatttttttttttgagacagaatattkctctgtcgccaaggctggggtgcagtggcacagtcttggctcactgcaacctacgcctcctgggttcaagtaattctcctgcctcagcctccggagtagc

SEQ ID NO: 297218 - DNA, 201 bp, Homo sapiens
taccgttgtggtccttggcagcaggggcgggggtggggatgcatcctggtcattggggtcccccaggtcagttcagctggaccagtgcctctcagcaaacrccacctccagaccccaccaggagaagaggcctggctgccacagggagcagggctgggagcatctcagagctgctgggcgaccagccccgcgtcctggcat

SEQ ID NO: 297219 - DNA, 201 bp, Homo sapiens
gtggaaatgaccatcctctgtgtaaaccattgggatggatgtgtatccttgtagattttttttttaatgtcacatttaatacccatatagttttattttttattccctgaaacctgctttaaaaaaaaatcctacaatatatcatgggtttccttacattttctgtgaatttgcacatacaaaaaggtccttgcttgtttt

SEQ ID NO: 297220 - DNA, 201 bp, Homo sapiens
aggcacggtggcaggcacctgtagtccctgctactcaggaggctgaggcaggagaattgcttgaacccgggaggcggaggttgcagtgagctgagattgcrccactgcactccagcctgggtgacagagcgagactctgtctcaaaaaataaaaaacagaaaagtagaaagaagaaaaaagtcacagattatttcttcaac

SEQ ID NO: 297221 - DNA, 201 bp, Homo sapiens
accatgaagactcagtccttcctgcagaggggaggtagccagagtctcagttaaggagggatgttgaaattctgccgtatggtcagcactggcccctctcrggtgcccaagctgccccctggcttctgccttctgatgcatccacccccatccctggcagtatggcagcctggacgtgcggaacaagacagtggaggaagt

SEQ ID NO: 297222 - DNA, 201 bp, Homo sapiens
tagctttgtggaaatgaccatcctctgtgtaaaccattgggatggatgtgtatccttgtagattttttttttaatgtcacatttaatacccatatagtttwattttttattccctgaaacctgctttaaaaaaaaatcctacaatatatcatgggtttccttacattttctgtgaatttgcacatacaaaaaggtccttgc

SEQ ID NO: 297223 - DNA, 201 bp, Homo sapiens
gaaatgagagagtagaaagtgccgtgctagctctggtcagtactgcccacaacccattccccctgcagggacccttccttgtgcatgtcagtggagcttcytggagcaaacagatttaaagactgtaggttttcagtttctaaagaggcaaaaatatttttaacctcaaaagaaatcctttggaggaatcttgcgtgtgaa

SEQ ID NO: 297224 - DNA, 201 bp, Homo sapiens
gagactggggagaccatgaagactcagtccttcctgcagaggggaggtagccagagtctcagttaaggagggatgttgaaattctgccgtatggtcagcastggcccctctcgggtgcccaagctgccccctggcttctgccttctgatgcatccacccccatccctggcagtatggcagcctggacgtgcggaacaagac

SEQ ID NO: 297225 - DNA, 201 bp, Homo sapiens
ctttctccgatattgattgaggttttatgtggagtaaccagggcaggctcagcaagagaccctaagatggatatacttggagctattagaagtattttttrtgtgccctctgattaggggaattggtcgtgtgaggtcaggcccagtggctggggcaaaagttggtatttagcccataggtcttgactgagccttggtaat

SEQ ID NO: 297226 - DNA, 201 bp, Homo sapiens
agagagagggtttcaccatgttgtccaggatggtctcgatctcctgacctcatgatccacccaccttggcctcccaaagtgctgggattacaggtgtgagycatcacacccagccaattcctgttattcttaatttgtttacttggtcaatcccccatgtgtagctgcctcccatgccctctgcagtcccccatcccgttc

SEQ ID NO: 297227 - DNA, 201 bp, Homo sapiens
ggacctggtgtccagggagcatgcacaggacctggagactggggagaccatgaagactcagtccttcctgcagaggggaggtagccagagtctcagttaargagggatgttgaaattctgccgtatggtcagcactggcccctctcgggtgcccaagctgccccctggcttctgccttctgatgcatccacccccatccct

SEQ ID NO: 297228 - DNA, 201 bp, Homo sapiens
tgagccatcacacccagccaattcctgttattcttaatttgtttacttggtcaatcccccatgtgtagctgcctcccatgccctctgcagtcccccatccygttcccatctcctcctgaccctttgtgggctcttccaccccatgccttctctctgtcaggcctggtctcctcatgccatgccaggacccactcctctttc

SEQ ID NO: 297229 - DNA, 201 bp, Homo sapiens
ctggcctaggtggtcttacccctagattcccaagtgttcctgtgcatctggggatgggataggtgccggcaggtatttggagtgaggtggccagaccatcygctgcagaccaggaacccccttccccatgcctcttgagatgaccttgtcctctgctccttccaccaggacactgtgtgacaacctgaggcgggagcggga

SEQ ID NO: 297230 - DNA, 201 bp, Homo sapiens
ggtacccactccactctccagggcagtggcaccaccaccccggagcatccatctgtcatcgacccactgatggagcaggacgaggggcctagcaccccccmagccaagcagagcagctccaggtcagcagacgttgctgtgagccttccctgtgtccgcttcggctgggtggggctgagcacattctccaagtggcgtggg

SEQ ID NO: 297231 - DNA, 201 bp, Homo sapiens; identical to SEQ ID NO: 61621

SEQ ID NO: 297232 - DNA, 201 bp, Homo sapiens
  misc_feature (1)...(201): n = A,T,C or G
tagccttgagacctgccaaggagtgtggggggagcccagtgtctggcccacctttgcttttctcaccaggaagggcaggaagggcagggcagcagggtctngatggccctgcccagcattgtcccctgtgccacaggatggaccaagaattctccaggaggctcagcatgtctgaagtcaaagatgacaatagcgccacaa

SEQ ID NO: 297233 - DNA, 201 bp, Homo sapiens; identical to SEQ ID NO: 61623

SEQ ID NO: 297234 - DNA, 201 bp, Homo sapiens
aataataataattagccaggcatggtagcacacccctgtagtcccagctgcttgggaggctgaggtgggaggattgcttgagcccaggaggtggaggttgyagtgagccttgattgtgtcactgcactctagcctgggtgacagagcaagaccctgtctcaaaaaagaaatttttttttgttaaggttatgttcattgaga

SEQ ID NO: 297235 - DNA, 201 bp, Homo sapiens
tgcagagggtgccaagcttttcatctctgcctgcatcctaatgtccagatctgcgggtgggctccccacacgagctcctgtcacctcctgggactgagctsatttctctactgggaagggctgcttccttcatgggccagccatgcccatgctgctgtcagagccattgctttcgccttccgctttctgtgggggccttat

SEQ ID NO: 297236 - DNA, 201 bp, Homo sapiens
cttcacaggtaggtgtgcgtgggcctggagtggggagcaggcagcagggaaggaagcagaggcttcctaaggctgttttcttagccgtggagaagcccgcrctttctacatgctcccaagtgctgtcatgagcacgttcctgacaagtcaggtgttcagattgcagtccctggccaacgtcaggattcttacaggttgaat

SEQ ID NO: 297237 - DNA, 201 bp, Homo sapiens
gctgtaagaccaaggatgcgcctccagggtcagtgggagcatgacagtgagggagcccaggacaaagggcggtggctgagaaatccacccagctgccagtycatttgctgagcctcggtggtggtgaccatagcagccagggcaactgaaggagctgaggattcctgtgatggggacactcccttctgccctccttcttac

SEQ ID NO: 297238 - DNA, 201 bp, Homo sapiens; identical to SEQ ID NO: 61628

SEQ ID NO: 297239 - DNA, 201 bp, Homo sapiens
ggagtacagcaggtacttcacaggtaggtgtgcgtgggcctggagtggggagcaggcagcagggaaggaagcagaggcttcctaaggctgttttcttagcygtggagaagcccgcgctttctacatgctcccaagtgctgtcatgagcacgttcctgacaagtcaggtgttcagattgcagtccctggccaacgtcaggat

SEQ ID NO: 297240 - DNA, 201 bp, Homo sapiens
ctcatcttggaaaactggggaggttttaaggaggagaagagacattcttgggcagcacttataaagccagccttaaattccatgaagattgaaatagcagragatttcttattaaatggagaggtctccaggcttatcggcaggagaaattgctggagggcttctctcatatcccagggaagattccttgaaagtgcttct

SEQ ID NO: 297241 - DNA, 201 bp, Homo sapiens
gaggctcagtgctcagcctggtgtctggctgtccccacagggagcagagagaccccatctacctgagggacaaggtgactcagaggcattccaaagagcartttgaggcggcgcagaagcttgagcaggagtacagcaggtacttcacaggtaggtgtgcgtgggcctggagtggggagcaggcagcagggaaggaagcag

SEQ ID NO: 297242 - DNA, 201 bp, Homo sapiens
gtggactcaactctccaccacccagaggacactgcatgtctttatgcttgctcttttaggggcttgtgcgggagtgtctcaggaatatatggaggactggktttcctcttatgttagtctgctagggctgctgtaaccaaataccacaggccaggcacggtagctcacacctgtaatcccagcactttgggaagctgaggc

SEQ ID NO: 297243 - DNA, 201 bp, Homo sapiens
ctgggaaaacaatggcaggttgtattcagcatgagaagaaattggaggctgaagcctggggcgtgtagacagcgttctctcaggcggtctgtcgggtctcrgatctccagcctggccctactcacaactcgccacacctttgccaacagccttaaaggcagcaggtctttgtgccaaggcctcctcgggcagttttcatca

SEQ ID NO: 297244 - DNA, 201 bp, Homo sapiens
tcccttatggaacaataggttcttcgagtaacttgcagttcaaggcggaacgcattaaaatcccatcaacaccaagatatccgcggagtgtcgtgggctcygagagaggtaaggacttctcgacattcccatctctcctgcttttcctgcggtctgactcctcatggtggagtctctgggcttagctgagaacttcatagt

SEQ ID NO: 297245 - DNA, 201 bp, Homo sapiens
gctgcttaggagcaggggagccagtggcctgggcacagtcccactcagccccgagctggctcatgactcaggagccgttgccttcgctgagcttcggctcytgtgctggttgggccaagggctcaccaaggccctgctccattttgcctttctgtgctgctgagcttctgggacctgcgctaggggctgctggtgcatctg

SEQ ID NO: 297246 - DNA, 201 bp, Homo sapiens
gcccttactactgtatgaaatgctgtgggcatttagggatggcagcaggctttctaggaggagctcagagctttcttcacatttcctaagatccaagatcrcagaaagcatgagaacactgatgcggtacaactccctgtctctagggtagaagatgacatatttccatcctagagagattccagtctgtaggaaccaggg

SEQ ID NO: 297247 - DNA, 201 bp, Homo sapiens
cattcttttaagcactatattgaattccaccctatagcaactgtgccataatttgagaatatgattcttatactagtaaatggagggaatggtgacgtagygtccatcagcagggaagtggataagtcgatccagaataagtgttaatgggatgcccaaaaggagcagagcggcccacgacgaatcaccagggatgcctcc

SEQ ID NO: 297248 - DNA, 201 bp, Homo sapiens
gggagcatgcacaggacctggagactggggagaccatgaagactcagtccttcctgcagaggggaggtagccagagtctcagttaaggagggatgttgaawttctgccgtatggtcagcactggcccctctcgggtgcccaagctgccccctggcttctgccttctgatgcatccacccccatccctggcagtatggcagc

SEQ ID NO: 297249 - DNA, 201 bp, Homo sapiens
ttcttgtggggcaggtccccatcccacatgtggcgaggcccctgatagtggtgtgcttgtgtgcaaagtcagctcgtgtgtgtgtgtgtgtgtgtgtgtgkccctaccactgtctcctagacctgcctaagttgagtgaagctttatgtggttggtaaacatattaattgttccctgtcacacatgtgttttatttgtttt

SEQ ID NO: 297250 - DNA, 201 bp, Homo sapiens
agccgtgcagattggggaggcctcacctgtcactgggcaggtctgggttacactgaccacaccttcctggggagtgggagctttacctgccaaaccccagrggctgccttgccagagagcagaggagaatggagatggggcaggggaagcaggcgtcgacccacgaggaaaaatcagagcagaaggaagctctgggatgag

SEQ ID NO: 297251 - DNA, 201 bp, Homo sapiens
cagaatcctgccaagcccttctgaggaggtccctgtgaagccaggcaggccattgagggaacctgagggcagagccttggctcaggccctgggcatcaggkggtgctcgccctcaggtgatgtagctgcaggactctgttctgatgagagaggatggtctttctctgtggtctcctgcctcatgggggagatggtttgtga

SEQ ID NO: 297252 - DNA, 201 bp, Homo sapiens
gccaccacaccaggctaatttttgtatttttttttgtggaggcggggtttcaccatgttgctcaggctggtctcaaacccctggcttcaagtgatccaccwgcctcagcctcccaaagtgctgggattacaggcacgagctgtcacgccgagcctacagagaagagacatttcatcacaggtttctggtggactcagacct

SEQ ID NO: 297253 - DNA, 201 bp, Homo sapiens
ctgggctcaggcgatcctcccacctcagcctcccaagtagctgtgactctaggcacgtgccaccacacccagctaattttttggtattttttgctagagayggggtttcgccatgttgcccaggctggtctcaaactcctgagctcaagggatccgtctgccttggcctcccagagtgcttggattacaggcatgagccac

SEQ ID NO: 297254 - DNA, 201 bp, Homo sapiens
ttgtattcatgaggatatgcccctcagtcagttggcccgaaggcaggatgagtgaagacgtggatgtgctagcacatgagagttggcacactatggcccaygggcccactgcctgttttataaatgaagttttattggaacacagccatgctcattggttacaaagtgtctatgactgctttcctgctacaaaggtggagt

SEQ ID NO: 297255 - DNA, 201 bp, Homo sapiens
cagcctgggcaacatagcgaaaccccgtctctaacaaaaaatacaaaaaaattagctgggtgtggtggcacatgcctgtagtcccagctacttaggaggcygaggtgagaggatcgcttgagcccaggaggcagaggttatagtgagctgagactgcgccactgtactccagcctgggtgacaacaagaccctgtctcaaa

SEQ ID NO: 297256 - DNA, 201 bp, Homo sapiens
ctgctgttccgtggctggaagtgagacttgtgcgctcctgttctggagcagtctgggcctgcacagttcattgagataaatgttaaacgtctgcttttctkgactgttccatatcaaggctcccttgggaataaacagcagggcccagctttgcatttattatcctgactggtagcctggtggagaggaaggacagggtgg

SEQ ID NO: 297257 - DNA, 201 bp, Homo sapiens
ggtgtggtggctcacgcctgtaatccgaccactttgggaggccaaggcaggcagatcccttgagctcagaagtttgagaccagcctgggcaacatagcgawaccccgtctctaacaaaaaatacaaaaaaattagctgggtgtggtggcacatgcctgtagtcccagctacttaggaggctgaggtgagaggatcgcttga

SEQ ID NO: 297258 - DNA, 201 bp, Homo sapiens
agtaaactgttgcttactgtaacttttttactttataaactttatatttttttaactttttgactgttttgtaataacacttagcttaaaacacaaacacrttgggccgggtgtggtggctcacgcctgtaatccgaccactttgggaggccaaggcaggcagatcccttgagctcagaagtttgagaccagcctgggcaa

SEQ ID NO: 297259 - DNA, 201 bp, Homo sapiens
ttgaacccaggaggtggaggttgcggtgagccgagatcgcaccactgcactccagcctgggcaacaagagtgaaactctgtctcaaaaaaacaaaaccaamcaaaaaaacccaaaacctgccaggcttgcattgtgtgctactggtggttgttatttgggaggcaccgaggcatgagggtgaagtgcatgtgtttagaatc

SEQ ID NO: 297260 - DNA, 201 bp, Homo sapiens
agaccagcctggccaacatggtgaaactccatctctactaaatacaaaaaattagccgggcatggtggcgcatgcctgtaatcccagctacttggtaggcwgaggcaggagaatcgcttgaacccaggaggtggaggttgcggtgagccgagatcgcaccactgcactccagcctgggcaacaagagtgaaactctgtctc

SEQ ID NO: 297261 - DNA, 201 bp, Homo sapiens
ctagagaggggcagttggccgaaggagggctgctaagtggccctgcaccagtgtcccaggcccctgtttagcctggtgcctttgcctttgctgttggactyaagtgggaagtggcccagctaggaggtaggtaagtggcgtggaagtgcatggtagtgggagtgtgacacaagaggggaacactttattgggcatagcatt

SEQ ID NO: 297262 - DNA, 201 bp, Homo sapiens
cagccttgacctgactctgagttattgggaaacaagggggaaaggaacccattttagctctttcaaatggcctgcctcgtgaggttcagagccgttacgcrgtgggatgtttcacctcccaaggggctgtcaccgtggctctctctgttcacagggaacagatggaatcccagttggaaaaggaggcccggttccgacagc

SEQ ID NO: 297263 - DNA, 201 bp, Homo sapiens
caccactgtgcactcctgcaagaggagattttctgagcgtgtatgtgaggcacccactccttggcagtcagccccctgagtgagagttgtgggcggtagcygctggtcccacagcctgtgtgggtgctgaactggctgtgccctttctcagggtcaatgactggctgctgagaatcaacgatgtggacctcatcaacaagg

SEQ ID NO: 297264 - DNA, 201 bp, Homo sapiens
tctatcctttgccaactcctgactttggcaccttgcatttggtgactgtctagcacaggaggttaggtaggcagagatcctgactggtaggcctgaggccrctctgcctgtggcctgacatgctctctgtcctgctctagatcaatggcattgcactggacaacaagtctctgaatgaatgtgaatctctgctgcggagct

SEQ ID NO: 297265 - DNA, 201 bp, Homo sapiens
aagccaaggcagctggggttcatgggagaggaagctggttctcccttgtcagattactcacaggatcatccttccgttgatttcatttacattttctcccrtcatcagaaacccagttctgatgttagaaggaggtggggaggtgagtgctgggaagcacatgttttgccattgtttactttgtcagggcacagggcttct

SEQ ID NO: 297266 - DNA, 201 bp, Homo sapiens
atttatcttccatttcctctgtggaggcaaggagctgggaagttctgagccaaggtcccacgccacatggccgggcacagcagtgccaagatgttccctcygggtcctcggtgttctgatcccagaaggacatgctcctcccctagcctgctgtgaaggcttatgtgttcctctacctcagaatccccttagttggactcc

SEQ ID NO: 297267 - DNA, 201 bp, Homo sapiens
tcactgctgaaagtgggcaaactctacttgggggaatgccccagtggagcatctgggggtcgggagtgcacgggcctgcactccacctggatgcctgggaygacagacatgacagacatatttcagtctcagccacacaaaggctcaccagactctggctcttcattcgctcagtctggcaaaaataaggcttcagaggcc

SEQ ID NO: 297268 - DNA, 201 bp, Homo sapiens; identical to SEQ ID NO: 61624

SEQ ID NO: 297269 - DNA, 201 bp, Homo sapiens
acttccctcctgggcctgcccaagtggtcttttcaccctgtcatccagccacagtgtctactgaagcccgccgctcctggaattgccaggcagctcttgcrtgctctcttgctgttcatgtgttgctctgttgtgactctagttaaagtgtgtgctttttaatggcaggaactctgtgttctattctttattatgtttctg

SEQ ID NO: 297270 - DNA, 201 bp, Homo sapiens
acagatccctccaggccaagcctctcatggacccttcctcccaagcctgcagtcatcttgtgctctgccctccccatcatctccatactcatcctcttgcyctgctctttctggagactctcatcccacttccctcctgggcctgcccaagtggtcttttcaccctgtcatccagccacagtgtctactgaagcccgccgc

SEQ ID NO: 297271 - DNA, 201 bp, Homo sapiens
ctcacatgttggagacagagagatctctggtgtctcttcctcttaaaaagccgcagttctatcagattagggccttgctcttctgacctcatttaacttayctcctgaagactccgtctccaaaggtagtcacactggggcttagggcttcaacatataaatgtcgaggggacatagttcagtccacagcaccttttaaag

SEQ ID NO: 297272 - DNA, 201 bp, Homo sapiens
gtcccaacaagaagccagctgactgactccaagttcccctctgcccgcctgcccagagcaggaggggccgataaagtgaggtgggaggcctggcagaaacrccgaagtccagatctgctgagcgcgcctcctctgcttggcctgtggatgtggatttctagtgcctggtgcatgtagctctcatggcctggcattgactga

SEQ ID NO: 297273 - DNA, 201 bp, Homo sapiens
gtcgttagatacatacaccttttgcattgttacaccttcctggtaaattaacctttttatcgttataaaatgcccttcttgatctccaggaatgtttcttkctgaaagtctattttacgtgatatttttattgacattaccagttttcttttggttatctttggcacagtttatctttttcttttacttcaaacttttctg

SEQ ID NO: 297274 - DNA, 201 bp, Homo sapiens
taaagtggacaaaggaagcattgctgatggccgcttaaggtaagagttgaggcccaggctctggaggcaaggtggggcccttcttcccagtgcagaggacscgaagagagccaggtagcacttaggtgaacgtttcccagccttagactcacacacagtctgtccaaggcctgcagtctcagcagctaataatgctccgaa

SEQ ID NO: 297275 - DNA, 201 bp, Homo sapiens
gctgagtgccttgcttgccatttgtttttaggttcttacaggctgcttggtagtgaccaagagctgtcggtttctgcagaacttcggcatttctggcctcrgtcctgtgttcatgaacaagtcttgtataatccttatggagcaagatgctagtccagggctggagttgagtgataggagatgtcagacatcccctggtag

SEQ ID NO: 297276 - DNA, 201 bp, Homo sapiens
cccagcccaaaccatatgtgcccctacaaatctatatatacctagatagatttcttggtgttgttttgcttatttatgtacagtaatgggatctgcaattygcatcctaccttggatatctttccaagtgtagcctggctaatgttacccaccttatggtattctgttgtttgattatatgtagtttaaattatccaccta

SEQ ID NO: 297277 - DNA, 201 bp, Homo sapiens; identical to SEQ ID NO: 61630

SEQ ID NO: 297278 - DNA, 201 bp, Homo sapiens
tggactactgcctatttttaaatggtctgtgagctgagcatgggtttttacacttcttaaaatgtaagatgtaaaaaagtctattagccctttgctgatawcaattgcttaattttgccgttttgccttcaaagcctaaaatatttactatcttgccctttatagaaaaagtttaggccaggcatggtggcgcatgcctgt

SEQ ID NO: 297279 - DNA, 201 bp, Homo sapiens
actcgtgccttgccgctccctcaaagtgtaccattcagtggttttcaacatattgataggtgtgtgcagccgccactacagttaattttagagcatttccrtcacctcaaacaaaccccagacccattagctgtcagccccttatcccactgtcctcccacccagccctcagccctaggcagccactactttacttttgat

SEQ ID NO: 297280 - DNA, 201 bp, Homo sapiens
ttgctttttgttttttttccttcactctctttggcctccactcttgtgccctctgctcctttctccgtaggtgccatctccattatgtttggcatttgtcyggtggtgctagtgtctttaaaaaatagccctttgtctattcttccttttagctcttcaggtgtttttcaatatatatcttgaagttgtcgttagatacat

SEQ ID NO: 297281 - DNA, 201 bp, Homo sapiens
gaaaatcttatatttgacttgaaaatctgaacttaaaaggcaaccaaccagagaacctgaggggtaacggaaggacagcaaaacacagaggcctggccccmgtaggggaatcgggtgtaactcggaagaaatgctgacggagctcttaccatgtggcacgcgcaggagcatgctggcctgttttactcagccccggccctg

SEQ ID NO: 297282 - DNA, 201 bp, Homo sapiens
ccctcctcactgaccggcaagtgaatgagaaggtggagaacctctccattcagctgcggctgatgacccgggagagaaacgagctccgcaagcgcctggcstttgctacgcatggcacggcctttgacaagaggtagtaattgcgccgtctcccctgcccaggccccatggttgggattactaccccgatgctggtgctgt

SEQ ID NO: 297283 - DNA, 201 bp, Homo sapiens
tctccgggcctggggtggggtggggcaggggtcgccgagggccaccagccatggagctgtcccatgggagggggctggggccagggctgctggaggagggrttctgcttcttatcttagcttctgctctctacattttgccaaaagtgctggtctaaaaagctgctcctagtgtgagtcagtgctgtatagagcacagtga

SEQ ID NO: 297284 - DNA, 201 bp, Homo sapiens
ttctctactgggaagggctgcttccttcatgggccagccatgcccatgctgctgtcagagccattgctttcgccttccgctttctgtgggggccttatggycattcaggtgacccctcagctaggagccttgctctgtgtccctgaggttgttggcctcattctggactgttttgtatggctcttcatacatttttgtatg

SEQ ID NO: 297285 - DNA, 201 bp, Homo sapiens
tgttgggcacagttgggtacatttgaatctggacccgataattagatgatcttagggaattgttgccagttttcctaggtatgatgatggcattggggttrttatacaggagaatggctttatttgggggaggtacaagctaaagttgttagaagtgatgtgtcatggccgggcatggttgctcatgcctgtaaccccaac

SEQ ID NO: 297286 - DNA, 201 bp, Homo sapiens
tccaggtgctgttatgtggagcacactggagtacccctggcctggtgtctatagacccctttgtcaaactcctatagtacagggctggcccaagttggcgycatcatctttctgtgattctcctcttggccatgagctatctggctccttaaacttgtcgtttcctgcagaatcctgctaatgattagaccaccgccacat

SEQ ID NO: 297287 - DNA, 201 bp, Homo sapiens
ggagcacactggagtacccctggcctggtgtctatagacccctttgtcaaactcctatagtacagggctggcccaagttggcgtcatcatctttctgtgaytctcctcttggccatgagctatctggctccttaaacttgtcgtttcctgcagaatcctgctaatgattagaccaccgccacatgtcctccaaacttcctt

SEQ ID NO: 297288 - DNA, 201 bp, Homo sapiens
tctgccttggcctcccagagtgcttggattacaggcatgagccaccactcttggctaatttttgtattttttgtagagatgtgatttaatctttttttttwaatacatatttcttttgtttctaactctattataatcttatgggaccacatcctacatgtggtccaccatcattgactgaaacgtcgttatgtggcacat

SEQ ID NO: 297289 - DNA, 201 bp, Homo sapiens; identical to SEQ ID NO: 61639

SEQ ID NO: 297290 - DNA, 201 bp, Homo sapiens
gatggcttggcagctggacgagaatgcccagaagatccagcgcgggcagattcccagcaaatatgtgtaagtgttctccgggcctggggtggggtggggcaggggtcgccgagggccaccagccatggagctgtcccatgggagggggctggggccagggctgctggaggagggattctgcttcttatcttagcttctgct

SEQ ID NO: 297291 - DNA, 201 bp, Homo sapiens; identical to SEQ ID NO: 61692

SEQ ID NO: 297292 - DNA, 201 bp, Homo sapiens; identical to SEQ ID NO: 61695

SEQ ID NO: 297293 - DNA, 201 bp, Homo sapiens; identical to SEQ ID NO: 61657

SEQ ID NO: 297294 - DNA, 201 bp, Homo sapiens
ctttgaagaccttcctgcctggaattctctccccattccctccaccctgacccagtggccgtcatcgtaccgtggtaagtggcagcgggttgggactggaygtctatgtgcggcgaagcctggatacggggtgaacacagggacggcaggcctggcccagccctaaggctgatggtaaagtaggagctgaggtggaagtcc

SEQ ID NO: 297295 - DNA, 201 bp, Homo sapiens; identical to SEQ ID NO: 61658

SEQ ID NO: 297296 - DNA, 201 bp, Homo sapiens
ctgcagttgctctgtcagccaggctgccctccctgcattagccctgtatccaggcttcactgcacatggaagcccagccccaacccgctgccactccaggycagtggcaggccctgcccgggggactgggaggtggagtctatcaagagagagctgggttgggagatggatgtgctgggggtggccttgaagactttgaag

SEQ ID NO: 297297 - DNA, 201 bp, Homo sapiens
  misc_feature (1)...(201): n = A,T,C or G
tggtatcgggccctggttctcctcttctgggtcccaggatctgcagactcgaatgtccctggtgtggtttgcaccgtctgccctttcaaatgccctcccangcaggtgcctccaggggcagcgtggctcagccctgctggtttttgcaggtgtcctgtccatggctaatgctggtcctaacaccaacggctcccagttctt

SEQ ID NO: 297298 - DNA, 201 bp, Homo sapiens; identical to SEQ ID NO: 61659

SEQ ID NO: 297299 - DNA, 201 bp, Homo sapiens; identical to SEQ ID NO: 61661

SEQ ID NO: 297300 - DNA, 201 bp, Homo sapiens; identical to SEQ ID NO: 61691

SEQ ID NO: 297301 - DNA, 201 bp, Homo sapiens
ttattttattggatgtttattgacccctttacctgaggggcgccaactgggtgggcttgggtgggctgaggctgctgccagcgccagggccgtggcccccrcctgctccatggtagccactcagaaggtgctttgtgctcacaggcgggcgacttcaccaaccacaatggcacaggcgggaagtccatctacggaagccgc

SEQ ID NO: 297302 - DNA, 201 bp, Homo sapiens; identical to SEQ ID NO: 61697

SEQ ID NO: 297303 - DNA, 201 bp, Homo sapiens
cggcctaatttttgtattttttagtagagagggggtttcaccatggtgcttatcttcatttgaagaaaagacaaatacttgtcatcaagggtggaccataytgatcagaaggtggacaatatggatcacaaggtaagcattgttgaccagaaggagatttattctaatggagcaaggaaaggtatcaatgtgagttagtca

SEQ ID NO: 297304 - DNA, 201 bp, Homo sapiens
cttcttcctgataccactgagaacagaacaggaagggatgacatcatagctaagcctttggggaaggtaggcttttctctggcttaggaggtagtgatgaygtttgattttccaaagagagtggaaggagtaacatgaatgaaagaagctggttcccagtccagagtcctcagcatggagtctttgcactattcatggctc

SEQ ID NO: 297305 - DNA, 201 bp, Homo sapiens; identical to SEQ ID NO: 61698

SEQ ID NO: 297306 - DNA, 201 bp, Homo sapiens
tgagtgacagaatgtgtcctggaagccaggcatcctctggggtgtatttggggcgctcaacaaggcttgatcgagctttgggggtagatctagctattccwtggggattcttttcagaattgctgttttcggtaactaattccatgaccaggtccatggcattggatgacattgcgctacactgttgctcacccgggtcac

SEQ ID NO: 297307 - DNA, 201 bp, Homo sapiens
tcccttccttcatgtgccaggtaatgtagtttcctcttctgtaaggggggatgagagcaggagctgccttgtgggtgtgtgaagatgcctggtatgaggarggtgctgagcagagcagctgcagttgctctgtcagccaggctgccctccctgcattagccctgtatccaggcttcactgcacatggaagcccagccccaa

SEQ ID NO: 297308 - DNA, 201 bp, Homo sapiens
ctgtgcactggtgagaagggcttcggctacaaaggctccaccttccacagggtgatcccttccttcatgtgccaggtaatgtagtttcctcttctgtaagsggggatgagagcaggagctgccttgtgggtgtgtgaagatgcctggtatgaggaaggtgctgagcagagcagctgcagttgctctgtcagccaggctgcc

SEQ ID NO: 297309 - DNA, 201 bp, Homo sapiens
aacgggtatgaccctggaattggggcctggccctgttgacctgtgtttctcttcgaccctcagagaacttcagagccctgtgcactggtgagaagggcttyggctacaaaggctccaccttccacagggtgatcccttccttcatgtgccaggtaatgtagtttcctcttctgtaaggggggatgagagcaggagctgcct

SEQ ID NO: 297310 - DNA, 201 bp, Homo sapiens
tgctcacccgggtcacccgtcctcacaggttggatggcaagcatgttgtgttcggtcacgtcaaagagggcatggacgtcgtgaagaaaatagaatctttyggctctaagagtgggaggacatccaagaagattgtcatcacagactgtggccagttgagctaatctgtggccagggtgctggcatggtggcagctgcaaa

SEQ ID NO: 297311 - DNA, 201 bp, Homo sapiens
agttccatttggaattgacttctaggtgtttccaaattcacagggaaggcaggattggaggtaagagcttccctaggtagacagggctgtggtgtggcccrgcagttgagtggtcaggcaggcagttctcagaggaaatttgggcccttttgagggcatctaacagaattatttctcactggggttccctgagtgaggtta

SEQ ID NO: 297312 - DNA, 201 bp, Homo sapiens
ttgtgtggcacctccccctgcccccttcttgctcctgctttcaccatgtgacatgcctgatcccccttcaccttttgccatggtcataagcttcctgaggsctccctggaagctgagcagatgccagcaccatgcttcctgtacatcctgcagaaccataagccaattaaacctttttaataataaattactcagtctcaa

SEQ ID NO: 297313 - DNA, 201 bp, Homo sapiens
ggttgggagatggatgtgctgggggtggccttgaagactttgaagagccagcatattccagtggtctctgaccttgtcccctgtgtgcccctgagcactgstgtgggagataagagagggagagagagaagtggaggaggcggaggaggaagacaggtccagggcaggaacacacacgccaggacttggggcttcccttcc

SEQ ID NO: 297314 - DNA, 201 bp, Homo sapiens; identical to SEQ ID NO: 61675

SEQ ID NO: 297315 - DNA, 201 bp, Homo sapiens; identical to SEQ ID NO: 61693

SEQ ID NO: 297316 - DNA, 201 bp, Homo sapiens; identical to SEQ ID NO: 61696

SEQ ID NO: 297317 - DNA, 201 bp, Homo sapiens; identical to SEQ ID NO: 61676

SEQ ID NO: 297318 - DNA, 201 bp, Homo sapiens; identical to SEQ ID NO: 61665

SEQ ID NO: 297319 - DNA, 201 bp, Homo sapiens
acaaaagatatttaagttttgtcttttttttttttgcttattattcttattattagctcttattttattggatgtttattgacccctttacctgaggggcrccaactgggtgggcttgggtgggctgaggctgctgccagcgccagggccgtggcccccgcctgctccatggtagccactcagaaggtgctttgtgctcac

SEQ ID NO: 297320 - DNA, 201 bp, Homo sapiens
aagggcttcggctacaaaggctccaccttccacagggtgatcccttccttcatgtgccaggtaatgtagtttcctcttctgtaaggggggatgagagcagsagctgccttgtgggtgtgtgaagatgcctggtatgaggaaggtgctgagcagagcagctgcagttgctctgtcagccaggctgccctccctgcattagcc

SEQ ID NO: 297321 - DNA, 201 bp, Homo sapiens
gtcactaagtatcatctcagaatggcctttaggtcttttgaagattacttaaaaatttgctcagacaaaaagtaagtcatttggaaacaaaggtagttackgtgacaaaagatatttaagttttgtcttttttttttttgcttattattcttattattagctcttattttattggatgtttattgacccctttacctgagg

SEQ ID NO: 297322 - DNA, 201 bp, Homo sapiens
cggcgaagcctggatacggggtgaacacagggacggcaggcctggcccagccctaaggctgatggtaaagtaggagctgaggtggaagtcctgagccaggstgggaactccagcgcgggagggctccctggcacaaggcggtggcaccgggagtccagaccagagtcctgagtcatccgttgggagggatatcaattaggg

SEQ ID NO: 297323 - DNA, 201 bp, Homo sapiens; identical to SEQ ID NO: 61694

SEQ ID NO: 297324 - DNA, 201 bp, Homo sapiens
tttgggggtagatctagctattccatggggattcttttcagaattgctgttttcggtaactaattccatgaccaggtccatggcattggatgacattgcgstacactgttgctcacccgggtcacccgtcctcacaggttggatggcaagcatgttgtgttcggtcacgtcaaagagggcatggacgtcgtgaagaaaata

SEQ ID NO: 297325 - DNA, 201 bp, Homo sapiens; identical to SEQ ID NO: 61666

SEQ ID NO: 297326 - DNA, 201 bp, Homo sapiens
aaaattagctggggtggtggcagacgcctgtagtcccagctacttaggaggctgaggcaggagaatggtgtgaacctgggaggcagagcttgcagtgagcygagatcatgccactgcactccagcctgggcgacagagcaagactctgtctcaaaaaaagaaaaaataataaaaatatactttattttaaaaagtaatatt

SEQ ID NO: 297327 - DNA, 201 bp, Homo sapiens
cttttgctttttagaaaactttttattgggccaggcacggtggctcacgcctgtaatcccagcactttgggaggctgaggcaggtgggtcacctgaggtcrggagttccagaccagtctgaccaacatggagaaacccgatccctactaaaaatacaaaattagctgggcgtggtggtatgtgtctataatcccagctact

SEQ ID NO: 297328 - DNA, 201 bp, Homo sapiens; identical to SEQ ID NO: 61713

SEQ ID NO: 297329 - DNA, 201 bp, Homo sapiens; identical to SEQ ID NO: 61715

SEQ ID NO: 297330 - DNA, 201 bp, Homo sapiens
ggtgtactcatgatgaaagtgaaagcagagagagcgatttttttttcctctttgaatttgttttaacatgctcttacttgtaggacaaatttttcaaacargtggtagaaagcaaaacatcttaatgccatcttcagggcagaagactttgagttgcaggatgtgatttagggaggattttgaaagagtttgcagcactgc

SEQ ID NO: 297331 - DNA, 201 bp, Homo sapiens
tgttgtttgttttttgagatggagcctagctctgccgcccaggatggagtgcagtggcacaatctcagctcattgcaacttccacctcctgggttcaagtrattcttgtgcctcagccccctgagtagccaggactacaggcgcattccaccgcacccagctaagttttgtatttttggtggagacggggtttcgccatgt

SEQ ID NO: 297332 - DNA, 201 bp, Homo sapiens
cctcggccatgcagttcttcaccaagggctaccaggagaccatctcaggtcagtgcgcccgcgggctgctagagcgtgcgggcggcgggggcggtgcttgsaggaaacgcgcgccggctccaggaagtttccggagttgcctcacttttggcgcaggaagccgggcgctgtcacctccgaacccgccctagcctgccgccc

SEQ ID NO: 297333 - DNA, 201 bp, Homo sapiens
ttttaacaaacgtatgcagttatatagccacccatacagtgaagataggaactatttccatcacccaaaaaagtttctttctttccttttgcagtgaagtyctctctcctacctctctggccctggtaaaccacctgtctgccttctatcactatagttttgccttttctagaacataggtagtctcttctgtgtatggat

SEQ ID NO: 297334 - DNA, 201 bp, Homo sapiens
gatctgcccacctcagcctcccaaaatactgagattactggcgtgagccaccacgccaatagccatttttatgtcttctcttgattttatgtcttctcttratttcttctttagctctctgttgctccaagccgagtttttctaatattttgtcacacatttaaaaaataaagccaagaattggtacatttctttaagtta

SEQ ID NO: 297335 - DNA, 201 bp, Homo sapiens
tctcgcctgagcgcccagcgcgggattctcggggtacctgcggttccaaacttgcccacgataaggatcacctgggcacttgctgcggcgacggcttcctrggtagttccttattgagatcccattgtcagggtgtgtatctggattgaagcctcggcgcgatccttccccgaaacctcggggacctgcattcccactgat

SEQ ID NO: 297336 - DNA, 201 bp, Homo sapiens
tgtggtgggcagatcacgaggtcagaagttcgagaccagcctggccaacatggtgaaaccctgtctctactaaaaatacaaaaattagccgagcatggtgrcgggtgcctatagtcccagctactcaggaagctgaggcaggagaatcgcttgaacccaggaggcagaggttgcagtgagctgagatcatgccattgcact

SEQ ID NO: 297337 - DNA, 201 bp, Homo sapiens
ccataaagaagaaactttcagatttgtgtcaagagttcaacttcacaggtaagtgtcagggccatgcaattgactcttgaacaacatgaatttgaactgcrtgggtccacttagacatggctctttttcaagcaaacactgatcaaaaattctacagtatttgcaggatacaaaacctgtatagatggaggggcaactttt

SEQ ID NO: 297338 - DNA, 201 bp, Homo sapiens; identical to SEQ ID NO: 61721

SEQ ID NO: 297339 - DNA, 201 bp, Homo sapiens; identical to SEQ ID NO: 61732

SEQ ID NO: 297340 - DNA, 201 bp, Homo sapiens
aaacccagatacatcacatcagaagccatatcgtatctggaaatcctgcaattgataatgaaggaatctttgaaagggaatctattggtgagcaaattagrcacagaaagcctgtgacttgttcaagaggatagagagagttagtggcttggctgcagccagatccaaggcactgattctgtactcagcctgtcaccattt

SEQ ID NO: 297341 - DNA, 201 bp, Homo sapiens
tgttactttctgctattacttcctcagtgtttgtgtttttgctacctttgttttaaaaatatattatttagtgattttttttttttttttgagacagtttygctcttgttgcctaggctggagtgcagtggtgcgatctcggctcactgcaacctccgcctcccaggttcaagcaattcttctgcttcagcctctcgaata

SEQ ID NO: 297342 - DNA, 201 bp, Homo sapiens
tttattgtattaccctagacattgatttctaatgagttggttgtaggatgcaactggtttcttaagtgggggatatttttctagaatgtgggtacaacttyctgatgtgaggtcctcacaaatttttaaactttgctccagcaaaaagaaccacgtagaggttctctacctgggtccttcctgcctcaccttctttaggtg

SEQ ID NO: 297343 - DNA, 201 bp, Homo sapiens; identical to SEQ ID NO: 61724

SEQ ID NO: 297344 - DNA, 201 bp, Homo sapiens
gtccactccagaccctgtttgcctgggtattagcagcggaggctgcagaacagtggatattggtgaacagcaaatgttgctgcctgatcgttcctctggamgttttgtctcagaggagtacccggctgtgtgaggtgtcagtctgcccctccttgggggtgcctcccagttaggctactcgggggtcagggacccacttta

SEQ ID NO: 297345 - DNA, 201 bp, Homo sapiens
gaactcctgacctcaaatgatacgcctgccttggcctcccaaagtgctgggattataggcgtgagccactgcgcccggcctactgtgtaatcttacaaaamaagaaaaaaagaaaacaatgctctaaaagagaagggaattttgtttctgttccatgcatagacctacacaggcttttttccttttgctgtttcccacttc

SEQ ID NO: 297346 - DNA, 201 bp, Homo sapiens
ctaacagtcaggaccctcagctgccggtctgttggagtttgctggaggtccactccagaccctgtttgcctgggtattagcagcggaggctgcagaacagyggatattggtgaacagcaaatgttgctgcctgatcgttcctctggaagttttgtctcagaggagtacccggctgtgtgaggtgtcagtctgcccctcctt

SEQ ID NO: 297347 - DNA, 201 bp, Homo sapiens
ttttttgtttgttagttttccttctaacagtcaggaccctcagctgccggtctgttggagtttgctggaggtccactccagaccctgtttgcctgggtatyagcagcggaggctgcagaacagtggatattggtgaacagcaaatgttgctgcctgatcgttcctctggaagttttgtctcagaggagtacccggctgtgt

SEQ ID NO: 297348 - DNA, 201 bp, Homo sapiens
tagaataatttagaaaaagccaaagaacagaaatcacaaatctacaagttgaaaatcttgtatcataggttgctggggagtctgatatctaggaatgagaygatatgtaactaaaaatatgctttataaatctttacatcttgatgaatacgttttttaaaaagatggggagagaaaggaatggaccaagagtttgaaagc

SEQ ID NO: 297349 - DNA, 201 bp, Homo sapiens
tgcattggttattctagttagccattcgtctaatttttttaaaggtttttaacttctttgccatgggttcgaaattcctcctttagcttggagtagtttgytcgtctgaagcctttttctctcaattcgtcaaagtcattctccgtctggctttgttccgttgctggtgaggagctgcgttcctttggaggaggagatgca

SEQ ID NO: 297350 - DNA, 201 bp, Homo sapiens
gtgcattcatcacgtagttctcgtgccatggttttcagctccatcaggtcctttaaggacttctctgcattggttattctagttagccattcgtctaattyttttaaaggtttttaacttctttgccatgggttcgaaattcctcctttagcttggagtagtttgttcgtctgaagcctttttctctcaattcgtcaaagt

SEQ ID NO: 297351 - DNA, 201 bp, Homo sapiens
gaatcagctactgaggcttgtgcattcatcacgtagttctcgtgccatggttttcagctccatcaggtcctttaaggacttctctgcattggttattctarttagccattcgtctaatttttttaaaggtttttaacttctttgccatgggttcgaaattcctcctttagcttggagtagtttgttcgtctgaagcctttt

SEQ ID NO: 297352 - DNA, 201 bp, Homo sapiens
cttgtagagtttctgccgagagatcagctgttagtccgatgggcttccctttgtgggtaacctgacctttctctctggctgcccttaacattttttccttyatttcaactttggtgaatctgacaattatgtgtcttggagttgctcttctcgaggagtatctttgtggcattctctgtatttcctgaatctgaatgttgg

SEQ ID NO: 297353 - DNA, 201 bp, Homo sapiens
ctataaaattggacatgttactaaagcaagcctctgatttcagatgtcctaaacgatgctatatttgatgaagatcatgatgagatggtgattgtgaaggwcatagacatgttttccatgtgtgagcatcacttggttccatttgttggaaaggtaaggttctctttgttgtttcccagcaatttaaaacatagtgaaagt

SEQ ID NO: 297354 - DNA, 201 bp, Homo sapiens
gcttgtagagtttctgccgagagatcagctgttagtccgatgggcttccctttgtgggtaacctgacctttctctctggctgcccttaacattttttcctwcatttcaactttggtgaatctgacaattatgtgtcttggagttgctcttctcgaggagtatctttgtggcattctctgtatttcctgaatctgaatgttg

SEQ ID NO: 297355 - DNA, 201 bp, Homo sapiens
agaaaaggtcaaattaatgatttgggggaaagtgcctggacccagtcagttttataagtgttctttcaagctttcaagtaaccacaaattttgcatgtgtrtaaataattcaagagcgtagagaaacctgtgaagtgtcaattaatttgatgaagctgcctattcttgataacaaagcctgataagcctagcattaaaaaa

SEQ ID NO: 297356 - DNA, 201 bp, Homo sapiens
tttattgcatctatttgattcttctctcttttcttctttattagtcttgctagcggtctatcaattttattgatcttttcaaaaaaccagctcctggattyattgattttttgaaggcttttttgtgtctctatctccttcagttctgctctgatcttagttatttcttgccttctgctagcttttgaatatgtttgctct

SEQ ID NO: 297357 - DNA, 201 bp, Homo sapiens
gctctttagtttaattagatcccttttgtcaattttggcttttgttgccatcgcttttggtgttttagacatgaagtccttgcccatgcctatgtcctgartggtattgcctaggttttcttctagggtttttatggttttaggtctaacgtttaagtgtttaatccatcttgaattaatttttgtataaggtgtaaggaa

SEQ ID NO: 297358 - DNA, 201 bp, Homo sapiens
gatttttaagatttcaaatgttctagagacagaaaaagcttccagctgtttgtgtcagactctcaaactgagctccttatcacatccacagttcaggagcrccttacaaaacaaattgctgtagcaatcacggaagccttgcggcctgctggagtcggggtagtggttgaagcaacgtaagtctgcatctgcctttagtaa

SEQ ID NO: 297359 - DNA, 201 bp, Homo sapiens
gccccatcctttaaggggggtttagctaacagtgaggggttggggaagaagctgggcaggggtctagctgcagtgctctgctgtcgaacttgttgtcaggmctgaggactcttctatccttgtcaaggggagtgctcaccttctttgctttcatacaacactgctttcagacttgtaatgaaacttccctgtgggatcccc

SEQ ID NO: 297360 - DNA, 201 bp, Homo sapiens
ttttaagatttcaaatgttctagagacagaaaaagcttccagctgtttgtgtcagactctcaaactgagctccttatcacatccacagttcaggagcgccktacaaaacaaattgctgtagcaatcacggaagccttgcggcctgctggagtcggggtagtggttgaagcaacgtaagtctgcatctgcctttagtaacgt

SEQ ID NO: 297361 - DNA, 201 bp, Homo sapiens
taagatttcaaatgttctagagacagaaaaagcttccagctgtttgtgtcagactctcaaactgagctccttatcacatccacagttcaggagcgccttamaaaacaaattgctgtagcaatcacggaagccttgcggcctgctggagtcggggtagtggttgaagcaacgtaagtctgcatctgcctttagtaacgtcat

SEQ ID NO: 297362 - DNA, 201 bp, Homo sapiens
agactctcaaactgagctccttatcacatccacagttcaggagcgccttacaaaacaaattgctgtagcaatcacggaagccttgcggcctgctggagtcrgggtagtggttgaagcaacgtaagtctgcatctgcctttagtaacgtcataatggtgcactagaagtgatcttgctatttagtgcttctcatattttgta

SEQ ID NO: 297363 - DNA, 201 bp, Homo sapiens
ctgtgagctgagatttaatctttaggcctgcttttaaaaaccaaaccagcagctgtctactcctttaaacaacctgtgttgccttattttgtagacacatrtgtatggtaatgcgaggtgtacagaaaatgaacagcaaaactgtgaccagcacaatgttgggtgtgttccgggaggatccaaagactcgggaagagttcc

SEQ ID NO: 297364 - DNA, 201 bp, Homo sapiens
cagtaatgtcctaggccttcacattcacttaccatgcattcactgactcacccagagcaacttccaatcctgcaagctcctttcatggtaagtgccctacmcagacataccatcttaagtcttttctactatatttttactgtaccttttctatgtttagatgtctttctaaaattattattatttgtattttaaatatag

SEQ ID NO: 297365 - DNA, 201 bp, Homo sapiens
aactgtgagctgagatttaatctttaggcctgcttttaaaaaccaaaccagcagctgtctactcctttaaacaacctgtgttgccttattttgtagacacrtgtgtatggtaatgcgaggtgtacagaaaatgaacagcaaaactgtgaccagcacaatgttgggtgtgttccgggaggatccaaagactcgggaagagtt

SEQ ID NO: 297366 - DNA, 201 bp, Homo sapiens
gagctgagatttaatctttaggcctgcttttaaaaaccaaaccagcagctgtctactcctttaaacaacctgtgttgccttattttgtagacacatgtgtrtggtaatgcgaggtgtacagaaaatgaacagcaaaactgtgaccagcacaatgttgggtgtgttccgggaggatccaaagactcgggaagagttcctgac

SEQ ID NO: 297367 - DNA, 201 bp, Homo sapiens
taaaattggacatgttactaaagcaagcctctgatttcagatgtcctaaacgatgctatatttgatgaagatcatgatgagatggtgattgtgaaggacawagacatgttttccatgtgtgagcatcacttggttccatttgttggaaaggtaaggttctctttgttgtttcccagcaatttaaaacatagtgaaagtttt

SEQ ID NO: 297368 - DNA, 201 bp, Homo sapiens
cctgtagtcacagctacttggaaggctgaggcaggagaatcacttgaacccagaaggtggaggttgcagtgagccgagattgcaccaatgcactgcagccyggttgacagagtgagactccgtctcaacagtaaataaataaataaaaataaaaattaaaattaaaaatagaaaaaggtatagaacaaggatataaaatat

SEQ ID NO: 297369 - DNA, 201 bp, Homo sapiens
tttaatctttaggcctgcttttaaaaaccaaaccagcagctgtctactcctttaaacaacctgtgttgccttattttgtagacacatgtgtatggtaatgygaggtgtacagaaaatgaacagcaaaactgtgaccagcacaatgttgggtgtgttccgggaggatccaaagactcgggaagagttcctgactctcattag

SEQ ID NO: 297370 - DNA, 201 bp, Homo sapiens; identical to SEQ ID NO: 61749

SEQ ID NO: 297371 - DNA, 201 bp, Homo sapiens; identical to SEQ ID NO: 61717

SEQ ID NO: 297372 - DNA, 201 bp, Homo sapiens
gtttgaatagaactttcttttgttgctgaaaagccattgaacatgtattcattttcttcccttagaaataactgagcctcggctgggtgaggtggctcatrcctgtaatctcagcactttgggaggccgaggtgggcagatcacttgaggtcaggagttccagaccagcctggccaacatggtgaaaccccatctctacta

SEQ ID NO: 297373 - DNA, 201 bp, Homo sapiens; identical to SEQ ID NO: 61720

SEQ ID NO: 297374 - DNA, 201 bp, Homo sapiens
tggggccgggcgtggtggctcatgcctgtaatcccaactctttgggaggccgaggcgggcagatcacaaggtcaggagatcgaaaccatcctggctaacayggtgaaacaccatctctactaaaaatacaaaaattagctgggtgtggtggcaggcgcctgtagtcccggctactcaggaggctaaggcaggggaattgct

SEQ ID NO: 297375 - DNA, 201 bp, Homo sapiens
tttaaaacttagttcttagggtgcaggttcttgccaagccatggtggtagcagtgccctttttctccagttaggaagatggggccgggcgtggtggctcaygcctgtaatcccaactctttgggaggccgaggcgggcagatcacaaggtcaggagatcgaaaccatcctggctaacacggtgaaacaccatctctactaa

SEQ ID NO: 297376 - DNA, 201 bp, Homo sapiens
ccgagatcacaccactgcactccagcctggcaagagagtgaatccgtgtccaaaaaaaaaaaaaaaaaaaaaaagagtagtgcttcataagggtgctgaaracttcatattatatcacatcagggccgagtgaggtggctcatgcctgtaatcccagcgacttgggaagtcaaggtgggaggatagcttcaggtcaatagt

SEQ ID NO: 297377 - DNA, 201 bp, Homo sapiens
actttttttgcaatacattaggtctttcctgctgacaaacctacagtttatgaaataagtttgtggagcatatcaaagctgtgcggcagctctgtgcactycagcagatggtgtgactggttgtctgtagtcgtcttagtttccgccattgtgtcagtctgtggaatgtttgggttcatgcttattttggccaagttttcc

SEQ ID NO: 297378 - DNA, 201 bp, Homo sapiens
acccttgagctctggactcttttattcattccttctactttaccattctacatcttgaaccactgtgcgtgcggttcccctaagaggcagtaaagtaattscatcagggtggagggattttatgtgctttcactttctcatttgattatttctacatcttaccgataaacttccatgaatattactgttgtaatgaggagc

SEQ ID NO: 297379 - DNA, 201 bp, Homo sapiens
tttttaatttttaaacacttaaaaaatagagacaggatcttgccctgtcactctatttggagtggagtggtgcaatcatagctcattgtagcattgaactsctgggcttaagtgatcctcctgccttagcctcctgaatagctatgactataggagtgtgctgccgtgcctggctaatttttttcttattttttgtggaga

SEQ ID NO: 297380 - DNA, 201 bp, Homo sapiens
ctgataaaaataaaagttgcaagacaacttcaagaacaaaaagtttaggttgctgcaaagataattgcagtttttgccattatgttcaatagcaagaaccrcagttacttttgcatgaacctaatagataacatttgtgtaagaagggatatttcgatatacttggtaactgtgagctgagatttaatctttaggcctgct

SEQ ID NO: 297381 - DNA, 201 bp, Homo sapiens
gaggaggataacgagctgaacctccctaacctggcagccgcctactcgtccatcctgagctcgctgggcgagaacccccagcggcaagggctgctcaagamgccctggagggcggcctcggccatgcagttcttcaccaagggctaccaggagaccatctcaggtcagtgcgcccgcgggctgctagagcgtgcgggcggc

SEQ ID NO: 297382 - DNA, 201 bp, Homo sapiens
aaaccaaaccagcagctgtctactcctttaaacaacctgtgttgccttattttgtagacacatgtgtatggtaatgcgaggtgtacagaaaatgaacagcwaaactgtgaccagcacaatgttgggtgtgttccgggaggatccaaagactcgggaagagttcctgactctcattaggagctgagcttcattcagtgtgtg

SEQ ID NO: 297383 - DNA, 201 bp, Homo sapiens
ttgtagacacatgtgtatggtaatgcgaggtgtacagaaaatgaacagcaaaactgtgaccagcacaatgttgggtgtgttccgggaggatccaaagactygggaagagttcctgactctcattaggagctgagcttcattcagtgtgtgtgcgttggttgccgatcgtactgccagtagcattgtctgtctgtccggtct

SEQ ID NO: 297384 - DNA, 201 bp, Homo sapiens
cctcagccattttcactggaagattatgtctattcgctaaagataatgggaggcaattagatactttgtttatacaaaaatgcatcttagacacttcataytgaaatgtagcaatcacaaaaggtttttctttttgaatcacaaacctctcggatttattaaattagactgctgtggtgaactaagaattttaacaacttc

SEQ ID NO: 297385 - DNA, 201 bp, Homo sapiens
aaaatgaaactgaagtccagtatactcattaaatagattagacatagattaaatacggtgattgggaagaaaggtctaaagaaattgtgctgaatgcagcrcaaagacaggtagaaaatatgaatgagaatttaagaaacatggaagactgggagggtataatatgcccttaattgaaattcctggagataacagaggcaa

SEQ ID NO: 297386 - DNA, 201 bp, Homo sapiens
ttgatcatcaagtactacgcacttcactgaacgctgggaatgcaggatgagcaaaaccaggtatagttcctgccttcatggaacttacagcctagcagatmgaatcacatgaaatagaaatgtgttgtgagattgagaaatgtgatgataaacaaaaacacagctcagtgagagcacttggcataggaacttgaccaatgc

SEQ ID NO: 297387 - DNA, 201 bp, Homo sapiens
gagacagagccttactctgtcacccaggctggagtgctgtggtgcaatgttggctcacggcaacctccgcctcccagaatcaaacgattctcctgcctcarcctcctgagtacctgggattacaggcatgtgccaccacacccagctaatttttgtatttttagtagagatggggtttcaccatgttagccaggctggtct

SEQ ID NO: 297388 - DNA, 201 bp, Homo sapiens
gagacaggaaagtccagatgttatggagaaagtagcttttgagttgaacctagaaggaaattcattttgagtttttttgggttgtttgttttttgcagaaygtgtccatgctggtttagagattatggtctaagtgtttttcaataaaaggcatacactaacattcatagttacctgtaccagagttaaaattaaatggag

SEQ ID NO: 297389 - DNA, 201 bp, Homo sapiens
ccaccttcctggggctagcgtacaaaatctccaagcaactgcaaggcagggagaggaggctctcaataaattactgtgtaatctttttttttgttgttgttgttgttgttgttgttgttttgagacagagtttcactcttgttgcccaggctggagtgcaatggtgtggtcttggctcactgcaacctctgtcttctgggt

SEQ ID NO: 297390 - DNA, 201 bp, Homo sapiens
tttctagaacacatgcaaaatatcggtcttcagaaagcctaataaattccaaataagtcaaattaaatccctacttggattaaaacatagtaaattgcagyatatacttataaaatatagttaatataaaagcagccaaagaaagaaatatcgattatctaaaaggcaacagcagttacactgaattggtttgccaacagc

SEQ ID NO: 297391 - DNA, 201 bp, Homo sapiens
actattctgggtctgttctgaagggagaggcagtaggactaggagttaaattgtcatgccgaggtctctgagcatgggtgggcctgtcagaattgtcatcrctcactctgttgacttccagcagctgacaggcaaggccctaggaagctcttcagcctcctttccttgctagaggtgctgttttccctggaaatgttcaag

SEQ ID NO: 297392 - DNA, 201 bp, Homo sapiens
gctccgcggcgcaggctgagccgccgggccataaaaaggaggcgcggccgggctttccagcctgtggccgctcccggctcggagtgtgatctaagcaggtygcgtaccttcctcaggtgactccggccacagcccattgtccgcggccaccggcggagtttagccgcagacctcgaagcgccccggggtccttcccgaacg

SEQ ID NO: 297393 - DNA, 201 bp, Homo sapiens
agccaccttcctggggctagcgtacaaaatctccaagcaactgcaaggcagggagaggaggctctcaataaattactgtgtaatctttttttttgttgttkttgttgttgttgttgttgttttgagacagagtttcactcttgttgcccaggctggagtgcaatggtgtggtcttggctcactgcaacctctgtcttctgg

SEQ ID NO: 297394 - DNA, 201 bp, Homo sapiens
cccagccaccttcctggggctagcgtacaaaatctccaagcaactgcaaggcagggagaggaggctctcaataaattactgtgtaatctttttttttgttkttgttgttgttgttgttgttgttttgagacagagtttcactcttgttgcccaggctggagtgcaatggtgtggtcttggctcactgcaacctctgtcttc

SEQ ID NO: 297395 - DNA, 201 bp, Homo sapiens
gcccccagccaccttcctggggctagcgtacaaaatctccaagcaactgcaaggcagggagaggaggctctcaataaattactgtgtaatctttttttttkttgttgttgttgttgttgttgttgttttgagacagagtttcactcttgttgcccaggctggagtgcaatggtgtggtcttggctcactgcaacctctgtc

SEQ ID NO: 297396 - DNA, 201 bp, Homo sapiens
gaggctgaggtgggcagatcaccaggtcaggagatcgagaccatcttggctaacacgctgaaaccctgtctctactaaaaatacaaaaaaaaaaaaaaaaattagccgggcgtggttgtgggcgcctgtagtcccagctactcgggaggctgaggcaggtgaatggtgtgaacccgggaggcagagcttgcagtgagcgga

SEQ ID NO: 297397 - DNA, 201 bp, Homo sapiens
cagaaggtggaggttgcagtgagccgagattgcaccaatgcactgcagcctggttgacagagtgagactccgtctcaacagtaaataaataaataaaaatwaaaattaaaattaaaaatagaaaaaggtatagaacaaggatataaaatatttttgcacagctgtacaatgtgtttttgttttaagctgtgttattacaaa

SEQ ID NO: 297398 - DNA, 201 bp, Homo sapiens
tccatgaatattactgttgtaatgaggagcaaaatgttagtaaagataactttatacgtgaaaacttgaactcttaccaagaaacgtagtgtttgtgacarggctggctgagaggatgagaatagctcatcagtactgggttggctgaaggaaacatgcatgtcagtactattttgagggcagctgagaacatctatttca

SEQ ID NO: 297399 - DNA, 201 bp, Homo sapiens
ggataacttgtaatttggcatcaatgtccaacacccttgagctctggactcttttattcattccttctactttaccattctacatcttgaaccactgtgcrtgcggttcccctaagaggcagtaaagtaattgcatcagggtggagggattttatgtgctttcactttctcatttgattatttctacatcttaccgataaa

SEQ ID NO: 297400 - DNA, 201 bp, Homo sapiens
gagggacattgtccttttgctttttagaaaactttttattgggccaggcacggtggctcacgcctgtaatcccagcactttgggaggctgaggcaggtggrtcacctgaggtcgggagttccagaccagtctgaccaacatggagaaacccgatccctactaaaaatacaaaattagctgggcgtggtggtatgtgtctat

SEQ ID NO: 297401 - DNA, 201 bp, Homo sapiens
ctaaggctctaattttggtctaccagaaatattcagagtagtaaactgagaccagaaaggcgagttctttggcttggataactttgagagttaatagtatrcatgattggcagccttcagttttatccagcaataaatctaaacagtttaaaataagtactttccccttacctcagtacagagaggccctggccactgcca

SEQ ID NO: 297402 - DNA, 201 bp, Homo sapiens
tttgggaggctgaggcaggtgggtcacctgaggtcgggagttccagaccagtctgaccaacatggagaaacccgatccctactaaaaatacaaaattagcygggcgtggtggtatgtgtctataatcccagctactcaggaggctgaggcaggagaattacttgaacctgggaggcagaggttgcagtgagctgagattgt

SEQ ID NO: 297403 - DNA, 201 bp, Homo sapiens
ttgggaggctgaggcaggtgggtcacctgaggtcgggagttccagaccagtctgaccaacatggagaaacccgatccctactaaaaatacaaaattagctrggcgtggtggtatgtgtctataatcccagctactcaggaggctgaggcaggagaattacttgaacctgggaggcagaggttgcagtgagctgagattgtg

SEQ ID NO: 297404 - DNA, 201 bp, Homo sapiens
aaaaatacaaaattagctgggcgtggtggtatgtgtctataatcccagctactcaggaggctgaggcaggagaattacttgaacctgggaggcagaggttrcagtgagctgagattgtgccattgcactccagcctgggcaacaagggcaaaacttcgtttcaaaaagaaagtttttattttgaaacaattttagactgac

SEQ ID NO: 297405 - DNA, 201 bp, Homo sapiens
ggatttttaaatgttacttacagaaaaggactttgctactttgataaggaaaaatatctagttttaatttgtattcccttaatattttagggaggattaaygttcgtttatgttgactgtctattcatgtttatccataattctacctttctataaaattggacatgttactaaagcaagcctctgatttcagatgtccta

SEQ ID NO: 297406 - DNA, 201 bp, Homo sapiens; identical to SEQ ID NO: 61704

SEQ ID NO: 297407 - DNA, 201 bp, Homo sapiens
ccattatgtttattctggtgttctttcaaagtcattagatgctttctctgaattttttttttttttagcaaaatcatctgcaaaagaaaaatgtgtcctcyttacagaactttgaccaccttagcaaaagaaaagcagattctggcaaactgagtgtttcaagcaggggctcttttaaaatttgtttttttctttcacttt

SEQ ID NO: 297408 - DNA, 201 bp, Homo sapiens; identical to SEQ ID NO: 61706

SEQ ID NO: 297409 - DNA, 201 bp, Homo sapiens
gcggacggctggaagggcgagcggccccgcagcgaggaggataacgagctgaacctccctaacctggcagccgcctactcgtccatcctgagctcgctggscgagaacccccagcggcaagggctgctcaagacgccctggagggcggcctcggccatgcagttcttcaccaagggctaccaggagaccatctcaggtcag

SEQ ID NO: 297410 - DNA, 201 bp, Homo sapiens
aatctagctctcccaccggctggttggctcttcttcagcagtcagctagtgtttccaaatgacagtatctgtgtcctcatctgtaaagtcgggacaataactggtgttttttttgttttgttttgttttttgagacagtttcactctgtcacccaggctagagtgcagtggcgcgatctcggctcactgcaagctccgctt

SEQ ID NO: 297411 - DNA, 201 bp, Homo sapiens; identical to SEQ ID NO: 61709

SEQ ID NO: 297412 - DNA, 201 bp, Homo sapiens
ataacgagctgaacctccctaacctggcagccgcctactcgtccatcctgagctcgctgggcgagaacccccagcggcaagggctgctcaagacgccctgragggcggcctcggccatgcagttcttcaccaagggctaccaggagaccatctcaggtcagtgcgcccgcgggctgctagagcgtgcgggcggcgggggcg

SEQ ID NO: 297413 - DNA, 201 bp, Homo sapiens
ttcctcacctatccccgcttttgtattttctctgctatttgctttgtccacctctagaaacccttccatgcctgggcattccccacctgactcatttgccwgtgatttctatatgaggactgtaatttgagtctagtatttggttgagtagactgcagtgttaaaactcaccaggagagggcaactgtctaatcattggat

SEQ ID NO: 297414 - DNA, 201 bp, Homo sapiens
tccaagcaggaactcacatccaggaacaaaatgaatggagaccagaaatccagatatgtatgcccaagaaaagcagaattttatccaggacttctcccagrttgtcaggatgctgactgaggatgagatggggcacccagagacaggagagtctattacctggctcaaagaggtcctggagtacactgccactggagacaa

SEQ ID NO: 297415 - DNA, 201 bp, Homo sapiens
tctggtaggtgatttaattttaataataatattttactgatttatttgaatgatttctcccttcttcctcacctatccccgcttttgtattttctctgctrtttgctttgtccacctctagaaacccttccatgcctgggcattccccacctgactcatttgccagtgatttctatatgaggactgtaatttgagtctagt

SEQ ID NO: 297416 - DNA, 201 bp, Homo sapiens
gggcgagcggccccgcagcgaggaggataacgagctgaacctccctaacctggcagccgcctactcgtccatcctgagctcgctgggcgagaacccccagyggcaagggctgctcaagacgccctggagggcggcctcggccatgcagttcttcaccaagggctaccaggagaccatctcaggtcagtgcgcccgcgggct

SEQ ID NO: 297417 - DNA, 201 bp, Homo sapiens
cgcgatctcggctcactgcaagctccgcttcccgggttcacgccattctcctgcctcagccccccgagcagctgggactacaggcacccaccaccgcgccyggctaattttttgtatttttagtagagacggggtttcactgtgttagccaggatggtctcaatctcctgacctcgtgatccaccggcctcggcctcccaa

SEQ ID NO: 297418 - DNA, 201 bp, Homo sapiens; identical to SEQ ID NO: 61716

SEQ ID NO: 297419 - DNA, 201 bp, Homo sapiens
ggcgagcggccccgcagcgaggaggataacgagctgaacctccctaacctggcagccgcctactcgtccatcctgagctcgctgggcgagaacccccagcsgcaagggctgctcaagacgccctggagggcggcctcggccatgcagttcttcaccaagggctaccaggagaccatctcaggtcagtgcgcccgcgggctg

SEQ ID NO: 297420 - DNA, 201 bp, Homo sapiens
aaccaaaccagcagctgtctactcctttaaacaacctgtgttgccttattttgtagacacatgtgtatggtaatgcgaggtgtacagaaaatgaacagcaraactgtgaccagcacaatgttgggtgtgttccgggaggatccaaagactcgggaagagttcctgactctcattaggagctgagcttcattcagtgtgtgt

SEQ ID NO: 297421 - DNA, 201 bp, Homo sapiens
acaacctgtgttgccttattttgtagacacatgtgtatggtaatgcgaggtgtacagaaaatgaacagcaaaactgtgaccagcacaatgttgggtgtgtyccgggaggatccaaagactcgggaagagttcctgactctcattaggagctgagcttcattcagtgtgtgtgcgttggttgccgatcgtactgccagtagc

SEQ ID NO: 297422 - DNA, 201 bp, Homo sapiens; identical to SEQ ID NO: 61757

SEQ ID NO: 297423 - DNA, 201 bp, Homo sapiens
cggccccgcagcgaggaggataacgagctgaacctccctaacctggcagccgcctactcgtccatcctgagctcgctgggcgagaacccccagcggcaagkgctgctcaagacgccctggagggcggcctcggccatgcagttcttcaccaagggctaccaggagaccatctcaggtcagtgcgcccgcgggctgctagag

SEQ ID NO: 297424 - DNA, 201 bp, Homo sapiens
cgagcggccccgcagcgaggaggataacgagctgaacctccctaacctggcagccgcctactcgtccatcctgagctcgctgggcgagaacccccagcggyaagggctgctcaagacgccctggagggcggcctcggccatgcagttcttcaccaagggctaccaggagaccatctcaggtcagtgcgcccgcgggctgct

SEQ ID NO: 297425 - DNA, 201 bp, Homo sapiens
tatcaccatctgtttcgtaaattccattttcggtttaacagctggattgtgaaagatatacaaaattatccagttaaaaaactaaatttggcaagtgtgtrtgtgtttttaaaaatgactccttgaatacactgttttgattccttagacagtttctaaggctctaattttggtctaccagaaatattcagagtagtaaac

SEQ ID NO: 297426 - DNA, 201 bp, Homo sapiens
gtaacactgtatcaaggatttttaaatgttacttacagaaaaggactttgctactttgataaggaaaaatatctagttttaatttgtattcccttaatatyttagggaggattaacgttcgtttatgttgactgtctattcatgtttatccataattctacctttctataaaattggacatgttactaaagcaagcctctg

SEQ ID NO: 297427 - DNA, 201 bp, Homo sapiens
atattttccaaaactccctgttgattggctgtatttgggaacccctgttgcgaaggaagatcccttatctcttcatctgtcactaatgatggtggcttgcrcactctgatggtacttacttggatgggattacagatggttccatcacacccatctgtatgaaatctcgtggtataagtgaatgtaggatgataagggacg

SEQ ID NO: 297428 - DNA, 201 bp, Homo sapiens
ggggacatcaggaagcaccactctgcagtggttggtggtcttctgtattagtaagggttccctagagggacagaactaataggagatatatatatatatawaaaggggagtttattaagtattgacttacatgatcgcagggtcccacaataggctgtctgcaagcttgaggagcaaggagagccagtctgagtctcaaaa

SEQ ID NO: 297429 - DNA, 201 bp, Homo sapiens
aatgagttggttgtaggatgcaactggtttcttaagtgggggatatttttctagaatgtgggtacaactttctgatgtgaggtcctcacaaatttttaaamtttgctccagcaaaaagaaccacgtagaggttctctacctgggtccttcctgcctcaccttctttaggtggagttggctccagtttcctccttgtctctg

SEQ ID NO: 297430 - DNA, 201 bp, Homo sapiens
acctgttgtttcctgactttttaatgattgccattctaactggtgtgagatggtatctcattgtggttttgatttgcatttctctgatggccagtgatgakgagcattttttcgtgtgtctgttggctgcataaatgtcttcttttgagaagtgtctgttcatatccttcacccactttttgatggggttgtttgatattt

SEQ ID NO: 297431 - DNA, 201 bp, Homo sapiens
gcacttttatccaggcttggaaggatacccaaagatgaagttccaaggagtaccatgagtcgagtcagacaaacacgatggaagagggcagatagtagaaytatcagagataggatataaaacaagtacagtaagtcctcactttacgttgtcgatgggttcttggagactgcaacttgaagcgaaatgacttcaggcaaa

SEQ ID NO: 297432 - DNA, 201 bp, Homo sapiens
ccattttatcctgttactttctgctattacttcctcagtgtttgtgtttttgctacctttgttttaaaaatatattatttagtgattttttttttttttttgagacagtttcgctcttgttgcctaggctggagtgcagtggtgcgatctcggctcactgcaacctccgcctcccaggttcaagcaattcttctgcttcag

SEQ ID NO: 297433 - DNA, 201 bp, Homo sapiens
gggaggccaaggcaggtggtggatgtatcgctttgagctcaggagtttgagaccaacctaggcaacatggtaaaaccctgtctctaccaaaaaaaaaaaaaccaaccaaaaaaaaaaaaaacgaaaaccaatcaaccaaacagacaaacaaaaaaacaggcaaaaattagctagcatggtggcatgcacctgtggtctcag

SEQ ID NO: 297434 - DNA, 201 bp, Homo sapiens
ctgtgaagcaggcactttatgctcattttatagccgagaagactgaggtacagagtaccttgcccaaggcctaataactagtaagtgatggagccagatcyttttttttttttttttttttttttgagacggagtcttgttctctcttgcccaggctagagtacagtgacatgatctcggctcactgcagcctccacatcc

SEQ ID NO: 297435 - DNA, 201 bp, Homo sapiens; identical to SEQ ID NO: 61795

SEQ ID NO: 297436 - DNA, 201 bp, Homo sapiens; identical to SEQ ID NO: 61796

SEQ ID NO: 297437 - DNA, 201 bp, Homo sapiens
atcacagcctggagtatacagtagctgctctttcttcttggttagagttcacacttgaaaatatcttttggccaggttcgtgtgccttatgtccccctctrgaggggaaaagggtggctcccattcaggctgaggacagtgacattgattcacctttcaggtctaatctcccccaagcgattttccgcagacctctatcct

SEQ ID NO: 297438 - DNA, 201 bp, Homo sapiens; identical to SEQ ID NO: 61802

SEQ ID NO: 297439 - DNA, 201 bp, Homo sapiens
aaaattctccttccctggagtccggccccacctgggaggagactgctgcctctcccttctttctcccttctccaaaatggggctgatgaagagggaggggmcaaggggaggtgatgggcagaggagagagcattgctgtggttctccagtctggttacatattactctacaaccccgagtggcaacagtccctgggggtaa

SEQ ID NO: 297440 - DNA, 201 bp, Homo sapiens
ttgatcttgtgatttacagatctctctcatgtaagaggagcaacaggaaagcacgtgagaaaggcctgcagcactgagtgctcagggctaaggtgacagtrctgctcccagagaccctgacggtctcagcagggcatgggcacagaaatcctctgggtattagagacagacgcctaccaaagcacagggcgtcatcccacg

SEQ ID NO: 297441 - DNA, 201 bp, Homo sapiens; identical to SEQ ID NO: 61804

SEQ ID NO: 297442 - DNA, 201 bp, Homo sapiens
gctcccattcaggctgaggacagtgacattgattcacctttcaggtctaatctcccccaagcgattttccgcagacctctatcctcactaagctatttatraaggatgagctccgctcatgaattctgcctctggatattgactcgaggacgtgctgaccttttgctttaaagtttgcatcacatagtgcaccatctaatt

SEQ ID NO: 297443 - DNA, 201 bp, Homo sapiens
aaaaagaaaaaaagaaaaagaagtgtaaggattataggtgtgagccactgcacctgctctatgtgtgtgtgtgtgtgtgtgtgtgtgtgtgtatttttttwatttatgtatggttttttgttttgttttgaggcagggtctctcacccaggctatagtgcattggcatgatcatggtttactgcagcctctacctcttggg

SEQ ID NO: 297444 - DNA, 201 bp, Homo sapiens; identical to SEQ ID NO: 61805

SEQ ID NO: 297445 - DNA, 201 bp, Homo sapiens; identical to SEQ ID NO: 61806

SEQ ID NO: 297446 - DNA, 201 bp, Homo sapiens
gcgcctggccgccttatttcttgaaactgtttcttgattctttactcttggtcctagaaaaacttggccaaagaatgtgaatagatcttggaaaattcacsaagtgtttgggaaaagtctccaagtctttgggcaaatccagagatctctcaggcatcccatcagcaatgcatggtccttggtgactctggtgacccctaa

SEQ ID NO: 297447 - DNA, 201 bp, Homo sapiens; identical to SEQ ID NO: 61807

SEQ ID NO: 297448 - DNA, 201 bp, Homo sapiens; identical to SEQ ID NO: 61808

SEQ ID NO: 297449 - DNA, 201 bp, Homo sapiens
ggaatgcttttggccttgaaggactgtttggctggagatcagtgggaaggatgttctttgttttttttgagagggagtttcgctctgtcgcccaggctggwatgcagtggcgatctcagctcactgcaacctctgcctcctgggttcaagcaattctcctgcctcagcctcccaagtagctgggattacaggctcccacca

SEQ ID NO: 297450 - DNA, 201 bp, Homo sapiens
tcgtgtgccttatgtccccctctggaggggaaaagggtggctcccattcaggctgaggacagtgacattgattcacctttcaggtctaatctcccccaagygattttccgcagacctctatcctcactaagctatttataaaggatgagctccgctcatgaattctgcctctggatattgactcgaggacgtgctgacctt

SEQ ID NO: 297451 - DNA, 201 bp, Homo sapiens; identical to SEQ ID NO: 61809

SEQ ID NO: 297452 - DNA, 201 bp, Homo sapiens
ggacatcaactggcacttactctgtttaggaacttgagttgaatcatttctaaacttgtcctttagaccacgcctagggcagcaaattccacttcctagamctgcaaaccgggagaggatgtagttagattctggcatcctgccccggctctttgagggaaaagttctttcccctgctctaagtagggcgggcccagcctc

SEQ ID NO: 297453 - DNA, 201 bp, Homo sapiens
ttcttttcttttctttctttcttttttttttttgagacctagtcttgctctgttgaccaggccagagtgcagtggtgcgatcttggttcactgcaacctcwgcctcccaagtagctggaactgtaggcacgaaccaccatgcctgactacttttcgtattttttttgtagagacagggtttctcgagttgcccagagccat

SEQ ID NO: 297454 - DNA, 201 bp, Homo sapiens; identical to SEQ ID NO: 61799

SEQ ID NO: 297455 - DNA, 201 bp, Homo sapiens
cagtgtattcatgaggttgttggtctcctttaaataataggtacatgttcttcttggcgcgtttcaagtgataatttaataaaagtcaagagaactaatgwagtccttaatgcttttcactatgtgcccagaacctgggtgcgtaagtccttggtgattcttggtgctgttagctacctgctgtatcccttcatcctgttt

SEQ ID NO: 297456 - DNA, 201 bp, Homo sapiens; identical to SEQ ID NO: 61800

SEQ ID NO: 297457 - DNA, 201 bp, Homo sapiens; identical to SEQ ID NO: 61801

SEQ ID NO: 297458 - DNA, 201 bp, Homo sapiens
agcataagcacgtgcagctcccagtggtgaaagtggatgcaggcagcagccatggctgtttataatggtaaaatggggttctgtctatcaaaggaacacckgttttatctatgaggtcacttataagttactcatctgggctgagagcctctctgaccccttgttttacaaagaggcccagccagggccccagagctggcg

SEQ ID NO: 297459 - DNA, 201 bp, Homo sapiens
ttgctaagtcgggtgttccctccatgtggggacatcgcccccatttttctgtttggatctgtgatgatccatatttttcagtagaggctcttctgagaggscgttcggagcccagctgtttcctttaggctctgatgtcttctctctcttttccgggacacttcctggattattcctaaagggacagcctcatgtaagccc

SEQ ID NO: 297460 - DNA, 201 bp, Homo sapiens
tgcggttggagaggctgcgattgtttaactctctttagctgtgttggggctcccaatagcccagcagacaagggcccttcagaggacaaaggccgggactscagcgagtgcatcaatgctgacctggcccagctcggggagagtgaattcagaaagacccccattgccctggccttttgtgtttctccccagctggctcta

SEQ ID NO: 297461 - DNA, 201 bp, Homo sapiens
tcgtgcctgtgggttgattgtgaatcaggcagaaacagatctccctggcacccccaaaggtgctgtcatccgcagctgtggtgacagcattccgtaacttsagcagcccttcccggaaggggtgcaggtcctcggtggcgggcaggggcagggctctggcttgtcttcatgggcctttttcatctctaatttctattaggt

SEQ ID NO: 297462 - DNA, 201 bp, Homo sapiens; identical to SEQ ID NO: 61803

SEQ ID NO: 297463 - DNA, 201 bp, Homo sapiens
gcatcaatgctgacctggcccagctcggggagagtgaattcagaaagacccccattgccctggccttttgtgtttctccccagctggctctaatctttaartatttacccggcccctttgtgcatatatgacttgtgcactttgggctgatggtgctcataaattacatatcgtttacctgttttccagcctagagagagg

SEQ ID NO: 297464 - DNA, 201 bp, Homo sapiens
ctctactaaaaatacaaaaatgaactgggcgtggtggtgggcacctgtagtctgagctacttgagaggctgaggcaggagaatcgcttgaacctgggaggyggaggttgcagtgagctgagatcacgcagttgcattccagcctgggcgacacagcgagactctgtctcaaacaaaacaaaacaaaacaccagaaacaaaa

SEQ ID NO: 297465 - DNA, 201 bp, Homo sapiens
acgaggtcaggagttcaagaccagcctggccaagccaggagttcgagaccagccttgccaacatagcgaaaccctgtctctactaaaaatacaaaaatgarctgggcgtggtggtgggcacctgtagtctgagctacttgagaggctgaggcaggagaatcgcttgaacctgggaggcggaggttgcagtgagctgagatc

SEQ ID NO: 297466 - DNA, 201 bp, Homo sapiens
tcaggggagggaagtgtgtttgggaggacctgtcctgtgtgccagggtgggagacgctgtggcttcaagaccctggccctgggatgccggctactcaggawgatgggccgagatgggcagccagggggctgaggaggctgatggcccgggcctgggccccggcaggctgcctgggtggggagggctcagggggcattttca

SEQ ID NO: 297467 - DNA, 201 bp, Homo sapiens
ggctgttccagtgggagtggcctaatcagccctctctgccctaactttctctttcacaactaaacatgtgaaacttgcccagaggccggcgggtgcagcckggttgaggctgtgcggcctgcactctggctggggactttccatttcccttgctggtcacaggattcctgggaaagcagccctggtgggggcagcattggg

SEQ ID NO: 297468 - DNA, 201 bp, Homo sapiens
acctgacagctggtctctgagaaggttcctcctcctcgtgcaaggctgagcaatattccaatgtgtggctgttgcttttatgtccttatgtggacatctcrgcgctggcccatgtcctgcgttatacacggctgtgcagtgagtacccttgcagtgcttcgtttaaccgtgtgtggaaacagctgtggggtaaatttctgc

SEQ ID NO: 297469 - DNA, 201 bp, Homo sapiens
ctcccctatttgtgaatggttccctgtccttcacaaagggtgggtcaggcgttgctgggacaggtagaacggtgggaagggccaggcgtgcctgctaagcmgcagtgctctggcaggtgcaggtcggagccccgcagggcagtgagagttgaggcggaaaagttcccaatccctgagagctccagatgccttactaggaga

SEQ ID NO: 297470 - DNA, 201 bp, Homo sapiens
ctatctactgtgtaccatgtgtctgccagcgctgttgtggagtgagtgtgcgatctgcgtgatctcccagttaggcgaggcagtgttgtcattctacccaytgtacagatgagcacatggaggattgagggttctgacagcttgcccaggttacctagcaagtaagagccagagccaggaacgctcttggagagtgacttg

SEQ ID NO: 297471 - DNA, 201 bp, Homo sapiens
gatgaagttgttcctctttggggaagtgaggtggcgtttccattccttctgacctgggaggctccttgccttcaatccagggcctgattccacactgcccscgggacccacagaggagcttagcgcgcagtgggcaggcgctcacctgctgacagggcctggggtcttgaagctgcgactcatgtttagttctcagaacag

SEQ ID NO: 297472 - DNA, 201 bp, Homo sapiens
cccttccagaactccataccctgggggggggtggtcagagtgcaggaggagggccagccctgggggaaggggctgcagaggggcagggaagggcgccagcktgaatggagggaatggcagcccatcccctgggtgtggccgcgtcatgttgatctacgctgttatttctcactcattaaagatggtctttgattcttcact

SEQ ID NO: 297473 - DNA, 201 bp, Homo sapiens
ctacagcacttctcagacgttttttccttagaagggcacccacaaccgctctagagaagcgtcgcctccgccaccccagaccccctcccaaccaccccccsccactgcagacgctgcgtggactgtcaggctcacatatccaggagcaggcgcctggctgcccgggtcagccagagctctaaacttactagctgtgtggcc

SEQ ID NO: 297474 - DNA, 201 bp, Homo sapiens
gtatcctccagggcccactagactctgtcacatccaggggccgttgaatgctgtcacactcgtgtgttgttttccagaggattgtcacacctgccaggtcytttgcagggaggcgagggctgtgctggccgagtggggccagggttgtcagagcagggtcatcatgcttgctcctaggatactgcaccttagatcagctcg

SEQ ID NO: 297475 - DNA, 201 bp, Homo sapiens
ccttagcatggctgctgcctgggcgtccaggtcgcctctgagtgtggcgccttggtgttccctggcattgtgtaagaatgctggagggggatgaggaccgygccctgggtcccccatcctctgctgaagggcctgctgggaagctggaggggtgggctccctccaggtggtcctggcctgcaggtcctgcctgatgagacc

SEQ ID NO: 297476 - DNA, 201 bp, Homo sapiens
ctcctgggctcaaacgatgctcccgcctgagcctcccgagtagctgggaccacaggcgtgtgccactatatccagttaggtttccagttttaaagtatttyactttgtcctgctagccaaccttatagcctgtgtcttgtttagaataatgatgttgctctctgaagggtgaaaattctcagattttggttgtaattgaaa

SEQ ID NO: 297477 - DNA, 201 bp, Homo sapiens
gcctgtgagaccttggtgtcatgtgtgggatgtgccttctgagcccagggtctaggagatgggataccctaaaccagggcccctggaaactgggctctctsttggtgactgggacttgtgattcgtctgtcaaccctaggtttcaaattaagtcccagccagtgaccacatcagatttccagtttttttctttttttctga

SEQ ID NO: 297478 - DNA, 201 bp, Homo sapiens
gggcttttctagggagagaccacgggggccaggagcttcagggagctcacagaaggccactctggtggggtgtggaaagcagggggcaggctaggggcccytgtagaggctgaggccagtcgctcatcaccccaaccccacctggatggacctccgtccccagggaggcctcgatgctgcaggggggcctctatgtgacct

SEQ ID NO: 297479 - DNA, 201 bp, Homo sapiens
gccctcgtgggtccccagaggggtccagcctgtcaactggatacctgctttgggccccctgggcccagccctgccctcgtgggacttccaggctagatggrgacagacagacaacagtgaaatagacaagccaacaagtgtgccaatgcaaatggggtcgttggctctgcaggagtggaggacagttctagagggggtgtg

SEQ ID NO: 297480 - DNA, 201 bp, Homo sapiens
cctgttgtggtaaggtgccctttctacttctctcttgggggcagatggcagagatcaggtcacctcacctgatgttgggaggctcgttcagctaagggtcycaagggagcaacaggccagagctagggcacagggggccaggtccgccagcaggcagtgtcccctctgggctgggcagggcatccctggctccacaggagt

SEQ ID NO: 297481 - DNA, 201 bp, Homo sapiens
gctgctcccgtctctgccttcatcttcacctggacctcctgtgtctcatgtcgagacttccctgttcctataaggacaccagtcattgggttagggccctycctaaggcacggcgacctcatcttgattgtatctggatgcaaagaactcttttcaagtaaggtgacattcatagtttctgggggttcgttctcaaacaca

SEQ ID NO: 297482 - DNA, 201 bp, Homo sapiens
ccttggtgcaggacccaaggtgccgaagaaaggcggccaggcccgtggtagccagctggcgtgcggtctgcagttcctggcatgtactcctgatggcacarcgccaagtgccgagtcctcactttgttgccaggtggctccaggctcttcctcggggcctcaggcactgtccctggtcttctgtcttaaaggctacccaca

SEQ ID NO: 297483 - DNA, 201 bp, Homo sapiens
tccctggtcttctgtcttaaaggctacccacatatctgtcctgtcttcagtgcccaccgcatgaaagcacttcctccgctgctctgcagcccttggcccgsgtcttctctccctggccttgtgtcattcctgggggccagcctgctgtgtgtggctccacttcacagacaggcaaagtgaggcctgcagcagtcattcagg

SEQ ID NO: 297484 - DNA, 201 bp, Homo sapiens
agtgaacctgcttttgtgcctcctctgagcgacccttggacctgcccctcacatcctggcctgcaaggcctggcagcctgcctctttggacctttgtccaygtctcccactgcgtccctgtgttctggtggctccccaccacctccccactcctgctgctctttcctctccctgtggtaccaacgctccccctacctcctc

SEQ ID NO: 297485 - DNA, 201 bp, Homo sapiens
gttgtggtcattttcagcagtgctaacttgggggtgattgaagacctaaggagcaggggtcagatgggggctcctggctgttctccgcagaattgcaagcrcacccaccccacgttcattcttttctctaagcccttggcgttcagtgagccacatcacatgtaaatattgagacatagcatttaacggatttaattttca

SEQ ID NO: 297486 - DNA, 201 bp, Homo sapiens
ctgtgctgggagccctctgtccggtcgctgttccctccgcccagtcgcttttccctccgcccagtcgcttttccttccatccagtcactgttcccttcacstggttgcagttctctccacctggtcatggttctctctgcctggttgcggttccctctgcctgtggctgttccctctgcctggtcgtggttccctctgcct

SEQ ID NO: 297487 - DNA, 201 bp, Homo sapiens
ctggctgatggggttttgatgaggacgacacaatctgacatattcgtgaggatccctcgctctttaggggctgagagggggagaggctcctgtgcagagcyaaggcaggcgtgagcatgagagagcagcccccaccagctcacccagaaggtgctgggagcttctcggcctcccagctgtgtcctggccaccacagccctc

SEQ ID NO: 297488 - DNA, 201 bp, Homo sapiens
gagaccaagccaggctggtgggctctgggctgagggtcccagccccttggcctttctcctcctcatgcagggcaggtggggtgggcgtgtgcaggccacaygcactcgttcacaggggctgctgcccccaggtgtccacatcccctgagctctgccacgtttgagagctggtggttctccgcctggcatggactctgtagg

SEQ ID NO: 297489 - DNA, 201 bp, Homo sapiens
ggcccctcctcctactcccagtcgcctccctcatccccacgtcagctttcttcagcctcctgtctatttttagctcccttccccagggcctggctgacacrgatgcagcctctctgcttggagttgcgtctccatgaatattttatgctgggggctgccgcacccgctccgggcagctgccagcacttcccggtctcggtc

SEQ ID NO: 297490 - DNA, 201 bp, Homo sapiens
ggcagggaggggccgcacctactcccagagaatttcactagcaaaagagtgggcggaagcactgtgtggtggccgcgcgcagcctctgcactcgccctggratgggcaccgctgcgcccgtgtgcgggctcttacactggcttcctttgtttgtttggccaagattggacttttggaataattttttaattgttgactaat

SEQ ID NO: 297491 - DNA, 201 bp, Homo sapiens
agccacctttgaggcctgccctggactgcggagtgactgcacctggtccccgtgcacttgtgccggaactcctggctctcaggcagcttgaaaatgcatcrttaagctgggcgcggtggctcatgcctgttatcccagcactttgggaggccgaggcaggcagatcacgaggtcaggagatcgagaccatcctggctaaca

SEQ ID NO: 297492 - DNA, 201 bp, Homo sapiens
gctaggccgggcgcggtggctcatgcctgtaatcccagcactttgggaggccgaggcgggcggatcacgaggtcaggagattgagaccattctggctaacrtggagaaaccccgtctctactaaaaatacaaaaaaattagccgggcatggtggcgggcgcctgtagtcccagctactcgggaggctgaggcaggagaatg

SEQ ID NO: 297493 - DNA, 201 bp, Homo sapiens
gttcacagccatggagctggttccaggtgggactgggagggcaggcccagcagctggtctctgggaccagagctctgagcccatgctttggtgtccccagygacctggcctaaaccccacctggcatccgccccgtcagggcctcgagtgtgagtgatgaagcttgaccctcattgattacatgcggctacagccaccttt

SEQ ID NO: 297494 - DNA, 201 bp, Homo sapiens
tcccagctactcggggggctgaggtaggagaatcgcttgaacctgagaggcagatgttgcagtgagccgagatcgtgtcactgcactccagccggggcgayagagcgagactccgtctcaaaaaaaaataaaataaaataaccagaaaacagtgggaatgcggaatggagacgccagacctgtggggtggcttctccagat

SEQ ID NO: 297495 - DNA, 201 bp, Homo sapiens
ttgggagcatcagagacctccgggcatggccacaaaccaggtggcaggtgacaaccggaagcagtttcctcaggctggagaccagcggtgggcagggccaygctcccgaaggtttgacgggaggctgctcccgtctctgccttcatcttcacctggacctcctgtgtctcatgtcgagacttccctgttcctataaggaca

SEQ ID NO: 297496 - DNA, 201 bp, Homo sapiens
atactgcaccttagatcagctcgctgcctcccacgcttgccccttggtagggaaacagagcgaggctgtgcggggaggcacggcccctgctggctctgggytctgggtgacactgggtgggtgtgtgagaaaccgcggggggctggcctcacagttccagcgtgactttctcatggactctgctggggccgctgtacaccc

SEQ ID NO: 297497 - DNA, 201 bp, Homo sapiens
ggagtttgagaccagcctgggcaacatggtgaggccccatctctacaaaaatttaaaaattatctgggctactcaggaagctaagggaggaggatcacatragcccaggaggcagaggctgcagtgtgagccgtgattgtgccgccgcactcagcctgggtgacagagtgagaccttgtctcaatttaaaaaacaaaaaca

SEQ ID NO: 297498 - DNA, 201 bp, Homo sapiens
gcatcagagacctccgggcatggccacaaaccaggtggcaggtgacaaccggaagcagtttcctcaggctggagaccagcggtgggcagggccatgctccygaaggtttgacgggaggctgctcccgtctctgccttcatcttcacctggacctcctgtgtctcatgtcgagacttccctgttcctataaggacaccagtc

SEQ ID NO: 297499 - DNA, 201 bp, Homo sapiens
tcccaggccagcaacggagttggtgctggggacgcgagggccacgacaggctggagcccgcacccaggggaccagcacaggggaaggcacgtggagcccgstagcacccacagagtgggagagcctccgccccccaggcaagcagtggagcccctaatgggagctgtggggtcacttgctgtgtggatttttttttttcag

SEQ ID NO: 297500 - DNA, 201 bp, Homo sapiens
tcacagtggctcacgcttgtaattccaacactttgtgaggctgaggcaggaagatcacttgagccctggagtttgagaccagcctgggcaacatggtgagrccccatctctacaaaaatttaaaaattatctgggctactcaggaagctaagggaggaggatcacatgagcccaggaggcagaggctgcagtgtgagccgt

SEQ ID NO: 297501 - DNA, 201 bp, Homo sapiens
gtccttggtgcaggacccaaggtgccgaagaaaggcggccaggcccgtggtagccagctggcgtgcggtctgcagttcctggcatgtactcctgatggcayagcgccaagtgccgagtcctcactttgttgccaggtggctccaggctcttcctcggggcctcaggcactgtccctggtcttctgtcttaaaggctaccca

SEQ ID NO: 297502 - DNA, 201 bp, Homo sapiens
ccctccgagtcttggctgccttgttatggcaggtactggcactgcttggggttgtgtttgctttggtttctgagacaggtgcgtggaagtggatttgaggytctctccccttcctcggatgggccccgcaatgtcccaactttgcctagtgccaggttcgccacaggatacagacagacactactggtatacaaggcaggt

SEQ ID NO: 297503 - DNA, 201 bp, Homo sapiens
tttcagcatattttattagaaaaatagctgggcctgggcacgatggctcaagcctgtagttttggctacttaggatgctaaagtaggaggattgcttaagmcaggggttcgagaccagcctgggcaacacagtgagacccctgtttctttaaaaacaaaacaaaacaaaacacacacaaaaaaagcaggctggtcacagtg

SEQ ID NO: 297504 - DNA, 201 bp, Homo sapiens
gtggccatgaggaacccagtgcctgtggtttgctgggatgcctgtgcctcacgggccgtgtgataccagttgcttttgagagcgtggcagagggcacttcygggcaggtgctgatcaggagctcgtgtctctgtcccagggcagggtggggcttttcctgctcctgcagtcctggaagcaggaggtgtggggctcatccga

SEQ ID NO: 297505 - DNA, 201 bp, Homo sapiens
agcctgggagacagagcgagacgccgtctcaaaaaaaaaaaaaaagaaatgggaaaacgaagtctccagtgagacgcagcagcttccctggctccctggcyctcacccctgcctgcctttagacagaggcagtcatgaccctgtcctgggatggacacggttggccttggccaggccatggggcggggcctgagagagtga

SEQ ID NO: 297506 - DNA, 201 bp, Homo sapiens
ttgggagcacattattctgtcttagcaggtggaagggggttttctgatgtgcccatttcagcatattttattagaaaaatagctgggcctgggcacgatgrctcaagcctgtagttttggctacttaggatgctaaagtaggaggattgcttaagccaggggttcgagaccagcctgggcaacacagtgagacccctgttt

SEQ ID NO: 297507 - DNA, 201 bp, Homo sapiens
ggcctgccagggtctaggggtgtccagaatcagcctgcaattgccgagggcaccttgggcctcaggggaatttagtacaccctgaaacccacaataccacraggagtggggctctgagagaaggccagaaattggcggcatgaaaagattggaaaagcctattgtttattgacctgggaacggaaggagactgaaatcaaa

SEQ ID NO: 297508 - DNA, 201 bp, Homo sapiens
tccatctcaaaaacaaaaaacaaaacaaaacaaaaaaacaaaaaattagctgggcgtggtggctgtagtcccagctactcggaaggcccgctgtagtcccrgcgggcgcctgtagtcctagctactcgggaggctgaggcaggagaatgtcgtgaacccgggaggctgagcttgcagtgagctgagatcttgccactgcac

SEQ ID NO: 297509 - DNA, 201 bp, Homo sapiens
aagaatccatgtctcgcctttcccagcgtctgaggccacccacattcctcggctcatggtcccggccatcctccagcctctcctaacagcatcccattccycccctcgtgctgacactcctgcctccctctcacaggacccctgtgattctatcaggcccacccgggtaccccagaacaatcttcccatctccagggctgt

SEQ ID NO: 297510 - DNA, 201 bp, Homo sapiens
ctgtgctggccgagtggggccagggttgtcagagcagggtcatcatgcttgctcctaggatactgcaccttagatcagctcgctgcctcccacgcttgccscttggtagggaaacagagcgaggctgtgcggggaggcacggcccctgctggctctgggttctgggtgacactgggtgggtgtgtgagaaaccgcgggggg

SEQ ID NO: 297511 - DNA, 201 bp, Homo sapiens
gacctctccagagcattggacaccactgacctggccaccctgaggtcccctcacaggatttcaggccattatgctttccaaggccttcatcctcccacgcyggtgggcgccagggtggctggggaatgggcctgggtgtctgaatgttgatcgcaccccgagtggttctgcgcacatcagggggaggaccctggggctctc

SEQ ID NO: 297512 - DNA, 201 bp, Homo sapiens
aacaaaacaaaacaaaaaaacaaaaaattagctgggcgtggtggctgtagtcccagctactcggaaggcccgctgtagtcccagcgggcgcctgtagtccyagctactcgggaggctgaggcaggagaatgtcgtgaacccgggaggctgagcttgcagtgagctgagatcttgccactgcactccagcctgggtgacaga

SEQ ID NO: 297513 - DNA, 201 bp, Homo sapiens
cgaattccagggtgggctcagctccctcttccgagcctggccatcccaagcccaggcttctgccacttccgagtattgtgtttgagactcatacagctccrttctgcctggaatttgtgaaactctgggctatgagttctgcttactttgtcgacatgttagacgttcttcactaaatggggcatttccgtcgtcgctgtc

SEQ ID NO: 297514 - DNA, 201 bp, Homo sapiens
tctgcgctctaggccacccttcccaggcagttttggcaggtgggctcacctcatgtaattaaaaagttttaatttcatctgtggacagctttttaaaaaawtttttgggtacatagtaggtatatatatttatggggtacatgagatggtttgatacaggcacacaatatgaaattagtacatcggccaggtgcggtggct

SEQ ID NO: 297515 - DNA, 201 bp, Homo sapiens
gcatctcagattgccgcccacagaacagacagcggcacacgggctccgagctgtgaactgccgccttgggtttgcaggcaagcctgacccagtcacgagcmaggccttgggagaagaaaatgaagccttatttttaagccagttgacagatcaatacttaaaaacaaaaaaacacaaaacaaaaacctataagcagttaaa

SEQ ID NO: 297516 - DNA, 201 bp, Homo sapiens
aacttcctaccttgaacacccacaatagcgctatcacatcctcccaaacacacttataagtccttagtatcgtcgaatacccaatcactgttcacatctcsccaggtgctcatctttttctctagttggtagagtccagatgcccacaagatgcgtgcctctcattaggtggatgtgtttcttgaagaatggggtccccat

SEQ ID NO: 297517 - DNA, 201 bp, Homo sapiens
ctccagcctgggcgacagagtgagactccgtctcaagaaaaaaaaaaaaaaaaaagaaagactctggcacccatttttcaaattggtgataaaaattaaayggatgactgcgtccctggggaggctcacatgcagccccgggatctgatagctgtgagatgtttaatgcctgctgagggtcagggcagggccttgcagggc

SEQ ID NO: 297518 - DNA, 201 bp, Homo sapiens
ggaagtccccgggggtttctgcagcctggtggccagtgacatcgatggtgacaccttcccggggccccaggtcagctcttggcttgagtccttccatcccrtagctatcccccaggcagggtgtctcatgcctgcctatagggaagagctgagctccctgagattaagggattatgttgaggccaggtaggaggatggagc

SEQ ID NO: 297519 - DNA, 201 bp, Homo sapiens
tccagcctgggcgacagagtgagactccgtctcaagaaaaaaaaaaaaaaaaaagaaagactctggcacccatttttcaaattggtgataaaaattaaacrgatgactgcgtccctggggaggctcacatgcagccccgggatctgatagctgtgagatgtttaatgcctgctgagggtcagggcagggccttgcagggca

SEQ ID NO: 297520 - DNA, 201 bp, Homo sapiens
cggtccacaggccacagcccccaggaagagctcttcttagagggaaggaaccaggattctgagtctctgcagtgtgggccccggcagggagcttttcctcyggctgagatatatatatagaatacatttttagaaataataaaactgagaaccagattgtcaggaattggtgcctgctctttttgcttccagacccaatag

SEQ ID NO: 297521 - DNA, 201 bp, Homo sapiens
gctggggcaggcagtgcccaggccgtgcttttgggagggcagcccagcagtcaggtcagacaccggctgtaaggaatgggatgggatgggagcaacgggasgtgtcttaggaaaggcaccaacacagcgctcagggccagacaatatgtccacattcaaatccctagagcctgtgaatgggaccttatatggaaaatgggt

SEQ ID NO: 297522 - DNA, 201 bp, Homo sapiens
ttgtgtcaccacaaatcatatgttgaggtcctgaccctgagtccctcagaatgtcactgaatgtaaagaaagagtctttaaagaggtaattaagttaaaaygaggtcattagggtgggctggtgtctttacaagaagaggaggttaggacagacacacacagaggaacaaccctgtgaggacacgggggaaggcggcatct

SEQ ID NO: 297523 - DNA, 201 bp, Homo sapiens
cttcctcccctatcctctcttgcttcccccatgccctcagcctccaaactactgcttacgggagcaggactatgggcctggccagagggccagagacatcragtgggaggcgtttcagacccagggccaagcccctggcctgaccatgttcaccagccctcgcaccctcgtggatggctcagggcggatcttcctggggct

SEQ ID NO: 297524 - DNA, 201 bp, Homo sapiens
ccaggttgtctctctggggagtggagccacatgggatttcactgtttctgtattcttattacttatattaaaacacacatgaacagaagaaaaaatagtcycagttacacaaggctataagggcctgggatcatggccgcccagcgaggggaggaggccgtgtcctgcctgggcctgacctgtctttggtttctcgcagta

SEQ ID NO: 297525 - DNA, 201 bp, Homo sapiens
aagcctgagggctcctcagtgtcatgctgtcaatgtcctaaggaagtgattgttgcagtagaaagtcatggcagtcctctgggaaatggagactcacattycccatggctcaaacacaaggtcatcttttgtgtcatttattcagcaaagatgagaaataagtcaattctgagtgttggtcaggatgccgtgaggtggcaa

SEQ ID NO: 297526 - DNA, 201 bp, Homo sapiens
gcctcgctctgtcgcccaggctggagtgcagtggtgcaatctaggctcactgtaatctctgccttccgggctcaagcgatcctcctatctcagcctttggraccacatgtgtgcaccgccatgcccagctaattttttttttttttttttttttttgaggcagagttttgctctcgttgcccagcctagagtgcaatggcg

SEQ ID NO: 297527 - DNA, 201 bp, Homo sapiens
agggcgtctgccttggtgccgcagctgcagcctctgcactatggggctcggtcagcacaccttctgtggcctccagggaggcagagaagaggaagactcakccccagcttggagagtgggagtgtgaggtgcaggtccccaccatgggcacgggcataatgccactctatcaagaggccaagtggaagccacgtcagagac

SEQ ID NO: 297528 - DNA, 201 bp, Homo sapiens
tgccttccgggctcaagcgatcctcctatctcagcctttgggaccacatgtgtgcaccgccatgcccagctaattttttttttttttttttttttttgagrcagagttttgctctcgttgcccagcctagagtgcaatggcgccatctcggctcaccgcaacctctgcctcctgggttcaagctgttctcctgcctcagcc

SEQ ID NO: 297529 - DNA, 201 bp, Homo sapiens
ccttgataagggccggctgttccagtgggagtggcctaatcagccctctctgccctaactttctctttcacaactaaacatgtgaaacttgcccagaggcyggcgggtgcagcctggttgaggctgtgcggcctgcactctggctggggactttccatttcccttgctggtcacaggattcctgggaaagcagccctggtg

SEQ ID NO: 297530 - DNA, 201 bp, Homo sapiens
tggccaaggcagcctctgctgagctcctgaaggaagctccgagtgtctgcaggccccaggtggtggcccccagccatgagtggcatctgcagccctatgaytggggacagtctgcccagacacctctgtcccacccagctttccagctgaggtgagggtggagcacacgcacctggtgcttgacctctggtttgaggcctt

SEQ ID NO: 297531 - DNA, 201 bp, Homo sapiens
gggctgtggaaggggcaggcagggttcagtgccctgcagggctgctgccaaggtcaccgcacaggggcctgtccagggctggccaggtgtgggtggcaggwgctgagctgggctgagggtgctgagcggggctgagggtgctgagctgggctgagggtgctgggcagggctgagggtgctgagggtgctgccgctgctgcc

SEQ ID NO: 297532 - DNA, 201 bp, Homo sapiens
gagatcacatcactgtactccagcctgggtgacaaagtgagaccctgtctcaaaaacaaaaataaagtgtacaagttgttgattttttttttttgtatttkcacagagttgtgcaactactattgccgtcaatttgagaccattgtcattactcctacaaagagaccctgtacccattagtggtcattcccatatccccct

SEQ ID NO: 297533 - DNA, 201 bp, Homo sapiens
cagctgtactgacgatgatccacataccacacatttcacctatttaaagtgtactggcctggctcagtagcacgactgtaatcccagcactttgggaggtraggtgggcagatcgtttcagtccaggagttcgaggccagcctgggcaacatagcaagaccccatctacaacaatattagccaggtgtggtaacatgtgcc

SEQ ID NO: 297534 - DNA, 201 bp, Homo sapiens
ctcaggagtttgataccagcctgggcaatatagcaagaccccatctctgcaagaaaataaaaaataaattaaaaagttatggccaggtgcggtggctcatrcctgtaatcccagcattttgggaggctgaagtgggcggatcatgaggtcaggagttcaagaccagtctggacaacatagtgaaaccccgtctctactaaa

SEQ ID NO: 297535 - DNA, 201 bp, Homo sapiens
tggctgacacggatgcagcctctctgcttggagttgcgtctccatgaatattttatgctgggggctgccgcacccgctccgggcagctgccagcacttccyggtctcggtctcgtattagaagaggccaactcagcgcgtagaggcaggcctccccgtggcagtgccctctgaccttgggccgaagggggctggagaagtg

SEQ ID NO: 297536 - DNA, 201 bp, Homo sapiens
tgcgctgcacgtgagaaacacgtaatgaccgctctctaactcgagaaccagtgaccaggcacctcctgtgtgccgagccccgccgtgctccaccagggacmctgtgaagaagacacagccctgctggctggttgggagtcaaaccttctgcgacaaacatccatgcaggtgtctagctgctggggagccaaacaacgctgc

SEQ ID NO: 297537 - DNA, 201 bp, Homo sapiens
cctcagagccagaagccagttggcctaagtgggccctggtttgcataatagactctcacccagggtggaggggtgacactggggatgggcagctatgggtygctgggggacatctgtggtcatttgctctagaagtggcatcctgtggccagatggtgggtttcttggagcttccaaccaagttggctaaatacttaccaa

SEQ ID NO: 297538 - DNA, 201 bp, Homo sapiens
gtgctggagacatctgtcttgctctgtcagcttctcacccagcgggacagggtggcccctttgtcacttgggtaggagaactatttagcaaagccatgacstggggaggctggctgcccaccagcagtgagcccgtaacctaccatgggacagacaccgccccgcggccctttgttccacctccccctgggtggtgagcct

SEQ ID NO: 297539 - DNA, 201 bp, Homo sapiens
ccctttgttccacctccccctgggtggtgagcctgggtcctcaggcacctgggacatccctgcccttgactgccatcttcataaaccttcaccctggaagrgcgcccctgggcactcagggaggaaggccgcccgcaccttgggagggcagcgcttatgggcgggcactccacgcagtgacgttgaggctcctgggctggt

SEQ ID NO: 297540 - DNA, 201 bp, Homo sapiens
tccaaactactgcttacgggagcaggactatgggcctggccagagggccagagacatcaagtgggaggcgtttcagacccagggccaagcccctggcctgrccatgttcaccagccctcgcaccctcgtggatggctcagggcggatcttcctggggcttggccagagcactgcctgaccccagaaaggcggatcccaacc

SEQ ID NO: 297541 - DNA, 201 bp, Homo sapiens
cagcaatacaccagacaggcctggaggcacgtgctggggcaggcagtgcccaggccgtgcttttgggagggcagcccagcagtcaggtcagacaccggctstaaggaatgggatgggatgggagcaacgggaggtgtcttaggaaaggcaccaacacagcgctcagggccagacaatatgtccacattcaaatccctagag

SEQ ID NO: 297542 - DNA, 201 bp, Homo sapiens
acagcaatacaccagacaggcctggaggcacgtgctggggcaggcagtgcccaggccgtgcttttgggagggcagcccagcagtcaggtcagacaccggcygtaaggaatgggatgggatgggagcaacgggaggtgtcttaggaaaggcaccaacacagcgctcagggccagacaatatgtccacattcaaatccctaga

SEQ ID NO: 297543 - DNA, 201 bp, Homo sapiens
atggggtttcaccgtattagccaggatggtctcgatctcctgacctcgtgatccgcccacctcggcctcccaaagagctgggattacagacgtgagccacygcgcccggctgagatatcttttaaaaataaaatttaaacagccagtttatcaacacagcaatacaccagacaggcctggaggcacgtgctggggcaggca

SEQ ID NO: 297544 - DNA, 201 bp, Homo sapiens
gcggaggtgatggggactcactcccagccaggctatggcagtgactctcacactctagacggggacagagggactcaagcccctccaggcatgggcgatgrggcagggggattcgcaccaggcctcattccagactctgctcctgaaccacactgtggtaggggcccactcacaggtgggtgtggttaattcagaagctga

SEQ ID NO: 297545 - DNA, 201 bp, Homo sapiens
tccaaaagacacaggcatctcaccgaggtccctgcccagtagctagtttcttcctctgggggccatggaggcctctggtttgtcacacctccttcctggartggtcgtccctgcgccccaggtggtcaccttgctcccatggctctgtgccttgctgtttttcacctgacagctggtctctgagaaggttcctcctcctcg

SEQ ID NO: 297546 - DNA, 201 bp, Homo sapiens
gttggggggaagccagcccttgggtgctgaggacagggcgtctgccttggtgccgcagctgcagcctctgcactatggggctcggtcagcacaccttctgkggcctccagggaggcagagaagaggaagactcagccccagcttggagagtgggagtgtgaggtgcaggtccccaccatgggcacgggcataatgccactc

SEQ ID NO: 297547 - DNA, 201 bp, Homo sapiens
tgcatatgtagaatgaaccaagccacagtaagtgcggatggttggacgtggatgtgggggatgtcgtgtggtacaggttcaggagtgggtttgctggcagygcctggtttaggaggggctcgctggctgggctgggggtagattgattctttggacccgaggctccggtgcagctcagtcacgttcagagagcaccctctg

SEQ ID NO: 297548 - DNA, 201 bp, Homo sapiens
gggtgggcctgagcctgagagcctggggcaggggtgagggccaagtcccaagttcctgttgcacccttccagagagagacagtgagggtccctggcaggaragcatggacacagggaaggaaaagtccccaagatggggaggaaagatgaaggaggggcttgggaggccagagggtgatgctgtcactcagaatcgtggaa

SEQ ID NO: 297549 - DNA, 201 bp, Homo sapiens
aataataaaactgagaaccagattgtcaggaattggtgcctgctctttttgcttccagacccaatagagacgctgggtgctcttgccgctgccggcagccytggttccctccccagcgtttgccgggtgcaggccacttcccgcctgtaggaggcctggctctccatcttcccgtggccccccggtcaccagggctgatgg

SEQ ID NO: 297550 - DNA, 201 bp, Homo sapiens
gggtggggggcagggccccaggccaggtcacaaggccacggcactggttctgcagtgaccctaacctgcctgtctctgtgtgtggtccacagcccgagacygaggacgagaagaagcgctttgaggaaggcaaagggcggtacctgcagatgaaggcgaagcgacagggccacgcggagcctcagccctagactccctcct

SEQ ID NO: 297551 - DNA, 201 bp, Homo sapiens
taattatacctgctaagacctttattccaataaggccccactctgaagttgtgagtagatgtatcatttgggaacccactagaaatgctttgtctccttaragctcaactcatgtagatactagctcacttccacttttataaaatcatgaacttgataaaatcccctctgggattcaccagccccaagctgcctctgtct

SEQ ID NO: 297552 - DNA, 201 bp, Homo sapiens
gccgggcatggtggcctgcacctgtgatcccagctactgggaggctgaggtgggaggatcgcttgagcccaggaggtcgaagttgcagtgagccatgatcrtgccactgcacttcagcctgggcaacagaacgagaccctatctcaaaagaaaaggttgaacaataaatcacagaaatatgctggcaggctgggcgccata

SEQ ID NO: 297553 - DNA, 201 bp, Homo sapiens
cggctgcccccagctgggctgtgcacactggttgtggggtcaggaccactgcacctaccccagcactcagctggttcagggagaccagtgcagtgaccacraggggccagcgatccatgggctctcagggaggggacctctgtgcctcacgttccccactccctatagagtccaacctgagggggtccacccttgtgtgga

SEQ ID NO: 297554 - DNA, 201 bp, Homo sapiens
ctgcctgaagtgttcccatctgcagtgtggggacggtgagacctgccctgcagacctgaggctcagaaagacctcagctctagggacaaaaaaaaaaaaaatgcccttttccccaacattttagggtttgagaggccaggactttggtgtcaggcaagtggagtttggatcctggctcaggcaagtgctggccgggcaaac

SEQ ID NO: 297555 - DNA, 201 bp, Homo sapiens; identical to SEQ ID NO: 61824

SEQ ID NO: 297556 - DNA, 201 bp, Homo sapiens
catgagcacgagttctgggctgggagcacgtgtgtgctccgtgcggtgaacctgcatgtgcgttccgtccctccagatgtgccctggcggcccctcctccyactcccagtcgcctccctcatccccacgtcagctttcttcagcctcctgtctatttttagctcccttccccagggcctggctgacacggatgcagcctct

SEQ ID NO: 297557 - DNA, 201 bp, Homo sapiens
cccacatgagcacgagttctgggctgggagcacgtgtgtgctccgtgcggtgaacctgcatgtgcgttccgtccctccagatgtgccctggcggcccctcctcctactcccagtcgcctccctcatccccacgtcagctttcttcagcctcctgtctatttttagctcccttccccagggcctggctgacacggatgcagc

SEQ ID NO: 297558 - DNA, 201 bp, Homo sapiens
ttgggaggccgaggcagtctgatcacctgaggtcaggagttcgagaccagcctggccaacatggtgaaaccccgtctctactaaaaatacaaaaattagcygggcgtgggggcaggcgcctgtaatcccagctactcggggggctgaggtaggagaatcgcttgaacctgagaggcagatgttgcagtgagccgagatcgt

SEQ ID NO: 297559 - DNA, 201 bp, Homo sapiens
atgagctgagatcacatcactgtactccagcctgggtgacaaagtgagaccctgtctcaaaaacaaaaataaagtgtacaagttgttgattttttttttttgtatttgcacagagttgtgcaactactattgccgtcaatttgagaccattgtcattactcctacaaagagaccctgtacccattagtggtcattcccata

SEQ ID NO: 297560 - DNA, 201 bp, Homo sapiens
acctagaagaactcagtctgtgggctgcagctctgccgctactaagccccttaaacacacgcacacacgtgccctacacacacacacacacacacacacacttgcgctctctctctctctctctctgaagccatgacctagtacctagtcaggaggtggccgggtgggcctctctgccctctgtgtgtggcgtccggtaag

SEQ ID NO: 297561 - DNA, 201 bp, Homo sapiens
aacctagaagaactcagtctgtgggctgcagctctgccgctactaagccccttaaacacacgcacacacgtgccctacacacacacacacacacacacacacttgcgctctctctctctctctctctgaagccatgacctagtacctagtcaggaggtggccgggtgggcctctctgccctctgtgtgtggcgtccggtaa

SEQ ID NO: 297562 - DNA, 201 bp, Homo sapiens
caacctagaagaactcagtctgtgggctgcagctctgccgctactaagccccttaaacacacgcacacacgtgccctacacacacacacacacacacacacacttgcgctctctctctctctctctctgaagccatgacctagtacctagtcaggaggtggccgggtgggcctctctgccctctgtgtgtggcgtccggta

SEQ ID NO: 297563 - DNA, 201 bp, Homo sapiens
gatgaggcttttcagtaggaacctggaaagaagcatcttggaaaaaacttaggcactcgatattttaaatacagcggaagaaagtgaaagggagacagtgrcttccagcgtcagaagcggggtggctccctctggcaaggcaggggcccaggtggacagtggtggcaagaaaggcagttgtgaggaaggcactatgttttt

SEQ ID NO: 297564 - DNA, 201 bp, Homo sapiens
ctgacccccaagattaggtggtcagccgaagctgggataggaagtgcaggcctgcgtgagctggggtcccctgacggaccagggcactcccctgcctgctstagtccccagggaggaaggcacctggttttctttccagccttgctcctgtggcttccctctgctcccttcagctgggctgggttcactgcggtttcccag

SEQ ID NO: 297565 - DNA, 201 bp, Homo sapiens
gtcctgcctccgaggaaacacgggtggggaggagacatgtctgtgtgggatcttctaatgtatgtttaattcatgctgggaatgtgagcgcaagctggccyagaacccgtggacataaacatccctccaacctagggacctttttgtcacactccctaaccagagaaaagacggtgacaggatcgtgatagtgacatgtcc

SEQ ID NO: 297566 - DNA, 201 bp, Homo sapiens
tcaacctagaagaactcagtctgtgggctgcagctctgccgctactaagccccttaaacacacgcacacacgtgccctacacacacacacacacacacacacacttgcgctctctctctctctctctctgaagccatgacctagtacctagtcaggaggtggccgggtgggcctctctgccctctgtgtgtggcgtccggt

SEQ ID NO: 297567 - DNA, 201 bp, Homo sapiens
cctggaaagaagcatcttggaaaaaacttaggcactcgatattttaaatacagcggaagaaagtgaaagggagacagtggcttccagcgtcagaagcggggtggctccctctggcaaggcaggggcccaggtggacagtggtggcaagaaaggcagttgtgaggaaggcactatgtttttctgggttgttttcttaaaatt

SEQ ID NO: 297568 - DNA, 201 bp, Homo sapiens
ggacacaaacactgcggaaggccgcagggtcctctgcctaggaaaaccagagacctttgttcacttgtttatctgctgaccttccctccactattgtcctrtgaccctgccaaatccccctctgcgagaaacacccaagaattatcaattaaaaaaaaaaaaaaaaaaagaacgtacttttctacctgtgtacgggtcgga

SEQ ID NO: 297569 - DNA, 201 bp, Homo sapiens
gagggaagttcttgggggtcagccggtagccctgttcaaggcagaccttagaggagtcttgagcatgcattcttcacttctcaacttttggccatcttagytttttccttgtactttattttttatttttaaattaattattttatacttaagtattatgtggaaacaatccagagggcttgtgggtctctcttcctccca

SEQ ID NO: 297570 - DNA, 201 bp, Homo sapiens
gctggatcacctgaggtcaggagttcaagaccggcctggccaacatggcaaaaccccatctttactagaaatacaaaaattagccaggtgtggtggcaggygcctgtagtcccagctactcgggaggctgaggcaagagaatcacttgaacctgggaggcggaggttgcagtgagctgagatcgtgccactgcactccagc

SEQ ID NO: 297571 - DNA, 201 bp, Homo sapiens
atacttaccaaaaagggaaaaattctcctagttaacgtgtggactatctactgtgtaccatgtgtctgccagcgctgttgtggagtgagtgtgcgatctgygtgatctcccagttaggcgaggcagtgttgtcattctacccattgtacagatgagcacatggaggattgagggttctgacagcttgcccaggttacctag

SEQ ID NO: 297572 - DNA, 201 bp, Homo sapiens
ttttttgagacaagtctcactctgttgaccaggctggagtgcaatggtgcgatctcggctcactgcaacctccacctcctgggttcaagcgattctggtgyctcagcctcctgagtagctgggattacaggcatgtgccaccacacccagctaatttttgtattttttgtagagacagggtttcgccatgttggccaagct

SEQ ID NO: 297573 - DNA, 201 bp, Homo sapiens
ggtgtctcatgcctgcctatagggaagagctgagctccctgagattaagggattatgttgaggccaggtaggaggatggagcccaggccggggagggtggygggggcagaagagcagctctgggtcaggaagcttctgccaggatggactgtcgtgccctggggagcgtggggcgtacagagaggttggttagggttgagg

SEQ ID NO: 297574 - DNA, 201 bp, Homo sapiens
tttcaggtacctcagagtctgagagttccttaaaagtcctttgtccaatatatacagctataatttgtctatatatatatatatatatatatatatatatattttttttttttttttttttttgagacaagtctcactctgttgaccaggctggagtgcaatggtgcgatctcggctcactgcaacctccacctcctgggt

SEQ ID NO: 297575 - DNA, 201 bp, Homo sapiens
tctttcaggtacctcagagtctgagagttccttaaaagtcctttgtccaatatatacagctataatttgtctatatatatatatatatatatatatatatatattttttttttttttttttttttgagacaagtctcactctgttgaccaggctggagtgcaatggtgcgatctcggctcactgcaacctccacctcctgg

SEQ ID NO: 297576 - DNA, 201 bp, Homo sapiens
cgtctttcaggtacctcagagtctgagagttccttaaaagtcctttgtccaatatatacagctataatttgtctatatatatatatatatatatatatatatatattttttttttttttttttttttgagacaagtctcactctgttgaccaggctggagtgcaatggtgcgatctcggctcactgcaacctccacctcct

SEQ ID NO: 297577 - DNA, 201 bp, Homo sapiens
cccataggctgtcttgccatcccaccccttggcctctcactctcagagccctcctggggagggggatcaaggatgtgcctccccatccttggacccctgcrtgggaataactggggaagtctgttacaaatatgggttttctgcatgtgaacagtacttcagcagagagtcaacaagatgaagattgaggagataatgggg

SEQ ID NO: 297578 - DNA, 201 bp, Homo sapiens
cccagaagctggagcgcatggagaccaagtggaggaacggggacatcgtccagccagtcctcaacccaggtaagagccgcggacaccagcagcaggtgccrctcctcaccggggacgcataggaggcaggagcaggccgggcctacgtgagcctcatgcttgaggttccccaggtgctgagcatgctctccgggaaccagt

SEQ ID NO: 297579 - DNA, 201 bp, Homo sapiens
attgcctctggtggcccaaggtcaggtccggtcccatcctacccctagtggtgtgactttggaagcgtgactctccatgtgtctggttcctgacttgtagwatggagacagggaggctgctgcctcatcgggtgttgtccagtgagacccggtgttggtcattctgtgtttgtggagagggaccggccgcgcatcaggata

SEQ ID NO: 297580 - DNA, 201 bp, Homo sapiens
tccctttctccgcaggtgtgaccatgaagctcatggatgaggtcgccgggatcgtggctgcacgccactgcaagaccaacatcgtcacagcttccgtggaygccattaattttcatgacaagatcagaaaaggtaaccactcttctggcaaagacgagggaggcagtggccctcggctgcttgggtccctgcaccagtttg

SEQ ID NO: 297581 - DNA, 201 bp, Homo sapiens
cgggtggggggcagggccccaggccaggtcacaaggccacggcactggttctgcagtgaccctaacctgcctgtctctgtgtgtggtccacagcccgagaycgaggacgagaagaagcgctttgaggaaggcaaagggcggtacctgcagatgaaggcgaagcgacagggccacgcggagcctcagccctagactccctcc

SEQ ID NO: 297582 - DNA, 201 bp, Homo sapiens
atttgtcaactgtattttttctttgtagaaatgtctactcaagttgtttgctgatttttgaatcaggttttttttaaaactgaaaattaaatatattgctmaactgtttgtatatttattcatatacttgaacatagacatgtataggtgtatatattatgtgcatgttatatacatatccttgtgtatctatataagtat

SEQ ID NO: 297583 - DNA, 201 bp, Homo sapiens
ctcgtctttcaggtacctcagagtctgagagttccttaaaagtcctttgtccaatatatacagctataatttgtctatatatatatatatatatatatatatatatattttttttttttttttttttttgagacaagtctcactctgttgaccaggctggagtgcaatggtgcgatctcggctcactgcaacctccacctc

SEQ ID NO: 297584 - DNA, 201 bp, Homo sapiens
tggcctcgtctttcaggtacctcagagtctgagagttccttaaaagtcctttgtccaatatatacagctataatttgtctatatatatatatatatatatatatatatatattttttttttttttttttttttgagacaagtctcactctgttgaccaggctggagtgcaatggtgcgatctcggctcactgcaacctcca

SEQ ID NO: 297585 - DNA, 201 bp, Homo sapiens
aaggacaccagtcattgggttagggcccttcctaaggcacggcgacctcatcttgattgtatctggatgcaaagaactcttttcaagtaaggtgacattcrtagtttctgggggttcgttctcaaacacatcttttgggggacacaattcaacccagtactcaggctccatgtggcttaggtgggactccaccttgagagg

SEQ ID NO: 297586 - DNA, 201 bp, Homo sapiens
gggtcctcaggcacctgggacatccctgcccttgactgccatcttcataaaccttcaccctggaagggcgcccctgggcactcagggaggaaggccgcccrcaccttgggagggcagcgcttatgggcgggcactccacgcagtgacgttgaggctcctgggctggtctggactctgtctcagagcctggaacatccagca

SEQ ID NO: 297587 - DNA, 201 bp, Homo sapiens
cagtatccccctgctgtgtcccgggactcaggagctttggcttttgtgctgagttgttggtgttttttatttatttatttatttttttagacggagtctcrctctgtcgcccaggctggagtgcagtggcgcaatctcggctcactgcaacctccatctcccggattcaagcgattcccttgcctcagcctcccgagtggc

SEQ ID NO: 297588 - DNA, 201 bp, Homo sapiens
gctgctggaactgagaaagaacatttcattttccctggactgtttcaggtcaaattgcatagcctcaaattttatttttaaaagtcagccagagatcaaaycgtagcagcgggagggacttcttcaataaagtgtcttggaaaagcagttttcctgtgtacaccgaagactcttcaaagggggaccaggaccgctgcaagg

SEQ ID NO: 297589 - DNA, 201 bp, Homo sapiens
gagacggaatcttgctctgttgcccaggctggagtgcagtggcgcgatctcggctcactgcaagctccgcctcccacgttcacgccattctcctgcctcakcctcctgagtagctgggactacaggcgcccgccaccacacccagctaattattttatatatattttttagtagagacgggatttctccatgttagccagg

SEQ ID NO: 297590 - DNA, 201 bp, Homo sapiens
tggactgtttcaggtcaaattgcatagcctcaaattttatttttaaaagtcagccagagatcaaaccgtagcagcgggagggacttcttcaataaagtgtyttggaaaagcagttttcctgtgtacaccgaagactcttcaaagggggaccaggaccgctgcaaggagcgccacctatttctttaaatacccgaagattcc

SEQ ID NO: 297591 - DNA, 201 bp, Homo sapiens
tctctgccttccgggctcaagcgatcctcctatctcagcctttgggaccacatgtgtgcaccgccatgcccagctaattttttttttttttttttttttttgaggcagagttttgctctcgttgcccagcctagagtgcaatggcgccatctcggctcaccgcaacctctgcctcctgggttcaagctgttctcctgcctc

SEQ ID NO: 297592 - DNA, 201 bp, Homo sapiens
atattaagctaactgggatgtgattgctgtgaattgctccagaaaaatagctgggagctcttaagattttaagagatttttttttttttttttttttttttgagaccgagtcttgctctgtcgtgcaggctagagtgcagtggcgcaatctcggctcactacaacctccgcctctcaggttcaagtgattctcctgcctca

SEQ ID NO: 297593 - DNA, 201 bp, Homo sapiens
tttgaatcatgagaatgggtcgcctatttgaaggataaataacattgaaaaaaatttttttttttgagacggagtctcgctctgtcgcccaggctggagcrcagtggtgcgatcttggctcactgcaagctccgcctcccgggttcacgccattctcctgcctcagcctcccgagtaactgggactacaggcacccaccac

SEQ ID NO: 297594 - DNA, 201 bp, Homo sapiens
ctgattgtgtggttcctggacttcagcctccccagcctcccctcctttcaggatggatccagactttgtctcagccctgaggccctgcatgacagctgcgwccctgtctcaggacatcgcttcttcacccccttttgggccatgcgccagctttgtggggttgctttctgtttctggagctcgctgggcactcctggcctt

SEQ ID NO: 297595 - DNA, 201 bp, Homo sapiens
tttccagacagctgcatcctcagagctgccgtcagccagaagacggccggggctgggcatggtgatgagaccgcaccctctctgggccctcactggatgcygggcatggtccacgcacttgacgtttgtcaattgccttatccccgcatgtcagagagagacagctatccctgcctctcctgggcgtttcctaagcaccga

SEQ ID NO: 297596 - DNA, 201 bp, Homo sapiens
gagatcgcaccactgcactccaggccaggtgacagaacgagactccatttcaaataataataataataataataataataataataataataataataatwctaacactgctcattgacaatagacctgataaaccaagagctctgatggagatgcacaaggagattaattttgttttcgtgcctgctggctttagtccat

SEQ ID NO: 297597 - DNA, 201 bp, Homo sapiens
gattctgtgtttgtggagagggccggccttgtgcatcacaggatcgggtggggtccggtgagattccgtgtttgtggagaggggaggggccagctgtgagwcatggactcaggctgcctcagtgaacagacaaagttcacggctcatggcactgactttgcagccgagttcctctatgtgacatgctgggccatgcctggc

SEQ ID NO: 297598 - DNA, 201 bp, Homo sapiens
tggttttggcctcagccaggaggtgtaggaacccaccagagatgaagcgtcaagcaagctgacaggccctccctccaccactccccgccatgccgagtccyccgccaacctggccctgatcagaagcatgccccgcctccgtggggtggagtttattgtgatggccaacagctgagacataagaggccagacagcagatgt

SEQ ID NO: 297599 - DNA, 201 bp, Homo sapiens
tgtcatggggcctagagggtcatcttcccaagctttgcgcgtctgaaaagacttgtggctgagcagggtgtggggaagtgttccttacagggcttggaagygtttgttccatgtcttctggcttctgaggtttttgctgggaaattcagggactgtagattttccctccactttctggccgcaacctctgcctgtctgctg

SEQ ID NO: 297600 - DNA, 201 bp, Homo sapiens
tctgtaggtcttcattttttatggtcagataatatctcattgtatggatttatcgtattttgtttacctacccatccgtggtggacaccgggttgtttccrtccttgggtggttgtgaataatgctgctatgaacatttctagacatctcgttttgtcaattaaaatgatttttaatttactagatgggaaatagcacctt

SEQ ID NO: 297601 - DNA, 201 bp, Homo sapiens
cccagctggctcctccctactccccccatgcccacgcccacccagtgccgctccactcctctcccgaacagctcttactgccccgtccccatggggccccygctcagtcctcagctgctccttcctctgttcctggtgctctcaatgtgacccttccctgcagcccaggaaactggtcatcaaaatccgagttgctccctc

SEQ ID NO: 297602 - DNA, 201 bp, Homo sapiens
gctgagcggggctgagggtgctgagctgggctgagggtgctgggcagggctgagggtgctgagggtgctgccgctgctgcctcggggctcccctgtgccaytcagtgctgctttctttgggagcatcagagacctccgggcatggccacaaaccaggtggcaggtgacaaccggaagcagtttcctcaggctggagaccag

SEQ ID NO: 297603 - DNA, 201 bp, Homo sapiens
attgtagcctctacaggcccagggagttggggctgagaacttgtgggtcccagcctgggcctgaggaggaggtgtagacagggcggggtgaggggctcgcygaggcccctgaccagggagaagcctgtagcctgttccatggctgtcagggctgagtgagcgccgtgaccccactgcttcctgggcacactggggagggga

SEQ ID NO: 297604 - DNA, 201 bp, Homo sapiens
tggggctggaggccgcccacttggctcggcgctctcagcaaggggtgtggagtgtcctggcaaaggctctttgcggccagacacacatcttgagccctgcragcaaaggtgcaggaagaaacaggccctgtgccccacacggtggtagaaaggatgcagagccctccccacctgtgtgtgcaggatcagaagcaagtcccc

SEQ ID NO: 297605 - DNA, 201 bp, Homo sapiens
ggggtcatgtgccctgagctgccctttgccacctcatcctttctctctggcatattcttggggagccccagaggctcggaggagcctgcctgaggccacargtgggtgcccggcagctggcaccactggccagtgccccagaggctccagtccttcccccaccagcagcctcggggacttgagagagacatctgtcttccc

SEQ ID NO: 297606 - DNA, 201 bp, Homo sapiens
ctagttgacaggtcaataaacagcagctgagtggctatgagtttcagtatgttatggggttagaattatttcccccaagggaaaagacaaagaggggctcyacctttgtcttttttttttttttttcttgagacggagtctcactctgttgcccaggctggagtgcagtggcgcgatctcggctcactgcaagctccgcct

SEQ ID NO: 297607 - DNA, 201 bp, Homo sapiens
tgttactctgtcttctggggcgcatgtggtggtgcagtctcggtcactgagcctctacctcaagtgatcctcctgcctcagccacccgagtagctgggacyacaggcatgtgctaccatacctgggtaatttttgtagtttttgtagagacaggatttcgccatgttggccaggctggtcccaaactcctgagctcaaggg

SEQ ID NO: 297608 - DNA, 201 bp, Homo sapiens
ccttgctcctgtggcttccctctgctcccttcagctgggctgggttcactgcggtttcccagcgctgctgagcttcctacctgcggtggagggggggtctrtgggctgcacaaggagcctcctgggtcagtcccctgcccctggccaaaatggaggctgggagctcagggccattgttggcctcttcccccgtcctgcttg

SEQ ID NO: 297609 - DNA, 201 bp, Homo sapiens
aacccgggaggctgagcttgcagtgagctgagatcttgccactgcactccagcctgggtgacagagcgagactccatctcaaaaaaaaaaaaaaaaaaccrcggtgccaataaatggtgatacattggttgctttcacagtggggaatgaaagcaaaggcaaagaccgtttccagggggcatgtcctgggtggggctctcg

SEQ ID NO: 297610 - DNA, 201 bp, Homo sapiens
tctttgtatattttagatacaagttgtttatcggatatatgttttgtaaacattttcctcagtctgtggcttgtctccattatctttttttttttttttttgagaggagtctcgctctgtcgcccaggctggagtgcagtggcgcgatcttggctcactgcaagctccgcctcctgggttcccgccattctcctgcctcag

SEQ ID NO: 297611 - DNA, 201 bp, Homo sapiens; identical to SEQ ID NO: 61829

SEQ ID NO: 297612 - DNA, 201 bp, Homo sapiens
tacgccattatttctgcatatcagggacttttagtactttcactaatttgctactgttatctaaaaggcagagccaggtgtgcaggatggaacatgaaagyagactaggagcgtgaccactgaagcacagcatcacagggagacaggcctccggataactgcgggcaggcctgactgatgtcaggccctccacaagaggtg

SEQ ID NO: 297613 - DNA, 201 bp, Homo sapiens
ccgcttgtaaagccaagtccccgtctctttggggcctggagatcattggtgcctagggaagaaaggaggggctggttttcctagatctaggtctagttagytttttgcttttctagctttttaattatagaaaaggtcaaatatacgcaaaagtaaagagaagaaagaattcctgtgtagttattagctcagggccagtct

SEQ ID NO: 297614 - DNA, 201 bp, Homo sapiens
accatgggacagacaccgccccgcggccctttgttccacctccccctgggtggtgagcctgggtcctcaggcacctgggacatccctgcccttgactgccrtcttcataaaccttcaccctggaagggcgcccctgggcactcagggaggaaggccgcccgcaccttgggagggcagcgcttatgggcgggcactccacgc

SEQ ID NO: 297615 - DNA, 201 bp, Homo sapiens
aaaaaaaaaaaaccgcggtgccaataaatggtgatacattggttgctttcacagtggggaatgaaagcaaaggcaaagaccgtttccagggggcatgtccygggtggggctctcggggctgggctggctgacctgggctgacaactgcctctgtctccacaggagcgctgtgtggccgccctggctcgtgtcgagcgcacc

SEQ ID NO: 297616 - DNA, 201 bp, Homo sapiens
agatttgtgacacggacagagtgagcactgccaggaggggggctgtaccaggagaggcccgtgggtgggatttccagaggattcagtgaaccgagggagcrtcccggctagacccagggtgctgcggaaggtgagcgagagatctgtcagggaggcctggaaaggttgttgggcccatgtgaggtcctggccatgggactt

SEQ ID NO: 297617 - DNA, 201 bp, Homo sapiens
gggctggcttcctgggtggtcagttggggagttaggatggtccttggtgcaggacccaaggtgccgaagaaaggcggccaggcccgtggtagccagctggygtgcggtctgcagttcctggcatgtactcctgatggcacagcgccaagtgccgagtcctcactttgttgccaggtggctccaggctcttcctcggggcct

SEQ ID NO: 297618 - DNA, 201 bp, Homo sapiens
cttctgagcggcactggtaggtagctcttctgatgccactgtggcctaaccggctgcggggggttaaaaacccacctgggcacagtgagctgctcatgttctccccctggaggtttacagaaggctctgctcagagccaggcctggggggcatacaacagagtgtgggatggagccttggggcctctctgtccccactgct

SEQ ID NO: 297619 - DNA, 201 bp, Homo sapiens
gaacgctcttggagagtgacttgctcagccttggagctgctagagaagcagagaggagatgcagacctggggagacgctgctcctggggcccccacactgkccagcaaggctgggcaggctacacaagctgcaggtggatgctggaccctggacctgtgcccgctgcctgtcactcgtctccaggcctcggcctgtgaagg

SEQ ID NO: 297620 - DNA, 201 bp, Homo sapiens
cgcataacttggaggagttttggggagggtagtagggtcgggtgttggatgagctgtgtgttttgctggattgaaagtgcccacttaagtggccaccctcagtggagacctggcatgttcttcccctagggacgagcggaacacccgggctttgttggaggaggtgacctggcaaccctgggctgtgggaatctgggcctc

SEQ ID NO: 297621 - DNA, 201 bp, Homo sapiens
gactaatttaggaaattcagctgttactggagtgcagaaggttgacggtgtgttcctggaagggcttggtgaaccgcctgccgcgtttggccattagtgasggaagccctgcccccctcctgcccccaccttgctgccagcccacaggcgtgagtcatggactggaatattcatgaggctcagaatccagtgtcgtgctct

SEQ ID NO: 297622 - DNA, 201 bp, Homo sapiens
cccacacccctctgtacacccagcactgagaggccccacagatgctgccagaaaccagctgcagagcagggaggtggaaggcctctgccccggaaaagcaygcgcccataggtctgtttgatctgtgtcagcatagcataccgtaatgtacttaatcaccctcaaacaacacacacttggcttcattccacttttaggtct

SEQ ID NO: 297623 - DNA, 201 bp, Homo sapiens
tgagacccttgggctccttcaggttgagggagccctaccaggccgggggccattctcagcaggtttgttttctggttaggaagccagggcagctggatgcrgaggctgctgcctgtctcctgggtgggcaagggactggaggggcaggggaggcttcctcttgggtggtgcctgggtacaggtcattgaagccggaggctt

SEQ ID NO: 297624 - DNA, 201 bp, Homo sapiens
tgcagtttcaaaatgatgtgaggagcctgaaccaggcccccaggatagcagtgggcgaggtttacacagccataaacacaaaactctccttttcggatccygtcctatgtgacaagctatttacagggcttcgtgtgtgctaggtgtttacatcatcttcataacccgatagttttgctttcaccatctctggttccagct

SEQ ID NO: 297625 - DNA, 201 bp, Homo sapiens
ctgttgtgagtagggcagggtttgctgggggacaagcccgtgcaaaccagaatggggaagcatcgggccacccttgccagctctagaacttttcttgcccrgccccagatgcagtcacagagtccctgcgcctgtgtgcaggagagtcacctgggaaagggctcagacagaggctcccagcctacctccaaagaagcaggt

SEQ ID NO: 297626 - DNA, 201 bp, Homo sapiens
tttttttgagacggagcctcactctgtcgcccaacctggagtgcaatggctggatctcggctcactgcaaccgctgcctcccgggttcaaacgattctcckgcctcagcctcccgagtagctgggattacaggcgcatgccaccattccttattaatttttgtatttttagtagaaatggggtttcaccatgttggccagg

SEQ ID NO: 297627 - DNA, 201 bp, Homo sapiens
cctgcttaccggagtacgggtcactgggctcagggcccgtcccattctgctgtgacctcattctaactgtttacaactacaaagacctggtttttggagcrtttgcattttgaggtttcaggtggatatacattttgagggatgctgttcaacccactgcaccagccctcggttcaacaacctctcccgtctcttgttctt

SEQ ID NO: 297628 - DNA, 201 bp, Homo sapiens
ccctcatccccacgtcagctttcttcagcctcctgtctatttttagctcccttccccagggcctggctgacacggatgcagcctctctgcttggagttgcrtctccatgaatattttatgctgggggctgccgcacccgctccgggcagctgccagcacttcccggtctcggtctcgtattagaagaggccaactcagcgc

SEQ ID NO: 297629 - DNA, 201 bp, Homo sapiens
caaagacctggtttttggagcatttgcattttgaggtttcaggtggatatacattttgagggatgctgttcaacccactgcaccagccctcggttcaacamcctctcccgtctcttgttcttgtggggctgttctctccctgcttcttggctgagatggaagttgtggtcattttcagcagtgctaacttgggggtgattg

SEQ ID NO: 297630 - DNA, 201 bp, Homo sapiens
ttttggagatggagtctcactctgtcacccaggctggagtgcggtgacacactctcggctaactgcaacctctgcctcctttgttcaagtgattctcctgyctcagcctcccgagtagctgggactacaggcgtgcaccaccgtgcccagctaatttttgtatttttagtagagatggggtttcaccatgttggccaggct

SEQ ID NO: 297631 - DNA, 201 bp, Homo sapiens
agtgcagtggcgcgatctcagctcactgcaagctctgcctcccgggttcacgccattctcctgcctcagcctccccagtagctgggactacaggcgcccgycaccatgccccacttattttttgtatttttagtagagatggggtttcaccgtattagccaggatggtctcgatctcctgacctcgtgatccgcccacctc

SEQ ID NO: 297632 - DNA, 201 bp, Homo sapiens
tggaatcacagggagaacgcagtgctcccaccagacactagctcactgctgctttcctggttgcatggacagaacctcctgtctttagttaggggaatagwagagatctggggagtgagcccgagggtgtggagggtcattgtcccgtgcgggaggagggttgatgatggtgtgtgtgcagttgtgggttgaagggctcgt

SEQ ID NO: 297633 - DNA, 201 bp, Homo sapiens
gtgttgtcattctacccattgtacagatgagcacatggaggattgagggttctgacagcttgcccaggttacctagcaagtaagagccagagccaggaacrctcttggagagtgacttgctcagccttggagctgctagagaagcagagaggagatgcagacctggggagacgctgctcctggggcccccacactgtccag

SEQ ID NO: 297634 - DNA, 201 bp, Homo sapiens
ggggctcccctgtgccactcagtgctgctttctttgggagcatcagagacctccgggcatggccacaaaccaggtggcaggtgacaaccggaagcagtttyctcaggctggagaccagcggtgggcagggccatgctcccgaaggtttgacgggaggctgctcccgtctctgccttcatcttcacctggacctcctgtgtc

SEQ ID NO: 297635 - DNA, 201 bp, Homo sapiens
ctgctgctttcctggttgcatggacagaacctcctgtctttagttaggggaatagtagagatctggggagtgagcccgagggtgtggagggtcattgtccygtgcgggaggagggttgatgatggtgtgtgtgcagttgtgggttgaagggctcgtggagggtgtggaggaccgtcatcgtcccatgagggaggagggttg

SEQ ID NO: 297636 - DNA, 201 bp, Homo sapiens
ctcggcctcccaaagtgctgggattacaggcgtgagccactgcgcctggcccgtgtgtgtgctttttcttacccactgtaaaccaagtctgctatctcagsttcacaattgcatattgtttctttattttttggagatggagtctcactctgtcacccaggctggagtgcggtgacacactctcggctaactgcaacctct

SEQ ID NO: 297637 - DNA, 201 bp, Homo sapiens
  misc_feature (1)...(201): n = A,T,C or G
gctgccaactccaggccagctcttcgctggagttgggtgccggcctctcccaggtcgggtgggctgagtagaggagctgatggtgaacctggacttgatgnatgaggaggactcggccaggctgaaaggaaggaaagtgagtggtgggtgcccccagcacggcactaacacaatgcctgtgacccacccttgcatgactct

SEQ ID NO: 297638 - DNA, 201 bp, Homo sapiens
gcggcatctacaagcccagcagagaggcctcaggaagagccagctgctgataccttgacctgggacttccagcctccagggctgtgagacgaatttctgcygcttaaggcgccagcctttggtgggcactcttgttacagcggccccagcacacgggtacactccacacacagaatttcaaaccgcctcccctcccttctc

SEQ ID NO: 297639 - DNA, 201 bp, Homo sapiens
tgccctgtggctccgccagcctgggagtgccctcttggtgagccacatgttgcctatctcttcatcagcgtccagccccaaaggggtggagggcatattgraaattgcagcctccccttttggccacaatgtcctcatgtggccacatctgtgggtgggtgagtgccgctggtcagacgtgtctgttagacattggagtga

SEQ ID NO: 297640 - DNA, 201 bp, Homo sapiens
accctcctgaatatgcgtcaagaggtccttgcatctgggcccctctgggagctggcgtgcagggtcgcgatctcaaagccaaccaacagacccctccaagygccaaggcttttgggaaggagcccctgggggccccgacatcctgcattgcagccagttcgcacgacctgtggcttggcccaagggaggggatgcctgctc

SEQ ID NO: 297641 - DNA, 201 bp, Homo sapiens
gcttggcttcaacaagagagaggactttttcttttttttttttgaactaacaatgcagctgtgagcgatccacagccgataggcagccccgtggtgctggrgacccaggcttctgctgccctgtggctccgccagcctgggagtgccctcttggtgagccacatgttgcctatctcttcatcagcgtccagccccaaaggg

SEQ ID NO: 297642 - DNA, 201 bp, Homo sapiens
cattgcgctgtcgtgcgcgtgaggcttggagaaggcaggatacgcttgccagcacatgaaggcttttcccagtggggctgggcggtgccccaggttcttcytcccagcttcagccttttccctgtagcaggggctgggcagggaggccttggagccccaaggctgtagcttttctccatatcttggtcaggccccggagcc

SEQ ID NO: 297643 - DNA, 201 bp, Homo sapiens
ttccccacttctctccggggcggtgaccgtgtgcagctggctttccccacgtctctctggggcggtgaccgtgtgcagctggctttccccacttctctgcrgggtggtgactgtgtgcagctttcctgggagtgcagcgaatgcagggtccctcttcctttccacttccgttcagctcccatgtttcattatcaagtgcat

SEQ ID NO: 297644 - DNA, 201 bp, Homo sapiens
tgcccccagcacaggttgagccgaacagatgccccaggtgtttgaaaggacaggcgaaagtgcagcgagcgtgaacctggcccctcctcccctcacctgtsctacctcatttagcagcatcttcttatagcttctgtgggaaaagtcatggtaataaaaacataatgctttaatcaataacacccatgtctctgttttagc

SEQ ID NO: 297645 - DNA, 201 bp, Homo sapiens
cgccatctcagctcactgcaacctcctgactcccaggttcaagtgattctcctgcctcagcctcctgagtacctgggattaaaggcgcctgccaccacgcrtggctaatttttgtacttttaatagagacagggtttcaccatgttggccaggctggtctcgaacttctgaactcaagtgatccgcctgccttggcctccc

SEQ ID NO: 297646 - DNA, 201 bp, Homo sapiens
acgccattatttctgcatatcagggacttttagtactttcactaatttgctactgttatctaaaaggcagagccaggtgtgcaggatggaacatgaaagcrgactaggagcgtgaccactgaagcacagcatcacagggagacaggcctccggataactgcgggcaggcctgactgatgtcaggccctccacaagaggtgg

SEQ ID NO: 297647 - DNA, 201 bp, Homo sapiens
tgttatctaaaaggcagagccaggtgtgcaggatggaacatgaaagcagactaggagcgtgaccactgaagcacagcatcacagggagacaggcctccggmtaactgcgggcaggcctgactgatgtcaggccctccacaagaggtggaggagtagtcttctctaaactccccgggggaaagggagactccctttcctggt

SEQ ID NO: 297648 - DNA, 201 bp, Homo sapiens
caacctccgcctcctgggttcaggtgattctcctgcctcaccttccctggtagctgggattgcaggagcacaccaccatgcctggttaactttcttttcastagtggtggggttccaccgtgttggccaggctggtgtcaaaactcctcacctcagatgatccgcctgcctcggcctcccaaggggctgggattacaggcg

SEQ ID NO: 297649 - DNA, 201 bp, Homo sapiens
ctgacctgctagaggggccgtcccatgcatgccggcacactcatgcatacgtgttcacacccctggggcgtcgggaccctcatgctgggttagtgcttgayaccagcaagagggttctgaggacgagggacgcccgaggtgtgggagtatgtccacatttcccccgcgtttgtaacagcagctggctgtactgagcactgc

SEQ ID NO: 297650 - DNA, 201 bp, Homo sapiens
ccatggcctgggtaggaagggtcccctcttccactcccccaagagccagtggaggagcctttcctgcctcccatgtcctcctcctcctcctctgcctctcrgcctttgctgtcaccaaggccaaaggaaggctggctgtgtggtgtaccttgcacctccagaatgccttcaggtgtgatgtggcaccacagatctggtagg

SEQ ID NO: 297651 - DNA, 201 bp, Homo sapiens
gggacctggtgagccctggaccctcctgggctggcgggaaggggctgaagcgcctctgactgaggggtgctgttgggagttggggtggtgctgagcgggargattgtcctgcctgggacctgggctggggctagaggagctgggtagggagatgcaggggaccatggcccatctcccttctgtgactttgtgccgctccat

SEQ ID NO: 297652 - DNA, 201 bp, Homo sapiens
atcttggcttaactacagccttgaccccctgggtgcaagcgatctttccacctcagcctcccaagtagctgggactacaggtgcacatgctaacacgcccrgctaatttttgtattctttgtagagacggggttttgccatgttgcccaggctggtcttgaacccctggactcaagcaatcctcccaccttgacctcccaa

SEQ ID NO: 297653 - DNA, 201 bp, Homo sapiens
cctatccatccatccatttgtccatccatccatccatccatcagtccacccatttccatttgtccatccatttgtccattcatcatccatccatccatcchtttgtccatccattcatctatccatccatttgtctatccatccatcatccatttatccattcatctttctacccatccacccactctcctacccttcctt

SEQ ID NO: 297654 - DNA, 201 bp, Homo sapiens
ttttagagacagggccttactatgttgtccaggagggctttgaagtcctgggcccaagtaattctctagtattagacttttgagtagctaggatcacaggygtgtaccactgtgcctggcttgtatgagttctttatatagatgcatgttcctcatcagatatatgatttacaaatattttctttcatttcttcactttta

SEQ ID NO: 297655 - DNA, 201 bp, Homo sapiens
catccatttgtccatccatccatcatccatccatccattgtccatccgttatccattcatttgtccatccattatccattcattggttcatccatccatcctaccactctgtccatccatcatccatttgtccatccatcatccatttgtccacccatccatccatttgttcattcatctatccatccttttgtccatcta

SEQ ID NO: 297656 - DNA, 201 bp, Homo sapiens
agtacctcggtaccaacacgagacgcaagtctgatcagaggccttgagataccaagtaatgggaaccacacagcttccagaaatgtgcacacagggcaagygacagagacggggccctcctgcccaaaatgagcctatgaaccccaattccaaacccatacaaaagtgaatgctgagacatcccccaaaacaataaataga

SEQ ID NO: 297657 - DNA, 201 bp, Homo sapiens
tcatccatttgtccatccatccatcatccatccatccattgtccatccgttatccattcatttgtccatccattatccattcattggttcatccatccathctaccactctgtccatccatcatccatttgtccatccatcatccatttgtccacccatccatccatttgttcattcatctatccatccttttgtccatct

SEQ ID NO: 297658 - DNA, 201 bp, Homo sapiens
gtcagatgctgtcccaggcactgaggacacaagcaatgaaccaaaacagctgaaagcttcattccgtggagtttgtattccactggggaacacaggcaatycacaataaacagaaatacgtgttgttcaaccacagactccaaatgctctaaagaagaaagcagagtacaaggttagcaaaagatgggggctgataagttt

SEQ ID NO: 297659 - DNA, 201 bp, Homo sapiens
tcaatccatttgtccatccatccgtcagctatccatccaccatccatccatccatccattcatccatccttttgtccatccgtccgtccgtccgtccgtccatccatccatccatccatccatccatccatcctatcatccatccatccacttgtccatccatccatccatccatccatccatccatccatccatcctttt

SEQ ID NO: 297660 - DNA, 201 bp, Homo sapiens
gcttcgcatccttgacttccttttctgtgaccagccagagaaaagggctcgtgtggtcaggttaggcctactcaggtcatctccctgttttaaggtcaccygtgccgcaaaacggaacctgctctggggagtcgagtttgtcctcttcaccttccaggggatcttgcagggcgtggacaccaagggccggaagtcttggag

SEQ ID NO: 297661 - DNA, 201 bp, Homo sapiens
ggacaagcccctgcccccgcttctcgcccgagttggtggcaacatcgaggtggggcctgtctgttcccgcatctctttctgcccctgcttcctgctgcccytggggtatggaggagggctgggggactgccccgggtctcatgccaggtagaggcggagcttggacagaacttggtctggtcttcgccgtcagggtcctgc

SEQ ID NO: 297662 - DNA, 201 bp, Homo sapiens
atcaatccatttgtccatccatccgtcagctatccatccaccatccatccatccatccattcatccatccttttgtccatccgtccgtccgtccgtccgtccatccatccatccatccatccatccatccatcctatcatccatccatccacttgtccatccatccatccatccatccatccatccatccatccatccttt

SEQ ID NO: 297663 - DNA, 201 bp, Homo sapiens
catcaatccatttgtccatccatccgtcagctatccatccaccatccatccatccatccattcatccatccttttgtccatccgtccgtccgtccgtccgtccatccatccatccatccatccatccatccatcctatcatccatccatccacttgtccatccatccatccatccatccatccatccatccatccatcctt

SEQ ID NO: 297664 - DNA, 201 bp, Homo sapiens
cacacctggctaatttttaaaaaatatttttggtagagacggggtttcaccatattggtcaggctggtctcgaactcctgaccttgtgatcctccggcctyggcctcccaaagtgctaggattacaggcgtgagccaccgcgcccggcctggattgtggtttttatctgcaggagctccgtgtcctctggggagtgggagc

SEQ ID NO: 297665 - DNA, 201 bp, Homo sapiens
tcatcaatccatttgtccatccatccgtcagctatccatccaccatccatccatccatccattcatccatccttttgtccatccgtccgtccgtccgtccrtccatccatccatccatccatccatccatccatcctatcatccatccatccacttgtccatccatccatccatccatccatccatccatccatccatcct

SEQ ID NO: 297666 - DNA, 201 bp, Homo sapiens
ctctgggagcagctttatgatgctgtctctgccttgggtggtccagttcatatcccacacccacgaggacaaggcgttgggtgtgggttcctcactggagwccttcttttccttgatcctgtggtggagacaggccatctcactcccgtggccagtggtgagaactttccttcagagaccacggtgttggaccgtgttggc

SEQ ID NO: 297667 - DNA, 201 bp, Homo sapiens
ttctccctccttccctcagtcccttctttttatccatccatccttcatccatccagccattcatccatcatccatcatcaatccatttgtccatccatccrtcagctatccatccaccatccatccatccatccattcatccatccttttgtccatccgtccgtccgtccgtccgtccatccatccatccatccatccatc

SEQ ID NO: 297668 - DNA, 201 bp, Homo sapiens
ttcagagaccacggtgttggaccgtgttggcatcattccagttctctgcatcttttgggcttgaggcctcccctgtcctgcctgggtgctgagacacagcyccaagttccaagctctccaggcttcttcctggtgtctcatcaccccaacctggggcccctggacaccagctcctgcttcctcaccttcagtttccccttc

SEQ ID NO: 297669 - DNA, 201 bp, Homo sapiens
gggggagtagggggacagtggtcaccaggcaggggcaggggagcagggaatgagaacctgtcccagggaggctccacgcccccagcacacactccattgtsccctgggatatttgttacaaaacacaaattcaacaataaacaacaaaatgattaataatttcacatcagcaacctcagggcattaaaccccaagtgcagg

SEQ ID NO: 297670 - DNA, 201 bp, Homo sapiens
atcatggcagtgctgcccggcccctccctgggaaggggctgtggagggcttcgccagttgacttgcgtctctaaaggccacaagtaaaccactttctccgaggggcagcacctctctggtggggtgctctggttgtaaacgcccttatctccatataaatgggccattttctgcctgtacagacaggaaactaaatcaagg

SEQ ID NO: 297671 - DNA, 201 bp, Homo sapiens
ggcaagtttgagaccaggggctgagccaaggagtgggctggagtggagatggacccacatccccccagtacctcggtaccaacacgagacgcaagtctgaycagaggccttgagataccaagtaatgggaaccacacagcttccagaaatgtgcacacagggcaagcgacagagacggggccctcctgcccaaaatgagcc

SEQ ID NO: 297672 - DNA, 201 bp, Homo sapiens
agtcctgcgcatggcaagccccgcatgccccggggatcatggcagtgctgcccggcccctccctgggaaggggctgtggagggcttcgccagttgacttgygtctctaaaggccacaagtaaaccactttctccgaggggcagcacctctctggtggggtgctctggttgtaaacgcccttatctccatataaatgggcca

SEQ ID NO: 297673 - DNA, 201 bp, Homo sapiens
tttttatctctccggttctgtcttaatctcatcccatgcctctccttgctcaccccgaaaacagttaacagcagtcctgcgcatggcaagccccgcatgcmccggggatcatggcagtgctgcccggcccctccctgggaaggggctgtggagggcttcgccagttgacttgcgtctctaaaggccacaagtaaaccactt

SEQ ID NO: 297674 - DNA, 201 bp, Homo sapiens
ccacccagggccccttcctccggccagccccagcctctgtccgtggtgctgaagttcatggcggcctctcttgtccttacctttgctggggtgagggctcrgggagagcgtgtctctcagatctcctgaagggcggtctcttgaagctggccaaactctgacaccctcaacgggacgtggacatcactgtctcatctccac

SEQ ID NO: 297675 - DNA, 201 bp, Homo sapiens
gtctgtcttctgaagggccagggctgcacggggcagggagggacggtgtcaggaggaccctcgcaaaggcaaaggaattagagagcagcaacccctccccrtgtacctgggtcacgctgccacgaagcagcagtatgtccatcaactaacagtggtggatccttgctctggccctggccccactgggaagtatctgccgcc

SEQ ID NO: 297676 - DNA, 201 bp, Homo sapiens
tacagtgacttggccaagtctcaggcttgcaaggggcagagcctccctggggagcccgggactcactggcaggccacgtaggattaaccgtgggtccctcracttcatcctcggtaggtttgtggggtttgctctctagcagctgaaggccacccagggccccttcctccggccagccccagcctctgtccgtggtgctga

SEQ ID NO: 297677 - DNA, 201 bp, Homo sapiens
gggaccagcattgcctggctggcaggtgggaaaaggccttttggctccaagacatcctttgggggctcaggcatggaccacaggtgggcggctgtgccttyagtggccctgctggctgtgggggatggctagtgcctcctttcagtggttggagacggtataggggatcctcccaaaagggccacatttctgtgggtcatg

SEQ ID NO: 297678 - DNA, 201 bp, Homo sapiens
actggataggggcagggagagaaaagctagctagggccggggtgatcagagaaggcttcctggagtaggcaggccatcccattaatccttgagccctgagrgggcaaagggcaggtcaggtggaggcagcctgaggcttccgggagggcagagatggctccacccatggaacccgtggtgctgcgtccccaggaggaggtg

SEQ ID NO: 297679 - DNA, 201 bp, Homo sapiens
cttgaaggccctggactctgttaccagtggggggcctgtggccccggctcttcacagcaggcagaagcgtatgatcccagggagggtgggctggggggggbgcagcacttgcctcggagccactgctgcgttgggtttgccttctgccagaggtgtggttaagggcagtgatagctgcgccccagcaaggagggtcatggg

SEQ ID NO: 297680 - DNA, 201 bp, Homo sapiens
catggaccacaggtgggcggctgtgccttcagtggccctgctggctgtgggggatggctagtgcctcctttcagtggttggagacggtataggggatcctyccaaaagggccacatttctgtgggtcatggacaaggggcagcaaggcggtcagggcagcctccagtcagagccgtcatctggtttttgcctcacttgctg

SEQ ID NO: 297681 - DNA, 201 bp, Homo sapiens
tgtgcgcgtgtgtgtgcatttgcatgcatgtgtgtctgcacatgagcacgcaagggccaggcgagggccttcagttcattacaaactagctggggcaggtygcacccctccactattctccttccatcctacatgcaggtgtgctgggcctcagtttctccatttgtgtgatgaggagtttagattgaatccttccaaggg

SEQ ID NO: 297682 - DNA, 201 bp, Homo sapiens
ctcttgtcccgtgaacaaggtgagatcactggaaggcttcgagcagaggagggactgctatgacatgacatcctggcaggctcccctggcggccctggggwgggagagatggtggtggtggggggcgagggtccctgccttcgcctctgggcctcgggtctgtgccccatttccacttccccggcttgttcgggtacttgg

SEQ ID NO: 297683 - DNA, 201 bp, Homo sapiens
tcctggccattgtggcgatttctgtggctgtcatggtaggtttccctggccatcatggaaggttgcctgtggccactctggtaggtgctggggaacttacygtggaacccgctgctgtggtagggctggtgcggctgtgagccctgcctgggaacggggggcctggagccagggccgtgggacccacggtctaccccgcac

SEQ ID NO: 297684 - DNA, 201 bp, Homo sapiens
tgggtggctagagtcctggtgccgggcagggctgatttgcaaacactgaccatccgcccctgcccaaaccagctggtgttatggcagcgaggaagatcccsgtcacccagggctgtcctaggaggtcccctcgccagggaggccctctctgtcctttcccgggcctggcccaggcctgactaggaggtgggcgatggttga

SEQ ID NO: 297685 - DNA, 201 bp, Homo sapiens
tggtgggttacatacagttggaggacacacagagggtgggagggtgggcaggggagcttgtggtcaggaggggcctggcttggccagccttgggcggaggyagcagctaccccaagcctgtgacactttcagcccccctggctgccctgaggcccttagggctgagttgccaccactgccctccctctttcccttccacct

SEQ ID NO: 297686 - DNA, 201 bp, Homo sapiens
agccttggggcccccctttctctgtgagtgtgaggggcattcgccctcctcacccccacaggtagctgcctccctcacctcaccccagccctgcggtggggtggagttggaagctctttccctgcaccatggcaggagccagtgttaggtctggaggggagcatggagagaaggtgtggcccgccctggagctgacggtcc

SEQ ID NO: 297687 - DNA, 201 bp, Homo sapiens
aggccaggtctggggctcttctgtgttctctacctgtgccccatggtcccttgagggtgccctctggaccctgttcagcctcccacagtctcccaggcgcygtccccttggccccaggcctgattggagctggcaggtgggagcctggattcaccagcccctcacagccaatgccggggacagcctctcccctactctctc

SEQ ID NO: 297688 - DNA, 201 bp, Homo sapiens
ccctagagaagtggtatgtgggtaggatcaggctggctggagccccagttacctcctcctgtcctcagggccagctctgggcccaggctcagacactaagyccaggtcttactcagccttggggcccccctttctctgtgagtgtgaggggcattcgccctcctcacccccacaggtagctgcctccctcacctcacccca

SEQ ID NO: 297689 - DNA, 201 bp, Homo sapiens
cctgggagagcttcctgagtgtgctctgactgtgccccacggccccctggtccagagcctgtgcagcacccccactgctgccactccaagcccctgcccccgacccccacctgctttgcagccaatccaggcccttctggtcctccgtgcacacacgtgtgtgcatgtgactgtgtgtgtaccaccctgtcttcccctaga

SEQ ID NO: 297690 - DNA, 201 bp, Homo sapiens
atccaccgagccggtttacacagcgtgggctgtttcagtgggagggtgctgggggagagacttcgcaagggggtgggcgcccactgcctgtgttcaaacastggcagcttcaccactgccagctgtaggactgagatgtaggtaaataatgaggtcctttgagcctcagtttcccaatctgcagatggggataagaataga

SEQ ID NO: 297691 - DNA, 201 bp, Homo sapiens
gtcgccgaggggactgcttgccatcagatgctgggttggctccccgtagatgttgccacagcagccccttcttgtccaggtcctgctccctctgtaccgcrtctcgccccagctgctggcagcctctgtgcagttggctggagcccaatcccgacagcaaaaatgtgggggtgagcttggtgtgtcccctccagcttgtcg

SEQ ID NO: 297692 - DNA, 201 bp, Homo sapiens
acctgcttaacccactgatttgcgttttgcagccacgcctgccgggccacctgcccgacccacatgggagagaaaagctgccacctttttaggagccagcrccaccttgggacaaaaagggaaacctagtaatgccatcacatggaggacgaggcccagctcagctgggccagagcccagaagtgccacctcatcataatt

SEQ ID NO: 297693 - DNA, 201 bp, Homo sapiens
ggggagtccaggtggggaacagaaatagcccctctcggccgggcgcggtggctcatgcctgtaatcccagcactttgggaggccgaggcgggtggatcackaggtcaggagatcgagaccatcctggctaacatggtgaaaccctggctctactaaaaatacaaaaaattagccgggtgtggtggcggacacctgtagtcc

SEQ ID NO: 297694 - DNA, 201 bp, Homo sapiens
agacttgtagaaatgtcttttcagattctttgcacacttaattgggtcatttgtgcccgtgtcactttggtgatctaggtatttatttgggtgaagcaaayacctgttaagtacttggtccgtcggttgggcctcacaggcctggggcggacatagctatcccatggtgatgggtgaggccaggccctgagaagctgcacc

SEQ ID NO: 297695 - DNA, 201 bp, Homo sapiens
gtcaccgcgcccagcctcaaggcattttcttacagtctccctggttctatcctttctggcattcccagttcacagacgatgaagctgaggtttagctcgcyacagtgacttggccaagtctcaggcttgcaaggggcagagcctccctggggagcccgggactcactggcaggccacgtaggattaaccgtgggtccctca

SEQ ID NO: 297696 - DNA, 201 bp, Homo sapiens
cacagcaaggcggcccagccctggagacctgggtgcacgtcccatccctcccctccaccctggctcagagccctgcttctctgtgcttaggtttctcccgkgtcacagatgttcaaggcattttcttttctttcttttcttttctttttttttttgagatggagtttggctcttattacccaggctggagtacaatggtgc

SEQ ID NO: 297697 - DNA, 201 bp, Homo sapiens
agggagatggaggtgggaggcctctgccaagaaacatctgcggagctgggaaggaggaagggtggcgggactgtccattgggatccccagggctgcgaccrcatgctgtgccctcagcagggtgggggctcagagcagagacccctcctgcctgcccctgcctcctggcacacataggctgggcataacattcaaggcagc

SEQ ID NO: 297698 - DNA, 201 bp, Homo sapiens
tctctgccaaaagtggtgatggtggtgtccgtatgtttggcgtctttgggctgggtttggtttttgctgctggtagaatcagggtcctcgggcatgaacgygagcccaaagtgccagtctgcgattggaaatttccagccactttaagccagtgctgagtagggcttctgcagagccatgtttgagccaaggtcttggaag

SEQ ID NO: 297699 - DNA, 201 bp, Homo sapiens
cctctggccagagttgccccaggtgtgtaccgccccggtgctctttgctgggggcggcagtcagcacctctcacccacctcctaccggcccttctctcccrgcccctgccttgtggggcttctgcagccctgggctctcctgggagagcttcctgagtgtgctctgactgtgccccacggccccctggtccagagcctgtg

SEQ ID NO: 297700 - DNA, 201 bp, Homo sapiens
ttggtccccacggagttcagggactgctggggaaaggatggggctgggaggtgttagccccaaccctctggccagagttgccccaggtgtgtaccgcccckgtgctctttgctgggggcggcagtcagcacctctcacccacctcctaccggcccttctctcccagcccctgccttgtggggcttctgcagccctgggctc

SEQ ID NO: 297701 - DNA, 201 bp, Homo sapiens
agagtggatgatgattcaccgaatcctgaaccataggtgtgtgcctgcaggcggccaccctgcccatcgctggggccgggccacgtcagcttctttgcccwgtaaaatgggtgcagcgcagggtgccagggcccttgctttggggctgccgtgcagaaccacatgtgggcacagcaggggcacaaggaagggcccagggtt

SEQ ID NO: 297702 - DNA, 201 bp, Homo sapiens
ccaccctgcccatcgctggggccgggccacgtcagcttctttgccctgtaaaatgggtgcagcgcagggtgccagggcccttgctttggggctgccgtgcrgaaccacatgtgggcacagcaggggcacaaggaagggcccagggttcccagtgctggagatctgcctgacctgctagaggggccgtcccatgcatgccgg

SEQ ID NO: 297703 - DNA, 201 bp, Homo sapiens
tgagcgattctccagcctcagcctcccgaatagttggaattacaggcgcccaccaccacgcccagctaatttttgtatttttagtagagacggggtttcaycgtgttggccaggctggtctcagactcctggcctctggttatctgctcgcctcagcctcccaaagtgttgggattacaggcgtgagccactgtgcctggc

SEQ ID NO: 297704 - DNA, 201 bp, Homo sapiens
cctgttgtgtctccactgtcacagaaggtcaggcctggggtgtccatggcagagggtctgaggctgaggggcctctctttgcccctcagcttcccctgagygctcctgagtgcacaggggatggtggagagcgagtaggacaagctggctggggcgctggggccgcaggctggcatgaagggccggctctctcgtgggccc

SEQ ID NO: 297705 - DNA, 201 bp, Homo sapiens
ctgtgttcaaacagtggcagcttcaccactgccagctgtaggactgagatgtaggtaaataatgaggtcctttgagcctcagtttcccaatctgcagatgrggataagaatagaaccctgagccaggtgtggtggttgtgcgtgttgtcccagctgctcaggaggctgaggtgggagggtcgctcgagcccaggaggtcga

SEQ ID NO: 297706 - DNA, 201 bp, Homo sapiens
agtgtctgaggctggagagcagggctctgggtaggcggtgggacatcaggctggacaggcaggctgtaatgtgaggttttcagctgtgttgggggctgagrtgaatcacagagagcactgtgtctccagagcctcttccgtgctttgtcccaccccacactgcctgggccagcgaagccttctgggtgaagccctgggatc

SEQ ID NO: 297707 - DNA, 201 bp, Homo sapiens
tccatcgtataacctttcttagccaccctggaacactggacctctgggggtggaggcagtggcaagtagggagggagcggctctccaagcctgcctgtgcktgagagctggggcacttctcaccctgctcaccttggcttgtttcccagagttgcacacgctgtggcagaacgaggagcgggctgctgtatcctctgggaa

SEQ ID NO: 297708 - DNA, 201 bp, Homo sapiens
ctgggagagcttcctgagtgtgctctgactgtgccccacggccccctggtccagagcctgtgcagcacccccactgctgccactccaagcccctgcccccsacccccacctgctttgcagccaatccaggcccttctggtcctccgtgcacacacgtgtgtgcatgtgactgtgtgtgtaccaccctgtcttcccctagag

SEQ ID NO: 297709 - DNA, 201 bp, Homo sapiens
ctttgtccttctctgccagggatctgttgctgcagttccttctctctgttctctcccccatcctttctgcccacccaaggtgtacccccccaaacactccyatctgctggcctctctttttcagcccccggggcccagcagttctgcttcctcctctcaacccgggcaggtggtctgggcatcaacctggccacggcggac

SEQ ID NO: 297710 - DNA, 201 bp, Homo sapiens
gctttcttttgatgtgacaccaatgaggtgatgtctgggttttgttaaatgtcataaataaattatgaatcctctcttgggcggtgtactgcccccctttrccagcataagccctgtctcatggggggaggttcgaggactaacggcagcctgagaactccttggccagcgtctagggtggccctgagaacctctggccca

SEQ ID NO: 297711 - DNA, 201 bp, Homo sapiens
catccaccgagccggtttacacagcgtgggctgtttcagtgggagggtgctgggggagagacttcgcaagggggtgggcgcccactgcctgtgttcaaacagtggcagcttcaccactgccagctgtaggactgagatgtaggtaaataatgaggtcctttgagcctcagtttcccaatctgcagatggggataagaatag

SEQ ID NO: 297712 - DNA, 201 bp, Homo sapiens
acctgccagaccacagaccagcctgagtcacctcagtgtccccagggcatccaccgagccggtttacacagcgtgggctgtttcagtgggagggtgctggsggagagacttcgcaagggggtgggcgcccactgcctgtgttcaaacagtggcagcttcaccactgccagctgtaggactgagatgtaggtaaataatgag

SEQ ID NO: 297713 - DNA, 201 bp, Homo sapiens
  misc_feature (1)...(201): n = A,T,C or G
tcaccgggggcctccggcaggaggcaatcgacagattcaatggtacccccatcctgcccaagggttctgattgagactcctttttggcctcttctcccagncctggttcttagccaggtcacccagctggtgttgtgttgagcagcctcacaaacagctaaagacagcaggccagtccgagtttccaatgttaaaaggatt

SEQ ID NO: 297714 - DNA, 201 bp, Homo sapiens
gacctaactttcgctccacagtcacgcgccttccccttgttttgatcaccttgtgtttgccaagtgccctggcggctgcgtccttgctctgctgctgcccytccccagaggagtgaggggctggagcctgggtctggcagagctgtggggctgtgtgcagggggactagtgtggtgaaccagccttgacccccttgaggga

SEQ ID NO: 297715 - DNA, 201 bp, Homo sapiens
atgggccagacccctttcccctctccccctacaccaagtggggattctcagcagaggagaggccggccctgcccgccccaaggacccaaccaggccttggyctggccttgactttgggaaccttggaaatctttgggccttgactttgggaatcttggctgtggctgggagaaagctgggtggtcttggaggatgagcaga

SEQ ID NO: 297716 - DNA, 201 bp, Homo sapiens
tggcaggtttgccggcctttgcaacctggtgatggtgttctcgtcccagctcctggcttggcccctgcaaatccttcaaccacccagaatcagatgacctmactttcgctccacagtcacgcgccttccccttgttttgatcaccttgtgtttgccaagtgccctggcggctgcgtccttgctctgctgctgcccctcccc

SEQ ID NO: 297717 - DNA, 201 bp, Homo sapiens
cgggcatggtggctcatgcctgtaatcccagcactgtgggaggccggggtgggaggaccgcttgaacccagaagtttgaggcaacgtagtgagatcccacytctacaaaaaattagccaggcacggtggtgtgcctgtggtcccagctactagggaggctgaggtaggagaatcccttgagcccaggaaattgaggctgca

SEQ ID NO: 297718 - DNA, 201 bp, Homo sapiens
agtttctgcctctgttagcacatggggttttcccgtttgtgtctgtttctcatcctataaacacatcattcatactggatgtagggcctaccctaatccartatgatctcatcttagctacttattttatttatttatttatttatttttttgagacactgtatcgcccaggctggagtgcagtggggcgatctcgactca

SEQ ID NO: 297719 - DNA, 201 bp, Homo sapiens
gctggggaacttaccgtggaacccgctgctgtggtagggctggtgcggctgtgagccctgcctgggaacggggggcctggagccagggccgtgggacccamggtctaccccgcactgtggggcctggcctggctcgggtgtgggtctcatgttcagtgggcagacaggccatcaccccattgctcagcacttgtctgttcc

SEQ ID NO: 297720 - DNA, 201 bp, Homo sapiens
tggagtaggcaggccatcccattaatccttgagccctgagggggcaaagggcaggtcaggtggaggcagcctgaggcttccgggagggcagagatggctcyacccatggaacccgtggtgctgcgtccccaggaggaggtggagcgggaaatcatcaagcaggaggagaacgtggaccccgactactgggagaagctgctg

SEQ ID NO: 297721 - DNA, 201 bp, Homo sapiens
tgcttgacaggaggcgaggaaatacttgctttgtgaatggatggatgaataagtaaatgattgactggataggggcagggagagaaaagctagctagggcyggggtgatcagagaaggcttcctggagtaggcaggccatcccattaatccttgagccctgagggggcaaagggcaggtcaggtggaggcagcctgaggct

SEQ ID NO: 297722 - DNA, 201 bp, Homo sapiens
cggtgattcgggagaacgagttttcctttgaggacaacgccattcggagtgggaagaaggtattccgtatgaaggtgagggctcgctatccttggaaggayggtaggaaggcccccggtctagttcagggaccacgggtgccgtgcactcctttggggtccctcagcctgggagggctaccgaggccggcaggctctgagg

SEQ ID NO: 297723 - DNA, 201 bp, Homo sapiens
gtatgcctggacccagagctggagaaggctcccgagggcaagtggagctgcccccactgtgtaagccttggcagagccccgggctgggggcggggccacgmctggctcccccacccctgtgccctcatttgggggcagaatgcggggagatgctgtaggggagggagggagtcgggcctggtggagcggggaccccgccca

SEQ ID NO: 297724 - DNA, 201 bp, Homo sapiens
ctgctttcctgtcttttgggtatacacccagaagtggaactgccggatcatatggtaattctatttctgattttttgagaaacagacttagctctttgagwtctcatagcattcttcacctagataggcgaggagaccgatgctcggctaaaagattgtgtgcaaacccaggtgccacgtgcaggcaaagcctatgctgca

SEQ ID NO: 297725 - DNA, 201 bp, Homo sapiens
ggagaccgatgctcggctaaaagattgtgtgcaaacccaggtgccacgtgcaggcaaagcctatgctgcacggcatcctcggccctctctgctctctcacrggcatgtgggctgctgggagaggcaggcttggtgcagcacaggacaggcctacatcactgggggagaccggtgcaaaatgaaaatgcagggctcgcagga

SEQ ID NO: 297726 - DNA, 201 bp, Homo sapiens
gggctgaccccggagcagcctgtgctcgccctttcccctgggctggtctcctgggtcgattcccaggtgggcggagggctcttcagcctcactgaggtctyggctaatgctttgcatacactttcttcgtggggcctcttctcaggttttagtgaccagagtttgggtcgcttgagtgctggcagtgtcccccagtcactt

SEQ ID NO: 297727 - DNA, 201 bp, Homo sapiens
atgctgcacggcatcctcggccctctctgctctctcacaggcatgtgggctgctgggagaggcaggcttggtgcagcacaggacaggcctacatcactggrggagaccggtgcaaaatgaaaatgcagggctcgcaggaaaacagctttttcctttcttctgtggtctctgtcaacatgccaaggtgttttaaatttgctt

SEQ ID NO: 297728 - DNA, 201 bp, Homo sapiens
caggcctacatcactgggggagaccggtgcaaaatgaaaatgcagggctcgcaggaaaacagctttttcctttcttctgtggtctctgtcaacatgccaargtgttttaaatttgcttgcttttttttttttggagacagagactcactctgtcacccaggctggagtgcaatggtgtgatctcggctcactgcaacctct

SEQ ID NO: 297729 - DNA, 201 bp, Homo sapiens
tcaccgggagagtgcagaccctcacaggcaccaggccctgtcctggaacttggtgcatagaccgggtgcctggctccccctccccaaccagcacccaggtycaggcccccaccagggggagtagggggacagtggtcaccaggcaggggcaggggagcagggaatgagaacctgtcccagggaggctccacgcccccagca

SEQ ID NO: 297730 - DNA, 201 bp, Homo sapiens
tgttaggatgaggtgagagtggaaacaaagtaataagcccagagccagggctggtcgtggtggctcacgcctgtaatcccaacactatgggaggtcgaggygggcggttcacttgagttcagaagtttgagaccagcttcagcaacatggtgaaaccctgtctctacaaaaatacaaaaattagctgggtgtggtaaggca

SEQ ID NO: 297731 - DNA, 201 bp, Homo sapiens
tcccaaagtgttgggattacaggcatgagccaccaggagatgtagatttgagggccggttttggcacagctggactgtatcaactcgggcactcatcagastcagtttcctcatctgttatctgggtaatagagagctcctgtccaggacggttttgaggatggaaaggtgtccagtgtggctgaggaaaagagggctgtg

SEQ ID NO: 297732 - DNA, 201 bp, Homo sapiens
caactcctagcctcaagtgatccttccaccttagcctcccaaagtgcagggattataggcgggagccactgtgcctggcctaaatttgctttttaaagtcrtgttccttcaggtgtggggatcctcaccgggagagtgcagaccctcacaggcaccaggccctgtcctggaacttggtgcatagaccgggtgcctggctcc

SEQ ID NO: 297733 - DNA, 201 bp, Homo sapiens
tgctcctgggtgaaggagctacaggtgagtgcccgggagggtggctgtgctaaggcccgggacctggtgagccctggaccctcctgggctggcgggaaggkgctgaagcgcctctgactgaggggtgctgttgggagttggggtggtgctgagcgggaggattgtcctgcctgggacctgggctggggctagaggagctgg

SEQ ID NO: 297734 - DNA, 201 bp, Homo sapiens
gagcttctgccctcgtctcctcctcctggctgggcccagcatccgaggggaccctgggtgtgaatggctctgcatcctgggaggtgcccttcatcaaaccygtgctgtggccactgctctgagcgacccacatctgttcaccgtgttgcagctttgacaagaagggggatgtgcactacctgatcaagtggaaagacctgc

SEQ ID NO: 297735 - DNA, 201 bp, Homo sapiens
ggaagacctaaggtaggggaagtccagaatctcatgttctgctccctgctctgctgtcccttgccgagtgggcctcagtttccccctctgtcctatgcacrtggcagtctcacctacgctggctcagatattctgggtgccgataagttcaccattgagtgaaagggccacgtggtctcacagacccccactgcccatctc

SEQ ID NO: 297736 - DNA, 201 bp, Homo sapiens
ctcggcctttgctgtcaccaaggccaaaggaaggctggctgtgtggtgtaccttgcacctccagaatgccttcaggtgtgatgtggcaccacagatctggyaggtggaggaaggggtgggccattttacagatgggaaagcaggctctggaggcttggatgagtttccgaggacaggtagtagcaaagctgggacctgcta

SEQ ID NO: 297737 - DNA, 201 bp, Homo sapiens
gccacccagggccccttcctccggccagccccagcctctgtccgtggtgctgaagttcatggcggcctctcttgtccttacctttgctggggtgagggctyagggagagcgtgtctctcagatctcctgaagggcggtctcttgaagctggccaaactctgacaccctcaacgggacgtggacatcactgtctcatctcca

SEQ ID NO: 297738 - DNA, 201 bp, Homo sapiens
ttgccccaggtgtgtaccgccccggtgctctttgctgggggcggcagtcagcacctctcacccacctcctaccggcccttctctcccagcccctgccttgyggggcttctgcagccctgggctctcctgggagagcttcctgagtgtgctctgactgtgccccacggccccctggtccagagcctgtgcagcacccccact

SEQ ID NO: 297739 - DNA, 201 bp, Homo sapiens
ctccagatgagcagccacggctgtgtgcggccccgtcctgacagcccctcactttggtcttactgggttcaaggtcctccaagcactcctgagtcaaaggyctggcctggcctctctgacttagccggggatcctgcttgtctctcctggaggtgcttggctgcagtggagcctcccgaaggccaagcccccatctctcct

SEQ ID NO: 297740 - DNA, 201 bp, Homo sapiens
tggagacactccgtgctgtgagggtttcgggagggcctgttgcgggtggtgcaccatgggcctcttgtcccgtgaacaaggtgagatcactggaaggcttygagcagaggagggactgctatgacatgacatcctggcaggctcccctggcggccctggggtgggagagatggtggtggtggggggcgagggtccctgcct

SEQ ID NO: 297741 - DNA, 201 bp, Homo sapiens
cggcccagggctccgtggagcctttgtgggttcctgtgcacacctccttcttggctctttgtctcctgggactgtgatccgctctgctcccagccgtctcwtccccaatgcccctcttttctccagaaagaagtgcagatcaaattccacgtgctgctcacctcctatgagctcatcaccattgaccaggccatcctgggc

SEQ ID NO: 297742 - DNA, 201 bp, Homo sapiens
tatatctaggagtagaactgctggatcatatggtaattctctgtaccattttgagaaactgctgaattgttttccatgtgtattgcatcagttcacattcytaccagcatgtgtgagggttccagtttcttcacatacttgccaatacctgttattatctgtctttttgattatagtcaccctagtgggtgagaagtggta

SEQ ID NO: 297743 - DNA, 201 bp, Homo sapiens
agctcctgtccaggacggttttgaggatggaaaggtgtccagtgtggctgaggaaaagagggctgtgatgtgtggaggtgacacaggcttagacagaaatkgagacgatatccagggcaatgccagggctccctggttcaccagctagccggcctacatgggctaggcgctctgcaccctgcctcccctgccccggtcctc

SEQ ID NO: 297744 - DNA, 201 bp, Homo sapiens
cgatatccagggcaatgccagggctccctggttcaccagctagccggcctacatgggctaggcgctctgcaccctgcctcccctgccccggtcctctgctyctggctgttatcccagctttttgttgcagcaacctggagggcttcctggaggagtttgctgacatctccaaggaagaccagatcaagaagctgcatgacc

SEQ ID NO: 297745 - DNA, 201 bp, Homo sapiens
cagagtttgggtcgcttgagtgctggcagtgtcccccagtcacttgcagggggactccaggccggtggcttcacctcttgggggtcccttgggtctctctrtaaatgggtgcttggccaccagcttccagccccactgcagagcagagagagccctcatggaggcgggtctgacccagcctgcctttcctcgtgccctgct

SEQ ID NO: 297746 - DNA, 201 bp, Homo sapiens
gggcgcaaacttgctggcacccctcagggcccagtgccgttcccatgtgggtcatgtgactgtgtgtcaggggtcactcccccgtgccctggcataatgcrgctgaggagctcagaacacatttgccataaagagcaacatctccccacacctgcccttctggtctgcatgtccaggctggtaggacagcccctcctcccc

SEQ ID NO: 297747 - DNA, 201 bp, Homo sapiens
tttgccataaagagcaacatctccccacacctgcccttctggtctgcatgtccaggctggtaggacagcccctcctcccctgccctggccctctcccccgmagcctggcttctcattaaggtagggccctggggtgtggttgggaggagcccctctctccaataggccctgaggggccactggcacctggctttttggctt

SEQ ID NO: 297748 - DNA, 201 bp, Homo sapiens
atgctcctctcgtgggcccactgagccaggccccttgctcaaacccagagtctgggctatggctccttgtgcacaaacatcaactgaaagcagcgtccgcygcctgcagccccaggtcaccctgctgggctgcttcagcccgaagaatactggaaagcagggcaagtttgagaccaggggctgagccaaggagtgggctgg

SEQ ID NO: 297749 - DNA, 201 bp, Homo sapiens
gaagaatactggaaagcagggcaagtttgagaccaggggctgagccaaggagtgggctggagtggagatggacccacatccccccagtacctcggtaccarcacgagacgcaagtctgatcagaggccttgagataccaagtaatgggaaccacacagcttccagaaatgtgcacacagggcaagcgacagagacggggcc

SEQ ID NO: 297750 - DNA, 201 bp, Homo sapiens
ccgtgggacccacggtctaccccgcactgtggggcctggcctggctcgggtgtgggtctcatgttcagtgggcagacaggccatcaccccattgctcagcrcttgtctgttccctgcggcccctttggtgcagagtcagagaggagaggggagcccaccaatgccccacctcctgctgtgtctgcaggaggcccctgtctt

SEQ ID NO: 297751 - DNA, 201 bp, Homo sapiens; identical to SEQ ID NO: 61842

SEQ ID NO: 297752 - DNA, 201 bp, Homo sapiens
gacttcttaacaacaacaggtggcagagaccatggcaaaatctccggtgcactgagggaaaatgtgtgctgatagttttatatccagctaaactctctctygagaataaagggaattatacggggtcatgggagctcagaagggactgcctttcttttcttatggggaggagtgaaatcagggaagacatcacagaggtga

SEQ ID NO: 297753 - DNA, 201 bp, Homo sapiens
ctcacttgggcgtcctgggactgccaggtgggcggcgagtggggctgttacagcgcagtttcctctgtctggtcaccatgcctctcagctgcagcccctgytggggatgggaagggccattgttgggagtctgttcctgggaccccggggctggaccagggcagtctttgtcctcacactgcatttgcctgctccccaggt

SEQ ID NO: 297754 - DNA, 201 bp, Homo sapiens
ccccaggggaaggcctgccctcctcaaaaggccccgcccctgccggctcctgccccgcctcggtagccgatcccgcaaagcttcgcccgcgctgctcgagrccccgtccacaatagcttcctcgcgcccttctccgcgtctgactcccctagagacgggaggcatgagtgttagggaaaggcagacaggtgtggtgatcat

SEQ ID NO: 297755 - DNA, 201 bp, Homo sapiens
ttgaaggccctggactctgttaccagtggggggcctgtggccccggctcttcacagcaggcagaagcgtatgatcccagggagggtgggctgggggggggscagcacttgcctcggagccactgctgcgttgggtttgccttctgccagaggtgtggttaagggcagtgatagctgcgccccagcaaggagggtcatgggc

SEQ ID NO: 297756 - DNA, 201 bp, Homo sapiens
tatgattgaagtcctcctgcttttgggggctgccttcccagagtcccccgggtgctcccctgccgaggtcaggagctgaccaagccttggcccggtgacamctgcagccctcactcctgtcatcccaggacacttgaggcccaaggaggtggagtggagagtgggctcgggtacatgggagccagaagccagatggacttg

SEQ ID NO: 297757 - DNA, 201 bp, Homo sapiens
tgtcccagtaaggaaagaacaaggaacctatggtgggagctaccccagggcatttgcattagcagtgtggtgactggagagggaagtgcttcatctcatcrccatcctcccttcagtcaccccccacccacttaacacccatctttacctcaccttccttcccatccctccttctccctccttccctcagtcccttctttt

SEQ ID NO: 297758 - DNA, 201 bp, Homo sapiens
gttcttggcctgctgggtggatgtagtggggcacgagtaggactccccatctggacggttctcggcctgccgggtggatgtgcggggcatggaacctcccygtgggaagcagggggagggcatcctcatgtctcagccaggtggggcccctgtgtttcccacacggccctggtttctactgtctggggaggggcatcctgt

SEQ ID NO: 297759 - DNA, 201 bp, Homo sapiens
catgttcagtgggcagacaggccatcaccccattgctcagcacttgtctgttccctgcggcccctttggtgcagagtcagagaggagaggggagcccaccmatgccccacctcctgctgtgtctgcaggaggcccctgtcttgcccaatggctcctacgatggaagctccctggtcaagtcttcagggaagctcatgctgc

SEQ ID NO: 297760 - DNA, 201 bp, Homo sapiens
  misc_feature (1)...(201): n = A,T,C or G
ggctccgtggagcctttgtgggttcctgtgcacacctccttcttggctctttgtctcctgggactgtgatccgctctgctcccagccgtctcatccccaangcccctcttttctccagaaagaagtgcagatcaaattccacgtgctgctcacctcctatgagctcatcaccattgaccaggccatcctgggctccatcga

SEQ ID NO: 297761 - DNA, 201 bp, Homo sapiens
tctgctcccagccgtctcatccccaatgcccctcttttctccagaaagaagtgcagatcaaattccacgtgctgctcacctcctatgagctcatcaccatygaccaggccatcctgggctccatcgagtgggcctgcctggtggtagatgaggcccaccgcctcaagaacaaccagtccaaggtaggtggcgctggccgcc

SEQ ID NO: 297762 - DNA, 201 bp, Homo sapiens
tctagggctctgcttgtacttgctggcggcttgcactttgttttttgctcatctggggtttgaaaattgacctcctcgttccagtgccctcccactgcacyagggctcagagctcgctgggggctaagtgggcttgggcaggcctcctctggctcccctgagtgcagctgtggccacccgtctctgatggggtctccggct

SEQ ID NO: 297763 - DNA, 201 bp, Homo sapiens
ggaaatacttgctttgtgaatggatggatgaataagtaaatgattgactggataggggcagggagagaaaagctagctagggccggggtgatcagagaagrcttcctggagtaggcaggccatcccattaatccttgagccctgagggggcaaagggcaggtcaggtggaggcagcctgaggcttccgggagggcagagat

SEQ ID NO: 297764 - DNA, 201 bp, Homo sapiens
ccgggcccggcctgcctgctgctgccaacgtcaggcaagcccggctctcctctttttttgacagatatctagccgtcctcgagacttccctgtgttgcagygctcatttccagctgaggtgagggctgctgggtgctgtgttcctccccgccaccccattgctggcaaaccaggcctggccacagtcagccctgcccctgc

SEQ ID NO: 297765 - DNA, 201 bp, Homo sapiens
ggacactgtcatcatctacgactcggactggaacccgcacaatgacatccaggtctgtgctgctgccgcccaccaccctcccagggggcctctcatcccgrgcctcaggcaggttctgtccttcatgcccttcttgccatcaccccctcacctatcctggtgctgtgggcctccctcccccgtggagtctcggccccaaga

SEQ ID NO: 297766 - DNA, 201 bp, Homo sapiens
ccctcagaaggtggctgcgtgtctccagcacatggtcttgtggtcccattagtggttcgctcacagggaaatgcagcctcctacctccccgtggcccccaygaagctctgtgtggcttcagttacacccagcacactggccgtatcatccctcacacactcttgcacacctgcagtcctgcctgcttccaatggctagaag

SEQ ID NO: 297767 - DNA, 201 bp, Homo sapiens
tgggaggtggaggctgcaagtgagtggtgatcgtgccactgtactccacgctggggggtgggagtaagacactgtctcactggagctgttacaagccgagrccgtttcttctcctcctccacaccaccctctctcagggctgtgttctgagcctcagtggatgcccctctgcttggtggtcagcatctgcccctctggtcc

SEQ ID NO: 297768 - DNA, 201 bp, Homo sapiens
tggagggtgggcctctgttccgagggagcgtggcaggggactggggtggcccggctgagacacccatccagggcttgcttgggtccctgcccgctccaacwcacagcctctcttctgcaccccccacctgtatctcctggctaggacagcccagggtggtgtctctgggcactgcccgccaaccctgcagccctctgtggt

SEQ ID NO: 297769 - DNA, 201 bp, Homo sapiens
cccggggtctggtttcagtccctacccagctgcaccctcccgccccttcctcagggcctgcatctcggccctgcacctggaccgccaacgttccaggacgscccacaattttctttttttttttttcttgaaatggagtctcgctctgtcgccccggctggagtgcagtggcgcagtatcagctcactgcaaccaacgcct

SEQ ID NO: 297770 - DNA, 201 bp, Homo sapiens
gtatcagctcactgcaaccaacgcctcccaggtttaagtgattctcgtgcctcagctcccaagtagctgggattactggcatgcaccaccacgcctgtctratctttgtatttttagtagagatgggactttgccatgttggccaggctggttttgaactcctgacctcaggtgatctacctgcttcggcctcccaaagtt

SEQ ID NO: 297771 - DNA, 201 bp, Homo sapiens
cggggggatcagcaacaagaggaagaaaggctcctcggtgagtgtgtgcgtgtgtgcgcgtgtgtgtgcatttgcatgcatgtgtgtctgcacatgagcaygcaagggccaggcgagggccttcagttcattacaaactagctggggcaggtcgcacccctccactattctccttccatcctacatgcaggtgtgctgggc

SEQ ID NO: 297772 - DNA, 201 bp, Homo sapiens
tgatctacctgcttcggcctcccaaagttctggggttaaggaatgagccaccacgcctggtccaccccacacttttctcccttctctaccgggcaaacccyagctgtccccgaagagctccttgtgggtctctcctggaggcctttccgtttcctcctctgctccccaccctccgtgcagacctggtgagcccatgacctt

SEQ ID NO: 297773 - DNA, 201 bp, Homo sapiens
cctttccgtttcctcctctgctccccaccctccgtgcagacctggtgagcccatgaccttttcctttgaaaccaggagcctcctgagggcaggcaaggggragcttattcaactcagtacctcagtgcttgacaggaggcgaggaaatacttgctttgtgaatggatggatgaataagtaaatgattgactggataggggc

SEQ ID NO: 297774 - DNA, 201 bp, Homo sapiens
ctgatttgcaaacactgaccatccgcccctgcccaaaccagctggtgttatggcagcgaggaagatcccggtcacccagggctgtcctaggaggtcccctygccagggaggccctctctgtcctttcccgggcctggcccaggcctgactaggaggtgggcgatggttgaagatcagccaggagttcccctggggtcctgc

SEQ ID NO: 297775 - DNA, 201 bp, Homo sapiens
gtgacggctatgagacagaccaccaggattactgtgaggtgtgccagcagggtggggagatcatcctgtgcgacacctgcccgagggcctaccatctcgtrtgcctggacccagagctggagaaggctcccgagggcaagtggagctgcccccactgtgtaagccttggcagagccccgggctgggggcggggccacgcct

SEQ ID NO: 297776 - DNA, 201 bp, Homo sapiens
cggggcctgacgtggagcccagcctccctccacctaagcccctggagggcatccctgagagagagttctttgtcaagtgggcagggctgtcctactggcaytgctcctgggtgaaggagctacaggtgagtgcccgggagggtggctgtgctaaggcccgggacctggtgagccctggaccctcctgggctggcgggaagg

SEQ ID NO: 297777 - DNA, 201 bp, Homo sapiens
cggaggtagcagctaccccaagcctgtgacactttcagcccccctggctgccctgaggcccttagggctgagttgccaccactgccctccctctttccctyccaccttccctcccaccaccccaggttcaggagtttgagcatgtcaacgggaagtacagcaccccagacttgatccctgaggggcccgaggggaagaagt

SEQ ID NO: 297778 - DNA, 201 bp, Homo sapiens
cctccatctctccatcatcccttcattatccctccatccctccatcatccctccatccctccatcatccctccatccctccatcttcccccatccctccaycttccctccatccctccatcttcgctccattatccctacattatccctccatccctccgtccttccacccctccattcgtccgtccttccacccctccat

SEQ ID NO: 297779 - DNA, 201 bp, Homo sapiens
ggcctcaagtgatctgcccaccttggcctcccaaaatgctgggattacaggcgcgagccaccatgcctggccccaaattttcctcttcttacaagcatcccagtcattgagtttagggcccaccctagtccagcatgaccctttcttaacttcattacatctgcaaatactctatttccgaaaaaggttcccattcacagg

SEQ ID NO: 297780 - DNA, 201 bp, Homo sapiens
gctggtctcgaactcctgacctcaagtgatccacccaccttggcctcccaaagtgctgagattacaggcgtcagccaccacacccggcctttttctttttyttttttttttgagatggagtctcgctctgtggcctaggctgaagtgcagtggtgcgatctcagctcactgcaacctctgcctcctgggttcaagtgattc

SEQ ID NO: 297781 - DNA, 201 bp, Homo sapiens
tcagctgggcacagtggtgtgcacctgtagtcctagctacttgggaggctgaggcaggaggattgcctgagcccaggagttcgaggctgtagtgcgccatsattgtgtctgtgaatagctgttgtactcttgcctgggcaacataatgagactctgtctctttaaaaaaaaaaaaaaaatcagccgggcacggtggctcac

SEQ ID NO: 297782 - DNA, 201 bp, Homo sapiens
ggcgcttgtctgcttcctgtgcgtcggctggtgggggatcattgttttctgggtttagattgggtgcatcctcatcaggaattgtgattttttttttttttgagacggagtctcactctgtcacccaggctggagtgcagtggcgtgatctcggctcactgcaacctctgcctcccgggttcaagcgattctcctgcctca

SEQ ID NO: 297783 - DNA, 201 bp, Homo sapiens
ctttacatttgttgtaataactagatatgtggatggaattctgttatcttattttgtactttatatattacccttctcttttctccttttttctcttttcmtgccatctcttggattgatcaaattttctttatatctcctcttttccccctcaactcatttggaaggtttatagtcaatttcattctgtactcttaacat

SEQ ID NO: 297784 - DNA, 201 bp, Homo sapiens
tgcttgaacctgggaggcagaggttgcagtgagtggagatcgtgtcactgcactccagcctgggcaacagagagggactcaatctcagaaaaaaaaaaaawatatatatatataatacacacatatatacatatacacgtatatatatacgtatatatgtacgtacatacgtacgtatatacgcacatatgtacgtatgta

SEQ ID NO: 297785 - DNA, 201 bp, Homo sapiens
cactgcctgggccagcgaagccttctgggtgaagccctgggatcacaggaccctgtcttcccctgcagagtgaagaagatgagagggaggagtcggacttygacagcgccagcatccacagtgcctccgtgcgctccgaatgctctgcagccctgggcaagaagagcaagaggaggcgcaagaagaagaggagtatgactc

SEQ ID NO: 297786 - DNA, 201 bp, Homo sapiens
attgcttgaacctgggaggcagaggttgcagtgagtggagatcgtgtcactgcactccagcctgggcaacagagagggactcaatctcagaaaaaaaaaawatatatatatatataatacacacatatatacatatacacgtatatatatacgtatatatgtacgtacatacgtacgtatatacgcacatatgtacgtatg

SEQ ID NO: 297787 - DNA, 201 bp, Homo sapiens
gagggatctgtcctggtggggcctggccgcccagcacccaggtctgctctcggggggagtagttgggtgggggctggaccctagagaagtggtatgtgggyaggatcaggctggctggagccccagttacctcctcctgtcctcagggccagctctgggcccaggctcagacactaagtccaggtcttactcagccttggg

SEQ ID NO: 297788 - DNA, 201 bp, Homo sapiens
tcgatctcttgacctcgtgatccgcctgcctcggcctcccaaagtgctgggattacaggtgtgagccactgcgcccggccattttttttttttttttttttaatttttagtagagactgttggctgggctggtctcgacctcctgacctcaagtgatccacccaccttggcctcccacagtgttgggattgcaggcatgag

SEQ ID NO: 297789 - DNA, 201 bp, Homo sapiens
cctgaaaaagtgctgcaaccacccctacctcttccctgtggctgccgtggtaggtttccccggccatcatggcagcttctccatgaccgccatggtaggtscctgtggccgccatggtaggtccctgtggccgctgtgataggttctcctggccattgtggcgatttctgtggctgtcatggtaggtttccctggccatca

SEQ ID NO: 297790 - DNA, 201 bp, Homo sapiens
ttcagtggccctgctggctgtgggggatggctagtgcctcctttcagtggttggagacggtataggggatcctcccaaaagggccacatttctgtgggtcrtggacaaggggcagcaaggcggtcagggcagcctccagtcagagccgtcatctggtttttgcctcacttgctgtgtgattttaagcaaggggtttacctc

SEQ ID NO: 297791 - DNA, 201 bp, Homo sapiens
tcaactacaacgatgcctcccaggaggaccagggtgcgtgccgggagggagggactggtgcccctcacccagaggcggagggtggggcaggattctgtcarggcatccctgtgcagaacccccgggaggtgcgggccgggagagctgggcgagtgtgccaggagggatgggtgtcccatacccagaggcggagggtggggc

SEQ ID NO: 297792 - DNA, 201 bp, Homo sapiens
agctgggctcctagctccatgtccgtgtgtgtggtgtggccagaggacggcctggggagaggctgcctctgtggggtgtgcatccctgcctccaggccccmcttccttcttgggtcattactccccaggtagctaattgccctgtggccagctccataaaaacagcctcagccctgctggcccttgctggggttgactggc

SEQ ID NO: 297793 - DNA, 201 bp, Homo sapiens
gtacctcggtaccaacacgagacgcaagtctgatcagaggccttgagataccaagtaatgggaaccacacagcttccagaaatgtgcacacagggcaagcracagagacggggccctcctgcccaaaatgagcctatgaaccccaattccaaacccatacaaaagtgaatgctgagacatcccccaaaacaataaatagaa

SEQ ID NO: 297794 - DNA, 201 bp, Homo sapiens
aattgaaatagattttccgcggcgccatggagggtgcagctgggctcctagctccatgtccgtgtgtgtggtgtggccagaggacggcctggggagaggcygcctctgtggggtgtgcatccctgcctccaggccccccttccttcttgggtcattactccccaggtagctaattgccctgtggccagctccataaaaaca

SEQ ID NO: 297795 - DNA, 201 bp, Homo sapiens
ttcccagggaggctgttctgggacaggcctggaaggagatcgagatccaaattctgcctcagtggcagggcgtctgggtggggaggatgcaggcagcagasgccccctgtgacttgaaggccctggggagggagctttctgggtgcaggtttctggccttttggaggctggggatgttgatctccccagggctgtcagtca

SEQ ID NO: 297796 - DNA, 201 bp, Homo sapiens
ggcctgggcagccactaacctgcttcctgtttctggatttcgcaatgctggatggttcgtgtatatggcactgcacagtgcgtgggcctttctgtctggcktctgtcactcagcctgggggttccaggttcatccacattgcagcgtgcatcagtgcttcagtcattctgtcattctgccttatggctgataatgttttct

SEQ ID NO: 297797 - DNA, 201 bp, Homo sapiens
gagctgagccagatgcagaagtgagtgatgggctgaccccggagcagcctgtgctcgccctttcccctgggctggtctcctgggtcgattcccaggtgggyggagggctcttcagcctcactgaggtctcggctaatgctttgcatacactttcttcgtggggcctcttctcaggttttagtgaccagagtttgggtcgct

SEQ ID NO: 297798 - DNA, 201 bp, Homo sapiens
agcctgggaggtggaggctgcaagtgagtggtgatcgtgccactgtactccacgctggggggtgggagtaagacactgtctcactggagctgttacaagcsgaggccgtttcttctcctcctccacaccaccctctctcagggctgtgttctgagcctcagtggatgcccctctgcttggtggtcagcatctgcccctctg

SEQ ID NO: 297799 - DNA, 201 bp, Homo sapiens
aggtgtggggatcctcaccgggagagtgcagaccctcacaggcaccaggccctgtcctggaacttggtgcatagaccgggtgcctggctccccctccccaaccagcacccaggtccaggcccccaccagggggagtagggggacagtggtcaccaggcaggggcaggggagcagggaatgagaacctgtcccagggaggct

SEQ ID NO: 297800 - DNA, 201 bp, Homo sapiens
gttcgaggctgtagtgcgccatgattgtgtctgtgaatagctgttgtactcttgcctgggcaacataatgagactctgtctctttaaaaaaaaaaaaaaaatcagccgggcacggtggctcacccctgtgatcccagcactttgggaggccgaggcgggtgggtcacctgaagtcaggagtttgagaccagcctggccaac

SEQ ID NO: 297801 - DNA, 201 bp, Homo sapiens
tccaccttccctcccaccaccccaggttcaggagtttgagcatgtcaacgggaagtacagcaccccagacttgatccctgaggggcccgaggggaagaagycgggcgaggtgatctcctcggaccccaacacaccagtgcccgccagccctgcccacctcctgccagccccgctgggcctgccaggtctgtgggctgggcg

SEQ ID NO: 297802 - DNA, 201 bp, Homo sapiens
gattgatcatagctcactgcagccttgacctcccgggagctgggactacaggtacacaccaccacactcagctaagttctaaattttttgtagagatggaktctccgtatgttgctcaggctggtcttgtacttctgggctcaagtgatcctcctgcctcagcctcccaaagcatggggattataggcattgagccaccat

SEQ ID NO: 297803 - DNA, 201 bp, Homo sapiens
gccccgctgggcctgccaggtctgtgggctgggcgggccggggagggcactggggtcatggaaagtggcaaggtcacagaaacccctagtctaacccacartcccacagaagacggcctctccttcccccaaagcctctgtttgctgaaatgtcactctacagagagttttccattttaatgacagttacgagatataatt

SEQ ID NO: 297804 - DNA, 201 bp, Homo sapiens
gggcgggaaccaagtatcgctgctcaacatcatgatggacctgaaaaagtgctgcaaccacccctacctcttccctgtggctgccgtggtaggtttccccrgccatcatggcagcttctccatgaccgccatggtaggtgcctgtggccgccatggtaggtccctgtggccgctgtgataggttctcctggccattgtggc

SEQ ID NO: 297805 - DNA, 201 bp, Homo sapiens
aggcgatctgcctgccttggcctcccaaagtgttgggattccaggtgtgagccaccacgctcagcctattattattattattattattattattattattattttgagacagggtctcgctctgtcacccaggctagagtgcagtgattgatcatagctcactgcagccttgacctcccgggagctgggactacaggtaca

SEQ ID NO: 297806 - DNA, 201 bp, Homo sapiens
ccatcatcaactgggaacgcgagtttgagatgtgggcgcccgacttctacgtggtcacctacacgggggacaaggagagccgctcggtgattcgggagaaygagttttcctttgaggacaacgccattcggagtgggaagaaggtattccgtatgaaggtgagggctcgctatccttggaaggacggtaggaaggcccccg

SEQ ID NO: 297807 - DNA, 201 bp, Homo sapiens
tgtaatcccggctgctcgggaggctgaggcaggagaatcgcttgaacctgggaagcggaggttgcagtgagccaagatcacaccactgcactccagcctgrggggacaaagcaagactccatctcaaaaaaaaaaaagtactattcagtgatttctagtatattcgtagggtgtacaaccatcgccactgcctaaggccgg

SEQ ID NO: 297808 - DNA, 201 bp, Homo sapiens
ccaggctggtctcgaactcctaagttcaggcgatctgcctgccttggcctcccaaagtgttgggattccaggtgtgagccaccacgctcagcctattattwttattattattattattattattattattttgagacagggtctcgctctgtcacccaggctagagtgcagtgattgatcatagctcactgcagccttgac

SEQ ID NO: 297809 - DNA, 201 bp, Homo sapiens
caccactgcactccagcctggggggacaaagcaagactccatctcaaaaaaaaaaaagtactattcagtgatttctagtatattcgtagggtgtacaaccrtcgccactgcctaaggccggaatattttcattccccctgaaaaagaaaccctgtacccattagcagccactccttatccccccaccccaggcctgggcag

SEQ ID NO: 297810 - DNA, 201 bp, Homo sapiens
ggagcgtggcaggggactggggtggcccggctgagacacccatccagggcttgcttgggtccctgcccgctccaacacacagcctctcttctgcacccccsacctgtatctcctggctaggacagcccagggtggtgtctctgggcactgcccgccaaccctgcagccctctgtggtcctgcaccagtgctttccttctct

SEQ ID NO: 297811 - DNA, 201 bp, Homo sapiens
cccaggctggtctcgaactcctaagttcaggcgatctgcctgccttggcctcccaaagtgttgggattccaggtgtgagccaccacgctcagcctattattattattattattattattattattattattttgagacagggtctcgctctgtcacccaggctagagtgcagtgattgatcatagctcactgcagccttga

SEQ ID NO: 297812 - DNA, 201 bp, Homo sapiens
gaagctgcacctccaagcacaagggagcccttggaggtggacacatcttggtttgcttcttggctttggcctgaactctgtctaaccttgggcaagtcacmtaacctctgtgggcctccgctttcccggctgtgcccacctcccggggcttctcagagctgtgtaagtgaccagcactttgcagtgtgttggcggctggct

SEQ ID NO: 297813 - DNA, 201 bp, Homo sapiens
caggcctcagcagtagttggatcctctcagggctgtgcccccaggatgtccctccaccccaggcctcagcagtagttggatcctctctgggctgtgccccyagctggcccattgtcccatgcccctgccccagcagagtgcactttcctttcactggaaactggcagtggcctgtccttcacaagggctgacgtagctata

SEQ ID NO: 297814 - DNA, 201 bp, Homo sapiens
gcccaggctggtctcgaactcctaagttcaggcgatctgcctgccttggcctcccaaagtgttgggattccaggtgtgagccaccacgctcagcctattattattattattattattattattattattattttgagacagggtctcgctctgtcacccaggctagagtgcagtgattgatcatagctcactgcagccttg

SEQ ID NO: 297815 - DNA, 201 bp, Homo sapiens
gcccgaaagctgggaccagagcgggtgtcgtggctcccaatctgggcctccatctgcctcacttccctgcctccagatgagcagccacggctgtgtgcggycccgtcctgacagcccctcactttggtcttactgggttcaaggtcctccaagcactcctgagtcaaaggcctggcctggcctctctgacttagccgggga

SEQ ID NO: 297816 - DNA, 201 bp, Homo sapiens
ggagaatcccttgagcccaggaaattgaggctgcagtgagccatgattgtgccactgcactccagcctgggcaacaaagactctgtctcaaaaaaaaaaaagtaaatgtctggatccagtggaggagcctgttactgggggcgttgcgaatgccccagatggatgttcgttttgttgttcatccaaaaaatggtgagtaag

SEQ ID NO: 297817 - DNA, 201 bp, Homo sapiens
aggagaaaaaagccaagcgaaaaaagaaggatgaggatgaggatgataatgatgatggatgcttaaaggtaactgtggaggcctggctggggggacagagmgacatccccctttaagggggctgagcctcttgcctgtatgttctgtgtgtgtgtgtgtgtgtgtgtgtgtgtgatggagtctcactctgttgccaggctg

SEQ ID NO: 297818 - DNA, 201 bp, Homo sapiens
ccgtggtaacgggatcggtttttctcttaatgttcccaggcccgcagcagccgctgctcaccgggtctgtgtgcctcctcggcactgctgtgtggggtagycaagccccagcccggccctccagcactcctctggcctggttgccttagcctgggtgggtgggaggccctaaagaccctcccagtggccagaatcaagctg

SEQ ID NO: 297819 - DNA, 201 bp, Homo sapiens
actgcgcccggccattttttttttttttttttttaatttttagtagagactgttggctgggctggtctcgacctcctgacctcaagtgatccacccacctyggcctcccacagtgttgggattgcaggcatgagccaccttgcccgttggtctttaacttttcttaccatacagagattgggggtgattgggctacttttt

SEQ ID NO: 297820 - DNA, 201 bp, Homo sapiens
tgtggcctctgtttttgaggggcttaggatcggtggcctctgacactcagtgcttctggcttcaggcagctgttgggtagagcagaggttaaaagcctgarccagatgttcagatttcaatcccggttcccatctgctgagctttgaggcccttttagggaacaggctgctgcacgggtgacaggagcttgccagaggctg

SEQ ID NO: 297821 - DNA, 201 bp, Homo sapiens
agtcccagctactcaggagactgaggcaggagaattgcttgaacctgggaggcagaggttgcagtgagtggagatcgtgtcactgcactccagcctgggcracagagagggactcaatctcagaaaaaaaaaaaatatatatatatataatacacacatatatacatatacacgtatatatatacgtatatatgtacgtac

SEQ ID NO: 297822 - DNA, 201 bp, Homo sapiens
gggggctgagatgaatcacagagagcactgtgtctccagagcctcttccgtgctttgtcccaccccacactgcctgggccagcgaagccttctgggtgaakccctgggatcacaggaccctgtcttcccctgcagagtgaagaagatgagagggaggagtcggacttcgacagcgccagcatccacagtgcctccgtgcgc

SEQ ID NO: 297823 - DNA, 201 bp, Homo sapiens
ctgtgttgggggctgagatgaatcacagagagcactgtgtctccagagcctcttccgtgctttgtcccaccccacactgcctgggccagcgaagccttctkggtgaagccctgggatcacaggaccctgtcttcccctgcagagtgaagaagatgagagggaggagtcggacttcgacagcgccagcatccacagtgcctc

SEQ ID NO: 297824 - DNA, 201 bp, Homo sapiens
gttggctgtcactgaactctgtgtagaatttctccagatccagagcctggggatcaactttgccagcaaatgccgttttctgatggggaataggtagtgtsaacttgaattccatcacaaccatgacaccagctgcgcccaaagcacactgtagaccagtttcctttgttttgactcacacctcacttgcctgatcgaaaa

SEQ ID NO: 297825 - DNA, 201 bp, Homo sapiens
ctgatggggtctccggctttgtccttctctgccagggatctgttgctgcagttccttctctctgttctctcccccatcctttctgcccacccaaggtgtamccccccaaacactcccatctgctggcctctctttttcagcccccggggcccagcagttctgcttcctcctctcaacccgggcaggtggtctgggcatcaa

SEQ ID NO: 297826 - DNA, 201 bp, Homo sapiens
tcccatctgctggcctctctttttcagcccccggggcccagcagttctgcttcctcctctcaacccgggcaggtggtctgggcatcaacctggccacggcrgacactgtcatcatctacgactcggactggaacccgcacaatgacatccaggtctgtgctgctgccgcccaccaccctcccagggggcctctcatcccgg

SEQ ID NO: 297827 - DNA, 201 bp, Homo sapiens
  misc_feature (1)...(201): n = A,T,C or G
ccggtcacacccatccctgatgtccagtcctccaaaggggggaacttggccgccagtgcaaagaagaagcacggtagcaccccgccaggtaggggccaacncagcccagcctcagctcctcctccgaccaggtggctgctcctgcagaggaggggttccctgacctgccctcacttgggcgtcctgggactgccaggtggg

SEQ ID NO: 297828 - DNA, 201 bp, Homo sapiens
acagaacatgaacgagtacctgagctccttcaaggtggcgcagtacgtggtgcgcgaggaggacggcgtggtaaggtccccggcccgccctccatccgcarccccgccctccatccgcagccccgccccccactgtgtccacgccttccactgtgaccccgccctcccgccgcagccagccctccaagctgtgaccccgcc

SEQ ID NO: 297829 - DNA, 201 bp, Homo sapiens
cttgttgtcccctccccaaaataaccattctgacttgcatgccacttgctgttgctgctcctgcttccttgtagtcaacaacttgtccccctattaaaacytttaggagaagtgcttctacagaagggatgggctgatgcattccctgggcaacactgcgtgaggggctggtggccgtggctcaccctctgggactcatcc

SEQ ID NO: 297830 - DNA, 201 bp, Homo sapiens
actcttgccaagaaggaacaaatccatgtaccagcaggagctgctagagggagcccagccttgtacacagtggaggccccaggtgctaagaaggcctcacraggccgctgttggtgcgcagaggctctcttaaaagtttgtgtgcaggtgctctcagagacatggccctgctgagagattgtgtttccaagtgtcagttgg

SEQ ID NO: 297831 - DNA, 201 bp, Homo sapiens
ataaagatctctccatcctccgtatttatgagagtgcaaggggttaaccctgtcatttctgaccttcttcgccagtttgcaccagggagtcagtgatcttsgttgggtcctaacaataatcaataaatgactattgattgagctctctatgcgcacatctcatttaatcctcataatgttagtggaaggtagatattctcc

SEQ ID NO: 297832 - DNA, 201 bp, Homo sapiens
accctgtcatttctgaccttcttcgccagtttgcaccagggagtcagtgatcttcgttgggtcctaacaataatcaataaatgactattgattgagctctytatgcgcacatctcatttaatcctcataatgttagtggaaggtagatattctccccatttagcagatgaagaaacagtactttgaaaaggttaagcaact

SEQ ID NO: 297833 - DNA, 201 bp, Homo sapiens; identical to SEQ ID NO: 61886

SEQ ID NO: 297834 - DNA, 201 bp, Homo sapiens
aaaggtttggttgactcccttggagggccctgtgtggaagcggaggagggcgggatggccatacctgcagcactgcatcaccagcgtctggcgttgccagmggttttgtcttatttctgctggctgtgcagagtgactgccagaattgtctcttgcaggctggaggagattgatggattctttgcgagaaataacgaagag

SEQ ID NO: 297835 - DNA, 201 bp, Homo sapiens
gttgaccaggtggtacatagacttcctttctcatttttgtctttgatgtgggtatgcccacctggcagttttcctatctctgttccgggcctctcctgacytgccgcctccagctccttagcttctgggccacatccttctctctcttcccccgctcagacccttatattttaaacccatgcacccagaggcctttggtgc

SEQ ID NO: 297836 - DNA, 201 bp, Homo sapiens
ctggaaaccctggactctgctgctcagtactgctgagtcagatgtggctctgggcgcttcgggtttggccgctggctcagcctcccttggccctggggccyggatctgagcccaccctcctcagtgtgggtctgcaggaagctggggctgccctcgggtgatttgtgcctctccttgggaacttcctgccagcctgatccc

SEQ ID NO: 297837 - DNA, 201 bp, Homo sapiens
aattcataggacttgtcagctaactggatgacgggtttttgaagagggggatggtgtgggtggcagggagggggactggttgctgggtgaggtaaacacargtggcaaagcaggttgagagaggggtgattcagtcttggggatggtgggggaggggctgtatccagacacctgagtggaggccaccaggaagaaccagga

SEQ ID NO: 297838 - DNA, 201 bp, Homo sapiens
ggcagggagggggactggttgctgggtgaggtaaacacaagtggcaaagcaggttgagagaggggtgattcagtcttggggatggtgggggaggggctgtrtccagacacctgagtggaggccaccaggaagaaccaggagtctaggacaggtgaggtctgagatgcagagggttcagatggcaaatcatttggacaaagt

SEQ ID NO: 297839 - DNA, 201 bp, Homo sapiens
gaaggtcaccaaggagcttccctagaacggcttcaactgagggttgtggggatggccagagagcagtctgaggagcaagggcagacgctgttccaggaacrttggcagcatggggacacgggaaggaaatgcggttactcgagaaggaaggagggcctctcttcatccccatcctccttcccttcccatcctttccttttt

SEQ ID NO: 297840 - DNA, 201 bp, Homo sapiens
gagggcctctcttcatccccatcctccttcccttcccatcctttccttttttaagggttagactagaaggattcgaatctatctgtaggcctagttgggcrgctgtagtagaaaagaggaatgatgagagatggctaggaagaagttcctgaagagcgtgaggcgtgggagccagaactcggaggagacattggcctggga

SEQ ID NO: 297841 - DNA, 201 bp, Homo sapiens
ccatcctccttcccttcccatcctttccttttttaagggttagactagaaggattcgaatctatctgtaggcctagttgggcagctgtagtagaaaagagkaatgatgagagatggctaggaagaagttcctgaagagcgtgaggcgtgggagccagaactcggaggagacattggcctgggaggtgggtgcgaagcttct

SEQ ID NO: 297842 - DNA, 201 bp, Homo sapiens; identical to SEQ ID NO: 61869

SEQ ID NO: 297843 - DNA, 201 bp, Homo sapiens
gcagagataaataaaatgtcgtcctgcttcctggtcagaggtgggtgcatgggtgagtggtggattcaggttgaagttcattgcagctggagtggcgggartggagggcaatgtgaggtgagtttgggtttggagcctggaaggccttgaatgcagtgagtttggacattattcattgacagtggggagtcatggaagaga

SEQ ID NO: 297844 - DNA, 201 bp, Homo sapiens
tgtgttgcctagggtggtcttgaactccagggttcaagtgatcctccctcctaggtctcccaaagtgctgggattacaggtgcgagccactgcacctgacytggtttattatttgtcggcaaaccaaaccccaaatagatgtatcttcaattttgttcatgaaaaagtgtcagtccataaatgccgtaacttacattatca

SEQ ID NO: 297845 - DNA, 201 bp, Homo sapiens
agcactttagatgtatggtcatggaatcctcacaagtcttcaaggtagatggtgtcatcctcatttcaaagatgagaacacaaaggttcggagcagttgaygcgttgcccaaggtcacacagcaagagcaaagcagaaccagtccttgaacgaggtctgccagagcccggggcctgttctcagctgccagcttgggataag

SEQ ID NO: 297846 - DNA, 201 bp, Homo sapiens
agcagccagggcaagacaaccgattggagttctgtagggcctgacacctgagctttctgactctgcctgggagaggctgggcacagcagggatgaaggagkcggcctaggcccaggaggtcagaggctcctcagcgccaccccatgtcacgcagcgcacgcagcctggatgcctcaggtgagtcaccatctcctgaactgc

SEQ ID NO: 297847 - DNA, 201 bp, Homo sapiens
tgcgggacgcagcaggatttcacatgctctatccccgggaaggccactgagagtcagaatggcatgaggaggaaaaaggagatcaaatattttgagggaamttggggggaggtggagagaaggtggtcatgcctggggcatgggggtggcccctggctctctgtatggcagagcatcaggtgcagtggccggtgctctgta

SEQ ID NO: 297848 - DNA, 201 bp, Homo sapiens
ggcagccaagtttcaagcagaactgtgagccagaactcagcttaattaccccagcagcatccatccgggaagtaaggccgtggctccaccaggaacatccmgctctaactccatgtgacctttctgttcctcgagcccagtgcaacccccactggattcagggtttccacacctaatagaagtcccttcctaaactgttac

SEQ ID NO: 297849 - DNA, 201 bp, Homo sapiens; identical to SEQ ID NO: 61848

SEQ ID NO: 297850 - DNA, 201 bp, Homo sapiens
ctccctcctgtgagcagctggtaggagtggccactgggtggcgtgtgggcaccagggtttccttgctcccagttgtccagagctccttaattcatccatcyttctggcactgtcgccttagaaggcggaagtttctaagtcaggatgatggcaaaggtcagtgagaaatgctgacttcaagctgtaaatttgtgtgtgagt

SEQ ID NO: 297851 - DNA, 201 bp, Homo sapiens
atccttttccttctccatatgtgcactcacactcatgtgtccctcagggtgccgttcttgccaagaaggtgaactggattggctgccaggggagtgagccrcatttccggggctttccctgctccctgtgggtcctcttccacttcttgactgtgcaggcagctcggcaaaatgtagaccactcacaggaagcaggtacgt

SEQ ID NO: 297852 - DNA, 201 bp, Homo sapiens
tcacctgctagagggcccaggaggtgcgatgccaccaaggacagggaggcactcgctttccgggcaggcccagaaagtgccagtgatggtggggagagaargcattgtctcctctctccgagttggtggaggggaaaattgtttgtgacgatgctgcctcccgagccatctgctcaccgagaaacccaggatggtggagtg

SEQ ID NO: 297853 - DNA, 201 bp, Homo sapiens
aatgataggtttgttcattgatccctttatccactcatcatttagaagcaagattgagcaacttctttgtgacagtgccttcaacagctttttaaacagamgagtgtcaggacctgacatgtgtctgtaggagagaccggggtaggagatgggggtggacagtgggcacaggagagcagtcgaaagtgaagctaggaccag

SEQ ID NO: 297854 - DNA, 201 bp, Homo sapiens
acctcggaggactcttgccaagaaggaacaaatccatgtaccagcaggagctgctagagggagcccagccttgtacacagtggaggccccaggtgctaagraggcctcacaaggccgctgttggtgcgcagaggctctcttaaaagtttgtgtgcaggtgctctcagagacatggccctgctgagagattgtgtttccaag

SEQ ID NO: 297855 - DNA, 201 bp, Homo sapiens
gccagagcccagctggaaggaaacaaaggcgtgggagagggaggggctggttggctgcaggttctggctggagcttggcaacctagaggctggaacttccrggtcaaggggcttctccgtgggcctcaggagtgcccttcagtgggaatagaatgggactttttatggccgaaggcctggccggagcaaggggtacacagc

SEQ ID NO: 297856 - DNA, 201 bp, Homo sapiens
agaggaatggatctgttagcaggttttcctgttcagttaccattcgtgtctccagtatccttctcctctcaaatgtttgtctttgctttctttgctgtgaktttctcagggtcctcatcccctcggccagcctctttgtggttttatctgatcagcctgctgctgtgtccctctttctcctgccctccgccccttgtgctg

SEQ ID NO: 297857 - DNA, 201 bp, Homo sapiens
tccttacacacacacgtacatcctcatggcacattttcagccctggggtatctcaaaagcaacagctcaagcaatcctgccaaggtctctcaaagtgatcyttttttttttttttttttggaagacagaatctcgctctgttgcccaggctgggagtgcagcggcacgatcttggctcactgcaacctccacctcctgggt

SEQ ID NO: 297858 - DNA, 201 bp, Homo sapiens
gtacctgtgattcccagcacagagcctggtgcagagtaggagcccactgcacgttcatggtggccagtggcctgagcctcacaggattccaaatgacagcrtgagtgtagaaccttctgctggtgccgtggatcctcttgactcagaccgggggtgtcagccaggtgtgaggggtagagaaggcattttgtccatccagtg

SEQ ID NO: 297859 - DNA, 201 bp, Homo sapiens
gtcagtgagaaatgctgacttcaagctgtaaatttgtgtgtgagttccagaggcccgtgtgggctcaccaggagggcacgtgtcaaagcgtggtcttttcyggccatttctcactctgggggaaggtgtccagcccaacgtttgataggaatatttaatggctttctcagaggaatggatctgttagcaggttttcctgtt

SEQ ID NO: 297860 - DNA, 201 bp, Homo sapiens
cggagcacctatcatttcaggcaccttactaagtactcggcatacattgtctcatagtttcctttccacaatttaaagattcctgtggtgtcacacatccrcctaatccaggtagtgggtatttggcgggcaggagtggtatagtgatagtgatttgttcctgacttgctgcctctgaatggagttacttcctgactctgg

SEQ ID NO: 297861 - DNA, 201 bp, Homo sapiens
gtggccactgggtggcgtgtgggcaccagggtttccttgctcccagttgtccagagctccttaattcatccatccttctggcactgtcgccttagaaggcrgaagtttctaagtcaggatgatggcaaaggtcagtgagaaatgctgacttcaagctgtaaatttgtgtgtgagttccagaggcccgtgtgggctcaccag

SEQ ID NO: 297862 - DNA, 201 bp, Homo sapiens
ttggaccagattgctgacacacgtagctgctaatccccaaaattaatgaaggtgatcaaatagcatgcccaagatcacacagctagtaagttggtagaagrgggctttgaaccaggtccgtctggctccaaagccaatgttgtttccacagtgtcccactccatgggactggagtgaaatatttgggagggagggaacatt

SEQ ID NO: 297863 - DNA, 201 bp, Homo sapiens
ccgctggctcagcctcccttggccctggggcccggatctgagcccaccctcctcagtgtgggtctgcaggaagctggggctgccctcgggtgatttgtgcytctccttgggaacttcctgccagcctgatccctccttcccacctccctgtcctggccccctggcttggtcacatgaatgcgtggtgacactgagagggcc

SEQ ID NO: 297864 - DNA, 201 bp, Homo sapiens
atctctgttccgggcctctcctgacctgccgcctccagctccttagcttctgggccacatccttctctctcttcccccgctcagacccttatattttaaayccatgcacccagaggcctttggtgcgtgtttggctcttgctccatgttcccaatccctggttggggcaccaaaactatatttcctgaattccaagacacc

SEQ ID NO: 297865 - DNA, 201 bp, Homo sapiens
ccacctgtcaggttcatgccattctcctgcctcagcctcctgagtagctgggactacaggcgcccgccaccacaccaggctaatttttttatatttttagkagagacggggtttcaccatgttggtaaggatggtcttgatctcctgaccttgtgatctgaccaccttggcctcccaaaatgctggaattacaggtgtgag

SEQ ID NO: 297866 - DNA, 201 bp, Homo sapiens
gtaaggctggtcagtgtcaagccaaccaggggagggtggcaacgtgaaagcaacaaaggagagcaaccacaaaatgtggcacgaaagttgacaaatgctcrccatgggaagacaaagcaggcagtaataacatctgtaccagagagaggccaggagggcggggagagatcactggagtggctgaagagaaggtcaccaagg

SEQ ID NO: 297867 - DNA, 201 bp, Homo sapiens
cctgcctcagcctcctgagtagctgggactacaggcgcccgccaccacaccaggctaatttttttatatttttagtagagacggggtttcaccatgttggkaaggatggtcttgatctcctgaccttgtgatctgaccaccttggcctcccaaaatgctggaattacaggtgtgagccaccacgcccggcctgggagcttt

SEQ ID NO: 297868 - DNA, 201 bp, Homo sapiens
catccattttgcctccctgccacctttctccactccctcgactggttgaccaggtggtacatagacttcctttctcatttttgtctttgatgtgggtatgyccacctggcagttttcctatctctgttccgggcctctcctgacctgccgcctccagctccttagcttctgggccacatccttctctctcttcccccgctc

SEQ ID NO: 297869 - DNA, 201 bp, Homo sapiens
tagctgctgtgggtcagtgctggggagaaaagggaacggacatccattttgcctccctgccacctttctccactccctcgactggttgaccaggtggtacrtagacttcctttctcatttttgtctttgatgtgggtatgcccacctggcagttttcctatctctgttccgggcctctcctgacctgccgcctccagctcc

SEQ ID NO: 297870 - DNA, 201 bp, Homo sapiens
tgaccttgtgatctgaccaccttggcctcccaaaatgctggaattacaggtgtgagccaccacgcccggcctgggagctttatttttaagtaaacacttaygtacctactatgtgctagtcactgttatggcattttaataacattaaccccttcagttctcagaacagcccccctgaagttggtggtattattattattg

SEQ ID NO: 297871 - DNA, 201 bp, Homo sapiens
aaccctgttccgcagctcagagacctcaaaggcctcagccccccgcacccagtgtcgcctgcaccctcattacgtccccaccacagccctggccctcttcyccaccctcttctgttcgcaggcagactcattggcaggctacaggcctggcaagcactcgtatatgcctgaccctccctccctttggttttctaattgcag

SEQ ID NO: 297872 - DNA, 201 bp, Homo sapiens
ctgctcacaaatggggaatctgcgtgcaaggacactctgaggcctccagaccaacttcccacccaagcaattatttgtgcagtcaatatttttgagtactyactatgtgctaggcactgtggcagcagatatgtacaggcagatgcattctctgcttgtgcagaccctacagcatacagcatcccttctaggaaggcaccc

SEQ ID NO: 297873 - DNA, 201 bp, Homo sapiens
agcaaaggtagtacagaagtcatatttgtgtcttagttagaatgttttcctggtggttttggaactttgcacaacctcctccccactgccccccgcccccygccccccgccttcttctgcatagcttcctaccatctgcaggacggggaacttggggaattgcttttcactctccagcttccgcttgttcctccccacagt

SEQ ID NO: 297874 - DNA, 201 bp, Homo sapiens
atgcctcagacaccccaccaccctagtccagtactctccaaaggagtcaccccaggaagatcggcttgtgtgtcactcgcatctctcagctgtgctcaaayctgctattttctttgtccccagtggggctgtttgcagccggtatgggggaaaagaatgagatacagaaaagtccctgagctgggcagaggcatcaccccc

SEQ ID NO: 297875 - DNA, 201 bp, Homo sapiens
gcccaggaggtgcgatgccaccaaggacagggaggcactcgctttccgggcaggcccagaaagtgccagtgatggtggggagagaaggcattgtctcctcyctccgagttggtggaggggaaaattgtttgtgacgatgctgcctcccgagccatctgctcaccgagaaacccaggatggtggagtggaatgaagccgtgc

SEQ ID NO: 297876 - DNA, 201 bp, Homo sapiens
agatgctggagaaggtcattgactccagctctttttggctttctggagcctgggcaggtagagaggtgggtggaggaggaaggatactccaggtggaaaamcagcatgtgccgagctatggaggtgaggttcgtaaggcgtgtgtttgagtgacagtgagcagtgttggttttgccccccttctcttccacggcacaggcc

SEQ ID NO: 297877 - DNA, 201 bp, Homo sapiens
attcttctagcacagggaaggactgacgcctcgtctgtctctgtcagagctggctgtgccctcggccctttgtttctgggagtgaaggtggccagtgtgcygtggaagcagctctgctctcctgacactccgctcacgcctgttttcatttacagtggctggtgctgacgtgcagacgctgcgggagaggctcattgacgc

SEQ ID NO: 297878 - DNA, 201 bp, Homo sapiens
ttaagggtggaaagtgccaaatggagagacttttagtagatcaagggagaaggaaagagagagtgaggggtggtgtaatcattatgatcattccgtcattrtgaatgatcatcataatcattcgatcattacagttatgcaaaccattgacgttcttgtaatagcttgggctggtgtatgtgccaggctctgtgctgggca

SEQ ID NO: 297879 - DNA, 201 bp, Homo sapiens
catcataatcattcgatcattacagttatgcaaaccattgacgttcttgtaatagcttgggctggtgtatgtgccaggctctgtgctgggcaccttccctrtgttacctcattcagtcatggggccacttctggaggcagggcacaggaatggagaggtaaactgaggcccaaggacagcaaagtggaacacagaggagac

SEQ ID NO: 297880 - DNA, 201 bp, Homo sapiens
gggcccacctaagatgtgaggtccggcagctgtgagcacatcagccctgaaagaaatacaggccctgcttcccctcctgcccccagtcgccatttcccagmcttggtgggcagctaaaccctggtctttcagagagggcccagtttttccagagccatgtcgtgtgtatgaacctgctggtctgattatgtctagtggtct

SEQ ID NO: 297881 - DNA, 201 bp, Homo sapiens
gccctgcttcccctcctgcccccagtcgccatttcccagacttggtgggcagctaaaccctggtctttcagagagggcccagtttttccagagccatgtcrtgtgtatgaacctgctggtctgattatgtctagtggtcttggctcggagctggcctgattagtgagttgcaggaggggtggctgtgggcctggagagaga

SEQ ID NO: 297882 - DNA, 201 bp, Homo sapiens
cgcctggtggccctgaaaaagtttgtggcagtgctggccaaggtgagcagggccatggcttcccttgtctgtgcaattctacggatggtcagtgtgcgttsctgtaagctgggcaccccgtcagcccctccctccagaagcccatggtctggctggacacctggacccacagctctccctgtccaccataggtgataccct

SEQ ID NO: 297883 - DNA, 201 bp, Homo sapiens
gcctctccttgggaacttcctgccagcctgatccctccttcccacctccctgtcctggccccctggcttggtcacatgaatgcgtggtgacactgagaggrcctgacagggacatttcagcctaaggcaggacagtcgttggcccctcactgaagtcccatgcaaaatgagcccttgttcttcagtccattgccataatag

SEQ ID NO: 297884 - DNA, 201 bp, Homo sapiens
ctatcatttcaggcaccttactaagtactcggcatacattgtctcatagtttcctttccacaatttaaagattcctgtggtgtcacacatccacctaatcyaggtagtgggtatttggcgggcaggagtggtatagtgatagtgatttgttcctgacttgctgcctctgaatggagttacttcctgactctggtgctaggt

SEQ ID NO: 297885 - DNA, 201 bp, Homo sapiens
tttgggtaaatctgtgcctctgtcttcatggaagtccagacccacttaacactcggaggctgcatgtttcttgttaagagttgtttgccatccagcacctsaacggttgtcagagctagaaggggcattagagatcattcatcctggccctcgctgatccaggaggaagcagaggtccagagagacatgtggagctcacgg

SEQ ID NO: 297886 - DNA, 201 bp, Homo sapiens
gattttcttctaaagtcagttagagcccccagagaatgttgaatagagattgacataatcagatccacagaaagaaaagatcatttggtggctagagaggscagtgaggggtggagcacattagaacctcaccaggagagaaataatatgttgatgtttctctggaagccctgccatgagaacctgtactagctcatggga

SEQ ID NO: 297887 - DNA, 201 bp, Homo sapiens
acccctgggttttttgtcctttcagcctggaggccggccctgtatctcgccgccctggactgtgctgaggagaccaacagtgcagtctgcagagacttcarcatccctggcttcccgactgtgagggtgtgtgactgacaggaggggaaggcaggctgggcctgctttgtttccctttataagggaaagggaccatgtggg

SEQ ID NO: 297888 - DNA, 201 bp, Homo sapiens
gggtgcccagcaccgcactcaccactgcaggcgtggccaggagcgtgagatccccagagcccatggccagtgagaggcggccagggataggtacccagggwatgccacaggagtttgctgggctcacggagctctttcactggtcagagaggagtgtgtgtaggagaggacttctacttggtgttgaaggacagatggggt

SEQ ID NO: 297889 - DNA, 201 bp, Homo sapiens
ccagtgagaggcggccagggataggtacccagggaatgccacaggagtttgctgggctcacggagctctttcactggtcagagaggagtgtgtgtaggagrggacttctacttggtgttgaaggacagatggggtttggctgggagagaggaggaatgtgggcgggccttataggcaggcgagaaggtgagagccaaggcc

SEQ ID NO: 297890 - DNA, 201 bp, Homo sapiens
gggagtgaaggtggccagtgtgctgtggaagcagctctgctctcctgacactccgctcacgcctgttttcatttacagtggctggtgctgacgtgcagacrctgcgggagaggctcattgacgccctggagtcccatcatgacacgtggcccccagcctgtcccccactggagcctgccaagtactttgggctggggcagg

SEQ ID NO: 297891 - DNA, 201 bp, Homo sapiens
ctcagctcaggcaatcggcctgccttggcctcccaaagtactgggattacaggcataagccactgcacccagcccaaagcaatccttttaaagaactttargaaggaggtagagatgtgtgatgaaaggtgagctgcctcttctgaagtctgagggtgggagtggggaaaggggtactggcccccatgtaggttgtgctct

SEQ ID NO: 297892 - DNA, 201 bp, Homo sapiens
cataagccactgcacccagcccaaagcaatccttttaaagaactttaggaaggaggtagagatgtgtgatgaaaggtgagctgcctcttctgaagtctgarggtgggagtggggaaaggggtactggcccccatgtaggttgtgctcttctgccagcctagggaagacccagggaagaggtctgagaggctggccacctga

SEQ ID NO: 297893 - DNA, 201 bp, Homo sapiens
ctcaaaattaccaggcacaagctgagagccccctccacaaggcctgatcactatgactcatgactggacccttgactctgcttgttgtcccctccccaaartaaccattctgacttgcatgccacttgctgttgctgctcctgcttccttgtagtcaacaacttgtccccctattaaaacctttaggagaagtgcttctac

SEQ ID NO: 297894 - DNA, 201 bp, Homo sapiens
taatagagacctttcctccaaggctgagagctgtttggtcctcacagtgcagaggcctggggttgacaacctagagacttagaggggaaaaatccagaackgacccacgtacagtccctcctcctgacccatgagggagagcacccagcatgctttcccggcatgcctcagacaccccaccaccctagtccagtactctcc

SEQ ID NO: 297895 - DNA, 201 bp, Homo sapiens
ctgacccatgagggagagcacccagcatgctttcccggcatgcctcagacaccccaccaccctagtccagtactctccaaaggagtcaccccaggaagatyggcttgtgtgtcactcgcatctctcagctgtgctcaaacctgctattttctttgtccccagtggggctgtttgcagccggtatgggggaaaagaatgaga

SEQ ID NO: 297896 - DNA, 201 bp, Homo sapiens
tgtttgggttttgcccgcacatcccctggggtctgtagagtattctggcccttgccttgcttgggtagcttcttcctgaatagtagtatcctagcagctaycatttcttcagccctgccggtgcctgcagtgttctttgtatattagctcctcattctgtttctcagagaagattccacagcatggcttctagtatgatct

SEQ ID NO: 297897 - DNA, 201 bp, Homo sapiens
catgtgtccctcagggtgccgttcttgccaagaaggtgaactggattggctgccaggggagtgagccgcatttccggggctttccctgctccctgtgggtyctcttccacttcttgactgtgcaggcagctcggcaaaatgtagaccactcacaggaagcaggtacgtccaggacccgttcaccccactgtgcctccaacc

SEQ ID NO: 297898 - DNA, 201 bp, Homo sapiens
gtgtccctcagggtgccgttcttgccaagaaggtgaactggattggctgccaggggagtgagccgcatttccggggctttccctgctccctgtgggtcctyttccacttcttgactgtgcaggcagctcggcaaaatgtagaccactcacaggaagcaggtacgtccaggacccgttcaccccactgtgcctccaaccctg

SEQ ID NO: 297899 - DNA, 201 bp, Homo sapiens
gccccactggctcccagctgccagaagatggggagagtcagccttggggctctggctggattgctctatctgcaggtagccccacacggccagaatagaaycaatcccaggagggagcagactttaggaattcaaccagtcctgttttcggccccgggagctctggggctgaggcttctccctgtctttctccgggcttat

SEQ ID NO: 297900 - DNA, 201 bp, Homo sapiens
aggcatgcaccaccatgcctggctaattttgtattttcagtagagacgtggtttcaccattttggtcaggctggtctcaaactcctgacctcaggagatcygcccacctcagcctcccataatgctgggattacagacgtgagccactgcgcccaaccaggaactttatttttattattttgagatggagtctcgctctgt

SEQ ID NO: 297901 - DNA, 201 bp, Homo sapiens
gtggacctctagtgtgaggcagggggacagagaggcctgcagtgcatcagggctagggccgtggtggagagaaagatgtggggtgaagagagggcaggctsgacgccattgggaaggggcccgaggccttacggggtgagttgaggggtgatgggtgagtagggattccgccaggagaggagcatcccagcagagggagca

SEQ ID NO: 297902 - DNA, 201 bp, Homo sapiens
catgactgggttagagggaacttctttatgatcatccttttccccagttggaatgatcccttatcaggggataaatggatgacgcagtaaagaaaaaacaytaacgggagtgaaatcctggaggtgaggagtggggtaacccgagcagcagcggagacagaggctgagcaacgccagggccgtgtggtgaggccttgtggt

SEQ ID NO: 297903 - DNA, 201 bp, Homo sapiens
ttaaactccagggagctgggtcgggagggagccatctgtggacaggaggcggtttgtgtgtcgggagggagcggtgcacgtggctgtgacagcctcccggkggggggagaccagggcggagccgaggttaaaggagctgaatggagcaggtggtggtgcaggcgcctgcacttggtcgtggtctcctggggcctcctatcg

SEQ ID NO: 297904 - DNA, 201 bp, Homo sapiens
aaactccagggagctgggtcgggagggagccatctgtggacaggaggcggtttgtgtgtcgggagggagcggtgcacgtggctgtgacagcctcccggggkggggagaccagggcggagccgaggttaaaggagctgaatggagcaggtggtggtgcaggcgcctgcacttggtcgtggtctcctggggcctcctatcgaa

SEQ ID NO: 297905 - DNA, 201 bp, Homo sapiens
agcagaccgaccaaagactgcaaaacagatcaaaatgagtattcttgccctttcccatgtctggtactggggtaaaggctggttgtaaagtccacatagcrggacagtgggtctggccaacaccgggaaatgactgagatggcgctcttcacgcttccctggaaaaccacggagggccggggctgaggggtaggtggatct

SEQ ID NO: 297906 - DNA, 201 bp, Homo sapiens
tggccaacaccgggaaatgactgagatggcgctcttcacgcttccctggaaaaccacggagggccggggctgaggggtaggtggatctgcctcctcctccwtgctgccatctgttgagctcccactgtgggctagtgtttgtaatctgtattttctaattacccatcctctggaagggcagtggcgagccctttctgcaga

SEQ ID NO: 297907 - DNA, 201 bp, Homo sapiens
tgggccacccgtggggctgctggtagctggtgtgtggctgctgctggactgtgtggcagtccatccatctgtcagcagccactgcgggcctacttgctggrtgcccagcaccgcactcaccactgcaggcgtggccaggagcgtgagatccccagagcccatggccagtgagaggcggccagggataggtacccagggaat

SEQ ID NO: 297908 - DNA, 201 bp, Homo sapiens
aagacaaccgattggagttctgtagggcctgacacctgagctttctgactctgcctgggagaggctgggcacagcagggatgaaggaggcggcctaggccyaggaggtcagaggctcctcagcgccaccccatgtcacgcagcgcacgcagcctggatgcctcaggtgagtcaccatctcctgaactgcctggctggctgt

SEQ ID NO: 297909 - DNA, 201 bp, Homo sapiens
cctgaggtctgagagagggagacttccaggaccccaccccatttagagcgagcaccttccctaccctgtcttctagccttaccaggtgtcccagagcaaargtagtacagaagtcatatttgtgtcttagttagaatgttttcctggtggttttggaactttgcacaacctcctccccactgccccccgccccccgccccc

SEQ ID NO: 297910 - DNA, 201 bp, Homo sapiens
tctccaggcagcctggtttctgccagtcctctcctcctccaccttgctcaggcagttccctgcccactggaccgacggtctaggttcaactctgtttccayctttcctgctgagcccatgccttggtctgcagggccgacctctccaaacttgagagttctgtgccacatgatttggcccctgccactgccctctcacggc

SEQ ID NO: 297911 - DNA, 201 bp, Homo sapiens
gctgcagatggacttattctagaatttcttccttcttgagagtgctggggggaaagattagcttccagctgactcacatgtttggcctcttgcaatgcagrgtttttagttttcctatgagttgcatgtctagatactgacccattctgctcctggatgagggttaccacttccaaacaggattccccagtgcatggagcc

SEQ ID NO: 297912 - DNA, 201 bp, Homo sapiens
aggaggtgcgatgccaccaaggacagggaggcactcgctttccgggcaggcccagaaagtgccagtgatggtggggagagaaggcattgtctcctctctcsgagttggtggaggggaaaattgtttgtgacgatgctgcctcccgagccatctgctcaccgagaaacccaggatggtggagtggaatgaagccgtgcgtcc

SEQ ID NO: 297913 - DNA, 201 bp, Homo sapiens
cccactgccccccgccccccgccccccgccttcttctgcatagcttcctaccatctgcaggacggggaacttggggaattgcttttcactctccagcttcygcttgttcctccccacagtatttccctggccggcccttagtccagaacttcctgcactccgtgaatgaatggctcaagaggcagaagagaaataaaattc

SEQ ID NO: 297914 - DNA, 201 bp, Homo sapiens
acggctgtggggctggcagcctgaagggctggtgcgtggcatctcctctgccctgtagccaaggccaaggaggtcctcccagccatccgaggctacgtgcrctacttcttcggctgccgagactgcgctagccacttcgagcagatggctgctgcctccatgcaccgggtggggagtcccaacgccgctgtcctctggctc

SEQ ID NO: 297915 - DNA, 201 bp, Homo sapiens; identical to SEQ ID NO: 61855

SEQ ID NO: 297916 - DNA, 201 bp, Homo sapiens; identical to SEQ ID NO: 61857

SEQ ID NO: 297917 - DNA, 201 bp, Homo sapiens; identical to SEQ ID NO: 61860

SEQ ID NO: 297918 - DNA, 201 bp, Homo sapiens
aactgttacaaagctgtgtttgaaaaaggccaaaggagtggttcagccatttcttatgggaacccaggggaggggaaagtcacagagggctaatctgatcmccagaggccttcatgccagtagttatttattacacgcttgccttatgccagcactttgctaagggccttcacaggccattattatgacaatccttacccg

SEQ ID NO: 297919 - DNA, 201 bp, Homo sapiens
tccttttaagaacagatcaatacttcaagaaaaccttgttttaacagagaggaccaaattctgatttttcatcagtgtacttttgatattaaggctcatcaaaaaaaaaaaaacacaaaaactataagttagcccattcgaccacacttgaagttcttttctcttcacaacttccttgtatccattggtttgtcctgtact

SEQ ID NO: 297920 - DNA, 201 bp, Homo sapiens
agggtcttccagctagtgaggggctgggcagggagccacacccactcgcatccagcccatgcccattaccaccaagtgcatggtgctcacaggcccgaacscctaagggtgccagtggacactgctggctccccctggctagctgccagccctgcaggtgcccggtcagtcaggaggccctctgcatgtcctgccggtgcc

SEQ ID NO: 297921 - DNA, 201 bp, Homo sapiens
ctctgtgctgggcaccttccctgtgttacctcattcagtcatggggccacttctggaggcagggcacaggaatggagaggtaaactgaggcccaaggacascaaagtggaacacagaggagaccttgccctgaggaggagcataggcagccacaatgcgtaccccattagttgaccttattggctctttccaacctcagga

SEQ ID NO: 297922 - DNA, 201 bp, Homo sapiens; identical to SEQ ID NO: 61862

SEQ ID NO: 297923 - DNA, 201 bp, Homo sapiens; identical to SEQ ID NO: 61861

SEQ ID NO: 297924 - DNA, 201 bp, Homo sapiens
ccagtatccttctcctctcaaatgtttgtctttgctttctttgctgtgattttctcagggtcctcatcccctcggccagcctctttgtggttttatctgaycagcctgctgctgtgtccctctttctcctgccctccgccccttgtgctgtgcacgtgcacacacgcacacacacacacatacacacatatgtcctcctcc

SEQ ID NO: 297925 - DNA, 201 bp, Homo sapiens
attgatatttcaaacaaacaataattagtaatttctaaagggatcttttccctttagaaaaatgttatgagaaggccctggggaatcctggacatcagagrgcagtcttggggtgtgaaggtcttaaagacaagaacgtgctggctcagtgcaaaaaacaaacgagaattaaaatgaaaccacattttattgtgctcttta

SEQ ID NO: 297926 - DNA, 201 bp, Homo sapiens; identical to SEQ ID NO: 61863

SEQ ID NO: 297927 - DNA, 201 bp, Homo sapiens
cagggatccccggcacgggagttatcacacccaaggcatgagggctttgtcacccccgctctggtggaaagtggcacgagatctctgatgatgccttacctgccagcctgcccagtgcagggcatcaacagcttaattaacgtctgaacagcttccaaggctctcaaataggaggccctggatagcccagggcagcaaggc

SEQ ID NO: 297928 - DNA, 201 bp, Homo sapiens
agtcacactccgccgttcctgtctgtgggcaccgggctgtcccgtgcctttccatgccctgcctggagccagagggccactgggggaattcttgggcccarttgccttaccaggtgaggtttgacatcaggctggtgtcagagaggctttccagagcatgtgcagtgattagaagggttacagcgaggcctgggtgccgtc

SEQ ID NO: 297929 - DNA, 201 bp, Homo sapiens
ccttgtatcagccccaagaagggccagcttagttgccttctttccagggatgcgtcagggtgtgccaggctcttcctgcatctgtctcgtggaggtgaggstaacactccttccccaggcgtaacgtgttcttaggagctctgataccttctgaaattgtgttcttctgagacgtcgtaaggagtaagttctagggtggag

SEQ ID NO: 297930 - DNA, 201 bp, Homo sapiens; identical to SEQ ID NO: 61864

SEQ ID NO: 297931 - DNA, 201 bp, Homo sapiens
gaagaggtaacacggaggtcaaattcataggacttgtcagctaactggatgacgggtttttgaagagggggatggtgtgggtggcagggagggggactggttgctgggtgaggtaaacacaagtggcaaagcaggttgagagaggggtgattcagtcttggggatggtgggggaggggctgtatccagacacctgagtgga

SEQ ID NO: 297932 - DNA, 201 bp, Homo sapiens
agccccctcaggagaagctgcagtctgctgtctgcggggccagcgcctccaccgtcaggagcctgggcctgaaacgctaaccctgttccgcagctcagagwcctcaaaggcctcagccccccgcacccagtgtcgcctgcaccctcattacgtccccaccacagccctggccctcttccccaccctcttctgttcgcaggc

SEQ ID NO: 297933 - DNA, 201 bp, Homo sapiens
ggacccctccacctgcccggtgggcagcctcctactccgggagcgcgtccctcttccagtcacctccgcccacctcttcctctccgcgcatcccacgcccmccaccttcatgtttctcagctccatttttgcctcccgctcccttgccttttcctcttggccctcatcccgagcttctttccctctccgcggcctgggccc

SEQ ID NO: 297934 - DNA, 201 bp, Homo sapiens; identical to SEQ ID NO: 61865

SEQ ID NO: 297935 - DNA, 201 bp, Homo sapiens
taacctgtctgtaaataaacaagagcaccatcaccatgaataactgcagcgcaacatcaccctcgggtttcttttttgtttttaaattttatttatttttmatttttaactttttgtagagatggggcctcactgtgttgcctagggtggtcttgaactccagggttcaagtgatcctccctcctaggtctcccaaagtgc

SEQ ID NO: 297936 - DNA, 201 bp, Homo sapiens
actacaggcgcctgccaccaagcctggctaattttttgtatttttagtagagatggggtttcaccatgttgcccagggtggtctcaaactcctcagctcargcaatcggcctgccttggcctcccaaagtactgggattacaggcataagccactgcacccagcccaaagcaatccttttaaagaactttaggaaggaggt

SEQ ID NO: 297937 - DNA, 201 bp, Homo sapiens
gcgagccctttctgcagacaaggaagctggcgttctgagtggaggagtgtggtctgggtttttgggtgggactgatgtcaccaccagcctgtgtatgcttycctctgtaggtgcccccagcgaggacccccagttccccaaggtgcagtggccaccccgtgaactttgttctgcctgccacaatgaacgcctggatgtgcc

SEQ ID NO: 297938 - DNA, 201 bp, Homo sapiens
gcagacaaggaagctggcgttctgagtggaggagtgtggtctgggtttttgggtgggactgatgtcaccaccagcctgtgtatgcttccctctgtaggtgmccccagcgaggacccccagttccccaaggtgcagtggccaccccgtgaactttgttctgcctgccacaatgaacgcctggatgtgcccgtgtgggacgtg

SEQ ID NO: 297939 - DNA, 201 bp, Homo sapiens; identical to SEQ ID NO: 61868

SEQ ID NO: 297940 - DNA, 201 bp, Homo sapiens; identical to SEQ ID NO: 61873

SEQ ID NO: 297941 - DNA, 201 bp, Homo sapiens; identical to SEQ ID NO: 61875

SEQ ID NO: 297942 - DNA, 201 bp, Homo sapiens
tggggtctcggtgacacagttcactgtttgctgcagaggaggccccactcgcagccttggcctctgccctgcagaagaattccctgtaactcactcaccartggccgtgggagccagtggcctcggcgagggtcagttggactgcatagctgccggctgagtctctctggccaccctcactggccccatcactccaggttg

SEQ ID NO: 297943 - DNA, 201 bp, Homo sapiens
ttatttgtgcagtcaatatttttgagtactcactatgtgctaggcactgtggcagcagatatgtacaggcagatgcattctctgcttgtgcagaccctacagcatacagcatcccttctaggaaggcacccaacctcacttgaatgcctgtggtgtcagtgagttcactgccttttcaggtcacctgtgtgtgtgtccaca

SEQ ID NO: 297944 - DNA, 201 bp, Homo sapiens
tttgtgcagtcaatatttttgagtactcactatgtgctaggcactgtggcagcagatatgtacaggcagatgcattctctgcttgtgcagaccctacagcatacagcatcccttctaggaaggcacccaacctcacttgaatgcctgtggtgtcagtgagttcactgccttttcaggtcacctgtgtgtgtgtccacagtc

SEQ ID NO: 297945 - DNA, 201 bp, Homo sapiens
tgcagtcaatatttttgagtactcactatgtgctaggcactgtggcagcagatatgtacaggcagatgcattctctgcttgtgcagaccctacagcatacrgcatcccttctaggaaggcacccaacctcacttgaatgcctgtggtgtcagtgagttcactgccttttcaggtcacctgtgtgtgtgtccacagtcgtaa

SEQ ID NO: 297946 - DNA, 201 bp, Homo sapiens
tggccctgaaaaagtttgtggcagtgctggccaaggtgagcagggccatggcttcccttgtctgtgcaattctacggatggtcagtgtgcgttcctgtaagctgggcaccccgtcagcccctccctccagaagcccatggtctggctggacacctggacccacagctctccctgtccaccataggtgataccctccagcct

SEQ ID NO: 297947 - DNA, 201 bp, Homo sapiens
accactcacaggaagcaggtacgtccaggacccgttcaccccactgtgcctccaaccctgctctgttcggccctccaaggggagagggggcagggaagctcccttgaattgccccactggctcccagctgccagaagatggggagagtcagccttggggctctggctggattgctctatctgcaggtagccccacacggcc

SEQ ID NO: 297948 - DNA, 201 bp, Homo sapiens
gggtgctgaacacagaggccaatgtggtgagaaagtttggtgtcaccgacttcccctcttgctacctgctgttccggaatggctctgtctcccgagtcccygtgtgagtatcctgtctcctggcgtcccctctcgtccctccctgtgctcatccttccttcttgcccagaggggctgcccgcctttcacagtggccaacat

SEQ ID NO: 297949 - DNA, 201 bp, Homo sapiens
gggaattcttgggcccaattgccttaccaggtgaggtttgacatcaggctggtgtcagagaggctttccagagcatgtgcagtgattagaagggttacagygaggcctgggtgccgtcttctggcctcacagaggacaagatggaatctcgttcacatatttaataaaccttcctgtccgatgagccacccttcttcctct

SEQ ID NO: 297950 - DNA, 201 bp, Homo sapiens
gggaagggagtcacactccgccgttcctgtctgtgggcaccgggctgtcccgtgcctttccatgccctgcctggagccagagggccactgggggaattctygggcccaattgccttaccaggtgaggtttgacatcaggctggtgtcagagaggctttccagagcatgtgcagtgattagaagggttacagcgaggcctgg

SEQ ID NO: 297951 - DNA, 201 bp, Homo sapiens
agcttgcagagataaataaaatgtcgtcctgcttcctggtcagaggtgggtgcatgggtgagtggtggattcaggttgaagttcattgcagctggagtggygggagtggagggcaatgtgaggtgagtttgggtttggagcctggaaggccttgaatgcagtgagtttggacattattcattgacagtggggagtcatgga

SEQ ID NO: 297952 - DNA, 201 bp, Homo sapiens
ccaagtttcaagcagaactgtgagccagaactcagcttaattaccccagcagcatccatccgggaagtaaggccgtggctccaccaggaacatccagctcyaactccatgtgacctttctgttcctcgagcccagtgcaacccccactggattcagggtttccacacctaatagaagtcccttcctaaactgttaccacat

SEQ ID NO: 297953 - DNA, 201 bp, Homo sapiens
gaagccagtggtaacttacaagactctgtgaccatcagcagtgccccttctcttctctccctttagccctggatgctccttgcagcccctgcaccatggtyaatacttctttctctctctatctccctctgggtcctcagctccaagatctacatggctgacctggaatctgcactgcactacatcctgcggatagaagtg

SEQ ID NO: 297954 - DNA, 201 bp, Homo sapiens; identical to SEQ ID NO: 61872

SEQ ID NO: 297955 - DNA, 201 bp, Homo sapiens; identical to SEQ ID NO: 61874

SEQ ID NO: 297956 - DNA, 201 bp, Homo sapiens
cgcttacctgcagagactctctgggctcaccagggaggctgcccagaccacagttgcaccaaccactgctaacaagatagctcccactgtttggaaattgkcagatcggtaaggctacgcctggttctcctcacttcttctccttcctctgatcacagaccaccacaccttcacacccacgccctcttgctcattcttctt

SEQ ID NO: 297957 - DNA, 201 bp, Homo sapiens
cccggatctgagcccaccctcctcagtgtgggtctgcaggaagctggggctgccctcgggtgatttgtgcctctccttgggaacttcctgccagcctgatscctccttcccacctccctgtcctggccccctggcttggtcacatgaatgcgtggtgacactgagagggcctgacagggacatttcagcctaaggcaggac

SEQ ID NO: 297958 - DNA, 201 bp, Homo sapiens
cgaagcagggggaggagagagtgcttttggtatgatggggacaggcccacacacaagtctggcctccctgagtggcatgtgtgactgtccttttcttctgyctccagccccttgtcactatgagcaaacagtgagcttctaccagcccagcctgtttagcaaacacctgggccctgaagggcgggccagctgtgtcaggtc

SEQ ID NO: 297959 - DNA, 201 bp, Homo sapiens
gagtagctgggactacaggcgcctgccaccaagcctggctaattttttgtatttttagtagagatggggtttcaccatgttgcccagggtggtctcaaacwcctcagctcaggcaatcggcctgccttggcctcccaaagtactgggattacaggcataagccactgcacccagcccaaagcaatccttttaaagaacttt

SEQ ID NO: 297960 - DNA, 201 bp, Homo sapiens
ggagaattacctaaaaggtacagaaaaacctttcactgtttccttttaagaacagatcaatacttcaagaaaaccttgttttaacagagaggaccaaattctgatttttcatcagtgtacttttgatattaaggctcatcaaaaaaaaaaaaacacaaaaactataagttagcccattcgaccacacttgaagttcttttc

SEQ ID NO: 297961 - DNA, 201 bp, Homo sapiens
cttctccatggataatccacggtgttggaagtggttaaggtaatggatcctcatgggcttaccataaaaatatctggaggctggaccattttccttaaaaygttataaaagctggaattgaatgccatcggtgtcacccctgggaagtgtgctttctcttgagctcttttggccccaagatagcagtcactccatagtttc

SEQ ID NO: 297962 - DNA, 201 bp, Homo sapiens
gaggctggaccattttccttaaaacgttataaaagctggaattgaatgccatcggtgtcacccctgggaagtgtgctttctcttgagctcttttggccccragatagcagtcactccatagtttcgtgaagaccagcctggtgttgcctggttttctgccattagggagcagctagaggtcttccagtagctcctgtgtaa

SEQ ID NO: 297963 - DNA, 201 bp, Homo sapiens
acctatcatttcaggcaccttactaagtactcggcatacattgtctcatagtttcctttccacaatttaaagattcctgtggtgtcacacatccacctaayccaggtagtgggtatttggcgggcaggagtggtatagtgatagtgatttgttcctgacttgctgcctctgaatggagttacttcctgactctggtgctag

SEQ ID NO: 297964 - DNA, 201 bp, Homo sapiens
attagggagcagctagaggtcttccagtagctcctgtgtaaagtgatgaaagaaaagggctgggtgctgactgctcctggagaaaagcaacacactcccaragtcttaattgcctgcttccagggagctgtggtggtttcccttgggcagggcacacgccccagtggttgacttaataaggatacattttaatcagaggac

SEQ ID NO: 297965 - DNA, 201 bp, Homo sapiens
acccttcttcctcttctgacattggttagctctaatcttgttctctgcacttactgcctctcctccctggttctgtgccctcacaggctcatggaatccakgtccttctataccgcttacctgcagagactctctgggctcaccagggaggctgcccagaccacagttgcaccaaccactgctaacaagatagctcccact

SEQ ID NO: 297966 - DNA, 201 bp, Homo sapiens
catgtcatcttcctgccaggttccctagctgctgtgggtcagtgctggggagaaaagggaacggacatccattttgcctccctgccacctttctccactcyctcgactggttgaccaggtggtacatagacttcctttctcatttttgtctttgatgtgggtatgcccacctggcagttttcctatctctgttccgggcct

SEQ ID NO: 297967 - DNA, 201 bp, Homo sapiens; identical to SEQ ID NO: 61850

SEQ ID NO: 297968 - DNA, 201 bp, Homo sapiens
gccagtggacactgctggctccccctggctagctgccagccctgcaggtgcccggtcagtcaggaggccctctgcatgtcctgccggtgccttcccacccrgcctctcccagcctgtgctccctcctgtgagcagctggtaggagtggccactgggtggcgtgtgggcaccagggtttccttgctcccagttgtccagagc

SEQ ID NO: 297969 - DNA, 201 bp, Homo sapiens; identical to SEQ ID NO: 61851

SEQ ID NO: 297970 - DNA, 201 bp, Homo sapiens
agtgtagaaccttctgctggtgccgtggatcctcttgactcagaccgggggtgtcagccaggtgtgaggggtagagaaggcattttgtccatccagtgacrtcactgcccagaaactgtcagcaaggaggaaggaaggcatgagttggtgaccgcatagtgctgactagctggacagggcataaactaactctctgtgtca

SEQ ID NO: 297971 - DNA, 201 bp, Homo sapiens
agaattgtctcttgcaggctggaggagattgatggattctttgcgagaaataacgaagagtacctggctctgatctttgaaaagggaggctcctacctggstagagaggtgagctgccctgaagttccctgcaattcttggatagccatggagagagagccccagtttgggagcagggcttttcctgccaattctagggtc

SEQ ID NO: 297972 - DNA, 201 bp, Homo sapiens
atgtgggggatctgggctgctgggaaccccgaatgttggaatcgccctgacaaccttatgagggtggtcagatatgggtcctgaggaaactgattccacgrcaactgcccgccaacccagcacaccccacagtgaagaggggcttctgatccatgagtagggcccctcaaatgatgttcccctttagatggtcatggtcat

SEQ ID NO: 297973 - DNA, 201 bp, Homo sapiens
cgcccggttcgtcccccgccaggttactgcctccttccctgcgagaggtctcctttgttccttcctccgcatggtccgctgacaccttaccgtttcctggkccagccttgtggcagtcctcttcctctcgtccagggacccatgtcatcttcctgccaggttccctagctgctgtgggtcagtgctggggagaaaagggaa

SEQ ID NO: 297974 - DNA, 201 bp, Homo sapiens
tgtcagccaggtgtgaggggtagagaaggcattttgtccatccagtgacgtcactgcccagaaactgtcagcaaggaggaaggaaggcatgagttggtgaycgcatagtgctgactagctggacagggcataaactaactctctgtgtcaggagagctcctgaattcttcggtgtagagtccagagctgagggtcagtaga

SEQ ID NO: 297975 - DNA, 201 bp, Homo sapiens
gaaggtcagatcgacagcttagttttggcttggtggcgtggaacttcagcttgagggactccatcttggtttggtctcttgggccttgtgcaggagctcartcccaaccaatggcctcctagaaatattatttaacagttctccccttttggtcaggttctcacctaggtgagagttactaaaacagggcatcagcactac

SEQ ID NO: 297976 - DNA, 201 bp, Homo sapiens
tttataggttaaggtgtcctcattatcatgcgtttcttggagttttatcattccagctggagagagaccatttagcattcagcagagggctgcatatagayatttaagactctttgagaggatacagtgtaacagggaaactactgtaatgactctccccaggataatactaagagtttacaatatgacgcttagccaggg

SEQ ID NO: 297977 - DNA, 201 bp, Homo sapiens
gtatatcaagttgttcagcttctgtttatagggctttaggcacagaacagttcctgttcttagttggagaattgtagctagttattggaagaaactggaaraattcagaattcaatccatcttataggtagatgataaaaacttgaaaatgatcaacaaggctacaatctaataacagatgtactatagtttttctttagg

SEQ ID NO: 297978 - DNA, 201 bp, Homo sapiens
gggaagtttgtacaaaatgtcaaaggtttaaaattaaaacacttaatcagcctgggcatggtggctcatgacggtaatcccaacactttgggaggccgagkcaggaggataccttgagcctaggggttcgagaccagtctgggcaacataggaagaccccatttctatattaaaattttaaaaaattagccaggtgtggtg

SEQ ID NO: 297979 - DNA, 201 bp, Homo sapiens
tttgaagaggtaacacggaggtcaaattcataggacttgtcagctaactggatgacgggtttttgaagagggggatggtgtgggtggcagggagggggacyggttgctgggtgaggtaaacacaagtggcaaagcaggttgagagaggggtgattcagtcttggggatggtgggggaggggctgtatccagacacctgagt

SEQ ID NO: 297980 - DNA, 201 bp, Homo sapiens; identical to SEQ ID NO: 61877

SEQ ID NO: 297981 - DNA, 201 bp, Homo sapiens
ggtggctcatgacggtaatcccaacactttgggaggccgaggcaggaggataccttgagcctaggggttcgagaccagtctgggcaacataggaagacccyatttctatattaaaattttaaaaaattagccaggtgtggtggtgtgcacctgtggtaccagctacttaagcagctgaggtgggagaattacttgagccca

SEQ ID NO: 297982 - DNA, 201 bp, Homo sapiens
caaaggatgcaccccagcttgcagatacttggataggctcaagttgctatccttgtgtgctaagggagtcaagaaggctccccaaaaagtgtgtggtgggrgggtgttgaggaggttggggaaatggcatcataggatgtagctcacctcactctgctaaatacttttgacgtctgactctggtaaatacctccatctact

SEQ ID NO: 297983 - DNA, 201 bp, Homo sapiens
ggaattccagatcccctaaggcatgttctccaccctctggaactgatcccatttagagccccagggacaaaggcaataccagggcttttcctggggggtgrggggctggggggatggcgaggagcagggcaaactccttcaacatctctcagcccccatccctggccccgattagtaatggagaaacagataccattatga

SEQ ID NO: 297984 - DNA, 201 bp, Homo sapiens
tagttttcttccagattagagaagccaaattcaaatctctgtctctgtagcaccagctataaataatatgtaccctcccaccagaatggcatctagaaaascagtttcttctgtagccattaaggattattaggaaatgcctttgaaagctgaaatgccaagcattgtccctggaacaagatacctctgagctgggggtag

SEQ ID NO: 297985 - DNA, 201 bp, Homo sapiens
cgtgtcattgaaaagtggcagcagagagtctgcatgtcaatcatccctttgaaatgaaaggccttcctggcagggacatggtgctatctttggccctaagrtgtgtaattgagaatattcaaacagggcactctgttcctttggctgaaccagggtgagtggccctgagtgggaagctgtgggcaagttagtgtggcacaa

SEQ ID NO: 297986 - DNA, 201 bp, Homo sapiens
ccagggtgagtggccctgagtgggaagctgtgggcaagttagtgtggcacaaggaaccatcattcacaggctgatatttttctcccagtgagcatgagccrcaggggtgcagccactgcccagcccccaggggaggggttgacactggtacagcagccagggcaagacaaccgattggagttctgtagggcctgacacctg

SEQ ID NO: 297987 - DNA, 201 bp, Homo sapiens
gcccagcctgtttagcaaacacctgggccctgaagggcgggccagctgtgtcaggtccccatcaggttggagccagagcccagctggaaggaaacaaaggygtgggagagggaggggctggttggctgcaggttctggctggagcttggcaacctagaggctggaacttccgggtcaaggggcttctccgtgggcctcagg

SEQ ID NO: 297988 - DNA, 201 bp, Homo sapiens
ggtctcccatatgcaagtgccaccatgctagtgtgatttggacttcagtaaaagttagtttgcttccttcccgttgtcccatctcactcctgggccacccrtggggctgctggtagctggtgtgtggctgctgctggactgtgtggcagtccatccatctgtcagcagccactgcgggcctacttgctgggtgcccagcac

SEQ ID NO: 297989 - DNA, 201 bp, Homo sapiens
tgaaaggccttcctggcagggacatggtgctatctttggccctaaggtgtgtaattgagaatattcaaacagggcactctgttcctttggctgaaccaggktgagtggccctgagtgggaagctgtgggcaagttagtgtggcacaaggaaccatcattcacaggctgatatttttctcccagtgagcatgagccgcaggg

SEQ ID NO: 297990 - DNA, 201 bp, Homo sapiens
tttacaaaaaaatttggcaaatatcaaaaagtataaagaacaaaatattcaaaaagcactctggaatctgcaaaccccagtcggtgctgcatccccagccygccgccacgccgcctacaaacaggtgctgatccggcacggcgaggttgcgtggaacctggagaaccgcttcggtggctggtacgatgccaacctgaaccc

SEQ ID NO: 297991 - DNA, 201 bp, Homo sapiens
gcagctgaacctgccgactggtattcccattgtctatgaattggacaagagctcgaagcccatcaagcccatacagttcctgggggatgaagagaccgtgygtgaagccatggaagctgtggctgcccagggcaaggccaagaagtgaaggtcagcgggcaggctactgtccccaggagcactgtccctgcccgtcgcttc

SEQ ID NO: 297992 - DNA, 201 bp, Homo sapiens
tgtggctgcccagggcaaggccaagaagtgaaggtcagcgggcaggctactgtccccaggagcactgtccctgcccgtcgcttccctctgcccctccctcstgcacgtgtcacactgaccacatctgtagacatcttcaattgtagctgcagatggggaccagtggctcccattttcattttagccattttgtctcctgca

SEQ ID NO: 297993 - DNA, 201 bp, Homo sapiens
acctttaggtaactgtagatttataatatttttaattgcataatgattagattagcaactcatcatgctcattatatactgatttattaaccttattaagraagattttggaagcagttcttacagtgctttatagctggtcatttttgcttcactaccaagtgtaaattttacaagcctcatttaataagtggtgaatct

SEQ ID NO: 297994 - DNA, 201 bp, Homo sapiens
tatagatacaatgtaattaattcttaggtagagttgtctgtgagtttgtgtgcatgtgtgtgtgtgtgtatacttggttcctggaaaaaactaagaaaaaytgtaatgttttctcaagcaaatttggattaagaaatatgtgaaggtacttttcttattttatctacttttgtatggttagaatatggtcatgaaagttat

SEQ ID NO: 297995 - DNA, 201 bp, Homo sapiens
ttatcaagattctcctttttttgtagtcattatattttactttaattctttaaacatggttgtctttaattctttggacatatctataataatgaatttgragtctttgctaagtccacctcaaagtcaatttatgttaactgcttttcctcccaaatatgtatcacactttcctgtttctttgcatgttttgaactattt

SEQ ID NO: 297996 - DNA, 201 bp, Homo sapiens
gtttctagcagcatatactgctagtgcgtggttaagatttagatctttaaagtataatgttagctttcttgttatataataatacttctatgcctacttaygggtaaatatgagtaaaagttttgccaatgtcagtaggaatttttttatgagatcagttttcacaatgtgttaattattaagcactcccactacacagtc

SEQ ID NO: 297997 - DNA, 201 bp, Homo sapiens
tttttttgtagtcattatattttactttaattctttaaacatggttgtctttaattctttggacatatctataataatgaatttgaagtctttgctaagtycacctcaaagtcaatttatgttaactgcttttcctcccaaatatgtatcacactttcctgtttctttgcatgttttgaactattttattgaaaactgaac

SEQ ID NO: 297998 - DNA, 201 bp, Homo sapiens
atttgctttctcttgttctctctatggattgcttggttggttgatgagctatttggaagtaaattgcagacatcctgacatttcatctctaaatacttttrgcgttagtctctttgaggttaggatggtttcatgtcattccaacactgttttacacctaaagcaaatttatttttatataattttcttacacttttcata

SEQ ID NO: 297999 - DNA, 201 bp, Homo sapiens
cagtttctagaatacatggagcttttcctgtatcttttgtacttgtgctcatttgtaacttaaaagggctaactagcaagaatatttcaaatatatttctrtataatttttaaggcaaacttggattttattggttagagtacattatagagagctaggttttatatcccaaaaaggaaatgtggaattattgattaattc

SEQ ID NO: 298000 - DNA, 201 bp, Homo sapiens
cttcatatattgagatatgaatgactgatggtgtttccagtgatatttacatttgaaaataagctgcagtaagcaccagtgaatatctgattaggctttcrgacatcttatgactctgctggtgactcccctatcataccacatacaagacaaggtactctgctgttgtgtaagacttgtctgacccttttgctcttaagc

SEQ ID NO: 298001 - DNA, 201 bp, Homo sapiens
ctacagcagctgcaaagtgatgaactttctgcggtgactgtgtcgggtcatgtatacaataatcagtgtgagtgggttcttattcattctacctactaacyaaaagtacatacatttcttaatgttcagtgagttcgctgtgtgattctgaaagattcatgacttttgttggaggtatagttatatttagtcagtaatctg

SEQ ID NO: 298002 - DNA, 201 bp, Homo sapiens
taggaatgtcatttttagacttttttgaaaatattgcctttatacaagatgtggtacagaaaaaacgtcaattaactgagggctttattaaagatattatrgaactatgaatgtatataaaacctttaacaataaatttgataaatttttaagcactagatagttaaatttatcctagttataacttcatttacatttgtg

SEQ ID NO: 298003 - DNA, 201 bp, Homo sapiens
cattgcattgcagcctgagtgcgcatgacagagtgagactcttgtctctaaaaaagaaagagaaccacaagtacataaagacatatgtacaacaatgtttrtcatagcatggtttatgattgtcaaaagtatggaaggaaaaatgcccatcaagagaaatagccaaataaactaaaacatctgtataatggatattatata

SEQ ID NO: 298004 - DNA, 201 bp, Homo sapiens
ttacttttaattgcgaaaaccgcaattacttaatatatagtgtaaaaatgtataatgatcagctttgcaattatttgtcttttttactttttttgtttttyttttatgatagcaattttcagatgactggattaaatgtctataatatacaaagacctcttagaaattaacaggaaaaataaacctaataacaaaggacaa

SEQ ID NO: 298005 - DNA, 201 bp, Homo sapiens
attctgagtgaggcctgagagcttgacatctaaacattcagagttttagtgcatagactttgtgatgattatttggatactcagggacctttattgcttaytattttgttatctgctatatgtataattgtcatatttaacaaaatctggcacctttagataaatgagatgttacataatttaaaaaggtaatacttttct

SEQ ID NO: 298006 - DNA, 201 bp, Homo sapiens
agacgtgagccaccgtgcccgaccagtagtgacatgcagtgatgaggccatataatgtaatgctctattaaaggactcctttttttagttaagaaatctavcaatctgattttttatgtagttcactgaggaatctcaaattattattacctttggttccatgattatatttttgggcattacctgatatatgaaaaaact

SEQ ID NO: 298007 - DNA, 201 bp, Homo sapiens
tcgaatgcctggcctcaagtgatcctcctgcctttgcttcctgaagtgctaggaaggattacaggcatgagccactgtgcccagtctagctatttcttttkgatctgttgtagaactatgaattgaagaaagtgaaatcagtatgctgccaccctgccacttcttcttgaaatctggaaagctggagaagttactgacaat

SEQ ID NO: 298008 - DNA, 201 bp, Homo sapiens
tgctagccatcagaaatggcaataaaataataataataatgaagaaacatggcttctgcttcactaagaaagtactattgaattactattgaaattactaytgaattttaaaaagtggtcagtatagtatatttgtgtcatagtggtcattcctttttgtttcaaattaccaacttgtattctaataaagtttagccaata

SEQ ID NO: 298009 - DNA, 201 bp, Homo sapiens
tagtatccaatagatagtttttcaacccttgatcccctctctccttctcccttatattcccccccagcgtctgttgtttccatctttacatccatgcatayccaatgtttagctcccacttataagtgagaaaacgcagtatttgattttctgtttctgtgttttttgcttaggataatggtttccagtggcatccatgtt

SEQ ID NO: 298010 - DNA, 201 bp, Homo sapiens
aactgttggcaaaattagtttctggtgtctttaaaccaaatcaacaaacagtcttattacctgaaagttgtcaacatcttattcatagtttgaatcacatraaggaaatacctggtaagacaaatatatttgaaaagtacatatacgtcttattttatttcttttaatttaaaaaattatagatacaatgtaattaattct

SEQ ID NO: 298011 - DNA, 201 bp, Homo sapiens
taaacatggttgtctttaattctttggacatatctataataatgaatttgaagtctttgctaagtccacctcaaagtcaatttatgttaactgcttttccycccaaatatgtatcacactttcctgtttctttgcatgttttgaactattttattgaaaactgaacctcatagataatgtattgtagcaactctggattta

SEQ ID NO: 298012 - DNA, 201 bp, Homo sapiens
ttgaagctaaaaataagattgaagaactacttgctagtcttttaaacaggtgattttcaatccattttgccaagtcatcctatgtattcattctatatacrgtatgtggaaagaatatttgatgttccatcttggaactgacagattatctggagactaaacaatgtaaaaataatttatcatgggatttctctgctttat

SEQ ID NO: 298013 - DNA, 201 bp, Homo sapiens
actttctctttatttttagagtatgccaagatggaaggaagcctcatacagtgagattaataatccgtcggtattcctctgagaagcactatggtcgtgaragtcgtcagtgccctattccttcacatgtaattcagaaattagggacaggtatggactagttttccaacagtttcattagcaggttgaactcttaaataa

SEQ ID NO: 298014 - DNA, 201 bp, Homo sapiens
agctgtgttgtccaggctggtctcaaactccagccacaagcgatccttccacctcagcttcgaaaagtattgggattacagtagttagccatcgtgcctgrccttttaaattttggaactttaggtttacctgaaagttgcagagctagatccccctagtgttaacataaactcagtacatttgtcaaaactaggaaatta

SEQ ID NO: 298015 - DNA, 201 bp, Homo sapiens
agctctggtctttaccttgtaccgcccacctcagggcctggatgtaaaggcaccggttctcatttcctgctggttttgtttcattcattaatttagagacraggtctccctgcagcctcgaacccctgggctcaagtgatcctccgccccagcctctccgtcccgagtagctgggacagcaggcacgtgccaccacacctg

SEQ ID NO: 298016 - DNA, 201 bp, Homo sapiens
gccagctcgcagggtgcgccgcagccagaggagccagcggcctccttgggtgtaaatgagaagggtggggcaggcggacgctcggggcggcggccactggkgcgcgaccgtccccgccccactcggctcctctaagagagggctgcctccctctgccttgtgttacgcggcgggtacctctagaggaatggcttcacccag

SEQ ID NO: 298017 - DNA, 201 bp, Homo sapiens
atctccaaaccttttcacccaaaattttagaaaaagaattaggaatttcagttgctcagcgtatccaaaagctcagttttggagaggataactcccctgtsatactctcaggaccacctcaggtacatgatgatacttattttaattaagtactggttatcacattatttgagataaagatttctagttttagtaccatgt

SEQ ID NO: 298018 - DNA, 201 bp, Homo sapiens
atatacgtcttattttatttcttttaatttaaaaaattatagatacaatgtaattaattcttaggtagagttgtctgtgagtttgtgtgcatgtgtgtgtrtgtgtatacttggttcctggaaaaaactaagaaaaactgtaatgttttctcaagcaaatttggattaagaaatatgtgaaggtacttttcttattttatc

SEQ ID NO: 298019 - DNA, 201 bp, Homo sapiens
gggcaaaatgaaaatatggggcttccttgttaaaaaattaagaatttcaagacaagagcagaatatgaaatcaagtgttgagccctatgtgactgcctacrtcacatactcatcaagccagccctgcttgctcccctaggatttccaagggtctacttttctatcctttcacgaaattaaaagccactcttcaaattaaac

SEQ ID NO: 298020 - DNA, 201 bp, Homo sapiens
tctagattagatcctattaattaaaactgggagtagggatttttagaatcaaaccccaaaatccttttttcctaaaacattccaaaacaatgagacacgtyagcttatataaattttattttcgtgcctcttaatacctttgagggatgtttattctccccactaccagccgtctggtgtttgaagcagtgaggaaaatgg

SEQ ID NO: 298021 - DNA, 201 bp, Homo sapiens
cagttcttcacatagaaaaaccacaagaagtataagttttacaggttctcttatttgaagagtcaacccagaagtgagaccaggtgctctaaacctgtgamatacaaaacctgtgaaattaaccatttgtctgtatctctgcttcccggctccttttctcccacaccacgggcccttatttcagtgactgaattataacac

SEQ ID NO: 298022 - DNA, 201 bp, Homo sapiens
tataaacttccaggtgatagtattagctctttcatcatccattatttatcacattttttcccttcaaacttattactatcctgagaaaaacgcagtgcacraacagtaattaagaggactgaagaccctaccctaagtggagtttcatgtctttgtaatttttcgatgctttcacacataatccaggagaaaacacgtcac

SEQ ID NO: 298023 - DNA, 201 bp, Homo sapiens
ctctgcttcccggctccttttctcccacaccacgggcccttatttcagtgactgaattataacaccatctaagtgacttgcaaaaaaaaaaattacaggaktgtgtgtgtgtgtgtgtgtgtgtgtgtgtgtatttgtgtataattagttttgttttctctagagtatgttatgattaatactataggtatgtaagaaatg

SEQ ID NO: 298024 - DNA, 201 bp, Homo sapiens
accaaaaccaagacatttgcatgaaactcttctaaaaaatgcatgtactcatattgtatattaattatatactaaatatagtatatgctcttttaagatawtgctctaataagctatcatataatggtaatagtgattactctttaacaaaagtaatgtcattttgtaaaaaaaaatcttttttttggtaatctcgtaaga

SEQ ID NO: 298025 - DNA, 201 bp, Homo sapiens
cttctttttaggtaacttgtctgaacgtaatctgcagaatttacctcccctgtgctgtgtagccactgatttctctgctcaagtgtttttttttttttttyccattcaaatttttattttaatactggcttctgggaagttgcccatgtctgtatagtttcatggttagccagtgattggcaaaggttttgctcaaacact

SEQ ID NO: 298026 - DNA, 201 bp, Homo sapiens
ttagatttgtatgtcactgagattttgtgattgtctgttacacataattgtggcagttgatattcatacaagtgtgtacagtaatatgcacaataaagcarcttcattattagaaaaaaatgaagtatattaagaaagtgttagcaaaaaagtgttagtgaaaaacaaactaattttgttctgacgaattgagtcccaaaa

SEQ ID NO: 298027 - DNA, 201 bp, Homo sapiens
attccacagatgagtattatctgttttcgtcccatttctttgtttctcctcttcttgttagaaatttctcaaattgtggtttcagggctctaacagtttaragtaggtgtgcttctctaatgattctaggaggactaactgtatttagagaaaatggtttttggttggttctaagtctgagaaaactgaagaagtgaaatt

SEQ ID NO: 298028 - DNA, 201 bp, Homo sapiens
ggaaaactggctagccatatgtagaaagttgaaactggatcccttccttacaccttatacaaaagttaactcaagatggattaaagacttaaatgttagamctgaaatcataaaaaccctagaagaaaacctaggcaatagcatttagtacataagcatgggcaaagacctcatgactaaaacaccaaaagcaatggcaac

SEQ ID NO: 298029 - DNA, 201 bp, Homo sapiens
aaattataggtgtagaagattgagctagatatattgccatgaataactgccctaggaatgtcatttttagacttttttgaaaatattgcctttatacaagwtgtggtacagaaaaaacgtcaattaactgagggctttattaaagatattatggaactatgaatgtatataaaacctttaacaataaatttgataaatttt

SEQ ID NO: 298030 - DNA, 201 bp, Homo sapiens
tactattttcaacaaagtcatttttattctatatgaggtaatacaaatatttgaattatttggtgggggactataattctttgtcttatttattatttctrctgactactcacatgctggcatttttcctcatgtgctctgtgattttggagtgtgtgttcatgtttgctagcctttatttgtggaactcctgcaaggtct

SEQ ID NO: 298031 - DNA, 201 bp, Homo sapiens
gtaagcatctttcttggggttcccaagaaagctatgaaatagggctaaactcagctaaaatatcttttgcctttcactctttttcttcctgcttagaacawtgggacaatgccaccagaaagacaaatgctataagctaagtatggcagagctgagtgctgtaaagagccttggtccctaatgacattattaggccatcat

SEQ ID NO: 298032 - DNA, 201 bp, Homo sapiens
cagagcaactcacgttggcctacagttgggcaaagtagtgtaacacaaagcctgttgacagagcctgggccgggcgtggtggctcatgcttgtaatcctarcactttgggaggccgaggctggtggattgcctaagctcaggagttcgagaccaacctgggcaacatggtgaaaccctgtctctaccaaaatacaaaaagt

SEQ ID NO: 298033 - DNA, 201 bp, Homo sapiens
ttaaacttattttgagataattgtagatttgcatgcagttttgaaaaataataatacataataataataccatattccctttatccagtttctccccatgrtaatatcttgcatacctacagtactgtatcacaactaggaaaatgacattgatactacccgctgccattatttagatactaccagttttacatgcactca

SEQ ID NO: 298034 - DNA, 201 bp, Homo sapiens
acatgtgtatacatgtgctgtgttgctttgctgcacccattaactagtcatttacattaggtatttctcctaatgctatccctcccccatccccccacccyacaatggccctggtgtgtgatgttccctgccctgtgtccaagtgttctcattgttcagttcccacctatgagtgacaacatgtggtgtttggttttctgt

SEQ ID NO: 298035 - DNA, 201 bp, Homo sapiens
atggttgaactaatttacactcccaccaacagtgtaaaagcgttcctatttctccacatcctctccagcatctgttgtttcctgactttttaatgatcgcyattctaactggcgtgagatggtatctcattgtggttttgatttgcatttctctgatgaccagtgatgatgagcattttttcatatgtctgttgactgcat

SEQ ID NO: 298036 - DNA, 201 bp, Homo sapiens
gtgtctgttcatatcctttgcccactttttgatggggttgtttgcttttttcttgtaaatttgtttaacttctttgtagattctggatattagccctttgwcagatgggtagattgcaaaaattttctcccattctgtaggttgcctgttcactctgctgatagtttcttttgctgtgcagaagctctttagtttaattag

SEQ ID NO: 298037 - DNA, 201 bp, Homo sapiens
tttagtagatacggggtttcactgtgttactcaggatggtttcgatctcctgacctcatgatccgcccgcctcagcctcccaaagtgctgggattacaggygtgagccaccgcacccagccccctttatttctttctcttgcctgattgccctggccagaacttccaacactatgttgaataggagtggtgagagagggca

SEQ ID NO: 298038 - DNA, 201 bp, Homo sapiens
tacttctgtcaactcgtcaaagtcattctccctccagctttgttccattgctggcgaggagctgtgatactttggaggagaaagggtgctctggattttaraattttcagcttttctgctctggtttctccccatctttgtggtttaatctacctttggtctttgataatcgtgacctacagatggggttttggtgtggat

SEQ ID NO: 298039 - DNA, 201 bp, Homo sapiens
gtatgaggtgtcagttggcccctactgggaggtgtctccaagttaggctacgtgggtgtcagggaagaggcagtcagtccactctcagagctcaaacaccrtgctgggagatgtcccatgtcttcagagctgtcagacagggatgtttaagtctgcagaagtttctgctgcctttagttcagctatgccctgccctcagag

SEQ ID NO: 298040 - DNA, 201 bp, Homo sapiens
agttccatctcggactgctgcactagcagtgagcaaggctccatgggcatgggacctgctgagccttgcctgggatataatctcctggtgcgccgtttgcyaagaccattggaaaactgcaatatttgagtgggagtgtcccgtttttccagatacagtctgtcagggcttcccttggctaggaaagggaaattccccggc

SEQ ID NO: 298041 - DNA, 201 bp, Homo sapiens
gttagtattttgtttatggtttttgcatcaatgttcatcagcaatattggcctgaagttttctttttttgttgtgtctttgccagtttttggtatcaggaygatgtttgtttcataaaatgagttagtggggagtccctcctcctcagttttctttggaatagtttcagtaggattggtgccagctcttctttatatgtct

SEQ ID NO: 298042 - DNA, 201 bp, Homo sapiens
atggaattaacagcagatactgctggagaaaaaattagtgcactagaagtcagagcaataaattattcagaaagaaacagagaaaaaataataaacacagmatctgtgagctatgagacaacttcaggcaggctaatacatgtcttattcaagtccccaaagaagagaagagggtgggagatgtaaaaaatatgtgaagaa

SEQ ID NO: 298043 - DNA, 201 bp, Homo sapiens
tatttggatcttctttttttctttgttaatctgattagtggtctatcaatcttgtttattctttcaaagaaccaacttttgatttcattgatctttttgtrtggatttttgggtctcagtgttattctgttatgctctgattttggttatttatttttttatgctagctttgcagtcagtttgctcttgtttttctagttc

SEQ ID NO: 298044 - DNA, 201 bp, Homo sapiens
aaagagcttggcaaatcccaggtacaataaacgtgaagaaaactataccaaggagtaacctaatcagagctcttaaaaccagtgataaacaccatcccttsaaaaagacatactattgcagaaaaacaagcaaagccaacaattttgaaaatattggaagccagaagacagtggtctgacatcctcaaataaagtaaagaa

SEQ ID NO: 298045 - DNA, 201 bp, Homo sapiens
ttgaaatgtcttaatttggtatataatgtcaagatgcccagtgatatttaggattttaatttcttaatctcagcaatataaaatatattatgctcttaatrttaattataatgtttattcttaaacattttatttaggaaattatgatgtgatgaccccaatggttgatatacttatgaaactttttcgaaatatggtgaa

SEQ ID NO: 298046 - DNA, 201 bp, Homo sapiens
tctcagtgttattctgttatgctctgattttggttatttatttttttatgctagctttgcagtcagtttgctcttgtttttctagttcctcttcatgtaaygttagattattaatttgagatctttctaacattgatgtaggcatctagtgctataaactttactcttatgacattgcttcagctgcgtccaaatattttg

SEQ ID NO: 298047 - DNA, 201 bp, Homo sapiens
gacctacattacccataaaattagaggaagtccaacaggcaggaagagcacaccagatggaaatacagatctacacacagaaatgaggagcaccagaaatrtgagtatatttaaaagctttttttgtttcttatttctaagtgtctttttaaaagttggctatataaaacaaaaataaaaattattaaaaatatattgtag

SEQ ID NO: 298048 - DNA, 201 bp, Homo sapiens
ttctgcctaaactacctagattgttctgcattattcctagaatgacagaatgatagaaaactcaattcttttaaaaatctgcttgcactttttcttacacygtctgtgttaaaactgtcatgttttattttaattactattttcaacaaagtcatttttattctatatgaggtaatacaaatatttgaattatttggtggg

SEQ ID NO: 298049 - DNA, 201 bp, Homo sapiens
ttacctactattttttttttttctgggagaaaggtatgctctgcatttcagccttgttttataaaattgattcatgttaacaattttagttcacaaagagwgttacacttttgatacatagtggtcaggttctcacaatttggtgatatttgggtgtccgccctttcttttctaagttgtatttattatatattagatata

SEQ ID NO: 298050 - DNA, 201 bp, Homo sapiens
caaagtcctgggctcaagtgatcttcctgccttggcttcccagaaagttgggattataggtgtgagccactgcaccagacatctatgccttttaagttggrcatttagactgttgacattcaaagttaatattggtatgggacattttgatcctgtcatcatgaatatgtactttcaactatgggtaaacattctagatgt

SEQ ID NO: 298051 - DNA, 201 bp, Homo sapiens
acatctatgccttttaagttggacatttagactgttgacattcaaagttaatattggtatgggacattttgatcctgtcatcatgaatatgtactttcaamtatgggtaaacattctagatgttacctaataaaatctcataagcttttcttgtgatttcatcagagtctaaatttgtgattattattgcaaagaaaaatg

SEQ ID NO: 298052 - DNA, 201 bp, Homo sapiens
aagcttattttatgtacaaaacaattattaacagcttacaaattattgagagagtggattagcttggtcattttatgatgtaacatattctttttgagtcmacagaataaaatgtgtggttatttgttttgtggtgttatttcagtaatagataatagctataaaagttggtacataaaagtggagggctatacaacaaaa

SEQ ID NO: 298053 - DNA, 201 bp, Homo sapiens; identical to SEQ ID NO: 61921

SEQ ID NO: 298054 - DNA, 201 bp, Homo sapiens
acagaataaaatgtgtggttatttgttttgtggtgttatttcagtaatagataatagctataaaagttggtacataaaagtggagggctatacaacaaaamcccaaatatgtggtatttaggcttttgggcagtagagggctcagaaaactgttagcagaggctggagtaacaatgaggaaactgctttaagaagttctta

SEQ ID NO: 298055 - DNA, 201 bp, Homo sapiens
cggttggcagcggcgggatggagaagctgggggtggagccggaggaggaaggcggcggcgacgacgaggaagacgccgaggcctgggccatggaactggcrgacgtgggggcggcagccagctcgcagggtgcgccgcagccagaggagccagcggcctccttgggtgtaaatgagaagggtggggcaggcggacgctcgg

SEQ ID NO: 298056 - DNA, 201 bp, Homo sapiens
cgccaaagctattaatcctaaatcaaagttgattctgaaaatcatataacttaaaacctattctaagatttaatgtccaaaaaaattagtaatataattaygcataccacttgaacctgggtgttttataatattgaattcgtgcaatatagtatatgccttgaagctagctcacagttctgagaggttttttttgtactc

SEQ ID NO: 298057 - DNA, 201 bp, Homo sapiens
tttttttgtactctaatgacaaattttaaaatgttgactatttttaaaaacaaagttgtaataaatatttttggataaaatttcagatttatctttatatygtagtttattctaagatagtagtaataataggagctgggtttagtttgaccaaatactgatttaaatactcagctctttgtccaaagtgtgcttttaatt

SEQ ID NO: 298058 - DNA, 201 bp, Homo sapiens
tgacatttcatctctaaatacttttagcgttagtctctttgaggttaggatggtttcatgtcattccaacactgttttacacctaaagcaaatttattttkatataattttcttacacttttcataaaagagctctaaaactgtgtacaggtcagagattgtttctagcagcatatactgctagtgcgtggttaagattta

SEQ ID NO: 298059 - DNA, 201 bp, Homo sapiens
acagttttgtaagtacactcttttttgttcagttttctaagtatactcttatgggatttgtgtggttacattacaaatctaagtgcttgtctttttgatayagtttagagattcttttgggtgatattgtttaggtgattaacttgtttataatacctatcttatggtttctggccttaaatatgctgtgatctaagaaga

SEQ ID NO: 298060 - DNA, 201 bp, Homo sapiens
ttcatctccagcttttggttatactatctgagatgtcctcctttttccatcattatcttttcaaaattctttctaagaaatgatcatttttggaaacttaytgattatgagtttagacatgtgattttgctaatggaatgttggactttagaaagtgcttacaatatttccacttcctcccttgctcccttgccttcttat

SEQ ID NO: 298061 - DNA, 201 bp, Homo sapiens
ctcagacttaagagataaagttagatttgtatgtcactgagattttgtgattgtctgttacacataattgtggcagttgatattcatacaagtgtgtacartaatatgcacaataaagcaacttcattattagaaaaaaatgaagtatattaagaaagtgttagcaaaaaagtgttagtgaaaaacaaactaattttgttc

SEQ ID NO: 298062 - DNA, 201 bp, Homo sapiens
agaaaaaaatgaagtatattaagaaagtgttagcaaaaaagtgttagtgaaaaacaaactaattttgttctgacgaattgagtcccaaaataatctttaartggtggataaattttaaagcagaacgtattaaaattatttattgggctggatgcagtagcttatgtttgtaatcccagtgctttgggaggctgaagcagg

SEQ ID NO: 298063 - DNA, 201 bp, Homo sapiens
gtcttgataatttctattttttgctagcttatgagatctaaactatattgtcgtttacttttaatattgcaaagatctcatattagtaaaatttcagctgygttcatgtttgtattattagtattttcaatccttaatttctttgtagaaatcttttaaaccaattcacaattttctgatgatttttttcattaaaagtat

SEQ ID NO: 298064 - DNA, 201 bp, Homo sapiens
atttctcctaatgctatccctcccccatccccccaccccacaatggccctggtgtgtgatgttccctgccctgtgtccaagtgttctcattgttcagttcmcacctatgagtgacaacatgtggtgtttggttttctgtccttgcgacagtttgctgagaatgatggtttccagcttcatccacgtccctacaaaggacat

SEQ ID NO: 298065 - DNA, 201 bp, Homo sapiens
cttgataatttctcgataagactatgactatttatatttagttaaatataaacatttttgttttggtaagtccagtaatgtctgaatatctgaaagtattrgaggagttatatggtaagaaagataagatttatagaaaaatctaagttcagaattgttaaattatttttatttgtcatattgtttggataccagtattac

SEQ ID NO: 298066 - DNA, 201 bp, Homo sapiens
acattttaccttaaataggagacaagttaattaaatatccaattttcctatttgtaagacaaagaaaaaacttatgtttggctttctgatttcaagatttktatctttcttgggatatgtattttattaaaatgtgtaatttggtgatttgtatgtttatgaagtttaggggtggctgaaagtctcacattcttctaagag

SEQ ID NO: 298067 - DNA, 201 bp, Homo sapiens
tgtatagattcatgtgaccacgccacagtcaacacacagaacaggtttatcacaaggatccctcctgccaccctttcaaagcgaaagccactttctttctkctcctcccccacctccctaaccccagaaaccactaattctgttcatctttatcattttgtcatttcaaaaatgttaaataaatggaagaatccactattt

SEQ ID NO: 298068 - DNA, 201 bp, Homo sapiens
aagcgaaagccactttctttctgctcctcccccacctccctaaccccagaaaccactaattctgttcatctttatcattttgtcatttcaaaaatgttaartaaatggaagaatccactatttaaccttatgagattggctttttcattcagtattattcctctgagacaattccagttgttgtgtgcatcaatagtttgt

SEQ ID NO: 298069 - DNA, 201 bp, Homo sapiens
tcagggtttcagtttcttcctggttcaatcttgagatgttgcatgcttccaggaatttattcatttcctctagattttctagtttgtgtgcatagaggtgktcgtaatggtcactgggtatcttctgtatttctgtgggatcagttgtaatgtcatctttgtttatttctgattgtgtttatttggatcttctttttttct

SEQ ID NO: 298070 - DNA, 201 bp, Homo sapiens
agtgaaatacatttaatacatctatgaaacatcatagcttagccaggcctacctcagacatactcagagcaactcacgttggcctacagttgggcaaagtmgtgtaacacaaagcctgttgacagagcctgggccgggcgtggtggctcatgcttgtaatcctagcactttgggaggccgaggctggtggattgcctaagc

SEQ ID NO: 298071 - DNA, 201 bp, Homo sapiens
cctgctatttaaaacaatgatggttttaatttcaataaatatatttttcatttgattctttttaacttcccgtttactcattacagtcccttgtaagtctrtttctaatttttaaaagtcaaatatatgatatttttgataatttcaatattttaagtctttataagtctacatttaaggttattattgcatatcattgtg

SEQ ID NO: 298072 - DNA, 201 bp, Homo sapiens
tccaagtcaagaaataaaacatatcaagtaatcaagaagtccagagttttctttggggtttcattacgtaggcatgatttattaaaacctttactgtgtgmttgaacttaatctccagtttccctcctctgtctggacatcaggctggctcaaagtctcaacaccctaatcatggttgtttttttgaagtgagctacctcc

SEQ ID NO: 298073 - DNA, 201 bp, Homo sapiens; identical to SEQ ID NO: 61920

SEQ ID NO: 298074 - DNA, 201 bp, Homo sapiens
gaatgttacaagtccttttgattatccttaaacatctaaaaatgctaccctctttccaaacaacacaaaggtattgaaataacattaattctaattaaatyccacaagttctttattaaatctccaaattggatattattagtattttatatagtcaatgtttatttttttgatgggacatggtgggggcttacctttttt

SEQ ID NO: 298075 - DNA, 201 bp, Homo sapiens
ttgcatgtagcctcctagtcaactagggttgtaaggggagcctatgtagtccctctttggttctctcatttccaaatctcctggtgacatatctggctggwccactgatctgtccttcacccgaaccacgactgaagcttcagactagcagagctgtgggatcttcccattcgtttcctatcaaatttgctcattttactg

SEQ ID NO: 298076 - DNA, 201 bp, Homo sapiens
tacaaatttatttggatttattttttgccatcttattttttaatatatttctttttctatgttgtgcttctttcccacctttatctctcctcctatctttkgggatcagttgggttttctatttaatcatatattttccctttactgatttggaatgtgaatgttacaagtccttttgattatccttaaacatctaaaaat

SEQ ID NO: 298077 - DNA, 201 bp, Homo sapiens
atgtgcatgtagccctttcagtaaggagtgtatggggagcttgggccctctgtggccttccatttatttgcatgtagcctcctagtcaactagggttgtamggggagcctatgtagtccctctttggttctctcatttccaaatctcctggtgacatatctggctggtccactgatctgtccttcacccgaaccacgactg

SEQ ID NO: 298078 - DNA, 201 bp, Homo sapiens
gtacaaatttatttggatttattttttgccatcttattttttaatatatttctttttctatgttgtgcttctttcccacctttatctctcctcctatcttktgggatcagttgggttttctatttaatcatatattttccctttactgatttggaatgtgaatgttacaagtccttttgattatccttaaacatctaaaaa

SEQ ID NO: 298079 - DNA, 201 bp, Homo sapiens
aatgaattaagaggtctcttttctccaagatctagtgttttgtactaggagaactctaaaaagtatctattccactgtagtgccaaagtacaaatttattkggatttattttttgccatcttattttttaatatatttctttttctatgttgtgcttctttcccacctttatctctcctcctatcttttgggatcagttgg

SEQ ID NO: 298080 - DNA, 201 bp, Homo sapiens
actttgaattattttatattaactgttttatattaactgttaatacagtaatattttatattaactttctagtgagtacaatagcttgcagataaaaaacwgttaatataaaagtgaactaaatggctcaaactaaggacaagaggtaagttagtgaagaatgtattgaatatttatttgactgtacactgataataatta

SEQ ID NO: 298081 - DNA, 201 bp, Homo sapiens
agaaaacaaagtaaatggttttggccagcttaaaaagagaaagcaaaatagttaaaaatacatttcatagattgagaatgtacgggctatgtcacagttaygctacttattttgtggttttaagttagtctcaacatctttgggcctcagaatcaacttttttatgggatcttttttctctgtttttaagattatctcttt

SEQ ID NO: 298082 - DNA, 201 bp, Homo sapiens
atatagggtttgatactgtccatggtttcaggcatccactgaaggtcttagaatgtatcccctgtggataaggggggactactgtataaattatagaactyaaagataagattgatatatttataatattttaattagctttgttttaaggagaaaagctattttaacattgtatgcatttctttttatttaggtattggc

SEQ ID NO: 298083 - DNA, 201 bp, Homo sapiens
ttgattattatttaatgccatcattatcaactacttcacgctctggcaagcacagttttgtaagtacactcttttttgttcagttttctaagtatactctyatgggatttgtgtggttacattacaaatctaagtgcttgtctttttgatatagtttagagattcttttgggtgatattgtttaggtgattaacttgttta

SEQ ID NO: 298084 - DNA, 201 bp, Homo sapiens
tttgatactgtccatggtttcaggcatccactgaaggtcttagaatgtatcccctgtggataaggggggactactgtataaattatagaacttaaagatawgattgatatatttataatattttaattagctttgttttaaggagaaaagctattttaacattgtatgcatttctttttatttaggtattggctataaaac

SEQ ID NO: 298085 - DNA, 201 bp, Homo sapiens
cctggttcaatcttgagatgttgcatgcttccaggaatttattcatttcctctagattttctagtttgtgtgcatagaggtgttcgtaatggtcactgggkatcttctgtatttctgtgggatcagttgtaatgtcatctttgtttatttctgattgtgtttatttggatcttctttttttctttgttaatctgattagtg

SEQ ID NO: 298086 - DNA, 201 bp, Homo sapiens
agtataagttttacaggttctcttatttgaagagtcaacccagaagtgagaccaggtgctctaaacctgtgacatacaaaacctgtgaaattaaccatttrtctgtatctctgcttcccggctccttttctcccacaccacgggcccttatttcagtgactgaattataacaccatctaagtgacttgcaaaaaaaaaaat

SEQ ID NO: 298087 - DNA, 201 bp, Homo sapiens
acacaaaggccgttcaataaacattgaatgaatgaatggtttggctagggccagggtggggagttaaagtgagaggagggtatatgttatagagaacagtsgtagaaggaactctccgtgcaagtaaattaagggaaagatggacaccagaaaggcaaggtgatgggcctataagcatactggataatggaagaagtccat

SEQ ID NO: 298088 - DNA, 201 bp, Homo sapiens
tggccacaaagagttgtatttgttgagtaggttagaaacatgtcagataatagctacaggcacacagcagcagcagcgatatttaaaagatatcagatatstaaattagtctgttattcttgtgttctagaaaatgaaagacactcatatggaagattttcccaaagacaaagaaacaaaccgggatttcctaccaagtgg

SEQ ID NO: 298089 - DNA, 201 bp, Homo sapiens
tatgtgtatgtttttttgaaaaatacccttaggtgaacttgcttttctaggccgccattcttttatttatagaattgaaagtttggttgcatgattgttayaatcttcccaggtctccaaatgcatatttacctctgtctcagtgctatctaggaaggaaacctcttcctggaatagtgggtagagattcacaaaatagtg

SEQ ID NO: 298090 - DNA, 201 bp, Homo sapiens
tataaaatattaaggctacaatggactttccaaaacatctaggccaaggtcctcattttaaagattaggaaactgatttccatgaggagttcggtgacctrtttaggtcatggggcaagtttgtatctttgaagattaaatacccaagtttttataggccatcaatatgttgaactacatttctgtggtattgctagggaa

SEQ ID NO: 298091 - DNA, 201 bp, Homo sapiens
acttttttggagttcatattgtgttgatgtttacggagttatatttgactatgtttatatttttatggtgcttgaaactaaaggatttaaatgaaaaactrtatagaaaaattatgcaagttagagttgaaagtgtctttaaatttttattttatataaatataaactagtactatatcttgatgatgttgggttttgtta

SEQ ID NO: 298092 - DNA, 201 bp, Homo sapiens
gctactccactccagcctgggcaacagtgagaccctgtctcattaaaactacagcaacaacaaaaaccttcagggacgggataattagggatttgtcctgygacctaaaatcagtcaatatttagtgatccaccagcttcgtgcatgattctgtatttaacttgcttttctatttagtgcttaaagccttatcctttattt

SEQ ID NO: 298093 - DNA, 201 bp, Homo sapiens
aatagacaaaccactatttagtaaatgtgggttgccttaaaaacaattattttttactaaattgttcatgcctataattaactcaatttaaaatacttttktgtttgtttagtcagtataattttagtaaccttttcattttcatttaagtttaaagtgagaacaggatagtgtatggaaatagtgaattaatgctctctt

SEQ ID NO: 298094 - DNA, 201 bp, Homo sapiens
catgtgcctgcagtcccagaggccgaggtaggaggattgcttgggcccaggaggtcaaggctgtactgagctgtggtgtgctactccactccagcctgggmaacagtgagaccctgtctcattaaaactacagcaacaacaaaaaccttcagggacgggataattagggatttgtcctgtgacctaaaatcagtcaatatt

SEQ ID NO: 298095 - DNA, 201 bp, Homo sapiens
cttttagctgacacatgagctactagtacctttcccatgattcttttgttaaagtatttacattttcttcattttgaaatagtattgaattttgatagcartattgatagatttgactactgatttcatagttgtaaagttaacagtgtggcaatagaaaggcagaggccagtcacattttcagacgactaaaacaaaacc

SEQ ID NO: 298096 - DNA, 201 bp, Homo sapiens
ctgaggaatctcaaattattattacctttggttccatgattatatttttgggcattacctgatatatgaaaaaactttatataaaaataatgttgtttatratatcaaaattttagaaacaatgtctaatagagaagtggacataaccttttttttctacatgtttgtattttacatattttaggtgaacattactcttac

SEQ ID NO: 298097 - DNA, 201 bp, Homo sapiens
ccttaaatatgctgtgatctaagaagaaaacataagcatcactggataaaagagagaaccattatggaggttctctattttggaattgttaacacattttrtagtatataaaaatatgatggattagctcataagtattaaaatatttgcagatattagaaatcacatctttttgtcttttagctgacacatgagctacta

SEQ ID NO: 298098 - DNA, 201 bp, Homo sapiens
gtctcactctgtagcccaagctgcagtgcagtggtgcgatcttggctcactgcaagctttgcctctggggctcaggtgattctcctgcctcagccttccawgtagctgggactagaggtgtgcgccaccatactcggttaatttttttgtatttttagtagagacggtttcaccatgttgccctgggtggtctcgtatgct

SEQ ID NO: 298099 - DNA, 201 bp, Homo sapiens
gttcacttgctgctaccctcttgtgcccactttggcttaataaatcccaatccagcctagctgatttactgaagaacaaagggatgactagtttttgctaygccaaggtgagtctaggatcttaaaacttttctaagggtgccaaggagttagaatcaggggacctaagttttttctcctgaaggcatttctgagtagtag

SEQ ID NO: 298100 - DNA, 201 bp, Homo sapiens
gagtgtgggcttttgcccactgcctcaaatcaggtctgtcccctctggaagtgaaactgctggcttttgcagccttcaccctgtaccaactgagctatgtraagggacattcgaacagtcccagacagtgaagctgctatctcctactttcttagctaacatatagcagctgttcatagatcagtacttctcactttgttt

SEQ ID NO: 298101 - DNA, 201 bp, Homo sapiens
gaaagattttggaagcagttcttacagtgctttatagctggtcatttttgcttcactaccaagtgtaaattttacaagcctcatttaataagtggtgaatstgagaatagtgtagtcggcagaacaaatgaagagaaagcagaataaatgttacttttctgtgctggttagtagcttagtttgctggtcagatttcttttt

SEQ ID NO: 298102 - DNA, 201 bp, Homo sapiens
actgaagcttcagactagcagagctgtgggatcttcccattcgtttcctatcaaatttgctcattttactggcaacactgctgagtgtgggcttttgcccrctgcctcaaatcaggtctgtcccctctggaagtgaaactgctggcttttgcagccttcaccctgtaccaactgagctatgtaaagggacattcgaacagt

SEQ ID NO: 298103 - DNA, 201 bp, Homo sapiens
tcacacataatccaggagaaaacacgtcactctgcattcttccttcacaggtaccatgttttaaggaactgtcagttgctcagagataataagcagcctgmatttctttttatttctttgcatattgtgcaggagttcatgatcaagtgttgcccacaccaaatgcttcatccagagtcatagtacatgtggatctggatt

SEQ ID NO: 298104 - DNA, 201 bp, Homo sapiens
gggaagttgcccatgtctgtatagtttcatggttagccagtgattggcaaaggttttgctcaaacactagagtctggaagccgtctacctctgccagtggrtaagtgtatgggttggagagggcttaaaaaatttaggccattttcccatactgcccaaagtaatttataggttcaatgccatccccatcaagctaccact

SEQ ID NO: 298105 - DNA, 201 bp, Homo sapiens
taatcctgctgccatgggagctaaaaatagcccacacttgtacccactggttgtcttttgccattttgtatttcagtttttgttggtttgtttgttttaartgtaagggcatgctgcttagaataattttcaagctgtgtgaaaatcaacgtcatttcaacttttctgccccttctggtttacactaagagctactataaa

SEQ ID NO: 298106 - DNA, 201 bp, Homo sapiens
atcaaagaactattcagtctttcaatttagtgaatatttattggtggtctgttatgtcctagacactgttttaggcactggcgatttagcattaaaccagrtaatcctgctgccatgggagctaaaaatagcccacacttgtacccactggttgtcttttgccattttgtatttcagtttttgttggtttgtttgttttaa

SEQ ID NO: 298107 - DNA, 201 bp, Homo sapiens
tacgatacagcctttttctaatgtgtcttaattagcatatcatactctttgaattgcataattaatataacacgtttaactggaagatatttaaactagtraccatttaaggtattttatcctagttaagcagccatcgagaagttttgtcacaaagcaataagagatagaaaaaattatttactacagaactatttaatt

SEQ ID NO: 298108 - DNA, 201 bp, Homo sapiens
tttattgcttactattttgttatctgctatatgtataattgtcatatttaacaaaatctggcacctttagataaatgagatgttacataatttaaaaaggyaatacttttctaattccttatttccactttctctttatttttagagtatgccaagatggaaggaagcctcatacagtgagattaataatccgtcggtatt

SEQ ID NO: 298109 - DNA, 201 bp, Homo sapiens
ctattttattgaaaactgaacctcatagataatgtattgtagcaactctggatttacaattttttcttgtagggttttttcttttttgtttcctgtacttytttttaggtaacttgtctgaacgtaatctgcagaatttacctcccctgtgctgtgtagccactgatttctctgctcaagtgttttttttttttttttcca

SEQ ID NO: 298110 - DNA, 201 bp, Homo sapiens
aggtcacagatatttttttctgttttctgttagaagttttatagtttttaagctttatgtttaggtccattttgagttaatttttttatgtgtggtatacrgtaagggtcttcattctttgctttgcatgtgggtatccagttgttcctgcatcatttgttgaagactattctccacccactgaattaccatgacatcttt

SEQ ID NO: 298111 - DNA, 201 bp, Homo sapiens
agagcttgacatctaaacattcagagttttagtgcatagactttgtgatgattatttggatactcagggacctttattgcttactattttgttatctgctrtatgtataattgtcatatttaacaaaatctggcacctttagataaatgagatgttacataatttaaaaaggtaatacttttctaattccttatttccact

SEQ ID NO: 298112 - DNA, 201 bp, Homo sapiens
taaactcagtacatttgtcaaaactaggaaattaacattggtataatactattaattgaactacacgctttattaatattctaccagtttttctgctaacrttcattttctgttccaggatcccaaccagaatattgtattgtattttgcctgtcttgtttttagccagtgttgagagaaggagtcgcctctgtcattccc

SEQ ID NO: 298113 - DNA, 201 bp, Homo sapiens
agatccccctagtgttaacataaactcagtacatttgtcaaaactaggaaattaacattggtataatactattaattgaactacacgctttattaatattytaccagtttttctgctaacgttcattttctgttccaggatcccaaccagaatattgtattgtattttgcctgtcttgtttttagccagtgttgagagaag

SEQ ID NO: 298114 - DNA, 201 bp, Homo sapiens
aattaatataacacgtttaactggaagatatttaaactagtaaccatttaaggtattttatcctagttaagcagccatcgagaagttttgtcacaaagcartaagagatagaaaaaattatttactacagaactatttaattttttatgtttttgcgatagggtcttgctctgtcacccaggctggatggcagtagtgcag

SEQ ID NO: 298115 - DNA, 201 bp, Homo sapiens
tttgctgtcgtgtgcaatgtggcactcaaatgtcttgagcagagccatgcagctcattgttggctgcatgcagctggggctggctgtatgactggcctccmgtgatatgactcaggctgggcctgcgagtatgctagtgaaactgggtcatttgcttcagctaaatagaagactaccctgaaatgcctaacctttggagac

SEQ ID NO: 298116 - DNA, 201 bp, Homo sapiens
ctcaaattgtggtttcagggctctaacagtttagagtaggtgtgcttctctaatgattctaggaggactaactgtatttagagaaaatggtttttggttgrttctaagtctgagaaaactgaagaagtgaaatttcctccaactttgctgtcgtgtgcaatgtggcactcaaatgtcttgagcagagccatgcagctcatt

SEQ ID NO: 298117 - DNA, 201 bp, Homo sapiens
cctgtggcaattgcaaagcctctgccctcaacctaatagttagttgcatttcattaagttagtaccatgctaaatacaaatacatgcgaaatacaaaaccygtgaaattaaccatttatctgtgcctctgctaatagttacttgcatttcattaagaagaaaaaaatgcaaagaggaataatactgtcataattctaaaac

SEQ ID NO: 298118 - DNA, 201 bp, Homo sapiens
ttgtttgtttgctttctggctcatagttgtattctggatggtaaatgttagatatgacttatggataaatgtgtggtggtgcgtataggaatcagttaggytacctaatatgtacacttaatttattttaattgctctagtggcagcctttttgtatattaataataatcatgatttctgaatatttctggaatattacat

SEQ ID NO: 298119 - DNA, 201 bp, Homo sapiens
atactggtgcaaaacattcttacttggctttactttcgagttcttgtatcttttttttttttttttaacaggctttctcctttctcacttattgccaaatkgccaaccttcttttttttctgctgtgaaaaatctgtcactctactttaatagttccccctacatagccatctcctccaacttactgcttttactgtgcaa

SEQ ID NO: 298120 - DNA, 201 bp, Homo sapiens
gtgcacaaacagtaattaagaggactgaagaccctaccctaagtggagtttcatgtctttgtaatttttcgatgctttcacacataatccaggagaaaacwcgtcactctgcattcttccttcacaggtaccatgttttaaggaactgtcagttgctcagagataataagcagcctgaatttctttttatttctttgcata

SEQ ID NO: 298121 - DNA, 201 bp, Homo sapiens
ggtagtgcattctgaagaacaatgtcaggttgtaataaactgaggactatatactggtgcaaaacattcttacttggctttactttcgagttcttgtatcttttttttttttttttaacaggctttctcctttctcacttattgccaaattgccaaccttcttttttttctgctgtgaaaaatctgtcactctactttaat

SEQ ID NO: 298122 - DNA, 201 bp, Homo sapiens
tactcagagcaactcacgttggcctacagttgggcaaagtagtgtaacacaaagcctgttgacagagcctgggccgggcgtggtggctcatgcttgtaatcctagcactttgggaggccgaggctggtggattgcctaagctcaggagttcgagaccaacctgggcaacatggtgaaaccctgtctctaccaaaatacaaa

SEQ ID NO: 298123 - DNA, 201 bp, Homo sapiens
tgctgtgtatataaaattttttaaaaaataaagacaaatatgttaaaagtaaaaattggataaaagacacgagtctaacattaatcaaaagaaagatgtartagctttcaacaggaaaactgcttgttagagcaaaggaatttaatcagaaaatcatttcaaaatgataaacgagtcagttcatcaggagaatgcaatagt

SEQ ID NO: 298124 - DNA, 201 bp, Homo sapiens
acacctacatagtatacttggaggcatccccaagagcctagaatctgcccttcccacttttccaacaatgccctaagtacctaattagctgtaataaattyacccctttctgcctaaactacctagattgttctgcattattcctagaatgacagaatgatagaaaactcaattcttttaaaaatctgcttgcactttttc

SEQ ID NO: 298125 - DNA, 201 bp, Homo sapiens
ttccaacaatgccctaagtacctaattagctgtaataaattcacccctttctgcctaaactacctagattgttctgcattattcctagaatgacagaatgrtagaaaactcaattcttttaaaaatctgcttgcactttttcttacactgtctgtgttaaaactgtcatgttttattttaattactattttcaacaaagtc

SEQ ID NO: 298126 - DNA, 201 bp, Homo sapiens
agctgtaataaattcacccctttctgcctaaactacctagattgttctgcattattcctagaatgacagaatgatagaaaactcaattcttttaaaaatcygcttgcactttttcttacactgtctgtgttaaaactgtcatgttttattttaattactattttcaacaaagtcatttttattctatatgaggtaatacaa

SEQ ID NO: 298127 - DNA, 201 bp, Homo sapiens
tgttgtttttaaagctataaacctgcttgacgtcttgcacatcagactacttgttggatctcagattgcagcagagatgcgggaagccatgtataatcagytggggctcactggctgtgctggagtggcttctaataaactgttggcaaaattagtttctggtgtctttaaaccaaatcaacaaacagtcttattacctga

SEQ ID NO: 298128 - DNA, 201 bp, Homo sapiens
tgaatatctgaaagtattagaggagttatatggtaagaaagataagatttatagaaaaatctaagttcagaattgttaaattatttttatttgtcatattrtttggataccagtattacttacctttaaacctttccgttttgtgggattgttattattatatatggtaccttctgcaatacctagctatttagaagtaat

SEQ ID NO: 298129 - DNA, 201 bp, Homo sapiens
agacagggtcttgctctgcaccaaggctgaagtgcagtggtgctgtgatagctcactgcagcctttgtctcccaggctcaaacaattcttctgccccagcytcccgagtagctgggacagtaggtgcatgctaccagacctggctaacttttttgatatttaggatagacagggtctcaaactcctgagctcaagcaatcc

SEQ ID NO: 298130 - DNA, 201 bp, Homo sapiens
gggaaaacgaaagtagtctttcattttgtttttgttgttgttgttgagaaggggtctcactctgtagcccaagctgcagtgcagtggtgcgatcttggctyactgcaagctttgcctctggggctcaggtgattctcctgcctcagccttccatgtagctgggactagaggtgtgcgccaccatactcggttaattttttt

SEQ ID NO: 298131 - DNA, 201 bp, Homo sapiens
cagtcttattacctgaaagttgtcaacatcttattcatagtttgaatcacataaaggaaatacctggtaagacaaatatatttgaaaagtacatatacgtyttattttatttcttttaatttaaaaaattatagatacaatgtaattaattcttaggtagagttgtctgtgagtttgtgtgcatgtgtgtgtgtgtgtata

SEQ ID NO: 298132 - DNA, 201 bp, Homo sapiens
ctgtatatgtaacctcatgtaagaattgtatatacaacctaggccaggcatggtggctcacgatgtttgtaaactcttacttgctcatgatgttttatcartcttaatatggctagtgctagtaacactcaggatagcttatttgagcacagtaaatctctgtcaggctaatgaaaggggagagtagctcagagtccaaaa

SEQ ID NO: 298133 - DNA, 201 bp, Homo sapiens
atgtatttgcctcataatactataaatatcaaacattaccaggaagatttattacacactcattatgtgcacagcacgattttttgtcattaaaaggaaasagagcttccaccctcaagggatttccagagggggtcaagtaaaattatatttctcttctctcttacaaagttccactggtaagtaaaggcaggtggacct

SEQ ID NO: 298134 - DNA, 201 bp, Homo sapiens
gttacttaatcctctcacctgtggacaggtttgccttttatcttaactgatttgaaagttatattgataagcaaactctctagttaaaaccaatttttgartgcattaaataaataccaactttctcatcaaaacctacaaagtaccatgtaaaatgacatggcatgaagacaacagtgagaaaactgtagccatcacata

SEQ ID NO: 298135 - DNA, 201 bp, Homo sapiens
tttttctattcttatgacttatttttcttttgatttcagagaacactttttacagttggctagaaggtaattagaaactttaaaataaatttcaatgatgrtttttttctcatgagattaattttatgtctacaagattcacatatgaaattttatttctaagtcactgctttttcttaggtctctgtgtagaaaaaagag

SEQ ID NO: 298136 - DNA, 201 bp, Homo sapiens
tgaaacaatagggccagtagtggaagggatgaggatcgggggagaagggaggagaggtggcactgatgaatagacatgcagagaaaattagaggcaagcayatagacagacatacacagagaaacagcatgagagggaaaagaaaaaaaatggagaaagaaaaggggagataaatggtgcaaatcattcattcaacaagtg

SEQ ID NO: 298137 - DNA, 201 bp, Homo sapiens
gactgatttactatttaaattctgtattttgacctcctgtaaaacactttaaccagaacgttatgaggctgggtcaacctaaggcaatgctaaagcctttyaaagaccaagcagcaggctggtacttaactgaatccataacctttcttcttcctttcgagaaattgcaattaagacttggaccgttaggttaaataatct

SEQ ID NO: 298138 - DNA, 201 bp, Homo sapiens
atagtgaaacccccgtctctacaaaaaaaattaaaaaaagaaaaaagctgggtgtgatggtgtgcgcctgtggtctcagctacttgggacactgaggtggsaggatggagtgagcccaggagttcgagaccagcttggagacccggtctgtattagtccgggttctctagagggatagaaccaatggaatatatatataaa

SEQ ID NO: 298139 - DNA, 201 bp, Homo sapiens
tttacggaaagaagatgtccaatgtaacattttcagctacattctggagatttggatactggaataaaagtacatgttgaactcttcaacttttacttttwttttccttaataacctttttggagttctgcttaaaatagaactttaaattctttgcatttattttctttttcttctaactagtgattaaacttttcctct

SEQ ID NO: 298140 - DNA, 201 bp, Homo sapiens
cgttatgaggctgggtcaacctaaggcaatgctaaagccttttaaagaccaagcagcaggctggtacttaactgaatccataacctttcttcttcctttcragaaattgcaattaagacttggaccgttaggttaaataatctttacattgttgtttggcacaaatttgctataatgctttaaaacttttgaaaaacttgt

SEQ ID NO: 298141 - DNA, 201 bp, Homo sapiens
tgagtgggtttatgcatctttgttggtcttatctgcccggggagagtgtgcacagtgtataatgccctgccagtatttgctattttcacagaacctggatmtttctcacttctctcttgaccaggaacttgtgtacccagtacctgtgctgcgtgcatttcgccagcctttctggctaagacgtttgtgggctgatctcag

SEQ ID NO: 298142 - DNA, 201 bp, Homo sapiens
gaggcttaggtgggaggatcgcttgagcccaggagttcgaggttgcagtgagctgcgatcgcatcattgcaggccagcctgggtgacccagggagaccctrtctggaaaaaaaaaaagcggatagactagtcccaactctgaatgttaaaagaccaggactgggtatcagaggacctccaatccttgctcaccttacctca

SEQ ID NO: 298143 - DNA, 201 bp, Homo sapiens
cttgctttcaggaatttgaggtaaagaaggtgaagatgttacgtgtcatgtcttcccccttcagatgattctaagcaccttgagacaaatgtctagtaatrtaccacgtgtgcaaccatattcagtaaatattaatgacaggaatgattctaataaaaatatcagcactaaacccattaggtttttacttagcctttcttt

SEQ ID NO: 298144 - DNA, 201 bp, Homo sapiens
cctcaggaaggacagtggaagtgggagctggaaacccctcagatacccaagtagcatatactctatctcctacctctgcttctttgtgtatctttttttgscccccaagaattccgaggacaatcaagctttgtgtatcttttaaaaacttttcctctctttgccaactggatcatgtgctcctcagttcacatgatggag

SEQ ID NO: 298145 - DNA, 201 bp, Homo sapiens
tttcataattgataatatttattatcattaccattgtatcctaggatatgtgcatttagtagcttgatttagtacataccattaagacattagctttaaayatttgaagagcaggattgactttgaggtcagtttgctgtttcattgttactaatgataaatggtttctaagcaccattccaaacctttaagaaattgtta

SEQ ID NO: 298146 - DNA, 201 bp, Homo sapiens
cctataaagcaacaagaagtaaatagagtgaccatatgccagggtttgtctggaacagaactggcttatacctgttgtcctgacatcctttctgatttatsattttttctgagtttcttggttttaaataaaatattattaacagttgcattaaaataggttgggatggaattggtagacaaatacttttttttttttttt

SEQ ID NO: 298147 - DNA, 201 bp, Homo sapiens
agcagcagtattactagattattgtcataccccatctcaagaaactatgtgggaggagggaggataaggactggttgagtagggggctgtttcctaacaascatgtgaggaaaaagaaccctgttgcatttaggacatttcaatttaatatttcattttctttgtaacaggttagtggttacttggatgattgtacctgtg

SEQ ID NO: 298148 - DNA, 201 bp, Homo sapiens
atgtaaaaaacaaaacatgctactatcaaagatttacttttttaaaaagcagtttctggtaaacatcgatttaaacagtcatatttacaaattaattttaraaatctcatcttgtttccttagtaccctatcaatgtatggttagaaatagaggacttgtatgaaggagaattatttagcattcaattcaaatagaatacg

SEQ ID NO: 298149 - DNA, 201 bp, Homo sapiens
tcttggcctcccagagtactgggattatagccgtgagctactgtgcctagccgtaactttgattttaaatggcggtttaaactcattagtaattttactgtttttttttttttttttttgagacagagtcttgttctgtcacccaggctggagtgcagtggtgtgatcttggctcactgtgacctctgcctcctgggttca

SEQ ID NO: 298150 - DNA, 201 bp, Homo sapiens
attgttatcaaggctaggtattttcccattcttgactgatttactatttaaattctgtattttgacctcctgtaaaacactttaaccagaacgttatgagrctgggtcaacctaaggcaatgctaaagccttttaaagaccaagcagcaggctggtacttaactgaatccataacctttcttcttcctttcgagaaattgc

SEQ ID NO: 298151 - DNA, 201 bp, Homo sapiens
tttcttggctgggcgtggtggcttatgcctgtaatcccagtactttggaaggccagggctggctggtcacttgaggccaggagtttgagaccagcctggcyaacctggtgaaaccctgtctctactaaaaatagaaaaattagctgggcgtggtggtgcacacctgtgatcccagctgtgtgggaggctgagatgggagga

SEQ ID NO: 298152 - DNA, 201 bp, Homo sapiens
cagtggcgtgactttggctcactgcaaacttcgcctcccgggttcacgccattctcctgccgcagcctcctcagtagctgggactacaggcgcccgccacracgcccagcaaatttttttgtatttttagtagagatgaggtttcaccgtgttagccaggatggtctcgatctcctgacctcatgatccacccgcctcggc

SEQ ID NO: 298153 - DNA, 201 bp, Homo sapiens
taacatatttgtgttgatatttttaattctttttacttctaggccacagacaattaaaagacctttaaatcctttggcttctggtcaaggtaaattacttrtttgcgttgttatattatttctcagccagggaactttaattcaaaggaaggggaaggcaagataaatgacagtaacagttgaagtcatataatccacagt

SEQ ID NO: 298154 - DNA, 201 bp, Homo sapiens
aattgttttcaggaggactttcgactgcattttagaaatatttcaagaattatggattgtgttggttgttttaaatgtcgtctgtggggaaagcttcaggkaagcaaatttagtcattcctatttctcatttaccctttgcatgaataattttctaatttttcttttttccttatttctattacagactcagggtttgggc

SEQ ID NO: 298155 - DNA, 201 bp, Homo sapiens
atacattaaatggtttatgcaccttaaatttattgaaataaattactttaaaaatgttttaaaatgcaaagtgaataacttttacagataaaatttatctragatggtttctgagtgaaatattttttggttacagaatttctacaagtgtgaaagaattagaaaacttcaggaacttgttacagaatattcattaaagaa

SEQ ID NO: 298156 - DNA, 201 bp, Homo sapiens
ttttttccttatttctattacagactcagggtttgggcactgctctgaagatcttattttctgagaaattgatagcaaatatgccagaaagtggacctagytatgaattccatctaaccagacaagaaatagtatcattattcaacgcatttggaaggttagtttgaatgtactgaaatgcttctggtagccaagtaagtc

SEQ ID NO: 298157 - DNA, 201 bp, Homo sapiens
tgttttataatctcaataaaacaatttgattttggatattaagcagttttctgagataatatcacttaaatataacatgattggtaacatatttgtgttgmtatttttaattctttttacttctaggccacagacaattaaaagacctttaaatcctttggcttctggtcaaggtaaattacttatttgcgttgttatatt

SEQ ID NO: 298158 - DNA, 201 bp, Homo sapiens
aaaaagtaaattgaggatcatatagttaaaaaaacagttttaacagaaatttagaaatttagaatggtctacttatttcatgatttgagggagcctaagcaaaaaaaaaaaaaaaaaaaaaaaagttgtctatttaagaacagagactatcaattccaattctataagtgaaacaatagggccagtagtggaagggatgag

SEQ ID NO: 298159 - DNA, 201 bp, Homo sapiens
tgttgcccaggttggtgtcaaattcctgtgctcaagcaaccctcctgccttcacctctcaaagtgctggaattacacgtgtgagccaccatgctggaacaraaggctggaattttgaagtggtccatgttacttgtcaggcctaccttggtcctcctatttactgttcctcaactggggccttcttatctctgcttattag

SEQ ID NO: 298160 - DNA, 201 bp, Homo sapiens
ttcaagtatttgaattaacgtagaagcaaacattgaaattagcgtctacaaaagcaagcacagtcttttagaacagaggcttccaactctcacaagtatgrgagtctcttatactcaggaactttcaaggcctcttctcatgacagagtatttttagtatctgttgattttgaaaatatgattgccaaaaagccaccatgc

SEQ ID NO: 298161 - DNA, 201 bp, Homo sapiens
gcttggaaaatatggaatgtcatctacgaagaaaactgttttaagtatgtgtcattttcatttagaaaaattcctataagatgtggtgatttctctttatraacaaaatcataatgatttaaaattaaaaatcaaattcactttgttaaaagatgtgtttgtacaaggaaacatgactattcattaatccagtttccttct

SEQ ID NO: 298162 - DNA, 201 bp, Homo sapiens
gaaactttaaaataaatttcaatgatggtttttttctcatgagattaattttatgtctacaagattcacatatgaaattttatttctaagtcactgctttktcttaggtctctgtgtagaaaaaagagcattctacagacttatatctggcctacatgcaagcattaatgtgcatttgagtgcaagatatcttttacaagg

SEQ ID NO: 298163 - DNA, 201 bp, Homo sapiens
agtaaaaatgctgaaatatggtagatgcttaataaaggcgtttaattatacttgttcattaaatgagctttttattaatattagaaaatacaaatactttrcagttattgcaaagtcaaatctcatcttgagataccaattatttctgattattattgatgaagtgtagaactaggggacaccatttggaaaagaagattg

SEQ ID NO: 298164 - DNA, 201 bp, Homo sapiens
aattgctggatcatgtgttagttccgtttgtttttttctgaggatctgccatactgtcttcaacagtggctgtaccgttttacattcctaccagcaatgtrcaagagttccagtttcttcacattcttgacaatacttttactttctattcttttggataatagttatcctaataggtgtgaagtggtattgtggttttgg

SEQ ID NO: 298165 - DNA, 201 bp, Homo sapiens
ttttttgtagaatcatgactttatcctgacctatattatttaaacaaatcacttgtgctgttttatcttgagatatctactagaagagtttagaaaacctratcaatggagtatttagttgtagtcagtttacaattgtctatcctctacctgttaactctttcttgtttgaaaagaatgtgagtcgagctactttggctc

SEQ ID NO: 298166 - DNA, 201 bp, Homo sapiens
gctttattaagaaaattcagttcataagagtgaagcatgtgattctgaaaccatccattggataattttaataactgaattttacactctagagttagaayctagttggttaaattgaagttaggacagaaattattatatattgttatcaaaatggtgagatcataattttctaaaacatcagattggctccaattaatt

SEQ ID NO: 298167 - DNA, 201 bp, Homo sapiens
agcttgatttagtacataccattaagacattagctttaaacatttgaagagcaggattgactttgaggtcagtttgctgtttcattgttactaatgataartggtttctaagcaccattccaaacctttaagaaattgttacagcccaatatttgaggattgttagatccttactgaaagctaaggatgggaatgcagctg

SEQ ID NO: 298168 - DNA, 201 bp, Homo sapiens
tactttaaatggataattagattttcttaagaattactgagcttcaaaattgtagttgttatttaaaattgatataggctttattaagaaaattcagttcrtaagagtgaagcatgtgattctgaaaccatccattggataattttaataactgaattttacactctagagttagaatctagttggttaaattgaagttag

SEQ ID NO: 298169 - DNA, 201 bp, Homo sapiens
gatttttcactcaaggattttatactttagtgggcaggggtaaaatagataaattcactgctgtgaggtacagtaatacttagataatagtgtgtggagtrtcttgggagcagctgggagaggcatttaacccagcgggtggtaaggagtactggaaggacagcttcctgaaaaaggtgatactgagctgaggcttgaaga

SEQ ID NO: 298170 - DNA, 201 bp, Homo sapiens
tccaaattttacaatttttttttctatttttgtgaaaaatgccattggagttttgatagaaattgcattgaatctgcagaacactttgggtggtatgggcwttttaacaatattaattctctcaatttatgaacatgggatatctttccatttatttgtgtaatcttcagtttttttaatcactgctttatagttttcagc

SEQ ID NO: 298171 - DNA, 201 bp, Homo sapiens; identical to SEQ ID NO: 61940

SEQ ID NO: 298172 - DNA, 201 bp, Homo sapiens
ttagttgagacagggttttaccatgttgctcaggctgatctgggactcccaggctcaagagacctaccaaccttggcctcccaaagtgctgattacaggcrtgagcctgagattctattctagtaacatgctttgttctctggtttctagaactggtcctgccaccatctttgccagactctctcccagggatcaggttgg

SEQ ID NO: 298173 - DNA, 201 bp, Homo sapiens
attgaaactcctgccacccttatactcccttagcagccctgctacctgtggttgtagttaagaatatctcctactccatatttcaggaaggggcaggacatttttttttttttgagatggagtctcgctctgtcacccaggctggagtgcagtggtgtgatcttggctcactgcaatctctgcctccccggttcaagcgat

SEQ ID NO: 298174 - DNA, 201 bp, Homo sapiens
attgcttccttctaaaatcataggctttattaatttcctcttttcttattgtgtttctcatttttgatggcctaatcttcatttattagtactgtggccartgaaagattttcatttattccacgaacatgtacaaagacaagatccttgttaaggatctctgggagtctcagggacatttgaaacacaatccctgctcaa

SEQ ID NO: 298175 - DNA, 201 bp, Homo sapiens
ctatctgaaaaaaaaaaaaatcattggaaggtatttatccatctaaaaatattcttagtttataaatacagataatgttagcttagcagagaaatgccacrattagatcagagttagaatgttaactggcagtattgtggggagtgtggaatagcagatgaggagatggggaagagactggtaaagtaacataaatgtgtt

SEQ ID NO: 298176 - DNA, 201 bp, Homo sapiens
catgatgtctcaccctgttgcccaggctggagtgcagtggcatgatctcaggtcactgcaacctccgcctcctgggttcaagcgattctcctgccccagcstcccaagtagctgggattacaggtgtgtgccaccacgcccagctaattttgtatttttagtggagatggggtttctccatgttggtccatgctggtcagg

SEQ ID NO: 298177 - DNA, 201 bp, Homo sapiens
aaggggagagtagctcagagtccaaaataaatactccaaaaatggatcttttttagcttggagcgcatttagtagatttaacctgtcaagtgtcttgttargtcagttgaaacaatggttttaattgttagcctggtggctgggccgtgggagagacacttgctaatatgttgagtggtggatggaaataagcccaggatt

SEQ ID NO: 298178 - DNA, 201 bp, Homo sapiens; identical to SEQ ID NO: 61924

SEQ ID NO: 298179 - DNA, 201 bp, Homo sapiens
ttctcccaactcccttattttgccatcttttctacaaggattttttttttaccttaaatattgttgtgagataaaactaaatttatagtatgcagctatamttttttttagtcctccactgttagaaaaaggatggtaatattttaaccttaattaacatccttttgtgactacaatgtgcagcaccaggtgagaatcaat

SEQ ID NO: 298180 - DNA, 201 bp, Homo sapiens
gagtagctgggatacaggcacacgccaccatgcctggctaattttcttgtttttcatagagagaaggttttgccacattgcccttgctggtctcaaactcstggactcaagtggtctgctcgccttggcctcccaaagcgctgggattacagacatgagctactgcacctggctattttatttatttaaaagaatttgatt

SEQ ID NO: 298181 - DNA, 201 bp, Homo sapiens
aaatttaatcatttcttggtggttagttttctcaaagtcctggatactgaccgttgtttatgtattttattttatttcatttttatttttattttttttcygaggcagagtttcattctcgttgcccaggctggagtgcaatggtgtgatctcagctcactgtaacctctgtctcccgggttcaagcgattctcctgcctc

SEQ ID NO: 298182 - DNA, 201 bp, Homo sapiens
ttatttgtatacttacatattttataccaaatactatatactttaatattaagggagtatacttatgaatgcttaaaatatagaagtattttaatatttaygtatctcatacttatgtatttgattgattgattgaccgacgtgatctcagtttacggaaacctctgcctcccaggctcaatagattctcccaccttagtc

SEQ ID NO: 298183 - DNA, 201 bp, Homo sapiens
gatgggaggatcacttgagcttgggaggcggaggttgcagtgagctgagatggagccactgccctccagcctgggtaacagagcaagactgtcttttttctttttttttttttttaaaaaggacacacagacacacacacacacacacaaacactgaactgaaaatttcactggaagcctaggtcctaagcagtattatcc

SEQ ID NO: 298184 - DNA, 201 bp, Homo sapiens
tctttccctttgaggtctcttggctatatgccacctctgctctggaggatttttgcatttctttctggtttggggcttcttagagcttcctttgtaattargatagagataggaagaatgatagacacaaaaggtgtttacctttgctgcttgctttacttgctatgtgtgtttctgcctcctgtgcttgtgtactctggg

SEQ ID NO: 298185 - DNA, 201 bp, Homo sapiens
caattttgggcttgaaataattgaccttcaaaattgtgtctctagcatccaagggctagatagttaatatttcattgattattctgtttttttcatgatcragagcagagctaagtgcacttaaaataaggaacaaaatttactttacaaaaattagtgaaaacagtgtagtcatacgtttaatactcttactctttatag

SEQ ID NO: 298186 - DNA, 201 bp, Homo sapiens
acatacatatatatacacacacacatgaaattatatatatgtacatatgaaatcatatatatatatcacagaatctttgtagagtaatattattgagtagtttttttttttttaagtaggtttaaaattagtacctcttgcctggatgtcatctggtcatagaaaaatagtaaaaataaagttagtacctcttactgaaca

SEQ ID NO: 298187 - DNA, 201 bp, Homo sapiens
gattacaggcgtgagccactgtgcccggccaagaacattttaaaatctaccaatctaccatttatcctgccttctttccctttgaggtctcttggctatakgccacctctgctctggaggatttttgcatttctttctggtttggggcttcttagagcttcctttgtaattaggatagagataggaagaatgatagacaca

SEQ ID NO: 298188 - DNA, 201 bp, Homo sapiens; identical to SEQ ID NO: 61927

SEQ ID NO: 298189 - DNA, 201 bp, Homo sapiens
ataagacattttattttacagacattcagtcccctgaagctgaatatgtagatttgcttcttaatcctgagcgctacactggttacaagggaccagatgcytggaaaatatggaatgtcatctacgaagaaaactgttttaagtatgtgtcattttcatttagaaaaattcctataagatgtggtgatttctctttatgaa

SEQ ID NO: 298190 - DNA, 201 bp, Homo sapiens
aggctggagtgcagtggtgtgatcttggctcactgcaatctctgcctccccggttcaagcgattctccggcctcagcctcctgagcagctgggactacagmcatgtgccaccatgcccagctaattttgaatttttagtggagacagggtttcaccatgttggctaggatggtctcaatctcttgaccttgtgatccgcct

SEQ ID NO: 298191 - DNA, 201 bp, Homo sapiens; identical to SEQ ID NO: 61930

SEQ ID NO: 298192 - DNA, 201 bp, Homo sapiens
gttgtttggcacaaatttgctataatgctttaaaacttttgaaaaacttgtattttggcatttttctattcttatgacttatttttcttttgatttcagaraacactttttacagttggctagaaggtaattagaaactttaaaataaatttcaatgatggtttttttctcatgagattaattttatgtctacaagattca

SEQ ID NO: 298193 - DNA, 201 bp, Homo sapiens
ttgccagactctctcccagggatcaggttggcaggcttatctgagttgtcagatggcatggatttccgagaatcttcttgtctttcctttactgagctgtyttcatccattgaaactcctgccacccttatactcccttagcagccctgctacctgtggttgtagttaagaatatctcctactccatatttcaggaagggg

SEQ ID NO: 298194 - DNA, 201 bp, Homo sapiens; identical to SEQ ID NO: 61923

SEQ ID NO: 298195 - DNA, 201 bp, Homo sapiens
tagaactggtcctgccaccatctttgccagactctctcccagggatcaggttggcaggcttatctgagttgtcagatggcatggatttccgagaatcttcytgtctttcctttactgagctgttttcatccattgaaactcctgccacccttatactcccttagcagccctgctacctgtggttgtagttaagaatatctc

SEQ ID NO: 298196 - DNA, 201 bp, Homo sapiens
atcaaattcactttgttaaaagatgtgtttgtacaaggaaacatgactattcattaatccagtttccttctggggaaatatatagacgtgagtttccacaratttttcctttagacctttatgggagtattgtaggcccttgacaaatgttccttgagtcgattataggatctcattttatagttaaggtaacctagagct

SEQ ID NO: 298197 - DNA, 201 bp, Homo sapiens
acctttaaaacacattagcatttaaaaaaatttagattcctgtggtaggtcagagttctgttttactttgggatatagcgtagtaattttcccccttaccygcattgttccatgtagtagttatttaggcagccttagcacatcctgaaacaacatccagtcctccctgttccaggttgccacctgtctttggtcttagtt

SEQ ID NO: 298198 - DNA, 201 bp, Homo sapiens
aatggagggatttgctgttttgcttgggagattgtaatagaaagccttccaaggctttctaactcttaaaagactaggactttttttttttcttttctatytttttgaggcaaggtcttgctctgtcatttaggctggagtacattggcatgattatggctcactgcagcctcaacctccctggctcaagcgattctccca

SEQ ID NO: 298199 - DNA, 201 bp, Homo sapiens
ataatttgaaattacaaagtaggctgcttccaggtttgttcttgcaaaattgctgtagctacttggggtcttttgctgttccatccaaattttacaatttwtttttctatttttgtgaaaaatgccattggagttttgatagaaattgcattgaatctgcagaacactttgggtggtatgggcattttaacaatattaatt

SEQ ID NO: 298200 - DNA, 201 bp, Homo sapiens; identical to SEQ ID NO: 61941

SEQ ID NO: 298201 - DNA, 201 bp, Homo sapiens; identical to SEQ ID NO: 61931

SEQ ID NO: 298202 - DNA, 201 bp, Homo sapiens
tgatccacctgtctcggcctcccagaatgctgggattacaggtgtgagccaccgtgcccggcctagattccaccattttaataaactcactttaccacatrtctgttcatctgtccatccttgtagccatccattagaacatcttatttttcggatgcatttcaaagtaaattgctggcatcagtatacctcctcctaaat

SEQ ID NO: 298203 - DNA, 201 bp, Homo sapiens
tttggaaatttatagtgcatatatgtgagctatttattctgtggtatatagtcttgtctctatgtggattctgtggatcctcataataaccattaagtctkctggaagtcaacagctcataggatgggaacatgttctttagggtaactttcttactctgttattattgttaaaagtgtgatttttctttaagttttggtc

SEQ ID NO: 298204 - DNA, 201 bp, Homo sapiens
gtttttattaattacttatttctgccatgtattttatttaaattatcttgactattattagaaatgtttgatttactgacttaaagatttactttaaaggttttttttttttttttttgagatgaagtctcactctgttgcccaggctgcagtgacgtcatctctgcttaccgcaacctctgcctcccaggttcaagcgat

SEQ ID NO: 298205 - DNA, 201 bp, Homo sapiens
ttgtgttttattgatcataacatttctatccatttggaaatttatagtgcatatatgtgagctatttattctgtggtatatagtcttgtctctatgtggaktctgtggatcctcataataaccattaagtcttctggaagtcaacagctcataggatgggaacatgttctttagggtaactttcttactctgttattattg

SEQ ID NO: 298206 - DNA, 201 bp, Homo sapiens
aggaactttcaaggcctcttctcatgacagagtatttttagtatctgttgattttgaaaatatgattgccaaaaagccaccatgcatttagtaacactttwaaagtaaaagttgtgttttattgatcataacatttctatccatttggaaatttatagtgcatatatgtgagctatttattctgtggtatatagtcttgtc

SEQ ID NO: 298207 - DNA, 201 bp, Homo sapiens
tgatggactcagtaacaaaggcattagggagtggctgtgaccccagagaacccctggcccaccttctgcacttgctaatgaagctttggcaggttacctgwtttcaatatgttgtcagtgactgagctgggagtggagtccagagttctgggctaaggggtcttaggaaaatgtctgtgggcagccccaggacatccttcc

SEQ ID NO: 298208 - DNA, 201 bp, Homo sapiens
agcagctgaattaccccaggagagccctagacagaagctttaatacccccaaatcctcttgattcttgattgtgtcatttttaagatcgaaatattcaatstgggcattcaaagaatggtcagttttgaaaagaactatttatgtgaaaaatcttcagctagagatgcttcccacaacattttattataaaaaatttcaaa

SEQ ID NO: 298209 - DNA, 201 bp, Homo sapiens
tgagaccaggagttcaagaccagcctggccaacatggtgaaacgccatctctactgaaaatacaaaacaaattagccaggcgtggtagcacaagcctgtartcctagctacctgggaggctgaggtgggaggattgcttgaacccgggaggtggagattgcagtgaaccgagatcacaccactgcactccagcctgggtga

SEQ ID NO: 298210 - DNA, 201 bp, Homo sapiens
  misc_feature (1)...(201): n = A,T,C or G
tgtcttggactgactggaaaacgatcattccaagcctatactgagggagtcacttacaaatggttttaatttgacacataataattgtgcatatttatggngtaccgtgtgttgttttgatccatgagtataacatttaatgatcaaattaggataatgggcatacccattgccacagacattgactacttctttgtggtg

SEQ ID NO: 298211 - DNA, 201 bp, Homo sapiens; identical to SEQ ID NO: 61967

SEQ ID NO: 298212 - DNA, 201 bp, Homo sapiens
tttcctcatgggactcccagggctgagctactgctagtccagacttccccaaaccagtgcctcgcgtgctaggtgtagcaggcctgcaccctgtgcctcakctttgtagatgggaaagggcaggtggcttttccatttgccccagactctgtgtacctctcagggtcagaggaccctggcttggggagtctgtctggatag

SEQ ID NO: 298213 - DNA, 201 bp, Homo sapiens
ctatctggaagcccctgctggactccagctttgttccttctcctgttggatttccctaggcagagtgggagcctgtgagctgtgtctgcacaggcagagamattcacaatcaatgatcagtcagcaagcttctaggaactctgatgggtaagcctaaggtggccagcatgtatttattttaggatattttatcagcgagag

SEQ ID NO: 298214 - DNA, 201 bp, Homo sapiens
gattaaacaaacaaacaaacaaacaaaacacaacctcaaacatatgtttagcagtagtttctaaaggaaagattaaggaattaatgaatatctttaattamagaatttaacatctgcttttgagagccaaactgcttgattctggatctggattcttaacaaaaacatattactctattaagagcagactgtgggtatttt

SEQ ID NO: 298215 - DNA, 201 bp, Homo sapiens
catttagtgctttacattttagaccctgcagagtctttaaggcaaatagtggaagaataaaatcaaattccagctcatgttgaacccttgtcagtcctacmgtaattgaagaggtcaagcccagctctaaggacacctggctttcgggaggctgagtgaccatgtgggagatctgagagctgcttatggaagtattctgca

SEQ ID NO: 298216 - DNA, 201 bp, Homo sapiens
ggctttcgggaggctgagtgaccatgtgggagatctgagagctgcttatggaagtattctgcaaaacaacaatgatgtataggggttatcttgtagaattyttatgggtggagtcatgtacttgggtgtggtgttttatatacggtgcattgcatcttgtggaacctgccatgcaatgcagctgtttgagccgtctgattt

SEQ ID NO: 298217 - DNA, 201 bp, Homo sapiens
ttgggcttgtctccccctcctagagtgttgggggtcagggatgacgtccttcccctgcacatgccagtggaaagctccatggaggaggcacccaatcaacrtggacacaccagggagatttcaggcttggagagagctgcggtcctcttggtctagggtgggcgccgctcagcctgctctctcgccacagggtttgatgtt

SEQ ID NO: 298218 - DNA, 201 bp, Homo sapiens
aaaccctgctcctgttccatcttccaatgcccttcctttctgctggacatgcagggatttggacttgaagaagcccatctaccagaagacagcatgctacrgccatttcggaagaagcgagttcccatgggaggttcccaggaagcttgtattttagagccagggggagctgggcctggtctcaccctggaggcacctggt

SEQ ID NO: 298219 - DNA, 201 bp, Homo sapiens
caagtgtgaggaggtggaggttgagggcactgctgtgaggctgctgcccactgcctgggccctcagccgtgtgtgctttgccagagttgagctccatcccrggttccagtagcaagtagagtgtagaaacacagagtagaaggaggtaacacttattgttttttcttgcaggacttctcaaagcctagacatactagtatg

SEQ ID NO: 298220 - DNA, 201 bp, Homo sapiens
  misc_feature (1)...(201): n = A,T,C or G
ctggccatggactaaatgtaaagtcggtgaattttggcctctgtacatttagtgcactctctggggaggtctgctatgtgtctgacagtgtgcaagaaatnggggatatgtccctaggattcctccacttagcgccactgggccctcccactcctgccatctcaagtgaccatcgaccttacccacggctgctgcacctca

SEQ ID NO: 298221 - DNA, 201 bp, Homo sapiens; identical to SEQ ID NO: 61947

SEQ ID NO: 298222 - DNA, 201 bp, Homo sapiens; identical to SEQ ID NO: 61948

SEQ ID NO: 298223 - DNA, 201 bp, Homo sapiens
cagtgttttctacaactttgggcttcctacaaggggaagggggaaatccacttattattctggcattcacaaccttttatggtcttccaactttacctgcytctgcctgccccacaccatctttgcttaatcgacatcatttcactcattgtccccttgtttcttagggctttgctttacctgagctccctctctggtctt

SEQ ID NO: 298224 - DNA, 201 bp, Homo sapiens
attctgacccatatttgctcttgtccagataagatctgtgaccagatcagtgatgcagtgctggatgcccatctcaagcaagaccccaatgccaaggtggmctgtggtaagaaacacccgatccctccctgctggagacctaagtgggctagactgagaaattaatcatgggtataagacaaacgagccatactcctcagt

SEQ ID NO: 298225 - DNA, 201 bp, Homo sapiens; identical to SEQ ID NO: 61975

SEQ ID NO: 298226 - DNA, 201 bp, Homo sapiens
ctgccatcacagtacttcagccccctccagcatctaggggctggctctgcttcttatcttgatttctctccctctgcagggggatgcgggtgtcactggcygtaagattattgtggacacctatggcggctggggggctcatggtggtggggccttctctgggaaggactacaccaaggtagaccgctcagctgcatatgc

SEQ ID NO: 298227 - DNA, 201 bp, Homo sapiens
ggtcccttcagaagaagggcaaagcttctgaaaggggcagggcccacacagaggcttcaatccctgacgctgcaccttgctggaaggtttcctatgccatkggtgtggccgagccgctgtccatttccatcttcacctacggaacctctcagaagacagagcgagagctgctggatgtggtgcataagaacttcgacctcc

SEQ ID NO: 298228 - DNA, 201 bp, Homo sapiens
agctgctcagagatgtaaatgtcaatcattccacagagctgtttttttaaagcacctgttaagagcatagcactgtgactataaggatttataccgttacrggtcacagaggactagagagaccagtatgggtgaatataggagggtatttattttaaggtgtgcactggctcagtggattcacatccaaaaagctgagcc

SEQ ID NO: 298229 - DNA, 201 bp, Homo sapiens
ggtgtggccgagccgctgtccatttccatcttcacctacggaacctctcagaagacagagcgagagctgctggatgtggtgcataagaacttcgacctccrgccgggcgtcattgtcaggtaaagtgccatgtgctgctattacacaggaccttgctccttccttgcccagatgctcacctcacctgaaagggaggcagaa

SEQ ID NO: 298230 - DNA, 201 bp, Homo sapiens
gtggccgagccgctgtccatttccatcttcacctacggaacctctcagaagacagagcgagagctgctggatgtggtgcataagaacttcgacctccggcygggcgtcattgtcaggtaaagtgccatgtgctgctattacacaggaccttgctccttccttgcccagatgctcacctcacctgaaagggaggcagaaagg

SEQ ID NO: 298231 - DNA, 201 bp, Homo sapiens; identical to SEQ ID NO: 61985

SEQ ID NO: 298232 - DNA, 201 bp, Homo sapiens
ggcccacacagaggcttcaatccctgacgctgcaccttgctggaaggtttcctatgccattggtgtggccgagccgctgtccatttccatcttcacctacrgaacctctcagaagacagagcgagagctgctggatgtggtgcataagaacttcgacctccggccgggcgtcattgtcaggtaaagtgccatgtgctgcta

SEQ ID NO: 298233 - DNA, 201 bp, Homo sapiens; identical to SEQ ID NO: 61961

SEQ ID NO: 298234 - DNA, 201 bp, Homo sapiens
gatgacgtccttcccctgcacatgccagtggaaagctccatggaggaggcacccaatcaacgtggacacaccagggagatttcaggcttggagagagctgyggtcctcttggtctagggtgggcgccgctcagcctgctctctcgccacagggtttgatgttcggctatgctaccgacgagacagaggagtgcatgcccct

SEQ ID NO: 298235 - DNA, 201 bp, Homo sapiens; identical to SEQ ID NO: 61962

SEQ ID NO: 298236 - DNA, 201 bp, Homo sapiens
aaaagggttaggaccaaaggcagtggccacctctggctcctccctgagttctgtgtgctctccttacgcattgctgcccttaggctgcctatgccttatcytgtgcccttcctgcatggtgtctgcatgagactggcgtgagggcatgctcaggccatgtctggagtatggataagtgactgaatttgaacaaagtgaagg

SEQ ID NO: 298237 - DNA, 201 bp, Homo sapiens; identical to SEQ ID NO: 61965

SEQ ID NO: 298238 - DNA, 201 bp, Homo sapiens
cagggagatttcaggcttggagagagctgcggtcctcttggtctagggtgggcgccgctcagcctgctctctcgccacagggtttgatgttcggctatgcyaccgacgagacagaggagtgcatgcccctcaccatcatccttgctcacaagctcaacgcccggatggcagacctcaggcgctccggcctcctcccctggc

SEQ ID NO: 298239 - DNA, 201 bp, Homo sapiens; identical to SEQ ID NO: 61968

SEQ ID NO: 298240 - DNA, 201 bp, Homo sapiens
atctcaagtgaccatcgaccttacccacggctgctgcacctcaccctgctctggtgcacattccccactgcagcatttgcacgtggacagctgttcccggktggctgtttccagatcttcaccacaggctgcctctggctgttgtgggcaccagagtgggacagggtgttttagacagggcaccactgccccctctcttgt

SEQ ID NO: 298241 - DNA, 201 bp, Homo sapiens
gtagataagttgatatgtaaactgaaaagtcgatatctaattattttaagatttcaatttgttatcccgaatatttttgtgattctgacccatatttgctsttgtccagataagatctgtgaccagatcagtgatgcagtgctggatgcccatctcaagcaagaccccaatgccaaggtggcctgtggtaagaaacacccg

SEQ ID NO: 298242 - DNA, 201 bp, Homo sapiens
tagcagagggttggaccagcacatggcctttctgatgcttgatctcattgggaacaaggaggtctttcaaagttcttaggtgaatcttccagacgggatgmaagagcttgaaacacaggtagctgcctagatggttataagctgcatcctcattgtaggagcctttgttggctgcacagatacctggcttcttctcttgtt

SEQ ID NO: 298243 - DNA, 201 bp, Homo sapiens
caagggtgagggcaggcctccgggtctgaaatccctgttgctctctgctgatagagaccccagtgctgagtcaaacccgtgcctttcagcccgatgggagyatcaatactaccaggaggaaaacactcctacacttgtctgtcaggttccaggggtcaaagactctggcataaggatggccaacaggcgactatgcccagt

SEQ ID NO: 298244 - DNA, 201 bp, Homo sapiens
aggggtcaaagactctggcataaggatggccaacaggcgactatgcccagtgggcccagcacatgcccatctgttgttgattgggcttgttttaggccttrccttcttggcgctgccaaaggctttggaagagaaagatgcactgaataaagggggctgccctcctttggggacatgctcgctgccaggcactggtgatag

SEQ ID NO: 298245 - DNA, 201 bp, Homo sapiens
tcctacagtaattgaagaggtcaagcccagctctaaggacacctggctttcgggaggctgagtgaccatgtgggagatctgagagctgcttatggaagtaytctgcaaaacaacaatgatgtataggggttatcttgtagaattcttatgggtggagtcatgtacttgggtgtggtgttttatatacggtgcattgcatct

SEQ ID NO: 298246 - DNA, 201 bp, Homo sapiens
ccccaattcttagagtctccacgttggtctctggcattagatgttcaggcaattctaatttttaaagaaaaattcattttgggtctctgttagctctttcyctaattctctgaaatcactgtgagagatgtgatgacctcacgccatggcaaaaagacccacttccaggtcatcctgcctagctatacacctgtaatcaag

SEQ ID NO: 298247 - DNA, 201 bp, Homo sapiens; identical to SEQ ID NO: 61970

SEQ ID NO: 298248 - DNA, 201 bp, Homo sapiens
ccacttccaggtcatcctgcctagctatacacctgtaatcaagatgcacagagagaagcatgactttaaaggtgttcatttctgcctgtgtcacataatcrttgtctagggtgatgtgtagcatcctgtgggtcagggtgctggacccccgtttgtaagtgagagagcccactcatggtatgatggtgcagactcgcagag

SEQ ID NO: 298249 - DNA, 201 bp, Homo sapiens
ttgatttgtgcattcaaaaacattcattaggaaacaggagggtgtaaagggcaaaggtgacctgatactcccagggtatatgatgcaacatgaggtgcccyggggtaagttcctggcattgtgtctaatgaactgcaggcaggtccagggacatgcactgagagtggacgtggggtttgggcatgtggggtgggagctgga

SEQ ID NO: 298250 - DNA, 201 bp, Homo sapiens
  misc_feature (1)...(201): n = A,T,C or G
cacctacggaacctctcagaagacagagcgagagctgctggatgtggtgcataagaacttcgacctccggccgggcgtcattgtcaggtaaagtgccatgngctgctattacacaggaccttgctccttccttgcccagatgctcacctcacctgaaagggaggcagaaaggaggatgtttctgcctctcagaagtgggag

SEQ ID NO: 298251 - DNA, 201 bp, Homo sapiens
gtagatccccacctgaagcttgtacagaaacagcagcttggatctgtgtgttttctctgtaagccctttcaggctgtgtgggtaggagaatagatgggaargaagatggctgtgggggtttggagagtgagtgtgtcactatgcttgaccttgtggtgggggcgtccatgtattcagtcccttattctcacagtccctgtg

SEQ ID NO: 298252 - DNA, 201 bp, Homo sapiens
gaaaccctgctcctgttccatcttccaatgcccttcctttctgctggacatgcagggatttggacttgaagaagcccatctaccagaagacagcatgctayggccatttcggaagaagcgagttcccatgggaggttcccaggaagcttgtattttagagccagggggagctgggcctggtctcaccctggaggcacctgg

SEQ ID NO: 298253 - DNA, 201 bp, Homo sapiens
  misc_feature (1)...(201): n = A,T,C or G
caggagatcaggtagctcggcactgcatgtgggagctgtgtgttgagctggctgggaaagttcatgagcagtgggttaatcacactgaggggtggattctngtcctagcacgatagccaggagcgagttgggaaccccagcttcacggccgtgctgtggatggctgtggttgctgacactgggtttgggcttgtctccccc

SEQ ID NO: 298254 - DNA, 201 bp, Homo sapiens
  misc_feature (1)...(201): n = A,T,C or G
tgcgcgcaactgcggtggggaggcgtagtgccatgcgaggagggctgtgttacagttcgttgctccctcctgtccttgaaatggagaaagaaaccctgctnctgttccatcttccaatgcccttcctttctgctggacatgcagggatttggacttgaagaagcccatctaccagaagacagcatgctacggccatttcgg

SEQ ID NO: 298255 - DNA, 201 bp, Homo sapiens
tgccgttcgctcagcctcagcctcacagtatctcccccacccttctgatggacaggtgacagttcagtacatgcaggacaatggcgcagtcatccctgtgygcatccacaccatcgtcatctctgtgcagcacaacgaagacatcacgctggaggagatgcgcagggccctgaaggagcaagtcatcagggccgtggtgcc

SEQ ID NO: 298256 - DNA, 201 bp, Homo sapiens; identical to SEQ ID NO: 61954

SEQ ID NO: 298257 - DNA, 201 bp, Homo sapiens
gtgtgcacagcctggcatttgaggacttctctcagctcacgatgtctgtgtgcatcgggccatctcatgcagatcttacatggccaggactctttctcctrcttcttctggaccttccttgttgctccttagaccaggcagaacacagagtaggagtttgatacagatccagggtttgatggatacctgagtagccttggg

SEQ ID NO: 298258 - DNA, 201 bp, Homo sapiens
gacgctgcaccttgctggaaggtttcctatgccattggtgtggccgagccgctgtccatttccatcttcacctacggaacctctcagaagacagagcgagmgctgctggatgtggtgcataagaacttcgacctccggccgggcgtcattgtcaggtaaagtgccatgtgctgctattacacaggaccttgctccttcctt

SEQ ID NO: 298259 - DNA, 201 bp, Homo sapiens
gggcccacacagaggcttcaatccctgacgctgcaccttgctggaaggtttcctatgccattggtgtggccgagccgctgtccatttccatcttcacctayggaacctctcagaagacagagcgagagctgctggatgtggtgcataagaacttcgacctccggccgggcgtcattgtcaggtaaagtgccatgtgctgct

SEQ ID NO: 298260 - DNA, 201 bp, Homo sapiens; identical to SEQ ID NO: 61984

SEQ ID NO: 298261 - DNA, 201 bp, Homo sapiens
ggcctcagctgtgggcctagacagaccctggctagttagggaacccccacgctgacaccaaatggcatgtcaggaaccgagccatccattgggaagtttgyggccccctccttctgacctgttccccacttaggctcactttgcttccgcctaggctttgacttcaagacttgcaacgtgctggtggctttggagcagcaa

SEQ ID NO: 298262 - DNA, 201 bp, Homo sapiens
acctacggaacctctcagaagacagagcgagagctgctggatgtggtgcataagaacttcgacctccggccgggcgtcattgtcaggtaaagtgccatgtrctgctattacacaggaccttgctccttccttgcccagatgctcacctcacctgaaagggaggcagaaaggaggatgtttctgcctctcagaagtgggagg

SEQ ID NO: 298263 - DNA, 201 bp, Homo sapiens
tgctgctattacacaggaccttgctccttccttgcccagatgctcacctcacctgaaagggaggcagaaaggaggatgtttctgcctctcagaagtgggarggtctgtgagctcttggtacagcacagtgcatccccagtgcagaaagcctggttgtcaggttaaaggaggctgccccaggttcctgctggcccagtcaac

SEQ ID NO: 298264 - DNA, 201 bp, Homo sapiens
gctgccatcacagtacttcagccccctccagcatctaggggctggctctgcttcttatcttgatttctctccctctgcagggggatgcgggtgtcactggycgtaagattattgtggacacctatggcggctggggggctcatggtggtggggccttctctgggaaggactacaccaaggtagaccgctcagctgcatatg

SEQ ID NO: 298265 - DNA, 201 bp, Homo sapiens
caggtaagccccctccacccaccaccgtcctgttgcagtggaggacccctgcccagttctgccctgagtgaggggatgttggcccggtgggaaagctgcaygctttgccaaaggttgtgattgtgtgattgtgttgggcactgtggccagggctctgaaaacctaggggagggaaaaccagaatcttcagggagagaggcg

SEQ ID NO: 298266 - DNA, 201 bp, Homo sapiens
tcactggccgtaagattattgtggacacctatggcggctggggggctcatggtggtggggccttctctgggaaggactacaccaaggtagaccgctcagcygcatatgctgcccgctgggtggccaagtctctggtgaaagcagggctctgccggagagtgcttgtccaggtaagccccctccacccaccaccgtcctgtt

SEQ ID NO: 298267 - DNA, 201 bp, Homo sapiens
gggatgcgggtgtcactggccgtaagattattgtggacacctatggcggctggggggctcatggtggtggggccttctctgggaaggactacaccaaggtrgaccgctcagctgcatatgctgcccgctgggtggccaagtctctggtgaaagcagggctctgccggagagtgcttgtccaggtaagccccctccacccac

SEQ ID NO: 298268 - DNA, 201 bp, Homo sapiens
cgctgggtggccaagtctctggtgaaagcagggctctgccggagagtgcttgtccaggtaagccccctccacccaccaccgtcctgttgcagtggaggacycctgcccagttctgccctgagtgaggggatgttggcccggtgggaaagctgcacgctttgccaaaggttgtgattgtgtgattgtgttgggcactgtggc

SEQ ID NO: 298269 - DNA, 201 bp, Homo sapiens
tagtagagacggggtttcaccgtgttagccaggatggtcttgatctcctgacctcgtgatccacccgcctcggcctcccaaagtgctgggattacaggcgygagccaccacgcctggcctttaaattttttttttttttttttttttaatagagaatgggtctcgctatgttgcttggactcctgggctcaagcaatcctc

SEQ ID NO: 298270 - DNA, 201 bp, Homo sapiens
tggtgtgtgtttccctctctgtgtccatgggttctcgttgttcaacttgcacttacgagtgagaatatgaggcatttggttttctgttcctgtgttagttwgctgaggatgatggcttccagcttcacccatgtccctgcaaaggacatgatctttatggctgcatagtgttgcatggagtatatgtactacattttcttt

SEQ ID NO: 298271 - DNA, 201 bp, Homo sapiens
ggtgtgtgtttccctctctgtgtccatgggttctcgttgttcaacttgcacttacgagtgagaatatgaggcatttggttttctgttcctgtgttagtttkctgaggatgatggcttccagcttcacccatgtccctgcaaaggacatgatctttatggctgcatagtgttgcatggagtatatgtactacattttcttta

SEQ ID NO: 298272 - DNA, 201 bp, Homo sapiens
ccacaatggttgaactaattacaacaaaagccaaaattgataaattgataaagttgatctaattaaactaaagaacttctgcacagcaaaagaaactatcrtcagaatgaacaggcaacctatagaatgggagaaaatttttgcaatctacccatctgacaaaggtctaatatccagaatttacaaggaacttaaacaaat

SEQ ID NO: 298273 - DNA, 201 bp, Homo sapiens
tagactgggtaatttataaacaacaggaatttatagctcacaattctggagtctatgaggcccaagttcaaggcaccagtagattcagtgtctggtggggsgcccattctctgcttcatagttagtgccttttatggtcttcacttgatggaaagggcaaaaggtatcccccaagtctcttttaaaagggcgctaattcca

SEQ ID NO: 298274 - DNA, 201 bp, Homo sapiens
gaacttctgcacagcaaaagaaactatcatcagaatgaacaggcaacctatagaatgggagaaaatttttgcaatctacccatctgacaaaggtctaatakccagaatttacaaggaacttaaacaaatttacaagaagaaagcaaccccatcaaaaagtggagaaaggatatgaacagacacttctcgaaagaagacatt

SEQ ID NO: 298275 - DNA, 201 bp, Homo sapiens
cccgtgtcactctgttttcctaacccaaccactgcagatcatggaggaatgaatgaaggcatttcgtataggatttggagcttacacgaacatcaaggctrggagagtgaaggcctggaagtttatagtcagagaatcagacaaaatagtccccactgactctagcctgaggcactggagcagaagctggggttcatggaa

SEQ ID NO: 298276 - DNA, 201 bp, Homo sapiens
agtgcccagctttctggaaatgtggatttcctgacagttttctcaccttctcatcttatagatttcctgtcagcctggatcatagccatgacagcctcccygttccctgtcctctctgtgcatgcacctgtgcatgtgtgtataaagacagaattatttagacaaatggctttcagaagttccgtcacagatataccccat

SEQ ID NO: 298277 - DNA, 201 bp, Homo sapiens
gcgatcagccaactgttttattaccaggtctcccatggagaaaacacttcgtaaatcgaggagctgttacaaaagtcgaatggcagcatcattagtgcccrgctttctggaaatgtggatttcctgacagttttctcaccttctcatcttatagatttcctgtcagcctggatcatagccatgacagcctccccgttccct

SEQ ID NO: 298278 - DNA, 201 bp, Homo sapiens
agaaggctgctgctgggctgggtgggcaagtcctgacacattagcgatcagccaactgttttattaccaggtctcccatggagaaaacacttcgtaaatcraggagctgttacaaaagtcgaatggcagcatcattagtgcccagctttctggaaatgtggatttcctgacagttttctcaccttctcatcttatagattt

SEQ ID NO: 298279 - DNA, 201 bp, Homo sapiens
agggcagccaggttcaggacagtgctgcttccagatcagaaaacatccatagggtgtagtctggcccacgcttgatgtaggcacaaggcagaggcgaatgragatcatgggaggtcctttggtgtaaaaaccccatctgcctggagcttcaggattagcagtgtttcacagcccgtctgaagtgccagcacttgggaaaac

SEQ ID NO: 298280 - DNA, 201 bp, Homo sapiens
cctgccttcttccctaccaggtaaaaattcaaacctacacaacaatagagaggatgatataaccaaaccctatgtacatgtcagccagattcaacagttayccggattttttagggcccatttgtaatatggcccaggaggaagaaaatgcctgaacaatctagattaacctagaggcaggtgtttctttgcttatttgtg

SEQ ID NO: 298281 - DNA, 201 bp, Homo sapiens
agttggtgacatataaggtgggcataggacagaatcaaaagacaaaacacagtgaaagctgcagcaaggcaaagctgagcacaagcaaggccatctgtgamagcccgtcgcctaaccgtttagcaatgtttcacccttcttgctttttgaaaagtcatgttggttgagcttggtagctcatgcctgtaatcctagcacttt

SEQ ID NO: 298282 - DNA, 201 bp, Homo sapiens
tttgtgcaattttatttatctccttcctgataaagggcttcttctgccttgggacttcttactatctaaggttgaggtaaagagccaggactctatgaaaycacattacttaacttggtttcctcatccatgtaggagagcacatgtggcttctaaaggtggtcataatggagtgtttggcacagggactgctgcctaata

SEQ ID NO: 298283 - DNA, 201 bp, Homo sapiens
tcattgattttaattgacaaatgaaaatatatttatggtgtgcccattaatgttttaatgtatgtatacattgtggaatggttaaatcaggctaattagcrtatctgttacctcacttagtcatttttttgtggtgagaacaattgaaatctactctcttggcaattttcaagtatacaatacattgccattgaccatagt

SEQ ID NO: 298284 - DNA, 201 bp, Homo sapiens
aaaaacagtttattagcatctttttaaaaaaaccttttaattactaatagaacacctagcaaaatgtataaattctaaaagcacggttcaatgaattatcrtatggtgaacatagattattcccagcaccacagaaagccctcccattgctacctctcctatcaactgtttcttgataacctgctagaggcaaggtagtgt

SEQ ID NO: 298285 - DNA, 201 bp, Homo sapiens
gaaggtaccattattgtccctgttttatagttaaggaacttaagattcaaagaggttaaagtcacttgtcgaagttcacagaggtaggagttattggggtyaggattcaggtccagggcagttttccccccagagcccatagaggtagaacaagaagcagcttttgggctacagagcagcttcactgtgatttacctcctc

SEQ ID NO: 298286 - DNA, 201 bp, Homo sapiens
tggctggttggctttcttcactctcaccattcttctcagtcatctctgggcccttttctgcctatggctgtgtcatgcctcagaatccccttcttgattcmctgttttttccccctccatgttctgtattctccatttgtcagtgcttcgcagattgggtatttcctgccttgagtcctttcctgggcttctttctcattt

SEQ ID NO: 298287 - DNA, 201 bp, Homo sapiens
tccttacctcggagcagaaggccaaagccctgaagggccagttcaactttgaccacccgggtgagtcgggcattgaagggggtatgtatgtgtattggtgkgttggggggaatagttttattttgctcatgaggaagttgcttaacctctcggaatcttgtttctatctagaacgtagggacttgataactaccttgcagt

SEQ ID NO: 298288 - DNA, 201 bp, Homo sapiens
tggaacagtcctgttgtcacgattccttaactctgaaggatgggatagtgatttcagcttgagggactgcatgtgcattctgatccacattccagtgctgytgttcctggaacaagatgtaaggggaggggtagaggaagggcaggaagaagagcaaagaaaactgttttttctgctgtcctggtttacttgggattggac

SEQ ID NO: 298289 - DNA, 201 bp, Homo sapiens
aaaagaaactatcatcagaatgaacaggcaacctatagaatgggagaaaatttttgcaatctacccatctgacaaaggtctaatatccagaatttacaagsaacttaaacaaatttacaagaagaaagcaaccccatcaaaaagtggagaaaggatatgaacagacacttctcgaaagaagacatttacgtggccaacaaa

SEQ ID NO: 298290 - DNA, 201 bp, Homo sapiens
gtagataaagtggataaaaatccatggtagatagttatcaatcgaattatgaactggttttggattaaccactcagtctggaccattttccctcactgatrcatgaaagtcttcaatccttctttctcattttcctcattccctgcttatcttctttcattcacatttcagctaaacaaggcacttccttaggtttcccca

SEQ ID NO: 298291 - DNA, 201 bp, Homo sapiens
gacccttccatctcagcctcccaaagtgttaggattacaggcgtgagccatagcacctggccccattgttttatttatttttttggcctgtctaggaagtrtgaatgtctctggactaggcgtagtgtggcagagttgatctgtaaaataggacctggtttcttcattctctttagaatttatttaattttccctccattt

SEQ ID NO: 298292 - DNA, 201 bp, Homo sapiens
gcctgaccagtgtagtagggaactgggtcccacttccgcagcccccagccctgtcttctagagttagactgtacattgctaactaggcttccttttttaaaaataaataaataaataaataaataaataaataaataaataaataaagtgagtgtgtcttttggatctcttcagattagaaaaaaatctgtatttgacttt

SEQ ID NO: 298293 - DNA, 201 bp, Homo sapiens
gtctgcagactttggcccgagtgcttcatccagtggtgactgatcatctcctgataagaagcccattcattaagggcttactctgtggtaggcattgtctrtcttactccttagagccctcctgtgaaggaggaggatcatattagctcaggcagagccactgggaagttggatgacttgcctgcaagtggcagagccact

SEQ ID NO: 298294 - DNA, 201 bp, Homo sapiens; identical to SEQ ID NO: 62007

SEQ ID NO: 298295 - DNA, 201 bp, Homo sapiens
agcatgggaagtgttgccacagctctatggaaactacttggatattatgattaatggatagtcaaacatctctcaaataaatatcaaagagtgatcttccyttaaaggttattgttcccaagtttatccctctcttggtgccctggctctggtttcttttcttctaagttgcccctttgattacttgtcatgtgaatatca

SEQ ID NO: 298296 - DNA, 201 bp, Homo sapiens
cctgaccagtgtagtagggaactgggtcccacttccgcagcccccagccctgtcttctagagttagactgtacattgctaactaggcttccttttttaaaaataaataaataaataaataaataaataaataaataaataaataaagtgagtgtgtcttttggatctcttcagattagaaaaaaatctgtatttgactttt

SEQ ID NO: 298297 - DNA, 201 bp, Homo sapiens
ctgaccagtgtagtagggaactgggtcccacttccgcagcccccagccctgtcttctagagttagactgtacattgctaactaggcttccttttttaaaaataaataaataaataaataaataaataaataaataaataaataaagtgagtgtgtcttttggatctcttcagattagaaaaaaatctgtatttgacttttc

SEQ ID NO: 298298 - DNA, 201 bp, Homo sapiens
caatgcttctgcagtgggccggtcacttgccggtaccgtgattcatgttctgtgcagatgtgctgtcagaacaggctggttggccagccttcccccacccyggcccccgccccagacagagtcctgctgtgctgcccaggctggagtgtggcgcgatctcggcccactgcagcctctgccgggttcaagcaattctcctgc

SEQ ID NO: 298299 - DNA, 201 bp, Homo sapiens; identical to SEQ ID NO: 61992

SEQ ID NO: 298300 - DNA, 201 bp, Homo sapiens
tgaccagtgtagtagggaactgggtcccacttccgcagcccccagccctgtcttctagagttagactgtacattgctaactaggcttccttttttaaaaataaataaataaataaataaataaataaataaataaataaataaagtgagtgtgtcttttggatctcttcagattagaaaaaaatctgtatttgacttttcc

SEQ ID NO: 298301 - DNA, 201 bp, Homo sapiens; identical to SEQ ID NO: 61993

SEQ ID NO: 298302 - DNA, 201 bp, Homo sapiens
aatgtaacttgtcttttccgaagccgctgctgatctgctcttggtcaagcctctcaggattccagcttgagaatcatctagagtaattgtggagcctgtgrgagctaggtccaccccatgaagggcgggtgtgtgctggctcctacaccgttttttgattcttgttttcccttctcttacagtattaagggacatcagcga

SEQ ID NO: 298303 - DNA, 201 bp, Homo sapiens
gaccagtgtagtagggaactgggtcccacttccgcagcccccagccctgtcttctagagttagactgtacattgctaactaggcttccttttttaaaaatwaataaataaataaataaataaataaataaataaataaataaagtgagtgtgtcttttggatctcttcagattagaaaaaaatctgtatttgacttttcct

SEQ ID NO: 298304 - DNA, 201 bp, Homo sapiens; identical to SEQ ID NO: 61994

SEQ ID NO: 298305 - DNA, 201 bp, Homo sapiens
ctgcagctttggctgacatctgtcattctaccctactcctgttggccttactttctcccttttacccctctcaacgtttgctttaggctgtcagtgtttactgcaccccataaaaggttagatcctcccaccaggcctgatctgactactaggagagactgtctgtatctgctggagggattgagagaattggtacagaag

SEQ ID NO: 298306 - DNA, 201 bp, Homo sapiens; identical to SEQ ID NO: 61995

SEQ ID NO: 298307 - DNA, 201 bp, Homo sapiens
agtaagtataatacttgaaactgctttgttgagaaaaataaaagaaagcatctgtccagtctactataataaaatagcttagactgggtaatttataaacracaggaatttatagctcacaattctggagtctatgaggcccaagttcaaggcaccagtagattcagtgtctggtggggggcccattctctgcttcatagt

SEQ ID NO: 298308 - DNA, 201 bp, Homo sapiens; identical to SEQ ID NO: 61996

SEQ ID NO: 298309 - DNA, 201 bp, Homo sapiens
caggcattttagggggacacaggcatgccaaccttagcagcaacttttcatataatttgtatcctaaaaacagtaaaactcggccgggcgcggtggctcamgcctgtaatcccagcactttgggaggccgaggcgggcggatcacgaggtccggacatcgagaccatcccggctaaaacggtgaaaccccgtctctactaa

SEQ ID NO: 298310 - DNA, 201 bp, Homo sapiens
aggcattttagggggacacaggcatgccaaccttagcagcaacttttcatataatttgtatcctaaaaacagtaaaactcggccgggcgcggtggctcacscctgtaatcccagcactttgggaggccgaggcgggcggatcacgaggtccggacatcgagaccatcccggctaaaacggtgaaaccccgtctctactaaa

SEQ ID NO: 298311 - DNA, 201 bp, Homo sapiens
tcaaactgctgccatgatctggcccttcggaccttcttccctttcccccttactctagctagtccagccagacccactcttggcatggcaggctttccccsagccaaggatgtccgcatttgctgtctgctctgcctgaatctctcctgcttgttcactgagccatgcctagcacgatgtctggtagaatgaagaagaaac

SEQ ID NO: 298312 - DNA, 201 bp, Homo sapiens
ctctggacccgtgtcggcgcccactgctctgttctggaaccttggtcgccatccccatccagccagatcacgtattccacaccttcctgtcaggtgttccsaggactgtggggctggtttggtccttttgctgcttttctcagagatggcattgtgtgttttccgtcacctcaaactgctgccatgatctggcccttcgga

SEQ ID NO: 298313 - DNA, 201 bp, Homo sapiens
tttattcagctgtcactgggcatttccacatcatgttcttcaccaatgattatccagaatgagacccctaacaatacctgcctcctgttcctagccacagrcctgctgctctacctgtattttctctccacacagatgtacaagacagaaaccttacagtcatctctgtcactcctgcacttccacattctcccacatcca

SEQ ID NO: 298314 - DNA, 201 bp, Homo sapiens
atgattatccagaatgagacccctaacaatacctgcctcctgttcctagccacagacctgctgctctacctgtattttctctccacacagatgtacaagayagaaaccttacagtcatctctgtcactcctgcacttccacattctcccacatccatcctgtctcctggtgcagtcaatcttgctttctgaatttctcttg

SEQ ID NO: 298315 - DNA, 201 bp, Homo sapiens
caaggcttgaagctgcttatggattttttttttctttctaacacaaaggaaaaaaatgggatacatgtgcagaacgtgcgggtttgttatatagatatacstgtgccatggtggtttgctgcacctattgactcgtcctctaagttccctcccctcatccctacccccagcaggccctggtgtgtgtttccctctctgtgt

SEQ ID NO: 298316 - DNA, 201 bp, Homo sapiens
tctcagtgattttaatgcccacctttatttgcaaagtgaaaggagaaatatatttccctattgcatttcctacccttcacttgtcaggcatatttgatatwtttttttttgttttcatttaaaaaaaattccaaaaacaccatgtcaaatatgtcaaatatttattttttaaaaagtaggccaagtattaatgtctttctg

SEQ ID NO: 298317 - DNA, 201 bp, Homo sapiens
tcagaagtggtcaaaggagacctttgtcccggccgtgatcacccttggctctttggtggtggtccgagggctctgtaagaccatattagccaagtctttarcccccgcttgaagtctgtgggggcaaggaacccagaacccagcccagccagatgttctggcccttgttctctgtcccttgctagcccctgcctggcttgg

SEQ ID NO: 298318 - DNA, 201 bp, Homo sapiens
ccactgcagatcatggaggaatgaatgaaggcatttcgtataggatttggagcttacacgaacatcaaggctgggagagtgaaggcctggaagtttatagycagagaatcagacaaaatagtccccactgactctagcctgaggcactggagcagaagctggggttcatggaaaagtccaagaaaccaccatgtctgggtt

SEQ ID NO: 298319 - DNA, 201 bp, Homo sapiens
gggccaggagcacagacattttggcaatagggagctacagacgggtctattgttgtagtggaaaggtcattgtggtggcaggaggagagaggatctgcaawgccatttgtgaagaagcctttggaacagccccagtgagagtctgataagggcctgaaagaaagcagtggaactgagcatggttgacaggagccagggcct

SEQ ID NO: 298320 - DNA, 201 bp, Homo sapiens
ggggtcatcgtatgggtgtctgaccctcttaggagcctgtttcctttgttttatcagcaaggcaaggagagacaagggaaatgacttcctagctttaccckgggttttttctgcaggtggagaagggtggagtcctcccagatggttctttctttgctcccctaacagcctttaagatgtggctacttgtttttcccaccg

SEQ ID NO: 298321 - DNA, 201 bp, Homo sapiens
gtatgcatgtctgtatgctttcgtgtccattaaaccatttcagtcattaagctgatttgtcatgaaagcattcgatcttttcatcatatatataaaatatrtaagtataacccatatataattatgacatacaaaataggaataaaaaatgagaaaaaggaaacatttagaaacataatttctttaatggtataaaatctt

SEQ ID NO: 298322 - DNA, 201 bp, Homo sapiens
cattttagggggacacaggcatgccaaccttagcagcaacttttcatataatttgtatcctaaaaacagtaaaactcggccgggcgcggtggctcacgccygtaatcccagcactttgggaggccgaggcgggcggatcacgaggtccggacatcgagaccatcccggctaaaacggtgaaaccccgtctctactaaaaat

SEQ ID NO: 298323 - DNA, 201 bp, Homo sapiens
acatcgagaccatcccggctaaaacggtgaaaccccgtctctactaaaaatacaaaaaattagccgggcgtagtggcgggcgcctgtagtcccagctactygggaagctgaggcaggagaatggcgtgaacccaggaggcggagcttgcagtgagccgagatcccgccaccgcactccagcctgggcgacagagcgagact

SEQ ID NO: 298324 - DNA, 201 bp, Homo sapiens
aaaccccgtctctactaaaaatacaaaaaattagccgggcgtagtggcgggcgcctgtagtcccagctacttgggaagctgaggcaggagaatggcgtgarcccaggaggcggagcttgcagtgagccgagatcccgccaccgcactccagcctgggcgacagagcgagactccgtctcaaaaaaaaaaaaaaaaaaaaaa

SEQ ID NO: 298325 - DNA, 201 bp, Homo sapiens
accccgtctctactaaaaatacaaaaaattagccgggcgtagtggcgggcgcctgtagtcccagctacttgggaagctgaggcaggagaatggcgtgaacscaggaggcggagcttgcagtgagccgagatcccgccaccgcactccagcctgggcgacagagcgagactccgtctcaaaaaaaaaaaaaaaaaaaaaaca

SEQ ID NO: 298326 - DNA, 201 bp, Homo sapiens
cgggcgtagtggcgggcgcctgtagtcccagctacttgggaagctgaggcaggagaatggcgtgaacccaggaggcggagcttgcagtgagccgagatccygccaccgcactccagcctgggcgacagagcgagactccgtctcaaaaaaaaaaaaaaaaaaaaaacaaaaaaaaacaacagtaaaactcaatagctctgg

SEQ ID NO: 298327 - DNA, 201 bp, Homo sapiens
gctacttgggaagctgaggcaggagaatggcgtgaacccaggaggcggagcttgcagtgagccgagatcccgccaccgcactccagcctgggcgacagagygagactccgtctcaaaaaaaaaaaaaaaaaaaaaacaaaaaaaaacaacagtaaaactcaatagctctggtttattgactgtttattacatgcctgctaa

SEQ ID NO: 298328 - DNA, 201 bp, Homo sapiens
ctgcaatcttggctcactgtaacctccacctcccgtgttcaagtgattcttctgcctcagctttccaatagctgggattacaggcacctaccaccatgccyggctaatttttgtatttttagtagagacaggctttcaccatgttggtcaggctggtctcgaactcttgacctcaggtgatccacccgccttggcctccca

SEQ ID NO: 298329 - DNA, 201 bp, Homo sapiens
ccacctcccgtgttcaagtgattcttctgcctcagctttccaatagctgggattacaggcacctaccaccatgcccggctaatttttgtatttttagtagwgacaggctttcaccatgttggtcaggctggtctcgaactcttgacctcaggtgatccacccgccttggcctcccaaattgctgggattacaggcatgagc

SEQ ID NO: 298330 - DNA, 201 bp, Homo sapiens
agtgacagaactcaggccagttcttttgattctaaaaaggtaggagatcaaacccaatgcttaccacctgctaagcagaaagatctgatccgctttcccaraccagttatttgttgtgtggctggaaacagaagaagggctgcctaaaactgagtggtgggctaggtagtacggggaatagggagaggaagaaggggagga

SEQ ID NO: 298331 - DNA, 201 bp, Homo sapiens
ttatattttttggagggaaagagggccttccatagggatgctctgtcttaggatggaaaactggaaggttccctggtggaaaggtctcatagctaattgaygtgtcagaaccatggctggttaccacgtctgcagactttggcccgagtgcttcatccagtggtgactgatcatctcctgataagaagcccattcattaag

SEQ ID NO: 298332 - DNA, 201 bp, Homo sapiens
tagctgggattacaggcacctaccaccatgcccggctaatttttgtatttttagtagagacaggctttcaccatgttggtcaggctggtctcgaactcttsacctcaggtgatccacccgccttggcctcccaaattgctgggattacaggcatgagccaccgcgcccagccgggtcctgccttatttttcaatatccagg

SEQ ID NO: 298333 - DNA, 201 bp, Homo sapiens
actgtatgaggaaggtaccattattgtccctgttttatagttaaggaacttaagattcaaagaggttaaagtcacttgtcgaagttcacagaggtaggagwtattggggtcaggattcaggtccagggcagttttccccccagagcccatagaggtagaacaagaagcagcttttgggctacagagcagcttcactgtgat

SEQ ID NO: 298334 - DNA, 201 bp, Homo sapiens
attacaggcacctaccaccatgcccggctaatttttgtatttttagtagagacaggctttcaccatgttggtcaggctggtctcgaactcttgacctcagrtgatccacccgccttggcctcccaaattgctgggattacaggcatgagccaccgcgcccagccgggtcctgccttatttttcaatatccaggtacatgac

SEQ ID NO: 298335 - DNA, 201 bp, Homo sapiens; identical to SEQ ID NO: 61998

SEQ ID NO: 298336 - DNA, 201 bp, Homo sapiens
acaaaaattccttgttagtcttttttttcgagaaggagttttgctctgttgccccggctggggtgcagtggcacgatcttggctcattgcaacctccgccrtccaggttcaagccattctcctgcctcagcctcccaagtagctgggattacaggcatgtgccaccatgcttggctaatttttgtatttttagtagaggag

SEQ ID NO: 298337 - DNA, 201 bp, Homo sapiens; identical to SEQ ID NO: 62001

SEQ ID NO: 298338 - DNA, 201 bp, Homo sapiens
gggtttgcagcctcaatctgggagcttatggactgtttgcaaagtttccctgtctcagtattatgatctcctgaatattgtggattttgcttcactctcamcttcgaagtctcttgttggcgtagtaacctggaagcatgtggggcaagggattctgagaattgtagttctcccttagggggaagtggtggtggtgtcacg

SEQ ID NO: 298339 - DNA, 201 bp, Homo sapiens
tgagcagattttatctcagtacattacgttcgtcaagcctgcctttgaggaattctgcttgccagtgagttgtgttcttggtttgtttttgttgaatgtaraatttaaaatttgatgatataaacgaaggtgtgcaagtttgtggagctcccctgcctgaatctcactcctctctctgagtgatcctctgtcctgaagtcc

SEQ ID NO: 298340 - DNA, 201 bp, Homo sapiens
ttcagaagttccgtcacagatataccccatgttcgtttacagtgagtttcacccaacatttgagtctatttactgagaaatggttgggaaggagctgaagrgccactgcaaatgattgtagatggatgtggtaactttttggggtgaaagatttagcagctcagatgataaggttagattaagatagcatttaaaatgaca

SEQ ID NO: 298341 - DNA, 201 bp, Homo sapiens
gcagataatctgggtgagtccctgcagagtgtcatcctggagtataatgtctgccctttgtcagtcataatttggggcaggatgtggtgaccctacagggstctgcagacatggctgccctgcttgtctgtgattgtgagccagcagaacctttccacctacacgtctggcctcaggaacaggtccctgggtgtaggcacc

SEQ ID NO: 298342 - DNA, 201 bp, Homo sapiens
ataaagacagaattatttagacaaatggctttcagaagttccgtcacagatataccccatgttcgtttacagtgagtttcacccaacatttgagtctattyactgagaaatggttgggaaggagctgaagagccactgcaaatgattgtagatggatgtggtaactttttggggtgaaagatttagcagctcagatgataa

SEQ ID NO: 298343 - DNA, 201 bp, Homo sapiens
cagcagtgtgtgctgtgggattgtagaggttggggagttcatctgagcgctccctggaacagtcctgttgtcacgattccttaactctgaaggatgggatmgtgatttcagcttgagggactgcatgtgcattctgatccacattccagtgctgctgttcctggaacaagatgtaaggggaggggtagaggaagggcagga

SEQ ID NO: 298344 - DNA, 201 bp, Homo sapiens
ctttctggaaatgtggatttcctgacagttttctcaccttctcatcttatagatttcctgtcagcctggatcatagccatgacagcctccccgttccctgkcctctctgtgcatgcacctgtgcatgtgtgtataaagacagaattatttagacaaatggctttcagaagttccgtcacagatataccccatgttcgttta

SEQ ID NO: 298345 - DNA, 201 bp, Homo sapiens
tgcattagtcaataaatatctatgtggcagatcagaaatctgcttctgctgaaggggtcggtgctgttcgttttctgaattttctgacaagactggttagrtcctccaaggggatctgctccggtcatgtcctcaggagctagtgatgcccggactgatgccatcactagtccagcagtggtactcagtctcagggatgca

SEQ ID NO: 298346 - DNA, 201 bp, Homo sapiens
gtgatacacgattatattaaattgcttatggttagttttccaggaggtgatttaattgttcaccttcctaagtcttcagtcttaggcttatccagtgggarctggaaagctttaataggcaagtttattggaacacacttccagagtcaaatgtcactcttggcagctgcagatgtcaactgggacaagtattcagagcct

SEQ ID NO: 298347 - DNA, 201 bp, Homo sapiens
aagctcttcggtgtccaggacgtacgcgtcttggatccacggaagggggtcatcgtatgggtgtctgaccctcttaggagcctgtttcctttgttttatcmgcaaggcaaggagagacaagggaaatgacttcctagctttacccggggttttttctgcaggtggagaagggtggagtcctcccagatggttctttctttg

SEQ ID NO: 298348 - DNA, 201 bp, Homo sapiens
ataacccatgacagtgcagttgcgtaagtggcatgatctggagtgcagagtactgtggggacacccatgagggagccacaattgcctggggtagggagttrgaggaggcagatgacaggaggtaatgactgagctggagctggagggatgagcaggagttaggcagattgcaaagggggtgcgggcatgtgctgggtggca

SEQ ID NO: 298349 - DNA, 201 bp, Homo sapiens
tgcccgactaatttttttttttttgtagagaaggggttttgccatgttgccaggctgatctcaaatgcctagacttaagtgatccgcccgcctctgcctcmcaaagtgctgggattacaggtgtgagccactacctgggctggctttttaatctttattttttttattattttttttttttgagacagagtcttgctctgt

SEQ ID NO: 298350 - DNA, 201 bp, Homo sapiens
actccggccctgctttggttgatctgctcagtgtccatgtcagcttgtcaaattagagaggcagtgtgatacacagggacagataaattttagagtccagygaattgggctgagatcctggttttaccacttactagatgtgtggcaaattgtgcaaattggcaaattgtgttttaacttttttgtatctcattttcctat

SEQ ID NO: 298351 - DNA, 201 bp, Homo sapiens
tagacttaagtgatccgcccgcctctgcctcccaaagtgctgggattacaggtgtgagccactacctgggctggctttttaatctttattttttttattattttttttttttgagacagagtcttgctctgttgcccaggctggagtgcagtggcatgatctcggctcactgcaagctccgcctcccgggttcatgccatt

SEQ ID NO: 298352 - DNA, 201 bp, Homo sapiens
gtttgtgtgtgtgcacgtgtgtgtgtgtgtgtgctgggagaaggacaaagcttcctccagtgctaaagccttcagcaattgtatgaaaagcatgtgttgcmaaacaatccagcatcaggcgtttgcagggctttaagtaaaagctgcccaagcacgggtgtgtttgttttttccctagctctgatacccttttgatctggt

SEQ ID NO: 298353 - DNA, 201 bp, Homo sapiens
aggatccaggtagggatatttttataagcttcccagatggttctgatatgcatctcagatacaccacaattctagggcatttcctaatcctagtccttttytcccgtcttccctgccccgttctgccacttgctagctaccctagcagtgcctgccttaaaactcagacacaagcctgttggtccaagctgagaaggcatc

SEQ ID NO: 298354 - DNA, 201 bp, Homo sapiens
gagctagtgatgcccggactgatgccatcactagtccagcagtggtactcagtctcagggatgcagtgctgccgagggaggcctcgcagcagggagtgcargaaccagcacaggagattagaaccaagttttgagcagcagcaagacgctggaaataaagtgcatcctagtgtctaattcaaacagatcatcacggtgtgg

SEQ ID NO: 298355 - DNA, 201 bp, Homo sapiens
tttctcatttcagatctgctaacttcacatgtcacctactgccgagtcactttcctgatggattcatgggacttttctgcatgctatttctacaaattcaytctctctccacgtaggacaaaaaacatgcttggcatgtgctttgtggagtgcgggggtgctggggtagggaggctggttagtcagaagcagctgttgagt

SEQ ID NO: 298356 - DNA, 201 bp, Homo sapiens
aaactacctccttcctgatggaaacccttgatcttctcgggattggtttctagcctcatttgccttcatattccctctgtgctctttaccaccacccagcyctgaatacggggacagggaggaggtggggcagggagattcaggatggctgacccctcatcttcctcatccatcattctctggttctcatagaattagggc

SEQ ID NO: 298357 - DNA, 201 bp, Homo sapiens
ggaagggaggaaggaactttggggatcctaagacttctctgtcacaggcgtgtaaggcggactcttctccgttagcctttttttttttttttttttaattwaacttttaagttcaggggtttgttacataggtaaacttgtgtcacagaggtttgttatacagattatttcatcacccaggtattaagcctagtacccatt

SEQ ID NO: 298358 - DNA, 201 bp, Homo sapiens
caggagaatcctactgagtcaatgagtcttctccagcttggccaaaccatggtctggctcctgaattatttatagttaagctctgagaccgggaggaaggraaggaagagcttgggacttaacctggtcttggttgagatacactgggaaggctggaatctctgaagacattgaagatttagagtaaggctgggtattgga

SEQ ID NO: 298359 - DNA, 201 bp, Homo sapiens
tgtgcgttgaggtgtagagggggctgttttggtgcttacctccatgcctcaccagaatcttctgaaacacttccttctatgggccaggttcttctgtgtargagagaggagagtgaaagatcaggataccatcctcacgcctcccgtgtcactctgttttcctaacccaaccactgcagatcatggaggaatgaatgaagg

SEQ ID NO: 298360 - DNA, 201 bp, Homo sapiens
tggcctcaattgagcctcccatcccagctcccaaagtattgggattacaggtgttagccactgtgtctggccaaaattgagattttacacacacacacatrcacacacacacttttggtaacttaatgtatactgaacatctcccatattaccaaatattcttttcaaatgtcctttggtagctgtacacatcacatcata

SEQ ID NO: 298361 - DNA, 201 bp, Homo sapiens
ccctgttggtggccaccttgagggcgggggagctgggagcctgtgacaggaccccacccgcctgagtctgaagcccatgccttccctgaggcagctgtgtrtcgcatggtccagcccggctgcgtcagtccagccccaggatatcctgctgcccagacacttggtaacatttgagaagggattagtcacttactgtttggg

SEQ ID NO: 298362 - DNA, 201 bp, Homo sapiens
gccttcataggattgaagagagttagggccttgctctggattaggctttggttcaagggaatgttatggctggtttgatattctatccagaccaaactttyttcgtatcagtaataaggctgttttgctttcttatcattcatgtgttcactggagtggtacttttaattgccgtcatgaacttttcctttgcattcacat

SEQ ID NO: 298363 - DNA, 201 bp, Homo sapiens
gtgcaatctcagctcactgcaaacaccaccttccaggttcaagcgattctcctgcctcagcctccgaagtagctgggatcataggtgtgtgccactatgcycagctaatttttgtatttttagtagagacggggttttgccatgttggccaggctggtcttgaactcctgatgtcaagtgatctgcccgccttggcctctc

SEQ ID NO: 298364 - DNA, 201 bp, Homo sapiens
tagctgggatcataggtgtgtgccactatgcccagctaatttttgtatttttagtagagacggggttttgccatgttggccaggctggtcttgaactcctratgtcaagtgatctgcccgccttggcctctcaaagtgctgggattacaggtgtgagccaccatgcctggccgtcttttaggcatataaaagatgtttacc

SEQ ID NO: 298365 - DNA, 201 bp, Homo sapiens
agctgggatcataggtgtgtgccactatgcccagctaatttttgtatttttagtagagacggggttttgccatgttggccaggctggtcttgaactcctgrtgtcaagtgatctgcccgccttggcctctcaaagtgctgggattacaggtgtgagccaccatgcctggccgtcttttaggcatataaaagatgtttaccc

SEQ ID NO: 298366 - DNA, 201 bp, Homo sapiens
cagacagcacatctggattcagacatcagcttgtgtgacttaagcttatttttctcttcaccatgccagtcctgcctctagcaaaatacacgcagatttcmtgataccacttttaatttcagcaaattatgttatcattttcaattaactgataattagctggcagtccttggaaggtagaaggagttctgatggaagccc

SEQ ID NO: 298367 - DNA, 201 bp, Homo sapiens
aaaattaagaattttgaaaagtgagaagctatacctctgggataaataaaaagacaaatggcagaagatggatagtcgctaatcttttttttagataaacattttgttttgagatagttgtaggttcacaaacacataagaaataatacagagagatcccatattacaaaagacaccgggatgttgacgttgatacagtga

SEQ ID NO: 298368 - DNA, 201 bp, Homo sapiens
aaattaagaattttgaaaagtgagaagctatacctctgggataaataaaaagacaaatggcagaagatggatagtcgctaatcttttttttagataaacattttgttttgagatagttgtaggttcacaaacacataagaaataatacagagagatcccatattacaaaagacaccgggatgttgacgttgatacagtgaa

SEQ ID NO: 298369 - DNA, 201 bp, Homo sapiens
aacggaagtgggtgcttggcattgctttctctttccttcccctgttgctctgtatttgggcattagatgtgggtgctggaggagaaattaagaagaaaatkttaaaaatcttgataactagacagtctgatttctgattttccagtttagataaggattactggatggaggagttaactaaaatatactttgtacaacaaa

SEQ ID NO: 298370 - DNA, 201 bp, Homo sapiens
aattaagaattttgaaaagtgagaagctatacctctgggataaataaaaagacaaatggcagaagatggatagtcgctaatcttttttttagataaacattttgttttgagatagttgtaggttcacaaacacataagaaataatacagagagatcccatattacaaaagacaccgggatgttgacgttgatacagtgaag

SEQ ID NO: 298371 - DNA, 201 bp, Homo sapiens
attaagaattttgaaaagtgagaagctatacctctgggataaataaaaagacaaatggcagaagatggatagtcgctaatcttttttttagataaacattttgttttgagatagttgtaggttcacaaacacataagaaataatacagagagatcccatattacaaaagacaccgggatgttgacgttgatacagtgaaga

SEQ ID NO: 298372 - DNA, 201 bp, Homo sapiens
ttaagaattttgaaaagtgagaagctatacctctgggataaataaaaagacaaatggcagaagatggatagtcgctaatcttttttttagataaacattttgttttgagatagttgtaggttcacaaacacataagaaataatacagagagatcccatattacaaaagacaccgggatgttgacgttgatacagtgaagat

SEQ ID NO: 298373 - DNA, 201 bp, Homo sapiens
tgggagtgggtgtgtgggaaggcaggcagacctcaggtcatgaagggccataggcggcagggccaggagcacagacattttggcaatagggagctacagaygggtctattgttgtagtggaaaggtcattgtggtggcaggaggagagaggatctgcaatgccatttgtgaagaagcctttggaacagccccagtgagagt

SEQ ID NO: 298374 - DNA, 201 bp, Homo sapiens
ctacaccgttttttgattcttgttttcccttctcttacagtattaagggacatcagcgagagaggcagggatcttgagcagattttatctcagtacattaygttcgtcaagcctgcctttgaggaattctgcttgccagtgagttgtgttcttggtttgtttttgttgaatgtagaatttaaaatttgatgatataaacga

SEQ ID NO: 298375 - DNA, 201 bp, Homo sapiens
acccttgatcttctcgggattggtttctagcctcatttgccttcatattccctctgtgctctttaccaccacccagctctgaatacggggacagggaggargtggggcagggagattcaggatggctgacccctcatcttcctcatccatcattctctggttctcatagaattagggctgcactgggccttgggggattca

SEQ ID NO: 298376 - DNA, 201 bp, Homo sapiens
gtgtgaagaattggaggccgcgctggctgtgtgttttggcggtgctactctggttagccatgtgtgccggagctctggggacttctggggggtgagccacrtggcagctccttagggctccttcttagcgagtctcccagcagatctgccagagcagcaggtcggcagcaggagcccaggtccagcgttgcaggggtgggg

SEQ ID NO: 298377 - DNA, 201 bp, Homo sapiens
tatagttaagctctgagaccgggaggaagggaaggaagagcttgggacttaacctggtcttggttgagatacactgggaaggctggaatctctgaagacaytgaagatttagagtaaggctgggtattggaatttccctatttattctaacaataaacttcattctttttcttctgggaaaatatctcaaactgtctttgt

SEQ ID NO: 298378 - DNA, 201 bp, Homo sapiens
attacaaaagacaccgggatgttgacgttgatacagtgaagatacagaacacttccatcgctactgctgttttgctgtttattacctgccccggatttccygcccctccactgctccctgtccctaaccgtggtccaccactaatcgttccacaattttatacaaatataaccatactgtatgtaaccttttggaattgcc

SEQ ID NO: 298379 - DNA, 201 bp, Homo sapiens
gcctcccaaagtgctgggattacaggtgtgagccactacctgggctggctttttaatctttattttttttattattttttttttttgagacagagtcttgytctgttgcccaggctggagtgcagtggcatgatctcggctcactgcaagctccgcctcccgggttcatgccattcttctgcctcagcctcccaagtagct

SEQ ID NO: 298380 - DNA, 201 bp, Homo sapiens
aagtgctgggattacaggtgtgagccactacctgggctggctttttaatctttattttttttattattttttttttttgagacagagtcttgctctgttgyccaggctggagtgcagtggcatgatctcggctcactgcaagctccgcctcccgggttcatgccattcttctgcctcagcctcccaagtagctgggactac

SEQ ID NO: 298381 - DNA, 201 bp, Homo sapiens
tgggattacaggtgtgagccactacctgggctggctttttaatctttattttttttattattttttttttttgagacagagtcttgctctgttgcccaggytggagtgcagtggcatgatctcggctcactgcaagctccgcctcccgggttcatgccattcttctgcctcagcctcccaagtagctgggactacaggtgc

SEQ ID NO: 298382 - DNA, 201 bp, Homo sapiens
tgagccactacctgggctggctttttaatctttattttttttattattttttttttttgagacagagtcttgctctgttgcccaggctggagtgcagtggyatgatctcggctcactgcaagctccgcctcccgggttcatgccattcttctgcctcagcctcccaagtagctgggactacaggtgcccgccaccacgcct

SEQ ID NO: 298383 - DNA, 201 bp, Homo sapiens
gagccactacctgggctggctttttaatctttattttttttattattttttttttttgagacagagtcttgctctgttgcccaggctggagtgcagtggcrtgatctcggctcactgcaagctccgcctcccgggttcatgccattcttctgcctcagcctcccaagtagctgggactacaggtgcccgccaccacgcctg

SEQ ID NO: 298384 - DNA, 201 bp, Homo sapiens
agccactacctgggctggctttttaatctttattttttttattattttttttttttgagacagagtcttgctctgttgcccaggctggagtgcagtggcaygatctcggctcactgcaagctccgcctcccgggttcatgccattcttctgcctcagcctcccaagtagctgggactacaggtgcccgccaccacgcctgg

SEQ ID NO: 298385 - DNA, 201 bp, Homo sapiens
ctcctctcccttttctttttaccaccctacctttattgttagtggttacaaagtgaccacatattatgtactttgctgtaaataaagacagacaaaaaggmtctcgccttctgtgtgatgcttggcccagagcagcgaccgaatcctggctgtgtggcccaagtggctcaggaagggccatgctgtgcatgtgtggtgtag

SEQ ID NO: 298386 - DNA, 201 bp, Homo sapiens
acctgggctggctttttaatctttattttttttattattttttttttttgagacagagtcttgctctgttgcccaggctggagtgcagtggcatgatctcrgctcactgcaagctccgcctcccgggttcatgccattcttctgcctcagcctcccaagtagctgggactacaggtgcccgccaccacgcctggccaatgt

SEQ ID NO: 298387 - DNA, 201 bp, Homo sapiens
agtcttgctctgttgcccaggctggagtgcagtggcatgatctcggctcactgcaagctccgcctcccgggttcatgccattcttctgcctcagcctcccragtagctgggactacaggtgcccgccaccacgcctggccaatgtttttgtattttcagtaaacacggagtttcactgtgttagccaggatggtctcaatc

SEQ ID NO: 298388 - DNA, 201 bp, Homo sapiens
ttgcccaggctggagtgcagtggcatgatctcggctcactgcaagctccgcctcccgggttcatgccattcttctgcctcagcctcccaagtagctgggaytacaggtgcccgccaccacgcctggccaatgtttttgtattttcagtaaacacggagtttcactgtgttagccaggatggtctcaatctcctgaccttgt

SEQ ID NO: 298389 - DNA, 201 bp, Homo sapiens
aaaattatccaggtgcagtgctgcaggtctagaggctgaggtgggaggaatgcttgagtatgggaggtcgaggctgcagtgagctgtgattgtgccactayactccagcctgggtgacagagcaagacctgtctcgaacaaaaaccaaaaaaggttatggctgagtacggtggctcacacctctagtcccagcactttggg

SEQ ID NO: 298390 - DNA, 201 bp, Homo sapiens; identical to SEQ ID NO: 62004

SEQ ID NO: 298391 - DNA, 201 bp, Homo sapiens
tctgctcagttcaagttgggtttggggctgacaccgttgcctttcagcaatcctagggcagaggctgcacagagtaagatgcccacatgcttgaggtgtgrtttatgtgttcttatgctagacttagtttgtatgccaggatgcagttacttgtagaatggtctacaaaatctcagtaaatttggaccaacaaaaaagaaa

SEQ ID NO: 298392 - DNA, 201 bp, Homo sapiens; identical to SEQ ID NO: 62006

SEQ ID NO: 298393 - DNA, 201 bp, Homo sapiens
tttctagttcatatttgtcctagtggaatagaggcaattaagtgtttggcttcaaagaccatgttctctgcataggtcataagctgaaacagtgttcagcrttagaaatgagaacttggttgggtgcagtggctcacgcctgtaatcctgggactttgggaggcccaggtgggtggatcgcttgagcccaggagtttgaga

SEQ ID NO: 298394 - DNA, 201 bp, Homo sapiens
tcatgacctaatcacctcccagaggtcccacctcttaacgctattgatacgtggattaagtttcaacacaggcattttagggggacacaggcatgccaacmttagcagcaacttttcatataatttgtatcctaaaaacagtaaaactcggccgggcgcggtggctcacgcctgtaatcccagcactttgggaggccgagg

SEQ ID NO: 298395 - DNA, 201 bp, Homo sapiens
tttattataaaggatattttgcaaaggacacagatgaagagacgcacagggcaaggcatggggaaagaggtgcggagtttccaacccctcccttgtgtgcyaccctccaggaacctccaggtgttcagctatccggaaactccctgtacccagctttcttgggttttttggaaacgttccttcctacagtgcttagccctc

SEQ ID NO: 298396 - DNA, 201 bp, Homo sapiens
cctaacccctggcaaccactgatctttttgttgtcctcatagttttgcctttttaagaatgtcatatactgtagttgaaatcatacattatgtgacctttycagattagcttctttcacttagcaatatgcatttaaggtttctcagtgtcttttcatggcttgccagctcatttctttctttcttttttttttttgagac

SEQ ID NO: 298397 - DNA, 201 bp, Homo sapiens; identical to SEQ ID NO: 62000

SEQ ID NO: 298398 - DNA, 201 bp, Homo sapiens
gatacagtgaagatacagaacacttccatcgctactgctgttttgctgtttattacctgccccggatttcccgcccctccactgctccctgtccctaaccrtggtccaccactaatcgttccacaattttatacaaatataaccatactgtatgtaaccttttggaattgcccttttttactcagcacaattctctggaga

SEQ ID NO: 298399 - DNA, 201 bp, Homo sapiens
atggcgcaatctcggctcactgtagtctccaccttctgggttcaagcgattctcctgccttagcctcctgagtaactgggactacaggtgcgtgccaccaygcccagctaatttttgtatttttagtggagacggggtttggtgaaaccccctctggccatgttggccagagtggtcttgatctcctaaactcgtcatctg

SEQ ID NO: 298400 - DNA, 201 bp, Homo sapiens
tggcgcaatctcggctcactgtagtctccaccttctgggttcaagcgattctcctgccttagcctcctgagtaactgggactacaggtgcgtgccaccatrcccagctaatttttgtatttttagtggagacggggtttggtgaaaccccctctggccatgttggccagagtggtcttgatctcctaaactcgtcatctgc

SEQ ID NO: 298401 - DNA, 201 bp, Homo sapiens
ttgctagcccctgcctggcttggcccattatctgctctgtgctttgcaggaaggaggagacagttactgtctatcccgcagacgtggtgctctttgaaggratcctggccttctactcccaggaggtacgagacctgttccagatgaagctttttgtggatacagatgcggacacccggctctcacgcagaggtgcgttct

SEQ ID NO: 298402 - DNA, 201 bp, Homo sapiens
gctgggcgtggtggctcatgcctgtaatcccagcaccatgggaggccgaggcgtgtggatcactttgggtcaggagttcgagaccagcctggccaacatgktgaaaccccgtctctactaaaaatacaaaaaatttgctgggtgtggtggtgcacacctatagtcccagctactcgttaagctgaggcagacgaattgttt

SEQ ID NO: 298403 - DNA, 201 bp, Homo sapiens
gctaacccagtgcccagtgtcatggttggtgtttttaagcgtctgccaaactgaattaagtagtactccctttactggtttcctgtagcagtcattctctkgtgtcatggttagctgtttacacctctagattccaggatcctgcagtgtcagttatccctcttgtgtccccagtctcgtgcacagggagggcttcagtct

SEQ ID NO: 298404 - DNA, 201 bp, Homo sapiens
ttttattttttattttattttttattgagatggaatctcactctgtcactcaggctggaatgcagtggtgccatcttggtttactgcaacctccacctccygggttcaagcaattctcctgcctcagcctcctgagtagctgggattataggcatgtgccaccaggcctggctagtttttttgtatttttaatagaggtgg

SEQ ID NO: 298405 - DNA, 201 bp, Homo sapiens
gcgtggtggctcatgcctgtaatcccagcaccatgggaggccgaggcgtgtggatcactttgggtcaggagttcgagaccagcctggccaacatgttgaamccccgtctctactaaaaatacaaaaaatttgctgggtgtggtggtgcacacctatagtcccagctactcgttaagctgaggcagacgaattgtttgaacc

SEQ ID NO: 298406 - DNA, 201 bp, Homo sapiens
gaatctcactctgtcactcaggctggaatgcagtggtgccatcttggtttactgcaacctccacctcctgggttcaagcaattctcctgcctcagcctccygagtagctgggattataggcatgtgccaccaggcctggctagtttttttgtatttttaatagaggtgggggtttcaccatgttggccgggctggtctcga

SEQ ID NO: 298407 - DNA, 201 bp, Homo sapiens
atgcctgtaatcccagcaccatgggaggccgaggcgtgtggatcactttgggtcaggagttcgagaccagcctggccaacatgttgaaaccccgtctctaytaaaaatacaaaaaatttgctgggtgtggtggtgcacacctatagtcccagctactcgttaagctgaggcagacgaattgtttgaacctgggaggcagag

SEQ ID NO: 298408 - DNA, 201 bp, Homo sapiens
ctcactctgtcactcaggctggaatgcagtggtgccatcttggtttactgcaacctccacctcctgggttcaagcaattctcctgcctcagcctcctgagyagctgggattataggcatgtgccaccaggcctggctagtttttttgtatttttaatagaggtgggggtttcaccatgttggccgggctggtctcgaactc

SEQ ID NO: 298409 - DNA, 201 bp, Homo sapiens
ctaaaaatacaaaaaatttgctgggtgtggtggtgcacacctatagtcccagctactcgttaagctgaggcagacgaattgtttgaacctgggaggcagargttgcagtgagctgagatcacgccactgtactccagcctgggcgacagagtaagactctgtctcaataaaacttaaaaaaaaaaaaaaaaaaaaaaaaga

SEQ ID NO: 298410 - DNA, 201 bp, Homo sapiens
gtcgggtacattcttcaatagctcttctttgccttcagtcttgctgtcatcctgttctcccagctaagccacaggaggcttagtccctccagccttgcttyctgtcactccctctttgccttatcggtcctccccaaccctgagttgtcagcacttccagttcccagctcttgagagctcacctccacactagtgcacgtg

SEQ ID NO: 298411 - DNA, 201 bp, Homo sapiens
ttgggacagagccttgctctgtcacccaggctggagtgcaggggtgcgaactcggctcactacaactcctgcgattctcctgcctcagcctcccaagtagytgggattacaggtgcccaccacaatgtccggctaatttttgtatttttagtggagacggggtttcactgtgttggccaggctggtctcatcttctgacct

SEQ ID NO: 298412 - DNA, 201 bp, Homo sapiens
tgggtgtggtggtgcacacctatagtcccagctactcgttaagctgaggcagacgaattgtttgaacctgggaggcagaggttgcagtgagctgagatcamgccactgtactccagcctgggcgacagagtaagactctgtctcaataaaacttaaaaaaaaaaaaaaaaaaaaaaaagagatgatgtagaagaaccatag

SEQ ID NO: 298413 - DNA, 201 bp, Homo sapiens
cagtcttgctgtcatcctgttctcccagctaagccacaggaggcttagtccctccagccttgctttctgtcactccctctttgccttatcggtcctccccmaccctgagttgtcagcacttccagttcccagctcttgagagctcacctccacactagtgcacgtgtgttgatgctgctgcttctgatgtgcctcttttgt

SEQ ID NO: 298414 - DNA, 201 bp, Homo sapiens
tgccgggcgcggtggctcatgcctgtaatcctagcactttgagaggcctaggcaggcagattacctaaggtcaggagttcaagaccagcctggccaacatrgggaaaccccgtctctactaaaatacaaaaattagctgggcatggtggctggtgcctgtaatcccagctactccggaggctgaggcaggagaatcacttg

SEQ ID NO: 298415 - DNA, 201 bp, Homo sapiens
gccccctcattcctggcacagagctcctaaaaccctgtggataggggcactaggagaacctcttgttctaatatgttcctgacacagagcaccctcaaacstttgtaatttcctgggtgataacagagctcctaaatcccttagaatttcccaggtgataggagcatcttttgttctaacaagataactgtggtgggctcc

SEQ ID NO: 298416 - DNA, 201 bp, Homo sapiens
attgtttgaacctgggaggcagaggttgcagtgagctgagatcacgccactgtactccagcctgggcgacagagtaagactctgtctcaataaaacttaaraaaaaaaaaaaaaaaaaaaaagagatgatgtagaagaaccatagttctcatttttggccagtttgccttccagattttctctgtcatgtttacctatatc

SEQ ID NO: 298417 - DNA, 201 bp, Homo sapiens
agaatttcccaggtgataggagcatcttttgttctaacaagataactgtggtgggctcctggatagccaggatggtggctggttgctaagggaacgaaccrcgtgattacggtgttagaactttcagccccatgcccctgacctctggggaggtgagagggagaggggggctgaaggtcgagctgatcactaatgacagca

SEQ ID NO: 298418 - DNA, 201 bp, Homo sapiens
ctgggcatggtggctggtgcctgtaatcccagctactccggaggctgaggcaggagaatcacttgaacccaggaagcagaggttgcagtgagctgagattrcaccactacactccagcctgggcgacaagagcaagactttgtctcaaaacaaaaaacaaaacaaaaaaaacaaccaaatggatatgttatacattttttt

SEQ ID NO: 298419 - DNA, 201 bp, Homo sapiens
attttctctgtcatgtttacctatatcttttacatggttatagtcagagtatttgtactatattctcccctgtcctcatatgtacttactcagggtttttktttgtttgtttgtttgttttctatcttgatcaatttcactgtaagtttgttacttggcatgagggtagaaatgttgattcttactctactgcttactcta

SEQ ID NO: 298420 - DNA, 201 bp, Homo sapiens
ctgaaaccacatgtagaatttagttaagtgtgcatttcacatttcactggggagagtgtttcatgtcagatcccaggatgaggataagcacgaacactttytgatataggtgtattctttgtcaagttggcaacaaggatcctggaagctgacttgatttagggattagaacatgtttttcctttttattcctagtcccag

SEQ ID NO: 298421 - DNA, 201 bp, Homo sapiens
gcactttgggaggccgggatgggcaggtcatctgaggtcaggaggtcgagaccagcctgaccaatatggtgaaatcccatctctactaaaaatacaaaaaktagctgggcatggtggcgggtgcctgtaatctcagctactcgggaggctgaggcaggagaatcacttgaaccagggaggcggagatttcagtgagccgag

SEQ ID NO: 298422 - DNA, 201 bp, Homo sapiens
ttaacactcactcttttgtttttttttgagacacagtctcgctctgtcacgaggctggagtgcagtggcatgatctcagctcactgtaacctctgcctccygggttcaagcgatcctcctgcctcggcctcccaagtagctgggactacaggcgcgtgtcaccacacccagctaattttttgtatttttagtagagacggg

SEQ ID NO: 298423 - DNA, 201 bp, Homo sapiens
atggtataaaaagacaaatcacactgtctcagtggtaccacttcctagtgaaatgatcttgggcaaagttactcgctgtgtgtcaattttcctcatcaatraaatgggtaccaaagtagtgcctgcctgtattgtgaggattgtaaagattacataaaacaataaataattcagaaaaggcaattgaaatgttttctggta

SEQ ID NO: 298424 - DNA, 201 bp, Homo sapiens
ggatgggcaggtcatctgaggtcaggaggtcgagaccagcctgaccaatatggtgaaatcccatctctactaaaaatacaaaaattagctgggcatggtgrcgggtgcctgtaatctcagctactcgggaggctgaggcaggagaatcacttgaaccagggaggcggagatttcagtgagccgagatcgtgccactgcact

SEQ ID NO: 298425 - DNA, 201 bp, Homo sapiens
tgaggtcaggaggtcgagaccagcctgaccaatatggtgaaatcccatctctactaaaaatacaaaaattagctgggcatggtggcgggtgcctgtaatcycagctactcgggaggctgaggcaggagaatcacttgaaccagggaggcggagatttcagtgagccgagatcgtgccactgcactccagcctggatgacag

SEQ ID NO: 298426 - DNA, 201 bp, Homo sapiens
tgaccaatatggtgaaatcccatctctactaaaaatacaaaaattagctgggcatggtggcgggtgcctgtaatctcagctactcgggaggctgaggcagkagaatcacttgaaccagggaggcggagatttcagtgagccgagatcgtgccactgcactccagcctggatgacagagcaagacttcgtctcaaaaaaaaa

SEQ ID NO: 298427 - DNA, 201 bp, Homo sapiens
aaagggagttgtcattggaaccacatgctaaaaaagcatgcttgaaattagttttgattttaccttagtacagttgagctgaaataacctctagcagggtkctctagcaatacagaatattagtagtagactcatggaggtcatctagtggtttctgatggagagtttacagactgatttggtttgtgatgaaaattacat

SEQ ID NO: 298428 - DNA, 201 bp, Homo sapiens
cacatgctaaaaaagcatgcttgaaattagttttgattttaccttagtacagttgagctgaaataacctctagcagggtgctctagcaatacagaatattrgtagtagactcatggaggtcatctagtggtttctgatggagagtttacagactgatttggtttgtgatgaaaattacattctctgaaatttatatagaaa

SEQ ID NO: 298429 - DNA, 201 bp, Homo sapiens
agtgatcctcccaccttagcctcctgagtgtccaggactacaggggtgagccaccatgcctggctaatttttattttttctactttttgtagagatgaggktctcactgtgttgcccaggttggtcttgaactcctggcctcaattgagcctcccatcccagctcccaaagtattgggattacaggtgttagccactgtgt

SEQ ID NO: 298430 - DNA, 201 bp, Homo sapiens
cctcccaccttagcctcctgagtgtccaggactacaggggtgagccaccatgcctggctaatttttattttttctactttttgtagagatgagggtctcamtgtgttgcccaggttggtcttgaactcctggcctcaattgagcctcccatcccagctcccaaagtattgggattacaggtgttagccactgtgtctggcc

SEQ ID NO: 298431 - DNA, 201 bp, Homo sapiens
cttctaccgtgtccttacctcggagcagaaggccaaagccctgaagggccagttcaactttgaccacccgggtgagtcgggcattgaagggggtatgtatstgtattggtgtgttggggggaatagttttattttgctcatgaggaagttgcttaacctctcggaatcttgtttctatctagaacgtagggacttgataac

SEQ ID NO: 298432 - DNA, 201 bp, Homo sapiens
taggtggaggtggtcaggtggtggagagcttctgttctgagaacctgaccgagaggcaaaacattgtctctatgtagtgcttggcacaaccgtgggctccratctgggaaagagtggactcgggaccacagcagatttctctatggggctgcagtcaatgaaattgtcctgaagcaagcctggtctagggcgttctggcct

SEQ ID NO: 298433 - DNA, 201 bp, Homo sapiens
ggctggagtgcagtggcatgatctcagctcactgtaacctctgcctcccgggttcaagcgatcctcctgcctcggcctcccaagtagctgggactacaggygcgtgtcaccacacccagctaattttttgtatttttagtagagacggggtttcaccatgttggccaggatggtcttgatctcttgacctcgtgatctgcc

SEQ ID NO: 298434 - DNA, 201 bp, Homo sapiens
gcagtggcatgatctcagctcactgtaacctctgcctcccgggttcaagcgatcctcctgcctcggcctcccaagtagctgggactacaggcgcgtgtcaycacacccagctaattttttgtatttttagtagagacggggtttcaccatgttggccaggatggtcttgatctcttgacctcgtgatctgcctgactcggc

SEQ ID NO: 298435 - DNA, 201 bp, Homo sapiens
cctctgcctcccgggttcaagcgatcctcctgcctcggcctcccaagtagctgggactacaggcgcgtgtcaccacacccagctaattttttgtatttttwgtagagacggggtttcaccatgttggccaggatggtcttgatctcttgacctcgtgatctgcctgactcggcctctcaaagtgctgggattacgggtgtg

SEQ ID NO: 298436 - DNA, 201 bp, Homo sapiens
ctctactaaaaatacaaaaattagctgggcatggtggcgggtgcctgtaatctcagctactcgggaggctgaggcaggagaatcacttgaaccagggaggyggagatttcagtgagccgagatcgtgccactgcactccagcctggatgacagagcaagacttcgtctcaaaaaaaaaagaaagaaaaaatcagagagtga

SEQ ID NO: 298437 - DNA, 201 bp, Homo sapiens
tctgaaacgagaaaaatctgctccattacactgccatcagagtggtcttccttaggaatagctctggatgtgccattttcctttttggaaaccttgggtarctccccactgctcagtacaggtcaaacacttcagtacagtacaaatccccttggcccctaatatggtcccaggctattatttttattttttattttattt

SEQ ID NO: 298438 - DNA, 201 bp, Homo sapiens
attgtagctaggagctcctagtcagcaatgcatgggctctggggccatgcatgacttcaagaatagatggcctagggcaacccacttgggtccccttccaygctgtggaagctttgttctttcgttcttcacaataaatcttgctgctgaaaaaagaaaagaatagatggctttgcagatattccagggaagcatttgagt

SEQ ID NO: 298439 - DNA, 201 bp, Homo sapiens
agtcctgctgtgctgcccaggctggagtgtggcgcgatctcggcccactgcagcctctgccgggttcaagcaattctcctgcctcagcctcccaagtagcygggactacaggcgtgtgccaccatgcccggctacttgttgtatttttagtagaggcggggtttcaccatgttggccaggctggtcttgaattcccgacct

SEQ ID NO: 298440 - DNA, 201 bp, Homo sapiens
gcaatgcatgggctctggggccatgcatgacttcaagaatagatggcctagggcaacccacttgggtccccttccatgctgtggaagctttgttctttcgytcttcacaataaatcttgctgctgaaaaaagaaaagaatagatggctttgcagatattccagggaagcatttgagtgacacctctctattgtgccactta

SEQ ID NO: 298441 - DNA, 201 bp, Homo sapiens
ctgccgggttcaagcaattctcctgcctcagcctcccaagtagctgggactacaggcgtgtgccaccatgcccggctacttgttgtatttttagtagaggyggggtttcaccatgttggccaggctggtcttgaattcccgacctcaagttatcccccggcattggcctcccaaagtgctgggagtacaggcgtgagccac

SEQ ID NO: 298442 - DNA, 201 bp, Homo sapiens
cacgatctcagctgactgcaacctttgtgtcttgggttcaggcgattttcctggctcagcctcccgagtagctgggactacaggcatgtgccaccatgccyggctaatttttgtatttttagtagaggcagggtttcaccatgttggccaggctagtctcaaactgacttcaggtgatccacccaccttggcctcttaaac

SEQ ID NO: 298443 - DNA, 201 bp, Homo sapiens
cagcctcccaagtagctgggactacaggcgtgtgccaccatgcccggctacttgttgtatttttagtagaggcggggtttcaccatgttggccaggctggkcttgaattcccgacctcaagttatcccccggcattggcctcccaaagtgctgggagtacaggcgtgagccactgtgcccggcctggtcagcctttaaaaa

SEQ ID NO: 298444 - DNA, 201 bp, Homo sapiens
tttttttttttaatttaacttttaagttcaggggtttgttacataggtaaacttgtgtcacagaggtttgttatacagattatttcatcacccaggtattmagcctagtacccattagttatttttccttatcctctgcttcctcccacccgccacctccagcaggccccagtgtgtgttgttcccctccctgtgtccatg

SEQ ID NO: 298445 - DNA, 201 bp, Homo sapiens
ttgataacctgctagaggcaaggtagtgtttgaccaatatctgtgtgactctagtaacttagccttgtacaggagatatatatttgtgtgtgcacacgtakgtgtgtgtgtgtgtatatatatatatatataaaatgaatataaaaatctccatgatcctagcaaaatcctactgctgctgctgctgctttttttttttga

SEQ ID NO: 298446 - DNA, 201 bp, Homo sapiens
cctctgcttcctcccacccgccacctccagcaggccccagtgtgtgttgttcccctccctgtgtccatgcattctcatcatttagctcccacttacaagtrggaacatgcagtatttggttttctgttcctgtgttagtttgctaaggatagtgtcctctagctccatccatgttcccacatgagacgtgatcttattctt

SEQ ID NO: 298447 - DNA, 201 bp, Homo sapiens
tatatatatatataaaatgaatataaaaatctccatgatcctagcaaaatcctactgctgctgctgctgctttttttttttgagatggagttttgctcttktcacccaggctggagtgcaatggcacgatctcggctcactgcatcctccgcctcctaggttcaagcagttcttgtgcctaagcctcccgagtagctggga

SEQ ID NO: 298448 - DNA, 201 bp, Homo sapiens
agcaggccccagtgtgtgttgttcccctccctgtgtccatgcattctcatcatttagctcccacttacaagtgggaacatgcagtatttggttttctgttyctgtgttagtttgctaaggatagtgtcctctagctccatccatgttcccacatgagacgtgatcttattctttttatggctgcatcccttagccctttaa

SEQ ID NO: 298449 - DNA, 201 bp, Homo sapiens
gagtgcaatggcacgatctcggctcactgcatcctccgcctcctaggttcaagcagttcttgtgcctaagcctcccgagtagctgggattacaggcgcccrccaccacacccagctaatttttgtatttttagtagagatggggtttcaccatgttggctaggctgttctcaaactcctgacctcaggtgatccaccccca

SEQ ID NO: 298450 - DNA, 201 bp, Homo sapiens
tgggaggctgaggcgggtggatcaggaagtcaggagatggagaccatcctggctaacacggtgaaacccccatctctactaaaaatacaaaaaattagccrggcgtggtggcaggtgcctgtagtctcagctactcgggaggctgaggcaggagaatcgcttgaaccccagaggcagaggttgtagtgagctgagatcgcg

SEQ ID NO: 298451 - DNA, 201 bp, Homo sapiens
acgatctcggctcactgcatcctccgcctcctaggttcaagcagttcttgtgcctaagcctcccgagtagctgggattacaggcgcccaccaccacacccrgctaatttttgtatttttagtagagatggggtttcaccatgttggctaggctgttctcaaactcctgacctcaggtgatccacccccaatcagcctccca

SEQ ID NO: 298452 - DNA, 201 bp, Homo sapiens
ctcctaggttcaagcagttcttgtgcctaagcctcccgagtagctgggattacaggcgcccaccaccacacccagctaatttttgtatttttagtagagakggggtttcaccatgttggctaggctgttctcaaactcctgacctcaggtgatccacccccaatcagcctcccaaagtgctggggattacaggcgtgagcc

SEQ ID NO: 298453 - DNA, 201 bp, Homo sapiens
aggcttttaacttactaaaaaggacaacttttggctgggattgatgactcaatgcctgatgactcaatgcctgtaatcccagcactttgggaggtcaaggkaggaggatcacttgaggccaggagtttgataccagcctgtcaacatagtagaaccccccatctctacaaaaaataagtaatgagccaggtgcagtggcat

SEQ ID NO: 298454 - DNA, 201 bp, Homo sapiens
tgtaggaaccatttcaagtgacgtggaaggaggttatcaaggtaggattagaaacatgtatttattatgctgcttactatccagtcttcagttatatatgtgttattattttacagaaggcttcattggacaaaaattccttgttagtcttttttttcgagaaggagttttgctctgttgccccggctggggtgcagtggc

SEQ ID NO: 298455 - DNA, 201 bp, Homo sapiens
atcaatgggttggaagtgaaagtcccttcccaaactcaactctggggaagaagctcttgccttctctggccctcccctgcccaccttgtccaccctgcttkgcccatcacagcaggcctcccgttccactgcaataaccctccccactagtctccttgtgcgggaccagtctttactcttctttgggttgctgtttgcgtc

SEQ ID NO: 298456 - DNA, 201 bp, Homo sapiens
tccttgtcctggccaatgtgaaaccttgggaatagttgcagagtagagaaatcaaaatacacaatctattctctgcttggcctttttacgccctggtgcarattgactaacctgtggtttttgatcatctctggtccagcggttgggaatctgtgctgtctatagcatctgagtgttgtgagaataaaatgtgaaaatagg

SEQ ID NO: 298457 - DNA, 201 bp, Homo sapiens
tttccttcaccccgaaagaaatcctggacccattagcagtctctctccatttcccacactaacctccctagccataggcaaccacaaatctacatcggacrgggcccattctggacattaatttttaatttttatttgaaagtgcccctgtaatcccagcactcttggaggccaaggcgggaagatcacttgagcccagga

SEQ ID NO: 298458 - DNA, 201 bp, Homo sapiens
gggtggatcaggaagtcaggagatggagaccatcctggctaacacggtgaaacccccatctctactaaaaatacaaaaaattagccaggcgtggtggcagstgcctgtagtctcagctactcgggaggctgaggcaggagaatcgcttgaaccccagaggcagaggttgtagtgagctgagatcgcgccactgcactccag

SEQ ID NO: 298459 - DNA, 201 bp, Homo sapiens
aagtcaggagatggagaccatcctggctaacacggtgaaacccccatctctactaaaaatacaaaaaattagccaggcgtggtggcaggtgcctgtagtcycagctactcgggaggctgaggcaggagaatcgcttgaaccccagaggcagaggttgtagtgagctgagatcgcgccactgcactccagcctgggtgacag

SEQ ID NO: 298460 - DNA, 201 bp, Homo sapiens
ccatcctggctaacacggtgaaacccccatctctactaaaaatacaaaaaattagccaggcgtggtggcaggtgcctgtagtctcagctactcgggaggcygaggcaggagaatcgcttgaaccccagaggcagaggttgtagtgagctgagatcgcgccactgcactccagcctgggtgacagagtgatgagactctgtc

SEQ ID NO: 298461 - DNA, 201 bp, Homo sapiens
tggtggcaggtgcctgtagtctcagctactcgggaggctgaggcaggagaatcgcttgaaccccagaggcagaggttgtagtgagctgagatcgcgccacygcactccagcctgggtgacagagtgatgagactctgtctcaaaaacaaacaaacaaaaaattagtccattgaggtggtgtgtgcctgtagtcccagctac

SEQ ID NO: 298462 - DNA, 201 bp, Homo sapiens
tcttgctctgtcacccaggctggagtgcagtggcgtactcttggctcactacctctgcctcctgggttcggggtttcaccatgttggccaggctggtctcraactcctaacctcaagtgatctgcccactttggcctcccaaagtgctaggatttacagccatgagccactgcacccagccgaagattaggttttaagtga

SEQ ID NO: 298463 - DNA, 201 bp, Homo sapiens
taagctgaaacagtgttcagcgttagaaatgagaacttggttgggtgcagtggctcacgcctgtaatcctgggactttgggaggcccaggtgggtggatcscttgagcccaggagtttgagaccagcctgggcaacatggcgataccccctctctataaaaaataacaaaaattagctgggtgtggtggcgggtgcctgta

SEQ ID NO: 298464 - DNA, 201 bp, Homo sapiens
gttgaccctcatgtgggagagagatctgtgtttgagtgaagcagccctggaaactacctccttcctgatggaaacccttgatcttctcgggattggtttcyagcctcatttgccttcatattccctctgtgctctttaccaccacccagctctgaatacggggacagggaggaggtggggcagggagattcaggatggctg

SEQ ID NO: 298465 - DNA, 201 bp, Homo sapiens
gcaagtcatcttctctgtaaattaggtgtagttaataacacctgttactcagagagtgactggattaacaggtaagagtttggactggagtgacccagaartggtatgaaatagtgagaagaacttgagatcgctacgtgtcccagagaagacaccttccttagatctaagttgaggagactgaattaaacagcctttgtt

SEQ ID NO: 298466 - DNA, 201 bp, Homo sapiens
ttttgagcagcagcaagacgctggaaataaagtgcatcctagtgtctaattcaaacagatcatcacggtgtggtttcaacagaacattttcccttcctttmttgcatgggattcttatgtgaaataggagcaattcctacaatggtgctggccctctgggggtttcttagggccagctctgcctctccgccttctctgaac

SEQ ID NO: 298467 - DNA, 201 bp, Homo sapiens
cagcaacccatacttgactttggtttaaatgcgggacaggtggactttttgagccaactgagtaacattgatgccctatccattgccctggagactattgrgttacaagagtaggttactggaaagagaccagagggggctgaggagctgtgaacttctttccacccagttatctatctgaggacctctcctgttattttt

SEQ ID NO: 298468 - DNA, 201 bp, Homo sapiens
gtgttcagcgttagaaatgagaacttggttgggtgcagtggctcacgcctgtaatcctgggactttgggaggcccaggtgggtggatcgcttgagcccagragtttgagaccagcctgggcaacatggcgataccccctctctataaaaaataacaaaaattagctgggtgtggtggcgggtgcctgtagtcccagctact

SEQ ID NO: 298469 - DNA, 201 bp, Homo sapiens
ccgccttctctgaacaggctgcctgggcagggctctgctttctcatttcagatctgctaacttcacatgtcacctactgccgagtcactttcctgatggaytcatgggacttttctgcatgctatttctacaaattcattctctctccacgtaggacaaaaaacatgcttggcatgtgctttgtggagtgcgggggtgctg

SEQ ID NO: 298470 - DNA, 201 bp, Homo sapiens
gggtttctccatgttggtcaggctggtctcaaactctcgacctcaagtgttccatctgccttggcctcccaaagtgctgggattttaggcatgagccaccrtgcccggccttattttttaatttttaaatttttcttagagacaaggtcttgctctgttgcccaggctggagtgcagtggcatgatcacagctgtctgcag

SEQ ID NO: 298471 - DNA, 201 bp, Homo sapiens
gaaactacctccttcctgatggaaacccttgatcttctcgggattggtttctagcctcatttgccttcatattccctctgtgctctttaccaccacccagmtctgaatacggggacagggaggaggtggggcagggagattcaggatggctgacccctcatcttcctcatccatcattctctggttctcatagaattaggg

SEQ ID NO: 298472 - DNA, 201 bp, Homo sapiens
gcagccttgaactcctgggctgaaaccatcttcctgcttcaacctcccaagtagctgggactacaggtgcacatgccacaacatgcgactaatttttaaatttttttttttttttttttgaggtggagtctggttctgttgcccaggctggagtgcagtggcgagatcttggcccactgcaagctccgcctcccgtgttca

SEQ ID NO: 298473 - DNA, 201 bp, Homo sapiens; identical to SEQ ID NO: 62005

SEQ ID NO: 298474 - DNA, 201 bp, Homo sapiens
gagtctggttctgttgcccaggctggagtgcagtggcgagatcttggcccactgcaagctccgcctcccgtgttcacgccattctcctgcctcagcctccygagtagctgagactacaggcgcccgccaccacacccagctaattttttttttgtatttttagtagagacggggtttcaccgtgttagccaggatggtctt

SEQ ID NO: 298475 - DNA, 201 bp, Homo sapiens
ggagtgcagtggcgagatcttggcccactgcaagctccgcctcccgtgttcacgccattctcctgcctcagcctcccgagtagctgagactacaggcgccygccaccacacccagctaattttttttttgtatttttagtagagacggggtttcaccgtgttagccaggatggtcttgatctcctgacctcgtgatccacc

SEQ ID NO: 298476 - DNA, 201 bp, Homo sapiens
actgcaagctccgcctcccgtgttcacgccattctcctgcctcagcctcccgagtagctgagactacaggcgcccgccaccacacccagctaatttttttyttgtatttttagtagagacggggtttcaccgtgttagccaggatggtcttgatctcctgacctcgtgatccacccgcctcggcctcccaaagtgctggga

SEQ ID NO: 298477 - DNA, 201 bp, Homo sapiens
gctccgcctcccgtgttcacgccattctcctgcctcagcctcccgagtagctgagactacaggcgcccgccaccacacccagctaattttttttttgtatktttagtagagacggggtttcaccgtgttagccaggatggtcttgatctcctgacctcgtgatccacccgcctcggcctcccaaagtgctgggattacagg

SEQ ID NO: 298478 - DNA, 201 bp, Homo sapiens
tcccgtgttcacgccattctcctgcctcagcctcccgagtagctgagactacaggcgcccgccaccacacccagctaattttttttttgtatttttagtaragacggggtttcaccgtgttagccaggatggtcttgatctcctgacctcgtgatccacccgcctcggcctcccaaagtgctgggattacaggcgtgagcc

SEQ ID NO: 298479 - DNA, 201 bp, Homo sapiens
tgaagatacttctgctcacaggagtttttgagcctcagtgtctggctacagggttctcatttgaatgtccagttttcccagtaccatttgctggatgacarttttaatatgtgaatgaagatacttctgctcacaggagtttttgagcctcagtgtctggctacagggttctgctttaatatgtaggaggaagagattcaa

SEQ ID NO: 298480 - DNA, 201 bp, Homo sapiens
tttaagatgcttgctcctctcccttttctttttaccaccctacctttattgttagtggttacaaagtgaccacatattatgtactttgctgtaaataaagmcagacaaaaaggctctcgccttctgtgtgatgcttggcccagagcagcgaccgaatcctggctgtgtggcccaagtggctcaggaagggccatgctgtgc

SEQ ID NO: 298481 - DNA, 201 bp, Homo sapiens
catctgtgaaaaggagatgatgtctggtttggagaggtgttagggttaaacgataaaatgtatgcagaggtatatacatagcaatgcttctgcagtgggcsggtcacttgccggtaccgtgattcatgttctgtgcagatgtgctgtcagaacaggctggttggccagccttcccccaccccggcccccgccccagacaga

SEQ ID NO: 298482 - DNA, 201 bp, Homo sapiens
ttgatggagtggagaacgtgcgtgggttttggagtcagccaggcttgtgttaacatccctatttggccacttttaatctgtttcttctgaacctattcctrcatctgtgaaaaggagatgatgtctggtttggagaggtgttagggttaaacgataaaatgtatgcagaggtatatacatagcaatgcttctgcagtgggc

SEQ ID NO: 298483 - DNA, 201 bp, Homo sapiens
tttttttaaattttaggatacatgtattactaacaacaacacacaaagcatgtaggtttgagttcatttggagttggcttctccactcttgtttgggataytcctaagttgttttagatgttggtggtgtttgtgttccttgtcaccctgtctgtggtgacacacgtttgtgaaaaggccacctggtttactgtagatgtg

SEQ ID NO: 298484 - DNA, 201 bp, Homo sapiens
tggtccgagggctctgtaagaccatattagccaagtctttagcccccgcttgaagtctgtgggggcaaggaacccagaacccagcccagccagatgttctrgcccttgttctctgtcccttgctagcccctgcctggcttggcccattatctgctctgtgctttgcaggaaggaggagacagttactgtctatcccgcaga

SEQ ID NO: 298485 - DNA, 201 bp, Homo sapiens
gcagttgaataaactgaggtttatagaaattatgtaagctggcttggtgtggtggctcttgcctataatcccagcactttgggaagctgaggtgggcagayagcttgagctcaggagtttgagaccagcccgggcaacatggtgaaaccccacctctaccaaaagtacaaaaattagccgggcgtggtggctggcgcctgt

SEQ ID NO: 298486 - DNA, 201 bp, Homo sapiens
cggagtttcactgtgttagccaggatggtctcaatctcctgaccttgtgatccgcccgcctcggcctcccaaagtgctgggattacaggtgtgcgccaccrcgccggcaatctttattttttgtagagactaggtcaccatgttgcccaagcttgtttgtacatttttgacatacgaatgattgatagtttgtcatccttt

SEQ ID NO: 298487 - DNA, 201 bp, Homo sapiens
tcccgagtagctgagactacaggcgcccgccaccacacccagctaattttttttttgtatttttagtagagacggggtttcaccgtgttagccaggatggkcttgatctcctgacctcgtgatccacccgcctcggcctcccaaagtgctgggattacaggcgtgagccaccacgcctggcctttaaattttttttttttt

SEQ ID NO: 298488 - DNA, 201 bp, Homo sapiens
tgatctggtttccttttttctttgggctttatctggagacgtgtgaagaattggaggccgcgctggctgtgtgttttggcggtgctactctggttagccaygtgtgccggagctctggggacttctggggggtgagccacgtggcagctccttagggctccttcttagcgagtctcccagcagatctgccagagcagcagg

SEQ ID NO: 298489 - DNA, 201 bp, Homo sapiens
cgagtagctgagactacaggcgcccgccaccacacccagctaattttttttttgtatttttagtagagacggggtttcaccgtgttagccaggatggtctygatctcctgacctcgtgatccacccgcctcggcctcccaaagtgctgggattacaggcgtgagccaccacgcctggcctttaaatttttttttttttttt

SEQ ID NO: 298490 - DNA, 201 bp, Homo sapiens
agtttcactgtgttagccaggatggtctcaatctcctgaccttgtgatccgcccgcctcggcctcccaaagtgctgggattacaggtgtgcgccaccacgccggcaatctttattttttgtagagactaggtcaccatgttgcccaagcttgtttgtacatttttgacatacgaatgattgatagtttgtcatcctttaag

SEQ ID NO: 298491 - DNA, 201 bp, Homo sapiens
ggctgggtattggaatttccctatttattctaacaataaacttcattctttttcttctgggaaaatatctcaaactgtctttgtttctttaaggatgttastagcttttacagcaacccatacttgactttggtttaaatgcgggacaggtggactttttgagccaactgagtaacattgatgccctatccattgccctgg

SEQ ID NO: 298492 - DNA, 201 bp, Homo sapiens
tgtacatttttgacatacgaatgattgatagtttgtcatcctttaagattattgatatttttgttattaaaaaagtccaagactgggcctggtggctcacrcctgtaatcctagcattttgggaggcagagacaggaggattgcttgagcccgggagtttgaggccagcctgggcaacatagtgagaccccatctgtataa

SEQ ID NO: 298493 - DNA, 201 bp, Homo sapiens
gtagctgagactacaggcgcccgccaccacacccagctaattttttttttgtatttttagtagagacggggtttcaccgtgttagccaggatggtcttgawctcctgacctcgtgatccacccgcctcggcctcccaaagtgctgggattacaggcgtgagccaccacgcctggcctttaaattttttttttttttttttt

SEQ ID NO: 298494 - DNA, 201 bp, Homo sapiens
gagactacaggcgcccgccaccacacccagctaattttttttttgtatttttagtagagacggggtttcaccgtgttagccaggatggtcttgatctcctracctcgtgatccacccgcctcggcctcccaaagtgctgggattacaggcgtgagccaccacgcctggcctttaaattttttttttttttttttttttaat

SEQ ID NO: 298495 - DNA, 201 bp, Homo sapiens
ggaggctgaggcaggagaatcacttgaacccaggaagcagaggttgcagtgagctgagattgcaccactacactccagcctgggcgacaagagcaagactytgtctcaaaacaaaaaacaaaacaaaaaaaacaaccaaatggatatgttatacatttttttgaagaaaacatcttgatgagatagagccttccaccccca

SEQ ID NO: 298496 - DNA, 201 bp, Homo sapiens
tttagtagagacggggtttcaccgtgttagccaggatggtcttgatctcctgacctcgtgatccacccgcctcggcctcccaaagtgctgggattacaggygtgagccaccacgcctggcctttaaattttttttttttttttttttttaatagagaatgggtctcgctatgttgcttggactcctgggctcaagcaatcc

SEQ ID NO: 298497 - DNA, 201 bp, Homo sapiens
gaggctgaggcaggagaatcacttgaacccaggaagcagaggttgcagtgagctgagattgcaccactacactccagcctgggcgacaagagcaagacttygtctcaaaacaaaaaacaaaacaaaaaaaacaaccaaatggatatgttatacatttttttgaagaaaacatcttgatgagatagagccttccacccccaa

SEQ ID NO: 298498 - DNA, 201 bp, Homo sapiens
ctaattttttttttttgtatttttagtagagacggggtttcaccatgttagccaggatggtctcaatctcctgacctcgtgatccacctgcctcggcctcycaaagtgctgggattacaggcgtgagccactgcgcccagcctttagatttctattttaaagcagactgtaatcagatcacttcctaaacccagaatgaag

SEQ ID NO: 298499 - DNA, 201 bp, Homo sapiens
cagagcaagactccgtctcaaaaaaaaaaaaaaaaaaaaaaagaagcctgtgcccaagttcatactgtgcgagggcgtaaacgccagcaggcgggtttgctgggccttcctagaatctgctgggccttcctagaatctgctgggccttcctagaatctgctgggcccaggcaactcaggggagctctcacagcacgtgccg

SEQ ID NO: 298500 - DNA, 201 bp, Homo sapiens
gcaagactccgtctcaaaaaaaaaaaaaaaaaaaaaaagaagcctgtgcccaagttcatactgtgcgagggcgtaaacgccagcaggcgggtttgctgggccttcctagaatctgctgggccttcctagaatctgctgggccttcctagaatctgctgggcccaggcaactcaggggagctctcacagcacgtgccgtggt

SEQ ID NO: 298501 - DNA, 201 bp, Homo sapiens
tcctgtatataacagcactgtagcaataaacgtgacattttataacgatgccctgcagtccccgggttctttctggtgtcacatgtttaggaagggaagtgggggggggccctgacgttcacctcgggtgcagcaaggaccgtggtccaccctgtgcactgggcttcctcgaagcgactcctcactctgaggagcccatgg

SEQ ID NO: 298502 - DNA, 201 bp, Homo sapiens
ctctggtgaggccccttggggcaatgtgggcagggtttcttcatccgcctccaggaggagcaccccctaccgccccaacatcccagctgtgtgatttgctrtgatccagggaggtgaatcggatttttttttttcttccgagacagagtctcactgtcgcccaagctagagtgcagtggcacgatctcggctcactgcaac

SEQ ID NO: 298503 - DNA, 201 bp, Homo sapiens
gattcctgccctgttggtggcatctgcctccgagccaggttccaggagcagctgtgcgtgcccccagctggtgagcgggcacctggcctacacttggagastctctggtgaggccccttggggcaatgtgggcagggtttcttcatccgcctccaggaggagcaccccctaccgccccaacatcccagctgtgtgatttgc

SEQ ID NO: 298504 - DNA, 201 bp, Homo sapiens
cgggctagtttttatatttttagtagagatgaggtttcaccatgttggccaggctggtctagaattcctgacctcaggtgatccacccgcctcggcctccsgaagtgctgggattacaggtgtgaaccgccgcaccccgcccggaattggattttaatttcagccctctgttggccagcagtgggacctgcaattgttatc

SEQ ID NO: 298505 - DNA, 201 bp, Homo sapiens
aaataacgttctggcacatactaggcgcacaaaatcactggcaggtagccccgcggagcccagaagcacaatcggccgccagaccacgtggccagaaagcmccgccctaacgccgcccactccggaccacttctccgcggtcgtccaaccctcgccggaagttactgtaagtggcttccgggtctgcgcgcacagtggcgg

SEQ ID NO: 298506 - DNA, 201 bp, Homo sapiens
cgagaagagcctggccaacaaggtgaaaccctgtctctactaaaaatacaaaaattagtcgggcgcggtagtggacacctgtaatcccagcttcatgggargctgagacaagagaatcacttgaacctgggaggcgggggttgccgtgagctgagattgcgtcattgcactccagcctgggtgacagagcgagattctatc

SEQ ID NO: 298507 - DNA, 201 bp, Homo sapiens; identical to SEQ ID NO: 62048

SEQ ID NO: 298508 - DNA, 201 bp, Homo sapiens
ggtgaggccccttggggcaatgtgggcagggtttcttcatccgcctccaggaggagcaccccctaccgccccaacatcccagctgtgtgatttgctgtgayccagggaggtgaatcggatttttttttttcttccgagacagagtctcactgtcgcccaagctagagtgcagtggcacgatctcggctcactgcaacctcg

SEQ ID NO: 298509 - DNA, 201 bp, Homo sapiens; identical to SEQ ID NO: 62043

SEQ ID NO: 298510 - DNA, 201 bp, Homo sapiens; identical to SEQ ID NO: 62045

SEQ ID NO: 298511 - DNA, 201 bp, Homo sapiens; identical to SEQ ID NO: 62046

SEQ ID NO: 298512 - DNA, 201 bp, Homo sapiens; identical to SEQ ID NO: 62041

SEQ ID NO: 298513 - DNA, 201 bp, Homo sapiens
tctgctgggccttcctagaatctgctgggccttcctagaatctgctgggcccaggcaactcaggggagctctcacagcacgtgccgtggtgggcaagagcrtgagcttggaaccggaggcctcgatcctcgccagctgtgtggcctcaggtgagggcctcgccctgtctgttgtttggtgtcctcgcctgggaacagggac

SEQ ID NO: 298514 - DNA, 201 bp, Homo sapiens
cttctaaagccaccagcaaattgtgcctaagcgaaatattttttttaaggaaaataaaaacattagttacaagattttttttttcttaatgtagatgaaamttagcaaggatgctgcctttggtctctggtttttttaagctttttttgcatatgttttgtaagcaacaaatttttttgtataaaagtcccgtgtctctcg

SEQ ID NO: 298515 - DNA, 201 bp, Homo sapiens; identical to SEQ ID NO: 62044

SEQ ID NO: 298516 - DNA, 201 bp, Homo sapiens
tctgttgtttggtgtcctcgcctgggaacagggactgtgatggcggcacctgcctgagtcctgcagctgtggcagggatggatgaatttctgcagactgcmgcagaccggacccatcatcatggtggttgcaaacttacaaacacctacacatgcgccaggcccagcctccccccagctccactcccaccccagcagcccc

SEQ ID NO: 298517 - DNA, 201 bp, Homo sapiens
caagactccgtctcaaaaaaaaaaaaaaaaaaaaaaagaagcctgtgcccaagttcatactgtgcgagggcgtaaacgccagcaggcgggtttgctgggccttcctagaatctgctgggccttcctagaatctgctgggccttcctagaatctgctgggcccaggcaactcaggggagctctcacagcacgtgccgtggtg

SEQ ID NO: 298518 - DNA, 201 bp, Homo sapiens
tacaatcccaacactttgggaggctgaggaaggggcatcacttgaaccaggagttcagtactaacctgggcaacaaagaggcccctgtctctgataaaaaraaaaaaaatgaaaaaataaaaatgaacaggtataaaaagagaatatggtacaaagtcacactccctgatacagctgcccagttttttccagctcttgcca

SEQ ID NO: 298519 - DNA, 201 bp, Homo sapiens
agttctgggattacaggcatgagccactgcgcccagcccaacatttattgagcacctactatgtgttagggacgcgccaatagaccgaacccttgtgggcrgacattctggttggtgggcaaggaaaggtaaagaaacgagacctgtggtgtggggctgacctaaaataacgaagcgggagaggaaggggtgcagacacgt

SEQ ID NO: 298520 - DNA, 201 bp, Homo sapiens
tctcatccgagggtgtgaccaggcagatccgtttccacgatcactcacggggttgttggctggattcatttatttcttcctttttttttttttttttgagmcggtgtctcgctctgtcaccaggctggagtacaatggcatgatctaagctcactgcaagctccgcctcccgggttcatgccattctcctgcctcagcctc

SEQ ID NO: 298521 - DNA, 201 bp, Homo sapiens
ggtggctcacgcctgtaatcccagcactttggggggcctaggcaggtatatcacaaggtcaggagttcgagagcagcctgaccaatatggtgaaatcccayctctactaaaaatataaaaaattagccaggcatagtggtgcacatctgttgtcccagctgcttgggaggctgaggcaggagaattgcttgaaccagggag

SEQ ID NO: 298522 - DNA, 201 bp, Homo sapiens
ccagtacagcccgggcgctgccgtggtcatgctgcttccagccatcatgttctccgtgtcggctgccatgatggccatcgcgatcatgaaggtgagtcctyggctttgtgacgtccagcccttaccccttctccatgaacctcgtcacccaactgtcccaggtgggtgaacgtcgaggagccgggccctctccccacggtg

SEQ ID NO: 298523 - DNA, 201 bp, Homo sapiens
gcagcctgaccaatatggtgaaatcccacctctactaaaaatataaaaaattagccaggcatagtggtgcacatctgttgtcccagctgcttgggaggctraggcaggagaattgcttgaaccagggaggcagaggttgcagtgagccaggatcgcgccactgccctccagcctgggggacagagtgagactgtcccaaaa

SEQ ID NO: 298524 - DNA, 201 bp, Homo sapiens
caggagaattgcttgaaccagggaggcagaggttgcagtgagccaggatcgcgccactgccctccagcctgggggacagagtgagactgtcccaaaaaaaraaaagcccccacgcagactattggtgtgccctggaactgagcattagctgttccctctccgagttctctcccctacttccccagccttccaggctgggct

SEQ ID NO: 298525 - DNA, 201 bp, Homo sapiens; identical to SEQ ID NO: 62051

SEQ ID NO: 298526 - DNA, 201 bp, Homo sapiens
gaatggtgtgaacccgggaggcggagcttgcagtgagcgagatcgggccactgcactccagcctgggtgacagagcgagactgtctcagaaaaaaaaaaaagagatggtccgggcgtggtggctcacgcctgtaatcccagcacttttgggaggccgaggtgggcagatgatgaggtcaggagtttgagaccagcctggac

SEQ ID NO: 298527 - DNA, 201 bp, Homo sapiens; identical to SEQ ID NO: 62052

SEQ ID NO: 298528 - DNA, 201 bp, Homo sapiens
agcaaggcccccagctgctgcctcctttcccgcttctggagtcctgatggttccaggcgtgcctggcccaagtgtgtggacactaggcgtagtccacaggscaccgaccctaaggaagggccctgggatttcgtgtccttcacaagtggcaacaggggaccccaaagggctgatgctagtcggtcacagcacagtgaggac

SEQ ID NO: 298529 - DNA, 201 bp, Homo sapiens
tctcaaactcctgtgcttaagtgatcctctcgccttggtctcctgagtagctgggactacatgtgcacaccaccgtgcccaactaatttatacttttaagmaatgtgggctgggcacggtggctcacacctgtaatcccagcactttgggaggctgaggcaggtggatcacctgaggtcaggagttccaagaccagcctgg

SEQ ID NO: 298530 - DNA, 201 bp, Homo sapiens
catgcagtggacagaacaccactgctggccaggagcccgccaggcctgcagtgggggagtccgtgcctgggggtgggactgaggtgggctggagggtccckgatggggccagagccacagcgtggagtgaggaggtgggagccgcagaggcgtgcccagttgagtggtagaggcagcatttgggcctccttcatgctcagg

SEQ ID NO: 298531 - DNA, 201 bp, Homo sapiens
acccgggaggcggaggttgcagtgagctgagatcatgccactgtactccagcctgggcgacagcgagactccgtctcagaagtaaaaaaataaaataaaawaaaaagaaaatgatctgtcttctggtaggtgaattatatcttcgtttttaaaaaccaatggctgtttaaactctgtgcacaccaggggttagcaggacat

SEQ ID NO: 298532 - DNA, 201 bp, Homo sapiens
gcgcagtgcctactagcaattgtagtccttgccccaccttggcctggcgaagatcccgcccctggaactacgctcccgtcgtgctccgcggctccaggcgragacgaggcggggtgaggtgggttgggccgggccggttgctaagacttggcgaagcgctgcgctcgcgcccggatccctcaggtaagcgcgcggccccga

SEQ ID NO: 298533 - DNA, 201 bp, Homo sapiens
gggcagcaggcatgcccctgctgggctggcccacctcccgatggcaggtccgcccccaggatcacggaagcagctagatccactcagtcgtgggtggatgkcaggccaggtggggctgctctggtgggtgagctcatggggttccctttcagaacggccagggtgccatgcggatgcgatggggtcttaggccctgcagcg

SEQ ID NO: 298534 - DNA, 201 bp, Homo sapiens
gcggatcccgagagctgggggccccaccagcccttcctctccagtggagtggccctactgcctcatgtccacctgtgccagcagcagggatggtaatggcyctactatctcctgtcctcacctgtgccagcagcagggatggtaacggctttactgcctcccgtcctcacctgtgccagtggctgggatgtcttcacctgt

SEQ ID NO: 298535 - DNA, 201 bp, Homo sapiens
tctcgggttctccaggctcagacttccccagagggggagtaggggctgacatggggggtctcggcggtgaggggcgccggccgtttgtggggagaaaacgsggggcccaggccagcctcgcgcgcgtctcgggcgggccggtgggcgacgcggggaggcggcgcgaatgcgcgtgcgcgcgcgcgcgcggcgctggcctgg

SEQ ID NO: 298536 - DNA, 201 bp, Homo sapiens
ggctgctctggtgggtgagctcatggggttccctttcagaacggccagggtgccatgcggatgcgatggggtcttaggccctgcagcgttcaccttgtggygcccaccccttgtgggctgaagccgggatttgggggacgcaggggcctaggacagcggggaaggggcatcctggctggggcggtgggtgggaggggctgc

SEQ ID NO: 298537 - DNA, 201 bp, Homo sapiens
attggtgtgccctggaactgagcattagctgttccctctccgagttctctcccctacttccccagccttccaggctgggctgtgggtcactgcctccgagragccctcctggattctgctgaagatggtcaggcccctccatccccccattttctcttatgtacctgacagccctgccttaaaaaaaaaaaaaaaaggtag

SEQ ID NO: 298538 - DNA, 201 bp, Homo sapiens
cccggccagtctgccaagaggcacccccttccccagcctctcgcctgcactgatgcagacaaaatctcacctggcaggcccaacccccccccacccctccmccgccgtgtgtggcccctcgccgcatcgttggggttttgttatgtgaaaatatcctggaaataaatacatgtttctgcacttagagccagggacctgccg

SEQ ID NO: 298539 - DNA, 201 bp, Homo sapiens
cccctgccatcacagctgctctttccttatagcagcgggcgtgttctcatgtgccccggggtccctcacccactcatttactggcagccttccccagtggkgcgtaagcccctgaggacagggcctcttgctgtctgactccccatctggccctcgcaggcgcccagggacacttcctcaggcagtgctggctgagcagaa

SEQ ID NO: 298540 - DNA, 201 bp, Homo sapiens; identical to SEQ ID NO: 62064

SEQ ID NO: 298541 - DNA, 201 bp, Homo sapiens
gccctgccttaaaaaaaaaaaaaaaaggtagagcaggaattcccatttcacaggggtggaagccgaggcttggaggagtcaggactggtgcctgagttctygcagtcaggaattgaccgcgctgggctgaacgcctctagggcaggttggggactgggtgtgttttctgggtggacatacccaggtcccggcgcggacctt

SEQ ID NO: 298542 - DNA, 201 bp, Homo sapiens
tctgccagcctttggggtgcttccccctcctgcagaggctgtggctgcaggtcaaggcactgctcgtcatcctccgagtcctcctgagctcccagctgccrgctcggctcccactggcccttccctgggctccagtgcctcctgtgagccgcctccccggtgcgtccccagctctcccaggctgagctgggtggacaggcc

SEQ ID NO: 298543 - DNA, 201 bp, Homo sapiens
tagctgggactacaggcgcccgctaccgcacctggctaattattttgtttttgtatttttggtagagacaggttttcaccgtgttagccaggatggtctcratctcctgacctcgtgatcctcccgcctcggcctcccgaagtgctgggatgacaggcgtgagccaccgtgcccggcctattttttatattgtagtagaga

SEQ ID NO: 298544 - DNA, 201 bp, Homo sapiens
cctgtggctcccgcttagcccactgctgtttccagagcacagggcacgatgaagggcttttcagccacggtgggtgggtggttagcgctctgcccagggcrgctcagggttccctgactgtggttgtcttccttccaggcggctgcaggcttcagcctgcgctggttggtgaaacagagatgtcaggtgagtcctgcctgc

SEQ ID NO: 298545 - DNA, 201 bp, Homo sapiens
tggcgtttttcttcatcttcggagcccagtttgtcctgaccgtcatccaggcgattggcttctccggctggggcgcgtggtaagcctctctctgatgggcrtggtggctgtgatgtggctcagctgccaggttgtgggcctgctgggaagccaggcggccaccggagcgtgctggtccgggattgtacgcgctctcctagg

SEQ ID NO: 298546 - DNA, 201 bp, Homo sapiens
gctgaggccctggagctgtcctgtcagtgagggtggggccccttgcaggttcccggtcacagtttccatctgaagatagcggaagtgttgagctgggctcrtaacagaaactttcagttacagcaaaatgcttttttttttttttttttttttttagacagagtctcgctctgtcacccaggctggagtgtagtggtgcga

SEQ ID NO: 298547 - DNA, 201 bp, Homo sapiens
ggccctgtgagcagtccctgcaggctggctgtccccacgcctgcctctctgctgtgctgtctgcccgcctagggcaggctcccttctaatgggcggatccygagagctgggggccccaccagcccttcctctccagtggagtggccctactgcctcatgtccacctgtgccagcagcagggatggtaatggctctactatc

SEQ ID NO: 298548 - DNA, 201 bp, Homo sapiens
ctcgaactccagagctcagacagtctgtctgcctcggcctcccgaagtgctgggatgacaggcgtgagtccccgcgcccggccgccatgctcattttctgycttctgcctccctgtcctctgtccttgcaggtgcacaggatctaccgaggggctggcggaagcttccagaaggcacagacggagtggaacacgggcactt

SEQ ID NO: 298549 - DNA, 201 bp, Homo sapiens
ggtggctcacgcctgttatcccagcactttgggaggcagaggtgggcggattatttgaggtcaggagttcaaaaccagcctggccaacatggtgaaacctygtgtctactaaaaagaaaaatccaaaaattagccgggtgtggtggtgggcgcctgtaatcccagctacttgggaggctgaggcagaagaatcacttgagc

SEQ ID NO: 298550 - DNA, 201 bp, Homo sapiens
tgaggcagtactgtctgctagaaataactgtgagcacacaggtagtaaggtttttaggattttattattatttatttatttgaaaaaaggaacagggtctytctatcttgcccacgttggtctcaaactcctgtgcttaagtgatcctctcgccttggtctcctgagtagctgggactacatgtgcacaccaccgtgccca

SEQ ID NO: 298551 - DNA, 201 bp, Homo sapiens
gctgggacgacaggcgtaagcctctgcgcccggcctcctcattgtttctaatggtccctcagtgcccaccgggtgatggtggcagattttccatccgcatkgctcccggacatgcggatgtaggtttcagcagttcccatcattagacacagttgccgtaggctgggttcttagtagcaggctcagtggggcctttgagtc

SEQ ID NO: 298552 - DNA, 201 bp, Homo sapiens
cacacgcggctcactgctgcgatggtggagggataaggtcgtattcacgcgttgaagttggtgcctctcagtatcgctttatgtttgttggccacttggtsgtccttgtatgagctgtccactccttgttgattggccagagctctttacatggggaggaccatgggccggaccatgggccctcatccagcaggtgtgcag

SEQ ID NO: 298553 - DNA, 201 bp, Homo sapiens
aagaggcacccccttccccagcctctcgcctgcactgatgcagacaaaatctcacctggcaggcccaacccccccccacccctcccccgccgtgtgtggcycctcgccgcatcgttggggttttgttatgtgaaaatatcctggaaataaatacatgtttctgcacttagagccagggacctgccgcgtttgtgctgtgag

SEQ ID NO: 298554 - DNA, 201 bp, Homo sapiens
cctgcactgatgcagacaaaatctcacctggcaggcccaacccccccccacccctcccccgccgtgtgtggcccctcgccgcatcgttggggttttgttaygtgaaaatatcctggaaataaatacatgtttctgcacttagagccagggacctgccgcgtttgtgctgtgagcatgtgtggttcccccaggccgtcttct

SEQ ID NO: 298555 - DNA, 201 bp, Homo sapiens
tgtagccaggtgtgcccagggctgaccctgccatcctggccaacgtggtgaaacccggcctctactaaaaatacaaaaattagccgggcgcggtggcgggygcctgtagttctagctactcaggaggctgaggcaggagaattgcttgaacccgggaggcggaggttgccgtgaacccagatcgcgccactgcactcccca

SEQ ID NO: 298556 - DNA, 201 bp, Homo sapiens
actctcttgtcccttgcagcggctggctgtcggcaattggattcttccagtacagcccgggcgctgccgtggtcatgctgcttccagccatcatgttctcygtgtcggctgccatgatggccatcgcgatcatgaaggtgagtcctcggctttgtgacgtccagcccttaccccttctccatgaacctcgtcacccaactg

SEQ ID NO: 298557 - DNA, 201 bp, Homo sapiens
ccgaggagccctcctggattctgctgaagatggtcaggcccctccatccccccattttctcttatgtacctgacagccctgccttaaaaaaaaaaaaaaaaggtagagcaggaattcccatttcacaggggtggaagccgaggcttggaggagtcaggactggtgcctgagttctcgcagtcaggaattgaccgcgctggg

SEQ ID NO: 298558 - DNA, 201 bp, Homo sapiens
gatcatgaaggtgagtcctcggctttgtgacgtccagcccttaccccttctccatgaacctcgtcacccaactgtcccaggtgggtgaacgtcgaggagcygggccctctccccacggtgtcacgcaggccgcacttcatccccagcagtgagctgggatgacagcaggaggcactgtcaccagggacactcccagggacc

SEQ ID NO: 298559 - DNA, 201 bp, Homo sapiens
tgtgaactcaggaggcagagcttgcagtgagccaggatcgtgccactgcactccagcctgggcgacagagtgagactccgtctcaaaaaaaaaaaaaaatkgtgtgtgtgtgtgtgtgtgtgtgtgtgtgtgtgtgtgtgtaaagaaacaagccccaggctgggcgcggtggctcacgcctgtaatcccagcactttgggg

SEQ ID NO: 298560 - DNA, 201 bp, Homo sapiens
gtgtgaactcaggaggcagagcttgcagtgagccaggatcgtgccactgcactccagcctgggcgacagagtgagactccgtctcaaaaaaaaaaaaaaatggtgtgtgtgtgtgtgtgtgtgtgtgtgtgtgtgtgtgtgtaaagaaacaagccccaggctgggcgcggtggctcacgcctgtaatcccagcactttggg

SEQ ID NO: 298561 - DNA, 201 bp, Homo sapiens
aagatcccgcccctggaactacgctcccgtcgtgctccgcggctccaggcggagacgaggcggggtgaggtgggttgggccgggccggttgctaagacttkgcgaagcgctgcgctcgcgcccggatccctcaggtaagcgcgcggccccgaggtctcgggttctccaggctcagacttccccagagggggagtaggggct

SEQ ID NO: 298562 - DNA, 201 bp, Homo sapiens
ctccccacggtgtcacgcaggccgcacttcatccccagcagtgagctgggatgacagcaggaggcactgtcaccagggacactcccagggacccagcgccygggttcctatggggccagtcctgtggccccctgggccgggagtccagactccagagggaagcaggggttgtgtgtaaaccgcagtgtttgcaggaacagc

SEQ ID NO: 298563 - DNA, 201 bp, Homo sapiens
gaagtcgggcccaccaggggaggggctgcgctccggggcttacgtttcgtggcttgtcttctgaggtctctcttttcctagcccttggccgactagggggygagtgtttacagaaaccactggaggtgggtgttccgtgtcagtgccaggctgtgtgctgttctgggagggggccccgtgtcccccacacttggcatgctt

SEQ ID NO: 298564 - DNA, 201 bp, Homo sapiens
ggctggaacccaggtgtcagccagggctgtgttgtcatctggaggctcaacgggggtggcatctgcttgcaactcacgcaggcgttggcggaattcagcascttgcggccgggggaccaagggtcctgctcagttcctggccacatggcccttctgtctggaagccaggcgccgcctgtccccgcttctgcttccaggctc

SEQ ID NO: 298565 - DNA, 201 bp, Homo sapiens
ggtttcaccatgttgtttggactggtctcgaactccagagctcagacagtctgtctgcctcggcctcccgaagtgctgggatgacaggcgtgagtccccgygcccggccgccatgctcattttctgtcttctgcctccctgtcctctgtccttgcaggtgcacaggatctaccgaggggctggcggaagcttccagaaggc

SEQ ID NO: 298566 - DNA, 201 bp, Homo sapiens
gtctcgatctcgtggcctcatgatctgcccgcctcagcctcccaaagtgctgggattacaggcttaagccaccacgcctggcttttttgttgttttttgayagtctcgcgctgttaccaggctggagtgcagtggcgcgatctcggctcaatgtaacctgcgcctcccaggttcaaccttctgggttctcctgcaagcctc

SEQ ID NO: 298567 - DNA, 201 bp, Homo sapiens
ccaattctttgtatttttagtagagacggggtttcaccgtgttagccaggatggtcttgatctcctgaccttgtgatccgcctgcctcggcctcccaaagygctaggattacaggcgtgagccaccgtgcccgggttttcattttttttttgagatggcatcttgctctgtcagccaggctggggtacagtggcacgattg

SEQ ID NO: 298568 - DNA, 201 bp, Homo sapiens
ggcggacagcgggtgccccattgctgggcccatgctttcccacggccacaccctcccgtgcctgctcatccgtcctccctctctcttcgcagtttactgcrccaccctcggcgtcaacctcattgcctgcctggcctggtggatcggcggaggctcggggaccaacttcggcctggccttcgtgtggctgctcctgttcac

SEQ ID NO: 298569 - DNA, 201 bp, Homo sapiens
gtggtttctcacagcagccatggggaacggaagcgtccccaggccacagcctccccgcagtgtgcggactcggcctgctgagcctgcatgttggcgtcccygcctgccggagggaatgatactaaatgcagcctgctgcagccgcacccacactaaacatggaggagggctacgaagagtagcagggccctgcatgaaggg

SEQ ID NO: 298570 - DNA, 201 bp, Homo sapiens
ggcagtttctgttgttctaagcctcccagtcggtggtggtttctcacagcagccatggggaacggaagcgtccccaggccacagcctccccgcagtgtgcrgactcggcctgctgagcctgcatgttggcgtccctgcctgccggagggaatgatactaaatgcagcctgctgcagccgcacccacactaaacatggagga

SEQ ID NO: 298571 - DNA, 201 bp, Homo sapiens
ctaggacagcggggaaggggcatcctggctggggcggtgggtgggaggggctgcggccagccctgcccgttttgccagcatgggtggtgtgcactggagcygaggggagggggacctgtggggtaacacattgggtcgagtcaggcctgtggctcccgcttagcccactgctgtttccagagcacagggcacgatgaaggg

SEQ ID NO: 298572 - DNA, 201 bp, Homo sapiens
tgagccaccgtgcccggcctattttttatattgtagtagagacagggtttcaccatgttgtttggactggtctcgaactccagagctcagacagtctgtcygcctcggcctcccgaagtgctgggatgacaggcgtgagtccccgcgcccggccgccatgctcattttctgtcttctgcctccctgtcctctgtccttgca

SEQ ID NO: 298573 - DNA, 201 bp, Homo sapiens
agtgcgcctgggggcaggaggcgggaagcgggaggcagggctccccgagggagggagtggcattcaggcaggggcagcccgtcgggggcccaccgtctacygaagccgtcctgggcctggtggtccctgcggtgaacgaggctggtgtccaggccccagtgtcttggcttgcacagttcatcctcgacatggggtcaccgg

SEQ ID NO: 298574 - DNA, 201 bp, Homo sapiens
caggcgttggcggaattcagcagcttgcggccgggggaccaagggtcctgctcagttcctggccacatggcccttctgtctggaagccaggcgccgcctgyccccgcttctgcttccaggctctggcttctggagatgcagagatcacatcagtggttgcctgggttgctgtgtgtgttgtagggtggtgagacaagtttt

SEQ ID NO: 298575 - DNA, 201 bp, Homo sapiens
actgaagccgtcctgggcctggtggtccctgcggtgaacgaggctggtgtccaggccccagtgtcttggcttgcacagttcatcctcgacatggggtcacygggctggggaggcggacagcgggtgccccattgctgggcccatgctttcccacggccacaccctcccgtgcctgctcatccgtcctccctctctcttcgc

SEQ ID NO: 298576 - DNA, 201 bp, Homo sapiens
gaggtcaggagttcaagaccagcctggccaacatggtgaaacgctgtctctactataggtacaaaaattagccaggcgtggttgcgggcgcctataatccyagctactcaggaggctgaggcaagagaatcgcttgaacccgggaggcagaggttgcagtgagccgagatctcgacactgctctccagcctgggcgacaga

SEQ ID NO: 298577 - DNA, 201 bp, Homo sapiens
cgtcgtgttttctgtccctccccagagccgacagctcctttaatttcatggcgtttttcttcatcttcggagcccagtttgtcctgaccgtcatccaggcrattggcttctccggctggggcgcgtggtaagcctctctctgatgggcgtggtggctgtgatgtggctcagctgccaggttgtgggcctgctgggaagcca

SEQ ID NO: 298578 - DNA, 201 bp, Homo sapiens
attttggaataatttgtaattctcagttgcagagagtgactgttctcgcccacgtccccgacgtgtctcccttgtccttggcacggcgggagctccccacrggtgacgctgctcacggagccgtgggtgcctttggtttcctgggctcccattagcaagctcctgttctggggttcctgccccacaagactgcggtactct

SEQ ID NO: 298579 - DNA, 201 bp, Homo sapiens
cacgtccccgacgtgtctcccttgtccttggcacggcgggagctccccacgggtgacgctgctcacggagccgtgggtgcctttggtttcctgggctcccrttagcaagctcctgttctggggttcctgccccacaagactgcggtactctcacgccagtgcacagatcagaatccagataaggtcccaggtttcctggga

SEQ ID NO: 298580 - DNA, 201 bp, Homo sapiens
tgacgctgctcacggagccgtgggtgcctttggtttcctgggctcccattagcaagctcctgttctggggttcctgccccacaagactgcggtactctcaygccagtgcacagatcagaatccagataaggtcccaggtttcctgggatggtgactcctctcccttcagggcccctcgatctgcaggcctctcccctcctg

SEQ ID NO: 298581 - DNA, 201 bp, Homo sapiens
ggtttcctgggatggtgactcctctcccttcagggcccctcgatctgcaggcctctcccctcctgcacctgcgcctggcgccaggccctccagggtggctrggatctgtggtttgtgcacccctcggatgtgccgctgaagctggtctgtcacctgccaccccaagagcctgagtgacgttgccccagggatctgagttag

SEQ ID NO: 298582 - DNA, 201 bp, Homo sapiens
ccaaacatatagcaggtacacaatataattttgttttcctcataaatacatggttaggttcagcatggttattcatgaaaaacttcttttaaaaaattgarcaactgaataaattctaattgaatggctgaattatttgaaaggcaaaaaaggcaggcaataaagttagtctgaagtatcttcatgtaggtattcttggtg

SEQ ID NO: 298583 - DNA, 201 bp, Homo sapiens
acgtgaccttaatgagatatttaacctttggaagtaatgctttttcatctagaaagtgagtcagtatctactttgaaagtttgttctgtggatacaatacrttggaagacattaaattaaaaagtatgtggaataaacactcttatttagatgatagctttcatcattatcattatcatcaccatcaccatcaacatcatc

SEQ ID NO: 298584 - DNA, 201 bp, Homo sapiens
aatttattgccgttctctatcttatgcttttaattttatttaatgcatgtcttaagtttttcaacagacttttctaaatgccatgataatattaagctctktgacaacattaattatgtgtacatatattatttcgattgcacagtttttgagtgcaatgatggatccattgagaatgaggattctggaaagctctaaaag

SEQ ID NO: 298585 - DNA, 201 bp, Homo sapiens
ataggatttataacgggtgtggtgaccacatcttgattaacccttactgaggctgagttgaaatatgcatttttagctcagtgcccttcccagttcttctsctatttaagaagggaaagcagttgccttttccgtgttcttggacctttctattccctttttttttatccttgcaaacaaatctagtcttttctgagctca

SEQ ID NO: 298586 - DNA, 201 bp, Homo sapiens
ttcatgcaaattcaatgaatgaatggtaaaacaaatctgatccaaactattgacagaagtggaggcaggcacagaactccagcctcttcatcatctcctcrtttcctcctgaattccttttcatgtagtttcttggacagatgcatctggaatctgaaagtaatatttaatagagtattcacattcttaatagttgttata

SEQ ID NO: 298587 - DNA, 201 bp, Homo sapiens
gctgagttgaaatatgcatttttagctcagtgcccttcccagttcttctgctatttaagaagggaaagcagttgccttttccgtgttcttggacctttctrttccctttttttttatccttgcaaacaaatctagtcttttctgagctcatttgtctcttataccttgtcaaatacagatcacagtaaccaataaatgata

SEQ ID NO: 298588 - DNA, 201 bp, Homo sapiens
actttcaaaataaagtcgctgaataaaaatagtgatcttacgaaatattatagttggatatcatcagagaggtgatattataaatcttctaccccagatartgattttttaatagtctttctgttgcaaatgtttagtcactactgaaatacattatatgaaagagagctcaccacaaatcaaaccaatacaaaggagtat

SEQ ID NO: 298589 - DNA, 201 bp, Homo sapiens
ttgaaatatgcatttttagctcagtgcccttcccagttcttctgctatttaagaagggaaagcagttgccttttccgtgttcttggacctttctattccctttttttttatccttgcaaacaaatctagtcttttctgagctcatttgtctcttataccttgtcaaatacagatcacagtaaccaataaatgatacttaca

SEQ ID NO: 298590 - DNA, 201 bp, Homo sapiens
aaaatagtgatcttacgaaatattatagttggatatcatcagagaggtgatattataaatcttctaccccagatagtgattttttaatagtctttctgttrcaaatgtttagtcactactgaaatacattatatgaaagagagctcaccacaaatcaaaccaatacaaaggagtattacaaggaaaaaggctttgaatcca

SEQ ID NO: 298591 - DNA, 201 bp, Homo sapiens
gagctcaccacaaatcaaaccaatacaaaggagtattacaaggaaaaaggctttgaatccaagtgcacattggagcaagctgctattcttttacagattarctatttgttattgcgcattcagcaaattccttagcttttggtcttctgtctactaaaggaaaatttaaattccagctctgcaagtttgttgagtaataat

SEQ ID NO: 298592 - DNA, 201 bp, Homo sapiens
gtttgttttgttgttgttgttgttttgggtgagaaccattaagatgtgtcctgtgatatcatttttacttgtcaattatgtctccataatttttaaaagaygctgttcattataagaccttcccaattcagaggtatcaaaatgtgaaaaaaatactttaatatagcaatctattttgaaaacatctctgttaaaatctag

SEQ ID NO: 298593 - DNA, 201 bp, Homo sapiens
tattaaatttgactggcgtagtgtctatctgtgagtgtgtgttcacatgcctatgtgtagaactaaagaataatttaaataaattatgacttatacaaatrtgaatgaatgtatgcccaaaattccatttaactgattgattaatgagggaaccagtaagatgttacaactgattcaaatgagaagttaaagtatcacata

SEQ ID NO: 298594 - DNA, 201 bp, Homo sapiens
gatttcaaaccaatgcaattttattttagttacctgttaaggaaaattttatatttttacctgtggtttcaggtaaatacaaaggcatatgactgtctccrttaatgcatttgtaccacttaatgacagcatttttttgggatggatacaacatcatccattttgatcttagttgtcgaaagaagagtcaagtttttcacc

SEQ ID NO: 298595 - DNA, 201 bp, Homo sapiens
aataacagaaaatcaatagatgggagagccgggattggaattgcaggctgtctgtctctgaagtccattctccatatcactgagctattctagttttcctrggtagagaatctaggatggccaaaaaatgtccccagagcctccctgtaagctgtcctccacaacagacttctggaatagaaagaagttggcttatgacct

SEQ ID NO: 298596 - DNA, 201 bp, Homo sapiens
gatacgtgtagagactttcaaagcattacttgaatttttttcatagttttttaaaactttgtttctaattattgaaataatcaatgcttactgaacaaatyttaaaaaataaagagaagtatgtgaagagaagtacttaaaatccaagcataatataatattaaatttgactggcgtagtgtctatctgtgagtgtgtgtt

SEQ ID NO: 298597 - DNA, 201 bp, Homo sapiens
gttacctgttaaggaaaattttatatttttacctgtggtttcaggtaaatacaaaggcatatgactgtctccattaatgcatttgtaccacttaatgacarcatttttttgggatggatacaacatcatccattttgatcttagttgtcgaaagaagagtcaagtttttcaccactgatgtgagaaagacacttttaggag

SEQ ID NO: 298598 - DNA, 201 bp, Homo sapiens
atttacagtaacaacaataacagttgtcattgatttaattatacattattatcctaaaaataacagaaaatcaatagatgggagagccgggattggaattscaggctgtctgtctctgaagtccattctccatatcactgagctattctagttttcctgggtagagaatctaggatggccaaaaaatgtccccagagcctc

SEQ ID NO: 298599 - DNA, 201 bp, Homo sapiens
gagtgccagaagtctggaaatatgagaaatggaggaagtgggactgtatagtgtagagaagactaataggaactaaaacacttgtctccaactatttatamggttgtcatttagaaaaatggacacgcttatatattgccctagaaaacaaagagtagaatcaatataatgaaagtaccatgtatatttttactcagtatt

SEQ ID NO: 298600 - DNA, 201 bp, Homo sapiens
aatacttggaattttccaatttttgatttagtggaaaatataggaagaaaatgtggccgtattcttagtcaggtaagaaatgcattcattcacactaattkaaatataggaaaaacagttcctttgttgcttaaagctctgtaaattcttgacacttgtggataggtgttatgtggagaaaggaagttttagaacacaaca

SEQ ID NO: 298601 - DNA, 201 bp, Homo sapiens
tctttggcaggttattataagagggacagtgaaaagtaaatggatttagaatatattttagagacaggatcaagtggatttcctaatcgactaaaagtaaracaagataaacaaaggaaagaatcaagacccgttccctcttctggggcctgagcaactaggtagatggttatgttctttactgggatgtaacaagattga

SEQ ID NO: 298602 - DNA, 201 bp, Homo sapiens
tttaaagaactataaagtttgtttagcttttagtttagtcctgacaacccagtgtccgcaatactgaggctgattttgtagatgagtgtgtcaaactactyttttggctgccagtgttaagaaggcaagtgtctgttaaggtgtgtgtatcttttctaagtggactttcgcatcccagagcagatatgtctctctcaaagt

SEQ ID NO: 298603 - DNA, 201 bp, Homo sapiens
ctgtaatgatccagaaaataacaataggacttttaaaaagggcttttcttagctttgcaagaaaagagataagagcagaaaggttcactttttgaagagamcaagactcactcagttggaaagttactctaaatttactttttcctaacattgatttatgacattcagtatgaattttgtctgtttatatccacatatcat

SEQ ID NO: 298604 - DNA, 201 bp, Homo sapiens
aataccatgacaactgactgtcttcagaatcatctagggctgattgattcataatctaaatttagggattgttcatatcagaatctaaggaggacttcacrttgcattcattttgttaattcagcaaaagtagtactagttagatctgggaaagtggatgttaaactttatgaatgccagactggattatagttttctcat

SEQ ID NO: 298605 - DNA, 201 bp, Homo sapiens
tcagaaccagtaatgcaccaaagatcattgtatcaaatccagctcatcttctaaattaatgtagtacattaaagaccaagataccatttcctagtatcacrgacagcctcccagagaaagagttggagggatggagtggcacgtagtgctacagagatgtaggaggagacagcttccaaaaactcatcacacatcttttcc

SEQ ID NO: 298606 - DNA, 201 bp, Homo sapiens
ctttcataaataatttatcagttaatggtagtgaacagagtttgaatgagtcaaaattctacaatgaaatgctcctgtataggtgtaagtatataaatgtatatataaatatacatatacaaatgtaaatatataaatgtatatatttaatgtgtatttgcccctagtttaatttgtcagcagtaactgctggtttttatt

SEQ ID NO: 298607 - DNA, 201 bp, Homo sapiens
tctaccatcttcacgtctctcactattaactctggccctcctgcctcttcttataagtaccttgtgataacattgggcccacccagaaaatcaggatcatygctctaactcaacatccttaatcgcatctgcaaagtaacttttgccatgtacgataacttattcacaaattctagggtttagaacatggacatctttggg

SEQ ID NO: 298608 - DNA, 201 bp, Homo sapiens
gaagtttgttatgtttcacatctcacatggaacctgcccacagacatgttgggaagcagtttgatgaagggccctataggttttcctcctactgtacatayatattatcttaaggaaaaaatccaaatgtaaactcatattccctgccagaaaattaaaatacgcaaacatctgcttccttaggatggcctttagccaagg

SEQ ID NO: 298609 - DNA, 201 bp, Homo sapiens
caggaataactgttagcagctgggcctgggtgctttttccctgctttgtcctggaaagatttcacatcttaagggaaatgaactacacaccttgagaaaatttttttttctatcatattgtataaatctgtgtaaatctcattttccccctttttggagttaagtagcataattaactgtaaggcttttccaaatactttc

SEQ ID NO: 298610 - DNA, 201 bp, Homo sapiens
ggctttttgcaagaaaatatttttgtatatggcagcatggagctgccatatacaaaacaaatatatgtggagctactctggttgtataaggtgataaggcrccaagtccattggttagtgcccccaaaacacatattccagtgtctgctaacttcactggtttctagggaccatagtgggtttcagtggatagggctattt

SEQ ID NO: 298611 - DNA, 201 bp, Homo sapiens
tgtattaaaatatgggtggcagtgtctttaactcagatttgggatgctttatacagtcatgggaaatatcaggggatcaacttgaaattctttaaaagttracagaattttggaacgatcaaggaacatgggaatatggcctcaccttttctttctcactgatgacataaatgccgccctcactgtgttgtttattgtttc

SEQ ID NO: 298612 - DNA, 201 bp, Homo sapiens
caaaaacatttttaatggtcatgtgccaatttttttctatggctattacataacattctctcttgttagacatttttgttgttttcgacttttccctactrcaattaataatgacatgaaaagttttgtataaaacacttcaagttgcagaacatctctttacagaatattcctagaagtggaattattaggccaaatggt

SEQ ID NO: 298613 - DNA, 201 bp, Homo sapiens
cgcattcactttttggatttatttttttcccctcatcccagaagccagaatgtaagctacatttctgtttgtattggacctttgagagactatgctacatrgctaatggaaaaacctgcatacgagtccaagttctgcctcttctaaaattcattaccataaaggaagttggttagccacagggagtttcttaggctttct

SEQ ID NO: 298614 - DNA, 201 bp, Homo sapiens
agtttcttaggctttctcagtttgatttcttagtccctagaaagttcaagtctgtaaaaactagaagtttttataaggaagttatgagaagtaaatgacarggtatttgaaagtacatgacattgtgtatggcatatgttaattgaccagtgaatgctttacatcccttgatctcttaactagaaattaagtggcagactg

SEQ ID NO: 298615 - DNA, 201 bp, Homo sapiens
agtacatgacattgtgtatggcatatgttaattgaccagtgaatgctttacatcccttgatctcttaactagaaattaagtggcagactgataactcctargttcatatcgacagcttcccctcttctgaattccacactcatatatccaattgcaataattggcttcttgacttagatacctaacagacgcctcatactc

SEQ ID NO: 298616 - DNA, 201 bp, Homo sapiens
gagaaaaatagagagtgtgctctcacttaaccaagaaaaaaatctttctagaagaaaatatgatagaatcagagaatgtaaacagaaaaatcacttttackcaatcattccacccagtttttacggttctgtcgaaggagagttagcagaatagtactagctgattatgcttgcgatggttaaggtgacagagactggtag

SEQ ID NO: 298617 - DNA, 201 bp, Homo sapiens
taagtggcagactgataactcctaagttcatatcgacagcttcccctcttctgaattccacactcatatatccaattgcaataattggcttcttgacttaratacctaacagacgcctcatactccaaatgtgccaaatggaacttccaattattgcctccaaatctgctccatcctttctaacagctgatggcaactcca

SEQ ID NO: 298618 - DNA, 201 bp, Homo sapiens
agctcaatttatgaaatgcctaacaagtgatcattgttaagcttttgcctaatcactaccataatagggaactaagtccccttccatgccattttgttctycccttttcccctcctctctgtttagatatggtcttttgaaattgaggagtccagaatctggtacaacagatatggtatgactggaacaaagcgaagggtg

SEQ ID NO: 298619 - DNA, 201 bp, Homo sapiens
cagcctcccaagtagctgggactacaggcgcccgccactacgcccggctaattttttgtatttttagtagagacggggtttcaccgttttagccgggatgrtctcgatctcctgacctcgtgatccgcccgcctcggcctcccaaagtggtacatagatttctaaatgtaaaatctatagagaaactgtggaacaccagaa

SEQ ID NO: 298620 - DNA, 201 bp, Homo sapiens
gctcattgataaaagcttaaaagtacaaatctactaatagtacctcaatcttgttctttctctagttgctaatttgacattttcctctgcctgattatgtyggaggatttctcattttctatccctaagccgtgcacagctcataaaaaacagtagttgccaagtgacaggtgtttttggaaaacttgcttagtttatacg

SEQ ID NO: 298621 - DNA, 201 bp, Homo sapiens
tgctttttaatgtgatgatctatacaacctctaactggaatttgaaagctggggccaaataccactgcagctcagatgctaaagctgtttcttaaaatgargcagataaaaaatagagaaaatcttttttaaaggctactttgctcctttccttctccataactaaatgttggagctttctgctggggaggggagagcaaa

SEQ ID NO: 298622 - DNA, 201 bp, Homo sapiens
agctgtcacatggggtttcattcatttgcattcccagaagtggtctaaagctttccctaatgtaggagtaatgagggctctgtaccttcagagacccagagggccttttgtaggatgttgttactttaagtggctctgataagggacacaggctcagagaatgccatgtttcactgtcagcttcagaggaccataaactac

SEQ ID NO: 298623 - DNA, 201 bp, Homo sapiens
gtactctgaggttgatactgttgttctcattttacagctgaagacacaggcacagtgagcctgtctctatatatgtctctctatatgtctttatatatgtstctatatattctagtaaatcatagttaaaaatttttgtgcatatgagtgctagacatggtatcatgtgtttatatacctttgttaatttttgccagaaga

SEQ ID NO: 298624 - DNA, 201 bp, Homo sapiens; identical to SEQ ID NO: 62076

SEQ ID NO: 298625 - DNA, 201 bp, Homo sapiens
tgaccccaagactgaaaaataaccagtgcacaacagacctgagcatactacaaacagctttgctcttaccattttgccccatgctgccttgtcagcccctsctcaatatgggggaaaagtggacctttccgataatctggggccctatatgtaggagaaaaagaagttgaagtgccaggagctgctctcagaagctgaccc

SEQ ID NO: 298626 - DNA, 201 bp, Homo sapiens; identical to SEQ ID NO: 62078

SEQ ID NO: 298627 - DNA, 201 bp, Homo sapiens
agtggacctttccgataatctggggccctatatgtaggagaaaaagaagttgaagtgccaggagctgctctcagaagctgaccctggggacacattctcargccaggctggcctgtcctgtctatacctcaacccttcccactgccagaagttttcatgttttacttattttttgcctggaatttgtcaagcttttaattc

SEQ ID NO: 298628 - DNA, 201 bp, Homo sapiens
gatactggtatattaaagaatattttacaaaatcacagtatcaaccatagcctcgagaggtaaaacttatcctatttttaatttccagtggtagcactttrtaaataaaaattatggtgtatgtgccaaaagcctggacttttgtctggcaaaggttgtttaaaacttgaagagacatcaagaaatatgtgagttcatcca

SEQ ID NO: 298629 - DNA, 201 bp, Homo sapiens
ccaggctatatgtataaatatgtgtttctaatagcattaacatcttatttatggtacaggaatttttctttacagccactctagggaacaaactaaaataytgtttaatagcattcctcacaagattttatattctcatcaaaggtgctgattttcttacaaagttttaccttgggagaacaaaggtggtttagcagttat

SEQ ID NO: 298630 - DNA, 201 bp, Homo sapiens
atcagtagtattcatccctccatgagaatgacaggttttttttttttgttttttttttcgggagtactggcaatcaccatctgattcagtctaacgttttytggctggggcaggaactctgaactttatttccaaatgagtaataatgataaacaatcctagaggaaagtgggaaaatgcctgatggcttattggcgggaa

SEQ ID NO: 298631 - DNA, 201 bp, Homo sapiens
agcaagtccccaattatatctttagatactggtatattaaagaatattttacaaaatcacagtatcaaccatagcctcgagaggtaaaacttatcctattyttaatttccagtggtagcactttgtaaataaaaattatggtgtatgtgccaaaagcctggacttttgtctggcaaaggttgtttaaaacttgaagagaca

SEQ ID NO: 298632 - DNA, 201 bp, Homo sapiens
aactttaaggtttaatgactgccctattgaattttagacttgcatggggcctgtagcgcctttgtttcagcaaggaaactggtggcattttgccctagccmtagagatctgtgaaactttgaacttgagggagatgatttagggtatctggccgaagaaatctctaagcagcaaagcactcaagaggtgactttggtgcta

SEQ ID NO: 298633 - DNA, 201 bp, Homo sapiens
gttcttttctggagacagacagggactcatgtctccctccttggcaacagctattctttcatgggtaattcctatgtactatttgaatatcaaaatatttwtatctccctaagaatggggagacacaacgtatttgccccataagggtaaattgcaaacaaattgctccagtgcttcagaaaggactggttattcattcct

SEQ ID NO: 298634 - DNA, 201 bp, Homo sapiens
attaaatctgataacaatagtgtggaatttggtgattatccccagttgatgaatggtacttaggaattcacagacataggttcagtatgtatctgtggagmtttgtggatagttgtgctgctggggaagttgttaggtagaagtccaagttaaacagtagggagctaacaagacctcctgggaaattggatcctggatttc

SEQ ID NO: 298635 - DNA, 201 bp, Homo sapiens
gtctactaaaggaaaatttaaattccagctctgcaagtttgttgagtaataatataaatggattatctcatagacaaatgttttaaaataaaatattgctrtaggatacttgctatattgaaccaaaaactgccttgtaactttgactcctttgtcctagtgtttattttctatcctacatgtctgttaggattcccaagt

SEQ ID NO: 298636 - DNA, 201 bp, Homo sapiens
cattgaattcaactgtccattgtctgacctcattttcatattccttaaacattgctcttccctgggatgcactagttaaatcttattgtggtattgggctrtccttttttgtagccatcctcagggaagccacacttgtttggcatgaccctgttgtcttggctgcactcaattgtacgtccccaagctgagcagtgagat

SEQ ID NO: 298637 - DNA, 201 bp, Homo sapiens
aatatgagaacagcaccaagccattcatgagaaacctgtcccccatgatctcatcacctctaatcaggcctacctccaacattggggatgacaattcaacrtgagatttagaggggtaagatatccaaactttatcaaggaccgtaatggaaatagacttgtactcatacagcttacattttatcctagtagacatgcctt

SEQ ID NO: 298638 - DNA, 201 bp, Homo sapiens
aagaactataattggctgctcattcttctctaattactgagaccaccttacacattcacttttgaaagatttcaaaccaatgcaattttattttagttacytgttaaggaaaattttatatttttacctgtggtttcaggtaaatacaaaggcatatgactgtctccattaatgcatttgtaccacttaatgacagcattt

SEQ ID NO: 298639 - DNA, 201 bp, Homo sapiens
tgtgtttttgatttgattagagctgtcatttgttatttaggaatctgtgaatgattattaaagctttcaagtatagccagtcctgctaacataataataayattacattaagggcactcatgttctttcctcctgagaagatgactggttacagggggcacatattgtttgctgaagtgtgtgtatgtgcatgtgcatgtg

SEQ ID NO: 298640 - DNA, 201 bp, Homo sapiens
aagcacatttggacaaaatgaaataatgtggatgctggctcgcttctggtaaaagctgacttaatttagagttcttgaagaagctagctgaagaatgaaaygtcattgtaacacacatctgtttcttgaaagagtttatacttgaatgtaactagtcactgttagctctggctaattttgaagttgatttaaattaatata

SEQ ID NO: 298641 - DNA, 201 bp, Homo sapiens
cattctccaggagttattcgaaagctgaaactttcagtggattgtgggcctggggagaagaaggattccgagggtggaattgggaagagcgtgcgtgcgtktgtgtgtgtgtgtgtgcgcgcgcgcgcgtgggtcggggcgggggcgtcggggggccactgggaattcagtgaagagggcaccctataccatggcagtgcc

SEQ ID NO: 298642 - DNA, 201 bp, Homo sapiens
tttcttgaaagagtttatacttgaatgtaactagtcactgttagctctggctaattttgaagttgatttaaattaatatagaggttgttctggtacttttytttttggtcagtctttttctgttctccatctctatctacatgcacattttctttcatttcattttctttttacctaatagagtcttctccctccgaatgt

SEQ ID NO: 298643 - DNA, 201 bp, Homo sapiens
tttatggtagacattatttcatttaaaaaattctaaaatgggctttatttagatagcaacacattttatcagtattttcttctaaattttttcatttagckgatttttaacatagttctttaatacttttggaattcagttatacaaatggtagttgcatataataagcaaactgtgagtttttttctaaattgctataca

SEQ ID NO: 298644 - DNA, 201 bp, Homo sapiens
ttaaaaaaaggcttcatgttgatacaagtgggtagatatgaaaccaggtgttaaaatatacacatatatttccttgctccgcatactgcagtgttcattgytacactccagcagcaaggatcatacccagcactgagatcgtgatttctaatacctttgcaaattgaaggaaccagagatctgtgaaaaagtggcttaatc

SEQ ID NO: 298645 - DNA, 201 bp, Homo sapiens
gtacaggaagcacaggccttactttttattgttgtatggagcagagtcccagaaggaccggctgtggagtgctgaataaaatccctgtgaatgcacaccgrgttctctgaaaatacaagcttctagtcatttctgggttaaggtgtagtccatttcgctttgctatcagattacacataagttattgagcaataaaaggaa

SEQ ID NO: 298646 - DNA, 201 bp, Homo sapiens
agaaaagttctttgctttaaaatgactcatcaagtgctattgggaacatttaaaatgttatttcaattgcacatactctttaggaagatacaagtttattrctttatatgtgtgtatcactgataaaaggtattttcatatatttaacaaaaatttaaagggaggaatggttaaatgactgtctaaggactcatacctctt

SEQ ID NO: 298647 - DNA, 201 bp, Homo sapiens
acctaatattttgcttgtttttagtttcaaatcatcctaggatattattgattactcaactgattgacatggtttgggaaataaggtattttgaaaggaawaatgtcttctttttataaactgtacaggaaccttctattaaattctgtaaatgtcattgatctcaaatccatgcatcacatgtgtaaattatattatttg

SEQ ID NO: 298648 - DNA, 201 bp, Homo sapiens
aagatacatataaagaattatacttatggtatatctcaaaactgagtttgtttcctataacccatactaaaaacaatttatcaagttaatatagtaatatrttgtgtaagtatacatgtataatatagtaagatgtatatgataatatatgttcaagttaatatagcataattagcaaaatcataattgggttcaaataat

SEQ ID NO: 298649 - DNA, 201 bp, Homo sapiens
tttttggtagaacgattgctatatttagtttaaaattttagggcggcaggccgggcgcaatggctcacgcctgtaatcctagcactttgggaggccgaggygggcggatcactaggtcaggagatcgagaccatcctggctaacatggtgaaactccatctctactaaaaatacaaaaaattagccgggcatggtggcggg

SEQ ID NO: 298650 - DNA, 201 bp, Homo sapiens
gcgggaaaaagaagggtgtgtgagaggaggaattattcagttatcactggtctggagaagaaagagcatggcccatttgcaaaaatgattcttagttcacttttttttttttttttgcctttagtgatattatgggtaatagcgataaatttttattttctcaatttatatatatcagatttctcactctgtgtcatcaat

SEQ ID NO: 298651 - DNA, 201 bp, Homo sapiens
aaaagctagaaagttcaagattatgatatcagtatctgacaaggaccttcttgctgcatcatcacatggcagaagggcaaagaaagggcaagagggggccraactcatcctttcataatggtatcaatcccagccatgagggtagagccctcagggcccgttcaactcttcaaattactacatcttaatactgttacaatg

SEQ ID NO: 298652 - DNA, 201 bp, Homo sapiens
aaactccatctctactaaaaatacaaaaaattagccgggcatggtggcgggcacctgtagtcccagctactcgggaggctgaggggagaatggcgtgaacycgggaagtggagcttgcagtgagccaagatcgcaccactgcactccagcctgggcaacagagcgagactctgtctcaaaaaaaaaaaaatttagggtggc

SEQ ID NO: 298653 - DNA, 201 bp, Homo sapiens
cgggaaaaagaagggtgtgtgagaggaggaattattcagttatcactggtctggagaagaaagagcatggcccatttgcaaaaatgattcttagttcacttttttttttttttttgcctttagtgatattatgggtaatagcgataaatttttattttctcaatttatatatatcagatttctcactctgtgtcatcaatt

SEQ ID NO: 298654 - DNA, 201 bp, Homo sapiens
tatcagtatctgacaaggaccttcttgctgcatcatcacatggcagaagggcaaagaaagggcaagagggggccgaactcatcctttcataatggtatcartcccagccatgagggtagagccctcagggcccgttcaactcttcaaattactacatcttaatactgttacaatggcatttaaatttcaacgtaagtttga

SEQ ID NO: 298655 - DNA, 201 bp, Homo sapiens
ttaactattcttgatatcttatatgagtggattcatgatgtttgtccttttatgactggcttagtttacttggcataatgtcttcagagttcatccatgtygtagcacatgtcagaatttccttcctttttaaggctgaataatattccattatatacgtatgccatattttgtttatccatttattattgatggatactt

SEQ ID NO: 298656 - DNA, 201 bp, Homo sapiens
cccctaccatccattacccccacttgttctcccttcgtttattctattctaagcttctttatagctttatcatcacctggtatactatgtttctgtgtttrtcttcttccttcactaaaatataatagccaggaggcagagatacatcttgttttgttcaatggcatacagtttgtgcctagaacagtgctttgcacataa

SEQ ID NO: 298657 - DNA, 201 bp, Homo sapiens
cccatattctatattcagatctctgaaaaaagtggcctttcattgatcaaaatatatttatataaaacattttaatgaagaatacctatttataaaatatscagaggaaatatatgcagatgtaaaattgagcccaataaatccttgtgttttcataggtatgaaagttacaataaataatggcaattagatattgtgtgt

SEQ ID NO: 298658 - DNA, 201 bp, Homo sapiens
cccatctgtacatcaccatcatcaaagaccaaaagtagataaaaccacaaagatggggaaaaaacagaacagaaaaactggaaactctaaaaagcagagcrccaatcctcctccaaaggaacgcagttcctcaccagcaacggaacaaagctagatggagaatgactttgacgagctgagagaagaaggcttcagacgatc

SEQ ID NO: 298659 - DNA, 201 bp, Homo sapiens
gagtcctgctgtctaaaggagtagcacagccagacactgatgagggtggaggtagtagctgagtcttttgttataaaagctcatgttgactcgttaacatkggtttttttttttttttttttttttttgtttttttttttttttgagatggagtctcgatctgtcgcccaggctggagtgcagtggcgctatcacggctca

SEQ ID NO: 298660 - DNA, 201 bp, Homo sapiens
gcttggtgcaggataggtgctcagtaaacgtttgtgttggatgaatggatagatggatggatggatgatcagtcacagaaagtgtcctgaggaagtgttayttgaagtgacacccgaagaatgaaaatgagctgacaatgctaagaaaatgggaaaatgtattctaggcaagatgaacggcatccaaacctttaggttata

SEQ ID NO: 298661 - DNA, 201 bp, Homo sapiens
tagcacagccagacactgatgagggtggaggtagtagctgagtcttttgttataaaagctcatgttgactcgttaacattggttttttttttttttttttkttttttgtttttttttttttttgagatggagtctcgatctgtcgcccaggctggagtgcagtggcgctatcacggctcactgcaagctccacctccctgg

SEQ ID NO: 298662 - DNA, 201 bp, Homo sapiens; identical to SEQ ID NO: 62085

SEQ ID NO: 298663 - DNA, 201 bp, Homo sapiens
gccagacactgatgagggtggaggtagtagctgagtcttttgttataaaagctcatgttgactcgttaacattggtttttttttttttttttttttttttktttttttttttttttgagatggagtctcgatctgtcgcccaggctggagtgcagtggcgctatcacggctcactgcaagctccacctccctggttcacac

SEQ ID NO: 298664 - DNA, 201 bp, Homo sapiens
ccagacactgatgagggtggaggtagtagctgagtcttttgttataaaagctcatgttgactcgttaacattggtttttttttttttttttttttttttgtttttttttttttttgagatggagtctcgatctgtcgcccaggctggagtgcagtggcgctatcacggctcactgcaagctccacctccctggttcacacc

SEQ ID NO: 298665 - DNA, 201 bp, Homo sapiens
aagtattctcaagaatgtttaaatttggtttattttcttgaagcaaagttatttaattttttaatttttaacttaaaatgaaacccacaaaatgacattcygtggtactgagtattttcacataatcagaactgtaaactactgattattttcatatactcagaggctgaatattttgatataataagaactagtatcata

SEQ ID NO: 298666 - DNA, 201 bp, Homo sapiens
cagacactgatgagggtggaggtagtagctgagtcttttgttataaaagctcatgttgactcgttaacattggtttttttttttttttttttttttttgtttttttttttttttgagatggagtctcgatctgtcgcccaggctggagtgcagtggcgctatcacggctcactgcaagctccacctccctggttcacacca

SEQ ID NO: 298667 - DNA, 201 bp, Homo sapiens
agacactgatgagggtggaggtagtagctgagtcttttgttataaaagctcatgttgactcgttaacattggtttttttttttttttttttttttttgtttttttttttttttgagatggagtctcgatctgtcgcccaggctggagtgcagtggcgctatcacggctcactgcaagctccacctccctggttcacaccat

SEQ ID NO: 298668 - DNA, 201 bp, Homo sapiens
tttgtatcatccatttacattttgagaagcatagtcaatcagataaacttactgttttaattctaaattcactgactttctgtcagtctctatgttccctrtatgtagcagctgggttaagaatataattgtcttgacaacaaattattgacatttacgagctcaaaagttacctcagaagcttttgaaatcaaagaaata

SEQ ID NO: 298669 - DNA, 201 bp, Homo sapiens
agctgagagaagaaggcttcagacgatcaaattactccgagctacgggaggacattcaaaccaaaggcaaagaagttgaaaactttgaaaaaaatttagamgaatgtataactagaataaccaatacagagaagtgcttaaaggagctgatggagctgaaaaccaaggctcgagaactacgtgaagaatgcagaagcctca

SEQ ID NO: 298670 - DNA, 201 bp, Homo sapiens
tccctatcccttcttgtgagttaaaagggaattaaggaaaaggaatctcactgcagaagaatgttttggttgttcatcctatatttaatcttgctcctttragtttatggtcaaacatgagcacatttataaaatgctttcctggggcagcgtggaagaaactgtgtttggaaagtgatattacactgaggacacttgggc

SEQ ID NO: 298671 - DNA, 201 bp, Homo sapiens
aagaaaatcattccatagcatggatctcttaaaaatagaattatatatatatatgtttatttttgtctatttttgaacgcgttagaatcatactgtgtttmttctttgactcatttttttcattcaggtttgtttttgagattcaaccgtgttgatatgtataattatagttcattcattttcccactatatattaatgca

SEQ ID NO: 298672 - DNA, 201 bp, Homo sapiens; identical to SEQ ID NO: 62080

SEQ ID NO: 298673 - DNA, 201 bp, Homo sapiens
taaatgtctaaagatattaaagaatgcatactttcagattcacctttttaaatacattgaaatttttattcaccatcatggtaaatcttttaaatctgttygaattaacatattgtaaatgatactcaatatatacatattgtatgtgattttatatgcagtaagttataagacccatggctttttgaacaattgataatg

SEQ ID NO: 298674 - DNA, 201 bp, Homo sapiens
acacagagttcctactggtgcactgcacagtggagctgtaagaagagggccattgtcctccagaccccggaatggtagatccaccaacagcttgcactgtrcacctggaaaagccacaggcagtcaatgccagcctgtgaaagcagctggaggggaggtgctgtaccctgcaaagccacaggggcaaagctgcccaaggct

SEQ ID NO: 298675 - DNA, 201 bp, Homo sapiens
aaaggcattaaatatctaaaggcattaaatgtctaaagatattaaagaatgcatactttcagattcacctttttaaatacattgaaatttttattcaccawcatggtaaatcttttaaatctgtttgaattaacatattgtaaatgatactcaatatatacatattgtatgtgattttatatgcagtaagttataagaccc

SEQ ID NO: 298676 - DNA, 201 bp, Homo sapiens
gcagtgagctgagatcgtgccagtgcacttcagcctgggtgacagagtgagactccgtctcaaaaaaaaaaaaaaagaaaaaagaaaaaaaaacacattgraaaatggtgaatttaccaaaagtatcagttatttttggcttgatatataaaaccgcactttcctccactgtttatcgtactgaaatgccacattttctat

SEQ ID NO: 298677 - DNA, 201 bp, Homo sapiens
gagaggcagtacaggcttcagtgttagacagaaatgggattcagtccaaacttggacacatactaggttgtgactctggatgtgatattcaatttctatgwgtttccatttcctcatgtgtaaaatgagataactacaagccttttgaaactttgatcctgaagacgtcgttttggtagatctaaaatgaatacatggtgg

SEQ ID NO: 298678 - DNA, 201 bp, Homo sapiens
gtggaaataggtttttgtttttattgttttatttatttatttaatttatttatttattttggtagagaaatcatatctctgtgctatcttcatttataaargaactactggcccagttcatgtaggggacaaacacccacgtgcacaacatacatttctttgcacacacaatctttctcaacaacaatgtttcaccaacaa

SEQ ID NO: 298679 - DNA, 201 bp, Homo sapiens
gacttgaaagttgagcaggaggtagccaggcataaaggaacccagagagttttccaagtggagttttccaaaaagcatgtgtgaagacttgcaagcttgtrcaacccaccattttttttgttgttgctgttctgttttgttttgctttaggattttagcagcctgaagccatggatctttgtttctgtctctagttttaag

SEQ ID NO: 298680 - DNA, 201 bp, Homo sapiens
ggcaagaagcagatactgtacaaatcagttcaataatgaggcattgaaacacaagttacatactgtgctaggaataaaatgataaacagagtaacactatyctgtccttttggatttttatagtttagtaggaatgtattaagtaatgacaagtacatgaatatgattaaagggatgtaaaatactgaatagcaaagggat

SEQ ID NO: 298681 - DNA, 201 bp, Homo sapiens
taaagtctgtcgctatattagctcataccacatatgtggcaagaagcagatactgtacaaatcagttcaataatgaggcattgaaacacaagttacatacygtgctaggaataaaatgataaacagagtaacactattctgtccttttggatttttatagtttagtaggaatgtattaagtaatgacaagtacatgaatat

SEQ ID NO: 298682 - DNA, 201 bp, Homo sapiens
ccttaatttcctcctttctgttaacattgaaaaccatcatactaactgtaaaaatcaaatactgtaataagagtgagggagtgcatgttttaaagtctgtmgctatattagctcataccacatatgtggcaagaagcagatactgtacaaatcagttcaataatgaggcattgaaacacaagttacatactgtgctaggaa

SEQ ID NO: 298683 - DNA, 201 bp, Homo sapiens
tgaaatcagagacatatcttttgagtatgttaggcagatgatcatgacattagatgaactaggaatacaatatttaggaaaaaagtgatttcgaaccttayggtgtcaagtttctttttatctgtacatgtcaagtgttctcacaggcagactttttagagagattgctatcactgacaacttccagagtttgagagtttt

SEQ ID NO: 298684 - DNA, 201 bp, Homo sapiens
tcctcagttttcaaaaaatattttatggtcttttgagggcataatattagtgcatgtaaaaactagaaccctttatgatttgaaaagaggagaagatgctragagagacactcttggaagctgggcaggaaatccagccatgcattgcctcaaggtctgtcattagatcaaaagcactcaggggacgatggtctgtgtaag

SEQ ID NO: 298685 - DNA, 201 bp, Homo sapiens
aactttttagcacatttatcattttcacttatacatgtatgctaatagcaatcttatgtgaacttttacctcttatatgaccagaattgattaaaaatgtyggcaagtaagtttgttatttaatatctctgaactttctctattttacattgaatatttgctacattgtaagcattacagtatgactagattcttcttttt

SEQ ID NO: 298686 - DNA, 201 bp, Homo sapiens
tctcatataactcattagagaaccacaaataaatgcatttacttaataaataatttattttaaattatatgacaaccctatgattaaatttaatattgtattttttttttttttttttgagacaaagtctcactctgtcacccaggctggagtgcagtggctgtgatctcggctcactgcaacatctgcctccgaggttca

SEQ ID NO: 298687 - DNA, 201 bp, Homo sapiens
tgtgttgaagagctggacatcaggtgtggagtgcatactgggttgtggaaaagacaggtggaaaagacatgtgaaaaagacacatagccctgcttttgtgmtgaggagtagaggtgggatgctgggaaattttaagaggtaagataagggggatgtggggccggtgtggagaggggagcaggatgaagacttgagtgtttt

SEQ ID NO: 298688 - DNA, 201 bp, Homo sapiens
cacagtaacataggtatataactagaaaataatatttgacaatttggggagacctatagagatgcaaccttcaagacagtaaactaacgttaaaaatgccraattattaacagaggttatcaatgaggttcgttaaaaagaaaaaatattttcccttttaaaattttttattcttttattattttattttagcgacaggat

SEQ ID NO: 298689 - DNA, 201 bp, Homo sapiens
cctgtttttctgaataatgtattggtattttaaaaataaagattgcgggggaggagccaagatggccgaacaggaacagctccggtctacagctcccagcrtggtggatgcagaagatggtgatttctgcatttccatctgaggtaccgggttcatctctctagggagtgcgagacagtgggcgcaggtcagtgggtgcgc

SEQ ID NO: 298690 - DNA, 201 bp, Homo sapiens
tttaagagcagaaacaaagtttggtggggataaaatagagaacactgaaatggtaaaaccacaataatattgacaaataggatagttatattagacaaaamcatgttccttgagtctggaaattgttagtgtcaagttacactatgtattaaggcaccgtaacatattgtggcactgacttttaggcacatatatttgtat

SEQ ID NO: 298691 - DNA, 201 bp, Homo sapiens
aaaatgccaaattattaacagaggttatcaatgaggttcgttaaaaagaaaaaatattttcccttttaaaattttttattcttttattattttattttagsgacaggatattgctgtgtcactgtcactcaggctgaagtgcagtggcatgatcatagctcactgtaaccttgaacacttacgctcaagtgaccctctggc

SEQ ID NO: 298692 - DNA, 201 bp, Homo sapiens
tgtattaaggcaccgtaacatattgtggcactgacttttaggcacatatatttgtatatctttctaatttttttcaaaagtggatttttctgccatttatrtttgccatcgtataaataaaatttttatgttttgatgttcaacagccattttatactaataggagctctaactgtgacaatcaaataaattaatgttttt

SEQ ID NO: 298693 - DNA, 201 bp, Homo sapiens
tgttgccatctatcttaagggtttataactctggtatagaataagcaaatagcataaaacacttgtacctgtgtgtactcctcagagttttattggtaataaaaaaaaaaaaaaaaaccacccatgctcacttttgtgcttgggaacagaatctgtttctaacctttgctattaacaggaagtgggagaggtgaaatgagc

SEQ ID NO: 298694 - DNA, 201 bp, Homo sapiens
ctgagaaagatcctggaggaaaagctggggccagtatgctgaaaaagacacagtcctcttgccctaccccaagagtaaagggcaagaggtagtggctgccaaaaaaaaaaaaaacaaaacaaaacaaaacaaaaaaacctgaaaaaacaaaaaagttttgtggagagatatcgaatggatatttatatggctttttgctgt

SEQ ID NO: 298695 - DNA, 201 bp, Homo sapiens
tgagaaagatcctggaggaaaagctggggccagtatgctgaaaaagacacagtcctcttgccctaccccaagagtaaagggcaagaggtagtggctgccaaaaaaaaaaaaaacaaaacaaaacaaaacaaaaaaacctgaaaaaacaaaaaagttttgtggagagatatcgaatggatatttatatggctttttgctgta

SEQ ID NO: 298696 - DNA, 201 bp, Homo sapiens
gtgaaccatattataatcatctttagtatcaataaatatttttgagatgatataatgccagtaaatccataaattaaaaaattaaagcattaaagaaatayctactatgtaagcattcaattttatataatgattatctgggtcagtgtacccaaaattgtgtgctagccaaactacaattaaatcatcatgataattcca

SEQ ID NO: 298697 - DNA, 201 bp, Homo sapiens
aagcgaaggagaaataaaatactttacagacaagcaaatgctgagagattttgtcaccaccaggcctgccctaaaagagctcctgaaggaagcactaaacrtggaaaggaacaaccagtaccagctgctgcaaaatcatgccaagatgtaaagaccatcgagactaggaagaaactacataaactaacgagcaaaataacc

SEQ ID NO: 298698 - DNA, 201 bp, Homo sapiens
aacaatattaactttaaatgtaaatggactaaatgctccaattaaaagacacagactggcaaattggataaagagtcaagaccaatcagtgtgctgtattmaggaaacccatctcacgtgcagacacacataggctcaaaataaaaggatggaggcagatctaccaagcaaatggaaaacaaaaaaaggcagggattgcaa

SEQ ID NO: 298699 - DNA, 201 bp, Homo sapiens
ttggcaaggatattttcatatcattgaaggtaaatgactgtacataggaacggtacccagtatttagcattgtgaatagcgtagggcttcggatccagacyacctgggttggaatgtcatctctgcagcttaagatctttgtaaccttgggcaaattacataaccttttgtgtgcactgctttcaaatgttgaaagtcact

SEQ ID NO: 298700 - DNA, 201 bp, Homo sapiens
agcaatggcaacaaaaaccaaaattgacaaatggggatctcatcaaactaaagagcttctgcacagcaaaagaaactaccatcagagtgaacaggcaaccyacagaatgggagaaagttttgtgtttttaaaacatcatgaaatcatgtattgcctttcctaagaatgggattaattcataaatctcgaaatatggaaatg

SEQ ID NO: 298701 - DNA, 201 bp, Homo sapiens
gaagaaaaaggatttccttttctagaagcatgaagctaagttcccctcatatctcattgactcacattgacttggcctacccattcttgatcaaatccctrgctttggagttgaaattatcatgattggcacagagagtcaatcatgatagccactgcatatgctttgaagacagtttagaattagacatttccaaatgtc

SEQ ID NO: 298702 - DNA, 201 bp, Homo sapiens
ctggcaaattggataaagagtcaagaccaatcagtgtgctgtattcaggaaacccatctcacgtgcagacacacataggctcaaaataaaaggatggaggmagatctaccaagcaaatggaaaacaaaaaaaggcagggattgcaatcctagtctctgataaaacagactttaaaccaacaaagatcaaaagagacaaaga

SEQ ID NO: 298703 - DNA, 201 bp, Homo sapiens
tcaaattctactcagttcagtcaagcccctgcccagaaacctggttagctggtttgttttccctcagaactcagattctgaaatactcccctctactttgyctcattcatagagtaagtttttgaatataaataaaaaactacacactgggtacagtatacactgctctggtgatgggtgcaccaaaatctaataaaaatt

SEQ ID NO: 298704 - DNA, 201 bp, Homo sapiens
tatcaaagatgatgattggaaaatatagaaaagaccatctcatgaagcaaaaagaacatggccattgaagccatgttgaagttagaaacgtgcagtgaatkttttttttgtttgtttgttagtgggaatgaatgatgatttgggtgaccgacaggtcttaactccacttttaccactcattgtccctattcaggtgtacgg

SEQ ID NO: 298705 - DNA, 201 bp, Homo sapiens
gataatagatgtttctctgcagggactgcagatagtttaagcaatagttaattttactaagtgtacaaaagcatattttgagagagaaataaaaacaaaartaatacctattactttaagccacagtttctgaccactgttgcagttgtgacttttcttatattctttcccccagatagcttatagtacacattaagaaaa

SEQ ID NO: 298706 - DNA, 201 bp, Homo sapiens
gtgagatcatgtggtatggcttatttcacttagcatgatatcctacaggttcacccatgttgtgcaaatagtaggattttctcctttttatggctgaatartatttcattgtgtatgcacacacatacatatacacacatcacatgttctttatccatttatatattgttgaacacttaggttgtttcaatgtcttggctt

SEQ ID NO: 298707 - DNA, 201 bp, Homo sapiens
cttagccccaaatgagctgggtaatcttggaccagtcaaataatctctttatgttcattatgttgaactagtcaaataacatctttatgttccagttttgytaattttaaaaaagaatgaatctagcttggattacctctactatctcttcttcttttattttgtggttgtgttctgtggcacagaaatggaatttaacac

SEQ ID NO: 298708 - DNA, 201 bp, Homo sapiens
taagctataaaattaattaagattaagctgtaagaaaaagttctgactaaaattaggagggaaaaataaagctctgattaaataaacaattacagaaaacyaaattttaactctaagataaatttgccttgcaacttggttttgatgtacaatttgtgtattagctgattaggtaacttcaaaagtcatcagctgtctact

SEQ ID NO: 298709 - DNA, 201 bp, Homo sapiens
actccagcctgggcaacagaatgcgacgctgtctcaaaaaaaaaaaaaaaaaaaaaaaaaaaaaaaaaggtgtaaagggagtgaaatttttctctttgtcwttctgtaaggtgatatttggacaagtgaatagaacacagagcagtcagattttgcttaaatataaggaatacatttctagccattcaaattgatttaaaa

SEQ ID NO: 298710 - DNA, 201 bp, Homo sapiens
gaacttacaggatataactttcttcaaagtggtaatcattatacccagtccttctttccgttttctactctcactgtcctagtttatggccgtatcacttygtagttggatgggctgttgcagtaacttctcaactggtctccctaccctcatgccatctgaatattaatttattcattgaactaccacactacatcttct

SEQ ID NO: 298711 - DNA, 201 bp, Homo sapiens
attgacgtcaagcccaatatcatatggcttttctaacagcaagtgccactttgggcttcactaacgtatttatggcatacagaacagaataattaattcartaaattctgcactggccagatgacctctgcagtgttgaattcagttctgagtacataatttcaagaaggatattgaaaagctgatgcactcacataaaca

SEQ ID NO: 298712 - DNA, 201 bp, Homo sapiens
tatttatgtggggcacatgatattttgctacattcatcaaatgtgtaatgattaaatcaggatatttagagtatctgtcacctcgagtatttgtcatttctttttttttttttttttttttgagaccgagtctcagtctgtcacccagtctggagggcagtggcacattctcagctcactgcaagctcactccgtctcctg

SEQ ID NO: 298713 - DNA, 201 bp, Homo sapiens
accatgcccggctaatttttgtatttttagtagagatggggtttcaccatgttggccaggctggtcttaaactcctgacctcaagtggtccatccgcctcrgcctcccaaagtgctgggattacaggcatgagccactgcacccggccatatttatcatttctatgtgttgggaagtcccctcttcccactattttaaagt

SEQ ID NO: 298714 - DNA, 201 bp, Homo sapiens
aaagtaaacatagtagtcttctcaagattattagcaaattttccttaaaatgcttgcatctgaaaagatggcttcagcctgattattttaaagcctgtgtrgttcatcagtttaagtagggaagtggaacttggcgatctcagaggagttctgtagcctccatgcccctgctccccccttttcatggctcactactgccat

SEQ ID NO: 298715 - DNA, 201 bp, Homo sapiens
ttattagcaaattttccttaaaatgcttgcatctgaaaagatggcttcagcctgattattttaaagcctgtgtagttcatcagtttaagtagggaagtggracttggcgatctcagaggagttctgtagcctccatgcccctgctccccccttttcatggctcactactgccattcacataagcaaacactagcttccctc

SEQ ID NO: 298716 - DNA, 201 bp, Homo sapiens
gtgtcactgtcactcaggctgaagtgcagtggcatgatcatagctcactgtaaccttgaacacttacgctcaagtgaccctctggccttggcatcccaaarcactgggattacaaacatgagccactgcacttggcctattcttccatattgtcatattgcttaattttgttttcaaaaaacatacattccttttgtaatt

SEQ ID NO: 298717 - DNA, 201 bp, Homo sapiens
gcagatctcaccttggagctaggatgctttcatgtccctccaaccctcactgattatctttgtaacagagagcaggcctcaggctaggagtgtttgtcagaaaaaaaaaaaaaaaaaaaagaggatcttgtgagaattgaaagagatagcattgtctttccttgactttagttttatggccactttgtacttatataaagt

SEQ ID NO: 298718 - DNA, 201 bp, Homo sapiens
attactttgttatgttttttacctattatactgtgaacatttcacatgttcttttttataaaggccttggaagccaaattttaattgctctatggtatcaytttgtataccgtaatctattgagtaatttcccttttgttggataaacaattagtagcacattatagttactggatttttagatcttagtttactggttca

SEQ ID NO: 298719 - DNA, 201 bp, Homo sapiens
ttgactttagttttatggccactttgtacttatataaagtattactgagtttccatttaagtagtgacataaagttttaaaaaataaatccaattggaaasaaaattttatttatagaagactaagtgtacaatattatgggtggctggtccataacatggtagaatcaccaaggtaattgctacatgaataattgaaatt

SEQ ID NO: 298720 - DNA, 201 bp, Homo sapiens
gcaaaagtcactggtatactatacagtttgggatcagcatagatgttgattacaggctctgtgatctagagaaagttacttagcatctctgtgccttttcwttctctatttaatagggacaatatttcctatctccaaatgttattacttaatcttgagataatttgcttacagcatctgtcaaagtgccaaacatatagc

SEQ ID NO: 298721 - DNA, 201 bp, Homo sapiens
tggagcatctagcattctccaggagttattcgaaagctgaaactttcagtggattgtgggcctggggagaagaaggattccgagggtggaattgggaagabcgtgcgtgcgtgtgtgtgtgtgtgtgtgcgcgcgcgcgcgtgggtcggggcgggggcgtcggggggccactgggaattcagtgaagagggcaccctatac

SEQ ID NO: 298722 - DNA, 201 bp, Homo sapiens
acttaggttgattccatatctttgctattgtgaagactgctgcaataaatatgggggtgcaattatctttttaatatactaatttcttttcctttgataartacccagtagtgggattgctagatcatatggtagttctcttttgagattttgagaaatctgcatactgttttccatagtggctataccaacttatatacc

SEQ ID NO: 298723 - DNA, 201 bp, Homo sapiens
agcattctccaggagttattcgaaagctgaaactttcagtggattgtgggcctggggagaagaaggattccgagggtggaattgggaagagcgtgcgtgcgtgtgtgtgtgtgtgtgtgcgcgcgcgcgcgtgggtcggggcgggggcgtcggggggccactgggaattcagtgaagagggcaccctataccatggcagtg

SEQ ID NO: 298724 - DNA, 201 bp, Homo sapiens
ggagtgcgagacagtgggcgcaggtcagtgggtgcgcgcaccgtgcgcgagccaaagcagggcgaggcattgcctcacttgggaaacgcaaggggtcaggkagttccctttcccagtcaaagaaaggggtgacagatggcacctggaaaatcaggtcactcccacctgaatactgcgcttttccgacgggcttaaaaaacg

SEQ ID NO: 298725 - DNA, 201 bp, Homo sapiens
tctcattatataccagtggtgccattattctcaaatgacagggactttctgcttattaactgtataatacagctaagccctggctcagctgtggccctcartggaaggtagtgagtgtttattttatcacataaaaatattcctcaggatgctgtctctttttaccagcttccacagggctttactctaggccttaaccct

SEQ ID NO: 298726 - DNA, 201 bp, Homo sapiens
gcattctccaggagttattcgaaagctgaaactttcagtggattgtgggcctggggagaagaaggattccgagggtggaattgggaagagcgtgcgtgcgtgtgtgtgtgtgtgtgtgcgcgcgcgcgcgtgggtcggggcgggggcgtcggggggccactgggaattcagtgaagagggcaccctataccatggcagtgc

SEQ ID NO: 298727 - DNA, 201 bp, Homo sapiens
gaagataattcctttatatagaaacttgaatccttttggtaattacctatatatactttcatgataggtagtattttttattaaaggagattttttgttgytgtttgtttttttagtaaggctactatggaattgttttaactttgaactgagaatgtatgtttgtgctgttattgatataaaatatacagatttgatcac

SEQ ID NO: 298728 - DNA, 201 bp, Homo sapiens
tgcgtttttggtagaacgattgctatatttagtttaaaattttagggcggcaggccgggcgcaatggctcacgcctgtaatcctagcactttgggaggccraggtgggcggatcactaggtcaggagatcgagaccatcctggctaacatggtgaaactccatctctactaaaaatacaaaaaattagccgggcatggtgg

SEQ ID NO: 298729 - DNA, 201 bp, Homo sapiens
ttatctgtgcattagtccttgtgctaaaaatcaaaaataatatacagatagatgtgacacagcatttgtctctgcaaagtttagagcctagtgagattaaygagaagtgaacataagaaaaagggaagtcacagtgaaatatcttagataatggagaaatgcatataataacttggagcaggtttttaacctggctccagg

SEQ ID NO: 298730 - DNA, 201 bp, Homo sapiens
cattttcttaatccagtctatcattcttggacatttgggttggttccaagtctttgctattgtgaatagtgcctcaataaacatacgtgtgcatgtgtctrtatagcagcatgatttgtagtcctttgggtatatacccagtaatgggatggctgggtcaaatggtatttctagttctagatccctgaggaatagccacac

SEQ ID NO: 298731 - DNA, 201 bp, Homo sapiens
cgcgcgtgggtcggggcgggggcgtcggggggccactgggaattcagtgaagagggcaccctataccatggcagtgcccggcgacgctgcacgagtcaggracaagcccgtccacagtggggtgagtcaagcccccacggcgggccgggactgccaccatcgtgcggaccccgcatcgccgcgggactcgggctgccgtgg

SEQ ID NO: 298732 - DNA, 201 bp, Homo sapiens
cgattgctatatttagtttaaaattttagggcggcaggccgggcgcaatggctcacgcctgtaatcctagcactttgggaggccgaggtgggcggatcackaggtcaggagatcgagaccatcctggctaacatggtgaaactccatctctactaaaaatacaaaaaattagccgggcatggtggcgggcacctgtagtcc

SEQ ID NO: 298733 - DNA, 201 bp, Homo sapiens
cttaacaggctcaacttgtcaacctagcctttagcagcaaatgctacaaccacatattccatttctttctgttctgtagggttgggttgtcataccttccmgtttttatcaagttcactaaagcaggaatgagagactttttgggttctgtttgctcatgccttccaaaagttaactgaccacattatattacaatttaaa

SEQ ID NO: 298734 - DNA, 201 bp, Homo sapiens
aaacagaataaaatgtttcaatatggtatcctaggaaaagaaggtttttatcccaccttataattaaatctgaaagattcctacagtgaactaagaggttyctaatgaagtactaagctgcatttagaattggagcaatgaaaggctctttgttctcctttcaaaaggttccagtacagaacaatttggctcccaatacag

SEQ ID NO: 298735 - DNA, 201 bp, Homo sapiens
tgaagaaattatgaatatcataatttttttttccttttgactctgcctgtgttcatttccctcagcactcattcaatttaataattgtcattctgtgtctrtatggttcaaaattaattcaagataatttaatgtcctttttattcactgtgttttaaaaattaattttattctgtacagtacaagaaatttctgcagtat

SEQ ID NO: 298736 - DNA, 201 bp, Homo sapiens
tgttcatttccctcagcactcattcaatttaataattgtcattctgtgtctatatggttcaaaattaattcaagataatttaatgtcctttttattcactrtgttttaaaaattaattttattctgtacagtacaagaaatttctgcagtatatcaaaataaaactgttaaaagaatgactagcccttccacaaagatgtt

SEQ ID NO: 298737 - DNA, 201 bp, Homo sapiens
ctaatcttcttaatgagttcatagcaaggcatgtggtatttgcgatagaaaagactcagtaaaagctgtcttccattcagtttttgaaaagtgaatggatrccagtttatgttatttcctatagtgcctatcttaaactgatttttttttttttacttgctgaatctcatttcatgtcaatatgagttttgtattggtaat

SEQ ID NO: 298738 - DNA, 201 bp, Homo sapiens
acaaaagtaaagagaaaagtccatataccaggtgatatggtttggctgtgttcccacccaaccctcatcttgaattgtagttcccataatccccatgtgtygtgggagggacctggtgggaggtaatcgaatcataaggggagttacccccatgctactgttctcatgacagtgagtgacttgtcacaagatttgctggtt

SEQ ID NO: 298739 - DNA, 201 bp, Homo sapiens
caaggaggagataaattaaatttccacctacaagatcagtatagcaatattctgaattcaaaattctgttgttaaggatggtgtaaccatatatgacaagscttttacaaactcctttttgaacattgctttaagcaatcatttgtgtatttgtattaattttcaatctaatcattccaaatgaggcaaagttttgtgtac

SEQ ID NO: 298740 - DNA, 201 bp, Homo sapiens
gagattggagggtcatatggtttggctgtgtctccacccaaatctaatcttaaattcccatgtgttgtggagggacccggtgggagataattgtatcatcrtggcaagtcttttctatgctgttctcgtgatagtgaataagtctcacaagatctaatggttttaaaaagaggagttcctttgcacaagttctctttttgg

SEQ ID NO: 298741 - DNA, 201 bp, Homo sapiens
cctgaactcctgagctcaagcaatctgcccacctcggtctcccaaagtgctagaattataggcatgagccccggcagctggccaaggcttttattctttcmctgtagagaatttataagtattacagctaaacaagaaaataacgtactaatgtggattcatggttcaggcatacaagttttttctcttaatactaggttc

SEQ ID NO: 298742 - DNA, 201 bp, Homo sapiens
ggaatgaaaggaatactgaaggaaggaaaagagatgaagtgacgaagcacttcttttggccactttcctgctgcatgtctcactttgggtgctacttagawgtagatagagttggcaccaccaaacagggttattactaatcttggatctcacatataacttttaattttaggttgaaaatatgagaaaagtgttcttctc

SEQ ID NO: 298743 - DNA, 201 bp, Homo sapiens
ttttaaagcattaatataaacttaattaataatagtaggaatgatcaggtcctactactcatggatttcttttgagagcttaatttaaggagggaaccctyatctcagaaaaatttacatgactatgtagagatataaatttacatgtaatttcagaatattctgaagtctttaaaactttatttaagaaccttgcagtag

SEQ ID NO: 298744 - DNA, 201 bp, Homo sapiens
gagaaaagtgttcttctcattgacaagtaattagccccagaatttccaaatcaattttgaatatcaggaagattaaaaattgaactactagaggccaggcrcggtggcttatgcctgtaatcccagcactttgggaggctaagatgggcagatcacttgaggtcaggagttcgagaccagcctggccaacatggcaaaact

SEQ ID NO: 298745 - DNA, 201 bp, Homo sapiens
tggataggtgttatgtggagaaaggaagttttagaacacaacattctgtagattccttgctgtgtgttaacaaaagaaactggaacttcaagtgagtcgartgtcatattctacaattaaaatatgatatatttttaaagacaaagtaggtggggatagagatatatagacaagggacaaacgatctagaattcatagaat

SEQ ID NO: 298746 - DNA, 201 bp, Homo sapiens
catggaaaactgcaactttgagggagtgatctttcctgcaaataagcctgtaacggtgccacaggatgtggcaatgagtcaggaagcattttctctcttgwttttatttttttgctagggagtgtgttccctggtatagagagacacatctcatctcattttatatttgatgtatatctcacagactctcgaaaacttaat

SEQ ID NO: 298747 - DNA, 201 bp, Homo sapiens
tgcactgccttatgaaagatgggaacaagggtgtttttgtttttgttttttttcaaaaagaaagaagtcaagacaaataatgtcagtacttttttaaaaasttctttgactctcattttctcttctcagattctgacagtggatttacacatggacatatgggatatgtattctcaaaaacgtataatgtgacagatgata

SEQ ID NO: 298748 - DNA, 201 bp, Homo sapiens
gtgtgtgtatgtgcatgtgcatgtgtgtacctgtatgtgcatttatgatttgtgtgtgtgcatgtgtgattttcccctggcagaaaattgctttggttgtrtcaatttagtgaagaaacagtgtcacccagtggctttgatgaaaacagtcctataaacattatagataagcactgtccagtagaaatacaacacaagcca

SEQ ID NO: 298749 - DNA, 201 bp, Homo sapiens
aaaataaagattgcactgaatccatacattgcttgggtagaatggtcattttaacaatattaatacttcagatccatgatcatgggatgtctttgcattcrtgtgtgttgtcttcaacgtgtttcatcagatttttgtagttttccatgtagaggtctttatccatcttggttaaatttatttctaattttttatagctat

SEQ ID NO: 298750 - DNA, 201 bp, Homo sapiens
ccacatggtaattcctcccttaaagaagtctgctgtatataatgttaaggcagggttgtcagggctgttatgctgtgtcccaagccaaatacatttctcarcattccaaggttatgcgaatacacagaaataattattttcagatgttgacattgcacttagtgatttagtaatatgagaaaatatggttcaaaagttatt

SEQ ID NO: 298751 - DNA, 201 bp, Homo sapiens
tagccaggagagttagttaagtatttctgatcttatagtgaatgataatgtttgtacaacctaatagttgccccttttcctttctttttcttctctaatartaatagcaaaaacattgtttctggcattcagtgagtgccagataaatagaaaggctatgagcttgatgcacagtttcttttctttttcctgggtcctctc

SEQ ID NO: 298752 - DNA, 201 bp, Homo sapiens
tcgaaagctgaaactttcagtggattgtgggcctggggagaagaaggattccgagggtggaattgggaagagcgtgcgtgcgtgtgtgtgtgtgtgtgtgygcgcgcgcgcgtgggtcggggcgggggcgtcggggggccactgggaattcagtgaagagggcaccctataccatggcagtgcccggcgacgctgcacgag

SEQ ID NO: 298753 - DNA, 201 bp, Homo sapiens
gtagagatggggtttcaccgtgttagccaggatggtctcgatctcctgacctcatgatccgccccgcccccctttggactcccaaagtgctgggattacargcatgagccaccgcgcccggcccccactttcttacactgtatctttctaaagaataagtctgaacaaagtagtgactattttaaaccaatagtatacatt

SEQ ID NO: 298754 - DNA, 201 bp, Homo sapiens
aggactatctgcctttgttcttaaaaaaaaaaaaaaaaacttgtgagagtctttttaaaattctatagtcagatctatgacaacaaaagagactgagacawccacaagttatttctaccatgtttgtttaactcaggagattgaatttgatgtgttatatacatggtatgaaccaaacgcataatagaaattgggtcttct

SEQ ID NO: 298755 - DNA, 201 bp, Homo sapiens
atgatgtatgtgtgctgttattataacgaaagccactttctgtgaagtgtccacctatgcttgagtactaatcatagaaaggagctctgaaaataagcagygggcctgtagtcagggactgctgaaaatgagggagagcatcagggaaattagtgcactgtgcctcttctttcttcagtactcctttatgttcattgctca

SEQ ID NO: 298756 - DNA, 201 bp, Homo sapiens
tatcttgggcatatggggcacaccctgcaaccagaaacagcacaggaatagtcattccttcatgacaacttctacgaaagtgtaaattgaggctaacaggraaatcaccctattactcctgtaaagtgacgatagctttcagttttcaaatgcgactttctgatcatgtttgaatgtgtttctgttcatgtttatggagaa

SEQ ID NO: 298757 - DNA, 201 bp, Homo sapiens
ttccccttcttttctggaatgcaatcaatggtgaaacatgttttacggtaaaacatttaatactccaaattgtgaataaagcaaagagaatgtgtttaatrtattttttaaatcatatactttctttaagaccctctcactcctaacataagctagagttttccgtttcaatatataatcaaaaaaccaagtatcctatta

SEQ ID NO: 298758 - DNA, 201 bp, Homo sapiens
gaaaataagcagcgggcctgtagtcagggactgctgaaaatgagggagagcatcagggaaattagtgcactgtgcctcttctttcttcagtactcctttaygttcattgctcatggggatctgtgtttgcctgttaattgagtgtgtttattgcaggcagttgccttaagtgacatgatactcagtaggaggttgtgagga

SEQ ID NO: 298759 - DNA, 201 bp, Homo sapiens
atcaaaattgtgaaatctttgatagatggaagaaagtagttgtctttgcttgtaatgaatactttcaaaataaagtcgctgaataaaaatagtgatcttaygaaatattatagttggatatcatcagagaggtgatattataaatcttctaccccagatagtgattttttaatagtctttctgttgcaaatgtttagtcac

SEQ ID NO: 298760 - DNA, 201 bp, Homo sapiens
ctcttccaccaaacgtgtgcacatccttgagagccgtgagcaacttgctcagcacacagctcaccttccaggccattcacaagcccagagtgaatcccgtyacttcgctcagtgaaaactatacctgttctgactctgaagagagctctgaaaaagacaagcttgctattccaaaggtaggtagtaatgacatacccctta

SEQ ID NO: 298761 - DNA, 201 bp, Homo sapiens
cacatctcatctcattttatatttgatgtatatctcacagactctcgaaaacttaatcttcatagtaactttagtgcaggttttttttttaaatatgtatyttatagaagaagaaactaaggcttaaaagaggctatgctactcttctaaagtcatatagtaaatattcaacccaggattccaaagcagatttatccatat

SEQ ID NO: 298762 - DNA, 201 bp, Homo sapiens
agacattaaactttgaacaaatgtagtttcatatgacttgctaagtagaactttttgggatttttccttttatttgagtttataagaacaaaaatcatgarattttcattatggaaaatatgtatatatttttgccatagtgagactttaggacagctgaaatgaattaatgtgaacattccaataaatcaccttttggct

SEQ ID NO: 298763 - DNA, 201 bp, Homo sapiens
ccaacagacaaatagagagccaaatcatgagtgaactcccattcacaattgcttcaaagagaataaaatacctaggaatccaacttacaagggatgtgaargacctcttcaaggagaactacaaaccactgctcaaggaaataaaagaggataaaaacaaatggaagaacattccatgctcatgggtaggaagaatcaata

SEQ ID NO: 298764 - DNA, 201 bp, Homo sapiens
atgttatttaaatcatattttagcttttaagcttttaaaagttttaaaagcttttatatttgcttatgcacctcagacttcagagtcccataactttttcktaattgtaaagagctgaaattacattaaaaaataattaatactaataaaacacaagtatttccaggaaggggtatcacatcaacttagggatttattatg

SEQ ID NO: 298765 - DNA, 201 bp, Homo sapiens
gggtatcacatcaacttagggatttattatgagcatatttattgttttcaaaatcccatccacctgctacattggaatgaatatacacagctgttagtgtrtcatagaaaaagagaatgaaaaactgaatctacaagtgagattttctgaagaatgtgggaccaaaatacagacagagtaaggcagttggagtacgggaaa

SEQ ID NO: 298766 - DNA, 201 bp, Homo sapiens
agactgaatttccaaattcatgttatattttcaaatgtattttaatgatgtaattagccatagcaaagttccactgagttcaaattgatactaaactccayagacataactaccaactttttcacaggtggtatatcattaaatcatagttgaaagatggcaaatgtttaagtacaaaaataagttttcagattctaagat

SEQ ID NO: 298767 - DNA, 201 bp, Homo sapiens
tccattttacaaaactgaaacactgtacccactaagaaattactccccatttcttcctttaccaagcctctggtagccaccattccactttctgtccctawgaatttgactactttaggtaccttttagaagtaaaataggacagtatgtgtctttttttgtgactagcttattttacttggcataatgtattcaaggttt

SEQ ID NO: 298768 - DNA, 201 bp, Homo sapiens
atcctttaatagctagtctggattacccctcataaaaatttgcaaatggtcaggaaagtgtgttataatttacaacacttttccacttgaagtattttagrcaggactagggaacaatgtaaggatgtaaaagtggaggtggtagagatggggtttatctcttttcttcttaaataataatcttggaattatgaatctgta

SEQ ID NO: 298769 - DNA, 201 bp, Homo sapiens
ctttaatatgataatgtgtgcaaatattagaaactaaatttcttattatagttctaagtgtacctttaacggttttcaagaaaagagggtaagtaggaaakcttttaaatttgtaattagaatccttacaaaaattgaagaatctagatttaaacagagaattaaagtaatttcatggtagtagcaatagaaagacaagaa

SEQ ID NO: 298770 - DNA, 201 bp, Homo sapiens
aaggcctaaggttttattactttgcacctgcgctactgaaataatgtcctaacaggtctctggagattccctccctgcttactgtcataatctgtaatgcrtgaatagtctttatatacatggctttcttctggttgttgacaataggactatcatgaatggacctccatgggtggttagtgcaatgtagaggtccgagat

SEQ ID NO: 298771 - DNA, 201 bp, Homo sapiens
tataccaaaacaatatttgatatatgatgcctttctaaaggttatctttctgatttttttcccaaaatatatttattgaatacttttttgtaatccctccyagctactgtgttggcactcaggatgtaaatgaaatggtaacatttagaatattttttaaccagcgtggcattgacgcgattggtcagaaagaacattgat

SEQ ID NO: 298772 - DNA, 201 bp, Homo sapiens
gacatggtacatgctagaggggcagaactaccagagtattaactatattccaaaagaaaaaaaaatatttaaagtgttacctctattctttattacttctkcttaccctatggtgcataggagcatagacaaaattttaaatacaaaatatataaatttggatcttaaaatctgtgaatttacatacaactccaaccctcc

SEQ ID NO: 298773 - DNA, 201 bp, Homo sapiens
ctgtgttggcactcaggatgtaaatgaaatggtaacatttagaatattttttaaccagcgtggcattgacgcgattggtcagaaagaacattgattgtaarccaccctatggtcatcctggtgcattttggctctgaatttaataccaaaagaggcagctacatccccaccctcttaaggcttatggttccttgtaaagtc

SEQ ID NO: 298774 - DNA, 201 bp, Homo sapiens
ccaacaaaaaagaagatggagctacattactgctccggagccttgggcaagttattattctccctgtgcgtcagtttcctcatctgtataaaaggaatagyaatatatgtgttgtgaggactgaatgaggtcacccaggaagtgtgcttacaaaaatatgttgtgtagtcatcatcgtttactattcttgttactatcatc

SEQ ID NO: 298775 - DNA, 201 bp, Homo sapiens
tttcaactttccacattcaatatgatattagctgtggttttattatgtgtggtgtttattatgttgaggcatgttccttcctagtatttttagtttttatyatgaagtgatgttgaattttatcaaatgctttttctgcatatattgagaggatagatgcaaaaaagcatttttatgcgaagtcacccagtactgaacttt

SEQ ID NO: 298776 - DNA, 201 bp, Homo sapiens
cccattccttgccctcagaggtaacctctgtgcactaccctcttgtggttagaagatggagctaggccgggctcggtggctcacgcctgtaatcccagcaytttgggagactgaggcgggtggatcacctgaggttggtagttcaagaccagcctgaccaacacggagaaaccccgtctctgctaaaaatacaaaaagcca

SEQ ID NO: 298777 - DNA, 201 bp, Homo sapiens
agatgcaaaaaagcatttttatgcgaagtcacccagtactgaactttttattgttgggagtctttattgctgatttaatctgattacttattattggtctrtttaggttttctatttcttcctgattcaatcttggtatatgtgtccaggaatttatccatttcatctaggttttctagtttgctaatacatacttgttca

SEQ ID NO: 298778 - DNA, 201 bp, Homo sapiens
acagagctacacagtagcttcttttatcacacagtgatattaaaatactctcaaaatgattagaagttgaaatattagctatcaaaccaggagtttgctaytaatttaggtatgttaatttattcatgatagctatttaatatattactaataaagattggaacaacctgattattctttaaaataaagaagaaaaatgtt

SEQ ID NO: 298779 - DNA, 201 bp, Homo sapiens
accacttgttcatgcatttcactgacctcgcatggcctcaccaaatgtcaaggagacagggaagcaccatcctaccacgtggctgaaagtgggagacgcayggaaatacttagttcacaccactgcaatgggttaaagatctgaaattgtaagacaattcttttgaaatttatgttcactagtagtttgtaatagtgtcga

SEQ ID NO: 298780 - DNA, 201 bp, Homo sapiens
aattttgcattttaaagacatttgtttagttacttaactctcattctttctcaggtgccctcgctaaaatttcacctctttcatcgccctgctcctcacckctccaagggactcctgccagcagcctggtcagcaaaatttctgcagtgcagtttccagaatctgctgacacaactgccaaacaaagcctaggttctcaca

SEQ ID NO: 298781 - DNA, 201 bp, Homo sapiens
gttcaaaatagtctctgatacttttgtatttctgtgctatcagttataatgtctcctttttcatttctgattttatttttggaggtcttctcatttttctyggttagtctagctagtggcttattcattttgtttatcttttcaaaaaaccaacttttgtttccttgacacattgtactttttaaatttttattttattta

SEQ ID NO: 298782 - DNA, 201 bp, Homo sapiens
ttttgactactactttgtgttgtttccattttcatttgtttcaagaaatttattgatttattccttaattatctctttgacccaaaggtcattcagagacwttttttttaattttcatgtatttatacagtttccaaagtttcttttgttattgatttctagttttattcattgtggtctgagaagaaacttgatataatt

SEQ ID NO: 298783 - DNA, 201 bp, Homo sapiens
tagcatctggtctatcctggagaatagttccatgtgctgacaatgagtactctgcagctgttcaacaaaatgttctgtaaatatctgtgaagtccattggyctaaaatgcagtttaaatccaacgtttatttattaattttctgtctagatgagctgtctggttctgagagtgggatgttgaattcctcaactatttttgt

SEQ ID NO: 298784 - DNA, 201 bp, Homo sapiens
aaaatccccacgtttattgtatgcaaattttcctaaacagagaagttgacagatttctaaaactaccctgatcattccaaaagactctttaggaagttacrgcttcaatgacagcagctgcgagatgttttagcaccacctgggagaacgggggattgggtgggggagaggggctatactaaaaaacaaaacaaaacaaaa

SEQ ID NO: 298785 - DNA, 201 bp, Homo sapiens
atcatatactttctttaagaccctctcactcctaacataagctagagttttccgtttcaatatataatcaaaaaaccaagtatcctattaagtgtatattrttgactcaaattgacaaggacattggtaaccttccttttttttttttttttttttttttttttttttgagacagggtctccctctgttatccaggctgga

SEQ ID NO: 298786 - DNA, 201 bp, Homo sapiens
cagattcattgtttgtagaatgtttcttaaggcttcacagatattgtaatttcttatagatggattgtggagagagatcatgtgtagatagaattcctacrtggtcccagtgttttaagtatagtagtcttctgccactctaatattgaataagaagtgctagtggaaaaattgggtgatcgattacttatttccactctg

SEQ ID NO: 298787 - DNA, 201 bp, Homo sapiens
gaaaaatttgtattgagatgtgctaatagagaatttggtataactaaacatctgatatataatttatattttgaggtaactctttagccaacattttaaartatgattaatttatagtacttacgaaggattttcagagacattacatttttctgttatttcactgttttaaacaagatggagattagagggtggaaaatg

SEQ ID NO: 298788 - DNA, 201 bp, Homo sapiens
tagtatattgcctacagttaacagtacatactctgttgtagacttaaaaagagggtagattttatgttgtgttcttatcacaaaaaaaggtgggaggaaayttctggaggtgatggataggtttatggcacagattgtggtgatggtttcacaagtatatatatgcttatctccaaactcatcaagttgtatatatttaat

SEQ ID NO: 298789 - DNA, 201 bp, Homo sapiens
atgttccctgtatgtagcagctgggttaagaatataattgtcttgacaacaaattattgacatttacgagctcaaaagttacctcagaagcttttgaaatyaaagaaataaaagtgttaattctctctgatctgaacaagccaggactcagtgtcagccctttataggtcaggctgtggaaggaatgcataggatgaaata

SEQ ID NO: 298790 - DNA, 201 bp, Homo sapiens
gaagtccatcacagtctattgacagtttcatcaaagctgtatagtccaactagtggggcagcttggctactatggtggaagtctcagcaaactgcctggttttgtttgtttgttttgttttaaggtacaggaaataagaggaataatagtggccaaagcaattagaacatcttcattccagaactgtgttcagcaatccag

SEQ ID NO: 298791 - DNA, 201 bp, Homo sapiens
aaattcagtcacaatgctatatatcaggctctcagtgattttttaaaggagggtcaattttaagaattctaaggaatctctttgttcctgctaatttgtcygaaggtttacgaggaatacaggagaaagctaaattgtttggggaacagtaagagatttagattctgagaaagatcctggaggaaaagctggggccagtat

SEQ ID NO: 298792 - DNA, 201 bp, Homo sapiens
aagtccatcacagtctattgacagtttcatcaaagctgtatagtccaactagtggggcagcttggctactatggtggaagtctcagcaaactgcctggttttgtttgtttgttttgttttaaggtacaggaaataagaggaataatagtggccaaagcaattagaacatcttcattccagaactgtgttcagcaatccagg

SEQ ID NO: 298793 - DNA, 201 bp, Homo sapiens
acacacaaataataattttttatttcccatctagttacagtcctccttcagctttcatccctttagtaatagttgtggtgaattttttctcccgagaagcycctaaaaaggcgttcatttttacgtaaacaaacaacaggagaaaaacatataaacatgaaagcaaaatattttacctacagaaatatattttcagcaatc

SEQ ID NO: 298794 - DNA, 201 bp, Homo sapiens
attaaacccaagttctgtaatatatacttcagaaatattgttttaatctattctctgaactagttttacctggcttgtaggactatctgcctttgttcttaaaaaaaaaaaaaaaaacttgtgagagtctttttaaaattctatagtcagatctatgacaacaaaagagactgagacatccacaagttatttctaccatgt

SEQ ID NO: 298795 - DNA, 201 bp, Homo sapiens
accactgctcaaggaaataaaagaggataaaaacaaatggaagaacattccatgctcatgggtaggaagaatcaatatcgtgaaaatggccatactgcccmaggtaatttacagattcaatgccatccccatcaagctaccaatgcctttcttcacagaattggaaaaaactactttaaagttcatatggaaccaaaaaag

SEQ ID NO: 298796 - DNA, 201 bp, Homo sapiens
agtccatcacagtctattgacagtttcatcaaagctgtatagtccaactagtggggcagcttggctactatggtggaagtctcagcaaactgcctggttttgtttgtttgttttgttttaaggtacaggaaataagaggaataatagtggccaaagcaattagaacatcttcattccagaactgtgttcagcaatccaggc

SEQ ID NO: 298797 - DNA, 201 bp, Homo sapiens
acaacaggagaaaaacatataaacatgaaagcaaaatattttacctacagaaatatattttcagcaatctatttctcatgctattgttaaaaatatctctrcttggatagaacctttttgtttccatgctgacttcttctttgcttctcctgtgaactttttaaattctgtgtttggcagcagttttgttttccttggagc

SEQ ID NO: 298798 - DNA, 201 bp, Homo sapiens
gaagaacattccatgctcatgggtaggaagaatcaatatcgtgaaaatggccatactgcccaaggtaatttacagattcaatgccatccccatcaagctascaatgcctttcttcacagaattggaaaaaactactttaaagttcatatggaaccaaaaaagagcccgcatcgccaagtcaatcctaagccaaaagaacaa

SEQ ID NO: 298799 - DNA, 201 bp, Homo sapiens
gtccatcacagtctattgacagtttcatcaaagctgtatagtccaactagtggggcagcttggctactatggtggaagtctcagcaaactgcctggttttgtttgtttgttttgttttaaggtacaggaaataagaggaataatagtggccaaagcaattagaacatcttcattccagaactgtgttcagcaatccaggca

SEQ ID NO: 298800 - DNA, 201 bp, Homo sapiens
gggtcttcattgtgcctatcttggttaatgagaactgagaagagaagaaacattctcttttaaaaaaaattttttttagagaatttcttcatcagacggaragattttatttgccatttgcaggcataaccttggtgacctatatatccccagaccttctggtaagatgcttattaaaatgtcattacccagaggagtaat

SEQ ID NO: 298801 - DNA, 201 bp, Homo sapiens
aatgcctttcttcacagaattggaaaaaactactttaaagttcatatggaaccaaaaaagagcccgcatcgccaagtcaatcctaagccaaaagaacaaaggctggaggcatcacactacctgacttcaaactatactacaaggctagagtaaccaaaacagcatggtactggtaccaaaacagagatatacaagaatgga

SEQ ID NO: 298802 - DNA, 201 bp, Homo sapiens
ttgacaaacctgagaaaaacaagcaatggggaaaggattccctatttaataaatggtgctgggaaaactggctagccatatgtagaaagctgaaactggawcccttccttacaccttatacaaaaatcaattcaagatggattaaagacttaaacgttagacctaaaaccataaaaaccctagaagaaaacctaggcatta

SEQ ID NO: 298803 - DNA, 201 bp, Homo sapiens
gcacttaattctgaaattcattgacctcaatgtgcaagctgtcttctttactatttattgtgaataaccatttttttttatttgttgtaatcacacatcargaaagggctagggagatgtctttgtgaaacatttatccctatggttctgtttaataggagtacttaccagtagctaaatgcctcattttattttaaataa

SEQ ID NO: 298804 - DNA, 201 bp, Homo sapiens
gtgctgggaaaactggctagccatatgtagaaagctgaaactggatcccttccttacaccttatacaaaaatcaattcaagatggattaaagacttaaacrttagacctaaaaccataaaaaccctagaagaaaacctaggcattaccattcaggacataggcatgggcaaggacttcatgtctaaaacaccaaaagcaat

SEQ ID NO: 298805 - DNA, 201 bp, Homo sapiens
ggtcttgtttgaatacaaggggtgggggagtcacacttttcagaccgattagaataatgagattctctaaacagttgagaaccatttgtaagaatagcacrttgtgttagaaggcaattagagctcattcttttaataattaggttttttgagttcttacagtatgctgagtactaagattataaaaatgaacaaaaattg

SEQ ID NO: 298806 - DNA, 201 bp, Homo sapiens
aaggttttattactttgcacctgcgctactgaaataatgtcctaacaggtctctggagattccctccctgcttactgtcataatctgtaatgcgtgaatartctttatatacatggctttcttctggttgttgacaataggactatcatgaatggacctccatgggtggttagtgcaatgtagaggtccgagataacccca

SEQ ID NO: 298807 - DNA, 201 bp, Homo sapiens
ccatccatgtaagatgtgagttgcttctccttgccttcctgtatgattgtgaggcttcctgagcaacatggaactgtgagtgagtgctcaattaaacctcyttcctttgtaaattgcccagtctcaggtatgtctttgtcagctgcatggaaatggacgaatacagtaaattggtactggtagagttgggtgctgctgaaa

SEQ ID NO: 298808 - DNA, 201 bp, Homo sapiens
attactttgcacctgcgctactgaaataatgtcctaacaggtctctggagattccctccctgcttactgtcataatctgtaatgcgtgaatagtctttathtacatggctttcttctggttgttgacaataggactatcatgaatggacctccatgggtggttagtgcaatgtagaggtccgagataaccccattcttgct

SEQ ID NO: 298809 - DNA, 201 bp, Homo sapiens
agagcattatgtgaaaaagctaaaaagaaatagacatttcatttgacatgataactaagagttaacagactactcagaaagctaccacaattacataagcygggggtgatcctcctgacattaccctacacccatcagaatgcacttgaaccttcctgtttggcactgtgaaccactcttaaaaagaatgtggaggtgaag

SEQ ID NO: 298810 - DNA, 201 bp, Homo sapiens
gccttatatataagtggaaagagtgacttgatgtgatctctgccattgtgaccttagatgggaagggttaagcccaggataaaggtaggtaattttatctrcattgagattcataccgagacccttaaatcaaaagcatacaacttgacatttgcatttgatatgagatcccccagcccagtcattagcctcccacaagac

SEQ ID NO: 298811 - DNA, 201 bp, Homo sapiens
gaagagccccctcgtggcaaagagtgtaagcaaatggaatcaaatgaaatgtgaagagagtctgaggaaacatgtagcagcaataggcaatgaggcggagrgaaagcgagtatgaagtaagaagaggcatacagaaagataaataccctgtttccagagagggctaatgaaatctgttctttgcgcaaatcaagtaaacag

SEQ ID NO: 298812 - DNA, 201 bp, Homo sapiens
gatcattcaagtcctcctataggcctcttgatctgtacattaattggaataatggtctgttctttttgtagaaattaatcatgttcttaaacacctccatkcagtgtaagttctgactgtttaattaaaactttatagtaagctcaaactgggatcctgaaaatgaaaagatattttttgttatctggttcaggtttttgt

SEQ ID NO: 298813 - DNA, 201 bp, Homo sapiens
gacttttaagaacttaacgcccaaggatcttgtcattcttctttgtaaaatggatcatccaaatatttacaatagaaataaggaaaatacttacaatagamataaggaatagcatacaattccattcattctcattctctcattcctgaaaatactcgtagatgtcttgtctggacattcattttcctcactgcctaatat

SEQ ID NO: 298814 - DNA, 201 bp, Homo sapiens
aattttctgtctagatgagctgtctggttctgagagtgggatgttgaattcctcaactatttttgtgttgaagtgtctctctccctttagatctattaatrtttgctttgcatatatctgggtgtgatactgcttctcagccttttggctaagatcaggtttagtatctggttgctctggtattggtgcatatatgtttag

SEQ ID NO: 298815 - DNA, 201 bp, Homo sapiens
aatgatttctgctgagaaatctgttagtctgattggagtttccttataagttactagatacttttcttttgctgtttttagaactctctatgtctttgacttttttttttttttttttgagatggagtctcgctctgtcccccatgctggagtgcagtggcgtgatctcagctcactgcaagctccgcctcctgggttcac

SEQ ID NO: 298816 - DNA, 201 bp, Homo sapiens
gtgagtgagtgctcaattaaacctccttcctttgtaaattgcccagtctcaggtatgtctttgtcagctgcatggaaatggacgaatacagtaaattggtmctggtagagttgggtgctgctgaaaagacaaccaagaatgtggaaacgactttggaactgggtaacaggaagaggttggaacagtttggagggctcagaa

SEQ ID NO: 298817 - DNA, 201 bp, Homo sapiens
tctgtaatattaagtcagtttatcacactatgagtagttttttttaatggattctgacaatatgctgcttattgtagtctttcatcctttatctgagaacwatgtttttatgacagtaaaatattttttatacaaataggataaaaattcatatgctgtcatgcgctaatatgaagtttatccttacatctcccactctcc

SEQ ID NO: 298818 - DNA, 201 bp, Homo sapiens
tctaaatcatactacttatttcattagttaattattgcttgtgaaccatattataatcatctttagtatcaataaatatttttgagatgatataatgccartaaatccataaattaaaaaattaaagcattaaagaaatatctactatgtaagcattcaattttatataatgattatctgggtcagtgtacccaaaattgt

SEQ ID NO: 298819 - DNA, 201 bp, Homo sapiens
aagaagctgaaaattatggttagggcagaccctggaaatatcagatcaagtgatggaacagcctcatattcctgtgtcctgatccccagtttgtatgactkcactctagaagaaagagcaaaggagcaaaatgtaaaagggaaggaatgtccacataagataccacatgggcaggtggtaggaatgagagccacaggcata

SEQ ID NO: 298820 - DNA, 201 bp, Homo sapiens
gagagcctaaagagattacaaccctccctaatcagatgggcccttctgctttaaaatccttgcttccctgtttgggttgatggagctaagtggttgtgacwtgtttgatgcagttgactgtgatgcatcctggttttccataaactccatggaaagaagctgggaagagccccctcgtggcaaagagtgtaagcaaatgga

SEQ ID NO: 298821 - DNA, 201 bp, Homo sapiens
tcacaacctactcatctgacaaagggctaatatccagaatctacaatgaactcatacaaatttacaagaaaaaaacaaacaaccccatcaaaaagtgggcraaggacatgaacagacacttttcaaaagaagacatttatgcagccaaaaaacacatgaaaaaatgctcatcatcactggccatcagagaaatgcaaatca

SEQ ID NO: 298822 - DNA, 201 bp, Homo sapiens
tggttccatagagattttggaattgtttttcctgtttttctgaataatgtattggtattttaaaaataaagattgcgggggaggagccaagatggccgaayaggaacagctccggtctacagctcccagcgtggtggatgcagaagatggtgatttctgcatttccatctgaggtaccgggttcatctctctagggagtgc

SEQ ID NO: 298823 - DNA, 201 bp, Homo sapiens
tactgaaataatgtcctaacaggtctctggagattccctccctgcttactgtcataatctgtaatgcgtgaatagtctttatatacatggctttcttctgrttgttgacaataggactatcatgaatggacctccatgggtggttagtgcaatgtagaggtccgagataaccccattcttgctaaaaacattacacatttt

SEQ ID NO: 298824 - DNA, 201 bp, Homo sapiens
ctgtgcattgttttcttcctattacttgaatttaagttaattttcttttttattgactttagtttttagtttctgtctcccctaaaaaagtgggagctccrttagagcagggtttttattttataacctactccatccgtggagcaagactcacaataactacttgttggatgaagaaatcattgagatactcagtacaga

SEQ ID NO: 298825 - DNA, 201 bp, Homo sapiens
ttgatttaatctatattttgtctagcattatcccaacattagaagtagttaatgtatccataggcaattgttagatacatatgtaagaaagtgaaaaaccracagacagacaaaacccacctaagtcaataatattggcaataggatttagaatgctgttatggcacatgagatgctccacatcctacctacatggaatat

SEQ ID NO: 298826 - DNA, 201 bp, Homo sapiens
cattttcttaatccagtctatcattcttggacatttgggttggttccaagtctttgctattgtgaatagtgcctcaataaacatacgtgtgcatgtgtctstatagcagcatgatttgtagtcctttgggtatatacccagtaatgggatggctgggtcaaatggtatttctagttctagatccctgaggaatagccacac

SEQ ID NO: 298827 - DNA, 201 bp, Homo sapiens
cctaaatactaggattacaggcataagccactgcgccccggcctctaatggattcttttttattgtatatacttgaggtgtacaacataatattttgatgyatatttacaatgtaaagtaattactaaggtcaagtaaattaacatcgatcgtctctcatagttttaactttgtgtttggtgaaatcaccgaaaatctacc

SEQ ID NO: 298828 - DNA, 201 bp, Homo sapiens
tattttgatgtatatttacaatgtaaagtaattactaaggtcaagtaaattaacatcgatcgtctctcatagttttaactttgtgtttggtgaaatcacckaaaatctaccctcttagcaaacttcagcacactgtataacatcatgaggtatagttctcatattctgcgttgtatcgctacacttattcatctgacataa

SEQ ID NO: 298829 - DNA, 201 bp, Homo sapiens
tgtggtcagtttcaaggaacgagagaccaacatccaagaatagtctggaggagaaaggacatatcaagaaacacaactcaagctgggtgtagtggctcacrcttctaatcgcagcactttgagaggctaagttgggaggatcacttgagcccaggagtttgagaccagcctaggcaatataaagagccctcatcttaacca

SEQ ID NO: 298830 - DNA, 201 bp, Homo sapiens
catcaccaacatcataactttatagagatattgcattagaattcatctagtttctgtacttattcatgaataagagatgcttatgtagatgttatttcttsttgacaaattctattagcataaaataaaagcattaatatttacttttaataaaagtcataacatttagcgttaagttcctttataagtaagtgctttatg

SEQ ID NO: 298831 - DNA, 201 bp, Homo sapiens
gtactggttagaagccatattaactagatttcagtttcttgaaaatttatacattagcaagcatagtgtaaatatgtattaagtgggcaataaatatttgytgtgttagtggcattttaatagtacatgatggaataaatgatagatgtgttgtaaaagcttttattgcatgattgccagtttctacctcattgttgtttc

SEQ ID NO: 298832 - DNA, 201 bp, Homo sapiens
aagggtataaaaatatgtaaataaaagtgcctagatgcaagagtgatggaaataagtcaaatgttagcagtgctttcttatcagatggagaaattatggaygacttttccttcccagtttagtgtttctttgtacctctgaaaatttgtacaatgtacatctgttatttataattttgtacattgagtgtgtatcaagtta

SEQ ID NO: 298833 - DNA, 201 bp, Homo sapiens
agattagagggtggaaaatggattctggagaaataaacccatcatattaactataaccatgagttccttgaagacaaatcaaatctgatgtcttttctttytccttatgaatatacttcagtacgaaggacctgatacttagtttggacccagtaattatttattgttgtaagtagcacagtaagaataaaaacgtttatg

SEQ ID NO: 298834 - DNA, 201 bp, Homo sapiens
gtgatctgcctgtcttggcctccgaaagtgctgggattacaggcgtgagccaccgcacccagccatctttgacttttgaaagtttggctacaatgcaccayggggaggaccttgaattttatttgtgtgagtttctctgagcttcctgcatctagatgtctaaatctctttttgttagacttgggaagttttcacctataa

SEQ ID NO: 298835 - DNA, 201 bp, Homo sapiens
ttagcattccttctccaaaaagagtatcatatcatcttaataaagtttctcttttcccagaattgcttaagtagcatgctgctattcatttctcttgaaaktttagtcaaaatgaattattttgcaaaaaggaaaattccacagtttctatttcttttcctcattgtctgtggcccattaacgtcttttatctgctactat

SEQ ID NO: 298836 - DNA, 201 bp, Homo sapiens
gtatatcatctgatttcaacttcggaaaatatataaatgtacatctaagcttctagtgaatggttgaaagaagtatatatggtgtgtaagttcttaagccratggattcagcctagagcagcagacctgttcccagcattttaacactaggtgtttatttacagtgatcaaagtgagaatgtgttacatcagaagttagat

SEQ ID NO: 298837 - DNA, 201 bp, Homo sapiens
aattaagacctcttttccagaagcaatctattatttttgtccagtgagatctatttaccctagaagtgtttgttcttataccttaatttttaaagtttttkttcagtaaaaaacagatatgaataagttggtaggaaaactattttaaaagggtatttttggccctataaaaatcccagcaggtatctctgcctacttttt

SEQ ID NO: 298838 - DNA, 201 bp, Homo sapiens
agttttgaactttaaggtttaatgactgccctattgaattttagacttgcatggggcctgtagcgcctttgtttcagcaaggaaactggtggcattttgcyctagccctagagatctgtgaaactttgaacttgagggagatgatttagggtatctggccgaagaaatctctaagcagcaaagcactcaagaggtgacttt

SEQ ID NO: 298839 - DNA, 201 bp, Homo sapiens
gttaaatgtcttttcttctctttagtgccacttagaaaacttggaaataaacaaaaaatgaagctcatatatttttttaccactgtctagaaaccattacwataatgctggtcttaattcatacttactagaattgggagatgtatttgacttactcataaatttgataggtggaaaaagtagcttatttattacgaagct

SEQ ID NO: 298840 - DNA, 201 bp, Homo sapiens
aaggggttgctgctcttcacactgaagcaaggggagagtgagatttctcatctttaacaacaacaacgacaaaaagaaataacagcgccaacaagaaattraaaagaaaattacacacgaacacacaaaatcgttcaacaaacttaatattcttttcagtggaccagaaaacctttggtatgacaactcaaacttttgagg

SEQ ID NO: 298841 - DNA, 201 bp, Homo sapiens
ccagtgcacaagggggtgtgtcttctgtgtaaagggaacatgttccaaaagcaaaaaggcaagaaacaatctgttaagaagaaaccacaaagatttcctargaagagagaatggcatgagttgagatggaaatgattgggaaaggagagttaagtcatagagggtctgggtttagatatgacaccctcccctttaaagtta

SEQ ID NO: 298842 - DNA, 201 bp, Homo sapiens
agtaacaaggagccaaatgttaatcaccaagacaatggagaaaatgtctccagggcatgtcagagaccttagtggcagtccctcctatcatagacccagakgcctaggcagaaaaaacgatttcacaggccaggccccagaccctctgctgtgtgcagcctagggacttggtgccgtgagtcccagctgtttcagccatgg

SEQ ID NO: 298843 - DNA, 201 bp, Homo sapiens
ttggaatgtttgtacttgttctccagggaatgggttacattgatattaggcatatttaattgtcagtttgcatttcccatttttgcaattttaaaatgtgwgaataatacattgcacaggatggctggactcaaatagttctctgaatgaaatttaagcaattgtatgtgctattctatcatgttgaaacaaaattacaaa

SEQ ID NO: 298844 - DNA, 201 bp, Homo sapiens
gatggctggactcaaatagttctctgaatgaaatttaagcaattgtatgtgctattctatcatgttgaaacaaaattacaaagtgttatctatcacagagkttaagaaaaaaatggcctagcatggctggagtaattattttgccaatgttgtcacgaagaaataattatctcttcttactggttaatgtatttttattgt

SEQ ID NO: 298845 - DNA, 201 bp, Homo sapiens
tgaaggttgtgttgattactaatggccagtgatacagtcagtcatacctgtagaattgaagcctctatgtaaaacctaaaggacagggttcagaggacttytggatagctgaacatgtggaggttcctagaaggtggtacaaccacccagggaggacatgggagctctgcaccccttctcctatacttcaccctatgcagc

SEQ ID NO: 298846 - DNA, 201 bp, Homo sapiens
gccaatgttgtcacgaagaaataattatctcttcttactggttaatgtatttttattgttcttcagtaacagcttgaataatttatcttaaagcattatgrtattttttaagtagaaaaacagttgagtgtttttaactatgagagtaccttgaataaaacagtatttcatttctgaggttgatgaggataactatttgaa

SEQ ID NO: 298847 - DNA, 201 bp, Homo sapiens
tgatgaagtaataatctgtgttattccagttcttttaaatgttaattcattttaacagttgcttcagaaaataaaattttatgaggcaaaatacagcaaartatttcaacaccacatttttgtttttccaaccagagtttgtttcatttacagacattgtcatttattttttatttttattcattttttagaacatcttaa

SEQ ID NO: 298848 - DNA, 201 bp, Homo sapiens
tagttttaactttgtgtttggtgaaatcaccgaaaatctaccctcttagcaaacttcagcacactgtataacatcatgaggtatagttctcatattctgcrttgtatcgctacacttattcatctgacataactgattatatatgtttatactctccaatgaaatttatattctttcaaaattaaaaatactgttagcttt

SEQ ID NO: 298849 - DNA, 201 bp, Homo sapiens
gcatttgaggaaaatgaaatgaactccatttgatatatgacctattgcacttaaaaatattcagatcactggttattgctgactgcttataaggcaaaatrttttgattttactgtattgttcatgctgcgagcaaaatgggtgtctgctaagtttttattttaaaatgcatatttctgtctttaccttgtagccttgcaa

SEQ ID NO: 298850 - DNA, 201 bp, Homo sapiens
tttagccaactaggtaaaaataaattttcacatatttctattgagcccactggacaccaatatactttaataattgtgtttaaaatagaaaactccttcarcttgaagctgtcttttatttgagaaaagtgaaaaagagattcgtgggatattataaaagatgaacaagatgcctaaaatggacaatgctcctttacatgt

SEQ ID NO: 298851 - DNA, 201 bp, Homo sapiens
tacatgttactttaacatttgagagaatgctatcaaaatgcagaactggctaaaagtgttagaaggagtagttcaagttgtcttcaaccaagagtcatctrgaatttggctgcaccctggtatatcaaatacgctgtatgggaatgtgcttatattttgatgagtaatgtgtttttataacaaatgaagatgcatgtcaga

SEQ ID NO: 298852 - DNA, 201 bp, Homo sapiens
ttacaagattttgtctctaaattaactctcttcatctgagggaaacagaaagatgaaaggacctattatttttgaaaagaaacaaattctaagtctttctrtattaccagagtgttttcattgtcttgctttatgtcttaggcaaagagaaaagcttccatgacgcatttatgctttttaatgacctaattagacaatgtg

SEQ ID NO: 298853 - DNA, 201 bp, Homo sapiens
ttaaaatatgggtggcagtgtctttaactcagatttgggatgctttatacagtcatgggaaatatcaggggatcaacttgaaattctttaaaagttaacaraattttggaacgatcaaggaacatgggaatatggcctcaccttttctttctcactgatgacataaatgccgccctcactgtgttgtttattgtttcttcc

SEQ ID NO: 298854 - DNA, 201 bp, Homo sapiens
acagccctgaaaagtgactttcatatttaggattgaatataaactcattctaagattgtctataacctatttctgtgttgcttagcatagttctatttaasagaactaagacaaacatatagaaatatgatgatgacaatgatgatattatattactttcccaagtgtctggcactatgcgtatttcaccaagcatttgta

SEQ ID NO: 298855 - DNA, 201 bp, Homo sapiens
tcattcaatagaatttaggcttgtcttccagatttaaaaaaaaatcatctaaggtgcagtatgtactgaaatagtgaacctggaacaaccccatattccaytgatattctttttttttcctggttatacaactgctggaacaatagtgtaacaatgtcaaagaaaatttgtctgggaggtaggaagattggtgataggaaa

SEQ ID NO: 298856 - DNA, 201 bp, Homo sapiens
ataggaaaagtactattattatggacaagctctagatttgggagtcataagatttgagtatggttcctggatctaattcctggtagtaaggaggccatgcrtaagtcgcttaccttgaccaatctattttctacttttctaaaatggtaattctatttgctctgcttaactcacagctcttgtaaggatcacatgagaaat

SEQ ID NO: 298857 - DNA, 201 bp, Homo sapiens
tggggttggggttgtttgtttttttcttttttcttctttctttttttctggtagagttggggtttcaccatgttggccagactggtctccgtctcctgacstcaagtgatccacctgccttggcctcccaaaatgtgggattataagtgagagccactgcgcctggcctttttcttgtaaatttaaattccttgtagattc

SEQ ID NO: 298858 - DNA, 201 bp, Homo sapiens
tctgtgcacagcacaacaaactcacttcaaagccaaatgaggacttggcatactcaggaaattctagtaatgagatgctcttagttttactgttacagtaygtagcacttcatcttaggcaaatatgacagtctgtggaatcctgtgtcattcatttgaaagaactgacaaaagaacatgtttttagatcaacttgcattt

SEQ ID NO: 298859 - DNA, 201 bp, Homo sapiens
ttcttctttctttttttctggtagagttggggtttcaccatgttggccagactggtctccgtctcctgacctcaagtgatccacctgccttggcctcccamaatgtgggattataagtgagagccactgcgcctggcctttttcttgtaaatttaaattccttgtagattctggatattagacctttgtcagatgaataga

SEQ ID NO: 298860 - DNA, 201 bp, Homo sapiens
accaataatgtctggtggtaatgcgtgttttttggagtagtctttaattactaaacaaggtggtgacatacataaagccagtgggttttttttccaccggmagatgggtgctaaagaaactgagcgattttatttttttcatcatataatatttctgatggtcttgcctccttcaagtctcaacatgtgtctctttaaaga

SEQ ID NO: 298861 - DNA, 201 bp, Homo sapiens
gatgggggcatttaagttattgtcaggattaaattcaatcgaaagaattaagtgttaggaaactgtgccttgcctgtcaaatagtgactagtcaggaaaamacacacacacacacacacacacacacgcacacacacgcacgcacaaatgcatgcacacattcctcactgctattttgacgtatatgtacctatagtatgt

SEQ ID NO: 298862 - DNA, 201 bp, Homo sapiens
ttcaatcgaaagaattaagtgttaggaaactgtgccttgcctgtcaaatagtgactagtcaggaaaacacacacacacacacacacacacacacgcacacwcacgcacgcacaaatgcatgcacacattcctcactgctattttgacgtatatgtacctatagtatgtctaaatttttcatggtattagattatacttcaa

SEQ ID NO: 298863 - DNA, 201 bp, Homo sapiens
agcagcatggtttcttttttttacaaatcttttgcaaagagcagtgataatgtgccaatgacaatgaaatatttgaacaagaaaagttgtttttatttatrgagaaacaagtaaaggccctaaggtggttaaatgattgcttaaagtcacacagaagtggcatggctctgatttcccagtttaccagatacttagatactc

SEQ ID NO: 298864 - DNA, 201 bp, Homo sapiens
tggacacaaggaggcgtttaagagggtattgtgaaagtcctgggtagagacattgaagatttattaagatagtagtggtgggcaggaaaggtgatttaagaaaaaaaaaaaaaaaactgcagttgggaggattagcttgtgattgatagtggaaggtgttaacaaagggcatgaacgccacttaaaactgtgaacctgaga

SEQ ID NO: 298865 - DNA, 201 bp, Homo sapiens
cattttctttttattctctaacccaaactgacagatttaataattagaaatattttacaggtaacgtttttctatttacactcaagggttgaaaagtaaarttacttagtatgcagatacggtctacctacctcttctcttagtgcacacacgagcacaattcaggaaaaaaaatgatgagttatttaagatattaaacaa

SEQ ID NO: 298866 - DNA, 201 bp, Homo sapiens
tgtctctttaaagagaatatttcacctttcaaaatgaagtctcctaatgactcacttaaatgtttattgttttcttgccgtaaggaactttgtgacttgtaaatatgaatttatgtatgcatttttgtatgaataaatacatttataaaattgatatttaaaaagagctagcacttaagttaggccagacgtttttctaag

SEQ ID NO: 298867 - DNA, 201 bp, Homo sapiens
tactataacgttttgtgtaataaaagttggttttgaaattttattttgatataaatgtctttatattttaaaatctgttttaacaagatgaaattttaatmaatttgtgtcattcacatgctcttccttttaaagagatgtatttgcagctgatactctacctatcttttttaaaaattttaatttaatttaattttaaaa

SEQ ID NO: 298868 - DNA, 201 bp, Homo sapiens
agaaacagtaggtcacatgaaataaattaaaatccctaaaaaatatggcaattgttattctataggattaatgtccattttaaagcattaatataaacttrattaataatagtaggaatgatcaggtcctactactcatggatttcttttgagagcttaatttaaggagggaaccctcatctcagaaaaatttacatgact

SEQ ID NO: 298869 - DNA, 201 bp, Homo sapiens
ttccatgtgccttagacctgtcttccatctaataagacttcacactgctcacttttcctttctgacactgaatacacataaacaacagagagcaatgtctsttaaacccataaacccattcaaaaaccaaaaccaaaccaaataaaatgaattggttgtattaatttgtatcatccatttacattttgagaagcatagtca

SEQ ID NO: 298870 - DNA, 201 bp, Homo sapiens
tgttttggattctgttgcccaaaatggaaattgccttatttttgttttcctgatcaaaacagtgacctacatttctgatattttggggggcgctgggagayggggtctcatgatgttggccaggtcggtctcaaactcctggcctcaagtgatcctcccgcctcagcctcttgaagtactaggattacaggcatgagccac

SEQ ID NO: 298871 - DNA, 201 bp, Homo sapiens
atgagattttatcagatcagattcaaacatggagcttacaaccaggatcactaattgcacaaagaaacaccatgagtttgagttaacagaaacaaaaatayaactttctagatctgtaaaagggttaaaatatttaaattaaaatttaatttaaaaatttacatatttaaggaaaaataatagcaatgagaaaagacataa

SEQ ID NO: 298872 - DNA, 201 bp, Homo sapiens
aagttgaggaagattccataatatgtcctctgtttcttctataaattaagaagggaagcattctctgagagtgaagaggaaggaaggtcatacatgttatktatatgtcttctccttcattcatttgctcaaaaaaacacttattgaatgtttccatgtgccatgttctgtgttaagactagaagaagcaaccaaaaatga

SEQ ID NO: 298873 - DNA, 201 bp, Homo sapiens
ataaattaagaagggaagcattctctgagagtgaagaggaaggaaggtcatacatgttatttatatgtcttctccttcattcatttgctcaaaaaaacacytattgaatgtttccatgtgccatgttctgtgttaagactagaagaagcaaccaaaaatgaagtgcacagtggagtctatcaaacaacttcagtcacgagt

SEQ ID NO: 298874 - DNA, 201 bp, Homo sapiens
gacatcatctgtttcaccttatcactgtgtactttcaaaatatcttcaagatgctttcattgaagcaacaagaaaattgttttgaacaaagaccctttagygtcagtcactatttcagaatataacaccagtcattgtttatatgatttactcttaataggattttgatattctgctgtgtaacgttgctgctgactgaat

SEQ ID NO: 298875 - DNA, 201 bp, Homo sapiens
tggaaacattctgatttggttgggggggggggcttttgacatcatctgtttcaccttatcactgtgtactttcaaaatatcttcaagatgctttcattgargcaacaagaaaattgttttgaacaaagaccctttagtgtcagtcactatttcagaatataacaccagtcattgtttatatgatttactcttaataggatt

SEQ ID NO: 298876 - DNA, 201 bp, Homo sapiens
ttgccaacaagatggagtttgagggactaaaattgattttaagaataataatgttgttgttcctttttcaaatcttttaacatggaaacattctgatttgrttgggggggggggcttttgacatcatctgtttcaccttatcactgtgtactttcaaaatatcttcaagatgctttcattgaagcaacaagaaaattgttt

SEQ ID NO: 298877 - DNA, 201 bp, Homo sapiens
atcgatcctgagtttgacagataaaacatgtgtctgaattgtagttacagccaaactacaatctatcagcttttccctcagggtaattatgcttattttaycccaaaacaaggtaattgttttgtgataaagtattcagttcactcggaataagccgttggcctccttttatctacttatttatttatttatttatttatt

SEQ ID NO: 298878 - DNA, 201 bp, Homo sapiens
atctttcagtatgctttttttttgtgctggagtagaaaacccaactaaaaatgatatacattttaataaccaaagtatattatctcacagatggaagtctrgaaggtcttaagggtgactccatcaaggagttctggctccattttcccaggaattctcttgattttgccctcctctaaatgaaacaatgtaattgaagca

SEQ ID NO: 298879 - DNA, 201 bp, Homo sapiens
ttctcccatctcagcctcccaagtagctgggcttataggcacccgccatcatgcccagctaatttttgtattttagtagagacggggtttcaccatgttgrccaggctggtcttgaactcctgacctcaggtgatctgcccgcctcggcctcccagagtgctaggattacaggcgtgagccaccatgcccggctggcctcc

SEQ ID NO: 298880 - DNA, 201 bp, Homo sapiens
tgatatgttgaaatggcagcatcctagaccaatcccaagtttaatgccttccttgaagttgccatgtttctgtttcggagtccttggtgccacaggtcccycttgactttcacaggccagggcttcttgccatacaggtaagtgttctcccttcccagcttatgggatccagactcatcagctgcccgctgtaggttgtcc

SEQ ID NO: 298881 - DNA, 201 bp, Homo sapiens
ctgtagtagacaatttaggcttaataaaaaggtttccatccagtgtttgctaaaggtaattgaagagaattggagaaaataatattttaaacaattccgcaaaaaaaaaaaaaatacataaatagaagccctatgttttgatggcattgatggcagtctgttctaaattcagtacaactgtgtttcatcagataagttact

SEQ ID NO: 298882 - DNA, 201 bp, Homo sapiens
ggtttccatccagtgtttgctaaaggtaattgaagagaattggagaaaataatattttaaacaattccgcaaaaaaaaaaaaaatacataaatagaagccstatgttttgatggcattgatggcagtctgttctaaattcagtacaactgtgtttcatcagataagttacttagcacaaatgtgattcatgtaaagaaacc

SEQ ID NO: 298883 - DNA, 201 bp, Homo sapiens
cactgcactccagcctgttgacatagcgacactccatctcaacaaaaacaaaaaacaaacaaacttctaaaagattgtaagctgtaacaaattctggcaartgacttgcaaatgagaagaaaaaaatcacgctcattcatgtaaaatggtatctgctttgagaataacccagtatcaagtatgtgttacttgaattagaac

SEQ ID NO: 298884 - DNA, 201 bp, Homo sapiens
tccaattagagactcattgatcaaatagaacaaagaagaatactgtgcaggtaaggtttatggattactctatatattactctttgccctgttctgttcarttgtgttagtatactttatgttctgctgctgtgatgactttgtgattaaacattaaccagctctcagggagtggggaggaaatcatgtaagtcaatatat

SEQ ID NO: 298885 - DNA, 201 bp, Homo sapiens
tagcttgtgattgatagtggaaggtgttaacaaagggcatgaacgccacttaaaactgtgaacctgagaaactagaaagatagtggcgctggtcactgagaaaaaaagcatcagatcagtttttgtttattttagtttcggggtgaaggagggaagatgatgtgtttggtttggacatattcagtgtatgttacttttgca

SEQ ID NO: 298886 - DNA, 201 bp, Homo sapiens
tgggcccttaaccagcatactacactgtatctccttcactgccgaagaagcaagagtctctgccacctgtctaggtttccagagtttctttttcactctgwtgaaattcacaaaaattctcttactcaaacttattagttattgtgtattatgagaatatttaaatcaaaattggatccaagtcaatgtatagggagacat

SEQ ID NO: 298887 - DNA, 201 bp, Homo sapiens
caagttgttttaaaaatatgtatatttgtatcttgctgcaggacttctctaattttttaaaaaattgatcgatgtgtaagaggctttcattctttctttctttttttttttttttttgagacaaggtcttgctctgttgcccaggctggagtacagtggcgccatctcagctcactgcagcctcgacctcctgggttcaag

SEQ ID NO: 298888 - DNA, 201 bp, Homo sapiens
tatgaaaactcagaaggcaacctatctgatttcttaaatttaaatttcctggttaatttatttagattatttgaaaattcttctttgcccaggtacctcayacatacatggactatactacttggtcacttttaatttagaaggaacttcctttaggaacagatattttgtatagctgtaaattatttaaattcacatgaa

SEQ ID NO: 298889 - DNA, 201 bp, Homo sapiens
aagttgttttaaaaatatgtatatttgtatcttgctgcaggacttctctaattttttaaaaaattgatcgatgtgtaagaggctttcattctttctttctttttttttttttttttgagacaaggtcttgctctgttgcccaggctggagtacagtggcgccatctcagctcactgcagcctcgacctcctgggttcaagc

SEQ ID NO: 298890 - DNA, 201 bp, Homo sapiens
cattacttcttaaagccctcaagaaattatgaaaactcagaaggcaacctatctgatttcttaaatttaaatttcctggttaatttatttagattatttgmaaattcttctttgcccaggtacctcatacatacatggactatactacttggtcacttttaatttagaaggaacttcctttaggaacagatattttgtata

SEQ ID NO: 298891 - DNA, 201 bp, Homo sapiens
ttatgaaacatctagaataattaaatcagaaaagggaaaatatttgttaagtcaaaggaagtattttcttcatctttgtaaacataagtctctacagcacygtaatccatataacctcagcgtcaagtcagattttttttattgcctgaaaactgctaagtgaacacattatatgtaaaattaaagtagtggaagtataca

SEQ ID NO: 298892 - DNA, 201 bp, Homo sapiens
gaataaataaaatcttctaaagtttacagttactttaaagtactccaaatttaagcatacttcacacgtgctatataaaacataaaacaacttaattcttyattagtgtgtatttcagttgcatctttaggctttttctgaatgccttcattacttcttaaagccctcaagaaattatgaaaactcagaaggcaacctatc

SEQ ID NO: 298893 - DNA, 201 bp, Homo sapiens
ctcagtaataaggagaatcatctgggaccccagcaaggtagagaaactgcatttgagaattccacattaaacccaagactcttaaaggggtgctaaagtgrttttaggtatgtaggaccccttggctccctacaaaaatatatatggatacttttggaagggaagcatcaccagttaagggccatgagattttatcagatc

SEQ ID NO: 298894 - DNA, 201 bp, Homo sapiens
tcaaatgttaagctttctggtaaattagacaaagcagatttatcatgccatttcttttttgaatggcagtgttagtccaagttcctgttgatggtctcackattctttccatagttctgttacataaatgtgaaactttaatacctaaataattctaaatatatttttaatgaggaagtcttcaggacagtggttttccaa

SEQ ID NO: 298895 - DNA, 201 bp, Homo sapiens
cattcaaaaaacatttattaagcagccactatgtgccaggaatagtagaataaataaaatcttctaaagtttacagttactttaaagtactccaaatttargcatacttcacacgtgctatataaaacataaaacaacttaattctttattagtgtgtatttcagttgcatctttaggctttttctgaatgccttcattac

SEQ ID NO: 298896 - DNA, 201 bp, Homo sapiens
cttagtttcttaatcttctgcctttagcagtttaagagttcatcaaatggttaaaaggaaaactgcccacttcccactgagatatgaaacattcaagttcwggcttccatggcaaccccaaactccaatttttatgtcaccagcctcatgacattgctagaagctctgctggcttgcctcccaaatagctgcacccctctg

SEQ ID NO: 298897 - DNA, 201 bp, Homo sapiens
cacaatttaaaacaagaccagaattaagcattcaaaaaacatttattaagcagccactatgtgccaggaatagtagaataaataaaatcttctaaagtttrcagttactttaaagtactccaaatttaagcatacttcacacgtgctatataaaacataaaacaacttaattctttattagtgtgtatttcagttgcatct

SEQ ID NO: 298898 - DNA, 201 bp, Homo sapiens
gaagactacctcatttgttcagggtccttgctcacccaaaactgtaaaaggagtttttgtcagattccgtctctgaattgcctttcccctagaagcccaaytaagaacctgggagatttcctctgacctttcctttttggaatctaacttcatggtttcacttctcagtattacagaaaatatcaatgagattttcagtaa

SEQ ID NO: 298899 - DNA, 201 bp, Homo sapiens
aagctttaaatgggaacatgaaatgatatcggggaagactacctcatttgttcagggtccttgctcacccaaaactgtaaaaggagtttttgtcagattcygtctctgaattgcctttcccctagaagcccaattaagaacctgggagatttcctctgacctttcctttttggaatctaacttcatggtttcacttctcag

SEQ ID NO: 298900 - DNA, 201 bp, Homo sapiens
tcaagaaagtgttttatttactacacatgagctatgataaggaatttagatatcaaaattaagaataataaagctttaaatgggaacatgaaatgatatcrgggaagactacctcatttgttcagggtccttgctcacccaaaactgtaaaaggagtttttgtcagattccgtctctgaattgcctttcccctagaagccc

SEQ ID NO: 298901 - DNA, 201 bp, Homo sapiens
caagcacttttcccttggagcagtccaagattgtcaacacaactttcgaaattcccttctctcccacattaggatggagtctatttcagattcaacatgtrtaagttttaagcaacacatgcagagaaattttgtcttggaatacctccaaaatttatatcacaatcattgcatgacttacataacattctctagttcagt

SEQ ID NO: 298902 - DNA, 201 bp, Homo sapiens
tgtttagaaatctactttctagtttaattgttatggagaaatcatcttcctgtatagattaaaattcaatcttttttgaactcaaagaaaaatttggaggsaaagataaatattaatgatggattatctaatatttgttccaatctcaacatgttttacttctcatagccttttatcttccagataaaattatgagcgcag

SEQ ID NO: 298903 - DNA, 201 bp, Homo sapiens
ctacataaaatattggtatggaatctgcataccttaaataaaagcttgtagttacaaaactttatattcttagtaatattgtatactctagtttaatttamatggctgtttggctctgttaatgatagaaaacccttcattattaaggacagcacttcacagaaaattgactgaagctaactttaacttgcagatggcgtt

SEQ ID NO: 298904 - DNA, 201 bp, Homo sapiens
tttttcagacaacattactaaggagatttgatgcctacatatcagtcttcatctcaaaacttctaaaagaggccttacgcggtagctcactcctgtaatcycagcactttgggaggccgaggtgggcggatcgcgaggtcaggatatcgggaccatcctggccaaaatgttgaagccccgtctctactaaaaatacaaaaa

SEQ ID NO: 298905 - DNA, 201 bp, Homo sapiens
atgggggtggttattgtcatgctgctgttcttgttataatgagttcttatgagatctaatggttttgtaagggacttttccccctttgcttggcacttctstcttcctgccaccatgtgaattaaggacatgtttgcttccccttccaccatgattatgtttcctgaggcctccccagccctgtggaactgtgagtcaatt

SEQ ID NO: 298906 - DNA, 201 bp, Homo sapiens
tttctgaatgaccttaaactcaaggtagtcgttgagtgggagggatgatttttagccatctttttcctccaactcaggtagataggatttaccagcttggycttaatttcctcctttctgttaacattgaaaaccatcatactaactgtaaaaatcaaatactgtaataagagtgagggagtgcatgttttaaagtctgtc

SEQ ID NO: 298907 - DNA, 201 bp, Homo sapiens
aagccttttgaaactttgatcctgaagacgtcgttttggtagatctaaaatgaatacatggtggatcccatcactgttttatttagaaatacaaaatcaargttattaattctaagatatgcatccatagctctgcagtatccaaagcacagcattaactttagttgcatgaaaatttcccaagttggtatatggatgtat

SEQ ID NO: 298908 - DNA, 201 bp, Homo sapiens
tttttccacttattgaatgatctttcagtctagtctgaggtagttattttggtttggccctaggagcagcaggagtcctgtggagtctcagtctactcctrttggtttcagtttataaattctgcctggagtggtcatctctttcctaacttggttacagacagtccatggatttccacttttgtgatagaagatggaaaa

SEQ ID NO: 298909 - DNA, 201 bp, Homo sapiens
ttccagacacttcatgttcagaatacctctattcattttctgctgatatggttttgctgtgtccccacccaaatctcattttgaattgtagctccaataaytctcatgtgttgtggaaaggacccaatgggagacacttgaatcatgagggcagtttcccccatattgttctcctggtactgaataagtcatggatctgat

SEQ ID NO: 298910 - DNA, 201 bp, Homo sapiens
acagttgttgaactagtttacagtcccaccaacagtgtaaaagtgttcctatttctccacatcctctccagcacctgttgtttcctgactttttaatgatygccattctaactggtgtgagatggtatctcgttgtggttttgatttgcatttcactgatggccagtgatgatgagcattttttcatgtgtcttttggctg

SEQ ID NO: 298911 - DNA, 201 bp, Homo sapiens
ggtatacaaaagagcaaaattgagaagctgggtgatctaagcctgaagtcctcaaatatttaaaagacttagtttgtcaagatttaaccatctttttctgrgttcttttcatcactgttgacaaaagcaagcactggagaaaaatttttcttttgcctatggggccagcagtgaagatgagctcatctgtccatcaagctc

SEQ ID NO: 298912 - DNA, 201 bp, Homo sapiens
aggtcaggggtttgagaccagcctggccaacgtggtgaaaccccatctctaccaaaaaatacaaaaattagccagacatgttggcacatgcctgtggtccyagctactcgagaggctgaagtaggaggattgattgaacctcggaggcagaggttgcagtgagccgagatgatgccagtgcacttcagcctgggtgacaca

SEQ ID NO: 298913 - DNA, 201 bp, Homo sapiens
aatgatgaggcaacctgggtgcccaaaaagtgaaagtggttatcactaggaccaaaggcacgaggagagggaggtgtaactgagacccagtgagagcagtrcctgtgggaaaggggctactgaacaggagctgtggctatgggtagagaaatgcagccactattggattacgctgctgcactgagcaggtgggggcagggc

SEQ ID NO: 298914 - DNA, 201 bp, Homo sapiens
aaatacatttatgaggtgtttaatgttgtgttaaaaaattgggggctattgaaatcacccgccccctcaaatgtttacactgtggaaggcaatagagattrtcaaaggggaacattttcttagttggtcagacacaatatagattttattaactcacaagtgaattattcacaaattattttgtgaagcctggggtactta

SEQ ID NO: 298915 - DNA, 201 bp, Homo sapiens
gataaccacagattggaaatgctagccctctggacactcaaactttaactctggaaactgggttacactggaaagaatctacaataaactgaccttccackggacacgtggagtattctaactaatgcagaaatccgaagcagactagagtatccctgatctccttagtggtgtagaatctcacactgtattatttattta

SEQ ID NO: 298916 - DNA, 201 bp, Homo sapiens
cacatgtacaagtatttctctaaggcatatacctgggagttaaattgttaggttaaatatggtatgtgcttgttcagctttcctaaatagaatcaaagtayactccaaagtgattgtagcaatatacactctccccggcagggtgggtgaattctagttgtcctatataccgacaaatatgatgggtgtaaaatgaaattt

SEQ ID NO: 298917 - DNA, 201 bp, Homo sapiens
atgggcaggtggtaggaatgagagccacaggcatagcaagagcccccttccattcttgccatcaagtgcataaggcatttctatcatgatcattttggagyggattttgcattgtggcatctttagacagctgtcacagcacagctaaaagtttataaaataacctatatcccaggcatgctgaatccaactaattaaatt

SEQ ID NO: 298918 - DNA, 201 bp, Homo sapiens
ctaatattttgcttgtttttagtttcaaatcatcctaggatattattgattactcaactgattgacatggtttgggaaataaggtattttgaaaggaaaaatgtcttctttttataaactgtacaggaaccttctattaaattctgtaaatgtcattgatctcaaatccatgcatcacatgtgtaaattatattatttgtg

SEQ ID NO: 298919 - DNA, 201 bp, Homo sapiens
taatattttgcttgtttttagtttcaaatcatcctaggatattattgattactcaactgattgacatggtttgggaaataaggtattttgaaaggaaaaatgtcttctttttataaactgtacaggaaccttctattaaattctgtaaatgtcattgatctcaaatccatgcatcacatgtgtaaattatattatttgtgt

SEQ ID NO: 298920 - DNA, 201 bp, Homo sapiens
ggttgtgactctggatgtgatattcaatttctatgtgtttccatttcctcatgtgtaaaatgagataactacaagccttttgaaactttgatcctgaagaygtcgttttggtagatctaaaatgaatacatggtggatcccatcactgttttatttagaaatacaaaatcaaggttattaattctaagatatgcatccata

SEQ ID NO: 298921 - DNA, 201 bp, Homo sapiens
gaccttccacgggacacgtggagtattctaactaatgcagaaatccgaagcagactagagtatccctgatctccttagtggtgtagaatctcacactgtattatttatttatttatttatttatttatttatttatttatttatttattttgagacggagtctcgctctgtcgcccaggctggagtgcagtggcgggatct

SEQ ID NO: 298922 - DNA, 201 bp, Homo sapiens
accttccacgggacacgtggagtattctaactaatgcagaaatccgaagcagactagagtatccctgatctccttagtggtgtagaatctcacactgtattatttatttatttatttatttatttatttatttatttatttatttattttgagacggagtctcgctctgtcgcccaggctggagtgcagtggcgggatctc

SEQ ID NO: 298923 - DNA, 201 bp, Homo sapiens
cttgaagaaaatagctaaggaaagtgcatttagagggagatactgtgtccttttctatttagaataaaaatattatacttatcttactttattcaaattcrttaattgtgagaacatttaccgtatgatttcaggtttttgaaacacatgtataagttttatcaatgacctaatgaatgaaaaaatatccacatctatgtc

SEQ ID NO: 298924 - DNA, 201 bp, Homo sapiens
ccttccacgggacacgtggagtattctaactaatgcagaaatccgaagcagactagagtatccctgatctccttagtggtgtagaatctcacactgtattatttatttatttatttatttatttatttatttatttatttatttattttgagacggagtctcgctctgtcgcccaggctggagtgcagtggcgggatctcg

SEQ ID NO: 298925 - DNA, 201 bp, Homo sapiens
ggctaatgagctccattaggtttaatcaacatttcagcaatttttgacttgaattttgtttaaactttctgctttgtcttttaccttttgttctttattaygttagctcatttaatttttatacgtaggataaaacatacactttgaaatggcctcagaatttgaaagtatggctgtaaagggtgaaatcactgatgttaa

SEQ ID NO: 298926 - DNA, 201 bp, Homo sapiens
gccaaaaacagataatatttgctgaatgaatcaaacgggtttctgagacgatcaattctttaaagatagagactcagttatttgtctttttcttctgagcsaagtacaaatacttacataacaattatattgaattattgttatttttttcttgtagctattttttctcatggtgtaaactgagggcaataattggcattt

SEQ ID NO: 298927 - DNA, 201 bp, Homo sapiens
cttccacgggacacgtggagtattctaactaatgcagaaatccgaagcagactagagtatccctgatctccttagtggtgtagaatctcacactgtattatttatttatttatttatttatttatttatttatttatttatttattttgagacggagtctcgctctgtcgcccaggctggagtgcagtggcgggatctcgg

SEQ ID NO: 298928 - DNA, 201 bp, Homo sapiens
ctcttgagtattcaaatttgttaaaatatgaaacacagtgcttggccaaaaacagataatatttgctgaatgaatcaaacgggtttctgagacgatcaatyctttaaagatagagactcagttatttgtctttttcttctgagccaagtacaaatacttacataacaattatattgaattattgttatttttttcttgtag

SEQ ID NO: 298929 - DNA, 201 bp, Homo sapiens
ttccacgggacacgtggagtattctaactaatgcagaaatccgaagcagactagagtatccctgatctccttagtggtgtagaatctcacactgtattatwtatttatttatttatttatttatttatttatttatttatttattttgagacggagtctcgctctgtcgcccaggctggagtgcagtggcgggatctcggc

SEQ ID NO: 298930 - DNA, 201 bp, Homo sapiens
acctcctggcagacccttctcttccaccaaacgtgtgcacatccttgagagccgtgagcaacttgctcagcacacagctcaccttccaggccattcacaascccagagtgaatcccgttacttcgctcagtgaaaactatacctgttctgactctgaagagagctctgaaaaagacaagcttgctattccaaaggtaggta

SEQ ID NO: 298931 - DNA, 201 bp, Homo sapiens
cacatctctcttgagtattcaaatttgttaaaatatgaaacacagtgcttggccaaaaacagataatatttgctgaatgaatcaaacgggtttctgagacratcaattctttaaagatagagactcagttatttgtctttttcttctgagccaagtacaaatacttacataacaattatattgaattattgttattttttt

SEQ ID NO: 298932 - DNA, 201 bp, Homo sapiens
atttatttatttatttatttattttgagacggagtctcgctctgtcgcccaggctggagtgcagtggcgggatctcggctcactgcaagctccgcctcccrggttcacgccattctcctgcctcagcctcccaggtagctgggactacaggcgcccgccactacgcccggctaattttttgtatttttagtagagacgggg

SEQ ID NO: 298933 - DNA, 201 bp, Homo sapiens
tcatccaatctgatataatcaaaatgaagatgaatgaaatgaaattctgtcagactgtataaatttctctaagtcatgcatagaaagtctcctaagtctaygtttcttgtgtaggttttgaaaaatacaattcagcttcctattgatattttgtctgaattgaattatatattgcgaaggtgtcaaaaatgttttcctatg

SEQ ID NO: 298934 - DNA, 201 bp, Homo sapiens
gtctcgctctgtcgcccaggctggagtgcagtggcgggatctcggctcactgcaagctccgcctcccgggttcacgccattctcctgcctcagcctcccargtagctgggactacaggcgcccgccactacgcccggctaattttttgtatttttagtagagacggggtttcaccgttttagccgggatggtctcgatctc

SEQ ID NO: 298935 - DNA, 201 bp, Homo sapiens
tatagcaggaaaaagtcttgtacatcatccaatctgatataatcaaaatgaagatgaatgaaatgaaattctgtcagactgtataaatttctctaagtcaygcatagaaagtctcctaagtctatgtttcttgtgtaggttttgaaaaatacaattcagcttcctattgatattttgtctgaattgaattatatattgcga

SEQ ID NO: 298936 - DNA, 201 bp, Homo sapiens
gactcaagcattccttggcttgtaatggcattcttcccatgcctctttttatatgtctgtctctgaatccaaatttcttttttataaagacacagacatattggattggaacctagcctaatgactccaacttgatcatcagcaatgaccctattttcaaataaggtcatgtttattcacactgaggattagaactgcaaa

SEQ ID NO: 298937 - DNA, 201 bp, Homo sapiens
cacaaatggccaataaggccacggaattagacaaaatatattgggagcttgtagaaaaagaagcactcttgagaatacaagtacttaacaagagagtagargtgaatttagggcagacaaccatagatttcaaatcatatagcaggaaaaagtcttgtacatcatccaatctgatataatcaaaatgaagatgaatgaaat

SEQ ID NO: 298938 - DNA, 201 bp, Homo sapiens
gacggcaaagaggaattctgtgatattatacattattgtatgttaatatatagtgtaatatttatgtatacgtatatttgattatatgcctataggatacygattttggaatcatccctccacaaatggccaataaggccacggaattagacaaaatatattgggagcttgtagaaaaagaagcactcttgagaatacaag

SEQ ID NO: 298939 - DNA, 201 bp, Homo sapiens
ctatcccttcaatgtaatttccgagacctttacaatataggtagaccctttaaaaaattaccgtgtgcttaaatttatattccaccattgttagccaaggrccttcatttcaattttatagtcatttaattttctcagtgtttatatctgtgtcttcttctttttgcctttaattcccctcagccaaaaatttcagcatac

SEQ ID NO: 298940 - DNA, 201 bp, Homo sapiens; identical to SEQ ID NO: 62087

SEQ ID NO: 298941 - DNA, 201 bp, Homo sapiens
tcattaaaacttcactattgtttcagccctgtatagttcacttagttacacgtgtaattttaaacactgttgttgactgtgttgtactggttagaagccayattaactagatttcagtttcttgaaaatttatacattagcaagcatagtgtaaatatgtattaagtgggcaataaatatttgctgtgttagtggcatttt

SEQ ID NO: 298942 - DNA, 201 bp, Homo sapiens
acttagtaaatcaatattggaattattttttcagctctcgctttttatatcaataactttgatattgagtaagttgttttttcccattgcttggctaattkttatcataattatcttttctgtacttcagtatgatgactgtccttctgtaggcccaagaaatatactctatataagtaagattttcttctggatggctat

SEQ ID NO: 298943 - DNA, 201 bp, Homo sapiens
ctttctctaggtaatgtatattaagctttgggcccaacccagtaactaaatgggatgatggtgatgacgattattattgattattgttttcttaaaagccrtgattcctattaaaatactcttgtagcaaattgtaatgaatttttcccagttggtttaccaagtgcgtaagaatcagatatcagtaaaaatgtcaaagta

SEQ ID NO: 298944 - DNA, 201 bp, Homo sapiens
actttttagagagattgctatcactgacaacttccagagtttgagagttttttgaatatactacttaaaaaaatctccatatggttttcatttgaaaaaayatattacaaactgagacattcactataaattaaattgaaataatcaaaatataattaagctatttgtgagtttacattttgcaaaacattttagaagcaa

SEQ ID NO: 298945 - DNA, 201 bp, Homo sapiens
gacctagtccctgtcatccaggggccaataggtcacagatgtgaattagccctttcccttgacttttgggattccaatttcaaagaggttgtaaaagagasagtgccatattcttgaaccttttagccaactaggtaaaaataaattttcacatatttctattgagcccactggacaccaatatactttaataattgtgtt

SEQ ID NO: 298946 - DNA, 201 bp, Homo sapiens
acagtgacctacatttctgatattttggggggcgctgggagacggggtctcatgatgttggccaggtcggtctcaaactcctggcctcaagtgatcctccygcctcagcctcttgaagtactaggattacaggcatgagccactgtgcccagcctgattttttaaattatagatttaaaaggacaagggagaaaattaaaa

SEQ ID NO: 298947 - DNA, 201 bp, Homo sapiens
gtcatttcctgagatgggaagtcacagcgaggagcccattaaccatatattaaaactccattagtaatattaagactgtccattctagaagaggtggtggstcacgcccgtaatcctagctagcactttgggaggccgaggcgggtggatcacctgaggtcaggatttcgagaccagcctggccaacttggtgaaaccccg

SEQ ID NO: 298948 - DNA, 201 bp, Homo sapiens
tgagtgatgtgtgagagtaggagaaacaatggtttttcctacattctcttacactaatggatttgtattcggagagattggaaagatggatctgtcatttmctgagatgggaagtcacagcgaggagcccattaaccatatattaaaactccattagtaatattaagactgtccattctagaagaggtggtgggtcacgcc

SEQ ID NO: 298949 - DNA, 201 bp, Homo sapiens
taaggcatttcttcattagcaaaaacagctggtaatttttttcacctgttattttgcagtgtttccttagaatttcattaaaatataagtaaatagggtawaatatcagaggaggtcatgaagaacattaccatttcgaagatggaaagctatttgagagaagtcacaaactaagcaatgtctgtgtttttgatttgatta

SEQ ID NO: 298950 - DNA, 201 bp, Homo sapiens
taggatctctgatttataactggttggtcgaaatacaggtcacaacctgggatttggaattggcatctgaagaggggggcagtcttgagggactgaggggygatgctatgtccaggtggatagtgttaggattgaattgaattagacgatgctcagctggtgtctgttgaagaatctggtgtcagaagtgttgagtgatgt

SEQ ID NO: 298951 - DNA, 201 bp, Homo sapiens
gaaagcgagtatgaagtaagaagaggcatacagaaagataaataccctgtttccagagagggctaatgaaatctgttctttgcgcaaatcaagtaaacagygtgtcctctagttcagtcaatcaatgttaattttaaatagctgaaacacaaattattatgcagttactaatataaaataaatgaacgaaatcacatagga

SEQ ID NO: 298952 - DNA, 201 bp, Homo sapiens
gacactgatgagggtggaggtagtagctgagtcttttgttataaaagctcatgttgactcgttaacattggtttttttttttttttttttttttttgtttttttttttttttgagatggagtctcgatctgtcgcccaggctggagtgcagtggcgctatcacggctcactgcaagctccacctccctggttcacaccatt

SEQ ID NO: 298953 - DNA, 201 bp, Homo sapiens
tgtttgtgctgttattgatataaaatatacagatttgatcactgagaaaaaagtctaacagatgtgcctgagttgtagtttagaggaagatgtgttgtatracaatcgtaaaaaatattagttgaccatacctgttcattgtgaatgtataccactgttttaaaagaagatgctacccatagctaatgttacccattatcc

SEQ ID NO: 298954 - DNA, 201 bp, Homo sapiens
tataggtagaccctttaaaaaattaccgtgtgcttaaatttatattccaccattgttagccaaggaccttcatttcaattttatagtcatttaattttctcagtgtttatatctgtgtcttcttctttttgcctttaattcccctcagccaaaaatttcagcatacttatgatctatccaaatatgtgttctgtgtatagc

SEQ ID NO: 298955 - DNA, 201 bp, Homo sapiens
cccagtagataataaagaacaatcaaaggattttaagtaaagaaggtttgctacatttaatgcccctctcctcacagtgttattgaactgtcaataatatsaacacacattaaactgaaccgcatattcagtttaatgtgtgtttttgtataatttgaacaaggctggaaaccaggagacctgaactcagattccagctgg

SEQ ID NO: 298956 - DNA, 201 bp, Homo sapiens
ataggtagaccctttaaaaaattaccgtgtgcttaaatttatattccaccattgttagccaaggaccttcatttcaattttatagtcatttaattttctcagtgtttatatctgtgtcttcttctttttgcctttaattcccctcagccaaaaatttcagcatacttatgatctatccaaatatgtgttctgtgtatagct

SEQ ID NO: 298957 - DNA, 201 bp, Homo sapiens; identical to SEQ ID NO: 62083

SEQ ID NO: 298958 - DNA, 201 bp, Homo sapiens
atattgtttagccctattttttcgtttgtttcttttgaactactccgttttccttaactctccttatctttttctgaatgaccttaaactcaaggtagtcrttgagtgggagggatgatttttagccatctttttcctccaactcaggtagataggatttaccagcttggccttaatttcctcctttctgttaacattgaa

SEQ ID NO: 298959 - DNA, 201 bp, Homo sapiens
aagtaccctagaacttaaagtataatacaaagtattatattaattattaattatattaattattaatatataatatataaaatatatatataaatatatawaaaatatatatataaatatatataaaatatatataaatatatataaatatatataaaatatatataaatatataaatatatataaatatatatataaata

SEQ ID NO: 298960 - DNA, 201 bp, Homo sapiens
tatttcttgaaatgtagagtccgtatcagtggtggtataaaagattgttttacatgcaacgagatatgctggtatataatattaagtgttttgctaaattrtttgcctttcatttctactctaatgttactgattaagataaggggagcagatctcaccttggagctaggatgctttcatgtccctccaaccctcactgat

SEQ ID NO: 298961 - DNA, 201 bp, Homo sapiens
taaaatatatatataaatatatataaaatatatatataaatatatataaaatatatataaatatatataaatatatataaaatatatataaatatataaawatatataaatatatatataaatatatataaatatatataaatatatataaatatatatataaatatatataaatatataaaaatatatataaatatataa

SEQ ID NO: 298962 - DNA, 201 bp, Homo sapiens
atatataaatatatataaaatatatatataaatatatataaaatatatataaatatatataaatatatataaaatatatataaatatataaatatatatawatatatatataaatatatataaatatatataaatatatataaatatatatataaatatatataaatatataaaaatatatataaatatataaaaatatat

SEQ ID NO: 298963 - DNA, 201 bp, Homo sapiens
aaatagacaagtagagatagaagagtaatttttaatttgctttaaaaaatctgatgtattaatgtattttattgactttcatagaaagaattcaaatttakttaaatttcaattgtatctactgcccttgttaggaggctttcaaatggaagaattgatataaggggtcttggcctgtgccccatacacttttgcctatgt

SEQ ID NO: 298964 - DNA, 201 bp, Homo sapiens
tatatataaatatataaaaatatatataaatatataaaaaataaaaatataaatataaatatattaattatattaatatattatattatattatagtataktatagtataataaaaaaatactaaaaaaaaattgccattctgactggcatgtgatggtatctcaatgtggttttggtttgcatttctctaatgatcggtg

SEQ ID NO: 298965 - DNA, 201 bp, Homo sapiens
aaattaggctatattcaatgatgctagctagcatcatcgtgtgtgtgtatgtatacatatatataacatatatattctcatatatatatatatatatatayacacacacatacatgcattatacatatatatatatatacaattccggaccgttgactctggatcaagggtccggaagtgcaatccactgttgattctttg

SEQ ID NO: 298966 - DNA, 201 bp, Homo sapiens
tttttacctgagtaatgcatacctagtataataggctacagtatttcttgaaatgtagagtccgtatcagtggtggtataaaagattgttttacatgcaaygagatatgctggtatataatattaagtgttttgctaaattatttgcctttcatttctactctaatgttactgattaagataaggggagcagatctcacct

SEQ ID NO: 298967 - DNA, 201 bp, Homo sapiens
tactcttctagacttgtgtttatatatcatagtaaatttttggaggacttttttttttccgtttatgtatgtgttacttttcctgaaaaacatcagtgctkttgtatcacaggattggagggaaattaaaggtagagctcaatttatgaaatgcctaacaagtgatcattgttaagcttttgcctaatcactaccataata

SEQ ID NO: 298968 - DNA, 201 bp, Homo sapiens
caaaagaatgagctaaaatattttattctgtgaggctaaaaactataactaggatgaggaactcttttctcccaatacaaattatagaatttcaaagcagraagagcatcttgttttacccctctttgtacagatgggaaaaagagccccaggagagcacaagatttgctcgtgtctcacaggcatttactgaatggcaaa

SEQ ID NO: 298969 - DNA, 201 bp, Homo sapiens
gcccaaaattccatttaactgattgattaatgagggaaccagtaagatgttacaactgattcaaatgagaagttaaagtatcacatacatttaaagtcagraaagaagtgctaaatgaatttacaaaaaggtgcataaggctggacacggtggctcatgcctgtaatcccagcaatttgggaggctgagataggcagatca

SEQ ID NO: 298970 - DNA, 201 bp, Homo sapiens
tatggagaatgaaatgaaaggaagccaggagtaaatgtgggaaaaccagcagccaggacagtggaggagagcatctttgaccagtgtgatggtacgggagrgtgaaaatagatggactttagagacgtttagtaatagttttaaactcatgtgctgtaaattcgatttgattttaagaggtgacaggaaggcaggaggcaa

SEQ ID NO: 298971 - DNA, 201 bp, Homo sapiens
gcctgtaatcccagcaatttgggaggctgagataggcagatcacttgaggtcaagagtttgagaccagcctggtcaacatggtgaaaccctgtctctactaaaaaaaaaaaaaaaaaaaaaaaaaaattaattccagctacttgggaggctgaggtgggggaattgcttgaacccaggaggcagaagttgtagcgagccaa

SEQ ID NO: 298972 - DNA, 201 bp, Homo sapiens
tcagtctactcctattggtttcagtttataaattctgcctggagtggtcatctctttcctaacttggttacagacagtccatggatttccacttttgtgayagaagatggaaaaaggtgaggaggaggggacagcagatcacataggccatgaggggtcactgcaagactcgttctgaggcagatgggataccatcaaagg

SEQ ID NO: 298973 - DNA, 201 bp, Homo sapiens
ggaattgcttgaacccaggaggcagaagttgtagcgagccaagattgcgccactgcactccagcctgggcaacagagagagactcaggcttaagaaaaaawaaaaaataaaataaaaaaagtggtcagtttctacaaggcaatattcaattgcattccaatggatacaacatccatttctatttttgttatttttctgtta

SEQ ID NO: 298974 - DNA, 201 bp, Homo sapiens
aacaatgcaaacaaatttgcatttgattacaaaaactcacaagtcttacaaaatatgaaaatttaatggaagttaattaaaacagtattagggagttaaaktgtaagcaaagccactgccaaatgaggcatcctaggagccagataaggcaacagtagaaggagagagatctgatagggacttcagatgcttcgggtgctt

SEQ ID NO: 298975 - DNA, 201 bp, Homo sapiens
tcaatggatgataccagtcacaccatttgaaaaaagcatatgacagtgttgttcagtgttggtgaacaggaattcttgatatttatttttaaggattccawttaattgctaattacagatctttgttaaattaagccgaccttcactcacatttaaaaaatttaactttgttttggttttcatgagacaaatatctctctt

SEQ ID NO: 298976 - DNA, 201 bp, Homo sapiens
agattttgaaaaggcatttaatgttttccgttaccgatatttacctagtttcaccactgttctctttatgtctgacatacacatagggatgtttcataagkctttgtcttcttttacaggtatcttacagactttttgaagacatgggcctctttgaagcttttaaaattccaattagggaatttatgaattattttcatg

SEQ ID NO: 298977 - DNA, 201 bp, Homo sapiens
tatctctgaactttctctattttacattgaatatttgctacattgtaagcattacagtatgactagattcttctttttttctaacttctcccctgttgatrattattcttatataactataatgccatgttaatcaaactattgtttatgaattataacagtaaatgcccctggttaatagattaatcaacctgccttaga

SEQ ID NO: 298978 - DNA, 201 bp, Homo sapiens
gctgaatagagggattgcttgagcctgggaggttgaggctgccgtgagctgtaattgcaccactatactgcagtctgggcaagagtgagtccctgtctccaaaaaaaaaaaaaaaagagaaaaagaagcagttcccctaatgattctggatcattatgccagaagtatccaggttcaaagcgatattttatattttagtaa

SEQ ID NO: 298979 - DNA, 201 bp, Homo sapiens
aagaagactagatcaaaatcaaatgaataattcctcagttttcaaaaaatattttatggtcttttgagggcataatattagtgcatgtaaaaactagaacsctttatgatttgaaaagaggagaagatgctgagagagacactcttggaagctgggcaggaaatccagccatgcattgcctcaaggtctgtcattagatca

SEQ ID NO: 298980 - DNA, 201 bp, Homo sapiens
ggtataacatctagcaaataggtacttgatgacatttttatgaatactatgatttatcaaaataagtatatcctgagaagtatatatttatagatgaaacrgtatttacagagaatagactctagtttagagaaactgaagagcattagtaaaagtgttaataagaataatattttaagtactatgagggacttttttcct

SEQ ID NO: 298981 - DNA, 201 bp, Homo sapiens
agttggctgatatcaatggtccagctaaatgtaaagaactccatcttcagtggacagatggtattgtcaatgaattttatgaacaggtaactgaccactgyttaatacagcttaatctgtacttacaggttgctcatgaattgctcaaagcttctaacagctatgaaagtatgatcactctattttatattcatacttttg

SEQ ID NO: 298982 - DNA, 201 bp, Homo sapiens
aacattttagaagcaaaatcatttaactttgtttgcattttgagacaaggagctaactgtgtgtatcatcttgagtagtgtctgtttttattcctagggaytgttttccctataattggagttgttttttgctaggtaagtaggatccaaataacagcatagttattaaggcagtagcctcgttttgtccacttctcgtca

SEQ ID NO: 298983 - DNA, 201 bp, Homo sapiens
ttcatgagataaatctaatgtgagtatccaataatagattcaaatatttttcaagaattgactatgagtctgtgaatatatattaatgactatacaatacttttttttttttttttaagagatggggtctcactgtgtaactcaggctggactctagctcctgagctcaaatgattttcccactcttagctcagccacact

SEQ ID NO: 298984 - DNA, 201 bp, Homo sapiens
ttttaattgtgatcaattacaaaacaaagtttgagatggttgcttccagagatgacattgtgaaattgactttttaaaaatgtcatccaactgccgtgctrgttccatcatgtggaatgatctagaaatttggtagcataattgcagaatcaagttgaactgaaaaatcagaagcttatagggttttattgcagtgataaa

SEQ ID NO: 298985 - DNA, 201 bp, Homo sapiens
gatttattttatgttgaaaattctgacttatttttaaattgtttattccatctcataaacttctatttgttatttaattttaggaactttgaaataaaagtttttttttttaatatatcttatgtcctgtgtgcaagtctaatggatagatctgtaccttgaagttccaacttctgccctcagagatgaaagtgacaaaca

SEQ ID NO: 298986 - DNA, 201 bp, Homo sapiens
tttttttgttattgcaaattgtatttgaaggggtgtctctccattctctttataaataaagaactataattggctgctcattcttctctaattactgagaycaccttacacattcacttttgaaagatttcaaaccaatgcaattttattttagttacctgttaaggaaaattttatatttttacctgtggtttcaggtaa

SEQ ID NO: 298987 - DNA, 201 bp, Homo sapiens
ccaacaagatggagtttgagggactaaaattgattttaagaataataatgttgttgttcctttttcaaatcttttaacatggaaacattctgatttggttgggggggggggcttttgacatcatctgtttcaccttatcactgtgtactttcaaaatatcttcaagatgctttcattgaagcaacaagaaaattgttttga

SEQ ID NO: 298988 - DNA, 201 bp, Homo sapiens
gaaataaaagtgttaattctctctgatctgaacaagccaggactcagtgtcagccctttataggtcaggctgtggaaggaatgcataggatgaaataccastgcatgcctggtgcactaaaactaaatgggatttcagcagatgaagggaaagggtgaggaatcaagccttaaattgtctgcctcaggcatggtaagaaga

SEQ ID NO: 298989 - DNA, 201 bp, Homo sapiens
caggggagacatacagttcaggctcatcttctcacatggaatgctgcagagagcaaatataggtagcatagaaattaaggaaaaagagtatgccaaggaargaatccaatcaaacatgcccaggttaaagaagtgcttttagtttcttatcaaatcaaaaaccgtgtgctcatcagagtaaatgtggttctaaaaggcaac

SEQ ID NO: 298990 - DNA, 201 bp, Homo sapiens
agccactcggacaccaagtagaacaggtaattcattgttttggattctgttgcccaaaatggaaattgccttatttttgttttcctgatcaaaacagtgayctacatttctgatattttggggggcgctgggagacggggtctcatgatgttggccaggtcggtctcaaactcctggcctcaagtgatcctcccgcctcag

SEQ ID NO: 298991 - DNA, 201 bp, Homo sapiens
tgctacagtctgagaaattgtatgttgtttaaatgcaatacatcacaatgtttgataaataaaaataaaaaccgttaaacctatccaaatgcaagaactcmtaaatattgttgagttaaagcttttgatgcagctgaggctatgtctggattttattattttccctaggatttccaattttttctaagaaaggagatcaat

SEQ ID NO: 298992 - DNA, 201 bp, Homo sapiens
gaacaggtaattcattgttttggattctgttgcccaaaatggaaattgccttatttttgttttcctgatcaaaacagtgacctacatttctgatattttgkggggcgctgggagacggggtctcatgatgttggccaggtcggtctcaaactcctggcctcaagtgatcctcccgcctcagcctcttgaagtactaggatt

SEQ ID NO: 298993 - DNA, 201 bp, Homo sapiens
ttgtatttttaatcaatatatatttgtacatatttatgtggggcacatgatattttgctacattcatcaaatgtgtaatgattaaatcaggatatttagartatctgtcacctcgagtatttgtcatttctttttttttttttttttttttgagaccgagtctcagtctgtcacccagtctggagggcagtggcacattct

SEQ ID NO: 298994 - DNA, 201 bp, Homo sapiens
tgacttgaatatattatcccattatctcctggactgaatgatttctgctgagaaatctgttagtctgattggagtttccttataagttactagatactttycttttgctgtttttagaactctctatgtctttgacttttttttttttttttttgagatggagtctcgctctgtcccccatgctggagtgcagtggcgtga

SEQ ID NO: 298995 - DNA, 201 bp, Homo sapiens
aagtggctggggtgggaggattgtttgagcccagtagctcaagatcagcctgggcaacatagtgagatcctgtctcataaataaataaataaataaataaatacataaataaataaataaataaataaaatctagctggacattatggaaaacagtatggaggttcctcaaaaaactaaaaatagaactcccatgtgatcc

SEQ ID NO: 298996 - DNA, 201 bp, Homo sapiens
agtggctggggtgggaggattgtttgagcccagtagctcaagatcagcctgggcaacatagtgagatcctgtctcataaataaataaataaataaataaatacataaataaataaataaataaataaaatctagctggacattatggaaaacagtatggaggttcctcaaaaaactaaaaatagaactcccatgtgatcca

SEQ ID NO: 298997 - DNA, 201 bp, Homo sapiens
tggagtgcagtggcgtgatctcagctcactgcaagctccgcctcctgggttcacaccattctcctgcctcagcctcccgagtagctgggactacaggcacrcgccaccatgcctggctaattttttgtatttttagtagagatggagtttcaccgtgttaggcaggattgtctcgatctcctgacctcgtgatctgcctgt

SEQ ID NO: 298998 - DNA, 201 bp, Homo sapiens
gtggctggggtgggaggattgtttgagcccagtagctcaagatcagcctgggcaacatagtgagatcctgtctcataaataaataaataaataaataaatacataaataaataaataaataaataaaatctagctggacattatggaaaacagtatggaggttcctcaaaaaactaaaaatagaactcccatgtgatccag

SEQ ID NO: 298999 - DNA, 201 bp, Homo sapiens
tcattctgtgcaaatgagaaatatctcaggggaggactcaggcccgacttgggccacacacacacccattggccagtcactgtgaaacaattttgtagacyggttgtgagggcagaagtagaatttaacaaccttttctggaaccacataattgaaggaagggggaaaagttccccctaaatgattttggacgcacagtta

SEQ ID NO: 299000 - DNA, 201 bp, Homo sapiens
tggctggggtgggaggattgtttgagcccagtagctcaagatcagcctgggcaacatagtgagatcctgtctcataaataaataaataaataaataaatacataaataaataaataaataaataaaatctagctggacattatggaaaacagtatggaggttcctcaaaaaactaaaaatagaactcccatgtgatccagc

SEQ ID NO: 299001 - DNA, 201 bp, Homo sapiens; identical to SEQ ID NO: 62086

SEQ ID NO: 299002 - DNA, 201 bp, Homo sapiens
tatcatccagttacctgatttgattattacacattgtatacatatatccaaacgttacatataccccaaactatgtacaactctgatgtatcaattaaaawgtaaagaaaaacaaaacagaaaaaaagctggaaaaggaaggcttgagatttgatgcactaaattctgtgtacttttggaaataatattaacataaggtgg

SEQ ID NO: 299003 - DNA, 201 bp, Homo sapiens; identical to SEQ ID NO: 62075

SEQ ID NO: 299004 - DNA, 201 bp, Homo sapiens
tgcaactatttagttggatgtaaaatcctacactcttcagttgttaaatctgtctctgaatctagtcatccctcaggggttttattaatctaaatgaccamcattatcacagctgcaactcatcttaagaactatttctcagaaaaaaacagtaagtagctagtgactctgtacacagagaaaaaaataaagaacagttta

SEQ ID NO: 299005 - DNA, 201 bp, Homo sapiens; identical to SEQ ID NO: 62077

SEQ ID NO: 299006 - DNA, 201 bp, Homo sapiens
agtgaccaaatacttctgccacttaaagatgggggaatatttctttttccttaacatctatcacttataccaaatgtaggagaggaaaaaatgtgtgtgaktgtgtgtgtgtgtgtgtgtgtgtgtgtgtgtgtgtgtgtatgttccttcttttaaaattcctgagctcctctctttcctcccatgttaaaatcggtagca

SEQ ID NO: 299007 - DNA, 201 bp, Homo sapiens
ggtagcatgtccaagcctctgggcctactgccttcggttagctcacacttgctttttcatgtgaagtttgttctatggcataatcttagtaaagcgttttwaaaacaaaaagatacggaggctttttacaaccccttcgcctaattatatgattcattaaaagaatcttgggggtgggcatggtggtgactcatgcctgtc

SEQ ID NO: 299008 - DNA, 201 bp, Homo sapiens
aaaagagaaaaaataagtaaatggggccacatcaaactaaatagcttctgcacaggaagggaaacaatcaacaaaatgaaaaggcaactgacagactgggaaaaaaatattggcaaagcatgtatctgataaggaattaatatccaaactttataaataactcttataacacaataggggaaaaataacctgattaaaaag

SEQ ID NO: 299009 - DNA, 201 bp, Homo sapiens
tggggtttcaccatgttggccaggctgctctcaaactcctgacctcatgatccacccgcctcggcctcccaaagtgctgggattacaggtgtgaggcaccrtgcccggctgcatcagtcttcattttatagacacattgaaagatatcatggaagcaaactgttgaacaaaacatgttactatgaactcccatatttcaaa

SEQ ID NO: 299010 - DNA, 201 bp, Homo sapiens
atttctaatattgatgatactggtgtttcttaaattcactaaaaaattttatttgtaaagggtaacctgcgttacattatttaaagtttttattttaaggtttttttttttttttgagatggagtcttgctttattgccctggctggtgtcaaacttttgggttcaagcagtccccacgccctagcctcctgagtagttgg

SEQ ID NO: 299011 - DNA, 201 bp, Homo sapiens
ttgtaagcctcaagtatacacaatgcaaattatttttaaaataagtaaataaaataaaattctacttttagctcagaaaaataaaattaaccctatagataacaaatatgacatatgcatgactatgtatcctaaaattattaatattacacttaaattttcatattggttcataagagatatttatgcctgtgatcagag

SEQ ID NO: 299012 - DNA, 201 bp, Homo sapiens
tggagtttgagggactaaaattgattttaagaataataatgttgttgttcctttttcaaatcttttaacatggaaacattctgatttggttgggggggggrgcttttgacatcatctgtttcaccttatcactgtgtactttcaaaatatcttcaagatgctttcattgaagcaacaagaaaattgttttgaacaaagacc

SEQ ID NO: 299013 - DNA, 201 bp, Homo sapiens
ctcctttattcagcaacacattgttgctaaatgtggagtggggtatcattttgaaatacttcccatacaaaaccttgatgatcctgcctgacatctgcccrctaaatgtcttggtgagccaccatgtctgctgatcctaggataatcatattttttaattgtctcataacattctgaatataataagattacaactgaaac

SEQ ID NO: 299014 - DNA, 201 bp, Homo sapiens
ataaatctgtaattcaaaccaggttttattattgccttaaaggcagccacccatgtaggcacagagagctccagaaacacacaactaattgttgtggtttcccctgctgaacttgaagagtttggcgttgaatcccagtctcttggctgctgtaatgtctatgcaacaagctatttttctggcatgagagctggcatattt

SEQ ID NO: 299015 - DNA, 201 bp, Homo sapiens
catatactatcattctatttcaacctatgctgtcttaaagttctgtttagacataaaaatatcataacccaattaaataaaataaatctaataatgaggcttttttttttttttttgagatggagtcttgctctgttacccaggctggagtgcagtggtgcaatctccactcactgcagcctccatctcccaggttcaagc

SEQ ID NO: 299016 - DNA, 201 bp, Homo sapiens
ttgtaacttaggaaactaaaagtcacaagcctgctcctagctttaatggatgaaaattgtaacagtgtctgtaaagggctaacttttcactactgtttatwtaaataccactttcatggaaacacaatgaaaatggttcattctgtgtatagagcagattggagattttgatagtgtggaatttttaaagtaggaatttag

SEQ ID NO: 299017 - DNA, 201 bp, Homo sapiens
cattctgtgtatagagcagattggagattttgatagtgtggaatttttaaagtaggaatttagattaggtgagttttggagccattttctgagttcactcyggtttgcaatttcaaactgatttcagatgaaaaagtctggaaatgtttaatgtcatgtcctctccatcacctttccttatactctatgaattcgttaaca

SEQ ID NO: 299018 - DNA, 201 bp, Homo sapiens
atttggacaaaatgaaataatgtggatgctggctcgcttctggtaaaagctgacttaatttagagttcttgaagaagctagctgaagaatgaaatgtcatygtaacacacatctgtttcttgaaagagtttatacttgaatgtaactagtcactgttagctctggctaattttgaagttgatttaaattaatatagaggtt

SEQ ID NO: 299019 - DNA, 201 bp, Homo sapiens
agaactatatagaaatattattttatcttgctacttctgacattggaagtactttaagtggttcccaaaacatagcaaatactcaataaacttccttcagkcaccttagtcagctatgagaaatgtcacagttgctcagagaggatagacttcagactctgggtgtttactgattggtcttttagttagcacagtttactg

SEQ ID NO: 299020 - DNA, 201 bp, Homo sapiens
tgaaaatgtttgttttaaaccataaaacaaaatgatggatttgctgtactatggaatagctatcgaaatacacacccttaattaaataaagaggatggtgygataatatgtatcagcttatcttcacatgttttaggtgtattcttataaatttgaataagtatcacagcagagatagtaaagaccatcaaacttgtgaat

SEQ ID NO: 299021 - DNA, 201 bp, Homo sapiens
tccatcacgaatatcagttttccatgtgccttagacctgtcttccatctaataagacttcacactgctcacttttcctttctgacactgaatacacataawcaacagagagcaatgtctcttaaacccataaacccattcaaaaaccaaaaccaaaccaaataaaatgaattggttgtattaatttgtatcatccatttac

SEQ ID NO: 299022 - DNA, 201 bp, Homo sapiens
ccaacccactgaacaatattttctagacaataatttatgaatctacccacatcttttaaacaaggatagacaactttataatacagatataatgaaatttaaaaaaaaaaatttatctacttatatgtatctcggttgtcgttgccagaacactgctataccctttgtgttattgtttttatatgtttagatatttgtaga

SEQ ID NO: 299023 - DNA, 201 bp, Homo sapiens
aacaggaatcaggaaataaaggacagcgatgaaaagctgaaaactgtgagggtctcacacagcaatatatgaaagcacctgtgaactataatgcatttatwtataatacattgatttattgtattaatagtaaaatacaattatttagtgtattaagaatgtgatatgactaggatgttatttatcttgagttcattaaat

SEQ ID NO: 299024 - DNA, 201 bp, Homo sapiens
agcaattaatacaataaggacttttctaagtctacataataattttaaaatctttttttaaatgtaaaatgcttaaagatgccaagatgtaattttaaaayctttttcttttttcttatttgatgggggtgtgtatgtgtgtgtgtgtaaatgtagagaaatgaattacttgcccaattggaagggaccttcaaaagatcc

SEQ ID NO: 299025 - DNA, 201 bp, Homo sapiens
agcctctgcctcctgggttcaagtgattctcctgcctcaacgtcccgagtagctgggattacaggctcatgccaccacgcctgcctaatttttgtattttgtttttttagtagagatggggtttcaccatgttggccaggctgctctcaaactcctgacctcatgatccacccgcctcggcctcccaaagtgctgggatta

SEQ ID NO: 299026 - DNA, 201 bp, Homo sapiens
tcactcacaggatgtttttgagcagagtgagcaatgtgttcctcccaattactctgtctcatctcacccatccctctcttcaaccctgcctttaaactacygagataaaccatttggaattacagatctgatcatatagtgcatgtgcttatgatcctccggggcccacagcatgcatttcttgtttcttcccatggtgta

SEQ ID NO: 299027 - DNA, 201 bp, Homo sapiens
gggacaataaaattgtactatttagtatgactaatataagggtgtctttgtggcatgtggtgcatattctataaattcttgttgtattgaatggaattaartaagagtttggggacagaagaatccctggtgtattagtatttccctagataattttttcttgtaattttgaattaatgaagctaataattaacttgtaga

SEQ ID NO: 299028 - DNA, 201 bp, Homo sapiens
gcctctgcctcctgggttcaagtgattctcctgcctcaacgtcccgagtagctgggattacaggctcatgccaccacgcctgcctaatttttgtattttgtttttttagtagagatggggtttcaccatgttggccaggctgctctcaaactcctgacctcatgatccacccgcctcggcctcccaaagtgctgggattac

SEQ ID NO: 299029 - DNA, 201 bp, Homo sapiens
aaattaattccagctacttgggaggctgaggtgggggaattgcttgaacccaggaggcagaagttgtagcgagccaagattgcgccactgcactccagccygggcaacagagagagactcaggcttaagaaaaaataaaaaataaaataaaaaaagtggtcagtttctacaaggcaatattcaattgcattccaatggata

SEQ ID NO: 299030 - DNA, 201 bp, Homo sapiens
gagaaagtaacctagttacctcttgaggtattgtggcattggtataattatatattatatttatatttacatatatatgtaaatataatttttttcttttytctttctccctcctcttttctatttgtatataatttttatgtttaaattcctgtaccctacaaagaaatctaaagaaaaaatcttttaaaaaatatctat

SEQ ID NO: 299031 - DNA, 201 bp, Homo sapiens
tgcactggtcaattttgatcaggagacaaaaagtgacgtataaaaattggactaaaatataatcatagaactctatgataaaagttatttgcaagcatttggggggaagaagatattgagatagtggaagtcagatgttaggaagatccttgaaatactgtttttttatagatttatttattatcatagaaggtagtttaa

SEQ ID NO: 299032 - DNA, 201 bp, Homo sapiens
gtgtatcatagaaaaagagaatgaaaaactgaatctacaagtgagattttctgaagaatgtgggaccaaaatacagacagagtaaggcagttggagtacgkgaaagaggagctcaacagtaccagggcccctgggaacatctggctgacaaatccatggaagttggaagagaaacatgaaaaaaggggtagttggaaagga

SEQ ID NO: 299033 - DNA, 201 bp, Homo sapiens
taaattactcagtcttgggagttctttatagcagtgtgaaaatggactaatacagtaagttggtaccagaagtggggtgctgatataaagatacccaaaawtgtggaagcaactttggaacacagtaacaggcagagattggaacagtttggagggctcagaagaagacaggaaaatgacagaaagtttggaacttcctgg

SEQ ID NO: 299034 - DNA, 201 bp, Homo sapiens
caaccaggatcactaattgcacaaagaaacaccatgagtttgagttaacagaaacaaaaatacaactttctagatctgtaaaagggttaaaatatttaaaytaaaatttaatttaaaaatttacatatttaaggaaaaataatagcaatgagaaaagacataactgcagagcagctaaatgtaacttttggaaatgtagtc

SEQ ID NO: 299035 - DNA, 201 bp, Homo sapiens
gatgaagaattgggaagtataatagattttaggagatatagaaaaatgagtctaatgtacatgatatatgtaatcatagttttagtagcagatagaagacaaaaatacttaggtgaagcctagtaaatggaaagaaactcacacgtagatacaaaatagtgaaactacacaacaccaaagatatacacaaacaaaaatcct

SEQ ID NO: 299036 - DNA, 201 bp, Homo sapiens
taaaggaaggctgtccttgttgctttgaggaatgcagatgactgattccattggttctgagtgctcagtttgtggcctgactgaattatgtgcaccagatytggtggtaggtttttgtgaattgacctcaccccggttgcatcttagcttttctccaccttttaggggatatactttcctcagccgtttcatttaaattgt

SEQ ID NO: 299037 - DNA, 201 bp, Homo sapiens
ataggtgctatataaatatttaaattaggatagctgattgctctgtaagttaggagtttgctaattctacattgtggttaatttctgattatgaaacattktttacatactgcttgggaacaacaaaagataagatattttaaaatgtgtgaaatgaagagtttttaaatcacatgggaaaatacttttgatgagtggaaa

SEQ ID NO: 299038 - DNA, 201 bp, Homo sapiens
aagacttgagtgttttaagattaggttgaggaatttgatattttatgtgtaccaaacattatattttttaaccaaagagtgatgtgaacagattaaacatrattattctagcagtggattaggtggggacccaaatggacacaaggaggcgtttaagagggtattgtgaaagtcctgggtagagacattgaagatttatta

SEQ ID NO: 299039 - DNA, 201 bp, Homo sapiens
tattatattgtaattatttacatgttttgtttccctctagagaatgagagttcctccaaggtggagactcattcagcttttcgtctctcttacataacctktgcctggcaggttgtaggtacccagtgattattgaattagttaatatacgcaatatggatttgcttgtcagagcatgagtatccatggctttctgaagtc

SEQ ID NO: 299040 - DNA, 201 bp, Homo sapiens
tcttttctgtttctctttctattgatcatggggctaggaaaattgctacaaattatattttgctatttattttttgtgacatcaagagcaataatgtgtgytaagtcagaggaataaatgtacagcctagtattaaagtaatgctcctttaccccctctgcacactcgcatgttgctttcctaacaaacacgcaaatatgc

SEQ ID NO: 299041 - DNA, 201 bp, Homo sapiens
gcaagatggcttttgtccatttcctctttgacttgactgtgctactgaggaaacagtaggaaaggagtcaggctgctaactttaaccctgggtatcatttktaatttttcccatggagccaactctaaattctcattcagcattagaagactgaataatcagattgagtgtcagatgtgtaaataacacaaaacttgttaa

SEQ ID NO: 299042 - DNA, 201 bp, Homo sapiens
atgaaagttcattggaaagtgggggcttctcccaagtgtttacaaagctgatttgttcttgtgttgtcattaaacttgtgtgaataactctatttaattcyggtcactaggaaaacaaaaccaagtcaatcaattgttttagttcacattttaatgactgattttatttctgtccagtatcaatttgattagtaaataatg

SEQ ID NO: 299043 - DNA, 201 bp, Homo sapiens
accaaacattatattttttaaccaaagagtgatgtgaacagattaaacataattattctagcagtggattaggtggggacccaaatggacacaaggaggcrtttaagagggtattgtgaaagtcctgggtagagacattgaagatttattaagatagtagtggtgggcaggaaaggtgatttaagaaaaaaaaaaaaaaaa

SEQ ID NO: 299044 - DNA, 201 bp, Homo sapiens
agaaagagttattgttgtgagttatactgtcctggatgtgtgaagataatcaatgcaactattgtatcatgcctttgcattgggcgatggggaaatgtctyatgctcccggaagtgatgcataaccctacaggtttatggtgaattgtttacttagctgccatatgtctcctcttcagtggagtcttcctgctccatttct

SEQ ID NO: 299045 - DNA, 201 bp, Homo sapiens
ggaattagtcaaatccctgctctgccatgtattaactctgtggctttaggtaaattgtaatgcttaatctctcaaagcttaggttttcttatatagaaaattttttttaagctaccccagaaaaatgttttggggattgactgagattataaagatgctaataataataacttaataaaccttgtatgttgcttactctaa

SEQ ID NO: 299046 - DNA, 201 bp, Homo sapiens
caaaatggaaattgccttatttttgttttcctgatcaaaacagtgacctacatttctgatattttggggggcgctgggagacggggtctcatgatgttggycaggtcggtctcaaactcctggcctcaagtgatcctcccgcctcagcctcttgaagtactaggattacaggcatgagccactgtgcccagcctgattttt

SEQ ID NO: 299047 - DNA, 201 bp, Homo sapiens
tagcaatcatgaggctgaggtgcaacttagactccagtcccctataaaatataccttatagagtttagagatttgatgcaattcaaagcaaatttactatrttgaacatcagcaatgtcccaaagaagaccataaaattctgtggtggttaaaatctgttgtttaaacattagaagtataatattaaacatttctttctgt

SEQ ID NO: 299048 - DNA, 201 bp, Homo sapiens
attttatccataattcgtttactttttttgtgaactatttttaccattaatttacacagccaataacatttttaagtagctagaggttcccaattatttgrtattatgatccctatataatatgaagacaataaatgttctattgtttttctcttctcttcaacttttgtttttatcaaagcaaaacatatattaacttta

SEQ ID NO: 299049 - DNA, 201 bp, Homo sapiens
ggttttcatttgaaaaaacatattacaaactgagacattcactataaattaaattgaaataatcaaaatataattaagctatttgtgagtttacattttgyaaaacattttagaagcaaaatcatttaactttgtttgcattttgagacaaggagctaactgtgtgtatcatcttgagtagtgtctgtttttattcctagg

SEQ ID NO: 299050 - DNA, 201 bp, Homo sapiens
atctcttgcctggattatagaactgtgtcataacaggtctttctgcttggagttacccaccttcacttgaccacaatctgtgatacccagtttctttttctttttttttttttttgttttgagacgtggtctcgtcctgtcacccaggctggagtgcagtggcgccatttcggctcactgcaagctccgcctcccgggttc

SEQ ID NO: 299051 - DNA, 201 bp, Homo sapiens
ctaatctattttctatctttatagatttgcctattccagacttttcttataaaagtaatcaaaatatttgcagtcttttgtaattaccatctttcacttakcataatgttttgaaggtttatccatggtgaagtatgtatcagtactacttcatttctttttgttgccaaataatattccattgtatggatataccatttt

SEQ ID NO: 299052 - DNA, 201 bp, Homo sapiens
gagtgggttctgaagggtgagtggaatttgaacagggagagacctgagaaagacgtagtcgaaggcaacatcattagtagcagaagagtgaaaaaaatatrgtattgaagaagaatagtgcaattatgtaatgggtcataaaatggattagattgacaagttaattctcactaagagccaggtactttgctaaaataagca

SEQ ID NO: 299053 - DNA, 201 bp, Homo sapiens
cccagtgatttctatactgacctcaagtagttgtttcatttgccctatcttaattcctactggtgatttcattaggaataagggttttgataagaatagckttaaactggatttcagtaatgagatggtactttgtagaagctaatggttaagagcacaacaggctgtagagttgcagactgcctgggatcacttactaga

SEQ ID NO: 299054 - DNA, 201 bp, Homo sapiens
ttggaggatttctcattttctatccctaagccgtgcacagctcataaaaaacagtagttgccaagtgacaggtgtttttggaaaacttgcttagtttatamgttcagagaagacattgcctctaaatcagcagctactaatgaccttttgttccagggagttgttagagatccagatgaagtcctgtaattgaagcatagt

SEQ ID NO: 299055 - DNA, 201 bp, Homo sapiens
tgaaatattcttgcaagaggcaatatttgactcagtattttcattggtcatttagattttacttttgactttaattactggtattctagccttcaatggtwgactgtttcatgtttctccagaaagttaggtttcatttttattttctatagtttatgagtccatgcttgtaacttatagggaaatcataaaaacagaaca

SEQ ID NO: 299056 - DNA, 201 bp, Homo sapiens
aaatgatatagcctaataagagagctttactctagtggccttcattatagcccatgtgcaggatgattctgaaatatataaattaaatgaatggaaacagrcatgttgacaagtttgtttagcaccaacgattggatatgctattcttaaaccaaaacttttgtttactcattcattcctagaatttcagtattttaagaa

SEQ ID NO: 299057 - DNA, 201 bp, Homo sapiens
atatagcctaataagagagctttactctagtggccttcattatagcccatgtgcaggatgattctgaaatatataaattaaatgaatggaaacagacatgytgacaagtttgtttagcaccaacgattggatatgctattcttaaaccaaaacttttgtttactcattcattcctagaatttcagtattttaagaagtctc

SEQ ID NO: 299058 - DNA, 201 bp, Homo sapiens
aacaagtattataaatgaaaaaaaccctcatagctccccaatataaatggtgaaaaatataatcgttaaaacattcctcttctaatttataaggttacccytttttgctggtttatctctattagttggttttcctcttcagtcacctttctaaaagtggataagctgtaggacccattaacattttactggcatgataaa

SEQ ID NO: 299059 - DNA, 201 bp, Homo sapiens
caatattctgaattcaaaattctgttgttaaggatggtgtaaccatatatgacaaggcttttacaaactcctttttgaacattgctttaagcaatcatttstgtatttgtattaattttcaatctaatcattccaaatgaggcaaagttttgtgtaccagtgattgaattagaagaaagaacaagttattttgtatagtct

SEQ ID NO: 299060 - DNA, 201 bp, Homo sapiens
gtagtttgtagttgttttttgcctttcaaatgaaataaatacctccttgtttgggattcaggaccctctctaatctacccttcttaacattcagtcatttyaaactgctactgccttcatcacatcaattttctagtgactttgaagcgtgccttttctctctcaagacagagataggtagatctcttgaggtcctacttc

SEQ ID NO: 299061 - DNA, 201 bp, Homo sapiens
tttagatttctacttcaacttcctaatgaattattttctttcaaaggctcttcctggaatttttctgtttttggcaggtatgtttgcatatctcaagtgasacaatttggccaggtttctgaaaaagaatactttaaaagaaaaatgtaggttggctcttaagtgttttaatgttatttgagataaactaaaatagagcat

SEQ ID NO: 299062 - DNA, 201 bp, Homo sapiens
tgagttcaactttcttagattccacatgtaagtgagatcatgtggtatggcttatttcacttagcatgatatcctacaggttcacccatgttgtgcaaatrgtaggattttctcctttttatggctgaatagtatttcattgtgtatgcacacacatacatatacacacatcacatgttctttatccatttatatattgtt

SEQ ID NO: 299063 - DNA, 201 bp, Homo sapiens
tatactatacagtttgggatcagcatagatgttgattacaggctctgtgatctagagaaagttacttagcatctctgtgccttttctttctctatttaatrgggacaatatttcctatctccaaatgttattacttaatcttgagataatttgcttacagcatctgtcaaagtgccaaacatatagcaggtacacaatata

SEQ ID NO: 299064 - DNA, 201 bp, Homo sapiens
ctgattagtgtgagatggtatctcattgtggttttgatttgcatttctctaatgctcagtcatgttgagctttttttcatacgcttgtggccacgtgtacrtcttcttttgaaagtgtttgttcatgttctttgcccactttttaatggagttgtttgttcttttcttgtgagtttaggttccttacagatgctggatatt

SEQ ID NO: 299065 - DNA, 201 bp, Homo sapiens
cagttaacgaaattgtattgtattacagatttttgttaaataaggagatttcagctgctcttgtcacaaaaatactatgcaagacgctagataatgttaayctgtctcactatagtaaccatttgactatctgtacatatacacataacatgttgtaagcctcaagtatacacaatgcaaattatttttaaaataagtaaa

SEQ ID NO: 299066 - DNA, 201 bp, Homo sapiens
atgcaagacgctagataatgttaatctgtctcactatagtaaccatttgactatctgtacatatacacataacatgttgtaagcctcaagtatacacaatrcaaattatttttaaaataagtaaataaaataaaattctacttttagctcagaaaaataaaattaaccctatagataacaaatatgacatatgcatgacta

SEQ ID NO: 299067 - DNA, 201 bp, Homo sapiens
ttctatgagatgctggaagatttcttaaaagtgaagagggtgaaatggggaggtgttagtcaaagggtatacagttttggttatgcaagatgagtaagttytaaagatctgtgtagtatattgcctacagttaacagtacatactctgttgtagacttaaaaagagggtagattttatgttgtgttcttatcacaaaaaaa

SEQ ID NO: 299068 - DNA, 201 bp, Homo sapiens
ttacactcagagtgccccagacctatcccctcaaatcctgactccacctgttatatgtagcaggtaaggattttttatgaactgaagtttaataataaaamcgatgatagttttcccctagaaatacctaccaccagcccacgcagcttggggtaggtttgccaaagtattagacaaccaagtataggataatgtgatttg

SEQ ID NO: 299069 - DNA, 201 bp, Homo sapiens
ccatccacctgctacattggaatgaatatacacagctgttagtgtatcatagaaaaagagaatgaaaaactgaatctacaagtgagattttctgaagaatrtgggaccaaaatacagacagagtaaggcagttggagtacgggaaagaggagctcaacagtaccagggcccctgggaacatctggctgacaaatccatgga

SEQ ID NO: 299070 - DNA, 201 bp, Homo sapiens
ctatccctaaaggaagagaaactttcttcagaaaggtatttgttttaatcaaggaagtttctgctgagattaataacttggtatcatcccttagttcctgrtaaacatcataccttaaatgagtcttctgttttttaactagtttttcttttgtctaaaacaaaattgcctcttttgttttagagatgaattactcaattt

SEQ ID NO: 299071 - DNA, 201 bp, Homo sapiens
tacactcagagtgccccagacctatcccctcaaatcctgactccacctgttatatgtagcaggtaaggattttttatgaactgaagtttaataataaaacygatgatagttttcccctagaaatacctaccaccagcccacgcagcttggggtaggtttgccaaagtattagacaaccaagtataggataatgtgatttgt

SEQ ID NO: 299072 - DNA, 201 bp, Homo sapiens
ggagggaagaagatattcattgtcttagggcatctgctggttttctctagtatctccttgacttagaacatgaaccaatatttgtttttcttgtcatattktcaggcatatattggcactagccacctattaaaatattctttaatgattacttactttgtgtatttaaaaagatccatttaaggaggatggaagcatata

SEQ ID NO: 299073 - DNA, 201 bp, Homo sapiens
attgtctatcaaagttaataaaaataactggcctttgagaaagagtacacctttaaaatttttgaaggccaaatgatttttttttatttttcatccagaartatctatccctaaaggaagagaaactttcttcagaaaggtatttgttttaatcaaggaagtttctgctgagattaataacttggtatcatcccttagttc

SEQ ID NO: 299074 - DNA, 201 bp, Homo sapiens
accctatgatcctatgttcttggagtgctcaggaaagcagtatttccctaaacactatatttaccatatgcatcttagcaaaatttgcttaaatgagcccyctttccccattgtagatcttgtaataagttgttctcttttaattgtagatgacactgctcaagttacctctgattatgaaaccaataacaacagtgacag

SEQ ID NO: 299075 - DNA, 201 bp, Homo sapiens
tttgtacaaaggcattttaagagaacagtgcacttaatcagagaacctccttcaaggtgactctactgcttaaacatggtttaaaaaaattaaaatatttrtggctcagcattgttgtttcattgtctatcaaagttaataaaaataactggcctttgagaaagagtacacctttaaaatttttgaaggccaaatgatttt

SEQ ID NO: 299076 - DNA, 201 bp, Homo sapiens
gttttcaaaataaccttcctttgagttctcagttttatgtgaactgtagttaaactcttttttttccatgacttgtagcatatggtatttaactgtttgcyagtatcgctttctgaaatgaacctatttgtacaaaggcattttaagagaacagtgcacttaatcagagaacctccttcaaggtgactctactgcttaaac

SEQ ID NO: 299077 - DNA, 201 bp, Homo sapiens
tgtaccacattttctttatctagtctatcgttgatgggcatttgagttgattccatgtctttgctattgtgaatagtactgctgtgaacataaacatgcaygtatttttataatagaatgactcacattcctttgggtgtattcccagtaatgggattgctgagtaaaatggtattactggttctaggtctttgaggaatc

SEQ ID NO: 299078 - DNA, 201 bp, Homo sapiens
ctaaatcctctttttaaaatataaataaatatctttaaaataatattttaggccgggcatggtggctcattcctgtaatcccagcactttgggaggctgagacgggcggatcacgaggtcaggaggtcaggagtaatcccacatcgttcaagtcagtaatgaatttatttgaatcaaaagtggatacatttaaggaattgt

SEQ ID NO: 299079 - DNA, 201 bp, Homo sapiens
agcaattagaaactgtgttatagtccagacttgaaagagattatttcctgaggcaaagggagcattcatggagtagagtagtcattgagtaggatccttcrtggagcagatagtcattgagtgggttctgaagggtgagtggaatttgaacagggagagacctgagaaagacgtagtcgaaggcaacatcattagtagcag

SEQ ID NO: 299080 - DNA, 201 bp, Homo sapiens
gtcgccccacccgacagactccagcatgttgttcccctccccatgtccatgtgttatcattgttcagctcccacttataagtgaaaacatgtggtgtttgsttttctgtttctgcattagtttgctaagaataatggcttccagctccatccgtgtccctgcaaaggagacgacctcattcctctttatggctgcatagta

SEQ ID NO: 299081 - DNA, 201 bp, Homo sapiens
tcagccattctgtatgaatattaccaagtttaagacattggtttatgttcaatttcagcagtttgtataactgatttgaaaaagcaataaataggcttcawaattttatattttttataggaaacaggtaatttaatacatttaatacattaatacatttataatgtatgtattttttcatgaggtagactatgtaaaaag

SEQ ID NO: 299082 - DNA, 201 bp, Homo sapiens
tagaagctctgctggcttgcctcccaaatagctgcacccctctgtctggatccttcacttcttactccatgccaatagtcagtaaatcatgctatgaaggsaagaacaatttgcaggattttggctcacctttctgaggttctcttctttatgggaacctagtccctcagaattgtgtgctttgcctcgatagcttttttg

SEQ ID NO: 299083 - DNA, 201 bp, Homo sapiens
gcatggatggttaaaattagacctgatggcactattggttattctaagaaaggagctaaaagtctatataattggtttactttttattcagtctagttttkaaatcttaagaatggatcaaggaacattggatgaagaagggacacagggtaatgttattttcccaaatttcagaaattcttccaatttaggttcagcagg

SEQ ID NO: 299084 - DNA, 201 bp, Homo sapiens
tatgtaaactggtaactatacctatgttgttaaaggaaaatttaccctaatgttaaataatataaaatcccaagtctcatagattggtgggcattgtggarcttgcagattaaaatataccgcccacccccccaactgaaggaaatgtaggaactctgtatagtcagccttctgtatccctggattctacatccatggatt

SEQ ID NO: 299085 - DNA, 201 bp, Homo sapiens
cttgaaaggttgaaatgaactaaattgagggttgtttatattaaataaagctattttcccccaattttagctaaacctctttttatgtaaagaaaaaggattttttttttccagtaagatttaccagtcaaagcaggaaatcattttgttacaattgtcttacaaagcagccctgtgcaaggctgttgctaatgttaagac

SEQ ID NO: 299086 - DNA, 201 bp, Homo sapiens
gcatctgtcaaagtgccaaacatatagcaggtacacaatataattttgttttcctcataaatacatggttaggttcagcatggttattcatgaaaaacttyttttaaaaaattgagcaactgaataaattctaattgaatggctgaattatttgaaaggcaaaaaaggcaggcaataaagttagtctgaagtatcttcatg

SEQ ID NO: 299087 - DNA, 201 bp, Homo sapiens
aagtcacactgtataccatgtgaaatggtaatacctaccatgaaagaaaggatagcaggaagtggaggaaagaatgctgggggtcagtagggaggaggggragctacaattttaagtaggccagagaaggcctccctgggagggtgacatttaaggaaagacctgaggagaaggtagggagaagctgttgtggctgctagg

SEQ ID NO: 299088 - DNA, 201 bp, Homo sapiens
tgcagtgcatgacagtacaaatgttggagaccagagtgtgcttggcatatccatccagagaacacagaagaggccacaggggcaggaatggcatgactgcrgtggaaaatgacggcagagggcagagagttaagggagtacagtagggggtgggaagagacggtaaggtagatcattgcaaagacttaagagaatgcgagg

SEQ ID NO: 299089 - DNA, 201 bp, Homo sapiens
tgggcagggtggacgggaaggagtttgggttcagatacattacttttgaagagcctatcagaaatccaagtacagatgttggtaagcaggggacactggarggataagtttggaagtcattggcgtatggttgatatttaaagccttgagaagaacatcacaaggagtgcatgaagagaagaggtccaagtactcagtctt

SEQ ID NO: 299090 - DNA, 201 bp, Homo sapiens
gcacccagggagctgagatgtgccgcagggcctgtggcggacatggctactcgaagctgagtggcctgccatcactggtcaccaaattgtcggcctcctgyacctacgagggtgagaacacagtgctctacctgcaggtggccaggtaaggtccaggctgacccaggcctttgcccaagcccttggggacccaccaagctt

SEQ ID NO: 299091 - DNA, 201 bp, Homo sapiens
taaagacaaagaggtatgcgttttgctaaacaggtatgacaaagcaagaaaaatcgttgagtgtgtgtgtatatatatatatatatatatatatatatatwtttttttttttttttttttttttttttgagcgggagtcttgctctgttgcccaagctggagtgcagcggcacgatctcagctcactgcaacctctgactc

SEQ ID NO: 299092 - DNA, 201 bp, Homo sapiens
ctctccaggattattttcttcaggtgtaagcttcactgacttttttgtgaagatttccctaggcaattcatgtaactcaaactgcagtggatagagcccartctttggggtcaggccctgtccaatcttggctaacaagtattgaacaaacatgtaccaagcaatggctgcataccatgcctaccatgcacacagtgcctg

SEQ ID NO: 299093 - DNA, 201 bp, Homo sapiens
ttcgtgagagccctcaggagcctgggctcagaggagcagattgccaaatgggacccactctgcaaaaacatccagatcatcgcaacgtatgcacagacagagttgggacatggtgagctaggactgctgcgtgtggtgtttaggttgtgcactgcaaaactccagagggcccatttacatctaggtagtcataggttcata

SEQ ID NO: 299094 - DNA, 201 bp, Homo sapiens
gagcctgcacacagaggctccaagcaatggccaagtcagcttcctccacacaggcgatttcttttcatccctcttaggtctgtgggccctggaggccgacwgagcctcatcctcacctattctcaggtgaacaaacagggcaaatgcttccctatgcaaggagaaagaagttcactggcaaatatgaaaaacaacatttat

SEQ ID NO: 299095 - DNA, 201 bp, Homo sapiens
cttcgtgagagccctcaggagcctgggctcagaggagcagattgccaaatgggacccactctgcaaaaacatccagatcatcgcaacgtatgcacagacagagttgggacatggtgagctaggactgctgcgtgtggtgtttaggttgtgcactgcaaaactccagagggcccatttacatctaggtagtcataggttcat

SEQ ID NO: 299096 - DNA, 201 bp, Homo sapiens
aaaatcacagtgttctgatggaaaattctgtttgctcagatcacagaagggtttatgttcaggatcagagagtgtctggcccagctccacaggtcctgggrtatgcctgactgagggcctcgaggcaggacggcccgagggggaaccctcaggagggaggccaggcagaggcctggtgacctggctctcccacgggaaggc

SEQ ID NO: 299097 - DNA, 201 bp, Homo sapiens
tcttcgtgagagccctcaggagcctgggctcagaggagcagattgccaaatgggacccactctgcaaaaacatccagatcatcgcaacgtatgcacagacagagttgggacatggtgagctaggactgctgcgtgtggtgtttaggttgtgcactgcaaaactccagagggcccatttacatctaggtagtcataggttca

SEQ ID NO: 299098 - DNA, 201 bp, Homo sapiens
gggcacaggctccatgccacactagggcctttggattggttgggtggacattcgtggattcagttctaaaaaccaccccatgcctagcctccccggtcctstcagttcctgccaccatgggcagagagaggggatgtcccccccatcagccatggacccccgtcacttccccatcctggtcacagtagtagaaggacatca

SEQ ID NO: 299099 - DNA, 201 bp, Homo sapiens
agaggagcagattgccaaatgggacccactctgcaaaaacatccagatcatcgcaacgtatgcacagacagagttgggacatggtgagctaggactgctgygtgtggtgtttaggttgtgcactgcaaaactccagagggcccatttacatctaggtagtcataggttcatatgctccgagggacatatgtttaataagaa

SEQ ID NO: 299100 - DNA, 201 bp, Homo sapiens
tgttccagtgggctcagaagtcaccaaccaatactcaggtagttgagtggaacacattataaattatgtaagaaagcagagaacaggcagtgaatacaccytcatgttctcccattttaattgattcccgttaggttggcaatcacttggcgtagcacgtctgtttaaaatattcttagagaacacataaaagaaacaagg

SEQ ID NO: 299101 - DNA, 201 bp, Homo sapiens
gtcttcgtgagagccctcaggagcctgggctcagaggagcagattgccaaatgggacccactctgcaaaaacatccagatcatcgcaacgtatgcacagacagagttgggacatggtgagctaggactgctgcgtgtggtgtttaggttgtgcactgcaaaactccagagggcccatttacatctaggtagtcataggttc

SEQ ID NO: 299102 - DNA, 201 bp, Homo sapiens
ttgggaggccagggcaggaggattgcttgagcccaggagttcaagacaagaccagcctgagcaagatggtgagacccccgtctccacaaaaaaaaaaaaaatgaaaaattagtcaggtgtggtagcacacacctgtagtcccaactactactttggaggctgaggtgggaggattccttgagcccaggagtgcaaggatgc

SEQ ID NO: 299103 - DNA, 201 bp, Homo sapiens
cctatactgcagaaggcctgtgtcatcgccatgcgctactcggtcatccgccgccaatcccggctccggcccaggcaaggggtgcccagtgactgactacygcagatatgctgcctcttggtcccacagtgcctccccctgacaccacccttctgccagagccagagtgctgggagcaggcaatgccccccaccacataca

SEQ ID NO: 299104 - DNA, 201 bp, Homo sapiens
  misc_feature (1)...(201): n = A,T,C or G
agatgcgccggttgaggggcgaggtgccctccatgtgtggagccccacagctctggagaagcgagggcatcctgggaagccttggcccagaacttgtgccngtccttgttccacacaggtcttgccagatggcacctacgtcaaactcggtacagcacagagcaactaccttcccatggtggtggtgcgggtggagctgct

SEQ ID NO: 299105 - DNA, 201 bp, Homo sapiens
agctccacgcactgagcacgggcatgaaggccatgatgtcagaattctgcacccagggagctgagatgtgccgcagggcctgtggcggacatggctactcraagctgagtggcctgccatcactggtcaccaaattgtcggcctcctgcacctacgagggtgagaacacagtgctctacctgcaggtggccaggtaaggtc

SEQ ID NO: 299106 - DNA, 201 bp, Homo sapiens
agaacactgcactccgcaggaaagttggtaaggggaagctggggaatgggacatctgttttatgccccatgcttctcttgtaagaagagtccttcattagyagttctgcttccaaataacaaactttgcccttgaaattccactgttagagattcattccttcgaactgtaaagacaatcttcacatgtcaatattgcctg

SEQ ID NO: 299107 - DNA, 201 bp, Homo sapiens
ccagccccaggaggctgggttggttgggaaaagcaatgcacaggtcttcctgtgacgggccgctactctctctgccctcagtgggacggtcagccacccaygccctggtccaggcccagctgatctgctcaggagccaggcggggcatgcacgcttttattgtgccaatccggagtcttcaggaccacaccccactgccag

SEQ ID NO: 299108 - DNA, 201 bp, Homo sapiens
  misc_feature (1)...(201): n = A,T,C or G
taagcttcactgacttttttgtgaagatttccctaggcaattcatgtaactcaaactgcagtggatagagcccaatctttggggtcaggccctgtccaatnttggctaacaagtattgaacaaacatgtaccaagcaatggctgcataccatgcctaccatgcacacagtgcctggtccacagccagtgtccacaggggga

SEQ ID NO: 299109 - DNA, 201 bp, Homo sapiens
gacacccagccctaggcagttcctcttgcacacaggttctttgcactgaccaatgctgagagcagaccctcggagcagccgggttggaagtgtctctccayagtcaccagacagatccaggataggatgggcagcccagtgcaccgagtgtcattgggggatacctggagcaggcaaatgcaccccgacatagagagcgag

SEQ ID NO: 299110 - DNA, 201 bp, Homo sapiens
attcactttcccaccttggtcctcagttttgtcatctgtaaaataacaataatgtctgacttcctttccagatccatgaagcaagtgggtgagaagatttsaaggtgccagaaacctcacccaggtccctaagccctctgttctctgtcctctgcagagagcatcatccacagttacccggagtttagctgtaaggacaat

SEQ ID NO: 299111 - DNA, 201 bp, Homo sapiens
gccctttatctcctgtactctgctcaggcagggggtacctgggcccctgtctccaataagctactcaactacagcatctctccccaacagagccctttctrgagacgtggccttaaatatacacagagtcttcgtgagagccctcaggagcctgggctcagaggagcagattgccaaatgggacccactctgcaaaaacat

SEQ ID NO: 299112 - DNA, 201 bp, Homo sapiens
gctcagaagtcaccaaccaatactcaggtagttgagtggaacacattataaattatgtaagaaagcagagaacaggcagtgaatacaccttcatgttctcscattttaattgattcccgttaggttggcaatcacttggcgtagcacgtctgtttaaaatattcttagagaacacataaaagaaacaaggagtggcagtat

SEQ ID NO: 299113 - DNA, 201 bp, Homo sapiens
caccctattatcattacaccagcataaagcattatgaattaatgaaagaaaaaaatgggaaaaaatgggaaaaatactgaagaataaatgagctacctcakttgaactctttacattgtcaaggaaataggaatagtatctaaggaaaatcaataaaatgaagcatgctacatatgaatgatatgtgctaatgtgctaata

SEQ ID NO: 299114 - DNA, 201 bp, Homo sapiens
gtttaaaatattcttagagaacacataaaagaaacaaggagtggcagtatggcctggcaggaactctgagcctggattgtaatcagcaaaatgcactgctyggaacttagtaaagggaattaagaggaaggcccaagctctaaatcatggcttgacagacccaagtgcatacacacagagtggtaaactggcttttaagta

SEQ ID NO: 299115 - DNA, 201 bp, Homo sapiens
tgggaggcccgaaggccaggaggaagaagaatgggaacaaggggaggtaggagtgaagagagggggtgataaatataaatctttaccttttgaatgaagawtcaacagataatatctcaaactgaaccatcaacaagcagcaatataaacaagatattttgacattcagataaatactgaaatatcaactaaaagattgaa

SEQ ID NO: 299116 - DNA, 201 bp, Homo sapiens
aacaagtcaaaatcctggctccactccttactagctgtgtgaccctggacaaattggttaacctctctgggactcagttttccccattgcaaactgggggktgcctgcccttaaaagagttaaaaagataataaatatcaatcatttagctttatggcacataagtggtcaataaacaggcattatttctacttctgaggg

SEQ ID NO: 299117 - DNA, 201 bp, Homo sapiens
tgagctcgttctgtccagctgtgctgtcagcatcccactggtatgtctagtctggatcccttttgttgtaattggttgtgttgctaccactccctccaccycacagcacagaatagcaagggctgcctgaaccctctgtgaacactcagctcggccatttcacttcatacctcagcttcctcagctacaaaatgggtgtgg

SEQ ID NO: 299118 - DNA, 201 bp, Homo sapiens
agggagctgcgcgtgcaaaaggaagcagcaagaaggatcctggtgtgcttgggaggaagtgcaaatctcccaaggaggacctaaggagaaggactgagacwaggggagaaggagagacaggcaaggcctctgaccttttgcaccactgtgaaaagttggggttttgttttcattgcaatgcctttgctgagtttgtttgga

SEQ ID NO: 299119 - DNA, 201 bp, Homo sapiens
caagagaggctctgatatcccacagattggggtgaaacccctgcttaggagcagtatgatcttgggcacagagcctcagacctctcatgcagaaatgctcrtcacataggctgacagagcaatcgtggggtggggtggcagccccaggagaggatagggctgaggtgacctgcataatatttacccacagtgaggcctgac

SEQ ID NO: 299120 - DNA, 201 bp, Homo sapiens
ttttcattgcaatgcctttgctgagtttgtttggaggtggggtaaagtgatcagtttcattctagaagaatcatgcaggttgcccaggatggaatgaaagsgagcaagttagaaaggagcaagtctgaaccgggactgagggtggtcctgaccatgagcatggcagaaggcctggagacaagtgggtagatcagagatgct

SEQ ID NO: 299121 - DNA, 201 bp, Homo sapiens
acagcagtgcatctgtcaggttgaggtcaggaaggaaggggatcaaaagcatggcagcctgccggagagatttacaacatacctgctgcaagctaggaaaygcagagctggcctcccaggccttgtgggaggaacatgtaagcaaataagaacttgtccctaaccctagagcacccagggaacgagggagctgaactttgt

SEQ ID NO: 299122 - DNA, 201 bp, Homo sapiens
ttttagacaagaaatatgattttctccccttaagtaataataatcaataaatacaaacttaattttcatatttcattttttattagttttgttttttttttctggtagacagtacacttgggaattatactgcaccaggcataaagagtaagttttctaccacagggacattttgtattcagaattcaatataaatatttc

SEQ ID NO: 299123 - DNA, 201 bp, Homo sapiens
gtaagaatggactgaggtgccatcatcaatgtccttcatgataatggctttgcgtccagagtagcatccagccaggaccagcaccactttcccactttttcatgaacttgcccattttgacagcaaccagccaggcctacagtaaaaagaaagaagggcatttccactaactttttacccctgaggggaattttgatgttg

SEQ ID NO: 299124 - DNA, 201 bp, Homo sapiens
ggctgctgtgacctggaatgtgtgtatgatacctgccacatagcaagcactctctcaactgataggtgtcctcatctccatctccttcaaggaatcatcaytggggacatcggacccaagatggactttgatcaaacagacaatggcttcctgcagctgaaccatgtgcgggtccccagggagaacatgctgagtcgcttt

SEQ ID NO: 299125 - DNA, 201 bp, Homo sapiens
aagagggtggcctctttaaggttaaatgaggttcaatgcaaaaagccctagtgacatttgaagaaagggtgttctgggcagatggagatgccctagcaaawgctggcagtggcagggaggcctggagcattcagaacagcaaggaggcagtggcagcagagcaaggaaaagaggtaaggcaggacgagaggagccgcacta

SEQ ID NO: 299126 - DNA, 201 bp, Homo sapiens; identical to SEQ ID NO: 62097

SEQ ID NO: 299127 - DNA, 201 bp, Homo sapiens
aagcaagtgggtgagaagatttgaaggtgccagaaacctcacccaggtccctaagccctctgttctctgtcctctgcagagagcatcatccacagttaccyggagtttagctgtaaggacaattatttcatgacccagaatgagcgttataaggctgccatgcggagggcattccacatccggttgatagctcggcgcctg

SEQ ID NO: 299128 - DNA, 201 bp, Homo sapiens
ttgttgggaaaccaggatgctaggtgccctttatctcctgtactctgctcaggcagggggtacctgggcccctgtctccaataagctactcaactacagcmtctctccccaacagagccctttctggagacgtggccttaaatatacacagagtcttcgtgagagccctcaggagcctgggctcagaggagcagattgcca

SEQ ID NO: 299129 - DNA, 201 bp, Homo sapiens
gcatgagtagatgctcagtaagtggtgcacagggttggtccctatggtggaggccccctaacaccgcccaacccccctccatgttctcacagctccacgcrctgagcacgggcatgaaggccatgatgtcagaattctgcacccagggagctgagatgtgccgcagggcctgtggcggacatggctactcgaagctgagtg

SEQ ID NO: 299130 - DNA, 201 bp, Homo sapiens
tgccccatgcttctcttgtaagaagagtccttcattagcagttctgcttccaaataacaaactttgcccttgaaattccactgttagagattcattccttygaactgtaaagacaatcttcacatgtcaatattgcctgagcccacctaggggatagaagagtcctaggcagcagaagacctggattctggtcctaaaatt

SEQ ID NO: 299131 - DNA, 201 bp, Homo sapiens
gtagtttcactcttgttacccacgttggagtacaattggtgagatctcagctcactgaacctcccccttgggttcaagcgattctcctgcctcagcctctytagtagctgggattacaggtgcctgccaccacatccggctaattttttctatttttagtagagacggggtttcaccatgttggccaggttggtctcgaac

SEQ ID NO: 299132 - DNA, 201 bp, Homo sapiens
ggattacaggcgtgagccactgcgcccggccaacttgtaggaagttagtgtgaaatggcaagttagtctataggatatttggggtttgtttgttttttttkttttttttttttttcgagacggagtctcgctcttgttgcccaggctggagtgcagtggcatgatatcagctcactgcaacctccgccgcctgggttcaag

SEQ ID NO: 299133 - DNA, 201 bp, Homo sapiens
tgattgtttaatgttgagatggtggcaaacaaaagtaggtatatgggttataaaaccaaacagagtatacgtaatggctttgtggagcttttcttccccckcccccccctccattatatgcacactggggatttattttagttatttatttaccatataaagctttgaatatttctttgcaacaggggtaagtagtctaga

SEQ ID NO: 299134 - DNA, 201 bp, Homo sapiens
ctggagtgcagtggcatgatatcagctcactgcaacctccgccgcctgggttcaagcaattcttctgcctcagcctcctgagcagctgggattacaggcaygtatcaccacaccaggctactttttgtacttttagtagagacagggttttgccatgttggccaggctggtcttgaactcctgacctcaggtgatctacct

SEQ ID NO: 299135 - DNA, 201 bp, Homo sapiens
tttttaagtgactggatctcagtatgtcacccaggcctggaatgcagtggtgtaatcatggctcactgcagccttcaactcttgggctcaagcagtcctcstgccccagtcccctgagtagctgggactacaggtacatgccatcatacctgactaatttcaaaatttgtttttgtggagatggaatcttgctctgttgcc

SEQ ID NO: 299136 - DNA, 201 bp, Homo sapiens
ttttgtatagggaattcatcttctcttttaaaataacttttttcctttaatttatttctattacttattgtacataaattttaaaataaaaaaataaaagaaaaaagtcacttgtctatcacctgttaatagtttaaacattttggtttatttccattcatccttcccccccatgcattatttacatatttttttttctct

SEQ ID NO: 299137 - DNA, 201 bp, Homo sapiens
tgcatgtcctcttatttccttgatcagtggttttgtagttctccttgaagaggtctttcacatcccttgtacgttgtattcctgggcatttaattctcttygcagcaattgtgaatgggagttcactcatgatttggctctctgtttgtctgttattggtgtatgggaatgcttgtgatttttgtaaattgattttttttt

SEQ ID NO: 299138 - DNA, 201 bp, Homo sapiens
ccttgtacgttgtattcctgggcatttaattctcttcgcagcaattgtgaatgggagttcactcatgatttggctctctgtttgtctgttattggtgtatrggaatgcttgtgatttttgtaaattgatttttttttcctgagactttgctgaagttgcttttcagcttaaggagattttgaaaagccctttatttatcaa

SEQ ID NO: 299139 - DNA, 201 bp, Homo sapiens
cctcagctctgggtctcttatgcccctcacgcggctctgggggtcctcaccacaatcgcctctgtcccacgatgaccgaggaggacctagggcaacatctycttaagtctattgggaagtgaccctgtatttcccctcacacctaggagggtcactcccccttcccgtcgcagttgctctttgagattgacctgaggcaca

SEQ ID NO: 299140 - DNA, 201 bp, Homo sapiens
cgataagacttcgcattctcctagggagtgggagtagttgcattttacatatgcgatctgatagttctcatattcgtgttttttgttcttggttttttgttttttttttttttttgatatggagtctcactctatcgcccagccttgagtgcagtggcacaatcttggctcactgcaacctctgcctcctggattcaagca

SEQ ID NO: 299141 - DNA, 201 bp, Homo sapiens
acgatgaccgaggaggacctagggcaacatctccttaagtctattgggaagtgaccctgtatttcccctcacacctaggagggtcactcccccttcccgtsgcagttgctctttgagattgacctgaggcacattttctctttctagaagccgctgcgtaagtgacggacccatccacggggggagattcctgctgatagt

SEQ ID NO: 299142 - DNA, 201 bp, Homo sapiens
atttttcaagtgattataatttaccataatctcctttggtgttgacgaaagtgatctgtagccatctagtgggtgcagacgtcagtaggatctaggttttrgacgctttatataaaaagaacagcaagaaagtgtggtgcatggagttgatttagaggatagaattagcaattcatatgtgttttacagagaaattcatta

SEQ ID NO: 299143 - DNA, 201 bp, Homo sapiens
gttaaggacttctataagtaatgaaccatactaggaatagggcagtgttcccattctcagagactttccaatctgttggacataggagagattccctgtaygtgtacattccctgtatgtgtacacacacacatacacacaaatgtgcaaagattgtgatacaaggcagactgtgagaaatggcaggtatcaagaaagtta

SEQ ID NO: 299144 - DNA, 201 bp, Homo sapiens
ttaaaagggagtccttaccgagaactcctttaccctcactatctgcctaaatcatttctttctggctccagttgtcaccatcttaaccattttttaaaaartacagctcaatagtgttattgcattcacatggttgtgcaactaatttcctaacatattttttttttataatgtaaaactacaattctatccctttttttt

SEQ ID NO: 299145 - DNA, 201 bp, Homo sapiens
gcgtacactcttggtgatgtacattctgtgggtttgggcaaatatataatgcatgtatccactgttagtagtatcatacagaggagtttcactgctctaaraaaatcctctgtgctctgcctattcatccctcttttccccttaaccagtggcaaccactgatctttttactgcttccacagttttgcctttttcagaatg

SEQ ID NO: 299146 - DNA, 201 bp, Homo sapiens
tatttaccctctttcttaagcattagttaaatgtatatacatacttttaaaacttctgttctttttttctattcttgccccattgacatgaaaaaaatgtkctgaattcttgctttcgcttttctcttttcttcctttgttccacttgggagccttcaaaagttctgaattataatagaagtgaagtgttagttctagtgt

SEQ ID NO: 299147 - DNA, 201 bp, Homo sapiens
tgaacctggggggcggaggttgcagtgagccgagatcgtgccacttcactccaacctgggcaaaagactgagactctcaaaaaaaaaaagaggaagatctrgaaccttgattagatttcaaatcataggtagtgcagtgtatttcatattgcatcacatcagaaggtataacatgtcaggttgtttcgtgaaatcaggagg

SEQ ID NO: 299148 - DNA, 201 bp, Homo sapiens
aaaaaagcatatggtaggtttggaagtggaaataattgaatacaaaattctcttgcaagaaatttggcagagaagggaaggagaaagaagttggcctctaraagtgggtgggatacatggccacataatctgtttttccatctcaaaacacttggaccttttaacttttttccccctttttaacctgtctttaaggtgggg

SEQ ID NO: 299149 - DNA, 201 bp, Homo sapiens
aaataaatgagggcaagatggtggtagtgtagtatatgtgcacatgtgcctttgtatgtgttggggatatagcagagcttttttgctgacttggattcctrttcccattccttgagggctttatagcccaatttgaaagtcactaatatagagagtacaaataggtatataaaaaagtaagcaaatgagaaaataagccag

SEQ ID NO: 299150 - DNA, 201 bp, Homo sapiens
ctttttgtaagataaaaccaccaccttattgcaccgtaatgctgctcagatatggaaaccttggttaggtagtattacaggaaaatgtaagcatatgatarcaactaacttcttgttagtgatcttacattgctcagcaagtatagcattattgcaagatttacagaattcaggtctttaaaagtttatattttatttcca

SEQ ID NO: 299151 - DNA, 201 bp, Homo sapiens
gcaagtttctttttattcttagtttgttaagtattttcatcatgaatgatgaatttggccaaatgttttttctgcatttcatgatgattataagatttttyttaatttttctcttattgaggtgaattactttgattgaaaaaaaatttgaatgctaagtaacctttgcattcctggagaaaaccctatttggttgtatat

SEQ ID NO: 299152 - DNA, 201 bp, Homo sapiens
tccttaatcaaacttgaaaaaaatgtcacacaagatataactcttcttttaaaactaaaaggttcctaagtgatatcccaagctctcagattctccaggargagatgacttggatgaaggagattctttccaacctgggctcacctgttgtgctttgccataatgacctattgtgtaagaatataatctacaatgagaaac

SEQ ID NO: 299153 - DNA, 201 bp, Homo sapiens
agctgctgttttaaaaattactattgttattcaaagaaggttatttgagttatattttttccctaggctctccaaggtatactttaaatccttgaggttartgattctttggaaaagctggaggtgtgctgtggtaaataataggaagaaaacccttgccccaatagaaaataatacaactagaacataaaacacaattaa

SEQ ID NO: 299154 - DNA, 201 bp, Homo sapiens
ctgcctctccatccccctcagtgtcccctcccaaaaaatatgccctacaacagcaaggggcagaggtggaagtaggggaacaccacttaaaaataaagagktaggtggtaatggtgaagcaagatttttcttgactttttaagatactgcagggttgagaggcaagtctagtattatatagaataagagcacaagagcctg

SEQ ID NO: 299155 - DNA, 201 bp, Homo sapiens
tttaaacattttggtttatttccattcatccttcccccccatgcattatttacatatttttttttctctgtaggcatattttaatttggatcacagtttastacttagtatctccttttcatgacatttgtaatttccctggtcattatttttgaaaatgagatttcttcatggttttatttcattttattttcatgcctg

SEQ ID NO: 299156 - DNA, 201 bp, Homo sapiens
acaacctaatgattcttgctgaagatggccagagtaatcagagtaattaatttggggaatggtgaaggataaggaacctgatcagatatcaagggtggggrtactcttgctaaactgactcagtagggttcttgctaaaactggtttttacaagagagagcacaggtaggtctacaagaagattcgggagactgactaaag

SEQ ID NO: 299157 - DNA, 201 bp, Homo sapiens
gtggaatcatgtaatgtttgtctttttgtgactggcttatttcacttagcatgaacacttcaaggttcatttatgttgtatagcatgtgtcagaattttcwttttctttcaaggcttaataatattcctttgtatttatatactacgttttgtttattcatccatggatgtatacttgggcaatagtcacttttggctatt

SEQ ID NO: 299158 - DNA, 201 bp, Homo sapiens
tttattaagtatgtgcctctcgcatctcaagcatttgaatgaatcaataattgtgattgcaatgtgaaataaaaggaaaccctgaatcttactcctttatycttcatgcgtttctcagacactgcaatctgccttttccctcactgctgtaaaaagaaaatcaggtaaggcttaccaatcatgacataattgccaagtcca

SEQ ID NO: 299159 - DNA, 201 bp, Homo sapiens; identical to SEQ ID NO: 62114

SEQ ID NO: 299160 - DNA, 201 bp, Homo sapiens
cgcatcgcatgttttggtactacgttcttccacctctcatttccaattctcccatcccaactgagagaattgtgagctcctaaaattcagtaattctgacatgtgttttttgtactagctgtaatgctagttttcagtaagagtccttgtacaactaactgtagcacaaggtaggcatagaagaacgtaggacagaaggct

SEQ ID NO: 299161 - DNA, 201 bp, Homo sapiens
gcatcgcatgttttggtactacgttcttccacctctcatttccaattctcccatcccaactgagagaattgtgagctcctaaaattcagtaattctgacatgtgttttttgtactagctgtaatgctagttttcagtaagagtccttgtacaactaactgtagcacaaggtaggcatagaagaacgtaggacagaaggctt

SEQ ID NO: 299162 - DNA, 201 bp, Homo sapiens
agctaatttttgtatttttagtagagacagtgtttcaccatattgaccaggctggtctcgaactcctgacctcaagtgatccacctgcttcggcctcccamagtgctgggatcacaggcatgagccatcacgcttggcctgtctttaagttttatcatttatttgttttggaatctgctagcaagtgaatcttacatactt

SEQ ID NO: 299163 - DNA, 201 bp, Homo sapiens
atgtttgaatggtattgactataatttttgatagtcacaaacctaatatttgatgatcatgttaaacataatgtgacttagttattatttattattttttwaatttttacttttttttttaagagatggggtctcatactgttatccaggctagagtgcagtgatgctatcatagctcactgcagccttgtactcctgagc

SEQ ID NO: 299164 - DNA, 201 bp, Homo sapiens
aagtgggtgggatacatggccacataatctgtttttccatctcaaaacacttggaccttttaacttttttccccctttttaacctgtctttaaggtggggttttttttttttttgagacggagtctcactttgtctcccaggctggagtgcagtggagcgatcttggctcaccgcaacctttgcctccagggtttaaatga

SEQ ID NO: 299165 - DNA, 201 bp, Homo sapiens
acggagtctcactttgtctcccaggctggagtgcagtggagcgatcttggctcaccgcaacctttgcctccagggtttaaatgattctcctgcctcagcckccctagtagctggaattacaggcatgaaacaccacacccagctaatttttgtatttttagtagagacagtgtttcaccatattgaccaggctggtctcga

SEQ ID NO: 299166 - DNA, 201 bp, Homo sapiens
ggtatcaagaaagttatatagaaatattgaagacagaatgtataattaacactttggatcaaggaaggcatgttatatgaattaagggcaacatgttaacattagtggttctctttgtttaaatatagaattaaaattatagatgttagataaaattgtattcaaagatggttcttttatgtgaagaagttggtgttttct

SEQ ID NO: 299167 - DNA, 201 bp, Homo sapiens
gtatcaagaaagttatatagaaatattgaagacagaatgtataattaacactttggatcaaggaaggcatgttatatgaattaagggcaacatgttaacattagtggttctctttgtttaaatatagaattaaaattatagatgttagataaaattgtattcaaagatggttcttttatgtgaagaagttggtgttttctt

SEQ ID NO: 299168 - DNA, 201 bp, Homo sapiens
tatcaagaaagttatatagaaatattgaagacagaatgtataattaacactttggatcaaggaaggcatgttatatgaattaagggcaacatgttaacattagtggttctctttgtttaaatatagaattaaaattatagatgttagataaaattgtattcaaagatggttcttttatgtgaagaagttggtgttttcttt

SEQ ID NO: 299169 - DNA, 201 bp, Homo sapiens
gaccagtaattctgagacctgtagatactggcttgaattctggagtgtgagaagaagatgatgtggctttattatcaaagaataggcagtattttaaatgsatgctcatttggtttttgtataagaaaacattacttttgttacaattattagtacatgagattattaaaaatccaaaatagattttaatccacctgacaa

SEQ ID NO: 299170 - DNA, 201 bp, Homo sapiens
gtactagctgtaatgctagttttcagtaagagtccttgtacaactaactgtagcacaaggtaggcatagaagaacgtaggacagaaggcttcatagaggtrggggtacctgagctaagctttgaagggtagatgagatcagattgaaaagggaaacatttctgagcaaggaaaactatctcacaaaggcaatgaagctaga

SEQ ID NO: 299171 - DNA, 201 bp, Homo sapiens
caaattccgcaattttttttccttttttccccttcatacttgtatgatctcacctgaccagtgatttcttttcctcctaaccccatgctaccaccattttstggaaatcaaagagatgtggtagtaaatcatacagtacacacgatcatctgagatcaatatgagcacaaaactcatcaagtaggtctgcctggaatgtat

SEQ ID NO: 299172 - DNA, 201 bp, Homo sapiens
ataatgtaaatacatgaccatttacagtatgcattaccccattgcattagttttaaggacaaaaattttgtttcatttcctgctatatccccatcccctakaacaatgcctggccatatgataggtactcagtaattatttgtttaatgagtagattcttatcagggttaagattgatgcataaaacaatttcttagtcta

SEQ ID NO: 299173 - DNA, 201 bp, Homo sapiens
gaatgatgagtgctctggtgaaggggtacagagtactacaggacaccagcgtgaagattaaagggaaagtgtttcagactagaatactccctgtctttttstgtataaaatagaaaacattttgctaacattagtaggattatagttacttttcgtatcgttctcttcgaacctgcctaacattgcagagcaagtagggtg

SEQ ID NO: 299174 - DNA, 201 bp, Homo sapiens
gttactcatgttttaatgactgagaagagttttttcattggtacttttaaaaaatttaaataaatacaaattgatttttgtgtttggtaaactatgttttmtagggtggtgtttttaaatgtagtttaatttttaactctgttttaatttgtattctcaaccactagttagcagaaaataaaatatctgtaagtcagataa

SEQ ID NO: 299175 - DNA, 201 bp, Homo sapiens
tcaagaaattactaaagctgttgagatttctatctcatgtcttgatgttctctcagaatgtttattggtctcatgacttttggtgactttcatttctcctsctgtccccatttcttcataaaagctcatgtaaatacctaatatttaactttaaatttcagtaatggcaatcactgtttattttctctgtcagcacaatac

SEQ ID NO: 299176 - DNA, 201 bp, Homo sapiens
agcagttcttgctccagaactataggaattatcagtcatcttttaaatcaatcattaatttaatagactttatattaagcagaataaattgtaatattgcytatgactaacttcaaatctaatattttaatttcaactaatcatttaactactgacatcaagaaattactaaagctgttgagatttctatctcatgtcttg

SEQ ID NO: 299177 - DNA, 201 bp, Homo sapiens
tatattaagcagaataaattgtaatattgcttatgactaacttcaaatctaatattttaatttcaactaatcatttaactactgacatcaagaaattactaaagctgttgagatttctatctcatgtcttgatgttctctcagaatgtttattggtctcatgacttttggtgactttcatttctcctgctgtccccatttc

SEQ ID NO: 299178 - DNA, 201 bp, Homo sapiens
atgatggttgtcttcactctcctactcccaatgattcctagaaaagaaactttaaaacatgtttctacttcccattctgcagtttagtaaaatgatttggytaactcttaaaactttttgtggaataatgttctgtgaattcaagtatacaaggcaggaggatcacttcaggccaggagttccataccagcttgggcaaca

SEQ ID NO: 299179 - DNA, 201 bp, Homo sapiens
agtcttaaggagaacattttcaataatttattgttaggtatgatatatgctatagattttctttaatgactctaccagattaagcaagtttctttttattyttagtttgttaagtattttcatcatgaatgatgaatttggccaaatgttttttctgcatttcatgatgattataagatttttcttaatttttctcttatt

SEQ ID NO: 299180 - DNA, 201 bp, Homo sapiens
tatactgttaatggagaagcagggagtaatttgagagactttggagaaagaatcaagaggtcatgacttaaagtattaagggaaggagtgaaggagtatasccgttttgtaagcctgattggtgctattgaggaattagtggtagtagcccaattttgtttccttgattttttaatcaaattaatacaagtatagataata

SEQ ID NO: 299181 - DNA, 201 bp, Homo sapiens
gaactccagacctcaggtgatctgcccacctcggcctcccaaaatgctgggattacaggcgtgagccaccacgcctggccaattctatgctttttaaacarcaaatcttctttccttcctccagcccctggcaaccgtcatctactttctatccctaggaatttgactacttaggtacatcatgttagtggaatcatgtaa

SEQ ID NO: 299182 - DNA, 201 bp, Homo sapiens
gattttctttaatgactctaccagattaagcaagtttctttttattcttagtttgttaagtattttcatcatgaatgatgaatttggccaaatgttttttytgcatttcatgatgattataagatttttcttaatttttctcttattgaggtgaattactttgattgaaaaaaaatttgaatgctaagtaacctttgcatt

SEQ ID NO: 299183 - DNA, 201 bp, Homo sapiens
ttctctgttttatttgagcttttttgtagcaatcagttattacggacaccttcagaaaattttttaaaattcaaaagtgtttagaaattttttcaaatttcttatcagatatttcttagaaatttgcctcttgtcaagaacctggctgaagtttaatgacaaaccatccagtaacagacataatggaagaaatgcagtttc

SEQ ID NO: 299184 - DNA, 201 bp, Homo sapiens
agttactaattacatgctaatttccctgtaagtccaaaacccatatttttcctgacataagttgtgttactttatgttgtggtctgttatgcagaattaarccagtaagatcattttcagatgtttgtcacccctagaacatttttcacatttaaatatatttattgcttgtgagatttggattttcttttgtgtttatat

SEQ ID NO: 299185 - DNA, 201 bp, Homo sapiens
tttccaaaattgccagctttaaaaattctctttctgctcttgaaaactctagaaaatggtctggatttgaaaacagcattcataggttagaccagcagttygcaaccattttggtctcaagacctctttatagctctttgggctctttgttttaatatttgattaatgtttatcaatatttaccatattagatattaaaac

SEQ ID NO: 299186 - DNA, 201 bp, Homo sapiens
tctgcctcctggattcaagcagttctctggcctcagtagctaggagtacaggcgtttgccgccacacccagctaatttttgtatttttggtaaagacgggktttcaccatatcggctaggctggtttcgaactcctgacctcaaatgatccacccacctcggcctccccgagtgttgggattacaggtgtgagccacctca

SEQ ID NO: 299187 - DNA, 201 bp, Homo sapiens
aagattaaggtgttttttgtaggggaaggagtggatgacaaagatagggaagtagtagaagacctttaagaaatcagaggttctatttctctttattttgktttctaaggagttattttactctttgatataccagattggctataaatacatttttaacattcttttaaaaattgtgaaaaacagcaaacatatagaaaa

SEQ ID NO: 299188 - DNA, 201 bp, Homo sapiens
tctcttgttgacttttgtgatagttttatgtatggtgaaaataaggaaatgatcaaagtctggtttcatgaattacacactttattgccatacaaagatarttttttccccttaggttcacaatgcttaaagagaggaagaacaacctgaacaaatctcacagggaatatactcaatagatgaggtacattaactatataa

SEQ ID NO: 299189 - DNA, 201 bp, Homo sapiens
accctgcttattcctgtaaaccaaccagtgatctctggctgctgcttagaagaaacaagagggatggctaattaaacaggttgaagtaaaggagccagccyaaacccaccaaaaccaaaatggtgacgagagtgacatctggtcgtcctcactgctacactcccaccagcaccacgacagtttacaaattctatgacaatg

SEQ ID NO: 299190 - DNA, 201 bp, Homo sapiens
aggagaggcagcgcctcacacccagcatcctgcctctgactgcccaggggcccacaggcgtggacactgtgacagccactccctctgccccccccccccccgtcacccactaggcaggagcacttctgaccagacactgagcctgccccaggcacagagctgcccaagctggacctgcccccactcaccatccatccctcc

SEQ ID NO: 299191 - DNA, 201 bp, Homo sapiens; identical to SEQ ID NO: 62128

SEQ ID NO: 299192 - DNA, 201 bp, Homo sapiens
ggtcgtcacgcgctcctctcctagtgcaggcatcattcctttcccattgatttgcagggttctctgtaagttctgaggatcccatatacatattctctctstaagttctgaggatcccatatacatattctctctctaagttctgaggatcccatatacatattctctctctaagttctgaggatcccatgccgacataca

SEQ ID NO: 299193 - DNA, 201 bp, Homo sapiens
caggaacggtcgtcacgcgctcctctcctagtgcaggcatcattcctttcccattgatttgcagggttctctgtaagttctgaggatcccatatacatatwctctctgtaagttctgaggatcccatatacatattctctctctaagttctgaggatcccatatacatattctctctctaagttctgaggatcccatgccg

SEQ ID NO: 299194 - DNA, 201 bp, Homo sapiens
ttcccctgttggtggatttggcctgcacggattctgtgtggcctcttccttcccatgttggtggatttggcctgcatggattctgtgtggcctcttccttyccatgttggtgtccttttttccatgccaggaatcctggttctcaagggcggggttgttggcacgagcgtgatgcagactgcctttgctgcctttctcttg

SEQ ID NO: 299195 - DNA, 201 bp, Homo sapiens
tcctccttgcgaggaggtgggtgacacctcctcgacccacagtgatcctgctgcgcctggagggggccatcgatgctgttgagctgcctggagacgacagyggtgtcaccaagccagggaggtgagaggcggggagccagccccttcactgcaggcccagcctagagctagaaacgggccatggtgcagtcctgggctgtc

SEQ ID NO: 299196 - DNA, 201 bp, Homo sapiens
tgacttctgtgcttgcttgtgtctggtcagcttgctacacggacatcccaaagattatttacgcctccaggacccactcgcaactcacacaggtcatcaaygagcttcggaacacctcctaccggtgggtcagacgagtttacacctgtctcggggtcctcaagagaaccagcttggcatggtgctgagtccacagcccca

SEQ ID NO: 299197 - DNA, 201 bp, Homo sapiens
gcctaaggtgtgtgtgctgggctcccgggagcagctgtgcatccatcctgaggtgaagaaacaagagagtaaccatctacaggtaggctcctgggctcccrctccggctcagtgtccgacaggcgagtgctgctgggtgtccagagccccaggctgcgctcccgctgggctagggtttgaagttcactgggggactgcagg

SEQ ID NO: 299198 - DNA, 201 bp, Homo sapiens
gattggcaaactctcggctcctttccagtgccctaaacccacactgggcctcctgcagggatgggggaggacgaggtctggtggcacatgcccagggtgaygctggtgagggaggacgcaaaggacagtgggggccggggagccgctcctgccctgtccgggccctcaggccaggggggacccactgctggcagccccagc

SEQ ID NO: 299199 - DNA, 201 bp, Homo sapiens
agcagccccagctgcacgcagatgaagagctctggacacacgcggcttcctgaacagcttctccagggacagacaaatggggaccctgcaggttcccggcrggggtgtccctgggagcccatgattgggggtgcgaccctggcccccttctcattggccccgtcctgtcctgcaatgcccgtcccatgtgaggtctgcttc

SEQ ID NO: 299200 - DNA, 201 bp, Homo sapiens
tgtggagggcacgccccattttgggtgctctgggcacgttgcctctccggggcctcggtggcttttttagaagcagactcagaagtccctgactggggaarccaaggcacaggtggctgtgtggagccctgtgaggcctcctctgtgctgcccacgctgtacctgctggccacacgagatcatggcagggttaggcagggc

SEQ ID NO: 299201 - DNA, 201 bp, Homo sapiens
gctgctggccgccctggagcacagcgaacagcgggcggggagccctggcgaggagcaggtacagttccagggccttgggatggacacagaccctctgtctyctgaggccaacccgaccccgcccatctggcctcaggcacctccccacacacccctgtaaatcccctgcctggcaggcaggcgggcaagcgggcgggggat

SEQ ID NO: 299202 - DNA, 201 bp, Homo sapiens
tgcactaggccatgttgaatttctagattaatttggggccctcaggggcacagagaggagggctgggccagttggcgggaggagaggcccctcgggctgcygcattttcagtgcatggagatggcctatgttgggggaacacagagctcaccgggggtccctgcagggaggagaaagggtcaggcaggtgccagctcctgt

SEQ ID NO: 299203 - DNA, 201 bp, Homo sapiens
aggaccccaagtgctgggactctcccccaagaggggctttgccacaggcagggaccccagctggggccccccgtgggcttcactgcgcactcgggtgcccytgcagggtcaccagctgccggggaccccgagagtagcctgtgtgtggagtatgagcaggagccagttcctgcccggcagaggcccagggggctgctggcc

SEQ ID NO: 299204 - DNA, 201 bp, Homo sapiens
gagcacagcgaacagcgggcggggagccctggcgaggagcaggtacagttccagggccttgggatggacacagaccctctgtctcctgaggccaacccgaycccgcccatctggcctcaggcacctccccacacacccctgtaaatcccctgcctggcaggcaggcgggcaagcgggcgggggatcccagctgcctggctg

SEQ ID NO: 299205 - DNA, 201 bp, Homo sapiens
ggggtctgcctcctactcccaggaccccctgtcccccagaggggccccaagctggcaggctcacactcagggcagcctcctttgttctgacttctgcacastgggcctgggtggctgcccgcggctcgcttgcttgatgccagtgggtggagagggtgatgggcagagaggcaggtggtcaggcccccagtcccgtcctca

SEQ ID NO: 299206 - DNA, 201 bp, Homo sapiens
ctgaggcctgcgctgctgcagggtgagccccacccggagttcagcacggactcccccagcccaggtgcgttcatagccaggctgcttggtcctgaggcccrtgctactgcagtgggcagcctgccctgtggctgtgtgtggtcggcctgggcaccatctattcaggctggcactgcagggcatccgcttctctcagaggct

SEQ ID NO: 299207 - DNA, 201 bp, Homo sapiens
tgaggcctgcgctgctgcagggtgagccccacccggagttcagcacggactcccccagcccaggtgcgttcatagccaggctgcttggtcctgaggcccgygctactgcagtgggcagcctgccctgtggctgtgtgtggtcggcctgggcaccatctattcaggctggcactgcagggcatccgcttctctcagaggctt

SEQ ID NO: 299208 - DNA, 201 bp, Homo sapiens; identical to SEQ ID NO: 62151

SEQ ID NO: 299209 - DNA, 201 bp, Homo sapiens
taatcccagctacttgggaggctgaggcaggagaatcacttgaacccaggaggcggaggttgcagtgagccgagatcgcaccattgcactccagcctggcracagagcgagactccgtctcaaaaatcaatcagtcaatcaagtgtcatcactgaatgtttgtgtgtgaacgtggggattggtcctgccccatgctccctc

SEQ ID NO: 299210 - DNA, 201 bp, Homo sapiens
ctatctgttcccccacccctttggagatggggtctcactctgtcacccaggctggagagcggtggtgccatcacggctcactgcagcctccacctcctgcrgcctccacctcttgggctcaagtgatcctcctgcctcggcctcccaagctcctgggactacaggcgtgtgccactgtgcttggcagggtccattcttttc

SEQ ID NO: 299211 - DNA, 201 bp, Homo sapiens
gagtgcaatggcgcgatcttggctcactgcaacctccgcctcctgggttcaagcaattctcctgcctcagcctcccaagtagctgggatcacaggcgtgcrccaccacgcccagctaattttgtatttttagtagagatggtttctccgtgttggccaggctggtctcgaactcctgacctcacgtgatccacccgcttcg

SEQ ID NO: 299212 - DNA, 201 bp, Homo sapiens
tgcagtgcagtgtcacagtcttggctcactgcagcctcagcctcccaggctcaagcgattttcccacctcagcctcccaagtagccgggactgcaggcacrcaccaccatgcctggttaatttttgtattttttgtacagacagggtctcactctgttgctcaggccagtctcctgagctcgagagttccacctgccttgg

SEQ ID NO: 299213 - DNA, 201 bp, Homo sapiens
caggagaggcagcgcctcacacccagcatcctgcctctgactgcccaggggcccacaggcgtggacactgtgacagccactccctctgccccccccccccccgtcacccactaggcaggagcacttctgaccagacactgagcctgccccaggcacagagctgcccaagctggacctgcccccactcaccatccatccctc

SEQ ID NO: 299214 - DNA, 201 bp, Homo sapiens
gcaggagaggcagcgcctcacacccagcatcctgcctctgactgcccaggggcccacaggcgtggacactgtgacagccactccctctgccccccccccccccgtcacccactaggcaggagcacttctgaccagacactgagcctgccccaggcacagagctgcccaagctggacctgcccccactcaccatccatccct

SEQ ID NO: 299215 - DNA, 201 bp, Homo sapiens
ggcaggagaggcagcgcctcacacccagcatcctgcctctgactgcccaggggcccacaggcgtggacactgtgacagccactccctctgccccccccccccccgtcacccactaggcaggagcacttctgaccagacactgagcctgccccaggcacagagctgcccaagctggacctgcccccactcaccatccatccc

SEQ ID NO: 299216 - DNA, 201 bp, Homo sapiens
ttggggtaggcagagatttcttagtatggatacacaaggcactagccatgaagaaaaacattaaaatttagacttcaccaaaatttaaagcttcaactctktggaagagttgagaaaatgaaaaagcagttaaagaaagggagaaaatacttctttcaaaggacttaaaaaattttttcagccctcctctgatttgaaagg

SEQ ID NO: 299217 - DNA, 201 bp, Homo sapiens
aagcaggcactgccttctccttcacagacgcagctctgagcgggggcgagacctgggcagggaccaggtggggtgggcacagggtggtggggcccaggctyagccctccctccactgtggccgtctctgtggccagtgacgccacagcctgtgtcttctctgtgcggtagctggggctggaaggacagcactgccttgtcc

SEQ ID NO: 299218 - DNA, 201 bp, Homo sapiens
ctggtgctgcttccgtctgtgttaggcctctgggtattggggcccccatctgtctcctcctccaggcctgtggactcagaccaggaagacacaggccagcycctgcctgtcccccttggcttgggctctcactgcccgacctggcgggaggttgcctagccgtgaaccttcgcaccctgtctgccaccggacaggctgtga

SEQ ID NO: 299219 - DNA, 201 bp, Homo sapiens
ttgcgcctggtgaggccgggaggggtgccgcttgcctcttcagccctcacgctcttgtggaagtcgcggaattactgcaggcggaacttgcagcactgtgrgcgtcttttccagagaaggacggagttgtggggcgggaggataaggcaaggcccagccacttcgcatcttcgccccgccagctcctcgagatgggatata

SEQ ID NO: 299220 - DNA, 201 bp, Homo sapiens
cctgaggtgaagaaacaagagagtaaccatctacaggtaggctcctgggctcccgctccggctcagtgtccgacaggcgagtgctgctgggtgtccagagmcccaggctgcgctcccgctgggctagggtttgaagttcactgggggactgcaggggaggacctggtgggggtggggactggcttcggtcctttcttggcc

SEQ ID NO: 299221 - DNA, 201 bp, Homo sapiens
ccgggagcagctgtgcatccatcctgaggtgaagaaacaagagagtaaccatctacaggtaggctcctgggctcccgctccggctcagtgtccgacaggcragtgctgctgggtgtccagagccccaggctgcgctcccgctgggctagggtttgaagttcactgggggactgcaggggaggacctggtgggggtggggac

SEQ ID NO: 299222 - DNA, 201 bp, Homo sapiens
  misc_feature (1)...(201): n = A,T,C or G
gtgcttatcctccctggggaaggctctgggtgagtgccctgaatgccccagctgtgcccatcctggatcctggacccctgctcccaagagctggtaggganccctgcagacatcctgcccctgccttgaccccggcccctgcacttccaggcaacatcgcccgcgtggtgccctatgggctcctgatcttcttcccttcct

SEQ ID NO: 299223 - DNA, 201 bp, Homo sapiens
  misc_feature (1)...(201): n = A,T,C or G
gtaaggcggtctggtgactgagcccccgccccgtggccaagggagcccccgtgaccgagccgcctcgccccacagttcctctctgggcaggagtggtaccngcagcaggcgtccagggctgtgaaccaggccatcgggcgagtgatccggcaccgccaggactacggagctgtcttcctctgtgaccacaggtgcgtgcag

SEQ ID NO: 299224 - DNA, 201 bp, Homo sapiens
gaagctcacaacgtggtgagtctccgctggcctcctaaacacctcctattgcttctggcctttttgtcaagagccacgcaaacctttctggaggggctctsgccaaactcctgaagccctaggtgcccaggactggggactgagcacaccaggagcttctgccaccccctcccgccctgatccgatgcctctgctggggct

SEQ ID NO: 299225 - DNA, 201 bp, Homo sapiens
gagcgaactgtgagttcctgcccagggaggggatgagggtgttgtccccagaggagccagaaatgggtccacccacccccatggttctgcagatgccagcrccggccccccgggctacagcacccagtgtgcgtggagaagatgctgtcagcgaggccaagtcgcctggccccttcttctccaccaggaaagctaagagtc

SEQ ID NO: 299226 - DNA, 201 bp, Homo sapiens
  misc_feature (1)...(201): n = A,T,C or G
gccccgatggagcccagttgagctccgcgtttgacagacggtgagggcctgtccctgggccctgctggggtgggaggtgggggagcactgaggcctgaggncctgagcagtggcctctccggctctaggttttccgaggagtgcttatcctccctggggaaggctctgggtgagtgccctgaatgccccagctgtgcccat

SEQ ID NO: 299227 - DNA, 201 bp, Homo sapiens; identical to SEQ ID NO: 62138

SEQ ID NO: 299228 - DNA, 201 bp, Homo sapiens
gcctgtgtgtggagtatgagcaggagccagttcctgcccggcagaggcccagggggctgctggccgccctggagcacagcgaacagcgggcggggagcccyggcgaggagcaggtacagttccagggccttgggatggacacagaccctctgtctcctgaggccaacccgaccccgcccatctggcctcaggcacctcccc

SEQ ID NO: 299229 - DNA, 201 bp, Homo sapiens
ccctgccactggctgcgcttgaggctggcctttctccaggaatgtgctgcgggtggaacccaggttccttcttccttggggccttttgccccagaagcccrtaattcctcaggccaacccgaaattttctccctgcttcctgctgggagccattcccctcttcctgcccatccctgcccttcaggcccctggagtgagctc

SEQ ID NO: 299230 - DNA, 201 bp, Homo sapiens
acgagcgtgatgcagactgcctttgctgcctttctcttgcccagggctgaacatggagctggaagacattgcaaagctgaagagtaagtgttgccctcccygcctccttgcagctgggtggggcctcctccttgcgaggaggtgggtgacacctcctcgacccacagtgatcctgctgcgcctggagggggccatcgatgc

SEQ ID NO: 299231 - DNA, 201 bp, Homo sapiens
ctgccagcccctcgctgtggtcggactgtcttccctggacctgctcttacaagtcaccacctgcgagcctcatgagccgctggtgtgacttggacaggacmaagttgtggcactgtcaccggggtgtgctgtgcccccctcccccgacctccatcttggctcagggctccttgggaccatcttccctgtgcgtccaggtgc

SEQ ID NO: 299232 - DNA, 201 bp, Homo sapiens
gagtcggaatctgtacaggaggggcagccacacgagttccccggtttactctgaacttaggtggcttgagggccccagttagactgcggccaccgtttgcygggctccagatgggacgtcctttctatcagaaggctcacagtatctcctttcccgtttcttcccatgtgaacattgttgctgctgaacacctgaatatgt

SEQ ID NO: 299233 - DNA, 201 bp, Homo sapiens
gagccgctggtgtgacttggacaggaccaagttgtggcactgtcaccggggtgtgctgtgcccccctcccccgacctccatcttggctcagggctccttgsgaccatcttccctgtgcgtccaggtgctttgggaccccagagtgtgtggttggggtctgtgtgtggttgtgagctgtgtcctcctcaggcccacagctgc

SEQ ID NO: 299234 - DNA, 201 bp, Homo sapiens
aatgacccacaaatctggcatgcatcagctgctctgcctgtaggttccttcccagtgtttgtccagaggtgtatttccacacagcgctagtcacggcataygtggaaaacgtggaaacccttcatggatgttgtcagttggtctatattttctttcttttttttttttttgagatggagtttcacttttgttgcccaggct

SEQ ID NO: 299235 - DNA, 201 bp, Homo sapiens
gtcatttccgaggtcctcacctggatttccaggacaggagtgcctgctgggtgtccccagtcccatgcagcgggggtccttgggatagcatggaacgctgrgcatgggcctggccggccgtggtcctggacaagggcagtgccccggtggctgctgggcctgggacctggtggggacgctgggcctggtacctggtgggga

SEQ ID NO: 299236 - DNA, 201 bp, Homo sapiens
ggccaggagtttgagaccagcctgggcaacatggcggaacctcgcccctgccaaaaaattagccaggtgtggtggtgtgctcctgtggtccaagcttttcyggaggccgaagtgggaggcgtgcttgagcctgggaggcagagcttccggtgccccagatgactccactgcactccagcctgggcggcagagtgaggccat

SEQ ID NO: 299237 - DNA, 201 bp, Homo sapiens
gtgacttctgtgcttgcttgtgtctggtcagcttgctacacggacatcccaaagattatttacgcctccaggacccactcgcaactcacacaggtcatcarcgagcttcggaacacctcctaccggtgggtcagacgagtttacacctgtctcggggtcctcaagagaaccagcttggcatggtgctgagtccacagcccc

SEQ ID NO: 299238 - DNA, 201 bp, Homo sapiens
gccaagccaactttgccaccttcacccaggccctgcaggactacaagggttccgatgactttgccgccctggccgcctgtctcggccccctctttgctgasgaccccaagaagcacaacctgctccaaggtgccctggcttgcagaggccacccaccctgagggcagtgctgccgccgcgtgtggggtgggggccatctgg

SEQ ID NO: 299239 - DNA, 201 bp, Homo sapiens
atcccggggggaggccggcgcccctcacgcagttggggttgcgggaggcagtgcgtgcctgaggcagccggtgcacagattccaagggcctggaatctgtytgttccattgacctctgatgtcacttgacttctcagaagcagccactccctgcactgggcgtttgtaggaaatgagctcctggaggagggggtggggaag

SEQ ID NO: 299240 - DNA, 201 bp, Homo sapiens
ggccaagctcttcatggtggccgtgaagcaggagttgagccaagccaactttgccaccttcacccaggccctgcaggactacaagggttccgatgactttrccgccctggccgcctgtctcggccccctctttgctgaggaccccaagaagcacaacctgctccaaggtgccctggcttgcagaggccacccaccctgagg

SEQ ID NO: 299241 - DNA, 201 bp, Homo sapiens
ggtgctattccaggcatagcaagactggcttcactcacatggagctttgattctagtggtggggacaggtggacagcaaaagagtaagcacgtgagctgaygatactgaagggaaatagagcagagggaggaggcggagaccgagccaagcgggcccaagtgcgatgtcggcgggaggtggggaatgctggtgggtctgag

SEQ ID NO: 299242 - DNA, 201 bp, Homo sapiens
ccatcccaggcagcagcttcccacctgggccctacgtgcaggatgagggctccttccgggtcagaagacatggcggcctcggggcaccgtcccctgcatgrggtgctcacaggatcttctcctctctccttcccagggtgtgcccttactacctgtcccggaacctgaagcagcaagccgacatcatattcatgccgtaca

SEQ ID NO: 299243 - DNA, 201 bp, Homo sapiens
tacaacacatgtttctgtgagctcaaggctggggcaaagttacagattaacagcatcttagggcaaagcaattgttcagggtacaggtcaaaatggagtgkgttatgtcttccctttctacatagacacagtaacagtctgatctctcttttccctacagtccttgagggtgacagacttaggagtgccttgggggcctct

SEQ ID NO: 299244 - DNA, 201 bp, Homo sapiens
cggctttccgcagtgcatcgtgcccctggtttatcgagactggagaatggcgatgacttttaccaagcatactgcctgtaaacatattgttaacaaggcaygttctgcacagctctagatcccttaaaccttgattccatacaacacatgtttctgtgagctcaaggctggggcaaagttacagattaacagcatcttagg

SEQ ID NO: 299245 - DNA, 201 bp, Homo sapiens
gaaggtactatgcctggatgtgcacgtaggctagttttatgcttttctccacccaaacatctcggtggagtaaagagtaacagagcagcattgctgccaayatgtctcgcctcctgccacagggcggcttttctcctatctcagaattgaacaaatgtacaatcgggttttataccgaaacattcagttcccaggggcagg

SEQ ID NO: 299246 - DNA, 201 bp, Homo sapiens
ggtgccacaggggcaccccagctgagcccctcaccgggaaggaggagacccccgtgggcacgtgtccacttttaatcaggggacagggctctctaataaarctgctggcagtgcccaggacggtgtcttcgtggcctgggcttggtggtgggagttgagggacagggagttggcagaggcccctcccagcctgccatgtga

SEQ ID NO: 299247 - DNA, 201 bp, Homo sapiens; identical to SEQ ID NO: 62139

SEQ ID NO: 299248 - DNA, 201 bp, Homo sapiens
acacgcagttctggaactacctggagcgctgccgctactgcaacgtcctctgcggggagcgtgaggaggaggcacgggcttgccacgccacccacaaccgygcctgccgctgccgcaccggcttcttcgcgcacgctggtttctgcttggagcacgcatcgtgtccacctggtgccggcgtgattgccccgggtgagagct

SEQ ID NO: 299249 - DNA, 201 bp, Homo sapiens
atttgaggggtcaggggtccctccactagatccccaccaagtctgccctctcaggggtggctgagaatttggatctgagccagggcacagcctcccctggrgagctctgggaaagtgggcagcaatctcctaactgcccgaggggaaggtggctggctcctctgacacggggaaaccgaggcctgatggtaactctcctaa

SEQ ID NO: 299250 - DNA, 201 bp, Homo sapiens
ggaggagcgtctcccggtatggcgaactgctggttagggtggggcggtgttgccaggtcatccaggtctggcctctgctctcgacatcgccggcgctgttkctcatctgcgcttgtgatgttcgatgcctgctgcacatgtcttggcttccctctttcccggcctctgtgagctccagcgctgcgtcccttctcttcctcc

SEQ ID NO: 299251 - DNA, 201 bp, Homo sapiens
ggatctgagccagggcacagcctcccctggggagctctgggaaagtgggcagcaatctcctaactgcccgaggggaaggtggctggctcctctgacacggrgaaaccgaggcctgatggtaactctcctaactgcctgagaggaaggtggctgcctcctctgacatggggaaaccgaggcccaatgttaaccactgttgag

SEQ ID NO: 299252 - DNA, 201 bp, Homo sapiens
cggtccatctgcaggtcccaactcgccccttccgatggcccaggagccccaagcccttgcctgggcccccttgcctcttgcagccaaggtccgagtggccrctcctgccccctaggcctttgctccagctctctgaccgaaggctcctgccccttctccagtccccatcgttgcactgccctctccagcacggctcactgc

SEQ ID NO: 299253 - DNA, 201 bp, Homo sapiens
aagctcacaacgtggtgagtctccgctggcctcctaaacacctcctattgcttctggcctttttgtcaagagccacgcaaacctttctggaggggctctgkccaaactcctgaagccctaggtgcccaggactggggactgagcacaccaggagcttctgccaccccctcccgccctgatccgatgcctctgctggggctg

SEQ ID NO: 299254 - DNA, 201 bp, Homo sapiens
gaggcggcttcttttcctcggtgctgttctcgtgctggccaggcctcctctccccacctggaggctcctgagggcggaggcctctcacctccaatgctggygtcccctggagggctgaatttgtttccgagggaaggaaacttccacagttgttgccttcagttccaaagctgcagcctgatttccccctccaggctcgag

SEQ ID NO: 299255 - DNA, 201 bp, Homo sapiens
ccagccccacagctttcttcccgcagcccctccctatgtccatccagccagccagtttctcaggcagcagccccacctcggcagtcactgtcccagggaaygctcaatgttccaaggaaggctctgcagccccagggaccagatgatgaggctggccctgatggagcctcgggcctgtgtcctgcaggaggagcccgtggc

SEQ ID NO: 299256 - DNA, 201 bp, Homo sapiens
aggacctttgaccagagtatgtaaaattctcccataactaagcaaacaacccacttaaccactgggaagggatctggacagacgtttcaccaagatgggtrgaatggccagttaaccactgggagagcatccggacagacgtttcgccaagatgggtggaatggccagttaaccactgggagagcatccggacagacgttt

SEQ ID NO: 299257 - DNA, 201 bp, Homo sapiens
aatggccagttaaccactgggagagcatccggacagacgtttcgccaagatgggtggaatggccagttaaccactgggagagcatccggacagacgtttcrccaaggtggatggaatgaccagttgagcacatggaaagtcgcccagcatctccagtcataggagaaggcagattaaagccacggggagccgacactgtgg

SEQ ID NO: 299258 - DNA, 201 bp, Homo sapiens
ttcctggaggaagggcgggcagggcggtgggactctcagtcctccaccccagcgccactctgagccatgctactcccacaccaggagaccctggcagccamccacagtgggggtctggagtgcccagagcagggaagcagggccagcacgccgtgagcgcctacctggctgatgcccgcagggccctggggtccgcgggct

SEQ ID NO: 299259 - DNA, 201 bp, Homo sapiens
agacagcgggtgtgaggcggggggtctcggtccccaaagcccccgcaggtgcagcccccactcaccctgtgagggccgagcaggcctgggtcaggcaatckcgcctgccgatcttgctggtgcagtcgctgaaggccgtcttgatgtcagggattgagaggcacgtctgggggaggtaaggccgtgaggagcagcccccac

SEQ ID NO: 299260 - DNA, 201 bp, Homo sapiens
aagcccccgcaggtgcagcccccactcaccctgtgagggccgagcaggcctgggtcaggcaatcgcgcctgccgatcttgctggtgcagtcgctgaaggcygtcttgatgtcagggattgagaggcacgtctgggggaggtaaggccgtgaggagcagcccccacgtctggccctgtcctgcctgtgggcccgggactctc

SEQ ID NO: 299261 - DNA, 201 bp, Homo sapiens
ccaccctgagggcagtgctgccgccgcgtgtggggtgggggccatctgggtccaaggtggtctctgttctctagagaaaaaggggcagatggggacagacrccccttcctctacaggcttctaccagtttgtgcggccccaccataagcagcagtttgaggaggtctgtatccagctgacaggacgaggctgtggctatcg

SEQ ID NO: 299262 - DNA, 201 bp, Homo sapiens
ctgtctcggccccctctttgctgaggaccccaagaagcacaacctgctccaaggtgccctggcttgcagaggccacccaccctgagggcagtgctgccgcygcgtgtggggtgggggccatctgggtccaaggtggtctctgttctctagagaaaaaggggcagatggggacagacgccccttcctctacaggcttctacc

SEQ ID NO: 299263 - DNA, 201 bp, Homo sapiens
gcctcgccccacagttcctctctgggcaggagtggtaccggcagcaggcgtccagggctgtgaaccaggccatcgggcgagtgatccggcaccgccaggaytacggagctgtcttcctctgtgaccacaggtgcgtgcagtccggtggcaggcgcggcgccaggggacacgcccacaccccactgggcccctggactctcc

SEQ ID NO: 299264 - DNA, 201 bp, Homo sapiens
gatcatccagcacctggcaggacgtgagtgctggcacggggtctttggtgcgggcaaatgtggcgtagggggtgcagcaggcctccatcttggcagtcagrgctcccctggccgtcacctggccgtcagcaggaacaggcccacagaacctcatcttctgatcggggcgtggaggcgttagtgccacttgccagctgccgt

SEQ ID NO: 299265 - DNA, 201 bp, Homo sapiens
aaagctgcagcctgatttccccctccaggctcgagcctgttttcttctcggcagctacatctttgaccagtgtcgtcccccctcaggcccgagcctgcctycttctcctcagttcccaaagctgcagtctggtccccccgccaggctcgagcctgccttcttctcctcggcagctacatctttgagctgtttgctgaagcc

SEQ ID NO: 299266 - DNA, 201 bp, Homo sapiens
  misc_feature (1)...(201): n = A,T,C or G
caaagctgcagcctgatttccccctccaggctcgagcctgttttcttctcggcagctacatctttgaccagtgtcgtcccccctcaggcccgagcctgccntcttctcctcagttcccaaagctgcagtctggtccccccgccaggctcgagcctgccttcttctcctcggcagctacatctttgagctgtttgctgaagc

SEQ ID NO: 299267 - DNA, 201 bp, Homo sapiens
cagacgtgtgcagtgggccggttgtctcacaggcctctaggatgtgcccagcctgccacaccgcctccaggaagcagagcgtcatgcaggtcttctggccrgagccccagtgagtgcccacggaggcccccagcacacccaacgtggcttgatcacctgcctgtccagctctggtgggccaagaacccacccaacagaata

SEQ ID NO: 299268 - DNA, 201 bp, Homo sapiens
accagttcccctgaccctgttcttccctcctggctgcaggcacccccagccagaacacgcagtgccagccgtgccccccaggcaccttctcagccagcagytccagctcagagcagtgccagccccaccgcaactgcacggccctgggcctggccctcaatgtgccaggctcttcctcccatgacacgctgtgcaccagct

SEQ ID NO: 299269 - DNA, 201 bp, Homo sapiens
tctcagccagcagctccagctcagagcagtgccagccccaccgcaactgcacggccctgggcctggccctcaatgtgccaggctcttcctcccatgacacsctgtgcaccagctgcactggcttccccctcagcaccagggtaccaggtgagccagaggcctgagggggcagcacactgcaggccaggcccacttgtgccc

SEQ ID NO: 299270 - DNA, 201 bp, Homo sapiens
ggtgtctgggtgcacacctactccccttgctgtgggggaggctggggactcgggaagctgctgcgggaggcaggggtggggctcacctccacatcctgctygttggccagcaccaagacggggacaccgcacagcgcctcgctggtcaccaccttctctggggagggcaggagaggcagcgcctcacacccagcatcctgc

SEQ ID NO: 299271 - DNA, 201 bp, Homo sapiens
agctgcccaagctggacctgcccccactcaccatccatccctcccagagcagccaggccgcactcaccaaacgcctgcttggactcagccagcctctcctygtcggtggagtcaatgacgtagatgacgccgtgacactccgcataatactgggaggaagcaccaggagttggggctcagtccccaccctgccaagggcca

SEQ ID NO: 299272 - DNA, 201 bp, Homo sapiens
gggccaagctcttcatggtggccgtgaagcaggagttgagccaagccaactttgccaccttcacccaggccctgcaggactacaagggttccgatgacttygccgccctggccgcctgtctcggccccctctttgctgaggaccccaagaagcacaacctgctccaaggtgccctggcttgcagaggccacccaccctgag

SEQ ID NO: 299273 - DNA, 201 bp, Homo sapiens
tccgatgactttgccgccctggccgcctgtctcggccccctctttgctgaggaccccaagaagcacaacctgctccaaggtgccctggcttgcagaggccmcccaccctgagggcagtgctgccgccgcgtgtggggtgggggccatctgggtccaaggtggtctctgttctctagagaaaaaggggcagatggggacaga

SEQ ID NO: 299274 - DNA, 201 bp, Homo sapiens
atctgcaaagagctgcccgctggctgccgaagcttgtctcagggcagcttgtgtggcctcgcctcttcctggcttccccgtaacccttgctccgaactccrttcagaaggtgaatggcatcctggagagccctacgggtacagggaagacgctgtgcctgctgtgcaccacgctggcctggcgagaacacctccgagacgg

SEQ ID NO: 299275 - DNA, 201 bp, Homo sapiens
aatggcatcctggagagccctacgggtacagggaagacgctgtgcctgctgtgcaccacgctggcctggcgagaacacctccgagacggcatctctgccckcaagattgccgagagggcgcaaggagagcttttcccggatcgggccttgtcatcctggggcaacgctgctgctgctgctggagaccccataggtgaccct

SEQ ID NO: 299276 - DNA, 201 bp, Homo sapiens
aggctttgggaacttggctgtcagcctcctgtgccttctgcacccccaccccatttctgctttctggaacccccgatcctgtcctgttctgtggtgattcrggtgtgcttgggctctaggagaagatgtgtgaagaatcggcatcctttgacctgactccccatgacctggcttcaggactggacgtcatagaccaggtgc

SEQ ID NO: 299277 - DNA, 201 bp, Homo sapiens
cagatgctctcgaccagctttgtggctctacatctcttcatcaggaagaacggcgccggatcccaagctgaccgtgtccacggctgcagcccagcagctgracccccaagagcacctgaaccagggcaggccccacctgtcgcccaggccacccccaacaggtagctgactcctgaaccgtgtgcagcctacgacttggtg

SEQ ID NO: 299278 - DNA, 201 bp, Homo sapiens
ccacgcaaacctttctggaggggctctggccaaactcctgaagccctaggtgcccaggactggggactgagcacaccaggagcttctgccaccccctcccrccctgatccgatgcctctgctggggctggagactggccagctgggccagggacctgcccgtcaggcgcagggcccccacaggccgctcaccagacccttt

SEQ ID NO: 299279 - DNA, 201 bp, Homo sapiens; identical to SEQ ID NO: 62122

SEQ ID NO: 299280 - DNA, 201 bp, Homo sapiens; identical to SEQ ID NO: 62125

SEQ ID NO: 299281 - DNA, 201 bp, Homo sapiens; identical to SEQ ID NO: 62127

SEQ ID NO: 299282 - DNA, 201 bp, Homo sapiens
ccaccaggccatggtgtgaagtcccggccagcctggccccacatggcacagcatagccagttctcctccagggctccctgctgggccaaccacagctctgyggatcctgctgcctgagtcgacctctcctctcccgtcctccctgccttcctggtgccgacccccagtgtgcatcctgtacctcgacctgtctcagcatct

SEQ ID NO: 299283 - DNA, 201 bp, Homo sapiens
agtgttgccctccccgcctccttgcagctgggtggggcctcctccttgcgaggaggtgggtgacacctcctcgacccacagtgatcctgctgcgcctggarggggccatcgatgctgttgagctgcctggagacgacagcggtgtcaccaagccagggaggtgagaggcggggagccagccccttcactgcaggcccagcc

SEQ ID NO: 299284 - DNA, 201 bp, Homo sapiens
atcgggttttataccgaaacattcagttcccaggggcaggcaggagacagtggccttcctctatctcgactgcaagaggctttcctcttttactaatcctsagcacagacccttcacgggtgttgggctgggggactgtcaggtctttcccatcccacgaggccatatttcagactatcacatggagagaaaccttgggca

SEQ ID NO: 299285 - DNA, 201 bp, Homo sapiens
  misc_feature (1)...(201): n = A,T,C or G
gaggcttagagaagttgagtgatttgctgagggctgcacgggttggcatcccggcatgctctttcgctactttggctgcatctggttgcccacccgggcgnatggggaatggactccagccagccaggagggcagagggctggagaggcagggccggaggttcagaccctccgctctgacgttgcgcctggtgaggccggg

SEQ ID NO: 299286 - DNA, 201 bp, Homo sapiens
atgctggtcaccggaggacggctcagcggtctgatgcctggagcaccactgcagccagaaagcgaggtacagacctgggcccacacgctccccgcccgccygggtgcagtgcccggcaccaccatgccacaggctaggcacatgcccagccgtggatctcctgcccccatgggcctggccaccttctccatatccaggcca

SEQ ID NO: 299287 - DNA, 201 bp, Homo sapiens; identical to SEQ ID NO: 62134

SEQ ID NO: 299288 - DNA, 201 bp, Homo sapiens
gggccttacagtcctataaggtgggggccacctccaggaggcaggtggggctgggggtcttctggtcctaaaaggtaaggggctgcccccaggacatgggyggggcctccacactcctggtcctgtcccctccaggtgcacatccatcctgatgctggtcaccggaggacggctcagcggtctgatgcctggagcaccact

SEQ ID NO: 299289 - DNA, 201 bp, Homo sapiens
gcacttcctctgcctttcagattgtgttcagtgtggacccctccgagggcagccctggttccccagcagggctgggggccttacagtcctataaggtaggkgccacctccaggaggcaggtggagggcagcccttgttccccggcagggctgggggccttacagtcctataaggtgggggccacctccaggaggcaggtgg

SEQ ID NO: 299290 - DNA, 201 bp, Homo sapiens
ttggcctggggctgcatgatggcaggggccggtgaaccgatgacccctgggtgtcctgtgaccttctgtgtatgcggctgatgctgcagaaagtcgggtgkcctcaggctcctgacggggctgcacttcctctgcctttcagattgtgttcagtgtggacccctccgagggcagccctggttccccagcagggctgggggc

SEQ ID NO: 299291 - DNA, 201 bp, Homo sapiens
tgaccggccggccctacccgggcatggagccaccgggaccccaggaggagaggcttgccgtgcctcctgtgcttacccacagggctccccaaccaggtagkgcacctgcctggctgctcctggcagcgccccaaccgcacgcagccctgggagtgagcagcaaagccccaggcccccctcagactcaagtctctgtctcca

SEQ ID NO: 299292 - DNA, 201 bp, Homo sapiens
tctgattgaagctccccgcagggttcagcatgtttgtgcgtccacaccacaagcagcgcttctcacagacgtgcacagacctgaccggccggccctacccrggcatggagccaccgggaccccaggaggagaggcttgccgtgcctcctgtgcttacccacagggctccccaaccaggtagggcacctgcctggctgctcc

SEQ ID NO: 299293 - DNA, 201 bp, Homo sapiens
gctccccaaccaggtagggcacctgcctggctgctcctggcagcgccccaaccgcacgcagccctgggagtgagcagcaaagccccaggcccccctcagastcaagtctctgtctccaggcccctcacggtccgagaagaccgggaagacccagagcaagatctcgtccttccttagacagaggccagcagggactgtggg

SEQ ID NO: 299294 - DNA, 201 bp, Homo sapiens
ccaccacctcttttggactccgggaggcctggaacgttctgaacgctccgtggggctccagtcttctccgcagccagggcagcagggtttgctgtctgtcytgcaggcagatgaggagtcagggctggggcctgtgtgggggctctcctgagcgcacagccgccgaggtggagcgtgttctgcctgagcgccgacctggtc

SEQ ID NO: 299295 - DNA, 201 bp, Homo sapiens
cctagagctagaaacgggccatggtgcagtcctgggctgtcacatcacgagtgaggcctgttttcaggcctgttttccctttttgagacctgggaggagcrcctgctttgcatgatctggttgctgagatgttgagaggagcagcacacactcccacgggacagcacacagccccccacggaacggcacacacacccatgg

SEQ ID NO: 299296 - DNA, 201 bp, Homo sapiens
ctaggccatgttgaatttctagattaatttggggccctcaggggcacagagaggagggctgggccagttggcgggaggagaggcccctcgggctgccgcaktttcagtgcatggagatggcctatgttgggggaacacagagctcaccgggggtccctgcagggaggagaaagggtcaggcaggtgccagctcctgtccat

SEQ ID NO: 299297 - DNA, 201 bp, Homo sapiens
caacctcccaagtagctgggaccacaggcacatgccaccatgcccggctaggtttttttttttttttttttggtgaacaccctggggttgcaccatgttgyccaggctggtctcgaactcctgggttcgggcagtttgctcctctcagcctcccggagtgctgggattacaggcctgagccactgcactaggccatgttga

SEQ ID NO: 299298 - DNA, 201 bp, Homo sapiens
gtgtacctgcctgggttttcccgccctggtctgaggtgggtgaggcctggcctccctagccagccctgcccccccaccccagggaactttccagatgctcycgaccagctttgtggctctacatctcttcatcaggaagaacggcgccggatcccaagctgaccgtgtccacggctgcagcccagcagctggacccccaag

SEQ ID NO: 299299 - DNA, 201 bp, Homo sapiens
gggaacgctcaatgttccaaggaaggctctgcagccccagggaccagatgatgaggctggccctgatggagcctcgggcctgtgtcctgcaggaggagccygtggctggtgcacagacggacagggccaagctcttcatggtggccgtgaagcaggagttgagccaagccaactttgccaccttcacccaggccctgcagg

SEQ ID NO: 299300 - DNA, 201 bp, Homo sapiens
ctccagtcttctccgcagccagggcagcagggtttgctgtctgtcctgcaggcagatgaggagtcagggctggggcctgtgtgggggctctcctgagcgcrcagccgccgaggtggagcgtgttctgcctgagcgccgacctggtcgggggaatcccagttgcttccaggtggagccactgtcctcagcgtaatgctcaag

SEQ ID NO: 299301 - DNA, 201 bp, Homo sapiens
ctaggtgcccaggactggggactgagcacaccaggagcttctgccaccccctcccgccctgatccgatgcctctgctggggctggagactggccagctggsccagggacctgcccgtcaggcgcagggcccccacaggccgctcaccagaccctttccctccagccagctcggggtcagcctgggccagggctgtctcctc

SEQ ID NO: 299302 - DNA, 201 bp, Homo sapiens
cagagtcttactgtctttcccaggtctgtgccatagggattctcgaagagaacagcgttgtgtcccagtgcacatgctcgcatcgcttaccaggagtgccygagaccctaagatgttcggagtggttttttcgcccagacccgaatagcctgcccctcagccacgctctgtgcccttctgagaacaggctgatatgcccaa

SEQ ID NO: 299303 - DNA, 201 bp, Homo sapiens
agtccacagccccatgctgtgctgtggtggagggtggtggtctttctagacgctcccccgaagtgtgcagagcgctggtgcccaggggtggggtgcggccygggctgcctccaatgcccattacttgtgaggaagcagctttgcatctgtgtgctgaccttgggcgggcgtcctgagctcctcgcaggtgctgttgtagca

SEQ ID NO: 299304 - DNA, 201 bp, Homo sapiens
ttgtgtctgggcctccatgccttctgacgtcacctgtgggggtgtgaaaggcagactctaccttgatttttcccagcacgccacaccggtggttctgtgckctgaccgagcggctcggcttcccccaactccactgggcacctgccacacttttcctcatgtttttgttcactgtggttttgtcgtaagtcctggtgttgg

SEQ ID NO: 299305 - DNA, 201 bp, Homo sapiens
agagagtaaccatctacaggtaggctcctgggctcccgctccggctcagtgtccgacaggcgagtgctgctgggtgtccagagccccaggctgcgctcccrctgggctagggtttgaagttcactgggggactgcaggggaggacctggtgggggtggggactggcttcggtcctttcttggccgtgcttcagctgcgcac

SEQ ID NO: 299306 - DNA, 201 bp, Homo sapiens
ccaagtctccaagaagccctgctttcttttcctgcaagacggtatttcaagacccgccatgcggcagcgggttggtcatggttactgggttggtcgttgtkactgggtgttttcgtggagatacagccatacgcacaggtgtgttcacaaatgttaattctaaaggtcaaacacccggccaggcataagggctcagcggta

SEQ ID NO: 299307 - DNA, 201 bp, Homo sapiens
tttgtgtctgggcctccatgccttctgacgtcacctgtgggggtgtgaaaggcagactctaccttgatttttcccagcacgccacaccggtggttctgtgygctgaccgagcggctcggcttcccccaactccactgggcacctgccacacttttcctcatgtttttgttcactgtggttttgtcgtaagtcctggtgttg

SEQ ID NO: 299308 - DNA, 201 bp, Homo sapiens
ctcccgctccggctcagtgtccgacaggcgagtgctgctgggtgtccagagccccaggctgcgctcccgctgggctagggtttgaagttcactgggggacygcaggggaggacctggtgggggtggggactggcttcggtcctttcttggccgtgcttcagctgcgcactctgcccttcctcccacagatccacttgtgcc

SEQ ID NO: 299309 - DNA, 201 bp, Homo sapiens
aggatttttcacactcatgtcctgctccagacctggaatcagccaagtctccaagaagccctgctttcttttcctgcaagacggtatttcaagacccgccrtgcggcagcgggttggtcatggttactgggttggtcgttgttactgggtgttttcgtggagatacagccatacgcacaggtgtgttcacaaatgttaatt

SEQ ID NO: 299310 - DNA, 201 bp, Homo sapiens
gcaggcaggatgggagtttcctggccacaagagttggaggtggcgtctgggagctgtggaccccaagtggggtcctgacccacagatggagcttcctcccmcccctggttggggacggagcctcggggaaggtggctgggctgggtgtgggcaccagggagaggagcccccacggccccaggcagctccctggtgtgtccc

SEQ ID NO: 299311 - DNA, 201 bp, Homo sapiens
tttctgcactcacgtttgctgagtgctcagtgtgccaggactgaggaccctgaagctgctcttgtatttagggcggcgctcccctggcagagactgagccrggtggtcccgcatgacccactaccaggcgtttctgggccctggcccttggagggacagggtgggcggaacatgggcctgcagggaggctcccgcttactg

SEQ ID NO: 299312 - DNA, 201 bp, Homo sapiens
  misc_feature (1)...(201): n = A,T,C or G
ctgggctcccgggagcagctgtgcatccatcctgaggtgaagaaacaagagagtaaccatctacaggtaggctcctgggctcccgctccggctcagtgtcngacaggcgagtgctgctgggtgtccagagccccaggctgcgctcccgctgggctagggtttgaagttcactgggggactgcaggggaggacctggtgggg

SEQ ID NO: 299313 - DNA, 201 bp, Homo sapiens
ggagacatcctctgtgttgcttcttgttcgctgtggtttttggtctggtggcaccaaggaccctcagtcatcttgatgtgtggttgtccaggcctttttgwtggtcctaagaaggggctctgcctttgtgcccccaggttccctgacaggagctgccggctcgtcccggtgatgcctgcaggacgtgactctgggacgggg

SEQ ID NO: 299314 - DNA, 201 bp, Homo sapiens
aagttctgggcctgttgtggttggcagggaagctgagtgacggtgctaatcacaggggcacctgcaggggtttgtgggagatgcctctgtgggttggggcrataggctgaggggctgttcttccctgccctgaggagggctgagtgtagccgccactcctgtcctgtcttgggctgtctcggagaggatgcgtagaaccct

SEQ ID NO: 299315 - DNA, 201 bp, Homo sapiens
tgcctcagcctcccgagtagctgggactacaggtgcccgccaccacgtctggctaattttctgtatttttagtagagacggggtttcaccgtgttagccargatggtctcgatcttctgaccttgtgatccgcccacctcggcctcccaaagtgctgggattacaggagtgagccaccgcgcccggcccagctctgctttt

SEQ ID NO: 299316 - DNA, 201 bp, Homo sapiens
agtctcgctctgtggtgcaggctggagtgcagtggtgtggtcttggctcactgcagcttccgcctcttgggttcaaacagttctcctgcctcagccttccragtagctgggactacaggcacccgccaccacacccggctaatttttgtattttcagtagagacggcagttcgccatgttggccaggctggtcccaaactc

SEQ ID NO: 299317 - DNA, 201 bp, Homo sapiens
aggtcctgagcagtggcctctccggctctaggttttccgaggagtgcttatcctccctggggaaggctctgggtgagtgccctgaatgccccagctgtgcscatcctggatcctggacccctgctcccaagagctggtagggaaccctgcagacatcctgcccctgccttgaccccggcccctgcacttccaggcaacatc

SEQ ID NO: 299318 - DNA, 201 bp, Homo sapiens
actacaggcacccgccaccacacccggctaatttttgtattttcagtagagacggcagttcgccatgttggccaggctggtcccaaactcctgaccttgtsatccactcactttggcctcccaaagtgctgaggttgcaggcatgaaccaccgcacccggctggacctactgttttattccatttatgtgacactctatta

SEQ ID NO: 299319 - DNA, 201 bp, Homo sapiens; identical to SEQ ID NO: 62142

SEQ ID NO: 299320 - DNA, 201 bp, Homo sapiens
ccatgctgtggaggagcgtctcccggtatggcgaactgctggttagggtggggcggtgttgccaggtcatccaggtctggcctctgctctcgacatcgccrgcgctgttgctcatctgcgcttgtgatgttcgatgcctgctgcacatgtcttggcttccctctttcccggcctctgtgagctccagcgctgcgtcccttc

SEQ ID NO: 299321 - DNA, 201 bp, Homo sapiens
ctggtgggtgcttatggctccccagcagactctgggccctgggggctgcccggtcccctccttgggtcccacgagagcgactgctggccctgctgggagcstgtcctgctctgggcctgggcaggcaggatgggagtttcctggccacaagagttggaggtggcgtctgggagctgtggaccccaagtggggtcctgaccc

SEQ ID NO: 299322 - DNA, 201 bp, Homo sapiens
  misc_feature (1)...(201): n = A,T,C or G
ggaaacttccacagttgttgccttcagttccaaagctgcagcctgatttccccctccaggctcgagcctgttttcttctcggcagctacatctttgaccantgtcgtcccccctcaggcccgagcctgccttcttctcctcagttcccaaagctgcagtctggtccccccgccaggctcgagcctgccttcttctcctcgg

SEQ ID NO: 299323 - DNA, 201 bp, Homo sapiens
ccctccccaccgtgagcggcccctccctgccgtgggctgctgtggccgagagcagccccgtggaggggcatgttggggaccacgtggcctgcagcgaggcracgtgattccagggtggggcctggtggttccattcacagctgcgtgcctgggctcctccgtccctcgcctggccagcacagtgctggcttccccaggcct

SEQ ID NO: 299324 - DNA, 201 bp, Homo sapiens
accttttccgcatcatcccaggcattggtgaggctgcccgggcccttcagccgcacatgagggcagggtgggtggccctgggaggccccaccacactggaccccccccccctttttccagggaactttggcgaccgctactttgggacagacgcggtccccgatggcagtgacgaggaggaagtggcctacacgggttagc

SEQ ID NO: 299325 - DNA, 201 bp, Homo sapiens; identical to SEQ ID NO: 62367

SEQ ID NO: 299326 - DNA, 201 bp, Homo sapiens
agaggcatggaagaatgaagtgaaggagaaaggccacgtcaactgtcccaacgacgtgagcggaggcagccgggtggggggcgtggggagccatacagggmcagagcctgggtgtggccctctgagcaggaacagaggctgagagctttcaggaggtgcccaagcccaccccaggcctcacatgcccagcctgcccagtcc

SEQ ID NO: 299327 - DNA, 201 bp, Homo sapiens
gctgcccctcccagggctccatggccagtcacggccccctgcccacttgaggttgtaaactgacggagaagttggcaggcgcctgagtgccggtccagcaygtgcagtgcatgtagatgccacacagcctaggcctgtgtcttcctcccgttgatttcccccttgcagactttaggggctcccccttaccctgggcaggct

SEQ ID NO: 299328 - DNA, 201 bp, Homo sapiens
aggtgggcagctctgggccacatccgagtacatccctctctgcagcagcaatgcagagtccctggacaggctcctgccacctgtgggcactgggcgctctycccggaagcggaccaccagccagtgcaagtcagagcctcccctgctgcgtacaagcaagcgtaccatctacaccgccgggcggccgccctggtacaatga

SEQ ID NO: 299329 - DNA, 201 bp, Homo sapiens
ctgggtttcttcacagaaaacactgtatggtgcaaacgtcatcatctttgagggcatcatggcctttgctgacaagacactgttggaggtaagcacccgcygggaatacccaccccgctggtatctcagccctggccgccctgtccatgaggtgtgcgtcctcctgccctgtccccaaggcctccacactgtataggccta

SEQ ID NO: 299330 - DNA, 201 bp, Homo sapiens
catccggcacatagcagcccccagcctccacaaggcctcttcacgggccaactactgtgtgctgagcatggggacagaccctaaactcgccacgtcccccrttccccagtgtgttggtgcaagttaccccaagcaaagtaaggagatcacatgtgcccagccccattcctgcctgattccttagccagccaccatgccatg

SEQ ID NO: 299331 - DNA, 201 bp, Homo sapiens
ggggcaggactatgcgggcaagtgctatgcggggaagcaggtacctgcctgggcacacctgggcgcgggacaggctgctggggcgggatgtgggcgcttakcctcccctccccgcagatcaccggtgtgtccattctgcgcgccggtgaaaccatggagcccgcgctgcgcgctgtgtgcaaagacgtgcgcatcggcacc

SEQ ID NO: 299332 - DNA, 201 bp, Homo sapiens
cttcgaccagtacatccagcccaccatgcgcctggcagacatcgtggtccccagaggtgagcctgctgggctgcctgttgggtgggtgtcgggcaggccarcggcccagcccccggtcacccgcccccccatcccgccccagggagcggcaacacggtggccatcgacctgattgtgcagcacgtgcacagccagctggag

SEQ ID NO: 299333 - DNA, 201 bp, Homo sapiens
ttccagcttgcttttctcccctgaccatgctctgaggatgccgttccctgtccgcacctgtgttctgtgtcgttttcgggcgtaactggcatctgtggagygttccatttcctgtggaactccggagcgcggtggacagactgtgccgctgcaggaagctacaaagaggcggtcctgccgtttgcggagctttccctcttg

SEQ ID NO: 299334 - DNA, 201 bp, Homo sapiens
attacaggcatgagccaccacgcccagcccaggcagagttcttatgtacccccaatgagcctgcccgcctcagccatgcctgttgagggggtggggggggrtgccctgtgggccggccatgccagcgggtacctgggaggtgggcagctctgggccacatccgagtacatccctctctgcagcagcaatgcagagtccctg

SEQ ID NO: 299335 - DNA, 201 bp, Homo sapiens
cctcagcctccctagtagctgggattacaggcacccaccaccgcacccaggtaattttttttttttaatttttagtagagacgggtcttcaccatgttggycaggctggtctcaaactcctgacctcaaatgatccacctgcctcggcctcccaaagtactgggattacaggcatgagccaccacgcccagcccaggcaga

SEQ ID NO: 299336 - DNA, 201 bp, Homo sapiens
gctcggtgcagactcagcctgacgccgtcacaggcctgcggtgaggcgggcttctggcagatcgtcctggcctgcttgtgaccgttccgctgcatgggcaycactcccagcagaagggccagcgcctggctgtcagcagcgtgtgcctcaggagggatctgcggtgacggggttgttacttcagtaggatgaggaagagtc

SEQ ID NO: 299337 - DNA, 201 bp, Homo sapiens
ggtcccattccagctgcagcccccgcatgcggtctcggggaagtgccgtggcacctgctcccccttcagggcaccgtgcagtggtgctgtcccccgggccsccctcgcctggtcgtcttggcgcctggccttgttgtttgtgctcagccctgctgctgacgtcaccactcagctccagaacgatctccggagccgaggtga

SEQ ID NO: 299338 - DNA, 201 bp, Homo sapiens
tagctcaagggggccttcaggacacagctgagtgtgactcaggttggcctgatcccagggcccaggtcctgccccttgtacaggcccagaggactccatcrtccggcacatagcagcccccagcctccacaaggcctcttcacgggccaactactgtgtgctgagcatggggacagaccctaaactcgccacgtcccccgt

SEQ ID NO: 299339 - DNA, 201 bp, Homo sapiens
gagtgcccgagccttcctttctccctgtgtgctctctcccgtggctgtttcctcagtgtcggtttcacatgccctgcgctccctgctgctggacgtttgcytctggtttccttggcattgtggatggttcgtgaggggcagccctgcctccaggtctccacacatgcctgtgcttatttttcttcctttcttttttttttg

SEQ ID NO: 299340 - DNA, 201 bp, Homo sapiens
gcaccgtgcagtggtgctgtcccccgggccgccctcgcctggtcgtcttggcgcctggccttgttgtttgtgctcagccctgctgctgacgtcaccactcwgctccagaacgatctccggagccgaggtgaggctgagtgaggctgcctggctgattattccccgtgctcactcccctgatggtggcatggaaacaggcag

SEQ ID NO: 299341 - DNA, 201 bp, Homo sapiens
aaagtaaggagatcacatgtgcccagccccattcctgcctgattccttagccagccaccatgccatgcctcttcacctaagcccctgacgggcagcaccgyatccccagacacccccacctccccactccttcccacctgccagggtgccctggggaagtggctcgggccaggcccacggaccaggtgcagacacccccac

SEQ ID NO: 299342 - DNA, 201 bp, Homo sapiens
caggctatgcctggctcaggtgctcagcatccagtcccaggtcttcatcagcgcttttctctccccagaactggttccgaacatcagcagacccacctccyaaacacaggagccaggactcattggtgcccaagaaggaaaagaagaaaaatctggcaggtggaaagaagcggggccgaaagcccaaggagcggaccccag

SEQ ID NO: 299343 - DNA, 201 bp, Homo sapiens
tcgaccacccagatgcctttgacttcgacctcatcatttccaccctcaagaagctgaagcaggggaagagtgtcaaggtgcccatttatgacttcaccacrcacagccggaagaaggactgggtaggccagggccctgcagagggggcctcggggggctgcaggcacatgagccaggctccgcaactcctgggtttcttca

SEQ ID NO: 299344 - DNA, 201 bp, Homo sapiens
gtgcagtggcacgatagctcattgcaatctccacctcccgggttcaagccattctcctgcctcagcctccctagtagctgggattacaggcacccaccacygcacccaggtaattttttttttttaatttttagtagagacgggtcttcaccatgttggccaggctggtctcaaactcctgacctcaaatgatccacctgc

SEQ ID NO: 299345 - DNA, 201 bp, Homo sapiens
tgcagtggcacgatagctcattgcaatctccacctcccgggttcaagccattctcctgcctcagcctccctagtagctgggattacaggcacccaccaccrcacccaggtaattttttttttttaatttttagtagagacgggtcttcaccatgttggccaggctggtctcaaactcctgacctcaaatgatccacctgcc

SEQ ID NO: 299346 - DNA, 201 bp, Homo sapiens
cgcctccacccacacgccgccctcacgtctccttgggcacccagccttcagcatggcagcgatttggctgcccagagagtgtgccgggttgcaagggaacrtggtccattttggggtctcacctgcctttcacaggcccaccttgagtcccctaggggacagagcctggcccagccagtgcctgtccacacagcaggatga

SEQ ID NO: 299347 - DNA, 201 bp, Homo sapiens
cccagctaattttttgtatttttagtagagacggggtttcaccatgttggccaggctggtcttgaactcctgacctcagatgatctgcccgctcagcctcygaaagtgctgggattacaggcgtgagccactgcacccggctgcctgtgtgtatttcttttgttttgttttgttttgtttttgagatggagttttgctctt

SEQ ID NO: 299348 - DNA, 201 bp, Homo sapiens
actgtgtgctgagcatggggacagaccctaaactcgccacgtcccccgttccccagtgtgttggtgcaagttaccccaagcaaagtaaggagatcacatgygcccagccccattcctgcctgattccttagccagccaccatgccatgcctcttcacctaagcccctgacgggcagcaccgcatccccagacacccccacc

SEQ ID NO: 299349 - DNA, 201 bp, Homo sapiens
tcccacctctttcttgcctccaccccgcccttttcctgcccgctcctagacctgctgctgccccggccatccccaggcttgggcagcggggcgggacgggrcagccaagagacactgagccagctttgccccccacccccctctcttgaggggccgcgcaccacctcggggaggagccagggcggggcctgaccccacaaa

SEQ ID NO: 299350 - DNA, 201 bp, Homo sapiens
ccaagtagctgggattacaggcatgtgccactacgcccggctaattttgtgtttttagtagagacagggtttctccatgttggtcaggctggtctcaaackcccaacctcaggtgatccacctgccttggcctcccaaagtgctgggattacaggcatgtgccaccgtgcccagctaattttgtatttctagtagagataa

SEQ ID NO: 299351 - DNA, 201 bp, Homo sapiens
tgttagcagtgactcctggctgcggttgagatggagtctggggctgtggaagtggggagcagagggaggctgcccatgatctgtgcagggcaggtcctgcwgagggaaggtttcctgagtggtggggtgggccagggcaagcccccaacccccagtgctcatccagcctgagaaagcagccctaatgactctccctgagtc

SEQ ID NO: 299352 - DNA, 201 bp, Homo sapiens
ggcctccgtgggattacaggcgtgagccaccgcgcccagccaccaaagaggttttgatttaacccgaggtggggcaggccaacgctagataagcactgagrgctcttgagaaaggcactcctggatgacacaggttggtggcagcagccatctgggcctgccctgtgcacagacggtgggctgggcacggtggccctcgct

SEQ ID NO: 299353 - DNA, 201 bp, Homo sapiens; identical to SEQ ID NO: 62370

SEQ ID NO: 299354 - DNA, 201 bp, Homo sapiens
acttcagtaggatgaggaagagtcacaaatgcggggttggaaggctcctgctggagaggactgagcaccaggagactaccaatggggagcaggcacggtgccagcccggcctctgccgtctggtgtctgtccctcaagttagtcccagctttgtgcattagcgggctcaccctcggaatccagggtgcatggcggaagtgc

SEQ ID NO: 299355 - DNA, 201 bp, Homo sapiens
cgggggaggcattccttcctgtgtcccagagcttcactggtggagctggaggagccggaggtggagggtggggtctggcagctgctgctggggcagcctcmtgaggggaggggaggggaggggaggggagcaggcactgggcgggggcctaggtgcactttgtccttgccaccaatggcgggaggagggtggacctgaaca

SEQ ID NO: 299356 - DNA, 201 bp, Homo sapiens; identical to SEQ ID NO: 62368

SEQ ID NO: 299357 - DNA, 201 bp, Homo sapiens
ctgtgtgacccgccttcccgtagccccttgccccgctgctcccgctaggccctctttcctgctcctgccccgcccctttccctgccgctgtcacgcctctyttctgccctgccacaccccatttccggccccgcccctttccctgccgctgtcacgcctcttttctgccctgccacaccccattcccggccccgccccttt

SEQ ID NO: 299358 - DNA, 201 bp, Homo sapiens
cacttcctgtctctggcttcatccttgggccagaaggctccaaccctcagcagcccttgccagatgtgccagggagtgggtgtggagacccggactccccycacccacgcacacctcggcctgatgagaggatggaggctggggcagagatgggcgtgacccagcgtcagagggtcgggggaggcattccttcctgtgtcc

SEQ ID NO: 299359 - DNA, 201 bp, Homo sapiens
ccccttgccccgctgctcccgctaggccctctttcctgctcctgccccgcccctttccctgccgctgtcacgcctcttttctgccctgccacaccccattyccggccccgcccctttccctgccgctgtcacgcctcttttctgccctgccacaccccattcccggccccgcccctttccctgccgctgtcacgcctcttt

SEQ ID NO: 299360 - DNA, 201 bp, Homo sapiens
ccgctgtcacgcctcttttctgccctgccacaccccatttccggccccgcccctttccctgccgctgtcacgcctcttttctgccctgccacaccccattyccggccccgcccctttccctgccgctgtcacgcctcttttctgccctgccacaccccattcccggccccgcccctttccctgccgctgtcacgcctcttt

SEQ ID NO: 299361 - DNA, 201 bp, Homo sapiens; identical to SEQ ID NO: 62372

SEQ ID NO: 299362 - DNA, 201 bp, Homo sapiens; identical to SEQ ID NO: 62371

SEQ ID NO: 299363 - DNA, 201 bp, Homo sapiens
gccgctgggaggtcgtggcttctgtttgctgggtcccgtcttccttcttgactgacagcccttcaggcagacctgagtggggtgcaggtcccattccagcygcagcccccgcatgcggtctcggggaagtgccgtggcacctgctcccccttcagggcaccgtgcagtggtgctgtcccccgggccgccctcgcctggtcg

SEQ ID NO: 299364 - DNA, 201 bp, Homo sapiens
ccgtcacaggcctgcggtgaggcgggcttctggcagatcgtcctggcctgcttgtgaccgttccgctgcatgggcaccactcccagcagaagggccagcgyctggctgtcagcagcgtgtgcctcaggagggatctgcggtgacggggttgttacttcagtaggatgaggaagagtcacaaatgcggggttggaaggctcc

SEQ ID NO: 299365 - DNA, 201 bp, Homo sapiens; identical to SEQ ID NO: 62369

SEQ ID NO: 299366 - DNA, 201 bp, Homo sapiens
agaggactccatcatccggcacatagcagcccccagcctccacaaggcctcttcacgggccaactactgtgtgctgagcatggggacagaccctaaactcrccacgtcccccgttccccagtgtgttggtgcaagttaccccaagcaaagtaaggagatcacatgtgcccagccccattcctgcctgattccttagccagc

SEQ ID NO: 299367 - DNA, 201 bp, Homo sapiens
agcttctggcagcccctgcctcagtactagaagctccaagagaaacccatggtaggaggaagctgacacccatggctgacctgtctgcccctgggagagascttagggctgccaggacttctctgtgcacatccttgactgactctgcggagggtggggccgaaaccctgtttctgtgggcggggaggtggctgtgtcccc

SEQ ID NO: 299368 - DNA, 201 bp, Homo sapiens
agccctgttcttataggcgcttggtaggggagaggggagtcagagccagaggccagttgcctcttggcctggggttgggcttctagtgccaagccccaccrtgccactgttatcctggcaacagtgaggtcggggcagggggaccactaagagtgggaagaggagacgaagctggtgtcgagtgggagggctgtgcctctg

SEQ ID NO: 299369 - DNA, 201 bp, Homo sapiens
gccctgtgcagtgtaggatgttcagcagcatccctggcctccgcccactagaggccagtagcacccgctctcctagtcgtgactgtcaaaacgtctccagacacactgtggaatggcctcggtggtgggctgatcacctgtggttgagaaccacttctctgtttatcttcattttggctctcttatcaagggggaacactt

SEQ ID NO: 299370 - DNA, 201 bp, Homo sapiens
ccctgtgcagtgtaggatgttcagcagcatccctggcctccgcccactagaggccagtagcacccgctctcctagtcgtgactgtcaaaacgtctccagacacactgtggaatggcctcggtggtgggctgatcacctgtggttgagaaccacttctctgtttatcttcattttggctctcttatcaagggggaacacttc

SEQ ID NO: 299371 - DNA, 201 bp, Homo sapiens
gagtctggctctgtcacttaggctggagtgcagtggcgcgatctaggctcactgcaagctctgcctcccgggttcacgccattctccagcctcagcctccygagtagctgggactacaggtgcctgccaccatgcccggctaatttttttgtattttttttttttagtagaggtggggtttcaccatgttagccaggatgg

SEQ ID NO: 299372 - DNA, 201 bp, Homo sapiens
agggcagcatggttccctgctcacgtttcttgccaggatcggggcatttcttcccagaagtatctgaacttgcctctagcagggcctacctttgcctctgmccctctcctgcccctcacaggagaacctcatgctttccatcctgcccaagcacgtggctgacgagatgctgaaagacatgaagaaagacgagagccagaa

SEQ ID NO: 299373 - DNA, 201 bp, Homo sapiens
gcaagctctgcctcccgggttcacgccattctccagcctcagcctcccgagtagctgggactacaggtgcctgccaccatgcccggctaatttttttgtattttttttttttagtagaggtggggtttcaccatgttagccaggatggtctccatctcctgaccttgtgatctgcctgcctcagtctcccaaagtgctggg

SEQ ID NO: 299374 - DNA, 201 bp, Homo sapiens
aaacccagccccagcccagtgggtgctgcctcccacctgcctcctccagactcctcagctctgcctgcccctcaggactcccagcagctgtctgccttgaraggctgccctcaagagctggtggggccccatctctggcttttcttgaaaaccttcctagaggctcatcttttctgcaaacccagagctttttccacaatg

SEQ ID NO: 299375 - DNA, 201 bp, Homo sapiens
ggatgtctcctgggcttctgatctgagcaactggcaggatgggggtgccgttaaccaagatggggacaaggtggaaagatgagagtggagaggcaaagatsaggagtttgctttgggacacgtgaagtttgcagtgcccacaagccaaggaggccagcatccatgatctggagtttggagggcgggtggggttggagacgt

SEQ ID NO: 299376 - DNA, 201 bp, Homo sapiens
gccctgctacctttcaggaagatgattctggcagcgaacggtgatggctgtgagcagcagagtatgtgagaacctgcctgaacgtggcgggatacaaggasctgacctgagccaccgaagcgggtataggagagagagggattcgttcagccagcatagacggagggcctgctggtgctcagcatattagaaggtgcaaaa

SEQ ID NO: 299377 - DNA, 201 bp, Homo sapiens
agcagtacaaaaacggactaatacaggaagaaagctggggctgctagggagaagttaagaccaagagtgagccacggggtgtcacttgtgggggactgtcragttggtgatttgcacccctttgtgccagccaggcccagcatctgcctagcagagccccagggaccggcttgccttgtgcagcagctaacctcacccact

SEQ ID NO: 299378 - DNA, 201 bp, Homo sapiens
gaagaaaaataggggataggcataggaagatggcctaaggcagcagcatgagagtttggtttaaagacccaggaaggctggaagctctttgccttgttttyatatctactactccaccttgaacagtgattctgtagaagagaatcacctggaggagggcacagatgcagatgccggggattctgtgggctaggaccctgg

SEQ ID NO: 299379 - DNA, 201 bp, Homo sapiens
gagagctgttgtggtttgaatgtttttgatgttccgaatgtgtttgaatgtttgtgatgaaatttgagttttgttgaatctgtggatacagaggacctacygtgtacaaggcagtgtttgaggatggagccttagaatgtcagcacagccaaatttggggaccattgacacacattgccttcccaggtgatgaaaatgacc

SEQ ID NO: 299380 - DNA, 201 bp, Homo sapiens
agggtgagggtgaaccagggatcagaagactgttagaaaatgagggctgggcgctgtggctcacacctgtaatcccagcactttgggaggccaaggcgggsagatcacttgaggtcaggagttcaagaccagccaggccaacgtggcaaaaccctgtctctactaaaaatacaaaaattagccgggcgtggtggcgggcac

SEQ ID NO: 299381 - DNA, 201 bp, Homo sapiens
cctaactcagggtgagggtgaaccagggatcagaagactgttagaaaatgagggctgggcgctgtggctcacacctgtaatcccagcactttgggaggccraggcgggcagatcacttgaggtcaggagttcaagaccagccaggccaacgtggcaaaaccctgtctctactaaaaatacaaaaattagccgggcgtggtg

SEQ ID NO: 299382 - DNA, 201 bp, Homo sapiens
ttgcagttttcttgatagaaagtgggggtccagactcagggcactcactagcaaggaggacacagatgcagctttagcagcctgatttttcgggccctgaycctcagccagggccacgctgctcccggatctgcttcaggaacaggttcccgctgctgccacagaccatccacgtgattttacagaaggggaagatgtggc

SEQ ID NO: 299383 - DNA, 201 bp, Homo sapiens
ggagcttccttcagtggcatttaggattcttggcctcagtggtgactcctcagaaacaggttttattatctcttggcagcaggggttgcaactgagaaacrtgcaaggtgggggataattggatcttgtggctcacgcctgtaatcccagcactttgggaggccgaggtgggtggatcacctgaggtcaagagtttgagac

SEQ ID NO: 299384 - DNA, 201 bp, Homo sapiens
caggcaccaggaagcaatacgttcctgcagcaggagtcctgtgctggggagacctggccaccacccaggacctgctcctgcttagcactgtaaccatggasaggtcacccctccagccccgcaaaaccccactgtctcctcatcagttacatgccggggtgagtaaggtcaaaagaggtgcttagctcggaggcctttgta

SEQ ID NO: 299385 - DNA, 201 bp, Homo sapiens
ccctccatcccccagggctgtgaccctgatgagggacagggggcctcagagaaggcccccctacaaccccggaacagcattcctcctgtctcgccctggtyctggccctggctaaggccgttctgacctgccttggggtgaggcctctttgggcctgatattggatgtggcttttccttcctggaccctgcagtagcctgt

SEQ ID NO: 299386 - DNA, 201 bp, Homo sapiens
  misc_feature (1)...(201): n = A,T,C or G
catgatgctcagcttctactacttctcccgccacgtgagtgccgcctgcacgatccccgctctgtgcccacagcccacagggcctcctgagaagcagcccngggacctaagagcccaagctcctaaggaatggggcttcccttcacccagccccacacgtgagcctggtcaggccaccgccttctctattcaggctccttc

SEQ ID NO: 299387 - DNA, 201 bp, Homo sapiens; identical to SEQ ID NO: 62384

SEQ ID NO: 299388 - DNA, 201 bp, Homo sapiens
gaactgctgtgcaaagtggtcccagacacacaccaccagcaccacgtaaatataaataagaaatagggtttattgagaaagttcggcaagcagagaaacaraacagacacacaaccccctgctgttcacagctcaggcctaagatggttgtgttctgtggccaggccccctaaggctctgtgctttcataggaactggaga

SEQ ID NO: 299389 - DNA, 201 bp, Homo sapiens; identical to SEQ ID NO: 62387

SEQ ID NO: 299390 - DNA, 201 bp, Homo sapiens
gggagagtgtgtagaatcaaaaaggaagggggcttagaatccaacacgtggagcagccaatgtgtgtcgggggggccctcagcatgggacatctgtaaccygcccctgcttcctgccgggacccatgattgtcccaggtagcctgtgctgggtagatcggccattaggaagcaggaagcagtgtctgtctgatggtgtttt

SEQ ID NO: 299391 - DNA, 201 bp, Homo sapiens
tccaggcgtggcaccatgagggccacccaccaggacggacgtaggggatggagaagatgagtttggtttgagttgcccgtgggacatccaagtggaacttkcagattattcagtggaaagttattgaacaccttctgtataccagaccttgtactcaagatctggagaagaaaggtctagagttgcagatttgagaatcat

SEQ ID NO: 299392 - DNA, 201 bp, Homo sapiens
catggaccccagcaccattcctgcccctttctctcctcagcttaggttggcagcttggctctgatgtttgtattcctttcccaggaggtagagatttgcakgtgcacaagcttcagaaacaccagataggattgggtttgcatttagggggatcatcttggtggacctgaatgaagtcgacatggtgcaggaggctggtga

SEQ ID NO: 299393 - DNA, 201 bp, Homo sapiens
cctgcctcagcctcctgagtggctgggactataggcgcccgccaccacaccaagctaatttttatggtgtgatcacggctcactgcagcctcaacctcttrggctcaagtgatcctcctgcctcagtctcccaagtacctgggaccacaaatatgtgccacaacactcggctaattttttgtgtttttagtagagacgggg

SEQ ID NO: 299394 - DNA, 201 bp, Homo sapiens
gggcccctccctggacattgggcaacttgaggtttgattttggtcaccacccaccccacctcctccatccccttctccatccccttttctgaagacgtgcyttcacccctggccttttctctcttcttccttggggtgcagatcctggccaacgtcttcctctacctgtgcgccatcgctgtgggcatcatgtcctactac

SEQ ID NO: 299395 - DNA, 201 bp, Homo sapiens
tgggacacgtgaagtttgcagtgcccacaagccaaggaggccagcatccatgatctggagtttggagggcgggtggggttggagacgtgaacctggcatcrccagcatgcaggctgtgctgcaacacgagacttgctgagctcaaggcagcgtgtccagatgcagagacagaaaaggactcaagaaaccaagcgagaaaag

SEQ ID NO: 299396 - DNA, 201 bp, Homo sapiens
taaacgggaatgggtgtgagcagagggtatagagaacaggtttccgggagttgtcaggttaaggtggatgtgttgagtgtgtccactgtgaagctgggggyggctgtcacaggcagactcttagcccccggcagcgagggagtgatgctgctccgtgctctgtcctttcagcacagcgacatggcaggggtgcattcctaa

SEQ ID NO: 299397 - DNA, 201 bp, Homo sapiens
tcatcccaccttcatttcccctagccatccagcccccatccatgaatcaccagtcactattatctttttaatgtaccctttcagaggtttatagaattttcacacacacacacacacacacacacacacacacacacacacacacagatgatagcctattcactcttttgtactaaatctatttttctttttttgagacag

SEQ ID NO: 299398 - DNA, 201 bp, Homo sapiens
gctggccattcaggtgttgactgggtggcctgaggacatatggtactgaccactcagacaggggtgggttgtcctgccccaacagacttgccccacaaacrgggtaggcgactggggctgctcagacccaagaggtcaacaggtcattacaagctggaaccagacgccagcagagcttgggaatctacacccggtgacttg

SEQ ID NO: 299399 - DNA, 201 bp, Homo sapiens
tagacggcaccctgggcatccttccttttccctgccccgcgttttggagcagtcctagcgtcagaatggggatctggccaggatcaagagagctgagggayagaggcctccagaaggctggagaccttggctagatgggcccacactgattcttgggacaaagatggggacactgcgtcagtctcagtcaccaaggctgac

SEQ ID NO: 299400 - DNA, 201 bp, Homo sapiens
  misc_feature (1)...(201): n = A,T,C or G
gacactgggaggctgccatttcctaagcttggattgtatctcttgcttttctgaatgttcttcctctgtaacctttgcccaagcctggtcactgtttcccncaagaccttttgctattaggacaaggtgtcatcaaccctgagccctgttcttataggcgcttggtaggggagaggggagtcagagccagaggccagttgc

SEQ ID NO: 299401 - DNA, 201 bp, Homo sapiens
catcccaccttcatttcccctagccatccagcccccatccatgaatcaccagtcactattatctttttaatgtaccctttcagaggtttatagaattttcacacacacacacacacacacacacacacacacacacacacacacagatgatagcctattcactcttttgtactaaatctatttttctttttttgagacaga

SEQ ID NO: 299402 - DNA, 201 bp, Homo sapiens
tggggacataaattcggggggaaccctggactctgatcctgcccctcaccggctgggcaattttccaggtccaaccactactctgagctccagtttcacckgtgagctgagaatcagctcccctcaaagctccctccagccctgacactgtctggtctttgtccgcctcacttccaaggggaaaagcaaggccagaagaag

SEQ ID NO: 299403 - DNA, 201 bp, Homo sapiens
gctgggattacaggtgcgtgccaccacgcctggctaatttttgtatttttagtagaggtggggtttcaccatgatggccagggtggtctcaaactcctgayctcaagtgatccacctgcctctgcctcccaaactgctgagattataggcgtgagccaccacgtccagtcttgagcctgattcttataagacagattgctc

SEQ ID NO: 299404 - DNA, 201 bp, Homo sapiens
tgggggactgcacagagacacagctgcctctccccacctctccttctgctttaacccacttgcagggtcacctgttactagggatggtgtttttccttcakgccggtcttacagggaagaaccgcccattgaccacaagcgtcaggcccctctcctgggagccccggagcttgggacactgggaggctgccatttcctaag

SEQ ID NO: 299405 - DNA, 201 bp, Homo sapiens
atcccaccttcatttcccctagccatccagcccccatccatgaatcaccagtcactattatctttttaatgtaccctttcagaggtttatagaattttcacacacacacacacacacacacacacacacacacacacacacacagatgatagcctattcactcttttgtactaaatctatttttctttttttgagacagag

SEQ ID NO: 299406 - DNA, 201 bp, Homo sapiens
tcccaccttcatttcccctagccatccagcccccatccatgaatcaccagtcactattatctttttaatgtaccctttcagaggtttatagaattttcacacacacacacacacacacacacacacacacacacacacacacagatgatagcctattcactcttttgtactaaatctatttttctttttttgagacagagt

SEQ ID NO: 299407 - DNA, 201 bp, Homo sapiens
gacagctgaggtggacgctgggtgggtttccattcaggtcttgggggactgcacagagacacagctgcctctccccacctctccttctgctttaacccacktgcagggtcacctgttactagggatggtgtttttccttcaggccggtcttacagggaagaaccgcccattgaccacaagcgtcaggcccctctcctggga

SEQ ID NO: 299408 - DNA, 201 bp, Homo sapiens
gcagcaccttgaacgtgcctggcacatacttgatgctcagtgaaatattaactgcacgaatgaataaaagagtaattggcagagagaaactgaggcccctygggaagtggggatagggaggaaagtcgcttggtgccctcgtcctgctggcctgtgatgcctgactctgggctggccctggcctgccttaccccccaccca

SEQ ID NO: 299409 - DNA, 201 bp, Homo sapiens
ccaccaccacctctagctagttccgcaacatcttcccccaaaagaaaacttgggacccgagcttgatttttatttgtttttattttttttaattaattaattttttttttttgaggcggagtctcgctctgtccccgaggctggagtgcagtggcacgatctcggctcactgcaagctccgccttccgggttcacgccatt

SEQ ID NO: 299410 - DNA, 201 bp, Homo sapiens
accacgccgtctgctccatcctcatggggctggccatggtggaggccatctcgtaagtgggatgcctctgggagggaggctcccagagcaagggccccggycctggacccagggagaagcaggtcttccgcgctggccatggcccctgggtgggggatctgctggaagcagagactgggacacagcactggttgatgggtg

SEQ ID NO: 299411 - DNA, 201 bp, Homo sapiens
atatcatattgcccatctccagggacaaatttgggatattcactctttatttccatgaagagcccaatctagggtggttctttttattttttttttaaacrgtctcactctctcgcctaggctggagtgcagtggcatcatctcagctcactgaaacctccacctcctgggctgaagagattctcctgcttcagcctccca

SEQ ID NO: 299412 - DNA, 201 bp, Homo sapiens
ggaggggctggagcacaggccaggccctcccctttcagaaataccaccagctgcggattaagatcctgggcgactgctactactgcatctgcggcttgccygactaccgggaggaccacgccgtctgctccatcctcatggggctggccatggtggaggccatctcgtaagtgggatgcctctgggagggaggctcccaga

SEQ ID NO: 299413 - DNA, 201 bp, Homo sapiens
ggagcaggcagttgacctgagccctgctacctttcaggaagatgattctggcagcgaacggtgatggctgtgagcagcagagtatgtgagaacctgcctgwacgtggcgggatacaaggagctgacctgagccaccgaagcgggtataggagagagagggattcgttcagccagcatagacggagggcctgctggtgctca

SEQ ID NO: 299414 - DNA, 201 bp, Homo sapiens
atctcggctcactgcaagctccgccttccgggttcacgccattctcctgcctcagcctcccgtgtagctgggactacaggtgcccgccaccatgcccggcwaatattttgtatttttagtagagacggggtttcaccgtgttagccaggatggtctcgatctcctgacctcgtgatccgcccacctcagcctcccaaagtg

SEQ ID NO: 299415 - DNA, 201 bp, Homo sapiens
tgcagtagtaacaaagaagcctggaaggttatttgggatctgaaatggggaggagtaaaagccatatgagacagttctgactccattttgtagacagtggrcagccattgaaagctttggagcaggcagttgacctgagccctgctacctttcaggaagatgattctggcagcgaacggtgatggctgtgagcagcagagt

SEQ ID NO: 299416 - DNA, 201 bp, Homo sapiens
gaggcgggaggatcacctgagcccagcaagatcagtgtgcagtgagctgtgactacacttcagcactccagcctgggagacagcgggaccctgtctctttaaaaaaaaaaaaaaaaaaaaaaaattcagaccacaagtatttcaggacttttctaggcactggggatacagttgtgagcagaacagattctagtgtgggca

SEQ ID NO: 299417 - DNA, 201 bp, Homo sapiens
aggcgggaggatcacctgagcccagcaagatcagtgtgcagtgagctgtgactacacttcagcactccagcctgggagacagcgggaccctgtctctttaaaaaaaaaaaaaaaaaaaaaaaattcagaccacaagtatttcaggacttttctaggcactggggatacagttgtgagcagaacagattctagtgtgggcaa

SEQ ID NO: 299418 - DNA, 201 bp, Homo sapiens
tcagcctcccgagtagctgggactacaggcacatgccactatgcccagctaatttttgtattttcagtagagacggggtctcaccatattggtcaggctgrtctcaaactcttcacctcaggtgatctacccaccttgacctcccaaagtactgggattacaggcctgagccaccacaccaggccctttccaccattttgg

SEQ ID NO: 299419 - DNA, 201 bp, Homo sapiens
gtgacctcagctcactgcaacctctgcctcccgggttcaagcaattctcctgcctcagcctcccgagtagctgggactacaggcacatgccactatgcccrgctaatttttgtattttcagtagagacggggtctcaccatattggtcaggctgatctcaaactcttcacctcaggtgatctacccaccttgacctcccaa

SEQ ID NO: 299420 - DNA, 201 bp, Homo sapiens
aacgggagtgcccacagcagtgggtccacgtcggagaagcccgaggagcaggatgcccaggtatgtgcagggctcagggcagggggtcactgagggccagmtgcgggcaggcaccaggaagcaatacgttcctgcagcaggagtcctgtgctggggagacctggccaccacccaggacctgctcctgcttagcactgtaac

SEQ ID NO: 299421 - DNA, 201 bp, Homo sapiens
ggagtgcccacagcagtgggtccacgtcggagaagcccgaggagcaggatgcccaggtatgtgcagggctcagggcagggggtcactgagggccagatgcrggcaggcaccaggaagcaatacgttcctgcagcaggagtcctgtgctggggagacctggccaccacccaggacctgctcctgcttagcactgtaaccatg

SEQ ID NO: 299422 - DNA, 201 bp, Homo sapiens
cactttgcaatccacaagcaagttctgtggcctcagattgctctctaatcccaccgcctcccacgcccttgtcacttccagacctgtccacgccactctcwtcccatgcccagatcatggctgagctctcctttcctctaggccctgcccaatggagcaccagcttcctcaaagtccagctcccctgccctcattgagacc

SEQ ID NO: 299423 - DNA, 201 bp, Homo sapiens
gtgcttcgatcatacctaattgtgcttgtttactgccactgcactccagcctgggaaacacagcaagacccactcttaaaaaaaaaaaaaaaaatgctggrataatctgactgatgtgtgagtccaaaaagctgagtgcacatgtcatgcatggaagatagatgcatttctccaacacatcatccagtcagtcggacatgc

SEQ ID NO: 299424 - DNA, 201 bp, Homo sapiens
attgatctgcaagtttttaaaaataaaatctgctttttcactgcacttgtaggtacatacaatatggggacataaattcggggggaaccctggactctgaycctgcccctcaccggctgggcaattttccaggtccaaccactactctgagctccagtttcaccggtgagctgagaatcagctcccctcaaagctccctcc

SEQ ID NO: 299425 - DNA, 201 bp, Homo sapiens
ccatgaggccatttgtctccatctgttctttctttcaggcagcccccgctgggcccaggccttctcagggacaggggactggggcctaggtagggctgaayctaaacagcaaacacaaataagcaaaagaggaatttctccggcctcttataaagtgcactgctgtaggcatcgtgatgtgggccgtacagctctgaggcc

SEQ ID NO: 299426 - DNA, 201 bp, Homo sapiens
tgggattacaggcatgaaccgccacgcctggccattcctgtttttcatccttctatccagtggccagcttagagcacatgcctcgccttgtctgtgtctgyaggtagaaaaactggcacggacacttttcttgtggaagattgaggtccacgaccagaaggaacgtgtctatgagatgcgacgctggaacgaggccttggt

SEQ ID NO: 299427 - DNA, 201 bp, Homo sapiens
cctgcagcattcagttgccagctatgctggcaagttctaagaagcctttactcatgtctggagcctcagagctcctcctcctgacctctccatgtggctamcttgggcttcctcacagcatggtggtctcagagagaaggtggaagctatcacagtttttaaaggttaggctcatcactatcggctacaagaagtccaggc

SEQ ID NO: 299428 - DNA, 201 bp, Homo sapiens
ctacaaatggtacaaaaatcagccaggcatggtagcatgtgccagtagtcccagctactcagaaggctgaggtgggaggattatgagccccggatgctgcratgagccatgatcgtgacactgcactccagcctgggtgacagagcaagaccggtctcaaaaaagaataaaaaaagaatgacagtttattgtttctcatga

SEQ ID NO: 299429 - DNA, 201 bp, Homo sapiens
ctccccgcccctcacccacttcccttcacgatggcctaatgggtctgatgactctctgaggactagttacaaataacatttgcatggatcattgaagcgcwttttatctcattatgtcacttagtcctcacacccactctgtgaggtggatattcttgtcactggcattttatagaaaagaaagtggaggaggaacagagg

SEQ ID NO: 299430 - DNA, 201 bp, Homo sapiens
cgtcctcggcagggttagtgacgcacaacacctgaggcttcgagttgcatttagggaagaaagggatcatggcgctccctgttcagctggcgagccgtgcyggagccctgccatggtgcccccgcaccctcctacccctgctcccattcctccccgcccctcacccacttcccttcacgatggcctaatgggtctgatgac

SEQ ID NO: 299431 - DNA, 201 bp, Homo sapiens
ctgcatggagctcggttcctttcatatggagaacctggggttaggatgtccctgtggccctagatggcctcactttgttcccctgagctttagaatcttcrtcctcggcagggttagtgacgcacaacacctgaggcttcgagttgcatttagggaagaaagggatcatggcgctccctgttcagctggcgagccgtgctg

SEQ ID NO: 299432 - DNA, 201 bp, Homo sapiens
ttggcagaagtgagacctgtggatcagggctggttaggggagaccatgacaagcttgggtgttcacattgactttagcgttttccactcctggtcccgccrtaaggtctcctggaaacttttcagcaataccagtgtctgggcctctggttccacttttgtggactctgcctgggcataactccccaggtgattctaaggc

SEQ ID NO: 299433 - DNA, 201 bp, Homo sapiens
cattagctttctctcttggggcctccaaagcaagtcttgtcccttttctacatagcagctttcctcagacttaaagacagcttcctaagaagaagggggtgggggggacctggggctaaggacacagcctggttaagctggaccggggcctttttatttttctgtcacacagcccagagccaaggggcttgttcaggcagc

SEQ ID NO: 299434 - DNA, 201 bp, Homo sapiens
ccacactcctttctgggaaaagatggggttgtgaaatatgtaaataagttgaggagtgctttagggaggggttttgaaccatagaataatgagatttgaaygctggaggagatctcaccctctagttttaacaccttgtttaatttaatctcaattccttctgtaaaaccagagtgacatcacctgcctcagcactggttg

SEQ ID NO: 299435 - DNA, 201 bp, Homo sapiens
cctgttgcaccttcccctgcggcagctcctcacagtggggtcctgtgccatccttgggctttgggaagggggcaaggtcgccatacgtcgtgtcctgaggygcgcagccatttccacctcaaaacacatcgcactggctttgagggtcttgttttctgcagcttccttataccccagtcctcggttacaggttttgcctcc

SEQ ID NO: 299436 - DNA, 201 bp, Homo sapiens
agctactcgggaggctgaggcaggggaatggtgtgaacccagggggcagagcttgtagtgagctgagattgtgccactgcactccagcctgggagacagarcaagactctgcctcaaaaaaaaaaaaaaatgcaaaaacacactttcaattattcaccatttccccacagtaactaagaaagaccaaactgtaccttccca

SEQ ID NO: 299437 - DNA, 201 bp, Homo sapiens
gggccaggggtgggtaactgggtagttttatatgcacatgcaggcacacacacacacacacacatgcacacacacacacacatgcacacacacacacacaygcacacacacacacacatgcgtgctcactcctgggcttggtctgcccagccttctgggtaaaccctccgtcagatggaatggctgggatgccagggttat

SEQ ID NO: 299438 - DNA, 201 bp, Homo sapiens
agctcaggagtttgaggctgtggtgagccctgaatgtgccactgcagtgcagcctgggcaacagagtgagaccctgtctctatctgcaccaccgccccccycccaaaaagaagtccacactcctttctgggaaaagatggggttgtgaaatatgtaaataagttgaggagtgctttagggaggggttttgaaccatagaat

SEQ ID NO: 299439 - DNA, 201 bp, Homo sapiens
ccggctggaaggtgggttggccccgatggtgaaggcccttagaagccagactaaagggattaaaactttctcctgtaaggcactgaggtaccaagcagagtttttttttttttttaatcagaatgacaaaggtaaagcagtgtttaggaacataaatctgacaggtggctcgccaggtcacttggagccaggataggcagg

SEQ ID NO: 299440 - DNA, 201 bp, Homo sapiens
aatcccagcactttgggaggccaaggtgggcggatcacgaggtcaggagttcgaaaccagcctggccaacatggtgaaaccccatctgtactaaaaatacaaaaattagccaggcatggtggtgcacacctgtaatcccagctacttgggaggctgaagcaggagaatcgcttgaacccaggaggcggaggttgcagtgag

SEQ ID NO: 299441 - DNA, 201 bp, Homo sapiens
ctcctctaattgtggtagtaccatatacactatcttccttttttttcaaatataatgttattgttgtactttaacaattggagcacacggtgccgggcgcrgtggctcacgcctgtaatcccagcactttgggaggccaaggcgggcggatcacgaggtcaggagatcgaaatcatcctggctaacacagttgaaaccccg

SEQ ID NO: 299442 - DNA, 201 bp, Homo sapiens
gggaggccaaggcgggcggatcacgaggtcaggagatcgaaatcatcctggctaacacagttgaaaccccgtctctactaaaaatacaaaaaaattagccrggcgtggtggcaggcgcctgtagtcccagctactcaggaggctgaggcaggagaatggcgtgaacccgggaggtggagcttgcagtgagccgagattgtg

SEQ ID NO: 299443 - DNA, 201 bp, Homo sapiens
cgggcggatcacgaggtcaggagatcgaaatcatcctggctaacacagttgaaaccccgtctctactaaaaatacaaaaaaattagccgggcgtggtggcrggcgcctgtagtcccagctactcaggaggctgaggcaggagaatggcgtgaacccgggaggtggagcttgcagtgagccgagattgtgcactgcactcca

SEQ ID NO: 299444 - DNA, 201 bp, Homo sapiens
actcccttcctttcttctcggtgcgagggtggggctcaccccacggtgatggaaaggcggtcctcgagcctccccgggggcctctgtggcgcacgaactgkgagagtggagagaaaagcccctcaggaggaggagtactgagctgggccgtgaagggcacgttggatttcgatcctgaggtcagtaggggaggggcagtgg

SEQ ID NO: 299445 - DNA, 201 bp, Homo sapiens
ctgggaggttccagacttccccacagtttcctgtcttcttctgagccctccaaactgttctgacctctgcctgttacccagttccaaagtcacttccacgkttttgggtatcttttcagcaatgtgccactctactggtaccaatttactgtattagtccgttttcacgctgctgataaagacatacctgagactgggaag

SEQ ID NO: 299446 - DNA, 201 bp, Homo sapiens
tgaggcaggagaatcgcttgaacctgggaggtggaggttgcagtgagccaagaatgcaccactgcacgccagtctgggcgacagagcgagactccatctcaaaaaaaaaaaaagaaagaaaaaaaagaataagtctactgggaatgaggagttaggggctccagagcctaccttggccaggggttgctggtgcccactacc

SEQ ID NO: 299447 - DNA, 201 bp, Homo sapiens
acacagtcagtgtcccgactcccatcccgcagacagtaggtccactcccttcctttcttctcggtgcgagggtggggctcaccccacggtgatggaaaggmggtcctcgagcctccccgggggcctctgtggcgcacgaactgggagagtggagagaaaagcccctcaggaggaggagtactgagctgggccgtgaagggc

SEQ ID NO: 299448 - DNA, 201 bp, Homo sapiens
gtgaccgttctgtctttggcttcctaggaggaccactgccttcccccacccccattttggctgtgtgtctccttggttcgtgcctggccataggttccccmtcctcaggttatgtccaagctgactaggaagtctggagccaagcccaaaggccttgagggatgttccctttctaagaaaactgtggtccttccagagaag

SEQ ID NO: 299449 - DNA, 201 bp, Homo sapiens
gaggcaggagaatcgcttgaacctgggaggtggaggttgcagtgagccaagaatgcaccactgcacgccagtctgggcgacagagcgagactccatctcaaaaaaaaaaaaagaaagaaaaaaaagaataagtctactgggaatgaggagttaggggctccagagcctaccttggccaggggttgctggtgcccactaccc

SEQ ID NO: 299450 - DNA, 201 bp, Homo sapiens
aaggtgggaggggtagggggacattggaagccagtgacaccgggattcagggtgacaaggggcatgaggggacagtggagtgtttggaggctattgagtgygtggttgtgtggtgagaacagggagaatggtggtggagctggagggagggcaggtcacctgccgtggtcgtgcttggcgtccgcgctggagttctctggc

SEQ ID NO: 299451 - DNA, 201 bp, Homo sapiens
gagccagagccgcactgtcagggccttactatgttacaaaacaccagggcttcggtctgggtcctgctgcttgcacagaaagccaatcactgtgacagcarttattgccaaggaatacggctttaatcgggtgctgcggtagaggatatggggactcagtctccaatccatctctctgacctgctaaatccggggtttaca

SEQ ID NO: 299452 - DNA, 201 bp, Homo sapiens; identical to SEQ ID NO: 62412

SEQ ID NO: 299453 - DNA, 201 bp, Homo sapiens
tcgccactgcactccagcctgggtgacagagcaagactctgtctcaaaaagaaaaaaaaaaaggcaacttcatttcatatgattcaatctaacataaaagyaacaaatgtattcactgtggaaagcctggaaaatactatgtagtatgaaaaaatattacccataatattatttctgaaggataactgctattaacattga

SEQ ID NO: 299454 - DNA, 201 bp, Homo sapiens
acaaatgtattcactgtggaaagcctggaaaatactatgtagtatgaaaaaatattacccataatattatttctgaaggataactgctattaacattgagscttctcttaaacgaatatcagttttcttctatattatgaagcactattgtaagaaaataattcaacctagacaggagtacaaagaataaaagtgaaagtc

SEQ ID NO: 299455 - DNA, 201 bp, Homo sapiens
gaggacctgcgccgtgttgggtgctgtgttcctagctggggcgtagtgttggcagaagtgagacctgtggatcagggctggttaggggagaccatgacaascttgggtgttcacattgactttagcgttttccactcctggtcccgccgtaaggtctcctggaaacttttcagcaataccagtgtctgggcctctggttcc

SEQ ID NO: 299456 - DNA, 201 bp, Homo sapiens
agaaataccaccagctgcggattaagatcctgggcgactgctactactgcatctgcggcttgcccgactaccgggaggaccacgccgtctgctccatcctsatggggctggccatggtggaggccatctcgtaagtgggatgcctctgggagggaggctcccagagcaagggccccggccctggacccagggagaagcagg

SEQ ID NO: 299457 - DNA, 201 bp, Homo sapiens
cagatggtttacctcaggcagctgtgggggcggggtttagattcaagttcatggtaaagcccagagtatataggaccctgaatgccagaatgaagattttkaactcttggacaattggcagctattgaggtgttttgagcagaaggtggtacttgcaaaaatattattttggaagattaatgtgttccagggtggattggc

SEQ ID NO: 299458 - DNA, 201 bp, Homo sapiens
tgctgttctcttgaacgtgtgtccctgcccgccgtcctggcctccagctcagctgtctccagtactacacgggacccagcaatgcaacggcagggatggaracggagggcagctgcctggagaaccccaagtattacaactatgtggccgtgctgtccctcatcgccaccatcatgctggtgcaggtcagccacatggtga

SEQ ID NO: 299459 - DNA, 201 bp, Homo sapiens
ttgctaattgtgtttgggcaaatctggcccgagttttctgtacaatagggacagtactaaaaatactcgagagagtttttgtgaatgtcaaatgaggcaayggcgaggctcttagctgcagttactaactttcatatgattagtccctggtaaatttccccatctttcccggtatttctgggggagccgcgggaggtggca

SEQ ID NO: 299460 - DNA, 201 bp, Homo sapiens
atagcagctgagagccaagtaccagagtctctgcccctctcctatggccttaggggagataagtgttaagtagttattgcacagtgcctgcacatagacaytcaaactctctaccatcatatgattgttggatacaattttgaagatatagaaaagtagaagaggccaccaaaacctcccttaatctgggactttttttga

SEQ ID NO: 299461 - DNA, 201 bp, Homo sapiens
tgtgtataaacagagctttcccagtttgtcatcatcatgcatatgcaatttaggccccacctttcatccacattatttccctgacattttgctgtgaacaytggactcctcgtgtttattattttaaatcagcgctttatagtcagcgagtttttctagagaggaaacggaagcccagggctgggccaggggtgggtaact

SEQ ID NO: 299462 - DNA, 201 bp, Homo sapiens
aacatggtgcaaccctgtctctactaaaaatacaaaattagctggacgtggtggtgcatgcctgtaatcccagctactagggaggctgaggcaggagaatygcttgaacccaggaggcagaggttgcaatgagccgagattgtgccactgcattccagcctgggcgacagagatgctgtcttaaaaaaagagagaagaaac

SEQ ID NO: 299463 - DNA, 201 bp, Homo sapiens
aggcaggagaatcgcttgaacctgggaggtggaggttgcagtgagccaagaatgcaccactgcacgccagtctgggcgacagagcgagactccatctcaaaaaaaaaaaaagaaagaaaaaaaagaataagtctactgggaatgaggagttaggggctccagagcctaccttggccaggggttgctggtgcccactaccca

SEQ ID NO: 299464 - DNA, 201 bp, Homo sapiens
gtgcataatggtgaccaactcatcaagaaaatattaaggccaggcgcggtggctcacacctgtaatcccggcactttggaaggccgaggtgggtggatcaygaggtcaggagatcgagaccatcctggccaacatggtgaaaccctatctctattaaaatacaaaaaatcagccgggcgtggtgatgcacgcctgtagtcc

SEQ ID NO: 299465 - DNA, 201 bp, Homo sapiens
tccttcttcatcacgctgcccctcagcctcagccccatcgtgatcatctccgtggtctcctgtgtggtgcacacgttggtcctgggggtcaccgtggcccmgcagcagcaggaggagctcaaggggatgcagctgctgcgggaggtgagtcctgcccactgtccccccacagcgtcctctcctgcagctctcaccaacttg

SEQ ID NO: 299466 - DNA, 201 bp, Homo sapiens
acagggctttggttaataactctaataatcagggaaaaagcaaaaacaacacaatagaggaatggcgcataggaggcaaaatagaagaaactgaccagtcrcattggctcacatctgtaatcctaacactttgggaggctgaggcaggcagatcacctgaggtcaggagttcaagaccagcctggtcaacatggtgcaacc

SEQ ID NO: 299467 - DNA, 201 bp, Homo sapiens
ggcaggagaatcgcttgaacctgggaggtggaggttgcagtgagccaagaatgcaccactgcacgccagtctgggcgacagagcgagactccatctcaaaaaaaaaaaaagaaagaaaaaaaagaataagtctactgggaatgaggagttaggggctccagagcctaccttggccaggggttgctggtgcccactacccag

SEQ ID NO: 299468 - DNA, 201 bp, Homo sapiens
gaggaggtgtttttgggggcatcttcaaggaacagagatgtctggggtgttgagtgttgcaaccaacagccctcatatgcaccttctctggctgtaggagrcgttgttacattataggacagcatagtaactgatgtgcataatggtgaccaactcatcaagaaaatattaaggccaggcgcggtggctcacacctgtaat

SEQ ID NO: 299469 - DNA, 201 bp, Homo sapiens
atctctctatagtgatcatggctttgcttgctggacagggctttggttaataactctaataatcagggaaaaagcaaaaacaacacaatagaggaatggcrcataggaggcaaaatagaagaaactgaccagtcgcattggctcacatctgtaatcctaacactttgggaggctgaggcaggcagatcacctgaggtcagg

SEQ ID NO: 299470 - DNA, 201 bp, Homo sapiens
tcgcttgaacctgggaggtggaggttgcagtgagccaagaatgcaccactgcacgccagtctgggcgacagagcgagactccatctcaaaaaaaaaaaaagaaagaaaaaaaagaataagtctactgggaatgaggagttaggggctccagagcctaccttggccaggggttgctggtgcccactacccagggaagagaag

SEQ ID NO: 299471 - DNA, 201 bp, Homo sapiens
tcatgctgaaagagtgaaacttactttttacagacatattttgaggggcacattcattttgctaagtgagatacacatttatgaatatgaaacaggaaatktctgaatcttattagcttagagataatggccaccactgtgtatggaagctgtggaaatgataatggccaccactgtgtatggaggctgtggaaaatctgc

SEQ ID NO: 299472 - DNA, 201 bp, Homo sapiens
cgcttgagctcaggagtttgaggctgtggtgagccctgaatgtgccactgcagtgcagcctgggcaacagagtgagaccctgtctctatctgcaccaccgcccccctcccaaaaagaagtccacactcctttctgggaaaagatggggttgtgaaatatgtaaataagttgaggagtgctttagggaggggttttgaacca

SEQ ID NO: 299473 - DNA, 201 bp, Homo sapiens
agggagctgatggactttctgttgggttaaaaggaaaagagaaggccggtgcagtggctcattttgggaggctgagggtggaggatcacttgagtccaggrgtctgagaccagcctgggcaatatggtgaaaccctgtctctactaaaaaatacaaaaattagccaggcatggtggcccgcacctgtaatcccagctactt

SEQ ID NO: 299474 - DNA, 201 bp, Homo sapiens
gaggcaggagaattgcttgaacttgggaggcagagagtgcagtgagctgagattgtgcctggtgacagagggagactctgtctcacaaaaaaaaaaaaaaagaaaagaaaagaaaggaaatattaaattgcatttagcataaagtgtagtgtagtatctaaaaacattttcctcgggaatggataacacaagtttgaacaa

SEQ ID NO: 299475 - DNA, 201 bp, Homo sapiens
gtcatccccctccagtgcttatcacctagttgagggatccaaacaaggacaacctgacaaaacctaaggaccaggaccaggcccagccaaggtgaaggggyccgcctcgtggtcagactcacaggtccgtctcctctgctcaattgcccagtctttgcctagacctgctacgtgaactttgtcacagtggcaagtcagagc

SEQ ID NO: 299476 - DNA, 201 bp, Homo sapiens
gtcagggctggtctagcaagctgcttctgcttgcttccatctgcagcagcaagaaggcatctttcaagggcctactgggcaggaaatccagggacagttckgcctggcaggctggtggcagaggtggctggggtgacagcagcattccagccgagagtgaggtcccgctcttagacaaacatgggctttggtcgcaagaga

SEQ ID NO: 299477 - DNA, 201 bp, Homo sapiens
  misc_feature (1)...(201): n = A,T,C or G
ctgggctcaatggcactgacaggtaagggccacggcttcccctcctggcctgcactcacagcccttcttctagagacaggaatataacaggcccaagcccngggatctcaccctcccgggaggcacgtgacctgatacgtgcaggttagagaagctggcatgggttcctccaggagggctgcagcagtgcagtgaggaggg

SEQ ID NO: 299478 - DNA, 201 bp, Homo sapiens
agtcagggctggtctagcaagctgcttctgcttgcttccatctgcagcagcaagaaggcatctttcaagggcctactgggcaggaaatccagggacagttyggcctggcaggctggtggcagaggtggctggggtgacagcagcattccagccgagagtgaggtcccgctcttagacaaacatgggctttggtcgcaagag

SEQ ID NO: 299479 - DNA, 201 bp, Homo sapiens; identical to SEQ ID NO: 62378

SEQ ID NO: 299480 - DNA, 201 bp, Homo sapiens
tatgaaaaaatattacccataatattatttctgaaggataactgctattaacattgaggcttctcttaaacgaatatcagttttcttctatattatgaagsactattgtaagaaaataattcaacctagacaggagtacaaagaataaaagtgaaagtcctccttccttcccttgctccccttctcataggtacccattgc

SEQ ID NO: 299481 - DNA, 201 bp, Homo sapiens
ctggctgccctgtgggttggagagggagctggcagtggggtcgggtacacctggctgcctggagcgtcacccccacggttccttcctcatgcagcatcctytttgccgacatcgtgggctttacccagctgtcttctgcctgcagtgcccaggagcttgtgaagctgctcaacgagctctttgcccgctttgacaagctgg

SEQ ID NO: 299482 - DNA, 201 bp, Homo sapiens
tgctgagaacagcgcttagtgagcacagcgggagcagtgagaccaaatagcggcccagacaagccactgtggtggccaggccaggccgaggatagaggagkatcagtggttggattccgtcgatagatgctgaatgtattttggagacagagctgacaggatttgctggcagattggttgtggggcgtgagtgtggagttg

SEQ ID NO: 299483 - DNA, 201 bp, Homo sapiens
caaacagagtggttcccagctctacggtaccctcgtcttcacagctggggctgttagaggaactagagaagctgttttaaaatttattcaaagtagtggcygggcacagtggctcacgcctgtaatcccggcactttgggaggccgaggcgggtggatcatctgaggtcaggagtttgagaccagcctgggcaacaaatag

SEQ ID NO: 299484 - DNA, 201 bp, Homo sapiens
ctccagtgcttatcacctagttgagggatccaaacaaggacaacctgacaaaacctaaggaccaggaccaggcccagccaaggtgaaggggtccgcctcgyggtcagactcacaggtccgtctcctctgctcaattgcccagtctttgcctagacctgctacgtgaactttgtcacagtggcaagtcagagctagcgtggc

SEQ ID NO: 299485 - DNA, 201 bp, Homo sapiens
tccctggatctcctcttcagcctcgcccatctccctttttcaagaagtcctcaggcgacatggtttccagaccttacatggtcctgggcactttctctagstgtagactaaagcgcattgctcaggactgccttctcctgtttgcccaggctgctcacagaaccttgtccatcctgcctagctgcgggacacaaacactgc

SEQ ID NO: 299486 - DNA, 201 bp, Homo sapiens
cccacgcagacgtgtgtatatgtgtatatatatatacacacatcttagagaaattcatgcacatactcatgtcccaggatatatgtatgagaatgtccaargtggcactgttcgtaatagacataccccctcccccaaaacaaatgaaaacaacccaaatgacatcaacaggaaatggatacataactggtatattcatgc

SEQ ID NO: 299487 - DNA, 201 bp, Homo sapiens
aagagagagggagagagacaaagagagagagaagagggaggaggaggaggaggagaagggggaggaggagaaaaaggagaaggggaaggaggaggagggtrtggctgaattagagaccaggaatggcagttagggaaagatggggtacaggtatggtaggcaagagggatatggttgaaagagggtgggtggctggtctct

SEQ ID NO: 299488 - DNA, 201 bp, Homo sapiens
gtcaccaaggctgacctggcccctctcttggctcatcttggtaaagatagattttaggctgtgggcacagactgacgccctctctaacgcagcagtaggtyctccagggcaaggtgtggcctcctggagtccccagctggtgaagccctgtctgagggtgacgaccactctcttgttctccctttctcccctcggccaatc

SEQ ID NO: 299489 - DNA, 201 bp, Homo sapiens
ggtttcaccatgttggtcaggctggtctcgaactcctgacctcaggtgatccgcctgcctcggcctcccaaagtgctgggattacaggcatgaaccgccaygcctggccattcctgtttttcatccttctatccagtggccagcttagagcacatgcctcgccttgtctgtgtctgtaggtagaaaaactggcacggacac

SEQ ID NO: 299490 - DNA, 201 bp, Homo sapiens
gatgagcacgggtgatgctgagtccacagccccaccagccacactctgggtagggcagcctgaagtcctggggatgggctcggctgaaccagggctgcacycccagcaccggctcggccactctgtgtggcagtgacgagggcaacccaagtttccgcgggcgttggcagctcgggtcctcgggcagcggctcctggccgt

SEQ ID NO: 299491 - DNA, 201 bp, Homo sapiens
ggctggagtgcagtggtgcgatctcggctcactgcaacctctgcctcctgggttcaagttgattctcctgcctcagcctcccgagtagctgggattacagrtgcccgccaccatgcccggctaatttttgtatttttagtagagacagggtttcaccatgttggtcaggctggtctcgaactcctgacctcaggtgatccg

SEQ ID NO: 299492 - DNA, 201 bp, Homo sapiens
tgctgggtgtggtggcatgcctgtaatcccacttacttgggaggctgaggcatgagaattgcttgaacctgggaggtggaggttgcagtgagccgagatcrtgccactgcgctccagcctggaggacagagcagactctatctcaaaaaaaaaagaagaaaggtctaaagtctgtgatggaagcttctaccttagaagctt

SEQ ID NO: 299493 - DNA, 201 bp, Homo sapiens
agtgaagccacagataagggagactactgtattaataaagaagaaaggtctaggccgggcgcagtggctcatgcctgtaatcccagcactttgggaggccraggcaggtgcatccttgaggtcaggagttcgagaccagcctggccaacatggcgaaaccccatctctactaaaatatgaaaaaattgctgggtgtggtgg

SEQ ID NO: 299494 - DNA, 201 bp, Homo sapiens
cttatgaattatttatttcttaaatttttcatttaatatttttggactgtgattgaccttgggtagctgaaaatgcaaaaagtgaagccacagataagggrgactactgtattaataaagaagaaaggtctaggccgggcgcagtggctcatgcctgtaatcccagcactttgggaggccgaggcaggtgcatccttgagg

SEQ ID NO: 299495 - DNA, 201 bp, Homo sapiens
gctagaagcagcaaagctgggtcccaggaaggatctagggccagaaggtcatgtttactgatggcttctgctcagctcgcctgctgaccagaggctgaagsggggaggggtgggtggtgagtctgtgagtgtagagtcgtaacccacatctgtgccacccaacagcgtgaggcttcctgggcacctagggctggatggggc

SEQ ID NO: 299496 - DNA, 201 bp, Homo sapiens
ttcacacctctcctcctgcctgttggtctgctctgtctgatgttctagatcactcccaaaatgtaccctgtccgctgtcctcaggggagcgaccgagcctygttcctctttgttcttcaggcgggggtggactggggtaggtaggggatgctcactggaaggctagaagcagcaaagctgggtcccaggaaggatctaggg

SEQ ID NO: 299497 - DNA, 201 bp, Homo sapiens
gcagaagggtgggctagctgaatgttatgtgatgccccttttaaaagagccttaaccctcatggcctgatcccctcttaaaggccccacctcttaatagtrttacattggcagcacctgaattttgaacagacacattcaaatcatgccaagactttttgcagataattctaggctgccattttttacttctagcccttta

SEQ ID NO: 299498 - DNA, 201 bp, Homo sapiens
ggcggacctgacatccctccccgcttggccctatccaccctatcattgtttcccaacccctgactggggtgtcggaccctcagcccctgtttaataaatasccatattcaactttcctagacaatttttgtcttaaaaaatgtaaaaacggctgggcacagtggctcacgcctgtaatcccagcactttgggaggccgagg

SEQ ID NO: 299499 - DNA, 201 bp, Homo sapiens
ttcactgggataggcggcaagcactagaaatggctgtttctctggctgtcactgtcattgtgatgattattggctctgataaggaattgtagaaaagcctrgcccaaccacaagggagggaagagcagccccaggcttcttccaggatgtctcaagggcgcctggtggcttcaagccctgcccttgcctccctggttgggg

SEQ ID NO: 299500 - DNA, 201 bp, Homo sapiens
cccgggtggctttctgctttggactctgggtcaaagcactggcgtcacagtcattcgacttgaaccaccaggagctcccccacttaccaactgtgagatcyggggtaagttatttaacctctttgcctggtttctccttctgcaaaatgggtgtgataataatacctttttcactgggataggcggcaagcactagaaatg

SEQ ID NO: 299501 - DNA, 201 bp, Homo sapiens
tccccccacagcgtcctctcctgcagctctcaccaacttgggacctgttggagttgctgtttgctttgcctttgagtcaaaatgtgtcctgggggcctccrgggctctcacctctctccctagtccctgccttttcacccctgtgccattacccggagtctgcctgtgcttggccccagggaaaggaggatgtcagggcat

SEQ ID NO: 299502 - DNA, 201 bp, Homo sapiens
ccagctgatttttgtatttttagtagagatggggtttcaccatgttggccaggctggtcttgaactcctgacctcaggtgatccacccgtctcggcctccmaaactgctgggattacaggcatgagccaccctttcctggttctaatttgtccacaggaagtaatgcatgtctacttcttgttttctacacagcagccctt

SEQ ID NO: 299503 - DNA, 201 bp, Homo sapiens
cacagcagcccttccagtgtttgaattcagctatgttgctctccctggatctcctcttcagcctcgcccatctccctttttcaagaagtcctcaggcgacrtggtttccagaccttacatggtcctgggcactttctctagctgtagactaaagcgcattgctcaggactgccttctcctgtttgcccaggctgctcacag

SEQ ID NO: 299504 - DNA, 201 bp, Homo sapiens
atattctgccaaatctgtcaaaatctttaaaaaatgaaataatgtcaactatgtcatatttgcatctgccccaaattagtacttacctctttagtcatgawgcaaggacctcacaaccttttaacttcatttcacaagcctctgccccccactttctgcttattagtataatgtgttttagttcaacatattttaaacccc

SEQ ID NO: 299505 - DNA, 201 bp, Homo sapiens; identical to SEQ ID NO: 62379

SEQ ID NO: 299506 - DNA, 201 bp, Homo sapiens
ctcaggtgatccacccaccgcggcctcccaaagtgctgggattacaggcacgagccactgcgcctggccaggaaaatatattgactattcattaagtggargtggatcatcaaaaggtcttcatctgcatcttcacgttgagtagctgaggaggaggagaaagagaaggggttggttttgctgtctcaggggttgccgagg

SEQ ID NO: 299507 - DNA, 201 bp, Homo sapiens
ctgggaattcattttattttattatttttatttgtttcgggatggaggctcgctctgtcacccaggctggagtgcagtggcgcagtctcagttcactgcarcctctctctcccgggttcaagcgattctcgtgtttcagcctcctgagcagctggtattacaggtgcccgccacgaagccctgctaatttttgtattttta

SEQ ID NO: 299508 - DNA, 201 bp, Homo sapiens
gacagcttcctaagaagaagggggtgggggggacctggggctaaggacacagcctggttaagctggaccggggcctttttatttttctgtcacacagcccrgagccaaggggcttgttcaggcagctactttatgctgggaattcattttattttattatttttatttgtttcgggatggaggctcgctctgtcacccagg

SEQ ID NO: 299509 - DNA, 201 bp, Homo sapiens
gatggggtttcaccatgttggccaggctggtcttgaactcctgacctcaggtgatccacccgtctcggcctcccaaactgctgggattacaggcatgagcyaccctttcctggttctaatttgtccacaggaagtaatgcatgtctacttcttgttttctacacagcagcccttccagtgtttgaattcagctatgttgct

SEQ ID NO: 299510 - DNA, 201 bp, Homo sapiens
ggaacctgggtacagaatccccctacatttttattactgttctttctttttggccaaattgttactgtcttgcctaccttgaattcaacagcaatttcttytagctacttatatttgtcaaaaatgttcaaaatactcactttactttttttagaaacaacgcgctttctttcacatccatattttatctgtgtaggttat

SEQ ID NO: 299511 - DNA, 201 bp, Homo sapiens
ttcctggaccctgcagtagcctgtcctcctgtcccctttaccgacttagggggctgcctcccctttacccactaagggggctgccccagctctccttatgycagagcccaggtctccccaaagggagagtaatgagcagtcatcagctagcgggctcgcaggcagcgttttgcaggtcgcagtgcgattacacgtcttact

SEQ ID NO: 299512 - DNA, 201 bp, Homo sapiens
tcacttggaaggaacctgggtacagaatccccctacatttttattactgttctttctttttggccaaattgttactgtcttgcctaccttgaattcaacarcaatttcttctagctacttatatttgtcaaaaatgttcaaaatactcactttactttttttagaaacaacgcgctttctttcacatccatattttatctg

SEQ ID NO: 299513 - DNA, 201 bp, Homo sapiens
tggggtcgggtacacctggctgcctggagcgtcacccccacggttccttcctcatgcagcatcctctttgccgacatcgtgggctttacccagctgtcttytgcctgcagtgcccaggagcttgtgaagctgctcaacgagctctttgcccgctttgacaagctggcagctgtaagtccctggccccgcctggctctccag

SEQ ID NO: 299514 - DNA, 201 bp, Homo sapiens
cccggagcacgcggtggccgagttcccgcacaggtaaacgcaggggcagggccaggcttccgggggggaagacagcgccccgagcgtgggaagggggccgratcggagcccgagcctccaagggtttggtggaaaaaggaagtaaacagaaggaaggctcaggaatcccccacgatggtcctgatttctttccggcacatt

SEQ ID NO: 299515 - DNA, 201 bp, Homo sapiens
gatcatttgagcgagcctgagaggtcgaagctgcagtgagctgtgatggtgtcactcactccagcctgggcgacagagtgagaccttgtcttgaaaaaagaaaaaaaaaaaagacaggtattgtgcagtggataacaaagcaagaaccaactatcaactatcataaagaaactcatcttaaatataaagacacagatagac

SEQ ID NO: 299516 - DNA, 201 bp, Homo sapiens
tcgacccctggtgagggaggggccggggagggccacgagtttcctcggctgcggtggtgccgggcggggggcgggggcaggtgtctcagcgggagcctgayattggggagcaagccagtctctgctccctgacccccactgggacggcccccacaggccccaggagtgctagacggcaccctgggcatccttccttttccc

SEQ ID NO: 299517 - DNA, 201 bp, Homo sapiens
cgtcctgctctgcacggccctggtcgagatactcatcgacccctggtgagggaggggccggggagggccacgagtttcctcggctgcggtggtgccgggcsgggggcgggggcaggtgtctcagcgggagcctgatattggggagcaagccagtctctgctccctgacccccactgggacggcccccacaggccccaggag

SEQ ID NO: 299518 - DNA, 201 bp, Homo sapiens
aacataaaagcaacaaatgtattcactgtggaaagcctggaaaatactatgtagtatgaaaaaatattacccataatattatttctgaaggataactgctrttaacattgaggcttctcttaaacgaatatcagttttcttctatattatgaagcactattgtaagaaaataattcaacctagacaggagtacaaagaata

SEQ ID NO: 299519 - DNA, 201 bp, Homo sapiens
tcgagaccatcctggctaacacagtgaaaccctgtctctactaaaatacaaaaaattagccgggcccacttggtggcaagcgcctgtaatcccagctactygggaggctgaggcaggagaatggcgtgaacccaggaggcagagcttgcagtgagccgagatcgcgccactgcactccagcctgggtgacagagccagact

SEQ ID NO: 299520 - DNA, 201 bp, Homo sapiens
tccccaactgttcacacctctcctcctgcctgttggtctgctctgtctgatgttctagatcactcccaaaatgtaccctgtccgctgtcctcaggggagcraccgagccttgttcctctttgttcttcaggcgggggtggactggggtaggtaggggatgctcactggaaggctagaagcagcaaagctgggtcccaggaa

SEQ ID NO: 299521 - DNA, 201 bp, Homo sapiens
gaatatttatagaaccctgcacccaagaactagagaacatacattcttttcaagtgcactgaaatgttctcaaagacacacaacctgttacaaaacaagastcaatacactttggctgggagtggtggctcacgcctataatcccagcactttgggaggccgaggcgggtggatcacgaggtcaggagatcgagaccatcc

SEQ ID NO: 299522 - DNA, 201 bp, Homo sapiens
gttttggagcagtcctagcgtcagaatggggatctggccaggatcaagagagctgagggacagaggcctccagaaggctggagaccttggctagatgggcscacactgattcttgggacaaagatggggacactgcgtcagtctcagtcaccaaggctgacctggcccctctcttggctcatcttggtaaagatagatttt

SEQ ID NO: 299523 - DNA, 201 bp, Homo sapiens
ggtgactttggtggtgtccagagcaggcttctcaacctcatgggtttggtgagtcaccccaggacccgggactgggcagtgcagtcagctcccaggtacakctgttgcccttgggcccagaagtaaggcttcgagcgccagctgtctcgccccaggccaaggagcctcttccctctctgtctggtggtcagatggtgcctg

SEQ ID NO: 299524 - DNA, 201 bp, Homo sapiens
aagctgcagtgagctgtgatggtgtcactcactccagcctgggcgacagagtgagaccttgtcttgaaaaaagaaaaaaaaaaaagacaggtattgtgcartggataacaaagcaagaaccaactatcaactatcataaagaaactcatcttaaatataaagacacagatagactgggtgtggcagctcatgccttcaatc

SEQ ID NO: 299525 - DNA, 201 bp, Homo sapiens
gctgtcacccaggctggagtgcagtggcgcgatcttggctcactgcaacctctgcctcccgggtgcaagagattctcctgcctcagcctcccaagtagctrtgattacaggcgtgtaccaccatgcctggctaatttttgtatttttagtaaagatggagtttcactatgttggccagtctggtctcaaactcctgacctc

SEQ ID NO: 299526 - DNA, 201 bp, Homo sapiens
agcctgttcagcagaccaccgttaatctttgttgctttctttgtacatttcttatctctgatttatttatttattttgagacggagtctggctctgtcacytaggctggagtgcagtggcgcgatctaggctcactgcaagctctgcctcccgggttcacgccattctccagcctcagcctcccgagtagctgggactaca

SEQ ID NO: 299527 - DNA, 201 bp, Homo sapiens
agaaacctgcctgccattttccttcctttccatgtgcttgacaggttttggtattacggttatgcccaactcattaaataatttgagaagtttctaacccytgatagtttgaagataatttgggttattccttaaatttggaagtcacagccaggcatgtggctggcctgtaggtgtggccaggcaggtggctatgcctgt

SEQ ID NO: 299528 - DNA, 201 bp, Homo sapiens
tctcactgtgttgcccaaactggtctcaaactcctggcctcaagcaatcctcccactttagccacctggcatttttaaaaattaaatactagatattgtgratgggaaatagtagtgcttctgaataatgttgtgtctctccagggaagatttacttttcttgtggcagatggttagagcaggggcagataggaaatagct

SEQ ID NO: 299529 - DNA, 201 bp, Homo sapiens; identical to SEQ ID NO: 62385

SEQ ID NO: 299530 - DNA, 201 bp, Homo sapiens
ccctttactgccctaaactgcccctgggctgggtgaggaggaaggaggggactgggctcaggaccaggacctgcaggaccagcggccaatgagtgcggacwatggggaaggcagccaggatggttgggggtggtggtgggcggggcgtgcctttagcatttggcaaagtagggactaggaactgctgacaaatattttgta

SEQ ID NO: 299531 - DNA, 201 bp, Homo sapiens
cctccagtgcttatcacctagttgagggatccaaacaaggacaacctgacaaaacctaaggaccaggaccaggcccagccaaggtgaaggggtccgcctcrtggtcagactcacaggtccgtctcctctgctcaattgcccagtctttgcctagacctgctacgtgaactttgtcacagtggcaagtcagagctagcgtgg

SEQ ID NO: 299532 - DNA, 201 bp, Homo sapiens
gcccccaaggcaagagattggcagcccagacctagcatgggggaaataagaactgctgtgcaaagtggtcccagacacacaccaccagcaccacgtaaatwtaaataagaaatagggtttattgagaaagttcggcaagcagagaaacagaacagacacacaaccccctgctgttcacagctcaggcctaagatggttgtg

SEQ ID NO: 299533 - DNA, 201 bp, Homo sapiens
tcagtggttgagctcttttattgagtcatcaatttcaattatatatttttctgtcctagaatttccatttgattttaaaaactggacttaggtccctaackatgtattcctattttgtcatctattttttagaatatattaaacatttattttaaagttcctgactgacaaccataataataccaatgggtatgcattttt

SEQ ID NO: 299534 - DNA, 201 bp, Homo sapiens; identical to SEQ ID NO: 62411

SEQ ID NO: 299535 - DNA, 201 bp, Homo sapiens
tcgaccctcaccccgggtggctttctgctttggactctgggtcaaagcactggcgtcacagtcattcgacttgaaccaccaggagctcccccacttaccarctgtgagatctggggtaagttatttaacctctttgcctggtttctccttctgcaaaatgggtgtgataataatacctttttcactgggataggcggcaag

SEQ ID NO: 299536 - DNA, 201 bp, Homo sapiens
tcgctcccctggcctgggtcctgccccaggacctgttacggaattacttgccctttactgccctaaactgcccctgggctgggtgaggaggaaggaggggrctgggctcaggaccaggacctgcaggaccagcggccaatgagtgcggacaatggggaaggcagccaggatggttgggggtggtggtgggcggggcgtgcc

SEQ ID NO: 299537 - DNA, 201 bp, Homo sapiens
agatccccactgctgccacctccacgagacagacctgcagctgaaattaggtcccaagaggccccctacacacggaaggcctcctggatctctgctgtaaytacggaggctgggaaccgcaccactattgggtggccttttgatgaggtgcaatctttgcagggtcttacttcccttgccatttagccatcttccttccag

SEQ ID NO: 299538 - DNA, 201 bp, Homo sapiens
  misc_feature (1)...(201): n = A,T,C or G
ttaaatacctggggagcagccctgatgtgaataccaggtgcagccaggaggggccaggggttgcctggctgttggagaggagcccagtgagttaagaaaantttactgcccgggggagcccgacttgatgtgaaagggcctaaggagccggggtgagctctagggctggggtggcaggaagcagcaccatctagttggagg

SEQ ID NO: 299539 - DNA, 201 bp, Homo sapiens
gacctggaggctgtgctgttgaacaggcacatcgaggaggtccaacacagcgtcagaactcccacgccctcttctcagctctgccccttggtcagctgtcrggtgactcccaggcagagtccgttttgaggctcctgggactggaatacgggaccagcctgagttgctgtcagtcacgtcgcaggagaaaggactggcaaa

SEQ ID NO: 299540 - DNA, 201 bp, Homo sapiens
gtctcgaactcctgacctctggtgatccgcctgccttggcctcccaaagtgctgggattacaggcatgagccaccacgtccggcctcctatagagcttcaracaatttatactccaccagcaatgagtgagcgtatacttaggcacttaagttttccttgtttatctagaaaatacctcattgcttttggaaaccctcccc

SEQ ID NO: 299541 - DNA, 201 bp, Homo sapiens
aaaaagcagaacaattcttttgaaataagttatttccaggaaaactttaggattaagaaacttgtaaaaagatctataaatagagaccccaggggctgtgsacctctgtcaccacagagcctgatcgtgctgtgcagtctaaaggggaccacggggcaagaagaggtgactttggtggtgtccagagcaggcttctcaacc

SEQ ID NO: 299542 - DNA, 201 bp, Homo sapiens
taaaaattcttccttctctgaaagcaacattctgttccccagcagcctttcctcattagctttctctcttggggcctccaaagcaagtcttgtcccttttmtacatagcagctttcctcagacttaaagacagcttcctaagaagaagggggtgggggggacctggggctaaggacacagcctggttaagctggaccgggg

SEQ ID NO: 299543 - DNA, 201 bp, Homo sapiens
cacacagctagttagcggcccacacagctagttagtggcagaactgcctccacttggcctctgccccacatgcccgagagacacggggccgagcagcagcyggtgcagccgtggtccgtggactgtcccctgggggtgtgagggccacctctggccgacgctcagggcctctctctctgcaatccaggcgcgtgcacatct

SEQ ID NO: 299544 - DNA, 201 bp, Homo sapiens
cgtgaaggatcttgcgatgcgtaaacttccaggagggaggattttgtaaaggaatgttctcatggttgcgttctgagccgggatattagaaacactttatyaggctgtcatgggttagatgacactttagtccaagtgtttatccatttgggagatgcattttattattctaaaaatgttgtatattttaaaaaagcagaa

SEQ ID NO: 299545 - DNA, 201 bp, Homo sapiens
  misc_feature (1)...(201): n = A,T,C or G
gtgtctggggaagccatcacgacagatctgtgtagtggcacccctggcagtgcgcaacctgagaagctgctctagctgcctggcagatcatgagggacctngcctaacatgtcagatgggctggatgcctattctggaagtcctctttgttttggaagagggtagactttgaacatctcttaccaaaggcatgcacaagtt

SEQ ID NO: 299546 - DNA, 201 bp, Homo sapiens
tgaagaactagggccagctgtcttcctcagacctcatctaaagcagctacctagtcactttctaccacttttattctcttttgagctctgatatgcttacrtttgaaatattatttctgctaagagcttgacaagggtaaggtcacagactcgtcataacatgtggacctccacaggcagcagaggcaggctgttttggtt

SEQ ID NO: 299547 - DNA, 201 bp, Homo sapiens
gtttccttaaagtggagtaagaattaaaagtcacttggaaggaacctgggtacagaatccccctacatttttattactgttctttctttttggccaaattkttactgtcttgcctaccttgaattcaacagcaatttcttctagctacttatatttgtcaaaaatgttcaaaatactcactttactttttttagaaacaac

SEQ ID NO: 299548 - DNA, 201 bp, Homo sapiens
ttagcctactgaaaaggaaaacccataagatcatctcaattttgtcaaatgcagaaaaaagcatttgacaaaattcagcatccattcagataatacctctyagcaaactaggaaaagaagataatttcttcaacctgagaaaaggcatctttgcaaaacctacatcatatttaatagagaaagtctgaatgttctcttttt

SEQ ID NO: 299549 - DNA, 201 bp, Homo sapiens
cttttttttttttttaaagatgaggtcttgctatgttgcccaggttgggcttgagctcctgggttcaagtgatcctcccaccttgacctcctgagtagctrggaccaccggtgttagccaccaccccctcctatggccttcttttgcagctgggatgtgttgtgtgtcatttccagtttccttaaagtggagtaagaatta

SEQ ID NO: 299550 - DNA, 201 bp, Homo sapiens; identical to SEQ ID NO: 62390

SEQ ID NO: 299551 - DNA, 201 bp, Homo sapiens; identical to SEQ ID NO: 62406

SEQ ID NO: 299552 - DNA, 201 bp, Homo sapiens
ccagcttacagtgggctgtgttccagaagcttctgagtcactggtttgggactaatgtgactttttaaaaggtgcctgggttcccaggcccacccaccagrgtcttcctcaactcacagcatcccggcatttggcctctgaagatggtggaaatggggccgggcatggtggctcatgcctgtaatcccagaactttggcag

SEQ ID NO: 299553 - DNA, 201 bp, Homo sapiens
ggaacaaagaacagtaagataagtagaagacaaaaaacaagacaacagttttaaatatagccatattgataatattaaatgtaagtgatataaatattcartttaataggcagatattggcagtggctcacgcttgtaatcccagcactttgggaggctgaggaggacagattgagctcaagagttcaagaccagcctggg

SEQ ID NO: 299554 - DNA, 201 bp, Homo sapiens
caaagagatatgactcataagccaataatggagataaaatagaatggtaaacaaaaatcattcaaaagatggcaaagaaagtgggaaaaaggaacaaagamcagtaagataagtagaagacaaaaaacaagacaacagttttaaatatagccatattgataatattaaatgtaagtgatataaatattcagtttaataggc

SEQ ID NO: 299555 - DNA, 201 bp, Homo sapiens
gggcgtggtggtgtgtgcccgtagtcccagttactcaggaggctgaagcaggagaatcgcttgaacccatgaggaggaggttgcagtgagccgagattgcrccactgcactccagcctggcgacagagcaagactccatctcaaaaaaaagaaaaagaaaaatgaagataattacatcaaggcacattgtaatcagattgc

SEQ ID NO: 299556 - DNA, 201 bp, Homo sapiens
gtggctcgccaggtcacttggagccaggataggcaggagtagctggccagagacgagcagccctgaaaactgttcctgccctggcctcacctcgtcaccaygtctgctgtggaaagggctgcgacctggaggctgtgctgttgaacaggcacatcgaggaggtccaacacagcgtcagaactcccacgccctcttctcagc

SEQ ID NO: 299557 - DNA, 201 bp, Homo sapiens
gcgatctcggctcactgcaacctctgcctcctgggttcaagttgattctcctgcctcagcctcccgagtagctgggattacaggtgcccgccaccatgccyggctaatttttgtatttttagtagagacagggtttcaccatgttggtcaggctggtctcgaactcctgacctcaggtgatccgcctgcctcggcctccca

SEQ ID NO: 299558 - DNA, 201 bp, Homo sapiens
ctcccacctgcctcctccagactcctcagctctgcctgcccctcaggactcccagcagctgtctgccttgagaggctgccctcaagagctggtggggcccyatctctggcttttcttgaaaaccttcctagaggctcatcttttctgcaaacccagagctttttccacaatgtctggttagttaggttccgagacgggtcc

SEQ ID NO: 299559 - DNA, 201 bp, Homo sapiens
aaactcatgattgttctcctttgagtattgctaagacataaaaccctaaaacttagaaaacagaaaaaaaaagatagaaatcaagaataaaaatattagcrtcccaggggagcctgaccttggcatgcaagcagtgcctgggaggcagctttgggaacagagcaggaggggcagagagctctcaaggtccgattgggagcc

SEQ ID NO: 299560 - DNA, 201 bp, Homo sapiens
cctcccaaagtgctgggattacaggcgtgatccaccatgcccaggctgggaattcattttaaatctaacagcatctcaaatggtaggtgtcccccttctamcccccgcaacattggtacattgtgtctctcccattctgttctcctgcatttggtttgggagtctcaggtacagactatgacctctatcctttttgaattt

SEQ ID NO: 299561 - DNA, 201 bp, Homo sapiens
ttcaggccggtcttacagggaagaaccgcccattgaccacaagcgtcaggcccctctcctgggagccccggagcttgggacactgggaggctgccatttcytaagcttggattgtatctcttgcttttctgaatgttcttcctctgtaacctttgcccaagcctggtcactgtttccctcaagaccttttgctattaggac

SEQ ID NO: 299562 - DNA, 201 bp, Homo sapiens
tgccttggcctcccaaagtgctgggattacaggcatgagccaccacgtccggcctcctatagagcttcagacaatttatactccaccagcaatgagtgagmgtatacttaggcacttaagttttccttgtttatctagaaaatacctcattgcttttggaaaccctccccaaaggattcctatttgaaaaccccagcccca

SEQ ID NO: 299563 - DNA, 201 bp, Homo sapiens
ctgccaattcctaagaaaccaaatcagtaatttcctgaaggggaatctgagcaaagcgcatggcatggtgccgagggttgttcatcctcccacgtggggcygggggccgaccccactgcccacaggcacattttctactgtggacaaccctgtcagctggagccagcccaaggagtggcacacagcctcacccttcagtgc

SEQ ID NO: 299564 - DNA, 201 bp, Homo sapiens
atttcagattctcgctagggttcaagttttccccagaggcagaattttttcctgggtcttcagttcttcacctgtaatgagaggcgatcctgatggatgcrttttagaggaacggcagctgccctgcttacccagcatcaagttcttcctgcggccacacctgcctggccctggggacagggacgatgtcacgccaccgtc

SEQ ID NO: 299565 - DNA, 201 bp, Homo sapiens
ttcatccgttttgtgctgctacaacagaatacctgaaactgggtaatttataaagaacagaaatttactacttacagttctagaggccgggaagtccaagrtcaaggcaccagcatttgctctggtgtccatacatggcagaagggtgggctagctgaatgttatgtgatgccccttttaaaagagccttaaccctcatgg

SEQ ID NO: 299566 - DNA, 201 bp, Homo sapiens
aatgaatcagaccaagtttcttcattatccttttttcatctcttttctgcgtaatcaactagctctttttcttcattgtgaaaggattattgttaagaatrtttcaaattataaaatgctgaataatattgcagaatattgtactattccttttctgtagggcatttgtctacttttttttctttctttttttttgagacg

SEQ ID NO: 299567 - DNA, 201 bp, Homo sapiens
ggtaccaaattctctccatttctgattacctaggagtgtgcttattttgctttcattttcgaaagatacctgtcttcatccgttttgtgctgctacaacasaatacctgaaactgggtaatttataaagaacagaaatttactacttacagttctagaggccgggaagtccaagatcaaggcaccagcatttgctctggtg

SEQ ID NO: 299568 - DNA, 201 bp, Homo sapiens
gggaggaatgagatagaagtaatagagcaggggtgtctaatctttcggcttccctgggccacattggaagaagaagaattgtctcgggccaaacaaaaaakactgtgggttgaacaagcttgcaatcgtgcatcctgtgggcctgccctctggtctttttgtgggatcccccgaatatctacagacctgaagcactcagca

SEQ ID NO: 299569 - DNA, 201 bp, Homo sapiens
tggagacagagctgacaggatttgctggcagattggttgtggggcgtgagtgtggagttgaggatgtctcctgggcttctgatctgagcaactggcaggaygggggtgccgttaaccaagatggggacaaggtggaaagatgagagtggagaggcaaagatgaggagtttgctttgggacacgtgaagtttgcagtgccca

SEQ ID NO: 299570 - DNA, 201 bp, Homo sapiens
cagctctacggtaccctcgtcttcacagctggggctgttagaggaactagagaagctgttttaaaatttattcaaagtagtggctgggcacagtggctcaygcctgtaatcccggcactttgggaggccgaggcgggtggatcatctgaggtcaggagtttgagaccagcctgggcaacaaatagtgaaaccctgtctcta

SEQ ID NO: 299571 - DNA, 201 bp, Homo sapiens
catagataataaggttgttcagattttatatttccttttatataggttttagagaggtttttttcccccagaaacatgtccattcaaattttcaaaatttyggcataatattcttaatattttctttttatcttttgtctgaaatgggtaatgatgttcctttttttcattactgaagataatttgtgcctttttaaaatt

SEQ ID NO: 299572 - DNA, 201 bp, Homo sapiens
agtatccccatatgtaaaacttttgagagatttttttttctttctttttttttttttttttgacatggagtcttggtcttgtcacccaggctagagtgcartggcacaatctcggctcactgcaacctccgtctcccgggttcaagcgattctcctgcctcagcttcccaagtagctgggattacaagcacctgccaccac

SEQ ID NO: 299573 - DNA, 201 bp, Homo sapiens
tttgattcttttcccagagagggtcagggccttgacttttattaccatgctgtatttttaggataaccatcaaggacttgaaggctgaggagaatgaagastttaccctccttcttctctgtgcagaaccacatctgggcacccaggcctcggcccccagggtttggccacatccccctcctccggtccagccttccaccc

SEQ ID NO: 299574 - DNA, 201 bp, Homo sapiens
tcggctcactgcaacctccgtctcccgggttcaagcgattctcctgcctcagcttcccaagtagctgggattacaagcacctgccaccacacctggctaattttttttttttttatatttttagtggagacggggtttcaccatgttggccaggctggtctcaaaactcctgacctcaggtgatccacccgcctcggcttc

SEQ ID NO: 299575 - DNA, 201 bp, Homo sapiens
ttagcttctcaccagccaacctcatttatccaaatccctcctggcctccttgctgtaattaactcctgaatgcctcatcagagcctcagctgtaacagctygggcccctgggaacagtgctggctgcctcccccttctatctctgtcctgagccagtgcgaaccaggcctggcatgagtcatccctgagtagaagggggct

SEQ ID NO: 299576 - DNA, 201 bp, Homo sapiens
gtattataaattagatatgcagttagaaaaactcaggtttgcttcatttttttttcttttttatagagctaaaatgaaaccccttgaaagtggtttagtayactcaccatgttgtgccaccaccacctctagctagttccgcaacatcttcccccaaaagaaaacttgggacccgagcttgatttttatttgtttttattt

SEQ ID NO: 299577 - DNA, 201 bp, Homo sapiens
ggggactctggggacactggtctggtgcctgttctcatgctggaggccttgtttccaaatatgctgacttttacagttatgcagctcctccctcctctacrttcctacagcatttggctgaagactgtgaagcactcctgccctgggagaccagtctctcccacgtgtgaccattgccccacccatccaagctctttggag

SEQ ID NO: 299578 - DNA, 201 bp, Homo sapiens
tgtgtgccatctactaaaattcagtaggttttataaaaagtcagtaaaatacaggaatcacaaaaattgtgcatacatatatacatttatatgtattttaratagtttgttttaattgaaaacatttagctatacagtcatttgccaatcttttgttgaagggaaagttctttcctttttatataggtactctgtttggta

SEQ ID NO: 299579 - DNA, 201 bp, Homo sapiens; identical to SEQ ID NO: 62383

SEQ ID NO: 299580 - DNA, 201 bp, Homo sapiens
caaagtgttgggattacaggcttgagccaccgcgcctggccctttttttgagacagggtctcactccatcatccaggctggagtgcagtggtgtgatctckgctcactgcaacctctgcctcccgggctcaagcagttcttgtgcctcagcctcccaaataacttgggactacaggcatgtgccaccatatacccagctaa

SEQ ID NO: 299581 - DNA, 201 bp, Homo sapiens
tccagtttcagagtcttggctctttatgccaagggcagggggctttgaaccaggccttgaagttagtggtagcaatggaggtgggggtacattctataagragtcccagaaagagagagggagagagacaaagagagagagaagagggaggaggaggaggaggagaagggggaggaggagaaaaaggagaaggggaaggag

SEQ ID NO: 299582 - DNA, 201 bp, Homo sapiens
tagtcttgaactcctgacctcgtgatctgcccgcctctgcctcccaaagtgttgggattacaggcttgagccaccgcgcctggccctttttttgagacagrgtctcactccatcatccaggctggagtgcagtggtgtgatctcggctcactgcaacctctgcctcccgggctcaagcagttcttgtgcctcagcctccca

SEQ ID NO: 299583 - DNA, 201 bp, Homo sapiens
cacacaagcagtttctcagtccatccctccaccgtcatgtagctttggagtggctcttaggttcccaaacacatcatccccacctagtggaaggagtcttrtccctgtcatccagggagcctctgggatggacttgtttccttgaagctcctctcccagagtccgagagcacagttccatgtgcccaggcctgtgctaggt

SEQ ID NO: 299584 - DNA, 201 bp, Homo sapiens
ctccctctggctgggccaccaggctgtggcaggctgtggtgggccacggctgggccgtggtgggccttgttgggccgtggcgctgcagcacgtatgagtayggcagagtctgggtaaacaagaacctgggtagagaggaagtggagggccggctggaaggtgggttggccccgatggtgaaggcccttagaagccagacta

SEQ ID NO: 299585 - DNA, 201 bp, Homo sapiens
tgacaggtaagggccacggcttcccctcctggcctgcactcacagcccttcttctagagacaggaatataacaggcccaagccccgggatctcaccctccygggaggcacgtgacctgatacgtgcaggttagagaagctggcatgggttcctccaggagggctgcagcagtgcagtgaggagggaaggaaataccaggtg

SEQ ID NO: 299586 - DNA, 201 bp, Homo sapiens
ggcagaccatctctgatctttgaactatgaatgaatcagaccaagtttcttcattatccttttttcatctcttttctgcgtaatcaactagctctttttcytcattgtgaaaggattattgttaagaatgtttcaaattataaaatgctgaataatattgcagaatattgtactattccttttctgtagggcatttgtcta

SEQ ID NO: 299587 - DNA, 201 bp, Homo sapiens
tataattttcttgggcctttatgcccagggtggtactgagttgctgcatctgggtcaaggagagaatgcaaagggtctgctttccgccagtcacagatacraaccctccgcatccttctcaacacagggctcgaggcagctgctctctgcccatcagagttggcacagtacttgtgactacagtgttctagagctgcaata

SEQ ID NO: 299588 - DNA, 201 bp, Homo sapiens
tttttttttttgagacggagtctgttgcccaggctggagtgcagtggtgccatcttggcccactgcaacctctgcctcctgggttcaagcagttctcctgyctcagcctcccgagtagctgggactgcaggcacccaccaccacgcccagctaatttttgtgtttttagtagagacggtgtttcaccgtgttggccaggct

SEQ ID NO: 299589 - DNA, 201 bp, Homo sapiens
agctacattctttatttgtaagtgttgcgtaaggttccattgagtcaaagtgccgtaatttatttaacgaacccctattaggtcatttactatttttttaattattattataagtagtgctgtgacaagcatcctgatagaatatatacttgaaccattccctccttaggaaaacctttaggagatgctgggtcaccctgc

SEQ ID NO: 299590 - DNA, 201 bp, Homo sapiens
tacattctttatttgtaagtgttgcgtaaggttccattgagtcaaagtgccgtaatttatttaacgaacccctattaggtcatttactatttttttaattattattataagtagtgctgtgacaagcatcctgatagaatatatacttgaaccattccctccttaggaaaacctttaggagatgctgggtcaccctgcagg

SEQ ID NO: 299591 - DNA, 201 bp, Homo sapiens
atagggggctcaaaggccattttttttgtatttttagtagagatggggtttcaccatgttggccaggctggtctcgaactcccaacctcagatgatccgcmcgcctcggcctcccaaagtgctgggattacaggcgtgagccactgaacccagccagcataatggctttttaaagggagcctccagctcactctgaaatcc

SEQ ID NO: 299592 - DNA, 201 bp, Homo sapiens
gctggtacttcaccccagtcctggtggtttccatggagatgggttactgagggacagggggaatgtctgccccacttagagcatcagccaggagctgccaraaggcagaacaccgctaggtgcgagcctttggacccctctgctctccgggtgcacatctgacaccttccccctgcttagttgctctctctgcgactggtc

SEQ ID NO: 299593 - DNA, 201 bp, Homo sapiens
ctgggctaaccctccggacctcggctgggtgatatggtgcccctaccttttatgcatataacttcctgacatcgtgtctcccactcctgggctgcagcccytggcccacccctagaggtggcttttcttcctgcgagcctgcatcagtacacgctgctgcccactctgtctcctcatgttttggaaggcatgaggaagaca

SEQ ID NO: 299594 - DNA, 201 bp, Homo sapiens
gatgtattggtagatgcatttattgtatcgcctgcattggcggcgggggtctctctacacattttgtttaaacctgggccaggttaatcacgttgggaatytagtgatgtacccagcaagggtggtttcccaagctctccgggtaattgatagggcttgggttgccagtctgattgtggtaacaagcaaaggaagaagtag

SEQ ID NO: 299595 - DNA, 201 bp, Homo sapiens
acagcgatgagagtgacactgccaaggccgtggaggtgcagaacaagcccatgattgaatgggccctggggggcttccagccttctggccctaagggcctrgagccaccagaaggtaaatgagggcacccagctttctgggacccctgcccgccaggcagatccacaccagggctgggaaagccatgcttagggagggctg

SEQ ID NO: 299596 - DNA, 201 bp, Homo sapiens
tcctgctgtgcagcagcccactgaccccgcatcccccactgtggctaccacgcctgagcccgtggggtccgatgctggggacaagaatgccaccaaagcargcgatgacgagccagagtacgaggtgagcggcttcttcaccagccgtggccagctctttccgggggccttccactgccagctcctcccgtcctgctctcc

SEQ ID NO: 299597 - DNA, 201 bp, Homo sapiens
gcggtggctcatgcctgtaatcccagcactttgggaggctaaggcgggcggatcaccaggtcaggagctcgagaccatcctggctaacatggtgaaacccygtctctactagaaatacaaaaaattagccgggtgtggtggtgggcacctgtagtaccagctacttgggaggctgaggcaggagaatggcatgaacccggg

SEQ ID NO: 299598 - DNA, 201 bp, Homo sapiens
  misc_feature (1)...(201): n = A,T,C or G
gctgatgccgctgagctcgttttgcagtgcgttccaccaggccacgtacaacaagcagcccatgtaccgcaaagccatctacgaggtcctgcaggtgagtntccctgctgggagctcggaggaggagcctagagcactaggaggcctggaagttggagtgcaggtcgggcttgagcagaacggaggcccaggaggcagcga

SEQ ID NO: 299599 - DNA, 201 bp, Homo sapiens
acaggccctctggagtcctgaagggcaactggaggacattcacatggcccagacaccctgcctaagacactcagcatgccaggtaccttcagactcagccrtccacttgggtcaccttcccagtgggtggctgtgttgcctgcctgggtgatactagtttccccattggcctaagaaatgatccaacttggtcccgttctt

SEQ ID NO: 299600 - DNA, 201 bp, Homo sapiens
ggaggctgaggcaggagaatggcatgaacccgggaggtggaggttgcagtgagccgagatcccaccactgtactccagcctgggcgacagagcaagactcygtctcaaaaaaaaaaaaaaagaaagaaagaaaagaaaagggccaggcgtggtggctcacacctgtaatcctaacactttgggaggccgaggcaggcagat

SEQ ID NO: 299601 - DNA, 201 bp, Homo sapiens
ggcaaagactggcaggtcctaacagaggcttacaaagtacaaggggagtgtggcagggatggggtagaagataagggacagaagggaaagataagggacaraagggaaagataagggacagaaggggaggataagggtgaggggccagggcagcactgtcaaaagaactttctgggatgatggcaatgttttaaaatcagt

SEQ ID NO: 299602 - DNA, 201 bp, Homo sapiens
gtctcaaaaaaaaaaaaaaagaaagaaagaaaagaaaagggccaggcgtggtggctcacacctgtaatcctaacactttgggaggccgaggcaggcagatyacgaggtcaggagattgagaccatcctggctaacacggtgaaaccctgtctctactaaaaatagaaaaaaattagtcaggcatggtggtgggcgcctgta

SEQ ID NO: 299603 - DNA, 201 bp, Homo sapiens
aagggccaggcgtggtggctcacacctgtaatcctaacactttgggaggccgaggcaggcagatcacgaggtcaggagattgagaccatcctggctaacayggtgaaaccctgtctctactaaaaatagaaaaaaattagtcaggcatggtggtgggcgcctgtagtcccggctacttgggaggctgaggctggagaatgg

SEQ ID NO: 299604 - DNA, 201 bp, Homo sapiens
gagagcaaaggagaagggtgtggaaagtgctggggcagacaggccaggccttcaaaggtggctgccggggtggggggtgggggggcggggggggggggggkgggggggcggggagtgggcagtgtgtgtgatgtaatcagctttgcaatttgaaaagctcatgtcatctggatcctgggatggaatggaggagctgggaag

SEQ ID NO: 299605 - DNA, 201 bp, Homo sapiens
gagtgcagagagcaaaggagaagggtgtggaaagtgctggggcagacaggccaggccttcaaaggtggctgccggggtggggggtgggggggcgggggggsggggggggggggggcggggagtgggcagtgtgtgtgatgtaatcagctttgcaatttgaaaagctcatgtcatctggatcctgggatggaatggaggagc

SEQ ID NO: 299606 - DNA, 201 bp, Homo sapiens
ctagagtgcagagagcaaaggagaagggtgtggaaagtgctggggcagacaggccaggccttcaaaggtggctgccggggtggggggtgggggggcggggrgggggggggggggggggcggggagtgggcagtgtgtgtgatgtaatcagctttgcaatttgaaaagctcatgtcatctggatcctgggatggaatggagg

SEQ ID NO: 299607 - DNA, 201 bp, Homo sapiens
tcctttgataaagacagtccctgtccttgcccctaccctcagcccagggtttttcaaagacattattgccattttgtctggactaaatctctgttgggggsgggggtgtcctctgtctggtggggtgtttagcagcttccctagcctctactcactagatgccagcacctcaccctaaccttgtggcagccaaaaatgtct

SEQ ID NO: 299608 - DNA, 201 bp, Homo sapiens
ccccgctggaaacagaaccctgagtgggccggccactcaccacgcatggtcattctggcatccatttgccatggcttgtgacggcctagccaggccatggmctgagtgacctctaaggctttgcagagcccagagttctctcctcagacacacgggtggagagatctctggggagaagggagacaggcagctcccagcaga

SEQ ID NO: 299609 - DNA, 201 bp, Homo sapiens
tcccttcaggggcctaggtgaggggccacagtcacttgggtccctcctgctcttaatggccgggttagggatggagcccagccctgctgataaggtgagtygcccagggccagggcaggaaaggccaggctcagctgtgcagaatagaagaatgggccaggcgcagtggctcacacctgaatcccagcactgtgggaggcc

SEQ ID NO: 299610 - DNA, 201 bp, Homo sapiens
aaattagtcaggcatggtggtgggcgcctgtagtcccggctacttgggaggctgaggctggagaatggcatgaacccctgaggcagagcttgcagtgagcsgagattgcaccactgcactctagcctgggcgacagagcgagactccatctcaaaaaaaaaaaaaaaaagaaaagaaaaaagaaaatgtctttattttact

SEQ ID NO: 299611 - DNA, 201 bp, Homo sapiens
ttagccgggagtggtgacgggcgcctgtggtcccagctactcgggaggctgagaaatgagaatcacttgaacccaggaggcggaggttgcagtgagtggakatcatgccacttcactccagcctgggcaacagagaaagactccgtctcagaaaacaaaaacaaacaaaaaaacccaactgatcggaagctctgagaatga

SEQ ID NO: 299612 - DNA, 201 bp, Homo sapiens
gagaaggaaatggttgtctggctgccagtattcttagagcccaatcggggaatagcctgagagactggacatcagcatttaaaataaccttcccggccggygcggtggctcatgcctgtaatcccagcactttgggaggctgacgtgggcagatcacctgagattgggagttcgagaccagcctgaccaacatggagaaac

SEQ ID NO: 299613 - DNA, 201 bp, Homo sapiens
ggagttcgagaccagcctgaccaacatggagaaaccccatctctactaaaagtacaaaattagccaggcttggtggtacatgcctgtaatcccagctactygggaggctgaggcaggagaatcgcttgaacccgcgaggcggaggttgcggtgagccgagatcgcggcattgcactccagcctgggcaacaggagtgaaac

SEQ ID NO: 299614 - DNA, 201 bp, Homo sapiens
actcctggagcagaagctctgggacagtacttgtaggtttgattttctagccagcccccagatgattctggggcttactacagcttgaaaaccaccaagcytcagatgattagaggtaaaccaaatctggcacagatgagattcccacacagatgtattggtagatgcatttattgtatcgcctgcattggcggcgggggt

SEQ ID NO: 299615 - DNA, 201 bp, Homo sapiens
gggagtccacagccccaggccaggcccctgttctcagttctgtcccctttcctctggcctcagaaacacaatggctaagatgcattgaacgccgactgccrggtgctatgtgcatgcattatcttattccattctttttttgtttgagacggagtcttgctctgttgcccaggctggagtgcagtggcgtgatcttgtttc

SEQ ID NO: 299616 - DNA, 201 bp, Homo sapiens
tcctaggccgttggcatccactgtgaatgataagctggagctgcaggagtgtctggagcatggcaggatagccaaggtcagctccagcgtctagaacctckgctggggggcagggagaaggaagggcaggatgaggtggagcggtggccagggccttgtcccgcctgcttctccagctagtgtggagaatgcaatttagga

SEQ ID NO: 299617 - DNA, 201 bp, Homo sapiens
tttggataagctgcttttgagaagccagcagattggtgtcaatggggacaggttttttttttttttttttttgagacggagtcttgctctctcgccaggcyggagtgcagtggcacaatctcagctcactgcaacccttgactccctggttcaagtgattctcctgcctcagcctcccgagtaggtggggttacaggcatg

SEQ ID NO: 299618 - DNA, 201 bp, Homo sapiens
gaaagacaaaatctccattggtctagaccagtcatctccacctgacaggtggggaaactgagatgctgagagcagtgccttccttatctgaggcttgccgwgctgatgctgtccctgcctttctactgggtaggtgttctgcatacggagccagcgaggcagagttgctgagtgcagcctggtgcctgtgggtgtggcaga

SEQ ID NO: 299619 - DNA, 201 bp, Homo sapiens
cttattccattctttttttgtttgagacggagtcttgctctgttgcccaggctggagtgcagtggcgtgatcttgtttcactgcaagctctgcctcccggsttcacgccattctcctgcctcagcctcctgagtagctgggactacaggcgcccgccatgcccagctaattttttgtatttttttttttagtagagacggg

SEQ ID NO: 299620 - DNA, 201 bp, Homo sapiens
gaggtgggagaattacttgaacctggtaggtggaggttgcagtgagccaagatctcgccattgcactccagcctgggtggcaagagcaaaactccatctcaaaaaaaaaaaaaaaaaaaaaaagctgcggtgtgtggtggctcatgcctgtaatcctagcccttcgggaggctgaggtgggcaggtcacctgaggtcagga

SEQ ID NO: 299621 - DNA, 201 bp, Homo sapiens
aggtgggagaattacttgaacctggtaggtggaggttgcagtgagccaagatctcgccattgcactccagcctgggtggcaagagcaaaactccatctcaaaaaaaaaaaaaaaaaaaaaaagctgcggtgtgtggtggctcatgcctgtaatcctagcccttcgggaggctgaggtgggcaggtcacctgaggtcaggag

SEQ ID NO: 299622 - DNA, 201 bp, Homo sapiens
tgatcttggctcactgcaacctctgcctcccaggttcaagcaattctcctgcctcagcttccctagtagctgagactacaggcgcgtgccaccatgcccgkctaattttttgtatttttagtagagatggggtttcatcgtgttagcaggatggtctcaatctcctgacctcatgatccacctgcctcagcctcccaaagt

SEQ ID NO: 299623 - DNA, 201 bp, Homo sapiens
tagtaagaagtaaaaataactccaaagaatacaaaaataatagatatgagaacagcccctacctctagggttgccacagagtgcccaaggaagaggccccrcagggttgagatccacaccttgatggagagggtgtggcgatggctccctggatggcaacgtctctgtaatgccatgttggcagaacttgctggaaatcca

SEQ ID NO: 299624 - DNA, 201 bp, Homo sapiens
tgtgttatgattttatggttcggaaaatgtggtcataaagagagagagatgccttccggggggacagcagcgtctgccctgaagttccccaaaggatgtattatttatatatatatatatatatatatatatatatatatatatatatatatattattatattatttagatatataaatatatatctaaatatatatctaa

SEQ ID NO: 299625 - DNA, 201 bp, Homo sapiens
tttccaaagaatttctcaaaaaatgacgtgagccatgtcagcatcattgaatttagatagaggccaggagcagtgtggcatcgtgctggggccaccaggcyggggactggacagatgatggtttcacctcacccctgccacctccttgctgcgtgtcattggaagatcactcaacctttcttaggctcagttttaccatct

SEQ ID NO: 299626 - DNA, 201 bp, Homo sapiens
ccttgtcccgcctgcttctccagctagtgtggagaatgcaatttaggagacggtgcagggtcatgcagcagggcagccagaggagggcccagggctgctgrccttcagcccttcctccctggtgagtgtcgcccatcacccccggtagacactgaggagtctttaccaagacctggttgtgctgtggcttttttttcattt

SEQ ID NO: 299627 - DNA, 201 bp, Homo sapiens
ggcaaagaccagcattttcctgtcttcatgaatgagaaagaggacatcttatggtgcactgaaatggaaaggtacccgggttgtgctggcatctggctgcrgtgtggctgttctgattgctgtgcttgctgcgggggtcctctgcctttcccacctgacttgttttccacaaacgtcctgggaacagtgggttttatcaag

SEQ ID NO: 299628 - DNA, 201 bp, Homo sapiens
ctggtggggtgctggggcgcgcaaggaggctggaggcgggggtgggggggtgcccagccccaagtcctacagcggctgctggaggagtgagatgagcacayagtgagtggctgtgctggtggaattagacagaggtgccccaagtcaggaacctagagccctgagcgctccatggggaaggagaacagcccccacggtgaa

SEQ ID NO: 299629 - DNA, 201 bp, Homo sapiens
cgtgctcagctccttcctgggtttaccattcttcagagtgtgtttctgtttcctagttttccatcaatggttctatttggtccttggggacaactcttgaracaaatggggcagggacagatggccccagtttacagatgaggaagctgagccccgctgggcagtggcaggtccagatgacagcctgttctcctgtctccc

SEQ ID NO: 299630 - DNA, 201 bp, Homo sapiens
cttggtggtacatgcctgtaatcccagctactcgggaggctgaggcaggagaatcgcttgaacccgcgaggcggaggttgcggtgagccgagatcgcggcrttgcactccagcctgggcaacaggagtgaaactccatctcagaaaataaataaataaataaccttcctctccttggtttgatatatcatctttgtcttca

SEQ ID NO: 299631 - DNA, 201 bp, Homo sapiens
ttttatggttcggaaaatgtggtcataaagagagagagatgccttccggggggacagcagcgtctgccctgaagttccccaaaggatgtattatttatatatatatatatatatatatatatatatatatatatatatatatattattatattatttagatatataaatatatatctaaatatatatctaaataatatatt

SEQ ID NO: 299632 - DNA, 201 bp, Homo sapiens
atgtcaaggtctgggaccttggccaccaactggggccccctagagttgtgtagtacatggcccgcccagacacatactggaggattttaggtgatggacaygattttgagggactgctactgacagggctggtccattgagcaacacgaaagggttgacccaggtcagctgcattttctgtgaggacagtttctgcagctc

SEQ ID NO: 299633 - DNA, 201 bp, Homo sapiens
ttatggttcggaaaatgtggtcataaagagagagagatgccttccggggggacagcagcgtctgccctgaagttccccaaaggatgtattatttatatatatatatatatatatatatatatatatatatatatatatatattattatattatttagatatataaatatatatctaaatatatatctaaataatatattat

SEQ ID NO: 299634 - DNA, 201 bp, Homo sapiens
aaaatgtggtcataaagagagagagatgccttccggggggacagcagcgtctgccctgaagttccccaaaggatgtattatttatatatatatatatatawatatatatatatatatatatatatatatattattatattatttagatatataaatatatatctaaatatatatctaaataatatattatttagatatcta

SEQ ID NO: 299635 - DNA, 201 bp, Homo sapiens
ttccggggggacagcagcgtctgccctgaagttccccaaaggatgtattatttatatatatatatatatatatatatatatatatatatatatatatatattattatattatttagatatataaatatatatctaaatatatatctaaataatatattatttagatatctaaataatatattatttagatatatatatggg

SEQ ID NO: 299636 - DNA, 201 bp, Homo sapiens
cggggggacagcagcgtctgccctgaagttccccaaaggatgtattatttatatatatatatatatatatatatatatatatatatatatatatatattattatattatttagatatataaatatatatctaaatatatatctaaataatatattatttagatatctaaataatatattatttagatatatatatgggtgt

SEQ ID NO: 299637 - DNA, 201 bp, Homo sapiens
ggttctgcccagaaggaaagcgaagattggcaaactcggagggaccccaggaagtggtgggcaggatttgaagacccaaagtgtggtataccgggtggggrtaggtggacagtgggtgataggaccaagctgtactgaaatctagaatgatactagattcacaaccctcctgtggcccccatctggccccccacgggagga

SEQ ID NO: 299638 - DNA, 201 bp, Homo sapiens
tcaaatcccaccctcacatttccctgttttcttatttatttatttacttttttactgagacggagtctcactctgttgcccaggctggagtgcagtggcgygatctcggcttactgcaacctccacctcctgggttcaaacagttctcccacctcagcctcccaagtagctgtgattacaggcacgcgccaccattcccgg

SEQ ID NO: 299639 - DNA, 201 bp, Homo sapiens
cttggctgagccttggttgtggggcctgagctgtgcgcagggtgtgtgggtctaggagcctggctggagggccagcgctgggtgggagcttgggacaccgmtgggcctgcatctgacctgttgtgctcactgcttaggaccctccaaaggtttacccacctgtcccagctgagaagaggaagcccatccgggtgctgtctc

SEQ ID NO: 299640 - DNA, 201 bp, Homo sapiens
gcgggtgcctgtaatcccagttactcgggaggctgaggcaagagaatcgcttgaacccggaaggggaaggttgcagtgagccaagattgtgccactgcacwccagcctgggcaacagagcgagactctgtctcaaaaaaaaaaaaaaaaaaaaacaatgcagagctggctgtgtaaaaaacctgttccactgcagggccca

SEQ ID NO: 299641 - DNA, 201 bp, Homo sapiens
acaaacaaataaaaaagtgttaaagaggaggaaggcatttcaggaaaaggaactactgagggcaaagagaaggaggcatgacttctgggttgtttagggartagtaagagatctggtaactagggtgcaggggttagggaggatgggcaagaagagacagaactagaaagcaagatggtcacatcctcagtggtcttcctg

SEQ ID NO: 299642 - DNA, 201 bp, Homo sapiens
cctgtaatcccagttactcgggaggctgaggcaagagaatcgcttgaacccggaaggggaaggttgcagtgagccaagattgtgccactgcactccagccygggcaacagagcgagactctgtctcaaaaaaaaaaaaaaaaaaaaacaatgcagagctggctgtgtaaaaaacctgttccactgcagggcccagtgtcca

SEQ ID NO: 299643 - DNA, 201 bp, Homo sapiens
acaggagaatcgcttgaacctgggaggtggaggttgcagtgagccgagattgcgccactgtgctccagcctgtgcaacagagagattccatctcaaagggraaaaaaaaaaaaagaggagtctaggaaatcccctgctgccttgtctcccagagaccctgctgatcccccagggaaccactgcagtgacaggaccttaact

SEQ ID NO: 299644 - DNA, 201 bp, Homo sapiens
agaattctaccctcccctgtgagaggttggtaggtaaatgaatgaattgtgctgtagccagggcagggttgttttagaaatactaagggaaggactgtgcragcaactccctagccctgcctaagggcctcagggaaggcggtgcctagggagaggcagtgtaccgccattgacctgaacaggactgcttggcagggacag

SEQ ID NO: 299645 - DNA, 201 bp, Homo sapiens
taatcccagttactcgggaggctgaggcaagagaatcgcttgaacccggaaggggaaggttgcagtgagccaagattgtgccactgcactccagcctgggyaacagagcgagactctgtctcaaaaaaaaaaaaaaaaaaaaacaatgcagagctggctgtgtaaaaaacctgttccactgcagggcccagtgtccaccag

SEQ ID NO: 299646 - DNA, 201 bp, Homo sapiens
gtgcctgtagtcccagctactcaggaggctgagacaggagaatcgcttgaacctgggaggtggaggttgcagtgagccgagattgcgccactgtgctccakcctgtgcaacagagagattccatctcaaagggaaaaaaaaaaaaaagaggagtctaggaaatcccctgctgccttgtctcccagagaccctgctgatccc

SEQ ID NO: 299647 - DNA, 201 bp, Homo sapiens
agtctcactgaatattctgttacctaaagactacattataaagctaactgtcaacaacttgtatagaaaagaatgggaaggagaaaaaaagaagaaaatgrttaccatattgcaaacacaccacacacacacacacacacacacacacacacacacacacacacatatatatcaagttaatagaaaatgtgcaaaaccact

SEQ ID NO: 299648 - DNA, 201 bp, Homo sapiens
ttcttaccaaacctgtcaccctaggattggcagaaattgaaaacagaagcaacttcaaaagagatttacttaacgtatgggatctctcatacgtaatggcttttttgtttttgtttttgtttttgtttttgagacagagtctcactctgttgcccaggccggagtgcagtggtgcgatctcggctcactgcaacctttgcc

SEQ ID NO: 299649 - DNA, 201 bp, Homo sapiens
tattctgttacctaaagactacattataaagctaactgtcaacaacttgtatagaaaagaatgggaaggagaaaaaaagaagaaaatggttaccatattgmaaacacaccacacacacacacacacacacacacacacacacacacacacacatatatatcaagttaatagaaaatgtgcaaaaccactagaggcctggtt

SEQ ID NO: 299650 - DNA, 201 bp, Homo sapiens
atggctgttgagtgagtgcttgaagcagggagtgattagctggccaggatgttgaattgagctcaagggccatgaggatggaaaaaagccctttggggccrcgggtgactgtatcagtcagggtccattcagaagacagaaaccacatggtgattggaacaaggaaagtttcacataacgaattattaactctaattggat

SEQ ID NO: 299651 - DNA, 201 bp, Homo sapiens
attctgttacctaaagactacattataaagctaactgtcaacaacttgtatagaaaagaatgggaaggagaaaaaaagaagaaaatggttaccatattgcaaacacaccacacacacacacacacacacacacacacacacacacacacacatatatatcaagttaatagaaaatgtgcaaaaccactagaggcctggttt

SEQ ID NO: 299652 - DNA, 201 bp, Homo sapiens
ttctgttacctaaagactacattataaagctaactgtcaacaacttgtatagaaaagaatgggaaggagaaaaaaagaagaaaatggttaccatattgcamacacaccacacacacacacacacacacacacacacacacacacacacacatatatatcaagttaatagaaaatgtgcaaaaccactagaggcctggtttc

SEQ ID NO: 299653 - DNA, 201 bp, Homo sapiens
ctgttacctaaagactacattataaagctaactgtcaacaacttgtatagaaaagaatgggaaggagaaaaaaagaagaaaatggttaccatattgcaaacacaccacacacacacacacacacacacacacacacacacacacacacatatatatcaagttaatagaaaatgtgcaaaaccactagaggcctggtttctg

SEQ ID NO: 299654 - DNA, 201 bp, Homo sapiens
tacctaaagactacattataaagctaactgtcaacaacttgtatagaaaagaatgggaaggagaaaaaaagaagaaaatggttaccatattgcaaacacaccacacacacacacacacacacacacacacacacacacacacacatatatatcaagttaatagaaaatgtgcaaaaccactagaggcctggtttctgcatt

SEQ ID NO: 299655 - DNA, 201 bp, Homo sapiens
tgtgacatttaggaagtgcagtcagtaggaacaggcgggataaaagcaatgaggggagttggggtggctgtctggtttctagctcagccaactgtgtgggyggggatgcccttcatggagggggcatgggttggggggagtcggagagagcaggaggtgcctcccacatggagctgggttgtagctggggcttgagggcgg

SEQ ID NO: 299656 - DNA, 201 bp, Homo sapiens
  misc_feature (1)...(201): n = A,T,C or G
cattcgatctggtgattgggggcagtccctgcaatgacctctccatcgtcaaccctgctcgcaagggcctctacggtaggtaccatcctgtcccctccacnttctcagctggtgcttccgcacataggcttcctccttggatatttctgccctgggacagctattcccgatgaccctgtcttcccgtgccctccccgtgcc

SEQ ID NO: 299657 - DNA, 201 bp, Homo sapiens
catttacacaaacaaccagagcaaacaggaaatccttcagcttctgaagtcaggcaggagttcggctcctttttcgccttccctgctcttgatggggaggwtgctagggctacgtgttcgttacatgcagactccaggtgtacgttgccgagctaaccctgcaggagaggagaactagagagtgtgtcctggaggtatttc

SEQ ID NO: 299658 - DNA, 201 bp, Homo sapiens
gaattgtggagaagaagagagggtcccccttgctttttaaatttttggtgacagggtcttgctatgttgcccaggctggtcttgaactcctgggctcaagygatcctccctgctcagtaactgggattacaggcacatgcctggctgaagatcctagtcttgattaagaagataggagagggtggaaccaatatctgtgtc

SEQ ID NO: 299659 - DNA, 201 bp, Homo sapiens
aggtgggtggatcacttgaggtcaggagttcaagaccagcctggccaacatggcgaaagctgtctctactaaaaatacaagaattagccgggagtggtgaygggcgcctgtggtcccagctactcgggaggctgagaaatgagaatcacttgaacccaggaggcggaggttgcagtgagtggagatcatgccacttcactc

SEQ ID NO: 299660 - DNA, 201 bp, Homo sapiens
gaaaacagaagcaacttcaaaagagatttacttaacgtatgggatctctcatacgtaatggcttttttgtttttgtttttgtttttgtttttgagacagaktctcactctgttgcccaggccggagtgcagtggtgcgatctcggctcactgcaacctttgcctcccgggttcaaacaattctcctgtctcagttttctga

SEQ ID NO: 299661 - DNA, 201 bp, Homo sapiens
tcgaagggatttattgaaaatgaaagtacactacacaatgtgagagcaggcctgagcatagggggctcaaaggccattttttttgtatttttagtagagayggggtttcaccatgttggccaggctggtctcgaactcccaacctcagatgatccgcccgcctcggcctcccaaagtgctgggattacaggcgtgagccac

SEQ ID NO: 299662 - DNA, 201 bp, Homo sapiens
aaatacaaaaattagctgggtgtggtggcgggtgcctgtagtcccagctactcaggaggctgagacaggagaatcgcttgaacctgggaggtggaggttgyagtgagccgagattgcgccactgtgctccagcctgtgcaacagagagattccatctcaaagggaaaaaaaaaaaaaagaggagtctaggaaatcccctgc

SEQ ID NO: 299663 - DNA, 201 bp, Homo sapiens
gggggagaaggcaagaggagctcccagtgggaaaggaagaggcaggggaggagggagaatggcatctacccaccccccacccccacaggatcccccttccycggtgatcgctgcaggtgggctgcagcctggggacagggcttcttgccccaggtgccagggcctcatctcccctgtgccatgaccttcacctctcctcct

SEQ ID NO: 299664 - DNA, 201 bp, Homo sapiens
acacacacacacacacacacacacatatatatcaagttaatagaaaatgtgcaaaaccactagaggcctggtttctgcatttgttcacaaggctacacttyacacttgctacctggcttcattgtcttcttatcccattctgtgtttcctccacactcagccagagccttagcaggtcatgcttcttttacttggtggagt

SEQ ID NO: 299665 - DNA, 201 bp, Homo sapiens
gttacctaaagactacattataaagctaactgtcaacaacttgtatagaaaagaatgggaaggagaaaaaaagaagaaaatggttaccatattgcaaacacaccacacacacacacacacacacacacacacacacacacacacacatatatatcaagttaatagaaaatgtgcaaaaccactagaggcctggtttctgca

SEQ ID NO: 299666 - DNA, 201 bp, Homo sapiens
ggaggccgaggtgggtggattacctgaggttgggagttcgagaccagcatggccaacatggcgaaaccccatctctactaaaaatacaaaaattagctggrtgtggtggcacacgcctgtaatcccagctactagttgggactgaggcaggagaatcgcttgaacccgggaggcagacgttgtaatgagacgagatcacac

SEQ ID NO: 299667 - DNA, 201 bp, Homo sapiens
cccctattaggtcatttactatttttttaattattattataagtagtgctgtgacaagcatcctgatagaatatatacttgaaccattccctccttaggaraacctttaggagatgctgggtcaccctgcaggcattgtttgcttcatgtgactctggacactgcagaaagcgtcctaggagattgtgaagacacatccac

SEQ ID NO: 299668 - DNA, 201 bp, Homo sapiens
aagactacattataaagctaactgtcaacaacttgtatagaaaagaatgggaaggagaaaaaaagaagaaaatggttaccatattgcaaacacaccacacacacacacacacacacacacacacacacacacacacacatatatatcaagttaatagaaaatgtgcaaaaccactagaggcctggtttctgcatttgttca

SEQ ID NO: 299669 - DNA, 201 bp, Homo sapiens
acatggtgaaaccccatctttaccaaaaatacaaaaagttagccaagtgtaatagcagacacctgtaatcccagctacttgggaggctgaggcaggagaaycgcttgaacccaggaggtggaggttgtagtgagccgagattgcaccactgtgctccagactgggcaacaagagcgaaactccatctcaaaaaaaaaaaag

SEQ ID NO: 299670 - DNA, 201 bp, Homo sapiens
atctggaaaggatgctcactgaactgttaataatgggtaccttaggggagagattttgggggtagggagctgaaataggagctttaaccttttagcattattttttttttttttgtatagtcttttttttttttttttttttagatggagtctcactctgttgcccaggctggagtgcagtggagcagtttcagctcactg

SEQ ID NO: 299671 - DNA, 201 bp, Homo sapiens
gagagattttgggggtagggagctgaaataggagctttaaccttttagcattattttttttttttttgtatagtcttttttttttttttttttttagatgsagtctcactctgttgcccaggctggagtgcagtggagcagtttcagctcactgcaacctctacctcctggattcaagtgattctcctgcctcagcctccc

SEQ ID NO: 299672 - DNA, 201 bp, Homo sapiens
tattggaaagcaaactttccaagagagcacccgggacctgttagcttttgaaacaggcctgggtgtgattgactggtagagatgcctgtgtgatttttggygcattgcaggagtgtggattgggacaggcaccccagcaggaaggaaggctgacaccaaaggggtctcacagggcccagctccccttgcttcccgataatt

SEQ ID NO: 299673 - DNA, 201 bp, Homo sapiens
ttggccttgaggctgggcacagtggctcatgctggtaatcctagcactttgggaggcccaggcgggcagatgacttgaggtcaggagttcgagaccagccrggccaacacagtgaaaccttgtctctactaaaaatacaaaaaaaaattagtcgagcttggtggtgcatgcctgtagtcgcagctactccggagtctgaga

SEQ ID NO: 299674 - DNA, 201 bp, Homo sapiens
cgagcttggtggtgcatgcctgtagtcgcagctactccggagtctgagacaggagaatcacttaaacccgggaggtggaggttgcagtaagccaagattgygccactgcactccagcctgggcaatagagtgagactccatctcaaaaaaatacaaaaaaaaaaaacaaactttggccttggtacactcctgtgtggtccc

SEQ ID NO: 299675 - DNA, 201 bp, Homo sapiens
ggggcatttgtgagcttgcgcttttctgagactcaacccagagcgggagtcggccttcaaatgcctcgcctgtacctgagccatcctggaagctttactgmtcagaggcgtgtgacccaaggcaggcctcagaaaagcgagtatcgctccagctcccctaggatccctgtgaaaattacatttattaattttataagcata

SEQ ID NO: 299676 - DNA, 201 bp, Homo sapiens
acccgggaggtggaggttgcagtaagccaagattgtgccactgcactccagcctgggcaatagagtgagactccatctcaaaaaaatacaaaaaaaaaaamcaaactttggccttggtacactcctgtgtggtcccagctatccaggaagtatagattctggcagggatcagagctggtaggatccctgaaggccactgca

SEQ ID NO: 299677 - DNA, 201 bp, Homo sapiens
aggaagcaaatttaaaggcaagtcagaattctaccctcccctgtgagaggttggtaggtaaatgaatgaattgtgctgtagccagggcagggttgttttaraaatactaagggaaggactgtgcaagcaactccctagccctgcctaagggcctcagggaaggcggtgcctagggagaggcagtgtaccgccattgacctg

SEQ ID NO: 299678 - DNA, 201 bp, Homo sapiens
cacctcccagctactcgggaggctgaggcaggagaatggcgtgaacccgggaggcggagcttgcagtgagccgagatcgcaccactgcactccagcctggrcgacagagccagactctgtctcacaaaaaaaaacaaaacaaaaaactctttttaaaaaaaaaacctttggcccagcacagtggctcacgcctgtaatccc

SEQ ID NO: 299679 - DNA, 201 bp, Homo sapiens
cagcagatcgagaccatcctggctaacatggtgaaaccccatctctactaaaaatacaaaaaattagccgggcgtggtggcaggcacctcccagctactcsggaggctgaggcaggagaatggcgtgaacccgggaggcggagcttgcagtgagccgagatcgcaccactgcactccagcctgggcgacagagccagactc

SEQ ID NO: 299680 - DNA, 201 bp, Homo sapiens
caggccagacaaggactcagcccccctgattcctgtggttcactgatagcctaggccctcaccaaccccttcaccttggggatctggggcaggtgagcctrcagacccacagcaggtgtatgttctgccctcggagctcctgcaaacagcctttccactgacgcagtgccttgggggctctgccaagcgacccctagaatg

SEQ ID NO: 299681 - DNA, 201 bp, Homo sapiens
acgcctggaaacggggtctttggatcatccgaggcatcaccctaggtcagccacccatgcctgaagcttgagaaggcgtggtgggcgaggagcagcggcgwggtgtgggctcctctgcgagggtagctgacgcagctgaggatcccagcaagggaggcaccctcccccatagcggggtccacacttcagtgcaccttctcg

SEQ ID NO: 299682 - DNA, 201 bp, Homo sapiens
ctgggtttctgcagggactttgctgttcctgagcagggctttaatggtctactaaaggtgccagatccctttccactttaattttgagggctcattttcartcatttctctctgacgatttttccctaagaacatgaccaaatctgagatccatgaagtgtcagcctgagatttatgtctgtatccgagcctgcctccact

SEQ ID NO: 299683 - DNA, 201 bp, Homo sapiens
gcctgatggcgcatctattgggctgggacttcccagcatacaccattagggaagtgtagggttggctgggagagaacgagggagccaggggctctgggatrgaggtggggagagaaggggaggtgagggtatcagcaagagggaagttgggctttcctttccagcagttgggctcccccatcctgcatcttcctccttgat

SEQ ID NO: 299684 - DNA, 201 bp, Homo sapiens
tgtttgtgggaggtggtgcccagttcttcccagggttgtccatgctacccagagcctgaggcctggagggccattcacgtgccagtcacatgcctctcccwgggtacttcctgctgcctccaacttgctggcctggggtcctggacttggtgctcgtatcctccccaccccgtgccccactgggagttgagtgtgtctctg

SEQ ID NO: 299685 - DNA, 201 bp, Homo sapiens
actaagctgttgagtgtgggctgtgtcctggggaatacttgggaacggccatggtctgggggcaggaggccttcggagtgtccctcccccgccactccctrgaggaccccgggagacacaggcgagttcgcccctgcccctgccaagccagtgggattccccagcaccccagtgagcagaacctgtttggaaagaggcttc

SEQ ID NO: 299686 - DNA, 201 bp, Homo sapiens
cacctgccgctgtctgtgctctggagtggcaactgtggccatggctgactccctccccttcttgggcctggcttgctttctctgtcggataaggtgacccygagtgtcgccccactctgggtccgatgtcctgacagttgctgacgcagctccccatcaatgcactggcagtcactggtcagctgctccccacaggtgggg

SEQ ID NO: 299687 - DNA, 201 bp, Homo sapiens
ggaggctgagaaatgagaatcacttgaacccaggaggcggaggttgcagtgagtggagatcatgccacttcactccagcctgggcaacagagaaagactcygtctcagaaaacaaaaacaaacaaaaaaacccaactgatcggaagctctgagaatgatagtggacttgttggttttcaagtctacataggctgacctgaa

SEQ ID NO: 299688 - DNA, 201 bp, Homo sapiens
gcctccggagtagctgggattacaggcgccagccaccatacctggttaatttttgtaattttagtagagacagggtttcgccatgttggccaggctggtcrtggactcctgatctcaagtgatctgcccaccttggccttccaaagtgctgagattacaggcatgagccactgcactcagcctggaagactcttattatcc

SEQ ID NO: 299689 - DNA, 201 bp, Homo sapiens
cataggccgtactgagagagcagctgaccctccctgactcacgacaagtgccgcattccgaggcggcccggccaggctggaaagcgtgtgtctgtttgtgktgtgtgtgtgtgtgtgtgtgtgtgtgtgtgtgtgtgtgatcactcaagtgggcatgcgcagagtctgtcagggagaaaattccagaaagaagccagttgg

SEQ ID NO: 299690 - DNA, 201 bp, Homo sapiens
ggatggcgacttgaaactcatttctgacccaaagtggagaacaaatcactgaggatcttcccccaaaagcatcagtctgatgggctgttgtggcccaaatggttcctggggaactggaggtataactggggcccggcccgggtatggagctcaggtgacccagccctggcatagtgagagcctcttgggaggccacaccca

SEQ ID NO: 299691 - DNA, 201 bp, Homo sapiens
gatcacctaaggtcaggagttcgagaccagtctgcccaacatggcaaaaccctgtttctactaaaaagacaaaaaattagccgggcatggtggcaggcgcytgtaatcccagctactcaggagactgaggcaggagaatcacttgaacccgggaggcggaggttgcagtgagctgagatcacaccactacactccagcctg

SEQ ID NO: 299692 - DNA, 201 bp, Homo sapiens
taaggtcaggagttcgagaccagtctgcccaacatggcaaaaccctgtttctactaaaaagacaaaaaattagccgggcatggtggcaggcgcctgtaatyccagctactcaggagactgaggcaggagaatcacttgaacccgggaggcggaggttgcagtgagctgagatcacaccactacactccagcctggacaaca

SEQ ID NO: 299693 - DNA, 201 bp, Homo sapiens
ccctgtttctactaaaaagacaaaaaattagccgggcatggtggcaggcgcctgtaatcccagctactcaggagactgaggcaggagaatcacttgaaccygggaggcggaggttgcagtgagctgagatcacaccactacactccagcctggacaacaagagcaaaactctgtctcaaaaaaaaaaaaaatacaaacaat

SEQ ID NO: 299694 - DNA, 201 bp, Homo sapiens
tgggcatagtggcgggcacctgtaatcccagctacttgggaggctgaggcaggagaatcactggaacccaggaggcagaggttgcagtgagccgagattgygccactgcactccagcctgggtgacagaacgagactctgtctcaaaaaaacaaaacagactttgtaaaactcatgaacattttctaacatatgcagaagc

SEQ ID NO: 299695 - DNA, 201 bp, Homo sapiens
tcccgagtggctgggatcacaggcacctgctgacacacccggctaactttttgtatttttagtagagatgggggtttcaccatgttggtcaggctggtctygaactcttgacctcaggtgatctgcccgccttggcctcccgaagtgctgggattacaggcatgaatcactgcacccggcctatcaggcctgtttttgttt

SEQ ID NO: 299696 - DNA, 201 bp, Homo sapiens
ctggagtgcaatggcacaatctcagctcactgcaacctccatctcccaggttcaagcgattctcctgcctcagcctcccgagtagctgggattacaggcgygcaccaccacacccggctaattttttgtaatgttttctaagtggtgtaacaacagcacagacatttctcctcttttctcagtctcattttgctctctgac

SEQ ID NO: 299697 - DNA, 201 bp, Homo sapiens
caggagcattagctttcaccacaatcctaaaacatattatctgcatttaatgtcttttttttttttttgagatggagtcttactctgtcacccagtctgargtgcagtggcatgatctcagctcactgcaacctctgcctcttgggttcaagcgattctcctgccccagcctcccaagtagctaggattacaggcacctgc

SEQ ID NO: 299698 - DNA, 201 bp, Homo sapiens
gcaaagtagaccagtaaaggctcaaaacaaattattagccaactgtatgggaagcagttttagagcatttggactggaagacattcctcacttatttgccstacctgaccttttgcagcgtggcctcaaaaataacatcacccttgaaggagatgatgatgtttggagtaggcacagcaagtatactttacccaaggctga

SEQ ID NO: 299699 - DNA, 201 bp, Homo sapiens
ccctgtgagaacgaaatggtgcaagcaccaaggagcctcagcaaaggtcgggcctgcccccgcctggccaaacctttcctcttcaggaggccacggcaacygtagtttgacagaagagcagcaccttgatttaatgcttcccagcatgtgtccttgagcaagtcacctaacctctctgggctgcttcctcattgggaaaat

SEQ ID NO: 299700 - DNA, 201 bp, Homo sapiens
atgtgcgtgcgtgtgtgtgtgtgtgtgtgtgtgtgtgtgtgtatgcatctgtgggcagcattggggctgcggttcctcctttcccctccccatcaaagtcyggcccagaggcctggcagccactgatttctcgtgggctctctccactctggtctgcaagtacaagggcctccatccttgggtggggtccctgccagttcc

SEQ ID NO: 299701 - DNA, 201 bp, Homo sapiens
cctctctccagcttgactgtggccaccacctatgctaagaccgggcacctctgttcaccctccatgtgcatgtctttggaggcctcccagaacttgagccrtgatggtctgccctgcagacatgcctcagctggaggatggatggaggggccagggatgctcttcccgctggtcttatgtctacagctggtcacagtaggt

SEQ ID NO: 299702 - DNA, 201 bp, Homo sapiens
tcctctgatcaagccttctcctgcctgtagtagaagctgcagctggggtgcatctttgtgctggggaaacacagcacttatgtgtttgcacatgtgcgtgygtgtgtgtgtgtgtgtgtgtgtgtgtgtgtgtatgcatctgtgggcagcattggggctgcggttcctcctttcccctccccatcaaagtctggcccagag

SEQ ID NO: 299703 - DNA, 201 bp, Homo sapiens
caggcctcccctcccatggggcgtgtgcccttgggcaccctgagccctcatgaaggctcccgcgagtttgctcctcctcccacagcctttctgccctcacygcccgtctgctgtgctttcctgaaaagagcccctgaaggatctccggcctcggggctggcctctccctccacagacggcacggggctccccagtcccctg

SEQ ID NO: 299704 - DNA, 201 bp, Homo sapiens
agtcttgctctgtcgcccaggctggagtgcagtggtgccatcctggctcactgcagcctccgcctcccaggttcaagcgattctcctgcctcagcctcccragtagctgggattacaggcacctgccaccacgtctggctaatttttatattagtagagaccgggtttcaccatgttgatcaggatggactcaaactcctg

SEQ ID NO: 299705 - DNA, 201 bp, Homo sapiens
aggagtctgaggcattagaatcgcttgaacccgggaggtggaggttacagtgagctgagatcgcaccactgcagtccagcctgggtgacagagcgagactmcgtctcaaaaaaaaaaaaaaaagtctgtggctagatggatctaagattggccaggtgacctccaagtaggaagaaaagtgaggctgtggggtctgtggag

SEQ ID NO: 299706 - DNA, 201 bp, Homo sapiens
accccaggctcctgggtattttaaggttggtcccaagtaagaggagtctaggggccaggagcagtggctcatgcctataatcccagcactttgggaggccraggcgggtggatcacctgaggtcaggagttcgagaccagcctggccaacatggcgaaaccccgtctctactaaaaatacaaaaattagctgggtgtggtg

SEQ ID NO: 299707 - DNA, 201 bp, Homo sapiens
ggtgaaaccacctctctactaaaaatacaaaaatttagctgggtgtgatggtgcacgcctgtaatcccagctactccggaggctgaggcaggagaatcacytgaacccgggaggtggaggttgcagtgagccgagatcgcgccactgcactccagcctgggcgacagagtgagacttcgtctcaaaagaaaaaaaaaaaaa

SEQ ID NO: 299708 - DNA, 201 bp, Homo sapiens
cttccgacctgaaggtagggacccttgactcatgcatccttatacttattagatgcttaataatattgaatagtgataatgaaacatctgtgactggaacrtcatagtctctcctcccttccctcgccacactgagatacaacccactccctccgcccagggctgcccagcagatagcagagccttcatggaccttaaggg

SEQ ID NO: 299709 - DNA, 201 bp, Homo sapiens
tctactaaaaatacaaaaatttagctgggtgtgatggtgcacgcctgtaatcccagctactccggaggctgaggcaggagaatcacttgaacccgggaggyggaggttgcagtgagccgagatcgcgccactgcactccagcctgggcgacagagtgagacttcgtctcaaaagaaaaaaaaaaaaaagacctgcaagtgt

SEQ ID NO: 299710 - DNA, 201 bp, Homo sapiens
ggaggccaaggcgggtggatctcttgaggccaggaattcgagaccagtctggctaacatggtgaaacgccgtctctactgaaaatacaaaaattagctggycgtggtggcacatgcctgtaatcccagctacttggaaggctgaggcacaagaatcgtttgagccagggtggtggaggttgcagtgagtcaagattgcgcc

SEQ ID NO: 299711 - DNA, 201 bp, Homo sapiens
ctccaggaaagcttcctggaggaggcaggcatcctttgagaatttcagtaagtgcaaaagaggctgggtgcagtgtaatcccagcactttgggagaccaargtgggaggattgcttgagcccaggagttcaagagcagcctgggcaacatggccagacccactctctacaaaaaaaatatttaattagctgggcatggtgt

SEQ ID NO: 299712 - DNA, 201 bp, Homo sapiens
ggaggcatgacttctgggttgtttagggagtagtaagagatctggtaactagggtgcaggggttagggaggatgggcaagaagagacagaactagaaagcaagatggtcacatcctcagtggtcttcctgccatagtgagaaatttaggcttcgttgtccagtggagagcaggggtggaagagaattggacacatagttta

SEQ ID NO: 299713 - DNA, 201 bp, Homo sapiens
gtctttaagatattttctcttaggagggggtggatttttgagctagggtttggataagctgcttttgagaagccagcagattggtgtcaatggggacaggttttttttttttttttttttgagacggagtcttgctctctcgccaggctggagtgcagtggcacaatctcagctcactgcaacccttgactccctggttca

SEQ ID NO: 299714 - DNA, 201 bp, Homo sapiens
tggaagatcactcaacctttcttaggctcagttttaccatctgtaaaatggacataacttcacaggctggtgttgtttgttttgagcattgcttcttggamtaaacctggatattttttccttccctccctcgcttctgcacttcctctggttctttgcctcccaagaagcctgtttcctcctgttccctccaaaactcca

SEQ ID NO: 299715 - DNA, 201 bp, Homo sapiens
ctcagctcactgcaacccttgactccctggttcaagtgattctcctgcctcagcctcccgagtaggtggggttacaggcatgtgctgccatgcccagctartttttgtatttttagtagagacggggtggggtttcaccatgttggccaggatggtcttgatctcctgatctcatgatctgcccaccttggcctcccaaag

SEQ ID NO: 299716 - DNA, 201 bp, Homo sapiens
gtcctcctcatgcttggctcactcccctcattagagcacatcttccaggacacacatctgtccatatcaaaatccattcatggctgggcacagtggctcaygcctctaatcccaggactttgggaggccgaggcgggtggatcacctgaggttaggagtttgagaccagcctggccaacatggcaaaatcccatctctact

SEQ ID NO: 299717 - DNA, 201 bp, Homo sapiens
tttttgtatttttagtagagacggggtggggtttcaccatgttggccaggatggtcttgatctcctgatctcatgatctgcccaccttggcctcccaaagygctgggattacaggtgtgagccactgcgcccgaccccaggggacaggtttagtcagattccagggtggtcctcatggaggggacgcacaggcaggagggc

SEQ ID NO: 299718 - DNA, 201 bp, Homo sapiens
ttgtttctcatctgccttatttttttgtacctgttgctaattcctaccacaacttctaatataattttatttttctttaacaatactgttaccttaggacwtctttttctttttttctttttaactgacacataataattgtgcatctctatggggtacaatgtgatgtttcaatacatgcatacattgtgtaatgatcaa

SEQ ID NO: 299719 - DNA, 201 bp, Homo sapiens
tgggttcaagcaatcctcccacctcagcctcccaagtagctgggattataggtgtccgcccccacctctggcttttttttttttttttttttttgagacaragtctcactctgtcacccaggctggagtgcagtggcatggtcttggctcactgcaacctctgcctcccgggttcaagtgattctcctgcctcagcctcct

SEQ ID NO: 299720 - DNA, 201 bp, Homo sapiens
cccacctcagcctcccaagtagctgggattataggtgtccgcccccacctctggcttttttttttttttttttttttgagacagagtctcactctgtcacmcaggctggagtgcagtggcatggtcttggctcactgcaacctctgcctcccgggttcaagtgattctcctgcctcagcctcctgagtagctgggactata

SEQ ID NO: 299721 - DNA, 201 bp, Homo sapiens
gttgctgacgcagctccccatcaatgcactggcagtcactggtcagctgctccccacaggtggggagggtggggacagctgggacaaactcctcctgttaytggactgtactcccacgccgctgctgctgctctgggctgcggagccccaggccaccaccaatggacgggagcaggtcaggatctgcattataatagctca

SEQ ID NO: 299722 - DNA, 201 bp, Homo sapiens
ctgctcagtgcaggggttaggggggtgcccctgcccgacagcatttgcccaaatgccgctcctctccccagactcagggaggaggttctggggcagggccsaggtttggggtgatggcatagagcccaaccaggcagcacactgcagttgccatggtgacccttttgcttttcttcaggaggatggatttctcttttagcc

SEQ ID NO: 299723 - DNA, 201 bp, Homo sapiens
gggcacggcccgagccatctgctcacccttcttggcgtgttagccccctccctccgcagagggaacctcaggcaggcccagagcagaagcatcgcttcccrctttgccctaagactccatcgcggaagagttggcagaagagaacatgcttttcacaacgctgctcttagggccaaatgtcaaggggaagggccaggagtt

SEQ ID NO: 299724 - DNA, 201 bp, Homo sapiens
tcaacccatcagcaaagatatggaataaaacagaccccgtgacagatgcgagaatgaaccacttgctacgcttccttggagccattgaggggcacggcccragccatctgctcacccttcttggcgtgttagccccctccctccgcagagggaacctcaggcaggcccagagcagaagcatcgcttcccgctttgccctaa

SEQ ID NO: 299725 - DNA, 201 bp, Homo sapiens
actgttcttcagctgtcccatgtcaccacggatcagattcttttctttcagagtattagcaacgcctcctaattcagggctacttgcagatttgataagcrtgttttacattcctttgctcaacccatcagcaaagatatggaataaaacagaccccgtgacagatgcgagaatgaaccacttgctacgcttccttggagc

SEQ ID NO: 299726 - DNA, 201 bp, Homo sapiens; identical to SEQ ID NO: 62436

SEQ ID NO: 299727 - DNA, 201 bp, Homo sapiens; identical to SEQ ID NO: 62437

SEQ ID NO: 299728 - DNA, 201 bp, Homo sapiens
ggggctgtgtgcgtgtgtgaacctgtgcgcctgggtcatctctgcatttgtctaggtatatctctgtgtgtgcatctatgtgtgtttgtatctgtgtgtctgtgtgtgtgtgtgtgtgtgtgtgtgtgtgtgtgtgtggggtctgcatgactgtgagagactcctgaggccacagtggcaggtagacattctctggtaaat

SEQ ID NO: 299729 - DNA, 201 bp, Homo sapiens
gggctgtgtgcgtgtgtgaacctgtgcgcctgggtcatctctgcatttgtctaggtatatctctgtgtgtgcatctatgtgtgtttgtatctgtgtgtctgtgtgtgtgtgtgtgtgtgtgtgtgtgtgtgtgtgtggggtctgcatgactgtgagagactcctgaggccacagtggcaggtagacattctctggtaaata

SEQ ID NO: 299730 - DNA, 201 bp, Homo sapiens
attataggtgtccgcccccacctctggcttttttttttttttttttttttgagacagagtctcactctgtcacccaggctggagtgcagtggcatggtctyggctcactgcaacctctgcctcccgggttcaagtgattctcctgcctcagcctcctgagtagctgggactataggcacacgccaccatgcctggctaatt

SEQ ID NO: 299731 - DNA, 201 bp, Homo sapiens
tggcttttttttttttttttttttttgagacagagtctcactctgtcacccaggctggagtgcagtggcatggtcttggctcactgcaacctctgcctccygggttcaagtgattctcctgcctcagcctcctgagtagctgggactataggcacacgccaccatgcctggctaatttttgtaattttagtggagacgggg

SEQ ID NO: 299732 - DNA, 201 bp, Homo sapiens
tgtaagatactgggactaccagaggcatagaggattcctagttttcccatgataggatgagggctcatagcacctgcagaaagagctgccctgaatggggygtagacgaatgctgcctggggtcatctacgcatcagcaggggtggcttctggcttttgacggttgaactggaatttaggggagggctgaggaaggcattt

SEQ ID NO: 299733 - DNA, 201 bp, Homo sapiens
tatgctgtaattaaagaatccatgaattccagtacaagttttagaactactgatctcattttcagactaggggacttggggctaccgagttttataactgrccacaagctcccaatgaagaattgggaacaggactagaatggaattagaatttacgtttcctattccaatgtggggcccaggccctgactgtcacacagt

SEQ ID NO: 299734 - DNA, 201 bp, Homo sapiens
gtgattctcctgcctcagcctcctgagtagctgggactataggcacacgccaccatgcctggctaatttttgtaattttagtggagacggggtttcaccaygttggccaggctagtctcaaactcctgagctcagatgatccacccacctcagcctcccaaagtgctgggattacaggcatgagccaccacacttggccac

SEQ ID NO: 299735 - DNA, 201 bp, Homo sapiens
cagatgatccacccacctcagcctcccaaagtgctgggattacaggcatgagccaccacacttggccacctctggctaatttttgtatttttagtagagaygggttttcaccatgttggccaggctggtctcgaactcctgacctcaagtgatctgcccacctcggcctcccaaagtgctggaattacaggcgtgagccat

SEQ ID NO: 299736 - DNA, 201 bp, Homo sapiens
tgagccaccacacttggccacctctggctaatttttgtatttttagtagagatgggttttcaccatgttggccaggctggtctcgaactcctgacctcaastgatctgcccacctcggcctcccaaagtgctggaattacaggcgtgagccatcatgccgggcctacgttaatttttgagacagagtcttgctctgtcgcc

SEQ ID NO: 299737 - DNA, 201 bp, Homo sapiens
tgaggctccgacaggaatgtagaggctgcaacttcagattagagctcttcttcatactccaggttgcttgctcatcctctttacccttgaggatgggtttrcattcgcagctctaggcccatgggggagctcttttgaaaggcatgtagaaaatggggttttctcccctctaaatctggtatggtggaaatgggtgcaaag

SEQ ID NO: 299738 - DNA, 201 bp, Homo sapiens
aataggaaggattgattgcccaggggaattgtggagaagaagagagggtcccccttgctttttaaatttttggtgacagggtcttgctatgttgcccaggstggtcttgaactcctgggctcaagcgatcctccctgctcagtaactgggattacaggcacatgcctggctgaagatcctagtcttgattaagaagatagg

SEQ ID NO: 299739 - DNA, 201 bp, Homo sapiens
gtaccctaaaacttaaagtataataataataaaattaaaaaaaaaacattaacgtaggctagacacagtggctcatgcctgtaatcccagcactttgggargctgaggcgggcaaatcacctgaggtcaggagttagagaccagcctggtcaatatggcgaaaccccatctctactaaaaatacaaaaattagccaggtgt

SEQ ID NO: 299740 - DNA, 201 bp, Homo sapiens
cagagcagggctgcttggggagatggggaggaggcaggccgagctctggggctgtggtcagggcgagtcagctggtaaatgttgccgcagcagagggaggkggctggcctcatggagggtgggtggggaggcaagcagtggggaggctgagagcttagaggggagtatggagcagagggtggggggcagagggagcaggac

SEQ ID NO: 299741 - DNA, 201 bp, Homo sapiens
ctttgggaggctgaggcgggcaaatcacctgaggtcaggagttagagaccagcctggtcaatatggcgaaaccccatctctactaaaaatacaaaaattarccaggtgtggtggtacatgcctgtaatcccagctactcgggaggctgagacaggcgaatcgcttgaacctgggaggtggaggttgcagtgagccgagatt

SEQ ID NO: 299742 - DNA, 201 bp, Homo sapiens
tgtaacaacagcacagacatttctcctcttttctcagtctcattttgctctctgacatttgagcccttctgaaactgcctccctgggccttcccaaggccsctgcaggttcctccccacctccttcagctgatctcaagcggcaacctctgttagctgcatccccagatctccaccccccaccctctgccagtgttgatcc

SEQ ID NO: 299743 - DNA, 201 bp, Homo sapiens
ccggatttttaaaaataatagctttaagatataattcacattccatacagttcacccatataagtgtacagttcgatggttttagtacattcacaatcaaytttttaaaattgtcatgaggtgtcataggttttcatagagggagccatgtgtgggcaatccttgctgatagggtggggtgggaggtagagatgccagagg

SEQ ID NO: 299744 - DNA, 201 bp, Homo sapiens
aggcgggcaaatcacctgaggtcaggagttagagaccagcctggtcaatatggcgaaaccccatctctactaaaaatacaaaaattagccaggtgtggtgktacatgcctgtaatcccagctactcgggaggctgagacaggcgaatcgcttgaacctgggaggtggaggttgcagtgagccgagattgcgccactgcact

SEQ ID NO: 299745 - DNA, 201 bp, Homo sapiens
ggtttttgtttttttgagacggagtttcgcacttgttgcccaagctggagtgcaatggcacaatctcagctcactgcaacctccatctcccaggttcaagygattctcctgcctcagcctcccgagtagctgggattacaggcgtgcaccaccacacccggctaattttttgtaatgttttctaagtggtgtaacaacagc

SEQ ID NO: 299746 - DNA, 201 bp, Homo sapiens
agccgggcctggaatgatgcagctgggagaggtgggggcacggccagagcagtgggcggaggctgcgttgtagccagccctggtgagaccaggccagagcrtatattttaccacgtgtgcaaatctttggcatcaccggatttttaaaaataatagctttaagatataattcacattccatacagttcacccatataagtg

SEQ ID NO: 299747 - DNA, 201 bp, Homo sapiens
catcaggtacttgtttacatgttgttgtctccctctgaaccgagtttcctatttgtttatctttgtatccagtacacagtaggtgctcaatagattttttkagtgcacccctgtgtctggccttgtgacatagagacctcagaggtggacagggctgaggtgtgctgctcgtgggtgtgaggtctggcccaccctgcacct

SEQ ID NO: 299748 - DNA, 201 bp, Homo sapiens
catcatgattagttagggggcgcccagagcaggatgatggtcagaggttcctcatccccattttaccgatgaggaactggggcttagagaggccacacggctacaaagtagttttatctggatcttcccctctattaagcaagggctggcagagctgggtgtgctactgaaggagcagacatgtgtgggcttggtgccatg

SEQ ID NO: 299749 - DNA, 201 bp, Homo sapiens
tggcacaggagtcctggtcataccctgcagctgcctctgcagagagccacagggcattagggatattccttgtaatcatcccacgtaatgtttgtgctgcrtggaagggcatgtaaaggagtgttctctgcacggtaattgactcattctgtcatcatgattagttagggggcgcccagagcaggatgatggtcagaggtt

SEQ ID NO: 299750 - DNA, 201 bp, Homo sapiens
ctggaccggaggcagtagtcaccggagttcccggtggctttcccaggctggacggactccaggcccaggggcttccgtgagccagcagggagtggggaatrgtgtggtgtctcttgaatgccgcctggtttctccgcccccctgggggtgagcagcccgcagcccaaatgcgagagcctcgagttcacccctgtttctctt

SEQ ID NO: 299751 - DNA, 201 bp, Homo sapiens
tcagaatgcaacgcctgcaacctttcattcagggcacctttactgagccggtttccagaagcctccacagctgagtgacatgtaagatactgggactaccagaggcatagaggattcctagttttcccatgataggatgagggctcatagcacctgcagaaagagctgccctgaatggggcgtagacgaatgctgcctggg

SEQ ID NO: 299752 - DNA, 201 bp, Homo sapiens
ctttaaggattaacgcttggtggatttgtgtctttgcatggctgcagtgtgtgttcgtgtgtttgcggggagtttgaagagagttatgacgtgtgtgcgtsatttggggaaggggctcttaccctgtgaactagtggctgctgggggagggaggggagtcgtgcagctggggcccttcccgctgttatccaggtttctgtt

SEQ ID NO: 299753 - DNA, 201 bp, Homo sapiens
gcgctgcagtcgcagggggaggtggaggcgggacaactgcctgaggagatgggactggaccggaggcagtagtcaccggagttcccggtggctttcccagkctggacggactccaggcccaggggcttccgtgagccagcagggagtggggaatggtgtggtgtctcttgaatgccgcctggtttctccgcccccctgggg

SEQ ID NO: 299754 - DNA, 201 bp, Homo sapiens
acaacttgggaaactgaggcccgaatctctcagtgacagagccagggtttgaggcagggactgctggaggcagggcccatggttctgagatgtgctgctcrgaaccctgggctcttctccctccctcggccccctccacaaatggtttgtttttgttgggacagacgatgaggagaaaggcggccctgtgggaaatctgag

SEQ ID NO: 299755 - DNA, 201 bp, Homo sapiens
atcagagtcattggaaaatgtaattaaaattggaagtttgcttgatgaatacaggatcagggcagagaggtgtccttcagaggtatttttgtcgggcttargaggcctatgggatcactgttgtctgcccaccaaacaggaactgtgctctcattctcaggtcactctctccattggaccacactggatacttcctttcca

SEQ ID NO: 299756 - DNA, 201 bp, Homo sapiens; identical to SEQ ID NO: 62438

SEQ ID NO: 299757 - DNA, 201 bp, Homo sapiens
ctgatggctttctcttccgacctctcagagggcactggccggctcttctttgagttctaccgcctcctgcatgatgcgcggcccaaggagggagatgatcsccccttcttctggctctttgagaatgtggtggccatgggcgttagtgacaagagggacatctcgcgatttctcgaggtatagccagcaaccttggtttgg

SEQ ID NO: 299758 - DNA, 201 bp, Homo sapiens
ggcggccagggagtccccaaggtctgccttctgggcttgtcactcttctcttctacttcccctcctcttgagtcgggtgtgtcagggctggagggaggacyggccgtctctctccttgtgtgtgtgattggagtggtgtgtatttcttttctagtacttggtctgatgatagctgtgctcttacctcgagtcagcagcacc

SEQ ID NO: 299759 - DNA, 201 bp, Homo sapiens
gaagtgctgggattacaggcatgaatcactgcacccggcctatcaggcctgtttttgttttttggtttttgtttttttgagacggagtttcgcacttgttrcccaagctggagtgcaatggcacaatctcagctcactgcaacctccatctcccaggttcaagcgattctcctgcctcagcctcccgagtagctgggatta

SEQ ID NO: 299760 - DNA, 201 bp, Homo sapiens
ctgcgcttttagccaccccacagggaaaagggaaattggaggagtcagggtcctagctccatagcgttggagcttgctccatccaccccaggaaggccgarcaagggggcatctggggaccccctggcccctcctggagtgggcatggagcaggcatctctggctctccctaccacaggccacttccagctgctatcagat

SEQ ID NO: 299761 - DNA, 201 bp, Homo sapiens
gggcccaggtggaaggagggctcacttccccacctccagcaagaagctatgggaggcagaatcagccagccccgcagcctccggggcgctgggcctggaargggtgcctggaaagggtggtgaggacctggtggggagtgcagggggatgcctgggaggagcgcagctcccctcatgctgggggcttggagaagcacaggg

SEQ ID NO: 299762 - DNA, 201 bp, Homo sapiens
ccagggcaggaaaggccaggctcagctgtgcagaatagaagaatgggccaggcgcagtggctcacacctgaatcccagcactgtgggaggccaaggcagayggatcacttgaggtcaggagttggagaccagcctggccaacatggcaaaaccccgtctctactaaaaatacaaaaattagcccagcgtggtggtgcgtgc

SEQ ID NO: 299763 - DNA, 201 bp, Homo sapiens
ctgagacaggcgaatcgcttgaacctgggaggtggaggttgcagtgagccgagattgcgccactgcactccagcctgggtgaaagagtgactctgtctccaaaaaaaaaaataaataaataacatttccgtatcatagggtaggcaaccgatatgctgatgagattgaggaagattagatctgggaggaaggtttcctaaa

SEQ ID NO: 299764 - DNA, 201 bp, Homo sapiens
tcagcccgtttgctgttcatcttccttgcaggccaaggcagaggcttcctcaggagaccatcccactgacacagagatgaaggaggagcagaagagcaacmcggcagggagccagtctcaggtggagacagaagcatagcccctctccaccagccctactcctgcggctgcctgccccccagtctccccactccaccctgt

SEQ ID NO: 299765 - DNA, 201 bp, Homo sapiens
cttccttgcaggccaaggcagaggcttcctcaggagaccatcccactgacacagagatgaaggaggagcagaagagcaacacggcagggagccagtctcasgtggagacagaagcatagcccctctccaccagccctactcctgcggctgcctgccccccagtctccccactccaccctgttagttttgtaaaaactgaag

SEQ ID NO: 299766 - DNA, 201 bp, Homo sapiens; identical to SEQ ID NO: 62460

SEQ ID NO: 299767 - DNA, 201 bp, Homo sapiens
cgcggggcggcggagaggggcggggcgaggcgaccgccgcgggcacccgagccgcagcccggggccaggccgggcctcccacgccacgccgcccccgaccycgcggccccagcggagctgccagccgcgggccgcctcgttggtggcggtgccagggctcgcccacccgggcggtggaacacgggccaggacggggagcga

SEQ ID NO: 299768 - DNA, 201 bp, Homo sapiens
tcttctggtgtcatggtgaccaccccctgttccctgttctggtatttcccctgtcagtttcccctctcggccaggttgtgtcccaaaatcccctcagcctyttctctgcacgttgctgaaggtccaggcttgcctcaagttccatgcttgagcaataaagtggaaacaataaaacctgggtgtcagacaaccctttctgtt

SEQ ID NO: 299769 - DNA, 201 bp, Homo sapiens; identical to SEQ ID NO: 62461

SEQ ID NO: 299770 - DNA, 201 bp, Homo sapiens
ggaggcttgcaggcagtgctggtgcccctttctgccccaaaccctggggtactcactttctcccccttcctcccaggtcatcaagagagagggcacaggtwcagagatgcccatgattggggaccgagtctttgtccactacactggctggctattagatggcacaaagtttgactccagtctggatcgcaaggacaaatt

SEQ ID NO: 299771 - DNA, 201 bp, Homo sapiens
tacactgcctctctttcatgccagttgcactggaagggtactacaaggacaagctctttgaccagcgggagctccgctttgagattggcgagggggagaamctggatctgccttatggtctggagagggccattcagcgcatggagaaaggagaacattccatcgtgtacctcaagcccaggtgaggggtgggcacttcgt

SEQ ID NO: 299772 - DNA, 201 bp, Homo sapiens
gctggaaattaagtgtgtgttttttcacttgggaagtcagcccgtttgctgttcatcttccttgcaggccaaggcagaggcttcctcaggagaccatcccmctgacacagagatgaaggaggagcagaagagcaacacggcagggagccagtctcaggtggagacagaagcatagcccctctccaccagccctactcctgc

SEQ ID NO: 299773 - DNA, 201 bp, Homo sapiens; identical to SEQ ID NO: 62478

SEQ ID NO: 299774 - DNA, 201 bp, Homo sapiens
gcctcaggccttgttcttcctggggtgcagccagccacttgcattcctcctcatcctcctgaggggtacctttggaacccagtctaggccagatgagctasaagccctgagctcccacaatgtggcttcctctctgcattctttaggccctagaactggacagcaacaacgagaagggcctcttccgccggggagaggccc

SEQ ID NO: 299775 - DNA, 201 bp, Homo sapiens; identical to SEQ ID NO: 62479

SEQ ID NO: 299776 - DNA, 201 bp, Homo sapiens
tcagcaggcagtcctccaaagattccccccaatgccacgcttgtatttgaggtgagtgtttggtcactgagatccaggctaagagccaggccttatctcarcccaatgcctggctgccctccagcccttcctgcttcttggagacaatgtagccaaggctgagggtctggccttatgggaggagaaatgcagagggctctg

SEQ ID NO: 299777 - DNA, 201 bp, Homo sapiens; identical to SEQ ID NO: 62467

SEQ ID NO: 299778 - DNA, 201 bp, Homo sapiens
tcacttcatatatgtgagcttgctggccttgccagtgggaagggtgggagcaggaacctcttgtggccatgtgtcactgatgtctgcagggtataagagcytagtaccactgaaactgtgccaggtgcctgagcctctctcccattccaggaaggtaaatacaagcaagctttactacagtataagaagatcgtgtcttgg

SEQ ID NO: 299779 - DNA, 201 bp, Homo sapiens
gaaaaggtaagtttgctcagggtcttcccatctaaagtcaagttccaccctgtacgtgactctggggtagctgacaactttgtttctctcctggggtgtgrcaggccaaggagtcttgggagatgaattcagaagagaagctggaacagagcaccatagtgaaagagcggggcactgtgtacttcaaggtgagccaacagt

SEQ ID NO: 299780 - DNA, 201 bp, Homo sapiens
cgccgtctctagaaagttctgcaccccgccccctctgtctgcgctcccgctcctcccagcccctccctcgcggcggggcgggaccaatcgctccccgagcygctcctgacccacctaccccagctctcgcgccgcgtgcagaggtgctcaagcctcctcgcggtccgcagtcagtgccgccgcgcccggcctcccgcacgc

SEQ ID NO: 299781 - DNA, 201 bp, Homo sapiens
attgtgtcacatcttgtcccacaggtggagttgtttgagtttaagggagaagatctgacggaagaggaagatggcggaatcattcgcagaatacagactcrcggtgaaggctatgctaagcccaatgagggtgctatcgtggagggtgagacagtacagtctgggctttcaattctcattctgatatttaggccttgtgtg

SEQ ID NO: 299782 - DNA, 201 bp, Homo sapiens
caagtctcaagggatgggaaggtactttccaggaaatggacaggaagccttttcagcctggagcaggttaagtgttgccaagatgatacatagtgtttttyacccctccagctatgcttttggcagtgttgggaaggaaaagttccaaatcccaccaaatgctgagctgaaatatgaattacacctcaagagttttgaaaa

SEQ ID NO: 299783 - DNA, 201 bp, Homo sapiens; identical to SEQ ID NO: 62457

SEQ ID NO: 299784 - DNA, 201 bp, Homo sapiens
acgggctgatttccagaaggtcctgcagctctaccccaacaacaaagccgccaagacccagctggctgtgtgccagcagcggatccgaaggcagcttgccygggagaagaagctctatgccaatatgtttgagaggctggctgaggaggagaacaaggtgaggattggggtggggaacagttggaatagcatccctccact

SEQ ID NO: 299785 - DNA, 201 bp, Homo sapiens
caccccctgttccctgttctggtatttcccctgtcagtttcccctctcggccaggttgtgtcccaaaatcccctcagcctcttctctgcacgttgctgaargtccaggcttgcctcaagttccatgcttgagcaataaagtggaaacaataaaacctgggtgtcagacaaccctttctgttcagccttggagtggtgggta

SEQ ID NO: 299786 - DNA, 201 bp, Homo sapiens
gcttagaacagcattgcagtgaataacctcatgagttcataatttgtacatatacaagtgttctgttttgttttgtttgagacagtgtctcttgccctgcygcccaggctggagtgcagtggcacagtctcagttcactgtaacctctgcctccagggctcaagtgatcctcttgtctcagcctcccgagtagctgggact

SEQ ID NO: 299787 - DNA, 201 bp, Homo sapiens
agttccaaatcccaccaaatgctgagctgaaatatgaattacacctcaagagttttgaaaaggtaagtttgctcagggtcttcccatctaaagtcaagttscaccctgtacgtgactctggggtagctgacaactttgtttctctcctggggtgtggcaggccaaggagtcttgggagatgaattcagaagagaagctgga

SEQ ID NO: 299788 - DNA, 201 bp, Homo sapiens
cgatttatgttttcttgtgggccaggcgccgtggctcacacctgcaatcccagcactttgcagagccaaagtgggaggatcacttgaacccagtaggtagagacctcagtgacttaggatggcaccactgcaccccagcctgagtgacaaaatgaaaccccatctcaaaaaaagaaaagcgagatgctttttgtgtgtgat

SEQ ID NO: 299789 - DNA, 201 bp, Homo sapiens
ggtagcaaatagattgctctcctcagcttaactgaaatctatgtagtctgcccacctctaccaaagttgagattagggcagctcccaagaactgaaaaaawgtgccactctacccaactccttgtgactgcccttgtggtcagatccggcctggcagttagtagggactctctcggatgagaaagattgtgtttcactgcc

SEQ ID NO: 299790 - DNA, 201 bp, Homo sapiens
tagctgggagggactacaggcacatggcaccatgcccagctttttttttttttttccggacagagtgtagctcttgttgcccaggctggagtgcaatggcrcaatctcagctcaccgcaacatgtgcctcccaggttcaagcaataatcctgcctcagcctcctgagtagctgggattacaagtgcctactaccatgccca

SEQ ID NO: 299791 - DNA, 201 bp, Homo sapiens
ctcactttctcccccttcctcccaggtcatcaagagagagggcacaggtacagagatgcccatgattggggaccgagtctttgtccactacactggctggytattagatggcacaaagtttgactccagtctggatcgcaaggacaaattctcctttgacctgggaaaaggtaggcgtggtcagtgggctggtaggatagg

SEQ ID NO: 299792 - DNA, 201 bp, Homo sapiens; identical to SEQ ID NO: 62469

SEQ ID NO: 299793 - DNA, 201 bp, Homo sapiens
gactccctcctgttcttaagtgaagtcagtggaagcagaatttctggtttcatttcaggtccacatcacgctgagcacccatgagtgtgccggcctttcakaacgggacataaacctggccagcttcatcgaacaagtagcagtgtccatgacatagaccctgcccttcctctttgaattcttccgggggaaggggtgact

SEQ ID NO: 299794 - DNA, 201 bp, Homo sapiens
cagggctgagcccagcagctagtgactccctcctgttcttaagtgaagtcagtggaagcagaatttctggtttcatttcaggtccacatcacgctgagcayccatgagtgtgccggcctttcagaacgggacataaacctggccagcttcatcgaacaagtagcagtgtccatgacatagaccctgcccttcctctttgaa

SEQ ID NO: 299795 - DNA, 201 bp, Homo sapiens
tttctgattttcagattagagatgctcaacttgtcagtataatgcaaatattccaaaatccaaaatctgaaacacttctggtctcacacctttcagataasggatactcaacctatattttcttcctggctgtgatggctaatgttaggtgtcaacttgattgggccatggggtgcccaggcatttggtcaaacattccgg

SEQ ID NO: 299796 - DNA, 201 bp, Homo sapiens
tattaaaagtgacatagcagtatattcacatgactacttaagtctaatgcagaaacaagacagtacagtttttgcagaggccgatgtgacatctgcatgcracatgatactattaagtgtctctacccacctctgctacagagtagctgctatatgcacacatacacaaaaatacacaatgaaaagcctacaaaagtgtta

SEQ ID NO: 299797 - DNA, 201 bp, Homo sapiens
ctggggccatattacaggttgaacatccctaatttgaaaattggaaatccaaaatctgaaactttttgaatgccaacatgatgcccaaaggaaatactcaytggatcattttagatttctgattttcagattagagatgctcaacttgtcagtataatgcaaatattccaaaatccaaaatctgaaacacttctggtctca

SEQ ID NO: 299798 - DNA, 201 bp, Homo sapiens
ccctcctgttcttaagtgaagtcagtggaagcagaatttctggtttcatttcaggtccacatcacgctgagcacccatgagtgtgccggcctttcagaacrggacataaacctggccagcttcatcgaacaagtagcagtgtccatgacatagaccctgcccttcctctttgaattcttccgggggaaggggtgactgaac

SEQ ID NO: 299799 - DNA, 201 bp, Homo sapiens
aactattaccaattaccaattaactagtactaattaactattactagagtgaattaatgctaggtggcaggataagaaatgagctaaagggaacgcaagtgattaatggtgaaaagggcaaatctggaggctttgagttatgccttgaagacctgggtaggattcttgggaggcagagatggctgagagaacaccatgaac

SEQ ID NO: 299800 - DNA, 201 bp, Homo sapiens
aaaaacacaaaaaaattaggcgggcgcggtggtggacgcctgtagtcccagctactggggaggctgaggcaggagaatggtgggaacccgggaggcggagsttgcagtgagcagagattgagccactgcactccagcctgggagacagagcaagactccgtctcaaaaaaaaaaaaaaaaaaaaatacagacacatagcca

SEQ ID NO: 299801 - DNA, 201 bp, Homo sapiens
ttcatattttccatactcttgcccttctcccggtggtgactaccaggctggctgcccactaccaggtttgtggtgaggaggtaagtgtaggctctctgctkcccggggctgtggagctttctcagccttcccacccatccgcttcagtgcagtggaccctgccttatatccggggcaggtccttcatgggagagcttccca

SEQ ID NO: 299802 - DNA, 201 bp, Homo sapiens
taaaaacacaaaaaaattaggcgggcgcggtggtggacgcctgtagtcccagctactggggaggctgaggcaggagaatggtgggaacccgggaggcggascttgcagtgagcagagattgagccactgcactccagcctgggagacagagcaagactccgtctcaaaaaaaaaaaaaaaaaaaaatacagacacatagcc

SEQ ID NO: 299803 - DNA, 201 bp, Homo sapiens
gacattggtcttttcctgctttcggacttaaactgaaacatccactctccttaggtctcaaggctacaagcctccggtgtgcaacaataccatctgctttsctggttctccagcttgccaactacagatcttgggacttgtcagcctccataatcacatgagccaattccttataagaaatctctttgtgtgtattggttc

SEQ ID NO: 299804 - DNA, 201 bp, Homo sapiens
gcctctgtttttttccctcttctaggctggcaaagcacacaggctgagcgctgaggagagggaccagctgctgccaaacctgagggctgtggggtggaatkagctggaaggccgtgatgccatcttcaagcagtttcatttcaaagacttcaacagggtatggcaccagggtgggacagagttttctgagacgggctgatg

SEQ ID NO: 299805 - DNA, 201 bp, Homo sapiens
gggcgaggtgggagcgggaaggggcgggggaaagtcttttcgagtcccctgcggagccgccggggtccgaaagtggggtctctgcccggctctctgtcgcyggcggcggggaggggaagctgaagccctgagaggggcggtggcgggtccgaatcccacccagttgggaggccaggcctgccctgaccccggccagtgctt

SEQ ID NO: 299806 - DNA, 201 bp, Homo sapiens
ctgcggagccgccggggtccgaaagtggggtctctgcccggctctctgtcgccggcggcggggaggggaagctgaagccctgagaggggcggtggcgggtycgaatcccacccagttgggaggccaggcctgccctgaccccggccagtgcttgttccgggacccttccgggggcggggcctacgaccttcctgggccggg

SEQ ID NO: 299807 - DNA, 201 bp, Homo sapiens
ccaaattttgttcctgccatttgttcctattgctgcagaacaaatcatcacgctgagtggcttaaaacaaaaattatgatttctcatgcttccacgggttractggtctcacttggggcctcacgtgggattgaagtcagatgtctcctggggctgaagtcatctgaaggtttggcaggtctgagcatccaagagtctcac

SEQ ID NO: 299808 - DNA, 201 bp, Homo sapiens
ctcgtgtgcgtgcctgtccgctgccccttcccgctggcactctgggtacggggtctgcctgggactcacgctctgcgccggtatgctggccccagagccastccccgcgccggcttgaggcccgtgccaggccacgggggcttggtggcgctggagcagccctcctcccgtgagcttcccccacccacccccggggcgggg

SEQ ID NO: 299809 - DNA, 201 bp, Homo sapiens
gggggcttggtggcgctggagcagccctcctcccgtgagcttcccccacccacccccggggcgggggcgggggcggggcccttgctctgctgtaagctcgsgagcttcatcagaccatttctggtccacaggccttcggagcaggcaagactgggagggccttttgataggagagggacttgggggagggaggatgagtgg

SEQ ID NO: 299810 - DNA, 201 bp, Homo sapiens
ctctctgtctccagagccggcacctggaaggtttgtcagttcagccgcaggctgtgcgacctggggggttccagaaggctctaccgagaaagggaagcctyctaagagctcacctggactcacccacccctttaagagccaaggaagtaaacagtgggctctgatgctttggctgacttctggttgtctagatacacggac

SEQ ID NO: 299811 - DNA, 201 bp, Homo sapiens
ggagatagttcaagtggaaaccatgcacatctgaagacatttgaacagacggccaagactggccaggccaaaagcctgttgtggtgtttccaccttgttgrcatcctaaatagcaagactttcttcctactgcaaggacaatctctaactcaagcctgagaaccagtgacaggatgtcaagggggaaatgattatagagga

SEQ ID NO: 299812 - DNA, 201 bp, Homo sapiens; identical to SEQ ID NO: 62491

SEQ ID NO: 299813 - DNA, 201 bp, Homo sapiens
ggaagcaagcaggccgagcgcgtccctggctggggacgttaatcattaccggagggcggcccgagcgcggccccgccccgggacggcagcctgcgcgcccrgccgccgcctgccctctccgctggccacctgctgccgcccgcgccatggtgagtccaggggtgcgcggccgcgatcggggcagcggggccggggcagccg

SEQ ID NO: 299814 - DNA, 201 bp, Homo sapiens
ccaagagaggtacagccacctggctggtaaatggtgaaagcgggtctcaaaactcctgccaatcaacacatggtgtccagtctgcaggctgcctcataaawgctaaatcaacctccctcacattccctccccacccctaagggtatcttttcaattcagcactctatttctgccctggggtggtgctactctagaagccta

SEQ ID NO: 299815 - DNA, 201 bp, Homo sapiens
gcggagccgccggggtccgaaagtggggtctctgcccggctctctgtcgccggcggcggggaggggaagctgaagccctgagaggggcggtggcgggtccraatcccacccagttgggaggccaggcctgccctgaccccggccagtgcttgttccgggacccttccgggggcggggcctacgaccttcctgggccgggga

SEQ ID NO: 299816 - DNA, 201 bp, Homo sapiens
ggaagcagaatttctggtttcatttcaggtccacatcacgctgagcacccatgagtgtgccggcctttcagaacgggacataaacctggccagcttcatcraacaagtagcagtgtccatgacatagaccctgcccttcctctttgaattcttccgggggaaggggtgactgaactgggagtccagggagggagctgagga

SEQ ID NO: 299817 - DNA, 201 bp, Homo sapiens
cggagccgccggggtccgaaagtggggtctctgcccggctctctgtcgccggcggcggggaggggaagctgaagccctgagaggggcggtggcgggtccgmatcccacccagttgggaggccaggcctgccctgaccccggccagtgcttgttccgggacccttccgggggcggggcctacgaccttcctgggccggggaa

SEQ ID NO: 299818 - DNA, 201 bp, Homo sapiens
agcagaatttctggtttcatttcaggtccacatcacgctgagcacccatgagtgtgccggcctttcagaacgggacataaacctggccagcttcatcgaayaagtagcagtgtccatgacatagaccctgcccttcctctttgaattcttccgggggaaggggtgactgaactgggagtccagggagggagctgaggagcc

SEQ ID NO: 299819 - DNA, 201 bp, Homo sapiens
tgaggtcccagagatgcaggcttgggaaatcggtaaccactccccacacctcgccagaggaggcaaacggggcagcgtccccctctctgtctccagagccrgcacctggaaggtttgtcagttcagccgcaggctgtgcgacctggggggttccagaaggctctaccgagaaagggaagcctcctaagagctcacctggac

SEQ ID NO: 299820 - DNA, 201 bp, Homo sapiens; identical to SEQ ID NO: 62494

SEQ ID NO: 299821 - DNA, 201 bp, Homo sapiens
gtcgccaaaggacaggccatatacttgcatctgataccactgttcatttatttagattgtagctctgaagaaagcaaatggtgatgccactttgaaatttkaaccatttgttcttcatgtgcagtgtcgacaattgcaggatgcacagattctggtaaaattttgttgtaattgtacttgaatttatagatatgtgggtag

SEQ ID NO: 299822 - DNA, 201 bp, Homo sapiens
acaatatactatgcattatgcttattatttttgtaaaatattatatgaaacttaaattatgttattttttattttagggtataaatggttttgaggttcaraaacaaaactgttgctggctactggttacacacaaactttgtgtaaaagatgatgtggtaagttttaaaaaataaatttggaaataaacttttaaattca

SEQ ID NO: 299823 - DNA, 201 bp, Homo sapiens
attttcatggttctgattcttatcgtcatttaccagccattttcatggttctgattcttatcgtcatttaccagccattttcatggttctgattcttatcrtcatttaccagccattttcatggttctgattcttatcgtcatttaccagccattttcatggttctgattcttatcgtcatttaccagccattttcatggt

SEQ ID NO: 299824 - DNA, 201 bp, Homo sapiens
cttaatatgtttcttaccttattctaaatcccccagccgttttcttggttccaattcttatcatcatttaccagccattttcatggttctgattcttatcrtcatttaccagccattttcatggttctgattcttatcgtcatttaccagccattttcatggttctgattcttatcgtcatttaccagccattttcatggt

SEQ ID NO: 299825 - DNA, 201 bp, Homo sapiens
atttctaagcagcaaagcattcaagaggtgacttgggtgctgttaaacacattcagttttataagggaagcagagcataaaagttttgaaaacttgcagcmtgacaatgtgatagaaaagaaaattccattttctgaggagaaattcaagtcagccctagaaatttgcataagtaatgaggagctgaatgttaatccccaa

SEQ ID NO: 299826 - DNA, 201 bp, Homo sapiens
cttctttcctcattcatgaccatcacaatagcctcattcaggatgcttctggtatgcctctctgctaagccattctttatcaaatcatgtttgtaaagtgsaaaggattcctgttgcttaacttgcctgcttaagattctttaatacttagaactttttttgaagcattgaaggccaacaagtgctagtggtggcagtgta

SEQ ID NO: 299827 - DNA, 201 bp, Homo sapiens
gagcctagaacattgcagatgctcagcaaaagtttatggaatggccaggcgtggtggcttatgcctgtaatcccagcactttgggaggccgaggtgggtgratcacctaagactgggagttcaagaccagcctgaccaacatggagaaaccccgtctctatgaaaaatacaaaattagccaggcgtggcgcatgcctgtaa

SEQ ID NO: 299828 - DNA, 201 bp, Homo sapiens
agcactttgggaggccaaggcaggcgaatcacgaggtcaagagatcgagaccatcctggtgaaaccccatctctactaaaaatacaaaaattagctgggcrtggtggtgcgtagctgtggtcccagctactcaggaggctgaggcaggagaatcacttgaacccaggaggtggaagttgcagttagcagagatcacgccac

SEQ ID NO: 299829 - DNA, 201 bp, Homo sapiens
tacatacacatacacacacatatacacatatacacacatatatacacacgtatatacatatatacatatatgtgtgtatatatggtatttaaaccagggamtctcaaaaggagagcatgtacttagagcaaggtttttcaaccatggcacagctggcatttcaggtcaaataattatttgtgtgggggctgtcctgtataa

SEQ ID NO: 299830 - DNA, 201 bp, Homo sapiens
gcatagtccgtattggctagacgaaaaatttttttaaaaaccttaatagcttttagggttatatatgtttctgtagtttgtggagccaaacagatgatctsgttacccacagtatcaaaatgtaacaagttttattttcttacagcattccatggcaatagattctggtttcaggaactctggcataacggtgggaaagag

SEQ ID NO: 299831 - DNA, 201 bp, Homo sapiens
gtgaccttaggaaagctatctcaactctgccccttcctgttctatgaactgaggataataaaaagtatctgctttatagggattttgtgtggagaaaatargataattttttttgaaatatttggctttgtgcctggcccatgcactgtaaaagttggctgtgtactgattttattcgtagtattggcttaagagcatgga

SEQ ID NO: 299832 - DNA, 201 bp, Homo sapiens
acaaaataacttacaaagtcacctcagtcagatcagaatttgtgtgcttgctatgctttcttatatcatttcaacaaagttttttaagcaatagaagggayattgagaaacattgtactcattttaaaagattttgttttgtttatttttatacaacacaattagaagaatgattgttttttggttacattctgctttctg

SEQ ID NO: 299833 - DNA, 201 bp, Homo sapiens
ctcctaattcctctcttagcacattgtcagcttccattcatccttgcagttcagcccaggcattggatcttataacggagagcattttgtgatttcagttrgagcactgtgtcccatctttttcatggtgtgttaaatgtggctttacagttctgtagctcctgttaaaccatgagctccttgagggcacagaccacagac

SEQ ID NO: 299834 - DNA, 201 bp, Homo sapiens
tgccatgttgcctaggctggtctcaaactcctggactcaagtgattgcccgccttggcctcccaaagtgttgggattacatgcataagccaccgcacctgkctgacatatgacttgactcccaagaaacttaggtactgatatcctacctttgactggaagcattattcataacataagcagttgattagcacatgtattg

SEQ ID NO: 299835 - DNA, 201 bp, Homo sapiens
tagaacaaattatggaaagagaaggggattagcactatctctgtgttaccagctttactgatataaataaataatacattacttacctgcattgctttttkaaaatcttcatatctctgctgggttatttagtttcctaaggtaaagagtttagatgaattcataagtttttatcagccaggcacttttcattcccagtga

SEQ ID NO: 299836 - DNA, 201 bp, Homo sapiens
aaaaactgcaagttgcaattgttacaacaactgtgcctgttacagagggaacaggaactcactggctgtgctctgagctctttgcatgcactgctatttgwgagcttactagtgctgctggtaagcactggtgcttggtacaggatgcttcttgggaacatgggtggcagttaggctttgtttggacccttctctcacatt

SEQ ID NO: 299837 - DNA, 201 bp, Homo sapiens
tttgggaggccgaggcgggcggatcacgaggtcaggagatcgagaccatcccggctaaaacagtgaaaccccgtctctactaaaaatacaaaaaattagcygggcgtagtggcgggcgcctgtagtcccagctacttgggaggctgaggcaggagaatggcgtgaacccgggaggcggagcttgctgtgagccgagatccc

SEQ ID NO: 299838 - DNA, 201 bp, Homo sapiens
caggccttcgcagtgtgttacagctcttaaaggtggcccatctggagttgtttgttcctcccggtgggcgagtggtctcactgactaaaggaatgaagcckcagacctccgcagtgagtgttacagctcataagggtagtgtgggcccaaagagtgagcagcagcaagatttattgtgaagagcaaaagaacaaagcttcc

SEQ ID NO: 299839 - DNA, 201 bp, Homo sapiens
gcgtccagagttgtttgttcctcctggtgggttcgtggtctcactgactttaggagtgaagccacaggccttcgcagtgtgttacagctcttaaaggtggyccatctggagttgtttgttcctcccggtgggcgagtggtctcactgactaaaggaatgaagcctcagacctccgcagtgagtgttacagctcataagggt

SEQ ID NO: 299840 - DNA, 201 bp, Homo sapiens
attcataagtttttatcagccaggcacttttcattcccagtgaatttacaaatccaattctgtttttagcaaaaaagataatttatttaactggaaagggygaatggagctagaatcaagtattgctggttcagatgttcaaatcttgtcttcagagtacccacttcatcttcatctttaggcactggttctctttgcagt

SEQ ID NO: 299841 - DNA, 201 bp, Homo sapiens
aagcggtccaatggtactcaccacttggcaataggcgattgtcccatctgggtcgccaaaatgtgtcccatctgggtcgccaaatgtgtcccatctgggtygccaaaatgtgtctagaattggttccttccgatgggttcttggtctcactgacttcaagaatgaagttgcagacactcatggtgagtgttacagttctta

SEQ ID NO: 299842 - DNA, 201 bp, Homo sapiens
aaataggacagaatagcaagcgaaagcggtccaatggtactcaccacttggcaataggcgattgtcccatctgggtcgccaaaatgtgtcccatctgggtygccaaatgtgtcccatctgggttgccaaaatgtgtctagaattggttccttccgatgggttcttggtctcactgacttcaagaatgaagttgcagacact

SEQ ID NO: 299843 - DNA, 201 bp, Homo sapiens
caggctttgactacctgtcggatggcctggaggagatttggccctgtaaatagggatttggccatttgatgcgtgttttcaatacccatgtgaacagtttsgtggagggttttaagtattttccactggctggctttgggtataagtacctttccttcttctgtcgttaaccacgccgaggggagaaaactatgcccccgt

SEQ ID NO: 299844 - DNA, 201 bp, Homo sapiens
aaggtatcaacacagaccgacaagtattgaaatccctttgacttaggcatatgggtgaagtctaattgccagtcctctctgggatagtgacctactctttrttccccaaaagaggccttaggatgaactaagggattattcctttggcacacccctcacaggctttgactacctgtcggatggcctggaggagatttggcc

SEQ ID NO: 299845 - DNA, 201 bp, Homo sapiens
tcattgttgctctgtaagctttggggaagcccaaatctaggaattatttcataaattaggactttaatcactgcctgagccttctctgtcttgcaggggaragcttctatccaatttgtaaaggtatcaacacagaccgacaagtattgaaatccctttgacttaggcatatgggtgaagtctaattgccagtcctctctg

SEQ ID NO: 299846 - DNA, 201 bp, Homo sapiens
gaggtagaggggagagatttgactaacactggatctcctggttgaaacaactctgttcccttttctctgtgacatctttcaggtaggtttttaaggtttcrttgatattttgccaaagaagttatatttttgaccaagttggccatttcctgatcaagtaggagttcatttgtgagaaaagttcttccatacagcatttca

SEQ ID NO: 299847 - DNA, 201 bp, Homo sapiens
tcccacaaagaatctatagatggggaggtagaggggagagatttgactaacactggatctcctggttgaaacaactctgttcccttttctctgtgacatcyttcaggtaggtttttaaggtttcgttgatattttgccaaagaagttatatttttgaccaagttggccatttcctgatcaagtaggagttcatttgtgaga

SEQ ID NO: 299848 - DNA, 201 bp, Homo sapiens
ctctgctaagccattctttatcaaatcatgtttgtaaagtgcaaaggattcctgttgcttaacttgcctgcttaagattctttaatacttagaactttttytgaagcattgaaggccaacaagtgctagtggtggcagtgtaaaagggtgaagtgaggtagaagtatgccaccaaggcagaactgggttcaaatcgtggtt

SEQ ID NO: 299849 - DNA, 201 bp, Homo sapiens
ttgaaggggacataactgatagcccaggcgtttttgtggtcctttggagatttctttgcttgtttccttctgggagggggagattagaggaggcttatcaytaataggaaggggagctatagggatgctaggatgtgggggtaagctgagaggtcctcttgtaggatgtaaattgcaagtttgcatagttgtgtattctcc

SEQ ID NO: 299850 - DNA, 201 bp, Homo sapiens
cagtttttcaccaccagctcctgcgctggccgcatcctactccttgaccgggtgaggcccctttgcgcctgtccatcgcctgccttctagtgcgaaacttyaggagccctgttcccatccagtgacgaccggatccagcatgtctgtgtttgctcctctgaggggtggtctctgtttctttatatgtgaaatttaggggat

SEQ ID NO: 299851 - DNA, 201 bp, Homo sapiens
ttgggccaacatatccaataaccatttgaacatatctaattaaaatctctcaccagcttttccttaatatgtttcttaccttattctaaatcccccagccrttttcttggttccaattcttatcatcatttaccagccattttcatggttctgattcttatcatcatttaccagccattttcatggttctgattcttatcg

SEQ ID NO: 299852 - DNA, 201 bp, Homo sapiens
cttcttcagattccacagaaatgaggactgccacaccttctccaacttttgcaggctccacccaggatgtgcgcctcgctccacccaggctgtgcgcctckctccacccctaggcgaaggcactagaatttcccaaattaagaacgaagaggaagtttggaccttttcggccaccgctcgcttcaatatggctgcccccag

SEQ ID NO: 299853 - DNA, 201 bp, Homo sapiens
caacatatccaataaccatttgaacatatctaattaaaatctctcaccagcttttccttaatatgtttcttaccttattctaaatcccccagccgttttcwtggttccaattcttatcatcatttaccagccattttcatggttctgattcttatcatcatttaccagccattttcatggttctgattcttatcgtcattt

SEQ ID NO: 299854 - DNA, 201 bp, Homo sapiens
atctgcgtgggcttcttcagattccacagaaatgaggactgccacaccttctccaacttttgcaggctccacccaggatgtgcgcctcgctccacccaggmtgtgcgcctctctccacccctaggcgaaggcactagaatttcccaaattaagaacgaagaggaagtttggaccttttcggccaccgctcgcttcaatatg

SEQ ID NO: 299855 - DNA, 201 bp, Homo sapiens
tttgaacatatctaattaaaatctctcaccagcttttccttaatatgtttcttaccttattctaaatcccccagccgttttcttggttccaattcttatcrtcatttaccagccattttcatggttctgattcttatcatcatttaccagccattttcatggttctgattcttatcgtcatttaccagccattttcatggt

SEQ ID NO: 299856 - DNA, 201 bp, Homo sapiens
tgtggtcctttggagatttctttgcttgtttccttctgggagggggagattagaggaggcttatcattaataggaaggggagctatagggatgctaggatrtgggggtaagctgagaggtcctcttgtaggatgtaaattgcaagtttgcatagttgtgtattctccttcaatgaaaagaaagcttggacataagatattt

SEQ ID NO: 299857 - DNA, 201 bp, Homo sapiens
tggtcctttggagatttctttgcttgtttccttctgggagggggagattagaggaggcttatcattaataggaaggggagctatagggatgctaggatgtkggggtaagctgagaggtcctcttgtaggatgtaaattgcaagtttgcatagttgtgtattctccttcaatgaaaagaaagcttggacataagatatttca

SEQ ID NO: 299858 - DNA, 201 bp, Homo sapiens
attgcactccagccggggcaacaagagtgaaactctgtctgaaaaaaaaaaaaagaaaatgtatggagtgaatttttattctcataataatttttatagascttgtgtggttgttcttaacctctatccagtgtttgcctctacttggaacatgttgactatttcatcaacagggctattaagattgtgaaccctaaagca

SEQ ID NO: 299859 - DNA, 201 bp, Homo sapiens
ctccagccggggcaacaagagtgaaactctgtctgaaaaaaaaaaaaagaaaatgtatggagtgaatttttattctcataataatttttatagagcttgtrtggttgttcttaacctctatccagtgtttgcctctacttggaacatgttgactatttcatcaacagggctattaagattgtgaaccctaaagcattgaga

SEQ ID NO: 299860 - DNA, 201 bp, Homo sapiens
gttctgaaaaactcagttctgcttcagcatagagaaaggagtgcagtaagtgaaaagatacgagttaggagtagtttgtggtgataggttggtgtaaggtgatagcaccaaagcaggtgagaaaggaatagattcaatatgtatttcagcatttgaatcaacagaattgtaaggttgtctggggaaggacagccagaggga

SEQ ID NO: 299861 - DNA, 201 bp, Homo sapiens
atcactattctattttctctatgaattccactattataggtaattcatctaagtgggatcatacaatatgcatcctccagtatctggcctattttacttcrttaatgtaggattcatccatgctataacatgtatcagaatttcagtttctttaagagtgaataatattccattgtatttatagactgaattttgtttatt

SEQ ID NO: 299862 - DNA, 201 bp, Homo sapiens
ttgctgacttcaggagtgaagctgcagaccttcgcagtgagtgttacagctcttaaaggtggcatgtccagagttgtttgttcctcccagtgggttcgtgstcttgctgatttcagaaatgaagccgcagacttccacagtgagtgttaacagctcataatggtaatgcagacccaaagactgagcagcagcaagatttat

SEQ ID NO: 299863 - DNA, 201 bp, Homo sapiens
  misc_feature (1)...(201): n = A,T,C or G
ttgttttgtttatttttatacaacacaattagaagaatgattgttttttggttacattctgctttctggaagcaatcactagccaaatgtcactgtttgtnattgaattctacttttactctttctcaatgacacatccatagttcatatttcaatatttttcctgatgttaggagtttgatcaaagtcatttttaagcat

SEQ ID NO: 299864 - DNA, 201 bp, Homo sapiens
tcagagctcattttgttgcctgtgagagttcagaaaattgcacttttgaaaatcaggcttaagtgttactgtataaggggagaacataacttttgacttaytgagtactgtttctcaaaggacttttaaagttctcttagaaaagggaaaggaaaactagtatttgaagtttttattcaggaaaggatctttgttccattt

SEQ ID NO: 299865 - DNA, 201 bp, Homo sapiens
acacagccctgacgggacttttcttgagttattttcagtttctgtggtatctaagtcttcatatctaaattgttttttccttgtaggctgtccggagtacwcatggcttagaagttccattaagccataagggaaaactgatggtgacagaggaatatattgacttcctgttaaatgtggcaaatcaaaaaatggaggaaa

SEQ ID NO: 299866 - DNA, 201 bp, Homo sapiens
atattttttaaggaggaatgggtttttcctcaggatcagaggtaagagcctttttagtctgggatgtttccttccaaaataggagatgcaagtcctccaayggttcgcaggtgtatcgaggctggtctggctgatcttgggactcctgagctgatggtcccgcaggttcctccgggggtgtccaaaatttaactggggtgt

SEQ ID NO: 299867 - DNA, 201 bp, Homo sapiens
atcagagagggagaaggagacatgtacccaagttgggccaaattcccctcccgctacagcttgaaggggacataactgatagcccaggcgtttttgtggtsctttggagatttctttgcttgtttccttctgggagggggagattagaggaggcttatcattaataggaaggggagctatagggatgctaggatgtggggg

SEQ ID NO: 299868 - DNA, 201 bp, Homo sapiens
gtgggtccgtccaggggtcctcggtagaagttgttagttgagctcgtttggctacagtatatagtcctatcacaaagagtatggttagtatgctgctagawaatatgatgaaatagtaaaaggattccattaaaggggtaaagagaggtgttaaagattatgtaggttttcacttatattttttaaggaggaatgggtttt

SEQ ID NO: 299869 - DNA, 201 bp, Homo sapiens
tgattggtccattttacagagtgcagattggtgcatttacaatcctttagctagacatagagcgctgattggtgcgtttttacagagtgctgattggtgcrtttacaatcctttagctagacacagagcgctgattggtgcatttttacagagtgctgattggtgcgtttacaatcctttagctagacacagagcgctgat

SEQ ID NO: 299870 - DNA, 201 bp, Homo sapiens
ttgttctgaaaaactcagttctgcttcagcatagagaaaggagtgcagtaagtgaaaagatacgagttaggagtagtttgtggtgataggttggtgtaaggtgatagcaccaaagcaggtgagaaaggaatagattcaatatgtatttcagcatttgaatcaacagaattgtaaggttgtctggggaaggacagccagagg

SEQ ID NO: 299871 - DNA, 201 bp, Homo sapiens
caggggccattggttctcatgtagctgagcagttccaaggttcctctcccaaagttaggagatagcaaaaacaaacaagtgaacagggaaaaaaaaacaaacaaaaaaactgcaagttgcaattgttacaacaactgtgcctgttacagagggaacaggaactcactggctgtgctctgagctctttgcatgcactgctat

SEQ ID NO: 299872 - DNA, 201 bp, Homo sapiens
gctcaggggccattggttctcatgtagctgagcagttccaaggttcctctcccaaagttaggagatagcaaaaacaaacaagtgaacagggaaaaaaaaamaaacaaaaaaactgcaagttgcaattgttacaacaactgtgcctgttacagagggaacaggaactcactggctgtgctctgagctctttgcatgcactgc

SEQ ID NO: 299873 - DNA, 201 bp, Homo sapiens
ttgcttttgctcatgttttttggcggtttttttcctgaaatgttttcctatctctgcatatctgagacatgattcccaaaactcccctctcccacctgaayccacaaacacatactacctacttggaagtaatgactgcttctgtactggttagacttttatttcttatcttacacctcgtattatggtttattttaaaat

SEQ ID NO: 299874 - DNA, 201 bp, Homo sapiens
cagaatctagagtgggaattaaaatctgcgtgggcttcttcagattccacagaaatgaggactgccacaccttctccaacttttgcaggctccacccaggmtgtgcgcctcgctccacccaggctgtgcgcctctctccacccctaggcgaaggcactagaatttcccaaattaagaacgaagaggaagtttggacctttt

SEQ ID NO: 299875 - DNA, 201 bp, Homo sapiens
atatacaaagtttcagtgggtctagagagtggaaagaaggtgccagaaggaggctggggccaggtcatttaaggctttgtagaccagattaaagagtttgmatttctttctgagttcagggaaaagttattgaagggacagttttaagcaaagagtggctttctaggtttttgttctgaaaaactcagttctgcttcagca

SEQ ID NO: 299876 - DNA, 201 bp, Homo sapiens
tttgtggtgataggttggtgtaaggtgatagcaccaaagcaggtgagaaaggaatagattcaatatgtatttcagcatttgaatcaacagaattgtaaggytgtctggggaaggacagccagagggaggaggagaaagaggaatcaaggataactacttaggtctggctggagcccctagctgtatggtagtcgcctttat

SEQ ID NO: 299877 - DNA, 201 bp, Homo sapiens
gctcattcttattctgggttaacattacccaaaaacataccgaattgtttttattaatacttaaaatcctgacttgggattattaatttaagaaagcctamaatatactatgcattatgcttattatttttgtaaaatattatatgaaacttaaattatgttattttttattttagggtataaatggttttgaggttcaga

SEQ ID NO: 299878 - DNA, 201 bp, Homo sapiens
tgcataagttcttgaaaatggacaggatgtgtactcatcatgttgtatatgtattagagttaggtgacatatttaggaatatgtggatatttggagttttkgagttttataggcttcgtaagtagaacttagcctgtttattgaatcaaacaaagatgaaaattggtccaaatagagatctattctgtagatatcaaaaat

SEQ ID NO: 299879 - DNA, 201 bp, Homo sapiens
aatctagatgacataatgttgtactgccactctcaataaataataactttgaaaaaacaatgtaaaactttatatgtaatattctaattgtgacaaatagrtatatggattaattaataaatacattaattcagactacattaataaactgaaaagaaaaatattgagaggagttatttctagttatgtagaggtgatctg

SEQ ID NO: 299880 - DNA, 201 bp, Homo sapiens
tttgttcttcatgtgcagtgtcgacaattgcaggatgcacagattctggtaaaattttgttgtaattgtacttgaatttatagatatgtgggtagatgtarttttaagcttttaacctgctataaatatcaatgagatattaccttattcaactagttatgtatatattatttattggtctgctcaatctattaattttta

SEQ ID NO: 299881 - DNA, 201 bp, Homo sapiens
gggaactctttagaccagtgaaagggccagtgggtccgtccaggggtcctcggtagaagttgttagttgagctcgtttggctacagtatatagtcctatcrcaaagagtatggttagtatgctgctagataatatgatgaaatagtaaaaggattccattaaaggggtaaagagaggtgttaaagattatgtaggttttca

SEQ ID NO: 299882 - DNA, 201 bp, Homo sapiens
aaacaatcctaatacagtttttgtatactacatttcctaatgaaaaatccgttatggaattaaataaagtagtagtttacttcttcaaagcacactaatargtggaaagaatggtatagaagatttacgggagaactagaaattttaagaaaataagcaaataaatttttggtgaaaaaggaccaagaaagcagagggaaa

SEQ ID NO: 299883 - DNA, 201 bp, Homo sapiens
atctgataccactgttcatttatttagattgtagctctgaagaaagcaaatggtgatgccactttgaaatttgaaccatttgttcttcatgtgcagtgtcracaattgcaggatgcacagattctggtaaaattttgttgtaattgtacttgaatttatagatatgtgggtagatgtaattttaagcttttaacctgctat

SEQ ID NO: 299884 - DNA, 201 bp, Homo sapiens
cttgcaggcagctgccttctccctgtgtcctctcatggccctttctctgtgtatgcatgtcacttgtttcttctacttcttgtaaggacaccagtcctgtwggatcagggctccatccttatgatttcatttaacctaattaacaccttaaaggcctcatctccaaatatagtcacattggaggttagggcatcaacatat

SEQ ID NO: 299885 - DNA, 201 bp, Homo sapiens
caaatcatgtttgtaaagtgcaaaggattcctgttgcttaacttgcctgcttaagattctttaatacttagaactttttttgaagcattgaaggccaacargtgctagtggtggcagtgtaaaagggtgaagtgaggtagaagtatgccaccaaggcagaactgggttcaaatcgtggttctgagttactcagtctggttc

SEQ ID NO: 299886 - DNA, 201 bp, Homo sapiens
tttagggttatatatgtttctgtagtttgtggagccaaacagatgatctggttacccacagtatcaaaatgtaacaagttttattttcttacagcattccrtggcaatagattctggtttcaggaactctggcataacggtgggaaagagaggaaaaactatgttggtaagatattttgtcaaagagtaatttttttagtg

SEQ ID NO: 299887 - DNA, 201 bp, Homo sapiens
ggggatgaagaagtagaaagcatcggggctatctaggtttggagcttgagcagctagatagatgatggtgtcattttactgtaattagaaagaccgggccrggcgcggtggctcacgcctgtaatcccagcactttgggaggccgaggcgggcggatcacgaggtcaggagatcgagaccatcccggctaaaacagtgaaa

SEQ ID NO: 299888 - DNA, 201 bp, Homo sapiens
aagtagaaagcatcggggctatctaggtttggagcttgagcagctagatagatgatggtgtcattttactgtaattagaaagaccgggccaggcgcggtgrctcacgcctgtaatcccagcactttgggaggccgaggcgggcggatcacgaggtcaggagatcgagaccatcccggctaaaacagtgaaaccccgtctct

SEQ ID NO: 299889 - DNA, 201 bp, Homo sapiens
cttgtttccttctgggagggggagattagaggaggcttatcattaataggaaggggagctatagggatgctaggatgtgggggtaagctgagaggtcctcytgtaggatgtaaattgcaagtttgcatagttgtgtattctccttcaatgaaaagaaagcttggacataagatatttcactccatttaccttccctgttac

SEQ ID NO: 299890 - DNA, 201 bp, Homo sapiens
aggatgtgggggtaagctgagaggtcctcttgtaggatgtaaattgcaagtttgcatagttgtgtattctccttcaatgaaaagaaagcttggacataagrtatttcactccatttaccttccctgttacagaaaagatcaagctgcaggatagtattgtaatttatactgccctcaggtggccatttttccccatcagag

SEQ ID NO: 299891 - DNA, 201 bp, Homo sapiens
gtttgctcctctgaggggtggtctctgtttctttatatgtgaaatttaggggattagatcagtgcttctaaaagtttaacgtggctattaatcagctgagsatcttttaaaatacagatcccgattctttaagtgtagggtagggcctgatactgtgcatttctaacaagtgcccaaatgatgttgaaactgctgacctgg

SEQ ID NO: 299892 - DNA, 201 bp, Homo sapiens
accggatccagcatgtctgtgtttgctcctctgaggggtggtctctgtttctttatatgtgaaatttaggggattagatcagtgcttctaaaagtttaacrtggctattaatcagctgagcatcttttaaaatacagatcccgattctttaagtgtagggtagggcctgatactgtgcatttctaacaagtgcccaaatga

SEQ ID NO: 299893 - DNA, 201 bp, Homo sapiens
ttgcgcctgtccatcgcctgccttctagtgcgaaactttaggagccctgttcccatccagtgacgaccggatccagcatgtctgtgtttgctcctctgagrggtggtctctgtttctttatatgtgaaatttaggggattagatcagtgcttctaaaagtttaacgtggctattaatcagctgagcatcttttaaaataca

SEQ ID NO: 299894 - DNA, 201 bp, Homo sapiens
  misc_feature (1)...(201): n = A,T,C or G
aattgcattcttttttaccctcttctttgacccctacatttgggttggaaagtgaggtaggacagaggttgtcaagaggtgattccaatccagttttcagngctgttcttaaagaactgaaatgcatttatttccctaataaaacatattatttatttgatttatatttataaagctaatatgggacatagtcaaatttac

SEQ ID NO: 299895 - DNA, 201 bp, Homo sapiens
cttccatcaccttcagagcaatggcattcttgcccacaaactctctcttgccccatttccataactctgtctcgccttgatttttgcaatggttctctaamaagccacttaactattcttctccaaaccatgtttgacaaattgcaactctgcttatctctcacctatgctatgttttattacacatttttctacatcaga

SEQ ID NO: 299896 - DNA, 201 bp, Homo sapiens
ttgttaggctcattctttaggtccattattgactgatcatttatttgctgatctctcaagttagcagggcctgttcatttttaaatcacttccatcacctycagagcaatggcattcttgcccacaaactctctcttgccccatttccataactctgtctcgccttgatttttgcaatggttctctaacaagccacttaac

SEQ ID NO: 299897 - DNA, 201 bp, Homo sapiens
aggcttatcattaataggaaggggagctatagggatgctaggatgtgggggtaagctgagaggtcctcttgtaggatgtaaattgcaagtttgcatagttrtgtattctccttcaatgaaaagaaagcttggacataagatatttcactccatttaccttccctgttacagaaaagatcaagctgcaggatagtattgtaa

SEQ ID NO: 299898 - DNA, 201 bp, Homo sapiens; identical to SEQ ID NO: 62534

SEQ ID NO: 299899 - DNA, 201 bp, Homo sapiens
ttggtgggagtgtaaagtagttcaaccactgtggaagacagtgttgtgattcctcaaggatctagaactagaaatagcatttgacccagtgatcccattayggggtatatacccaaagattataaacacacatgcacacgtatgtttattgggcactattcacaatagcaaagacttggatccaactcaaatgtcatcaac

SEQ ID NO: 299900 - DNA, 201 bp, Homo sapiens; identical to SEQ ID NO: 62518

SEQ ID NO: 299901 - DNA, 201 bp, Homo sapiens
aaactagagctaagaagagagaaacttgagggaaatatggatttgaaagttaccagtatgttgggaccacagcagagaatatgaagattatatagcaaaayagaggtcaaggaagtaggaggagaattaagacaagtgaatgagtttcaagaaagggtatatagtctaaaagtagtctgagaacaagaaacagccctctcc

SEQ ID NO: 299902 - DNA, 201 bp, Homo sapiens
  misc_feature (1)...(201): n = A,T,C or G
gtgcttctcagataattgtttttttctgataatagttgtgtctgaagatggcttctaacattgagcagcacagattttaaactcactactgatcagtgctnttaaggtcaggagaggtaaaaatagcagcatggctaatgagttacctttgtgtttaatctctttataacttgttaccagttcaaatgacagatttaagaa

SEQ ID NO: 299903 - DNA, 201 bp, Homo sapiens
atttgagaaaaggttatatacacagagacaaaaggatgtgcttgacaacttaaaaagagttgagcataagatcattagaataaacctgaaagggacatttrcctaatacttgtctttattgcagattcttacgctgtatgacagtattaatgttattgacgtaaataaagttgtggaatatgttaaaggtctacagaaaga

SEQ ID NO: 299904 - DNA, 201 bp, Homo sapiens
tctctttttgtgcggtggcaactttggctttgttggtaagctttgaatatttgattgaaatgattaaagttcatgaatactctggaattttttttttttttgagtctgatctgctgaatactctggaatttaacaggcatctttttttttgtttgtaggggaagcttgatgctattaatgtggaaaaggcaatcgaatttg

SEQ ID NO: 299905 - DNA, 201 bp, Homo sapiens; identical to SEQ ID NO: 62522

SEQ ID NO: 299906 - DNA, 201 bp, Homo sapiens
aggctgaggatgttccagtgaggttcatgtggaaagtgatgggtttgggaatggctggaagcagggtcatagacctgaagtacgtgaatccatgtggaaarctgagcctgcctgcgcctgcgcagtgcagcttagtgcgtcggcgcgcagttctcccgcccgtttcagcggcgcagcttctgtagttgggctactggaggg

SEQ ID NO: 299907 - DNA, 201 bp, Homo sapiens
aggacagcggtgcgatctgggctcactgcagcctccatctcctgggtttaagtgagccacctgaatagctgggattacaggcacattccaccatgcccagytagtttttgtatttttcgtagagactgagttttgctatgttggccagagtggtctcaaactcctgacctcaagtgatctgcctgccccagctttccaaag

SEQ ID NO: 299908 - DNA, 201 bp, Homo sapiens
aaatggaagaacattccatgctcatgggtaggaagaatcaatatcatgaaaatggccatactgcccaaggtaatttatagattcaatgccatccccatcargctactaatgactttcttcacagaactggaaaaaactactttaaagttcatatggaaccaaaaaagagcccacattgccaagtcaatcctgagccaaaag

SEQ ID NO: 299909 - DNA, 201 bp, Homo sapiens
gaggacagcggtgcgatctgggctcactgcagcctccatctcctgggtttaagtgagccacctgaatagctgggattacaggcacattccaccatgcccarctagtttttgtatttttcgtagagactgagttttgctatgttggccagagtggtctcaaactcctgacctcaagtgatctgcctgccccagctttccaaa

SEQ ID NO: 299910 - DNA, 201 bp, Homo sapiens
tctcagataattgtttttttctgataatagttgtgtctgaagatggcttctaacattgagcagcacagattttaaactcactactgatcagtgctgttaargtcaggagaggtaaaaatagcagcatggctaatgagttacctttgtgtttaatctctttataacttgttaccagttcaaatgacagatttaagaaattgt

SEQ ID NO: 299911 - DNA, 201 bp, Homo sapiens
aaaggttatatacacagagacaaaaggatgtgcttgacaacttaaaaagagttgagcataagatcattagaataaacctgaaagggacatttacctaatayttgtctttattgcagattcttacgctgtatgacagtattaatgttattgacgtaaataaagttgtggaatatgttaaaggtctacagaaagaagatggtt

SEQ ID NO: 299912 - DNA, 201 bp, Homo sapiens; identical to SEQ ID NO: 62526

SEQ ID NO: 299913 - DNA, 201 bp, Homo sapiens; identical to SEQ ID NO: 62516

SEQ ID NO: 299914 - DNA, 201 bp, Homo sapiens
catcttttatacactcttagtgctgtccaggtaaatactaatcaaaattgcaacgatcttgatagtatgttctcttacttcagagttggaaattgaaactrtatcaggatttggtcaaaaagttttgttacaagtgaagctgtcctacaaggtcaatgatgtaatggcatgtattagctgaatctaaagttgatgtgagtt

SEQ ID NO: 299915 - DNA, 201 bp, Homo sapiens
gcaggtgtgtacccccctggacagtgcttgtagaaaaacagaactatacccatggatttcatgattatactgctagcttcttggttaaggggctgagttargcattcattgcagatagaaacaaagcagatgcatgcttatcagtgagtactgagatatttagcatggttacctatgaattgaagtttggtctcttcttac

SEQ ID NO: 299916 - DNA, 201 bp, Homo sapiens
gttaaagaagttttcattttgtgatctgtatataaattcttttttaaataggtggatccttttcataccttatttggaattgctggattgtcacttttggkagaagaacagattaaacctgttaatcctgtcttttgcatgcctgaagaagtgcttcagagagtgaatgttcagcctgagctagtgagctagattcattga

SEQ ID NO: 299917 - DNA, 201 bp, Homo sapiens; identical to SEQ ID NO: 62519

SEQ ID NO: 299918 - DNA, 201 bp, Homo sapiens
ggctggtttttgtgtttttagtagagatggggtcccctggcctcatgtgatcctcctgcctcggccaccaaaagtgctgggatttcaggcctgagccacartgcccagccccacctaattttttttaaaaagttttttgtagagatggggtcccattatgttgcctcggctagtctcaaactcctaggctcaagtgattct

SEQ ID NO: 299919 - DNA, 201 bp, Homo sapiens
ttgtggcaacttttttccctcctagttaccagatgtatgctactcatggtgggtcctggcttccctaaagataattggaagacttcattggattgatagaragaaactgcgtaatttcattttagcatgtcaagatgaagaaacggggggatttgcagacaggccaggagatatggcaagtaatatttctgacatatttct

SEQ ID NO: 299920 - DNA, 201 bp, Homo sapiens
agaagaacgttgtagaggtaaacattgatgagattaccactttattttgaaagggcactccacagaaggatgttattatcaagtcagatgcaccggacacwttgttattggagaaacatgcagattatatcgcatcctatggctcaaagaaagatgattatgtatgtataatttttttatgttggaaagtttattttaaag

SEQ ID NO: 299921 - DNA, 201 bp, Homo sapiens
ttcattggattgatagagagaaactgcgtaatttcattttagcatgtcaagatgaagaaacggggggatttgcagacaggccaggagatatggcaagtaayatttctgacatatttctataaattatttcagcgtttgcattacttcatggttccatggatttccagggtggcattccgagtgttgctttgaaagcagttt

SEQ ID NO: 299922 - DNA, 201 bp, Homo sapiens
cagccatagattaactaatcctgtgcttctcagataattgtttttttctgataatagttgtgtctgaagatggcttctaacattgagcagcacagattttraactcactactgatcagtgctgttaaggtcaggagaggtaaaaatagcagcatggctaatgagttacctttgtgtttaatctctttataacttgttacca

SEQ ID NO: 299923 - DNA, 201 bp, Homo sapiens
gaagatggttcttttgctggagatatttggggtaatgtcagatttagtccattctacccaaaataccaatattaaaatgtactggttttgctagtaaccaktttataagtttttcatcttttcaggtcccactaagcagctggtctaactggagttaatggtctgctggaacttccagcatgcactgtggtagttatatca

SEQ ID NO: 299924 - DNA, 201 bp, Homo sapiens
cagtcatacaccaccacgcccatccaattttgtatttttagtagagatggggtatcaccatgttcatcaggctgatcttgaactcctgacctcaggtgatytacccgcctcaacctcccaaagtgctgggattacaggcgtgagccactgtgctcggcctgtatttttatttttaaaccttagtatttctgaataacaacg

SEQ ID NO: 299925 - DNA, 201 bp, Homo sapiens; identical to SEQ ID NO: 62523

SEQ ID NO: 299926 - DNA, 201 bp, Homo sapiens; identical to SEQ ID NO: 62540

SEQ ID NO: 299927 - DNA, 201 bp, Homo sapiens
ttaataatttgagttttatcacttttaatgtcaagaaattattatacacataaactttatgtctgtaattttagatctattgttgcacaggatttctggcwattacaagtcagttgcatcaagtaaattctgatttacttggctggtggctttgtgaacgacaattaccctcaggcgggctcaatggaaggccggagaagg

SEQ ID NO: 299928 - DNA, 201 bp, Homo sapiens; identical to SEQ ID NO: 62542

SEQ ID NO: 299929 - DNA, 201 bp, Homo sapiens; identical to SEQ ID NO: 62525

SEQ ID NO: 299930 - DNA, 201 bp, Homo sapiens
acctttccctgttgtgaattttcagtaatatatcctactaaaagactccccttgacaaagtagacccccatgagttgaaatactcattgatcctaatgtcyatttccagacagtcttgtacaggaatctccatgtttaaggacagttgattttggcaaattggattttttaaaaattagactacagaatttttgtttgcaa

SEQ ID NO: 299931 - DNA, 201 bp, Homo sapiens
tgagaattagatctgggagacaaatttaacccagagaccccccatattcaacaccaggtctctggttttggtgactggatagatggtagtagtattttctrattctgggaattttgtaggcaaagcaaattttagagggaagatgatgagctctgttatggacatgctgagtgtgaaaagcctgtgggatatccatatatt

SEQ ID NO: 299932 - DNA, 201 bp, Homo sapiens; identical to SEQ ID NO: 62543

SEQ ID NO: 299933 - DNA, 201 bp, Homo sapiens
caactatgtaattgtcctgtagagcaagtgcagccataagtggtaagaaatgaatgagtatggctgtgttccaattacaattattatggatggatatactygtatttcctatgtcagatggaatcttgctctgttgcccaggctggagtgcagtgacgccatcttgattcactgcaacctccgcctcccaggttcaagcag

SEQ ID NO: 299934 - DNA, 201 bp, Homo sapiens
ccgccccgcgccctccaggcccggcccgccctccaacctctgcgtgcgcacagcctagagcccgcctccgtgaaagactgccgggcgcatgcggtcggggktgttcactggctgtccggggctccgcgcgcgtcgccggcccagctctgtcgctgacgggaggatctgaagccggccgcaggtaggctgactccagggatc

SEQ ID NO: 299935 - DNA, 201 bp, Homo sapiens
gagctttaaaaatactgatgcctgcctcctaccccacaagatcctaattcaagtggtctggggtgcagcatgggcttttgaccttttataagctctgaatrattccaatatgcagctgagtttgagaaccactgttcctagttaagccattcataggttcgtggacatgatttttttaaagctacatttgtgatttggatc

SEQ ID NO: 299936 - DNA, 201 bp, Homo sapiens
gaggctgcttcacagtgacctggcggtgtggcttagtttggtagacagcatgcccttgagtgctggcttctgagtcctgagaggcactgtcttatcacccrccaccccagagctggctttctggtctccctggatccttcacagccccagacctctgcctctcacttaggttcccaaatgggtaggtgctttggtgatgag

SEQ ID NO: 299937 - DNA, 201 bp, Homo sapiens
gtgagctcggcccagccgggacgtcaagatgctgtctccacctagtggctcatcattcattaatccagcccaagcttcctcacacagggtgggcagctggmctccaaaatgacaggcctgttatgcaggcacttatcaggcctgctgatgtcccgttggccaaaacaagtcacgtggccaagccccgagccggcaggggag

SEQ ID NO: 299938 - DNA, 201 bp, Homo sapiens
ttatgggtgattttaagcaatttacttagcctttatgggcctccgttttttctgtaaaatgggagtaataaaggtacgtacttcacatgattaagggagayaatgtatgtaaatagtctctagtagtgcctggaaaatagggaaatgctcagataatatcagctcttcgcctagctgtgtattactatgtgacagacctcc

SEQ ID NO: 299939 - DNA, 201 bp, Homo sapiens
aagggcaggcctgggttcctagcacctcatggtgtgccgtaagggagctgccttgcctcttgaggaacagcacggctcctccatgcaggaaggagggagcrcagccagactccctcctttgccttctgcctctgtgttcctgttcttgagattctgtcactttgatcaccgtggccaccatcctgaagctggtgcctggtg

SEQ ID NO: 299940 - DNA, 201 bp, Homo sapiens
cccttcagtccaggggatctgggcagttcttagcagtctggagcagctgggctgaagcctgacttcacccttcctttgtagaaatctgctcttttcccccsaaaaacatttccgaggattgtggtgcctggactagcatttagcatggtacctggaccgtggaaggtgctcagaaatgccactcctccttcttgagtaaca

SEQ ID NO: 299941 - DNA, 201 bp, Homo sapiens
agattcaaatgagaaagtcattttcaaattattttagggcctatggaaacaaacatttaagcagattttgttcttttacactttgtgcataaccttcacartgaagctgtttcttttgaatctctatttcagatcatcccttttttgttggggttcagtaccaccctgagttcctgtccaggcctatcaagccctccccac

SEQ ID NO: 299942 - DNA, 201 bp, Homo sapiens
ataaaggtacgtacttcacatgattaagggagataatgtatgtaaatagtctctagtagtgcctggaaaatagggaaatgctcagataatatcagctcttygcctagctgtgtattactatgtgacagacctccctaaagctcagtggctcccaacagcagtgacttctcatctcagtattctgtggtttggctcagtgcc

SEQ ID NO: 299943 - DNA, 201 bp, Homo sapiens
ttttatctgccaggaatgaaagtggtgaggtcttgaatataatccagaggttgagagagaaaagaaagtagtgaggtcattgtgggtatcaaatgggcagyccttcctccaagttgcagtgcacctcccagtcctgccctggggatgacagcttggggagcatggtcactgggcagttgtctcaatactgattactacatt

SEQ ID NO: 299944 - DNA, 201 bp, Homo sapiens
tcttctgagtgtcttggtcagtacggcacacagagctgatgaagaaaggcccccttaggggagcattttaagccaagaggtaagataaattgttaatattaatatatgtatttaaaattttgggctgggcacagtggctcatgcctgtaatcctaaaactttgagaggctgaggtgggaggattgcttgagcccaagagtt

SEQ ID NO: 299945 - DNA, 201 bp, Homo sapiens
gtgttctggtctgtgccatggcgggcagcagctgagctggtggaatggtggggcatggccctgcttgtctgtgggtggcagtagagtgtcatggttaagakcatggatgccgtggctaggcgcgttggctcatgcctgtaatcccagcactttgggaggccgaggtgggcagatcacgaggtcaggagattgagaccgttc

SEQ ID NO: 299946 - DNA, 201 bp, Homo sapiens
tataaaaatgttatcttgttgctcctgacctaacagaattaggaagcagcactgtctcatgagggaaggggtcttgataaacatggggtctggactctagraacttctttctggtacatggccttcctcggggagccatttaacttctggccgcagtttctccttctccaaaatgcttggagttggtactaaagccacttc

SEQ ID NO: 299947 - DNA, 201 bp, Homo sapiens
tgtttcccctcctgccttggttggttgaccccctgtcctggcatagcctaagtaggtggtgggtaggcatgagaagttagtatcaggaggagggcctgtgtgctaggtaagcgtttaacacggatggactcattaatcccctgaccagggagtttgctataggctgtttcacagtcttaaggagctgatacaacaagaact

SEQ ID NO: 299948 - DNA, 201 bp, Homo sapiens
ttcttctgagtgtcttggtcagtacggcacacagagctgatgaagaaaggcccccttaggggagcattttaagccaagaggtaagataaattgttaatattaatatatgtatttaaaattttgggctgggcacagtggctcatgcctgtaatcctaaaactttgagaggctgaggtgggaggattgcttgagcccaagagt

SEQ ID NO: 299949 - DNA, 201 bp, Homo sapiens
cttcttctgagtgtcttggtcagtacggcacacagagctgatgaagaaaggcccccttaggggagcattttaagccaagaggtaagataaattgttaatattaatatatgtatttaaaattttgggctgggcacagtggctcatgcctgtaatcctaaaactttgagaggctgaggtgggaggattgcttgagcccaagag

SEQ ID NO: 299950 - DNA, 201 bp, Homo sapiens
ttctttacatacagcccgtttgttttgccagggaaactctatggagacgcagactacttggaagagaggcaccgccaccgatttgaggtgaggattccagsttgctggtactctggaaagatagtgagctgagagaccagcagaattatttttcatgcctcaacaggtgaatccagtctggaaaaagtgtttggaagaaca

SEQ ID NO: 299951 - DNA, 201 bp, Homo sapiens
cagaaagttgagatatgggcccaaatctgattaatgtttgcagtccccaagcacagtagctgtcatgtaagtcagtagcccataaggatgaatgaatgagyctcccgcctgatctttatgtacactggcatatgtattgccaggcactgagactgcaagaatctaaagagagaaactaaagaacgtaaagagagatgttaa

SEQ ID NO: 299952 - DNA, 201 bp, Homo sapiens
gtaatcccaaagtgctgggttttataggtgtgagccaccatgcccgactgccttttacttctttgttgttattgagaacctgtcaatggtgtgacatacarctgtggctgttacttcaaagattaattgcttaaaactgggagagatgttaaaacatacctcttaagttttaaaattctgcattcgtactcctactctcta

SEQ ID NO: 299953 - DNA, 201 bp, Homo sapiens
atgtaaacccaaaagaggactgcaggcacaggaaagtgtctaatgggggcaggatcctcatttaacagggaaatcaatagaaaatgcctccaagtaaatgkggagaagtagcacaccagcaagatcagttaagagttgaagagcggttgtttctagggattggaaaggggagagtgggtgagggccgatactgcttacaag

SEQ ID NO: 299954 - DNA, 201 bp, Homo sapiens
ttcctggcccatcagctgaagcttttcaggaagagatgaaggtcagaggtaaagttggggctcagtgctgaggttgttaaacaggccccatgtagctgtcmccacattggggtttgctttctacttcccaggtgtttctcagcgtgagagtttagtttgctttgtgctgctggacaggttcctgcagaatggcctgttgta

SEQ ID NO: 299955 - DNA, 201 bp, Homo sapiens
tttagtgcctaacctctgaaacaactttgttcttctagcttggtggaaccgtgggggacatagaaagcatgccctttattgaggccttccgtcagttccarttcaaggtcaaaagagagaacttttgtaacatccacgtcagtctagttccccaggtaagtaagacattgaaagttttactttgggggagatggagaggag

SEQ ID NO: 299956 - DNA, 201 bp, Homo sapiens
gttttaaaattctgcattcgtactcctactctctagcgttgaggtgaaaatatgcaagcattaaatgtcactagtgcagaaatcctcgtaacaaatggcawcaggaaaagatccatatacctgagtgatatttaatacagaattcttgagcagaggatgagttacctctctgagggagaaaatgagactttttttcctttc

SEQ ID NO: 299957 - DNA, 201 bp, Homo sapiens
gcttttggaaatgctgcagcagaggatgcaaagagcctttggagcggggaagacttctgagcattcttccttccctgccaagtgtgttctttcttgctctrgggagggggtggggcgggggaatgcttcgagcacaactccttagttttcttgttccttagtttatttttatcataatttggcttcacatggaacgttcct

SEQ ID NO: 299958 - DNA, 201 bp, Homo sapiens
ggctagaagtatgaggttaccttttagagaatagctggtaatttttctttttgtgtgtcatatttagtcttctagaagtgaatttctgtgcttcctattaygtaattgcacaccttgttaatgagtgttttatttcaggattgcagttgtgccatggtataggtatttttcacttaacgtaaatggtttctctgttcactg

SEQ ID NO: 299959 - DNA, 201 bp, Homo sapiens
gagatgcggtttccccatattggccaggctggtctcgaactcctgacctcaagtgatcctcctggctctgcctcccaaagtgctgggattacaggcatgarccaccatgcccagccagagaactacttttaattaaaggaattttggtttagctgcaaccacttttaaatgttgatgttctttccttttagtctatctttt

SEQ ID NO: 299960 - DNA, 201 bp, Homo sapiens
tatgggaaaatataaaaatgttatcttgttgctcctgacctaacagaattaggaagcagcactgtctcatgagggaaggggtcttgataaacatggggtcyggactctagaaacttctttctggtacatggccttcctcggggagccatttaacttctggccgcagtttctccttctccaaaatgcttggagttggtacta

SEQ ID NO: 299961 - DNA, 201 bp, Homo sapiens
tttagtttttgttctaatcactgatcttaaactgaggagggaagttgtgtttagagcttagcaatgaaactattaatcactttcgtttgtaactattttcrtaacaagtattttggtatttcagatgccaattctacagagtttgaccctacgaccagtcatcccgtggtgagtcaagtgtttgaacctccacagggctta

SEQ ID NO: 299962 - DNA, 201 bp, Homo sapiens
caccatgtttgccaggctagtctcgaactcctgacctcaagtgatccacccgcctcggccttccaaagtgctgggattataggtgtgagccaccacgcccrgctcattctatatcttggtgtgtatgtttgacaaaactcttcaaagtatgcacttaaaatgcttgtattttattgtatgtgaattatgcttcaatatggt

SEQ ID NO: 299963 - DNA, 201 bp, Homo sapiens
ttgtggataggagctcaagtagaagccttcatgttttctctttagagacaaattcagtcttggaaagcttatttatgcttatgagctacatgtagatgtcrtggaattttgagagaatgaattgtgaattcctgtccatttaatgaacccagctgtttgtagcacacgtgaggttgagttttatatctgctcacttggcac

SEQ ID NO: 299964 - DNA, 201 bp, Homo sapiens
agcttggagacaccgcatactgtatagcagtgatcacagtgcgagtttacttgctaaacactcccaggattcttgcgttaaatgacttggtttaatcagcrtttctctgatttatatccataacaccctttttgagaatcccatgtgcattttgttgaaaccagggagcatgcttttggaaatgctgcagcagaggatgca

SEQ ID NO: 299965 - DNA, 201 bp, Homo sapiens
catagattctgcggacttggagcccatcacctcgcaagaagagcccgtgcgctaccacgaagcttggcagaagctctgtagtgctcagtgagtagagttcrctgccttgggtttccagagttcttttggtttgttttaatgaaaaagtcctcttgttttcatgtgccagtagtaggtaattgacttgttaaaatatttttt

SEQ ID NO: 299966 - DNA, 201 bp, Homo sapiens
aggtcttgctgtgtcaccctgactagagtgcagtggtgctgtcacagctcactgcagcctgggcttaaacagccctcctgcctcagcctcctgagtagctrgtaccttaggcggacgctaccatgttcagctgttttattttttgtagagatgaggtcttgctatggttgcccaggctggtcttgaactctttgggctcag

SEQ ID NO: 299967 - DNA, 201 bp, Homo sapiens
ctctgaatgattccaatatgcagctgagtttgagaaccactgttcctagttaagccattcataggttcgtggacatgatttttttaaagctacatttgtgrtttggatcatgaattattattattattatttttaagacaggttctggctctgttgcccaggctggagtacagtgatgcgatcttggctcactgcaacctc

SEQ ID NO: 299968 - DNA, 201 bp, Homo sapiens
tcagcagtttgggaggcagaggtgggaggactgcttgagcctatgagtttgagaccagcctgggcaatgtgacaagagcctgtctcgatttaaaaaaaaaraaaaagtccaacagaaaatgatttccatcctacaagtccatgtgtaacgtgtatctgttaagtgtgagagaagaataaagatgatttagtacagaaagga

SEQ ID NO: 299969 - DNA, 201 bp, Homo sapiens
catttatggtacaatcacttagtactgattgtccccatgagtagtgtgacacattttcatctgtctcttgagcaagtcagcagatcttttgctttcgtctkgcaagagcattcgtctccgaatgagcttcatttggtttcagtatctgtactcctgctgtgctgatcctagctgttggatctcagtgttcctcagataaca

SEQ ID NO: 299970 - DNA, 201 bp, Homo sapiens
cagatctgcttttggctttagactttactggcctgaaagctgagggtcacactgacagctggctctggtctggggctgccctggcaagattctgggctaaytgggtcatgtttggatcttagcttcccctctcaccagctttgtgaacatgggcaaattaacctcttcaaaatgtggattccttttctgtaaaatggagac

SEQ ID NO: 299971 - DNA, 201 bp, Homo sapiens
tctgccaggaatgaaagtggtgaggtcttgaatataatccagaggttgagagagaaaagaaagtagtgaggtcattgtgggtatcaaatgggcagcccttyctccaagttgcagtgcacctcccagtcctgccctggggatgacagcttggggagcatggtcactgggcagttgtctcaatactgattactacattctggt

SEQ ID NO: 299972 - DNA, 201 bp, Homo sapiens
gtgagccaccgtgcccagccaactgatgctttttcagtacaaaaattatttatggttaactaaggagataagatttaggtttttcttttttttttttttttactttgtcactgtgatagagataacattcctggcacctctctcatctgacctttttcttgaaatgatgtggaaagttccataataacctttgggaaggat

SEQ ID NO: 299973 - DNA, 201 bp, Homo sapiens
tccaactcctgggctcaagatccccccgcctcagcctttcaaagtgctgggattataggattatgggcgtgagctcatcctggccagacgtggtttttttycccttgaaatagctattttggtctcatgatagcgtgtaccttctgagtaattgggtttttcttgacgtttatttgatagatatgatcgcttgctggagac

SEQ ID NO: 299974 - DNA, 201 bp, Homo sapiens
ctgatagggccaggccaggtgccgggcctccagacaatgagttcgggttatgtcttaacacgcttgtctcttaccaactagatcagtgcagatgggcgtcytggtggcagcgggtgagtgtgcatatccaaagcccacacgaatggctgacagtggctggagcactcctgggtaccactccagagttctgagctgtgtttg

SEQ ID NO: 299975 - DNA, 201 bp, Homo sapiens
gcaggcagatcacctgaggtcaggagttcgagaccagcctgaccaacatggagaaaccccgtctctactaaaaatacaaagttagctgggcatggtggtgyatacctgtaatcccagctactcgggaggctgagacaggagaatcgcttgagacctggaggtggaggttttggtgccgagatcacgccattgcactccagc

SEQ ID NO: 299976 - DNA, 201 bp, Homo sapiens
cagtatttacagtctctcttcattgcatgcctgggagagatttctgacaaggagcaagttgttgttaaattatagaagagaactactttttttttttttttgaggtagtcttattctgtcgcgcacgctggagtgcagtggcatgatcccagctcactgcaacctctgtctcctgggttcaagcgattctcctgcctcagt

SEQ ID NO: 299977 - DNA, 201 bp, Homo sapiens
gcagaaagagagagatttgggagtttaatgattttgaaggaaactgttgtattttaaaacctcatatttaaaaaatgtttaagttattaaatatattaagwtgatcactttaaagccagtattaagatgatcactttaaagccagaatcaagaaagacaactttgataaaatgataatattatttaaaaattaagaacgca

SEQ ID NO: 299978 - DNA, 201 bp, Homo sapiens
aggctgtcattgaacagaaagccctctagagtctgctgcagaggcttagctgagacccgatcctgaacacagtagagtgcagaaagagagagatttgggartttaatgattttgaaggaaactgttgtattttaaaacctcatatttaaaaaatgtttaagttattaaatatattaagatgatcactttaaagccagtatt

SEQ ID NO: 299979 - DNA, 201 bp, Homo sapiens
actgcttcagaagactcagaccctgacatctttttcctacagtgcacagttgggcgttagcctcctcccaccttggcagaagactggaggcttgttctctrgggagggttcctggatgagcagacagtagggacagttgagggcagtaacactggactacaaacatggggttatgtgtaatgttaacgctgttgacagtcc

SEQ ID NO: 299980 - DNA, 201 bp, Homo sapiens
taaaaagtgggcacgagatttgaacagacacttccaaaaaaagatgtaggtgataaacacgaaaaggtgctcaacacctctagttagggaaatcagtgcasatgaagtcacaatgagatagtgacacaaaccccctagagcggctgagtgttagagaggctgtggagctcttaccttgctgccgggagtgtaaaatggcac

SEQ ID NO: 299981 - DNA, 201 bp, Homo sapiens
gaacaattcaaggaaatttctagacatcagtttctgggttgaaagggcccccttggtgcctatcatattggatgacagatgacctacaccaaggcatattrttgtgaaggttcagactaatggggcagaagttctaaaaggctctgaagagaaaaatcaagaatcattgtgccactggaccccttagcaacaatactggaa

SEQ ID NO: 299982 - DNA, 201 bp, Homo sapiens
tcccctttattccttttcttcctggcccatcagctgaagcttttcaggaagagatgaaggtcagaggtaaagttggggctcagtgctgaggttgttaaacrggccccatgtagctgtccccacattggggtttgctttctacttcccaggtgtttctcagcgtgagagtttagtttgctttgtgctgctggacaggttcct

SEQ ID NO: 299983 - DNA, 201 bp, Homo sapiens
aaagatagtgagctgagagaccagcagaattatttttcatgcctcaacaggtgaatccagtctggaaaaagtgtttggaagaacaaggcttgaagtttgtyggccaagatgttgaaggagagagaatggaaattgtggagttagaaggtgattattcgggcagttttatttaatggaaaacttagtaaagttttcttggca

SEQ ID NO: 299984 - DNA, 201 bp, Homo sapiens
aggtgaccttagcagattcatagaaatagccctcaaaagacctggctgtgtggatgatgaaaagtaaagcaggaaggaggatgtctttgtgaacgcatcaycctgtgagataaagttctttacatacagcccgtttgttttgccagggaaactctatggagacgcagactacttggaagagaggcaccgccaccgatttga

SEQ ID NO: 299985 - DNA, 201 bp, Homo sapiens
tgaagagcggttgtttctagggattggaaaggggagagtgggtgagggccgatactgcttacaagctcggttagaaccatttgattctaaaatgcatgcaygtgtaactttgacaaacataaaagctaaattacacaagtgaccaaatgatctatttccttattaaaagaggttcaaggaaaagtcatacttgaaaattcc

SEQ ID NO: 299986 - DNA, 201 bp, Homo sapiens
gagaaccctgttccagaccaagaactcagtcatgagtaagagctgcctcacgctggcccagcctttggctctgcgtgcccaggacgcgtgtcttagggtgrtgctgtggcttcgaggagcaggctggctttttttggtttcgttcttgcttttgaagttcattctttcctctcttattcatacccttttaggatgcactgt

SEQ ID NO: 299987 - DNA, 201 bp, Homo sapiens
gattggccactaattttctattctattcttgagtctgttttagtagtttatctagaaaattgtccttttttctgttttcaaatacataatatttttacaasgtcacgtagctagtaggaggctgtaagcctggtgagtttttgcttttatttaataacttgcttttttctaaacaggtgatctgtgtccacgatgtctcat

SEQ ID NO: 299988 - DNA, 201 bp, Homo sapiens
aggcttgttattttctaattagagatagtgggctgttccagaagaacccattgccatcggccattccctgcctctcctggttccccaaacaacacctgtgwccctcctgcctcttctccgtgcctcgttgtactttgtgcttcagccgggtggagtatctttcggttcccctagtaccctccactctccctatgattgtac

SEQ ID NO: 299989 - DNA, 201 bp, Homo sapiens
ccaattcaaggtcaaaagagagaacttttgtaacatccacgtcagtctagttccccaggtaagtaagacattgaaagttttactttgggggagatggagargagggaggaaaggtaaaccggaatgattttcactcattgtctagtagttttcacttgaggtgcaggaagcagagaataaagaactttgtaagtttaaatt

SEQ ID NO: 299990 - DNA, 201 bp, Homo sapiens
tcccagaacacagtatagatactaatatgagaccctggcatgtgtacttactgtgtgccagccgctgctctcactgctttcatatgtatattttatattarttcatgggatccccagccatagtcctgggagaactgctgggttggagcactggttggcttaaccgtatccaaagattttccaggctggcgtaccttgcgt

SEQ ID NO: 299991 - DNA, 201 bp, Homo sapiens
ttgtacaggtggggttccactgtgttgtccaggctggtcttgggtcctcccacctgtaatcccaaagtgctgggttttataggtgtgagccaccatgcccractgccttttacttctttgttgttattgagaacctgtcaatggtgtgacatacaactgtggctgttacttcaaagattaattgcttaaaactgggagaga

SEQ ID NO: 299992 - DNA, 201 bp, Homo sapiens
ggggcctgggcgcggacgggcgcggagcgaggcaccgcaccgccggggcggggagtgggcggggctcgggggcggggcggggtgtgggcggggctcacggscggggcgggtgagtgggcggggcctcggcgtggtaggcgcgctgcgtaaagaggcctgcagtcccgcggcgcggggcaggttccgggctgcttaggttgg

SEQ ID NO: 299993 - DNA, 201 bp, Homo sapiens
tgcaaggctgtgtcctaaagccatagggaagtttagctttcagttgcctgtaacattaaggttgtttcatgattttttgaaggtttgtttcacaccatttycccccttaaatcatttaactgaatggtatgtaacaggtgtagtttctaatgagttcttttcttcccctgtggctttagcatggcacattacacttctgtg

SEQ ID NO: 299994 - DNA, 201 bp, Homo sapiens
ccatgttttgtttattaaaatttatttaagatttattttattatttttatagatgaggtctcactctgttgccccagctgggtgcagtggcatgatcatasctcactaggctcaagtgatcctcctgcctcagcatccctagtaactaggactacaggcacatgctaccacgcctggctaattattttaatttttggtaga

SEQ ID NO: 299995 - DNA, 201 bp, Homo sapiens
ttcagctggtttcgtcctaagaaggaacttcgaaacacaggcattctttttcctgaaaataagcagagttacagctgagtaggaatttagctctgtcccayatgctatcgcattgggcagcaaaagcagggtggggtccagcgaaatcagcaggcactgcaatgagtaacatacccagccacgtttatgcagcatttttac

SEQ ID NO: 299996 - DNA, 201 bp, Homo sapiens; identical to SEQ ID NO: 62590

SEQ ID NO: 299997 - DNA, 201 bp, Homo sapiens
tagcaaatatcgattgagcacccactatgtacaaagcaccatgtgctgcacacgggtggacacagcatcgtttctgaaatcatggagctttttgtctggtsgggctgcgaacacatccacagcatactacacgcatggcaaacaagggagtgggtcaggtgtcaggtgacgggggacctgggcaaccttatgtgggcaacc

SEQ ID NO: 299998 - DNA, 201 bp, Homo sapiens
actgagattttcttttctttctttcttttcttttctttcttttttaaagagacagagtttcactatgttgcccgggctggtctcaaaccccttgcctcaartaatcttcccaccttgggcctcccaaagtgctgggattgcaggtgtgagccaccacacctggcccagattttctttaatatttgtctaatatctttccat

SEQ ID NO: 299999 - DNA, 201 bp, Homo sapiens
tgttgaattctattctgaccatcactcactgagattttcttttctttctttcttttcttttctttcttttttaaagagacagagtttcactatgttgcccrggctggtctcaaaccccttgcctcaagtaatcttcccaccttgggcctcccaaagtgctgggattgcaggtgtgagccaccacacctggcccagattttc

SEQ ID NO: 300000 - DNA, 201 bp, Homo sapiens
atttaatgaagtacatgaatgagtgtcttcagaattgtacacagtgagatcaaatattttaataatgagcttgttatgttgaattctattctgaccatcaytcactgagattttcttttctttctttcttttcttttctttcttttttaaagagacagagtttcactatgttgcccgggctggtctcaaaccccttgcctc

SEQ ID NO: 300001 - DNA, 201 bp, Homo sapiens
aaatcctccaagcatgcgcctgaaatgaccaagggaaatgaaggcggaggctgctgtcgcctggtggcctgggaagggccaagagccagggagctggaggsaggagagaacgtgcgacctcagcacggagcactgtaggggaggcggggctggagggagatggcgccgcgctcccggatgaacagagaaagcgacagggtg

SEQ ID NO: 300002 - DNA, 201 bp, Homo sapiens
ctctgactggaaaaaaaaaaaaaaaaaaaggaggatagacagggcttggggattggtggatgggtagataaggaaggaggagtctagcatgactctcagaytactgacttggaccagcaggggaatggctgtgacaataaataagattgggaaaacaagaaggtgagcaaatttagaggagaaaatgaatttcatttttgg

SEQ ID NO: 300003 - DNA, 201 bp, Homo sapiens
taaggttgtttcatgattttttgaaggtttgtttcacaccatttccccccttaaatcatttaactgaatggtatgtaacaggtgtagtttctaatgagttmttttcttcccctgtggctttagcatggcacattacacttctgtggatttaaagtccttgcccctcagatcagctttgctcctgaaattgcatccgaagaa

SEQ ID NO: 300004 - DNA, 201 bp, Homo sapiens
cggaacctggcgcaactcctagagcggtccttggggagacgcgggtcccagtcctgcggctcctactggggagtgcgctggtcggaaggtgagtgatcccytgtcggggaccgggggacttgggaaggacagttcccggactggacggccagaacgctctcagggatttcagctggccggccatatggccctgtgggtcgt

SEQ ID NO: 300005 - DNA, 201 bp, Homo sapiens
ttcaataaataataataattaattaattagccaggcgtggtggcaggcacctgtaatcccagctagttgggaggctgaggcaggagaatcgctttaacccrggaagctgaggttgcagtgagccaagattgcgccattgcattccagcctgggtgtcacagcgagactccatctcaaaaataaataaattaataaattaaa

SEQ ID NO: 300006 - DNA, 201 bp, Homo sapiens
attcgcccggttaatagcacccagagcccctgcgtttgtgtccggttgataacgcccaaagcccggcgtccatcaccttaggatagacttaaagcctctgyacctggaactgtttactttcctgtaaccgtttatccttttaactttttgcctactttacttctgtaagattgtttcaactagactccccctctcccctgt

SEQ ID NO: 300007 - DNA, 201 bp, Homo sapiens
aggcatgagaatcacttgaacctgggaggcagaggttgcagtgagctgagatcatgccactgcattccagcctgggtgacagagtgagactgtctaaaaaraagagagagaaagagacagaaagaaaagaaaatttgatatttcttagcttcaattactatgatgcacctgaacattcaattttcatcttagtcttcattg

SEQ ID NO: 300008 - DNA, 201 bp, Homo sapiens
tgcgtttgtgtccggttgataacgcccaaagcccggcgtccatcaccttaggatagacttaaagcctctgcacctggaactgtttactttcctgtaaccgyttatccttttaactttttgcctactttacttctgtaagattgtttcaactagactccccctctcccctgtctaaaccaaagtataaaagaaaatctagct

SEQ ID NO: 300009 - DNA, 201 bp, Homo sapiens
atttgatatttcttagcttcaattactatgatgcacctgaacattcaattttcatcttagtcttcattgaatttaacagagagaggttgttcttcaagagsaactgtttcttatcctgatttaggtaagaaagtactcattgtctatgcacaccaggaacccaagtctttcaacggatccttgaagaatgtggctgtagat

SEQ ID NO: 300010 - DNA, 201 bp, Homo sapiens
accgggggatcagagtttgtttttgcggagaagtgagtcctttatgccccaaatagtgactgacatagagaaggtactcagtaaacactttttaaaggaaygcctgcctgactgaagcttaatgatgtgaggcttctagtgtgataccctaccttgttttaacctgaagtgactcttccttagctaagagagccagacgga

SEQ ID NO: 300011 - DNA, 201 bp, Homo sapiens
tttacttctgtaagattgtttcaactagactccccctctcccctgtctaaaccaaagtataaaagaaaatctagctccttcttcggggccaagagaatttygagcgctagctgtctctcggctgccggctaataaaggactcctgaattcgtctcagagtgtggcgtttctctgtaactcgctcggttacaacactaggtt

SEQ ID NO: 300012 - DNA, 201 bp, Homo sapiens
tttataagaaattagaaaaacatgattttgggggagatcttctcatagttaacagcatatataacatataagttagaaatgtactctgctagctcataagatattttaaagcagggattttagtgtcattaaacttttatttataatagtttttttaatacaatttttttttttactttggaataactttagattcacagg

SEQ ID NO: 300013 - DNA, 201 bp, Homo sapiens
gtggctcacgcctgtaatcccagcaatttgggaggccgaggagggtggatcacttgaggccaggagttcaagaccagcctggccgacatggtgaaaccccrtctctactaaaaatacaaaaattagccgggcatggtggtaggcgcctgtagtcccagctacttgggaggccgaggcaggagactggtttgaacctgggag

SEQ ID NO: 300014 - DNA, 201 bp, Homo sapiens
  misc_feature (1)...(201): n = A,T,C or G
cgtcacagtgtctgatttgtatgccatgaactttgagccgagggccacagacaaagatatcactggtgagtcatgggataaatgctctatttataaaaacnatctttatgttttttactttaaaaaatgttgacttccagctgcaaaatggcattatagaagcaagctagcttcactttccaaaaacaaatagatagcact

SEQ ID NO: 300015 - DNA, 201 bp, Homo sapiens
ggattgagtgtgacatttttagaaaaaaagtggtcctctttgaaaggaaaaagtacgtgattccagttactgatagtctactgaaggaaatgataatttakaaacctgaccttgcttcttcacaggccaactggtctcttatgtgtcattagccaagttcaaattcttcttgcttttaaaaaaatctttttttttttcagt

SEQ ID NO: 300016 - DNA, 201 bp, Homo sapiens
cctgggcaacagaatgagaatccacctcaaaaacaagcaaacaaacaaacaaataaataaaatgatgttgcctgaggaaaaaaatgtggatagtggtgtgwgggcctctcactccccacctgacagggcaggcctggatgagggtgtgggttttaaaggaagtaatgcagaggattgagtgtgacatttttagaaaaaaag

SEQ ID NO: 300017 - DNA, 201 bp, Homo sapiens
tggcggacacctgtagtcccagctacttgggaggctgaggcagcagaatcgcttgaacctgagagacggaggttgcagtgagccaggattgcaccactgcrctccagcctgggcaacagaatgagaatccacctcaaaaacaagcaaacaaacaaacaaataaataaaatgatgttgcctgaggaaaaaaatgtggatagt

SEQ ID NO: 300018 - DNA, 201 bp, Homo sapiens
ggaacccaagtctttcaacggatccttgaagaatgtggctgtagatgaactgagcaggcagggctgcaccgtcacagtgtctgatttgtatgccatgaacyttgagccgagggccacagacaaagatatcactggtgagtcatgggataaatgctctatttataaaaactatctttatgttttttactttaaaaaatgttg

SEQ ID NO: 300019 - DNA, 201 bp, Homo sapiens
aaagaaaaacactaatgtgcaaaaagaaaacatttgaagatgtaaaacccactggtaaaagtaagtacacagaacactctaatactgtaattgtgtacagkccactcattactagtattaagtctaacagacaaatctatcaaaaacaataatcactacgtgacctgttaagagccaaagataagcaatataaaatatgta

SEQ ID NO: 300020 - DNA, 201 bp, Homo sapiens
cctgtggccactccaggtagaccagctgcgagtggctcccttgcttgttggcacacgcacacacagacacacacatgcacacatgcatacacacacacacrcacacacatacatgccctcagctccccgaggggtgagatgagatgggatggaagcgtgatgccccacaccattttgactcccctggatacaagaaaatta

SEQ ID NO: 300021 - DNA, 201 bp, Homo sapiens
tcctgtggccactccaggtagaccagctgcgagtggctcccttgcttgttggcacacgcacacacagacacacacatgcacacatgcatacacacacacaygcacacacatacatgccctcagctccccgaggggtgagatgagatgggatggaagcgtgatgccccacaccattttgactcccctggatacaagaaaatt

SEQ ID NO: 300022 - DNA, 201 bp, Homo sapiens
ggatgtcattgtcacctatggatgggagtgttgcatttgtccatccctggagggtgtccacacgcatgttccctgctggctgtgctgagcccgtgtgctgraggctcagcaacatttctgtcctcttctggagtccacacaaatgcatctgctttctcccttgcagggtaaactagcgctcctttccgtaaccacgggagg

SEQ ID NO: 300023 - DNA, 201 bp, Homo sapiens
gacaaagcgagactctgtctcaaaaaaaaaaaaaaaaaaaaggaacgatttttaaattctaaaagcttcagaaaataaatgcacgtaagggaaacatactragtaaccaagatgtgtcttggaccatgaatggtgctaccacttactgagcagccctgtgtgctgggaaccttgtcctgtggtcagtgcctcggccgtatc

SEQ ID NO: 300024 - DNA, 201 bp, Homo sapiens
gagcccgtgtgctggaggctcagcaacatttctgtcctcttctggagtccacacaaatgcatctgctttctcccttgcagggtaaactagcgctcctttcygtaaccacgggaggcacggccgagatgtacacgaagacaggagtcaatggagattctcgatacttcctgtggccactccaggtagaccagctgcgagtgg

SEQ ID NO: 300025 - DNA, 201 bp, Homo sapiens
ccctcagctccccgaggggtgagatgagatgggatggaagcgtgatgccccacaccattttgactcccctggatacaagaaaattataacattttgccccytttaaatgctttacttgacagatttgaaaagcttgaccaatagggaaaacatgccctaattatagcttttgatatggtttgggcagaagctaagccaaac

SEQ ID NO: 300026 - DNA, 201 bp, Homo sapiens; identical to SEQ ID NO: 62548

SEQ ID NO: 300027 - DNA, 201 bp, Homo sapiens
acctgacagggcaggcctggatgagggtgtgggttttaaaggaagtaatgcagaggattgagtgtgacatttttagaaaaaaagtggtcctctttgaaagraaaaagtacgtgattccagttactgatagtctactgaaggaaatgataatttataaacctgaccttgcttcttcacaggccaactggtctcttatgtgtc

SEQ ID NO: 300028 - DNA, 201 bp, Homo sapiens
aaaatgatgttgcctgaggaaaaaaatgtggatagtggtgtgtgggcctctcactccccacctgacagggcaggcctggatgagggtgtgggttttaaagraagtaatgcagaggattgagtgtgacatttttagaaaaaaagtggtcctctttgaaaggaaaaagtacgtgattccagttactgatagtctactgaagga

SEQ ID NO: 300029 - DNA, 201 bp, Homo sapiens
ttataagaaattagaaaaacatgattttgggggagatcttctcatagttaacagcatatataacatataagttagaaatgtactctgctagctcataagatattttaaagcagggattttagtgtcattaaacttttatttataatagtttttttaatacaatttttttttttactttggaataactttagattcacagga

SEQ ID NO: 300030 - DNA, 201 bp, Homo sapiens
gcgtcagcgagtgcgcggtccagtgcggccggaacctggcgcaactcctagagcggtccttggggagacgcgggtcccagtcctgcggctcctactggggmgtgcgctggtcggaaggtgagtgatcccctgtcggggaccgggggacttgggaaggacagttcccggactggacggccagaacgctctcagggatttcag

SEQ ID NO: 300031 - DNA, 201 bp, Homo sapiens
gtaacctttctgaggaatcacaatacaataattgataataatattgatcacataaacatagacttccttgacacaggattgccacagaccttcaatttgtaaaaaaaaaaaaaaaatgcaacatctgtggaagtactataaagagaagcagaataaggcagatatgcctgtataagactaagggagaatcttaaaagctgc

SEQ ID NO: 300032 - DNA, 201 bp, Homo sapiens
acctttgggactggtttctctcaccagcgtaactccccgggagatccgagcaagctgatgagtgtatcagtggctcattctttctgttgcaccacggaccstcattctgtaaccgggataccagccagagatggggagcgggaggcgcagggcaggggcgtccctcctctcagcacagcctccccgcgctggatttctatc

SEQ ID NO: 300033 - DNA, 201 bp, Homo sapiens
taacctttctgaggaatcacaatacaataattgataataatattgatcacataaacatagacttccttgacacaggattgccacagaccttcaatttgtaaaaaaaaaaaaaaaatgcaacatctgtggaagtactataaagagaagcagaataaggcagatatgcctgtataagactaagggagaatcttaaaagctgca

SEQ ID NO: 300034 - DNA, 201 bp, Homo sapiens
ttggggagaagaggagatgtgtacctgcctcacctgcctccctgcccagaatgccgactccgactcttgctttccactaaggctggggattaaatgaaaaktgagaatctggaaacccccagagatgatgtttgtcgttggagctgattttatctcattttagtagcatgacctcctcctcaaactcaggatgcaattatg

SEQ ID NO: 300035 - DNA, 201 bp, Homo sapiens
catcgggaggctttgaggagtgacccccaggaactagacaagtaacttgttcttcacaatcactgccctcccaagaacatccaggatttcagcctcagtgytaagacaaccatgtctctccctgacacatgctcgctgctgagaattctaggaaaagcagagggctgtgcaggcgcccctgcccctaggctaggagagctg

SEQ ID NO: 300036 - DNA, 201 bp, Homo sapiens
caaggcagcctaggaaatgtagtgcttacctgtacacgtggattcctggaatcaattcagggtctgtccttggggaaccagagtggggatattcagtcacyaaagatgcaggttcccagctgtccagtgaagtcaagcgaatggggaaggatttgaagtcacctttgggtgtttggagtgatcagagctgtctgccctctt

SEQ ID NO: 300037 - DNA, 201 bp, Homo sapiens
aattcagggtctgtccttggggaaccagagtggggatattcagtcactaaagatgcaggttcccagctgtccagtgaagtcaagcgaatggggaaggattygaagtcacctttgggtgtttggagtgatcagagctgtctgccctcttggggagtgacagtgccccactctgttaagtcccatgcctgcccccaactcagc

SEQ ID NO: 300038 - DNA, 201 bp, Homo sapiens
ttgcttgaacccgggaggcagaggttgcagtgagctgggatcgttgctccagcctgggcaacaagagcgaaactctgtttcaaaaaaaaaaaaaaagaaaaagaaaaaaggaaagaaaagaaagtttggtgtttctggccaagtgcggtggctcatgcctgtaatcccagcactttgggaggccaaggcgggtggatcact

SEQ ID NO: 300039 - DNA, 201 bp, Homo sapiens
tgcttgaacccgggaggcagaggttgcagtgagctgggatcgttgctccagcctgggcaacaagagcgaaactctgtttcaaaaaaaaaaaaaaagaaaaagaaaaaaggaaagaaaagaaagtttggtgtttctggccaagtgcggtggctcatgcctgtaatcccagcactttgggaggccaaggcgggtggatcactt

SEQ ID NO: 300040 - DNA, 201 bp, Homo sapiens
ccatagggaagtttagctttcagttgcctgtaacattaaggttgtttcatgattttttgaaggtttgtttcacaccatttccccccttaaatcatttaacygaatggtatgtaacaggtgtagtttctaatgagttcttttcttcccctgtggctttagcatggcacattacacttctgtggatttaaagtccttgcccct

SEQ ID NO: 300041 - DNA, 201 bp, Homo sapiens
aacactactttaaacactttacctaattgggtaaagatatccacgtagccaatatcactcactccaaatcccgactgccatgtaaataggaatgaaggatmtttccattattccagtggtccaagaatcatctgaaacctgccagtcttgttgcttcccttctcttcccgttcctgccctgagacattctggggctgcttg

SEQ ID NO: 300042 - DNA, 201 bp, Homo sapiens
tctcagggtggggccttgggggatgaggctggggcccgcgggaaaccgggctggggcgaggaggctcgcaggacttcctgccacagaatgtttcgatgctktttttaattctgcaaatgtaagcctttccactttaagtccaagctcagcgcagaggactgttctataatacatacaatttagtttaaaaatgttgcaaat

SEQ ID NO: 300043 - DNA, 201 bp, Homo sapiens
gaaaatgcacgcgtcaccccttttctgtgaactctctctaggtgcacgtgccttgcccatgtcctattggtttggtattttttaattttctatttgtcagygctcttcatatatcagagaaattaatcctattatgtcctttcaaaacacaatgatttttccttctacaggcagtgcacattgactaagttcattccttgc

SEQ ID NO: 300044 - DNA, 201 bp, Homo sapiens
atgtggccgagtagtggccacctgccaaagggaaggtggtgggcagagcagttccaacgtgctggggtgtcccacgaaggaacccctggtgaggggtggcrgagggagggagtggggagcagactccaggtcaggggctccagggaacccagaaacctaggggtcaactgttcttccaggttgtttaagggaggtttgtcg

SEQ ID NO: 300045 - DNA, 201 bp, Homo sapiens
tatagcttttgatatggtttgggcagaagctaagccaaacctgcttagcttggtcagcagaatggccccaaggtggccctgcgtgtgttgtgatacgtgckggtggaggccatccatatggctctggcagtgcttggtgagggcagcactgcccttggaccctggcaagtggcaccccaggccctgcattctgatggccgc

SEQ ID NO: 300046 - DNA, 201 bp, Homo sapiens
aagaaaattataacattttgccccttttaaatgctttacttgacagatttgaaaagcttgaccaatagggaaaacatgccctaattatagcttttgatatrgtttgggcagaagctaagccaaacctgcttagcttggtcagcagaatggccccaaggtggccctgcgtgtgttgtgatacgtgcgggtggaggccatcca

SEQ ID NO: 300047 - DNA, 201 bp, Homo sapiens
  misc_feature (1)...(201): n = A,T,C or G
gccactccaggtagaccagctgcgagtggctcccttgcttgttggcacacgcacacacagacacacacatgcacacatgcatacacacacacacgcacacncatacatgccctcagctccccgaggggtgagatgagatgggatggaagcgtgatgccccacaccattttgactcccctggatacaagaaaattataacat

SEQ ID NO: 300048 - DNA, 201 bp, Homo sapiens
tccagcctgggtgacaaagcgagactctgtctcaaaaaaaaaaaaaaaaaaaaggaacgatttttaaattctaaaagcttcagaaaataaatgcacgtaarggaaacatactgagtaaccaagatgtgtcttggaccatgaatggtgctaccacttactgagcagccctgtgtgctgggaaccttgtcctgtggtcagtgc

SEQ ID NO: 300049 - DNA, 201 bp, Homo sapiens
gcttgaacccgggaggcagaggttgcagtgagctgggatcgttgctccagcctgggcaacaagagcgaaactctgtttcaaaaaaaaaaaaaaagaaaaagaaaaaaggaaagaaaagaaagtttggtgtttctggccaagtgcggtggctcatgcctgtaatcccagcactttgggaggccaaggcgggtggatcacttg

SEQ ID NO: 300050 - DNA, 201 bp, Homo sapiens
catgcgacacccacgtggcaggatgaggagggcatggaatctggtagatgtgccacatgtggtagctatgaattcttactaaaacaatgatttttaaggcygggtgcagtggctcacgcctgtaatcccagcaatttgggaggccgaggagggtggatcacttgaggccaggagttcaagaccagcctggccgacatggtg

SEQ ID NO: 300051 - DNA, 201 bp, Homo sapiens
ataaaagacagctgccgccccgaagcggccatttcagaggcccaccctcagggacgcattctctttctcagggatgttccttgctgagaaaaagaattcascgatatttctcccatttgcttttgaaagaagagaaatatgtctctgttccgcctggctcaccggcagtgagagtttaaggttatctctcttgttccctga

SEQ ID NO: 300052 - DNA, 201 bp, Homo sapiens
ggtggacacagcatcgtttctgaaatcatggagctttttgtctggtggggctgcgaacacatccacagcatactacacgcatggcaaacaagggagtgggycaggtgtcaggtgacgggggacctgggcaaccttatgtgggcaacccggtggccagccctggctccagagagagtatctccctggtgcagagcccagccc

SEQ ID NO: 300053 - DNA, 201 bp, Homo sapiens
ctttctcagggatgttccttgctgagaaaaagaattcagcgatatttctcccatttgcttttgaaagaagagaaatatgtctctgttccgcctggctcacyggcagtgagagtttaaggttatctctcttgttccctgaacattgctgttatcctgttcttttttcaaggtgcccagatttcatattgttcaaacacacat

SEQ ID NO: 300054 - DNA, 201 bp, Homo sapiens
caaagcaccatgtgctgcacacgggtggacacagcatcgtttctgaaatcatggagctttttgtctggtggggctgcgaacacatccacagcatactacaygcatggcaaacaagggagtgggtcaggtgtcaggtgacgggggacctgggcaaccttatgtgggcaacccggtggccagccctggctccagagagagtat

SEQ ID NO: 300055 - DNA, 201 bp, Homo sapiens
ggttgcagtgagccaggattgcaccactgcactccagcctgggcaacagaatgagaatccacctcaaaaacaagcaaacaaacaaacaaataaataaaatsatgttgcctgaggaaaaaaatgtggatagtggtgtgtgggcctctcactccccacctgacagggcaggcctggatgagggtgtgggttttaaaggaagta

SEQ ID NO: 300056 - DNA, 201 bp, Homo sapiens
tcaccagataaactaaactaggaaacctgaggcgagccgcagcctcagtttctctttggtgttgccgcccacagttcccgctgtactggttcagcgtgccrgccatcctgaagggctggatggatagggtgctgtgccagggctttgcctttgacatcccaggattctacgattccggtttgctccaggtatgtgctcttg

SEQ ID NO: 300057 - DNA, 201 bp, Homo sapiens
cttgcttcttcacaggccaactggtctcttatgtgtcattagccaagttcaaattcttcttgcttttaaaaaaatctttttttttttcagtttgcagaagyacatattatggccaaaaaaaaaagagacaatatgaaatataaaaagagaaaatccctttaatccctcccacctcagaaagaatcactttaaatggtttga

SEQ ID NO: 300058 - DNA, 201 bp, Homo sapiens
gtctcttatgtgtcattagccaagttcaaattcttcttgcttttaaaaaaatctttttttttttcagtttgcagaagtacatattatggccaaaaaaaaargagacaatatgaaatataaaaagagaaaatccctttaatccctcccacctcagaaagaatcactttaaatggtttgatttattttcttagggcctatata

SEQ ID NO: 300059 - DNA, 201 bp, Homo sapiens; identical to SEQ ID NO: 62557

SEQ ID NO: 300060 - DNA, 201 bp, Homo sapiens
tcccgctgtactggttcagcgtgccagccatcctgaagggctggatggatagggtgctgtgccagggctttgcctttgacatcccaggattctacgattcyggtttgctccaggtatgtgctcttggataaggatcactatggatagttggagggaggggacagaggatgcgtcttctatcaagttatatttctagtttcc

SEQ ID NO: 300061 - DNA, 201 bp, Homo sapiens; identical to SEQ ID NO: 62605

SEQ ID NO: 300062 - DNA, 201 bp, Homo sapiens
cttgtctgaggagtccggtatacacagtgctactgggatggttgggatgggctgtggatgcccacctaggagtgagaatgtttggcctcttccccgacagrtactctttctaatcctgaggttttcaattatggagtggaaacccacgaagcctacaagcaaaggtctctggctagcgacatcactgatgagcagaaaaag

SEQ ID NO: 300063 - DNA, 201 bp, Homo sapiens
catttgggtttcagttttttcattaatatcagcctaagtttttaaaaaatagtcagccgaaaagaaggatttaattttatgtggtaatttctgcacaaacrtaatattcttgagaaacatcttgtctatcaataacatgtttaactatatattatatcaatatgctcaagaaatcaggccttggtaaagatttttcttttt

SEQ ID NO: 300064 - DNA, 201 bp, Homo sapiens
agtcagccgaaaagaaggatttaattttatgtggtaatttctgcacaaacataatattcttgagaaacatcttgtctatcaataacatgtttaactatatrttatatcaatatgctcaagaaatcaggccttggtaaagatttttctttttttttttttttttgggacggagtctcgctctgtcgtccaggctggagtgca

SEQ ID NO: 300065 - DNA, 201 bp, Homo sapiens
aaatacaggaggacaactatatctaaatctagattaatgtaagcggtgagaaaatattttatctccgtctaagtaggtcctaccagaggggaaactagacycactcaaagattgctttgatcaatccacacacagttcagtgatggacagagtgtcagtatctgttatatgtgtcactatcccatgctagaggtgtcaata

SEQ ID NO: 300066 - DNA, 201 bp, Homo sapiens
tttgacatcctgcgtggcttgtcctctgaggcctaaatctccagaagattcctggcctctcttgagaggtctttctctgatgtgtttgcgtgtctgtcagraagcagcagtgatgcctagatgtggtacattcgacctcacctatgcctctccccaccccctctgggttcgttttgtcttccagattgctggactcgctga

SEQ ID NO: 300067 - DNA, 201 bp, Homo sapiens
cctgtaatcccagctactcaggaggctgaggtaggagaattgcttgaacccgggaggcagaggttgcagtgagctgggatcgttgctccagcctgggcaayaagagcgaaactctgtttcaaaaaaaaaaaaaaagaaaaagaaaaaaggaaagaaaagaaagtttggtgtttctggccaagtgcggtggctcatgcctgt

SEQ ID NO: 300068 - DNA, 201 bp, Homo sapiens
ctctggtttctaccctctcagtggttgcttcacccccagcccagccaccttcctgtatttgttcacaaggaggtgatgccactgcagagtgaactggcccmgcaaaatgccctccaggagtgctgactcatcaggccacttcccgccactgcaaggaagatgtgcaggcatggctgtggctgtgtaaacctggcagcagag

SEQ ID NO: 300069 - DNA, 201 bp, Homo sapiens; identical to SEQ ID NO: 62613

SEQ ID NO: 300070 - DNA, 201 bp, Homo sapiens
ccagaatgatgaggttcccaagccttcataaaagcaacctgcatgtgcgggaagagggctgcctcatccctgcccaggcttgcctctgcacaccccttccygacaccagccctttctttactcagtgaccttgagctgctaatctgaccaaagtgcaggacgtcctttgtcctaattacaggtgggtggactcatagtcct

SEQ ID NO: 300071 - DNA, 201 bp, Homo sapiens
aaattcctgtccaactagaaggaaaggggaatctattataagggctctggtcacttgggcctcctggatcccaaggacagagctgtagctgctctcgtccwcagattcccatctgctcctttctgcctcttggctctgttctctctcactgcttgccagggactggatcccctagatccagaatttccaaccaagggatct

SEQ ID NO: 300072 - DNA, 201 bp, Homo sapiens
ggtgtagattcggattttcgcccttggcaccactgacattctgggccagataatcctatgttttggggggtcatcctgtgcaccctgtttagcacctagcmccatccctggcctctgcccaccagatgccagtagcacccctcccccaccggctgtgacaaaccaaaatgtctccaggcattgagaaacgtcccctagcag

SEQ ID NO: 300073 - DNA, 201 bp, Homo sapiens; identical to SEQ ID NO: 62551

SEQ ID NO: 300074 - DNA, 201 bp, Homo sapiens
ggggctcgggggcggggcggggtgtgggcggggctcacggccggggcgggtgagtgggcggggcctcggcgtggtaggcgcgctgcgtaaagaggcctgcrgtcccgcggcgcggggcaggttccgggctgcttaggttggcaccggtccgtggtccccgggggcgcagtcgcagcgctcccgccctccaggcgtcagcga

SEQ ID NO: 300075 - DNA, 201 bp, Homo sapiens
agtgaccctcccacattgaccttccaggtgggagttagactcttaatcagaaattggatacattgttgtaaaaaatccaagccacgtggaagtgtataaaytatctggaattatcttgttttctatgttctcacttgtttcattgttcctttcgactccctccagaatttaggttcctcaaaagtggggccctgcctatcc

SEQ ID NO: 300076 - DNA, 201 bp, Homo sapiens
  misc_feature (1)...(201): n = A,T,C or G
ctagtttccttccttttcttagcaaatatcgattgagcacccactatgtacaaagcaccatgtgctgcacacgggtggacacagcatcgtttctgaaatcntggagctttttgtctggtggggctgcgaacacatccacagcatactacacgcatggcaaacaagggagtgggtcaggtgtcaggtgacgggggacctggg

SEQ ID NO: 300077 - DNA, 201 bp, Homo sapiens
ctttgacttgtctgaggagtccggtatacacagtgctactgggatggttgggatgggctgtggatgcccacctaggagtgagaatgtttggcctcttcccsgacaggtactctttctaatcctgaggttttcaattatggagtggaaacccacgaagcctacaagcaaaggtctctggctagcgacatcactgatgagcag

SEQ ID NO: 300078 - DNA, 201 bp, Homo sapiens
tggactcgctgaagagagactacgcaggaaagccccagccacccatcaaatcagagagaaggaatccaccttcttacgctatggcaggtaatgattcactrttgtggagtaagacttttttttttttgagatgggattttgttgtattgcccaggctggtctcaaactcctgagctcaagtgaccctcccacattgacctt

SEQ ID NO: 300079 - DNA, 201 bp, Homo sapiens
tctttctctgatgtgtttgcgtgtctgtcaggaagcagcagtgatgcctagatgtggtacattcgacctcacctatgcctctccccaccccctctgggttygttttgtcttccagattgctggactcgctgaagagagactacgcaggaaagccccagccacccatcaaatcagagagaaggaatccaccttcttacgcta

SEQ ID NO: 300080 - DNA, 201 bp, Homo sapiens
aagtgaggggaagggccgacaactgccagtgctggcccaccagagtctggcaccagccgaggagtgcacgcacccattggtggtgtggcggttcactgatyccccagccttctgctcgatctacggggaaaactggggaaggcaggaaggccaaggaggctcaactcctgcttcctaccgtggctcatttcctgggtcctt

SEQ ID NO: 300081 - DNA, 201 bp, Homo sapiens; identical to SEQ ID NO: 62555

SEQ ID NO: 300082 - DNA, 201 bp, Homo sapiens
gtaactccccgggagatccgagcaagctgatgagtgtatcagtggctcattctttctgttgcaccacggaccctcattctgtaaccgggataccagccagrgatggggagcgggaggcgcagggcaggggcgtccctcctctcagcacagcctccccgcgctggatttctatcaatccagtttccacctgcctggaagtca

SEQ ID NO: 300083 - DNA, 201 bp, Homo sapiens; identical to SEQ ID NO: 62556

SEQ ID NO: 300084 - DNA, 201 bp, Homo sapiens
gatcacacagaaaagcagttcagaaatttatcagttaaattttacaaagagattgaaataatttttaaaaaatcaaacagaaatcttggaactagaaatayatttgctgaaaaattcattagaggctctcaacagcagaatggatgaagcagaagaaaaaatcagtgaactcaaaggcaggtgatttgaaaatacacagag

SEQ ID NO: 300085 - DNA, 201 bp, Homo sapiens
ggcataagaaattacaaaagtattaatttggggaactaataaatgtccacgaaatcttcacaatttatattcttctgccatggcctcagccagttgctccrttcggggtccctgacttcccacgaaacacacctgtagtcccagctagtcaggagactgaggcatgagaatcacttgaacctgggaggcagaggttgcagt

SEQ ID NO: 300086 - DNA, 201 bp, Homo sapiens
taaacactttacctaattgggtaaagatatccacgtagccaatatcactcactccaaatcccgactgccatgtaaataggaatgaaggatatttccattaktccagtggtccaagaatcatctgaaacctgccagtcttgttgcttcccttctcttcccgttcctgccctgagacattctggggctgcttgagaaccacat

SEQ ID NO: 300087 - DNA, 201 bp, Homo sapiens
aaacactttacctaattgggtaaagatatccacgtagccaatatcactcactccaaatcccgactgccatgtaaataggaatgaaggatatttccattatyccagtggtccaagaatcatctgaaacctgccagtcttgttgcttcccttctcttcccgttcctgccctgagacattctggggctgcttgagaaccacatt

SEQ ID NO: 300088 - DNA, 201 bp, Homo sapiens
cgcatgatgggcgcgcaggcgccaatgctcccaggacctgctgttccattcctaaatgaaagttgttcccaggatctggactcacaagacaaggcagcctrttccctgctggggagctcaggggcaagagggcatctcggagggagggcacattctcacctctgaagacaaggagaacatcatcagcacatagaccaatcc

SEQ ID NO: 300089 - DNA, 201 bp, Homo sapiens
caaaacctttatgttattatgaagaagcagttttccaaaggaatagggatgctggtagcacaagggaaagaaatctcattaaataaaaacaaaagcaatgwcctcttcaggaggtggctcagctagtttagctttaccttagcaccatgatggttcattttattcagaaatagaaacatggggcgttggggagaagaggag

SEQ ID NO: 300090 - DNA, 201 bp, Homo sapiens
ttatacagattttgctacccaaaaaacaaaacaaaaaatccaaaacctttatgttattatgaagaagcagttttccaaaggaatagggatgctggtagcasaagggaaagaaatctcattaaataaaaacaaaagcaatgacctcttcaggaggtggctcagctagtttagctttaccttagcaccatgatggttcatttt

SEQ ID NO: 300091 - DNA, 201 bp, Homo sapiens
taccaggagtggaaggaggggagaatggggatttattatccaatgagtgcagtgtttctatttgtttttgtttttgtttgagacagggtctcgctctgtcrtccaggctggagtgcagtgccacgatctcagctcactgcagcctccgcctcctgggttcaagcaattctcctgcctcagcctctgagtagctgggattac

SEQ ID NO: 300092 - DNA, 201 bp, Homo sapiens
gaggcgcagggcaggggcgtccctcctctcagcacagcctccccgcgctggatttctatcaatccagtttccacctgcctggaagtcagcagggtcctccscagtcccagatcgccgggcgaggccccagatggacctcaggggcggggagtgggcggagcttaggggccgaggcgaggtgtgggtggggcgggacgccgc

SEQ ID NO: 300093 - DNA, 201 bp, Homo sapiens
tcattgaatttaacagagagaggttgttcttcaagaggaactgtttcttatcctgatttaggtaagaaagtactcattgtctatgcacaccaggaacccargtctttcaacggatccttgaagaatgtggctgtagatgaactgagcaggcagggctgcaccgtcacagtgtctgatttgtatgccatgaactttgagccg

SEQ ID NO: 300094 - DNA, 201 bp, Homo sapiens
ttttgaggaaaaaaagcttagtgaaaaggccacatcttgtaggattccacttatatgaaatacatgcaatagacaaattcatggagacagaaagtagattmgaggctaccaggagtggaaggaggggagaatggggatttattatccaatgagtgcagtgtttctatttgtttttgtttttgtttgagacagggtctcgct

SEQ ID NO: 300095 - DNA, 201 bp, Homo sapiens
ggtcacagtggcaggtgactgccaaatgaggtggcagaagccagcaagcgctggaaaaagtcggcccaaactgttcaccagcaccgccccccataactccycaccggctctggtttcaagactttccgttttctaggtatttccttggccttaaaccattttcctttaaacgaactttttctgtgaagccatccggtttcc

SEQ ID NO: 300096 - DNA, 201 bp, Homo sapiens
gatatagcgccgctgctctccagcctgggcaacagaatgagaccctgtctcaaagtaaattaaataaataaaatcctaaactgtaggaccaagatttgatkcagaaaagagactttcttgtactaatttatacactgttcatgtcagatccaatctttctttttattagatgaatctggaaaagcaacttagaataattca

SEQ ID NO: 300097 - DNA, 201 bp, Homo sapiens
aaatcctatgtctgataacatccagaatatgtaaagaacacctacaactcggccgggtgcggtggctcacgcctgtaatcccagcactttgggaggccgasgtgggcggatcacctaaggtcgggagtttgagaccaggctgaccaacatggagaaaccctgtctctactaaaaatataaaattagccaggcgtggtggcg

SEQ ID NO: 300098 - DNA, 201 bp, Homo sapiens
acggtaagagattggactatcatatccacgacacccctccccacaaactacccagcaccagctgtgtgggaaatttcctcccaagtcacaggttctacacyggaaaagagatcaagggggacaatcagcttctcaattttctggggttcccagaaacaggcaggaaggagacctgttcctgcctcaacccacaggaagcat

SEQ ID NO: 300099 - DNA, 201 bp, Homo sapiens
tagaggaaaacgtaagagtaaatcttcatgatcttgtgttttgggttcttagataagacactaaaagcccaggaagaaacaacaaaaaataggtaaattgragttcataaaaaatgtgaaacttttatatcaaaggacattttcaagaaagtgaaagacaacctacagaatgggagaaaatatttgtaaatcctatgtctg

SEQ ID NO: 300100 - DNA, 201 bp, Homo sapiens
cattttattcagaaatagaaacatggggcgttggggagaagaggagatgtgtacctgcctcacctgcctccctgcccagaatgccgactccgactcttgcwttccactaaggctggggattaaatgaaaagtgagaatctggaaacccccagagatgatgtttgtcgttggagctgattttatctcattttagtagcatga

SEQ ID NO: 300101 - DNA, 201 bp, Homo sapiens
  misc_feature (1)...(201): n = A,T,C or G
ccatgaactttgagccgagggccacagacaaagatatcactggtgagtcatgggataaatgctctatttataaaaactatctttatgttttttactttaanaaatgttgacttccagctgcaaaatggcattatagaagcaagctagcttcactttccaaaaacaaatagatagcactgggattatcaccagcagtatccc

SEQ ID NO: 300102 - DNA, 201 bp, Homo sapiens
ttttctttcaaatatattccattggaggttggttgaatcagcagatatggaacacacaaatacaggaggacaactatatctaaatctagattaatgtaagyggtgagaaaatattttatctccgtctaagtaggtcctaccagaggggaaactagactcactcaaagattgctttgatcaatccacacacagttcagtgat

SEQ ID NO: 300103 - DNA, 201 bp, Homo sapiens
ctaatacttgaaagacggtactgatatggactatttcacctggagattgtttacttgataacttttttttcaagttctgcaaggtgatttaacatccaaawatatatagtcaatcctgggtattcatggaggactgggaccaggacccctcaaatatatcaaaatccacagatgctcaaatccctgatataaaatggcata

SEQ ID NO: 300104 - DNA, 201 bp, Homo sapiens; identical to SEQ ID NO: 62607

SEQ ID NO: 300105 - DNA, 201 bp, Homo sapiens; identical to SEQ ID NO: 62608

SEQ ID NO: 300106 - DNA, 201 bp, Homo sapiens
caaaatttatttaactgataaaagtaaaatttgttattctctctagctgtatagataagacaggatctctatagtgcattatttcaagacttacttagtargaaaaccagtaggtttgatttttttttaaatgccactttggttttaaagcactcgctttgtccactagttttctagatctgagtattggctattaatgac

SEQ ID NO: 300107 - DNA, 201 bp, Homo sapiens
ctaattgggtaaagatatccacgtagccaatatcactcactccaaatcccgactgccatgtaaataggaatgaaggatatttccattattccagtggtccragaatcatctgaaacctgccagtcttgttgcttcccttctcttcccgttcctgccctgagacattctggggctgcttgagaaccacatttatctgcacaa

SEQ ID NO: 300108 - DNA, 201 bp, Homo sapiens
cagctgatgagatgcagtcaataagcagttttgtattagtatttttataagaaattagaaaaacatgattttgggggagatcttctcatagttaacagcayatataacatataagttagaaatgtactctgctagctcataagatattttaaagcagggattttagtgtcattaaacttttatttataatagtttttttaa

SEQ ID NO: 300109 - DNA, 201 bp, Homo sapiens
tcggttacaacactaggttaatctttttcctttaactgtttgtttaaaatatattatgtttaagaccttctaactggtcagcctccaagatagtattgtgstgggcttgctttattctggtttggtttccatgatcccagttcatgtgttacctgcttctcttttgaattcacaatgatacacaacttttaatttgttaga

SEQ ID NO: 300110 - DNA, 201 bp, Homo sapiens
cttctagtgtgataccctaccttgttttaacctgaagtgactcttccttagctaagagagccagacggactccatcgtgactccttcactcgcagcccctyacccacccccttcctcaaggacttaacttgtgcaagctgactcccagcacatcaagaatgcaattaactgataagatactgtggcaagctatatccgcag

SEQ ID NO: 300111 - DNA, 201 bp, Homo sapiens
ttatgccccaaatagtgactgacatagagaaggtactcagtaaacactttttaaaggaatgcctgcctgactgaagcttaatgatgtgaggcttctagtgkgataccctaccttgttttaacctgaagtgactcttccttagctaagagagccagacggactccatcgtgactccttcactcgcagccccttacccacccc

SEQ ID NO: 300112 - DNA, 201 bp, Homo sapiens
gagcataattatctaccgtgaccccttcaaaaagacaggctgtatacatttgcactaagagaagaaatcgtgtaatgtcagcaaatttcccccacttaaarcttctctatttaaaaagcttcacgcacacatgcacgcatatgtcttcaagatgaccacaatttattttgcagtcattctttgcaccagttcccaattttt

SEQ ID NO: 300113 - DNA, 201 bp, Homo sapiens
taggaatttagctctgtcccatatgctatcgcattgggcagcaaaagcagggtggggtccagcgaaatcagcaggcactgcaatgagtaacatacccagcyacgtttatgcagcatttttacgaaaatgaaaccatactacctgtaaaggaagatatgctaacaaacaacaaaactggcaggaaccaagattcctactgac

SEQ ID NO: 300114 - DNA, 201 bp, Homo sapiens
cctggcgcaactcctagagcggtccttggggagacgcgggtcccagtcctgcggctcctactggggagtgcgctggtcggaaggtgagtgatcccctgtcrgggaccgggggacttgggaaggacagttcccggactggacggccagaacgctctcagggatttcagctggccggccatatggccctgtgggtcgtcgcgc

SEQ ID NO: 300115 - DNA, 201 bp, Homo sapiens
agctatgaataactggatttttaaaatgcccattgctttaaaactgccacctattagaaagtttggtatttctggggccaggtgctgtggctcataccagyaatcccagcactctgggaggccaaggtgggcagatcacctgaggtcgggagttcgagaccagcttgaccaacatggagaaacccggtcttaactaaaaat

SEQ ID NO: 300116 - DNA, 201 bp, Homo sapiens
ttccatgaaggtggcctccaagtatgccatgtgccccaggatctgtaagtaataaactatttctagcctgtgtctctcctaatcgttgtaggggtgctccrcatcttgaagatcttaaagtaaaacagatacatttgtggaaactaaggtcccaacgttgtacattactattaactccaggcttcatttgggtttcagttt

SEQ ID NO: 300117 - DNA, 201 bp, Homo sapiens
gagaaagagacagaaagaaaagaaaatttgatatttcttagcttcaattactatgatgcacctgaacattcaattttcatcttagtcttcattgaatttarcagagagaggttgttcttcaagaggaactgtttcttatcctgatttaggtaagaaagtactcattgtctatgcacaccaggaacccaagtctttcaacgg

SEQ ID NO: 300118 - DNA, 201 bp, Homo sapiens
tcaagaccctgctttcagttttttgggttcagagtaacgaatggaattgctgagtcatatgttaattctcatttttctaattgtaatttttgggggcacarcacctctccagcagcggcagcactcgacctttccccagcggtgcacggggttccaacttctccgcatcctcacctacgtgtgttttgttttttggtagta

SEQ ID NO: 300119 - DNA, 201 bp, Homo sapiens
agagaaagagacagaaagaaaagaaaatttgatatttcttagcttcaattactatgatgcacctgaacattcaattttcatcttagtcttcattgaatttracagagagaggttgttcttcaagaggaactgtttcttatcctgatttaggtaagaaagtactcattgtctatgcacaccaggaacccaagtctttcaacg

SEQ ID NO: 300120 - DNA, 201 bp, Homo sapiens
actatactgaacaagtggattttgagagagaagggcagagttacagttccagatggtttgtatttattctaactcagagaactgggtacatgaaagagtayatagggggaggaggatcagatttaggggtcagataatcagtttgagtcaaaaggggcttagagtgctggtgaacatttaggtgaagatgtccagaggaca

SEQ ID NO: 300121 - DNA, 201 bp, Homo sapiens
caatcctctaatctcagccccctgagtagctgggattacaggcatgcaccaccacacctggctaatttttaaaaatctttggtagagatgggatctcactrtgttgcccgggctggtctcaaattcctaggctcaagtgatctcctgcctcagcctctcaaagtgctgggccttctgcttccctgggctttgccaggcctc

SEQ ID NO: 300122 - DNA, 201 bp, Homo sapiens
caaatagagctgagttagtcactcagctcttggacctcagattcttattcttaaccgctagggggatggagacagaagtcacaaactcacatgccaccagscatatgatgtaaacatgtaaactgggccaaggaatacaaaagggagtggtgagctggggacactgaagaatggatgccctgtctagaggagtgaaaatga

SEQ ID NO: 300123 - DNA, 201 bp, Homo sapiens
acagtgacacaactgcaagtcaagagcctgtgttggagtctttccccactatttcaaatagtatagaaaatagagctgagtcactcaaatagagctgagtyagtcactcagctcttggacctcagattcttattcttaaccgctagggggatggagacagaagtcacaaactcacatgccaccagccatatgatgtaaaca

SEQ ID NO: 300124 - DNA, 201 bp, Homo sapiens
ttaatttctgaccttctgtcttgaaaatggatactcttggtcccaagagatactgggcagaaatgtggatagagcggcatgaagcttgttttactttattytctacatacatccctacacacatgcaaacacacgtatacaacgaacgtacacagtgcatgtgcgcagttgactgttgatgggctactttcataaagtcag

SEQ ID NO: 300125 - DNA, 201 bp, Homo sapiens
agccctaagtcttctctttgcttgctgatctcgtaccttaatgtgcaaaagaatcacgttgggaactgaaaattcagaatcctgggcctcactcccagagratctgatctacatgtgtggagatgcccaggaatctgctttattctcttttgtcctcccacctgtccccccatttcaggtaaaacaataacaaaaaaactg

SEQ ID NO: 300126 - DNA, 201 bp, Homo sapiens
tctgtccagagtccacactaagggcataaggacaataatctcttctttctcttatgtcagaaatcagcctgagcctgagtaccgctaaggctttaatcacsggtcccgagagccctaagtcttctctttgcttgctgatctcgtaccttaatgtgcaaaagaatcacgttgggaactgaaaattcagaatcctgggcctca

SEQ ID NO: 300127 - DNA, 201 bp, Homo sapiens
caaaaagcaagaaattagccaggtatggtggtatgcacctgtagtccaagctactcaggaggctgaggtaggagaatcaccagagcctaggaggtggaggytgcagtgagccatgatcatgccacagcgctccagcctgggtgtaggaatgagaccccacctgaaaaataaataaataaataaaaaatactcaacagacag

SEQ ID NO: 300128 - DNA, 201 bp, Homo sapiens
caggcatgagccaccacacctggcctatttcaccagttttctaatagtagataattaacttaatttttaagttgcctttttctgctgttataaatagcagrcagtgaacattctgttgctcgtgggcattttcatttttttgccactataaacagtattgttgtggacatcctggactgagctcctggcacacagggagaa

SEQ ID NO: 300129 - DNA, 201 bp, Homo sapiens
ttagtagagacagggtttcatcgcattagtccggatggtctcgatctcctgacctcatgatccacccaccttggcctcccaaagtgctgggattacaggcrtgagccaccacacctggcctatttcaccagttttctaatagtagataattaacttaatttttaagttgcctttttctgctgttataaatagcaggcagtg

SEQ ID NO: 300130 - DNA, 201 bp, Homo sapiens
gggctctccagcgggtggcaaaggtttcccgcatcctgggcagggtcctggacgccgtttgtgggggtggggtgggcagcgtggagaggagtggggggccscggggagccgacgggcagctgcctgaaaggaatgccaggatggcggggtgggcggcctttcgcccctgcaggggaggaagatggcttggtcgggggcggg

SEQ ID NO: 300131 - DNA, 201 bp, Homo sapiens
ttgttgaacaatttttcaaggaaataactttcatgtcaataaatatgcatttatactagttgtatgataggcacatattattccattgtatggatgtactstatcttatttcaccaattttctttttttttttttgagacagagtgttgctctgtcacccaggctggagtgcggtggcgcaatcttggctcactgcaacct

SEQ ID NO: 300132 - DNA, 201 bp, Homo sapiens
gaagaaggtgtgtcatttggccagttcccagtgatcatgactacataccgaacacgaagttgtctggtctgaagatctggccgaagggtccagacctgacmgagtccatggtgccaggctccagatccaccaggatggcccgaggtacatatttgttacctgcaggaaataagaactgactcaggcctgtgcttggggagg

SEQ ID NO: 300133 - DNA, 201 bp, Homo sapiens
agtgctggttccggttggagtgctggtgtgggttggagtgctggtgtgggtcggagtgctggtttgggtcggagtgctggtttgggtcgagtgctggttcrggttggagtgctggttcggggtggagtgctggtttgggtcggagtgctggtttgggtcgagtgctggttcaggttggagtgctggttccagctggagtgc

SEQ ID NO: 300134 - DNA, 201 bp, Homo sapiens
gtgctggttcgggttggagtgctggttcggggtggagtgctggtttgggtcggagtgctggtttgggtcgagtgctggttcaggttggagtgctggttccrgctggagtgctggtttgggtcgagtgctggtttgggtcgagtgctggttcaggttggagtgctggttccggctagagtgctggtttgggtcgagtgctgg

SEQ ID NO: 300135 - DNA, 201 bp, Homo sapiens
tggttcgggttggagtgctggttcggggtggagtgctggtttgggtcggagtgctggtttgggtcgagtgctggttcaggttggagtgctggttccagctrgagtgctggtttgggtcgagtgctggtttgggtcgagtgctggttcaggttggagtgctggttccggctagagtgctggtttgggtcgagtgctggtttg

SEQ ID NO: 300136 - DNA, 201 bp, Homo sapiens
cgagtgctggtttgggtcgagtgctggttcaggttggagtgctggttccggctagagtgctggtttgggtcgagtgctggtttgggtcgagtgctggttcrggttggagtgctggttccggctggagtgctggtttgggtcggagtgctggtttgggtcgagtgctggtttgggttggagtgctggttcgggttggagtgc

SEQ ID NO: 300137 - DNA, 201 bp, Homo sapiens
caccacaacctcttcctcctggattcaagcgattctcctgcctcaccctcccaagtagctgggattacaggcatgtgccaccatgcctggctaattttgtrttttttagtaaagacggggtttctccatgttggtcaggctggtttcgaattcccgacctcaggtgatccacctgccttggcctcccaaagtgctgggatt

SEQ ID NO: 300138 - DNA, 201 bp, Homo sapiens
agtgctggttcaggttggagtgctggttccggctagagtgctggtttgggtcgagtgctggtttgggtcgagtgctggttcaggttggagtgctggttccrgctggagtgctggtttgggtcggagtgctggtttgggtcgagtgctggtttgggttggagtgctggttcgggttggagtgctggttccagctggagtgct

SEQ ID NO: 300139 - DNA, 201 bp, Homo sapiens; identical to SEQ ID NO: 62660

SEQ ID NO: 300140 - DNA, 201 bp, Homo sapiens
tttcttttctgactaattgatactccagcctcacacctgtattgattctgataattagtgattcagtttcttttaacagagaggagcaataacccgtgccrtgcattttgtcgtatgatcataggcgctgaagtttaagaaggtttctctgctggggtggagtgatgggggcataaccgcactcattgctgctgcaaaata

SEQ ID NO: 300141 - DNA, 201 bp, Homo sapiens
ctgaggtaggagaatcaccagagcctaggaggtggaggttgcagtgagccatgatcatgccacagcgctccagcctgggtgtaggaatgagaccccacctsaaaaataaataaataaataaaaaatactcaacagacagtagctgccacttttgaggatggaatgctggcatggatacaggtgaatagggcccccagagga

SEQ ID NO: 300142 - DNA, 201 bp, Homo sapiens
gtactaaataggtgcacagcgtttagaactttacttgatccaacatagcagcctgcctagagccggagccccgcccactccggagtcccgcctggacgccsacgcagcgagggcgctatggctggcggcctcgcctcctggaaaggccatggtcgctgaggcgacgagcgagggcggggcagcgccgacggggacactcat

SEQ ID NO: 300143 - DNA, 201 bp, Homo sapiens
caggagaggagatggtgtggttctagtgtgaaagccaggaggcttgagacccaggaagagccaatgtttcagcctgagtccaaaggtaggaaaaagccaayatcgcagactgaaggccaaggaattccctgttctcagccttcttgttctactcaggcttttagcagattggacaagacccaccacactggggagggcctc

SEQ ID NO: 300144 - DNA, 201 bp, Homo sapiens; identical to SEQ ID NO: 62642

SEQ ID NO: 300145 - DNA, 201 bp, Homo sapiens
agctgctgctcaggtggaagggaaaaccatcagctccacacgctgcttgtgggctcgttacaggatttactgcacacagaattagccagtgcttatcaagytgagtcttttgtattaatatttcaaaaacagtgtggtctgaacctttccagacaaatcttacatgcaagattatattaaaacctctcttaagagaagaaa

SEQ ID NO: 300146 - DNA, 201 bp, Homo sapiens
agaccatgcttgaggacaacagaagttcactaaggatgcacgattgatctgagaagtttttaagcctcgtcctcgccctcctcctcctcgaactccccttsttcgtcggccgtggcgtcctggtactgctggtactcggacaccaggtcgttcatgttgctctcggcctcggtgaactccatctcgtccatgccctcgccc

SEQ ID NO: 300147 - DNA, 201 bp, Homo sapiens
ggcgggctgggctgcgcagagacctgccgccgcccccccagctcagtcttttatatccggggacccgccctgcccggtgacgtcatgacgggcggggctgyggccgcgggggcggtgcggctgggactgcggcaccgcgagggggagccggggcgcggtgcgaggtgtgggggcgctcgccctattgctgctgccgctggg

SEQ ID NO: 300148 - DNA, 201 bp, Homo sapiens
gccccgggtccagtgccccgccttgattgtgcacggtgagaaggatcctctggtcccacggtttcatgccgacttcattcataagcacgtgaaaggctcayggtaagtcctgtcaccgccttcacactccccccgagagcctcggagtcaatgggcaaagctactggaaggaaaataaccaagaggagttggagttttaga

SEQ ID NO: 300149 - DNA, 201 bp, Homo sapiens
tgcacagattaacaccttcaggaattctgcacattgtaaagtgcaatacaaatatactaataaaataacagcagacatttattaagcttaccacgtacccrcagaccctatgctgcatacgttgaatctactatctcattcatcctcagaatgattctatggggtagattctattactgtccgcattttccagatgaggaa

SEQ ID NO: 300150 - DNA, 201 bp, Homo sapiens
tgaccccgctcatggtggccgacaccaggtggttgaggtccccgtaggtgggggtggtcagcttcagggtgcggaagcagatgtcatacagggcctcgttrtcaatggagtaggtttcatctgtgttttccaccagctggtggaccgagagggtggcgttgtagggctccaccaccgtgtctgacaccttgggtgagggca

SEQ ID NO: 300151 - DNA, 201 bp, Homo sapiens
gggcttgaagggctctctgcctgttatagagggtgctcgagttcctccccagtgttctggaattgctcagtgattcatgaatctgcccatcgccctcacaygctcatgtgtgagcagaacagagaatactagttcttgtgtactgtgccagttcttgggcagtcaatctggcttaacggagaggtaggactgcgtgtccaa

SEQ ID NO: 300152 - DNA, 201 bp, Homo sapiens
gctcatggtggccgacaccaggtggttgaggtccccgtaggtgggggtggtcagcttcagggtgcggaagcagatgtcatacagggcctcgttatcaatgsagtaggtttcatctgtgttttccaccagctggtggaccgagagggtggcgttgtagggctccaccaccgtgtctgacaccttgggtgagggcatgacgct

SEQ ID NO: 300153 - DNA, 201 bp, Homo sapiens
ttaaagacaatactttagtatgaaattaaacctttcttcgcctacacttctgtttttcaggcatccgagatgtttccaaatggagtgagagaacaagaaarcctctagaagccctctatgggtatgactactttgccagaacctgtgaaaagtgggtggatggcataagacagtttaaacatctcccagatggtaggttac

SEQ ID NO: 300154 - DNA, 201 bp, Homo sapiens
cccacgcccagcctgaggtctttacaggcactggaataggggccagtgaacttcagcctgtgcattacacctagcctgcctcccacttttgtgcagcccaygtaccaatcgaggtggctagtgctgtgagtcacagagaccaagctggggtgtccctttaccacccagcattgctgccccagacctgcactggtggtcact

SEQ ID NO: 300155 - DNA, 201 bp, Homo sapiens
ctacatcttctccccacctcttcaggctgtctccacgtacctcattcaagtcttttcattcttgtgcagagcagttcatcctcttcagcctttatcttcarctcacacggggcctacctctgaatatttaagccagtcagcagaagcaaaggcaggcaccaggcactgtcctgtaatgggggatccgccctcctcagaagg

SEQ ID NO: 300156 - DNA, 201 bp, Homo sapiens
agttcctccctcgcacctactgaggttctgagctgtcagccccccagtattgaaactcaaaaaattagggaacatgataacgcattctgccctaatattgyccttttaatgtctaattatcattgtagacaaagtggcttgaacttaggctttcatcctagaagctttaccacttttactgtttctatacttttgtagcta

SEQ ID NO: 300157 - DNA, 201 bp, Homo sapiens
ttagtgtaggtatatgggcatatttgggttctccaaaaaaaaagaaccaacaagacgtatatgtgtgtatgtatatataggtagaaaaaagagattcattwtagggaattggttcatggagtatggaagctgacaagtcccaaggtctgcagagtgagttggccagctggagacccaggagagctaaaggtgtgattccag

SEQ ID NO: 300158 - DNA, 201 bp, Homo sapiens
ccacagtcacagcagatttggaaaggctttgtcctccacacaccacttaaaagcaccaacccaagcagcccgagggtcctctagcagcccacttcaagccrccacactgcccagaaagtagcctccggggcagttttgcttctaatgcttgtgtctaatgcttgagacatggttgcttttgagaaatggagctgctcagtg

SEQ ID NO: 300159 - DNA, 201 bp, Homo sapiens
gtgtcatttggccagttcccagtgatcatgactacataccgaacacgaagttgtctggtctgaagatctggccgaagggtccagacctgacagagtccatsgtgccaggctccagatccaccaggatggcccgaggtacatatttgttacctgcaggaaataagaactgactcaggcctgtgcttggggagggactcacag

SEQ ID NO: 300160 - DNA, 201 bp, Homo sapiens
atgcttgagacatggttgcttttgagaaatggagctgctcagtgagctgtcgcccccaccatccccaaatgcctggtcagccctaaccagaggagagcctrgccagccagggcagcccccaacttcatcagcagcaaggagcttgtggtttgaccattacctttttgtttgtttgtttgtttgttgtgagatagagccttg

SEQ ID NO: 300161 - DNA, 201 bp, Homo sapiens
cttcggggcagagtgggccgggtaccgcgcttggtcttagcgcatgcgcgctcccggcagctacgcgacctgtgaccatggtggctgtgctgggcggccgkggcgtgttgcgcctgcggctgcttctctcagcgctgaagcccgggatccacgtcccacgggccggacccgcggccgcgttcgggtaatggcggccacctc

SEQ ID NO: 300162 - DNA, 201 bp, Homo sapiens
tttggccagttcccagtgatcatgactacataccgaacacgaagttgtctggtctgaagatctggccgaagggtccagacctgacagagtccatggtgccwggctccagatccaccaggatggcccgaggtacatatttgttacctgcaggaaataagaactgactcaggcctgtgcttggggagggactcacagcagcat

SEQ ID NO: 300163 - DNA, 201 bp, Homo sapiens
cagaccacaaggttttctacacatgcttttttattagtatagataccttcacagacaatactgtaatttttagaggagttccacatcattacatcaacagkgtgaatttctaacagaggcaaaactgagcaccatagtttacaagtagaaagaccatgcttgaggacaacagaagttcactaaggatgcacgattgatctg

SEQ ID NO: 300164 - DNA, 201 bp, Homo sapiens; identical to SEQ ID NO: 62659

SEQ ID NO: 300165 - DNA, 201 bp, Homo sapiens
gaaggtgtgtcatttggccagttcccagtgatcatgactacataccgaacacgaagttgtctggtctgaagatctggccgaagggtccagacctgacagartccatggtgccaggctccagatccaccaggatggcccgaggtacatatttgttacctgcaggaaataagaactgactcaggcctgtgcttggggagggac

SEQ ID NO: 300166 - DNA, 201 bp, Homo sapiens
tcatctcccacatcatggaaagcaaggattcctgggcacacacatcccgctactcaccagcagcctcattgtagtacacgttgattctctccagctgcaartcactgtctccatggtaactgcctgtggggtcgatcccatgctcatcgctgatgacctcccaaaactgaaatgaaaaaagaaccacaccatggctctgca

SEQ ID NO: 300167 - DNA, 201 bp, Homo sapiens; identical to SEQ ID NO: 62661

SEQ ID NO: 300168 - DNA, 201 bp, Homo sapiens
accattttacattcccaacagcaatatacaagggcttcaatttctctacatcttcaccaacactaatttctgggggttttgctagtagccatcctaatggrcgtgaagtggtataaacaaaatttagatcccatcatctccgaaaagcaaatacacttcctagtactagtcagtactaaataggtgcacagcgtttagaac

SEQ ID NO: 300169 - DNA, 201 bp, Homo sapiens
cagcctcacacctgtattgattctgataattagtgattcagtttcttttaacagagaggagcaataacccgtgccgtgcattttgtcgtatgatcataggygctgaagtttaagaaggtttctctgctggggtggagtgatgggggcataaccgcactcattgctgctgcaaaatatccatcttacatccacaagatggtg

SEQ ID NO: 300170 - DNA, 201 bp, Homo sapiens
caaccaggtttggatggcgtcagaaggaatgcctgaagaagtgatatgccatgttgctgcccagtttcacactggaagagatcctgtgcaaagatccagcrgcctgctttgggttccagtaaacacaaaagtacgtactggcactctgcggattacagactcactgacaacttcatggattcatagatcaagttttgttac

SEQ ID NO: 300171 - DNA, 201 bp, Homo sapiens
tgggatcctcgaggctatggacattccaggcccccagatcgcgatttcccagcagacttttttgaaagggatgcaaaagatgctgttgatttgatgaaggyaggtctctgagggaagggccaggggaggaagggtggctgggcctgtcttcatttattttgtttaaattttgttgttatatttttctacaaaataatacca

SEQ ID NO: 300172 - DNA, 201 bp, Homo sapiens
ttttaggaagtggagagactgattttggacctcagctcaagaacctcaataagaagctcttcacggtggtcgcctgggatcctcgaggctatggacattcmaggcccccagatcgcgatttcccagcagacttttttgaaagggatgcaaaagatgctgttgatttgatgaaggtaggtctctgagggaagggccagggga

SEQ ID NO: 300173 - DNA, 201 bp, Homo sapiens
gcagcaaccagggctaagccgagcagagggagggagggaggcattccaggcagacgagacagtgagcgcatgggctcagaagtggctcttgctcagaatayttaaagacaatactttagtatgaaattaaacctttcttcgcctacacttctgtttttcaggcatccgagatgtttccaaatggagtgagagaacaagaaa

SEQ ID NO: 300174 - DNA, 201 bp, Homo sapiens
cctctagaagccctctatgggtatgactactttgccagaacctgtgaaaagtgggtggatggcataagacagtttaaacatctcccagatggtaggttacygggcttgaagggctctctgcctgttatagagggtgctcgagttcctccccagtgttctggaattgctcagtgattcatgaatctgcccatcgccctcaca

SEQ ID NO: 300175 - DNA, 201 bp, Homo sapiens
aggaggtcttaggccaaggcgggtgagtggcaggaaggagggctcttgagatggaggcttatggacagggctacttagcagttgacacagacatattttawcatcttaaaaaacagtaggatttatccgtgcagatgggcactgttgactatggccctcctgcagcaggccagacaacacaggataccctacagctaaaga

SEQ ID NO: 300176 - DNA, 201 bp, Homo sapiens
atgactacataccgaacacgaagttgtctggtctgaagatctggccgaagggtccagacctgacagagtccatggtgccaggctccagatccaccaggatsgcccgaggtacatatttgttacctgcaggaaataagaactgactcaggcctgtgcttggggagggactcacagcagcattcaattccagcatctgagaca

SEQ ID NO: 300177 - DNA, 201 bp, Homo sapiens
tccttggactatctggaaccatgtctctttctgaaggtgccacatgcagtgaggaacctgccctggcagaggaactcgtgttcatcctctgaggccccttygtttccaactgagccatgtgcttagcagttgggggtttcctactaatttttcggagaatgttattgtttgaaaagtgctctccacagagcatgtgattag

SEQ ID NO: 300178 - DNA, 201 bp, Homo sapiens; identical to SEQ ID NO: 62638

SEQ ID NO: 300179 - DNA, 201 bp, Homo sapiens
taggaagaaggtgtgtcatttggccagttcccagtgatcatgactacataccgaacacgaagttgtctggtctgaagatctggccgaagggtccagacctracagagtccatggtgccaggctccagatccaccaggatggcccgaggtacatatttgttacctgcaggaaataagaactgactcaggcctgtgcttgggg

SEQ ID NO: 300180 - DNA, 201 bp, Homo sapiens
ggtatgactactttgccagaacctgtgaaaagtgggtggatggcataagacagtttaaacatctcccagatggtaggttactgggcttgaagggctctctkcctgttatagagggtgctcgagttcctccccagtgttctggaattgctcagtgattcatgaatctgcccatcgccctcacacgctcatgtgtgagcagaa

SEQ ID NO: 300181 - DNA, 201 bp, Homo sapiens
gaagagatcctgtgcaaagatccagcggcctgctttgggttccagtaaacacaaaagtacgtactggcactctgcggattacagactcactgacaacttcrtggattcatagatcaagttttgttacattgatccaaggtgaaggcacgccacagcaggttacttgtggccttgttactgtctgtaactccttgagttaca

SEQ ID NO: 300182 - DNA, 201 bp, Homo sapiens
agcaggtctcccatattttaatgaagggaacctcatttttatttccccaagatctagagattaggaagagtgcagacagtgctgaacggctaaaaagaaasgattcacagcgaggttctccttccttccttatgggaaaccaacaaatcatagccagataggctggactgtctacagagaaagacttcacatgtggcaggc

SEQ ID NO: 300183 - DNA, 201 bp, Homo sapiens
tcaacctctctgagcctcctgccttgcagcgtttttgtgaggatttgaaacaataaatgtaaaagcctggggatataataaacatgaagtaattagtaggsacaatgggaatatttatataatagtacaatatataagagatgtaaaaataattcatcaagattcatgcaaatttcaagccctgaaggtagcaaatacttt

SEQ ID NO: 300184 - DNA, 201 bp, Homo sapiens
gtgtgcagttgctctgactttcctttcttgatgaaagcaagagtctctcagtagcgcagcactctttactctctgacgtctcgctacttcccctcctggcyactctttctttttcatcccccatcctctcctaacttgtgtcaagatggctgtggcccgccagtgtgctagagaccaagcccccaccacgcacctcctctt

SEQ ID NO: 300185 - DNA, 201 bp, Homo sapiens
gcccataatttgggagggtgacaggggtcaaggaaaggggtgtgggaagaaggtaaaggaggaacgtgagtgggtaatcagtcatcctagtttgcttggcrttgggggattttccaggatgtgggactttcagtgctaaaactagagtgaattgatcacttgttgtggttgataatatattccgttaaaataagaggtaag

SEQ ID NO: 300186 - DNA, 201 bp, Homo sapiens
ctgtaactccttgagttacagatgaaagttcagctaaagatgaaaagggctccaggcggggcaggaaaggtagcatcgtgaggccagcatctcacctatgscattttgacctaaaagagctgtatcaacagaggtaaagtgacccatacatttaccttggggttagacagcttctagttccttggactatctggaaccatg

SEQ ID NO: 300187 - DNA, 201 bp, Homo sapiens
tgaaacctgtgtcagacctaaaggaggcaagggctgctgaggagcttgaaatgacccttaaaagatatcaaggagaagagttgtcttcatactctcttctrtctgtctgtccatctgtctattcatccattcatccatccagcattcagagcaggtctcccatattttaatgaagggaacctcatttttatttccccaaga

SEQ ID NO: 300188 - DNA, 201 bp, Homo sapiens
acatctgccagtccagtgacactgcatgttttcattcaaaccgtagagaaaaatatacaaattaaattcacatgaagctagcgcaataaatatgaccgtasccccgacccaagtttctgagacaaatacacccaggggaatgccagccgcgtcccgcagaagggctgtgtcccagggaaatcgaaagggccccgattaaac

SEQ ID NO: 300189 - DNA, 201 bp, Homo sapiens
gattctcttggtaccccattcccacccccaatgtggtggctgagttggaagaggcccagcatcttccaagcacagctccctgccccacagttcctccctcrcacctactgaggttctgagctgtcagccccccagtattgaaactcaaaaaattagggaacatgataacgcattctgccctaatattgtccttttaatgtc

SEQ ID NO: 300190 - DNA, 201 bp, Homo sapiens
tttcctgtttcctgaaaacaaaggccttgagtgtccctgcaagccctgttccttgtgtaggcaactgggatcctatctctggggtgggtgcaactcatccktcttttctgaatagtgttaaagttgaatttagaatgtcgtgattgttagtaatagcattactaatgttccaaggccctcggaaaggtcccaacaatatgt

SEQ ID NO: 300191 - DNA, 201 bp, Homo sapiens
gttggaagaggcccagcatcttccaagcacagctccctgccccacagttcctccctcgcacctactgaggttctgagctgtcagccccccagtattgaaastcaaaaaattagggaacatgataacgcattctgccctaatattgtccttttaatgtctaattatcattgtagacaaagtggcttgaacttaggctttcat

SEQ ID NO: 300192 - DNA, 201 bp, Homo sapiens
tggaagaggcccagcatcttccaagcacagctccctgccccacagttcctccctcgcacctactgaggttctgagctgtcagccccccagtattgaaactmaaaaaattagggaacatgataacgcattctgccctaatattgtccttttaatgtctaattatcattgtagacaaagtggcttgaacttaggctttcatcc

SEQ ID NO: 300193 - DNA, 201 bp, Homo sapiens
gcacctactgaggttctgagctgtcagccccccagtattgaaactcaaaaaattagggaacatgataacgcattctgccctaatattgtccttttaatgtytaattatcattgtagacaaagtggcttgaacttaggctttcatcctagaagctttaccacttttactgtttctatacttttgtagctaataagtcaaatg

SEQ ID NO: 300194 - DNA, 201 bp, Homo sapiens
actgctgttcagaattggattttttattcctttagtaaagtacccagtttttcctattgcaagtactctgtgaaatcacagttgcccataatttgggaggstgacaggggtcaaggaaaggggtgtgggaagaaggtaaaggaggaacgtgagtgggtaatcagtcatcctagtttgcttggcgttgggggattttccagg

SEQ ID NO: 300195 - DNA, 201 bp, Homo sapiens
ttttcatatttgctacaatcaaacttaaatgacttagaaaagtaggtaactttctactgctgttcagaattggattttttattcctttagtaaagtacccrgtttttcctattgcaagtactctgtgaaatcacagttgcccataatttgggagggtgacaggggtcaaggaaaggggtgtgggaagaaggtaaaggagga

SEQ ID NO: 300196 - DNA, 201 bp, Homo sapiens
ctgagcaccatagtttacaagtagaaagaccatgcttgaggacaacagaagttcactaaggatgcacgattgatctgagaagtttttaagcctcgtcctcrccctcctcctcctcgaactccccttgttcgtcggccgtggcgtcctggtactgctggtactcggacaccaggtcgttcatgttgctctcggcctcggtga

SEQ ID NO: 300197 - DNA, 201 bp, Homo sapiens
tgttagccgtagtcatcctacagcgcgtagaacactaacacttattcctcctgtctagctggaattttgaatcaactaagaaatcttcccatctccccttyccccctgtggggatgtgttttttctcttctagcacctcggtaacctctgccaaagtggctgtgaatggcgttcagctgcattaccagcagactggagagg

SEQ ID NO: 300198 - DNA, 201 bp, Homo sapiens
ggtaacctctgccaaagtggctgtgaatggcgttcagctgcattaccagcagactggagagggagatcacgcagtcctgctacttcctgggatgttaggtytgggtactttttaatggaatgtttttgcatgctgtaaaatctatgatgcattcacaatactagatgccaaatactgatgattaattttagtgcttttttg

SEQ ID NO: 300199 - DNA, 201 bp, Homo sapiens
ttgttcagtaatccaaaaatggaagggtgatttggaaccttgagcagcaggctggggatggctgtgaattctgctttgcacttgcccactacatcaacacsccaagaaactcacctgccccatcccagtgcattctgaacatttcttatttttatcttcttaccaaccttctctcttaaaatcagcttcattaaaatggat

SEQ ID NO: 300200 - DNA, 201 bp, Homo sapiens
catcccagtgcattctgaacatttcttatttttatcttcttaccaaccttctctcttaaaatcagcttcattaaaatggatttttctagagtaaccaccaratcacctcccccactctcagtccgttttccagtcaaaccatttgttacttgattcagttccaaatataatgtgtgtctgctactgttaagtcattgcctt

SEQ ID NO: 300201 - DNA, 201 bp, Homo sapiens
ttaccaaccttctctcttaaaatcagcttcattaaaatggatttttctagagtaaccaccagatcacctcccccactctcagtccgttttccagtcaaacsatttgttacttgattcagttccaaatataatgtgtgtctgctactgttaagtcattgccttatagtcaacctcaagggtagtcataaactccaagagttt

SEQ ID NO: 300202 - DNA, 201 bp, Homo sapiens
gaccacaaggttttctacacatgcttttttattagtatagataccttcacagacaatactgtaatttttagaggagttccacatcattacatcaacagtgkgaatttctaacagaggcaaaactgagcaccatagtttacaagtagaaagaccatgcttgaggacaacagaagttcactaaggatgcacgattgatctgag

SEQ ID NO: 300203 - DNA, 201 bp, Homo sapiens
tggtagtttgttctccataggagagtttcctttgtaaggcaaaaatctaatcacttaattccactagaggacttaaaatccttcactaaccagcaaagtcygtgcagtttggctggcccctcctgccagcccctccccggacattctcccatctcccctttctcctcatccttccggtgcctctcccacgtgggataaatg

SEQ ID NO: 300204 - DNA, 201 bp, Homo sapiens
agtattagcatgattccaatattaaaaaaaatggaccagaggagattctctctcctgtcctatcctcagcacccagttcccctccccacaggcctctcagrtgttacatgctgataactatgtacatgtattccttaaatgtttttttaagttttatattcttggcactggtcttcaaatgtgtacatgtgtgccagggag

SEQ ID NO: 300205 - DNA, 201 bp, Homo sapiens
ggttccagtaaacacaaaagtacgtactggcactctgcggattacagactcactgacaacttcatggattcatagatcaagttttgttacattgatccaargtgaaggcacgccacagcaggttacttgtggccttgttactgtctgtaactccttgagttacagatgaaagttcagctaaagatgaaaagggctccaggc

SEQ ID NO: 300206 - DNA, 201 bp, Homo sapiens
aaagtggttagtagtcatttgtggcctgaggtagaagtcctcagaaatcagcagacttcactgataaaatgctgacttgcccctggactgggctctgtgasagtggccttctgcactgtgcacagtaggtgtgaacacaccacacctacagggaccacgtggtgggctgtggactagcggccaagctccctgcaggcccac

SEQ ID NO: 300207 - DNA, 201 bp, Homo sapiens
gacaacttcatggattcatagatcaagttttgttacattgatccaaggtgaaggcacgccacagcaggttacttgtggccttgttactgtctgtaactccytgagttacagatgaaagttcagctaaagatgaaaagggctccaggcggggcaggaaaggtagcatcgtgaggccagcatctcacctatggcattttgacc

SEQ ID NO: 300208 - DNA, 201 bp, Homo sapiens
cttgaacttaggctttcatcctagaagctttaccacttttactgtttctatacttttgtagctaataagtcaaatgtagaacaaagagaaggctgcatttrttcaggaaactgtaaatctgtcccatttgatcacaatcctgttgaaaggaagaagccttacgaggacagtgtgtttgctacaatgctgagccgtgacagc

SEQ ID NO: 300209 - DNA, 201 bp, Homo sapiens
cccatctcccctttctcctcatccttccggtgcctctcccacgtgggataaatggccattcctggaacaagcttccccctcatgcctcttcgcctttgcarctgctgctgtgccagcttgcaccagccttcccctcagccacatcctctgccagggcatattcacccctgacacagctccttgggcctccgcgtctgggat

SEQ ID NO: 300210 - DNA, 201 bp, Homo sapiens
caccctcacagccatttgtctggcggcttgtattcagatgtatttgttcagtaatccaaaaatggaagggtgatttggaaccttgagcagcaggctggggrtggctgtgaattctgctttgcacttgcccactacatcaacacgccaagaaactcacctgccccatcccagtgcattctgaacatttcttatttttatctt

SEQ ID NO: 300211 - DNA, 201 bp, Homo sapiens
cagtggcaccatctcagctcactgcagcctgcttgctcaacatcaaactatccttctgcctcagcctcccaagtagctggcactacaggcgtgtgccaccrcacctggctaattttttttttttttttttttgagacggagtctcgctctgtcacccaggctgcgcagtggcgtgatctcggctcactgcaaactccgcct

SEQ ID NO: 300212 - DNA, 201 bp, Homo sapiens
tcacagtgtatttaaagaaatatagaaaacattggcctaaggaattgcatttgttgattcatgttaatggttgtttttagctattcttccctactagtgartcatctataatacagtttgaagtttggtacttagccttttacacccatatttcttcggtagcagaaattagaatgaataatttgtgtgcatttttcaatg

SEQ ID NO: 300213 - DNA, 201 bp, Homo sapiens
gtacaatattttttcctttttacacatttagatgtgtctccccacgaggacactgttaatctttaatctcaacggaattaatatgaggaagaaaatattcygttttttccatcttcagaactaagtgatatgactgtaaccatgaacaatgcacaaatgtctcctattcttttttttttagatggagtctcactctgtcac

SEQ ID NO: 300214 - DNA, 201 bp, Homo sapiens
gatcctctggtcccacggtttcatgccgacttcattcataagcacgtgaaaggctcacggtaagtcctgtcaccgccttcacactccccccgagagcctcrgagtcaatgggcaaagctactggaaggaaaataaccaagaggagttggagttttagagtgcacagccccccttttgccaatgccagtcagtagcaccgct

SEQ ID NO: 300215 - DNA, 201 bp, Homo sapiens
acaaggaaaaacgtctgtacatgttcagtacagacccaaccacccatttttttcccgaaatatttttgttccgaggttggttgaatccacagatgtagaaccacggataggaaggctgactgtacttatttctttgtgatttgcttctttctaaaagtgaagtgctaaaaaggttccacttgactgagcctcagcggatcg

SEQ ID NO: 300216 - DNA, 201 bp, Homo sapiens
ttttagccccacaacagccccggggaactgtgattgttcctgtttgtggctgaagctcccagtggttaaggagccaccacagcctcacagaggcaggaaamtgcagtacagggactagggcccaggctgtccatcattgcctcaggaaagttctcataaatgggggtaagtccttacagtctctccaaagtatgttagtca

SEQ ID NO: 300217 - DNA, 201 bp, Homo sapiens
gccccggcctcccaaaatgctgggattacaggcatgagccacagcacctgtccccaatttaatttttttttatgtaaagtattagcatgattccaatattaaaaaaaatggaccagaggagattctctctcctgtcctatcctcagcacccagttcccctccccacaggcctctcaggtgttacatgctgataactatgta

SEQ ID NO: 300218 - DNA, 201 bp, Homo sapiens
aataactttcatgtcaataaatatgcatttatactagttgtatgataggcacatattattccattgtatggatgtactgtatcttatttcaccaattttctttttttttttttgagacagagtgttgctctgtcacccaggctggagtgcggtggcgcaatcttggctcactgcaacctctgcctcccgggttcaaacgat

SEQ ID NO: 300219 - DNA, 201 bp, Homo sapiens; identical to SEQ ID NO: 62641

SEQ ID NO: 300220 - DNA, 201 bp, Homo sapiens
ctcagctcactgcaatctctgtctcctgggttcaagcgattgctctgcctcagcctcccaagtagctgggaccacaggcgtgcaccaccacacaggcacattttttttgtattttagtagagacagggtttcaccatgttggccaggatggccttgatctcctgacctcgtgatccgcccgccttggccctcccaattgct

SEQ ID NO: 300221 - DNA, 201 bp, Homo sapiens; identical to SEQ ID NO: 62643

SEQ ID NO: 300222 - DNA, 201 bp, Homo sapiens
acaggaagatttaaaggtggaaatagggttaaatcagcaattcaaaaatacgttcatgatacagaggctgtagcagtgtataaactgtctcacagcgaggsccttcgtgatgcgtcccccttctgtgctgactcatttggtaggagccctcttttccgactgtcctctcaggtttatggatgcttggtatagtgtagggat

SEQ ID NO: 300223 - DNA, 201 bp, Homo sapiens
gagaaaaatatacaaattaaattcacatgaagctagcgcaataaatatgaccgtagccccgacccaagtttctgagacaaatacacccaggggaatgccarccgcgtcccgcagaagggctgtgtcccagggaaatcgaaagggccccgattaaacgcacacacagctgcggcgctgcgggcatcctggcgggtcatgcag

SEQ ID NO: 300224 - DNA, 201 bp, Homo sapiens; identical to SEQ ID NO: 62645

SEQ ID NO: 300225 - DNA, 201 bp, Homo sapiens; identical to SEQ ID NO: 62644

SEQ ID NO: 300226 - DNA, 201 bp, Homo sapiens
ggagagcaagaggtgcacagagggccatgtctctgtggatgggctggggtcaccagtgcaggaccagccgcgtgttctgagcccaggcctgagggccagasccggtgggaaagtccatgtggcacagagttggcatcttaagttcgtgtcaactaaaggggagggagaggggttaagagcaccagcaggggactcagacct

SEQ ID NO: 300227 - DNA, 201 bp, Homo sapiens
aatatgaccgtagccccgacccaagtttctgagacaaatacacccaggggaatgccagccgcgtcccgcagaagggctgtgtcccagggaaatcgaaaggsccccgattaaacgcacacacagctgcggcgctgcgggcatcctggcgggtcatgcagcctcccggaccccgcccggcggcctcgccgcggaatgtgccac

SEQ ID NO: 300228 - DNA, 201 bp, Homo sapiens
gtgaggggtttgttcttaagtggtgggccattgacccaaagtatttttaattccttttttaggctgcatttgatgccagaaggcaaacacaacctgcattygcgttttgcagatgaattcaacaagttagcagaagacttcctacaatgagaatgcacactccagtcttggtggttccttcgtgtggggcttgatcgtgtt

SEQ ID NO: 300229 - DNA, 201 bp, Homo sapiens; identical to SEQ ID NO: 62647

SEQ ID NO: 300230 - DNA, 201 bp, Homo sapiens
cctcacctctcttctttccccacattctcctggtttaggccgctagcttcatatggtagtttgttctccataggagagtttcctttgtaaggcaaaaatcyaatcacttaattccactagaggacttaaaatccttcactaaccagcaaagtccgtgcagtttggctggcccctcctgccagcccctccccggacattctc

SEQ ID NO: 300231 - DNA, 201 bp, Homo sapiens; identical to SEQ ID NO: 62651

SEQ ID NO: 300232 - DNA, 201 bp, Homo sapiens
caagccctgttccttgtgtaggcaactgggatcctatctctggggtgggtgcaactcatccttcttttctgaatagtgttaaagttgaatttagaatgtcrtgattgttagtaatagcattactaatgttccaaggccctcggaaaggtcccaacaatatgtcttcctttcaagttgattctcttggtaccccattcccac

SEQ ID NO: 300233 - DNA, 201 bp, Homo sapiens; identical to SEQ ID NO: 62654

SEQ ID NO: 300234 - DNA, 201 bp, Homo sapiens
aagaagaaataactaaattcaacgtataatggtggaaaaagaacattagtagaaaacttgaccagatttgagtaaggcttatagtttagttgttaatactrtaccagtgttaatgtcctgttctcgatcatggcactatggtttggtaatatgttaacattagaggaagctgggtgtaacttctataaacctaaaattcgt

SEQ ID NO: 300235 - DNA, 201 bp, Homo sapiens
gctagctaagaacagttcagaaaattagacaaatattttggccacattaaactttagttttcccaaactttctgaaatgtaaatatcttttctttttttakattttgaagactcttctccaaaattttgataaatggctttttataataacttaaccaatctttagagaattccatattttcagactttcacaaaatcagg

SEQ ID NO: 300236 - DNA, 201 bp, Homo sapiens
tgcaccaatgtcttgtcagtttcaatctcacaaaccacttcatcttctgcaactgtgtctccaacagctttctcccacctgacatctccctctgtgacagrttctgcaaacgctggggttttgactgtaaccaagtcatacttgcatacagttgtagttctgaagaagcgaacactgaagacactgttgttaatgacaacc

SEQ ID NO: 300237 - DNA, 201 bp, Homo sapiens
agttctgaagaagcgaacactgaagacactgttgttaatgacaaccttcctgctgttagggtaacctggtccctggcataaggagaccccaggcagggaaygtctccctagagggcagttccccttctggaaggcagagagcgagtggctgaacgcccgggacacagtgggaccgggacagcatcacggcggccgggtctc

SEQ ID NO: 300238 - DNA, 201 bp, Homo sapiens; identical to SEQ ID NO: 62715

SEQ ID NO: 300239 - DNA, 201 bp, Homo sapiens
ccgcatcctgttcattttctcccgatgttctgaatgcagacctttgccagctcctggctcagctagtggtgggacagcagtgggttttactgcagacacasgtttgctagaaggaggttgtgagggcgagggcactggtggcatcgagtgggtatgggtgctgcacggggaggaactgccgctgctataggttctgctttt

SEQ ID NO: 300240 - DNA, 201 bp, Homo sapiens
tctaaataattttcccttagagttcaccgaacagcagaaagaatttcaagctactgctcgtaaatttgccagagaggaaatcatcccagtggctgcagaayatgataaaactggtgaagtaggtatatacattttaaagagggaaaaatcttttacattttttacaagattatgtaatcaaactatctggatttcaaaata

SEQ ID NO: 300241 - DNA, 201 bp, Homo sapiens
aaatcttttacattttttacaagattatgtaatcaaactatctggatttcaaaatatattttaactcagttctttttcttctagtatccagtccccctaaytagaagagcctgggaacttggtttaatgaacacacacattccagagaactgtggtaagctttctttatatttttaatactggaatgcatatgagtaagaa

SEQ ID NO: 300242 - DNA, 201 bp, Homo sapiens
acactgttggtgggactgtaaactagttcaaccattgtggaagacagtgtggcaatttctcaaggatctagaactagaaatgccatttgacccagcaatcycattactgggtatatacccaaaggattataaatcatgctgctataaagacttctatgaccaaagatgtaggaggatttcccacccacaccaagcaacaga

SEQ ID NO: 300243 - DNA, 201 bp, Homo sapiens
caataaatatcctttaatttttttctttttaattctagcaccaagcaatatcatttatgctggctgaaatggcaatgaaagttgaactagctagaatgagwtaccagagagcagcttgggaggttgattctggtcgtcgaaatacctattatgcttctattgcaaaggcatttgctggagatattgcaaatcagttagcta

SEQ ID NO: 300244 - DNA, 201 bp, Homo sapiens
actacatattacaatgtgttgaaacattttgatactgtaggaggtcttggacttggaacttttgatgcttgtttaattagtgaagaattggcttatggatrtacaggggttcagactgctattgaaggaaattctttgggggtaagtgacttagaaaattaactacctaactcagctcttgttaatgagatagttactcct

SEQ ID NO: 300245 - DNA, 201 bp, Homo sapiens
gagaggatgtggagaaataggaatacttttacactgttggtgggactgtaaactagttcaaccattgtggaagacagtgtggcaatttctcaaggatctasaactagaaatgccatttgacccagcaatcccattactgggtatatacccaaaggattataaatcatgctgctataaagacttctatgaccaaagatgtag

SEQ ID NO: 300246 - DNA, 201 bp, Homo sapiens
ctggacaacgttgagagactgccaccacacacacacacaaattatatatatatatatatatatatatatatatatatatatatatatatatatatatatgwgaaaccaaaaagaagaaaagaagacaaaaacaactctgaggaaccagtagtgacaagccattttgtatagaaaaaaacaggctcatttacttcacaggct

SEQ ID NO: 300247 - DNA, 201 bp, Homo sapiens; identical to SEQ ID NO: 62705

SEQ ID NO: 300248 - DNA, 201 bp, Homo sapiens
taacagttagcccccattatatacatgtagttttatgtacatctttatttaacaacatgaacattttcttatgccttccttctttttacatgctgtaacartactgcataatttgctatctaatggatatgctataaattgtttcacttttctgtactgttgaatgtttaaactccttgggtttttactttggaaaataat

SEQ ID NO: 300249 - DNA, 201 bp, Homo sapiens
actgggagagacctcccagtaggggccgattgacacctcatacgtccgggtgcccctctgagacgaagcttccagaggaacaatcaggcagcaatgtttgycattctgcaatatttgcagttctgcagcctctgctggtgatacccaggcaaagagggtctggagtggacctccagcaaactccaacagacctgcagctga

SEQ ID NO: 300250 - DNA, 201 bp, Homo sapiens
attcctttttagaggcacttagagatttctgtttctttcctatgagctttttttttttcttaaccaagtatttctttgttaactccttcatgttgccagarctacatatgtacattttactaaatgttagtttatcttattcataaacaaatttcaacctaatgcttttcagtgaagatctgtcatcgtcttccaggtcct

SEQ ID NO: 300251 - DNA, 201 bp, Homo sapiens
attatatcctgcgcctggcttggagggtcccacacccatggaacctcacccactgctagcacagcagtctgagatgaaactacaaggcggcagcaaggctsagggaggggcatccgccattgctgaggcttgagtaggtaaacaaagtggccgggaagctcgaactgggtggagcccactgcagctcaaggaggcctgctt

SEQ ID NO: 300252 - DNA, 201 bp, Homo sapiens
atttcatgtgtggtattagaaaatatacaatgatctgcccaagggttccaagatggctgaataggaacaactccagtctacaggtcccagcgtgagtgacrcagaagacgggtgatttctgcatttccagctgaggtaccgggttcatctcactgggatttgtcgtacagtgggcgcagcccacagagcatgagccgaagc

SEQ ID NO: 300253 - DNA, 201 bp, Homo sapiens
tgtttagccatttcatgtgtggtattagaaaatatacaatgatctgcccaagggttccaagatggctgaataggaacaactccagtctacaggtcccagcrtgagtgacgcagaagacgggtgatttctgcatttccagctgaggtaccgggttcatctcactgggatttgtcgtacagtgggcgcagcccacagagcatg

SEQ ID NO: 300254 - DNA, 201 bp, Homo sapiens
cccctttaaatattgatgctcccccattatctgtattctttcctgcaactcactatgagttgtatagtgaacctcctatttctctttttttttttttttttgagacagggtcttggttgcccaaatgcgagtgcaatggtgcagtcatggcttattgcagcctcttgggatcaagcaatcctcccacctcagcctcctaaa

SEQ ID NO: 300255 - DNA, 201 bp, Homo sapiens
acttatacatatgaagctttatatgtttgtttggaatatgtttgtaaataaacttaataatgtctttcaatgagtagaaccagtccactgtccacagatartttacaataactcacactccattcttcctgatctcattttcttcctcagtatactacactgtacattagatctgttttagcagcatacatacacttaaat

SEQ ID NO: 300256 - DNA, 201 bp, Homo sapiens
aggaaaaaacttttaagttttctcaataaatatcctttaatttttttctttttaattctagcaccaagcaatatcatttatgctggctgaaatggcaatgraagttgaactagctagaatgagttaccagagagcagcttgggaggttgattctggtcgtcgaaatacctattatgcttctattgcaaaggcatttgctgg

SEQ ID NO: 300257 - DNA, 201 bp, Homo sapiens
ttagtagagatggggttcccttatgttggccaggctggtgttgaactcctggcctcaagtgatctgcctgcctcggcctcccaaagtgctaggattacagrcctgaaccactgcgcctggcctatgttatactcttaattcttgttacttcccatgtcctcttgagtatcagataattttagtactataaagagtcgtgtc

SEQ ID NO: 300258 - DNA, 201 bp, Homo sapiens
aacggatagtacatgtttttggctttgtgaaccagatggtctctgtggtaactacttagatctgctgtgaaagcggcaatagacagcatgatgtggctgcmctggtttggtgactccttgctcagaacattgtaagaatccctgtagacagcagaaaatacagaacatggttttatgctaatttgttttgttagagtgggg

SEQ ID NO: 300259 - DNA, 201 bp, Homo sapiens
cagctttctcccacctgacatctccctctgtgacaggttctgcaaacgctggggttttgactgtaaccaagtcatacttgcatacagttgtagttctgaaraagcgaacactgaagacactgttgttaatgacaaccttcctgctgttagggtaacctggtccctggcataaggagaccccaggcagggaatgtctcccta

SEQ ID NO: 300260 - DNA, 201 bp, Homo sapiens
gattatggttggcaaatttttttgtaaagatccaaattataaatatttcaggctttgcaggccatatctctgtcacaactactcagttctgccattgtagyaagaaagtaactgtagatgatatatgaacaaataggcgtgactgtattccaatcaggctttctttgcaaaacaggcattgcagactacagtttgttgatc

SEQ ID NO: 300261 - DNA, 201 bp, Homo sapiens
actgtgtctccaacagctttctcccacctgacatctccctctgtgacaggttctgcaaacgctggggttttgactgtaaccaagtcatacttgcatacagytgtagttctgaagaagcgaacactgaagacactgttgttaatgacaaccttcctgctgttagggtaacctggtccctggcataaggagaccccaggcagg

SEQ ID NO: 300262 - DNA, 201 bp, Homo sapiens
tgtaattttgactgtcctgaaacctttactcaagaacaccattgtggttcccagtttggcagctttaataaatgcaaatttttacttttgtatccattaarctgtcatgaatataaaaatgggttgcaaaacaataatatatgtatatttgattgtttctttatatgttcctttgaagaaatatgactatatttcagatcc

SEQ ID NO: 300263 - DNA, 201 bp, Homo sapiens
tcatcttctgcaactgtgtctccaacagctttctcccacctgacatctccctctgtgacaggttctgcaaacgctggggttttgactgtaaccaagtcatmcttgcatacagttgtagttctgaagaagcgaacactgaagacactgttgttaatgacaaccttcctgctgttagggtaacctggtccctggcataaggag

SEQ ID NO: 300264 - DNA, 201 bp, Homo sapiens
tctcccgatgttctgaatgcagacctttgccagctcctggctcagctagtggtgggacagcagtgggttttactgcagacacaggtttgctagaaggaggytgtgagggcgagggcactggtggcatcgagtgggtatgggtgctgcacggggaggaactgccgctgctataggttctgcttttggggctgcagcagcagg

SEQ ID NO: 300265 - DNA, 201 bp, Homo sapiens
tcttgctatttctagtttttttctttgcctaattttctcacttaaaaaaaaatctacttcaataaatatttatgtagtgcatactatatacagtattctakctattagggatacagtatggatcaaaatagacaaaaatccctggccttaggtaaattactttctggtgagtgatagagataattatattgtgtatattta

SEQ ID NO: 300266 - DNA, 201 bp, Homo sapiens
ccgagccctcatcttctggatgttactcacatcaatctcattaaaaattgtcagcattggcacatgtattctgggcctccttcagacgctgagcaatgcaytgccgcatcctgttcattttctcccgatgttctgaatgcagacctttgccagctcctggctcagctagtggtgggacagcagtgggttttactgcagaca

SEQ ID NO: 300267 - DNA, 201 bp, Homo sapiens
ggcttggccttagcaggagcagcaccagttttcctgagtgtgaaaagcggagtgcctccttcgacttttcccccatcaggtacgaaaagagcttcaatcaygccatttgctggtgatggaacctgcaccaatgtcttgtcagtttcaatctcacaaaccacttcatcttctgcaactgtgtctccaacagctttctcccac

SEQ ID NO: 300268 - DNA, 201 bp, Homo sapiens
gttcctgcaaggcaaaggctgaggccttcacagatgccgacatgaagcctagtttgaggttatgtttcttcaaaaaagcctctttgtgccgagccctcatyttctggatgttactcacatcaatctcattaaaaattgtcagcattggcacatgtattctgggcctccttcagacgctgagcaatgcactgccgcatcctg

SEQ ID NO: 300269 - DNA, 201 bp, Homo sapiens
caaagatgccatgcatccccaggatggcagacaggggggttgataatgggtgttcaaagagtgagccaaaaacacctccattgctaatggtgaaggtaccrccatccatatcttcaatggcaaattcattctttcgggccttctctcccagttcagtgatggtctgttcaatatctgcataattcatagcttccacattcc

SEQ ID NO: 300270 - DNA, 201 bp, Homo sapiens
attctcactattgtctataagaactgtgtgaaacgtctagattgttctcctgtagcatatacagtcagctctccatatccatgagggaatagtttaggacmtgttgccctccatatcaaaatttttggttgccaagtctgttatacaaaatgtacagttagccctttgtatctgtgggttttgctccacagttggttaaat

SEQ ID NO: 300271 - DNA, 201 bp, Homo sapiens
ttctcactattgtctataagaactgtgtgaaacgtctagattgttctcctgtagcatatacagtcagctctccatatccatgagggaatagtttaggacckgttgccctccatatcaaaatttttggttgccaagtctgttatacaaaatgtacagttagccctttgtatctgtgggttttgctccacagttggttaaatt

SEQ ID NO: 300272 - DNA, 201 bp, Homo sapiens
tcgtggatgccaaaggcaaacttttaaaaaattaaaattttataacttttctaattataaaatactgagtatagaaaatttagaaatgttttaagtagaayaaaaatatctgtaatccctcagatatggagttaattagtattacttccttattgtagtgcctaccacatttttaaatatgtaattgtgtttttaacagtt

SEQ ID NO: 300273 - DNA, 201 bp, Homo sapiens
ttgcagtatagttatttatcttcactgttacattgtgaaaatctctaggactgaatgtcttttacctctggtttccccatatcctaatttacatcgtggtrcatagtagatattcaatacatgtttgcatgaatgaatacatgtgaaattgaatttaatgaacttgtttaaagctatctaacattttcactttttattaaa

SEQ ID NO: 300274 - DNA, 201 bp, Homo sapiens
cttttacctctggtttccccatatcctaatttacatcgtggtacatagtagatattcaatacatgtttgcatgaatgaatacatgtgaaattgaatttaaygaacttgtttaaagctatctaacattttcactttttattaaatatatgatttgttgatatacctatgcctaatttgaattatatattaagtgtttttagg

SEQ ID NO: 300275 - DNA, 201 bp, Homo sapiens
atagtgtatatttcttgtatttactatgatgaaaaaaggtcgttttaattttgaattgaataaagttacctgttcattttttattagatattttaaagacytcagaaaatataaatatgaaataatttaagaacccaaatctctgaatttaatatttctttgtaattctaaatatcgaatactgctaaactgtgttatact

SEQ ID NO: 300276 - DNA, 201 bp, Homo sapiens
agctgagattatgccattgcactccagcctgggcaacaggagcgaaactccatcaaaaaaaaggaaagagagaagggaggaaggaagggagggaggaaggaaggaagggagggaggaaggaagggaggaaaagaaaaggtttctataccagatataaatgtactccaaaagaagggagggagggagggaggaaggaaggaa

SEQ ID NO: 300277 - DNA, 201 bp, Homo sapiens
tgggaggttgattctggtcgtcgaaatacctattatgcttctattgcaaaggcatttgctggagatattgcaaatcagttagctactgatgctgtgcagayacttggaggcaatggatttaatacagaatatcctgtagaaaaactaatgagggatgccaaaatctatcaggtaaggttaaagatgatttttttggtttgc

SEQ ID NO: 300278 - DNA, 201 bp, Homo sapiens
tgatcttggcccactgcaacctctgcctcccaggttcaagcgattctcctgcctcagcctcccaagcagctgggactacaggtgcgtgccaccacgcctgsctaattttttgtatgtttagtagagacaagatttcactgtgttagccaggatggtctctatctcctgacctcatgatctgcccaccttggcctcccaagg

SEQ ID NO: 300279 - DNA, 201 bp, Homo sapiens
tgagctgagattatgccattgcactccagcctgggcaacaggagcgaaactccatcaaaaaaaaggaaagagagaagggaggaaggaagggagggaggaaggaaggaagggagggaggaaggaagggaggaaaagaaaaggtttctataccagatataaatgtactccaaaagaagggagggagggagggaggaaggaagg

SEQ ID NO: 300280 - DNA, 201 bp, Homo sapiens
ttaattagtgaagaattggcttatggatgtacaggggttcagactgctattgaaggaaattctttgggggtaagtgacttagaaaattaactacctaactsagctcttgttaatgagatagttactcctgaagaagttggatttttagaagaaaaaaaaaggaaagtcagttactactaggtaaggttagtgggtacacac

SEQ ID NO: 300281 - DNA, 201 bp, Homo sapiens
gaactcctgagcttgagtaatccgcccatcttggtctcccaaagtgctgggattacaggcatgagtgactgcgcctggcctagtttttcatttttaattgrtaggtacagtgatatgacactgtaattccttgtcactcctttgctaggtgtctctcaacccatttgtgtgccctttgaaacttcagttttttgttttttt

SEQ ID NO: 300282 - DNA, 201 bp, Homo sapiens
caacatggcagcggggttcgggcgatgctgcagggtgagagggagcccagcggtgcggtggggctggaacatgggtattgtggtgtcggagcagggggccstgggccaaaaataggtgcggccgggaggagtgggaagtcgggctgaggaaggagccagcctaggggcccccaacctgctttcacgcctcctaccaccgga

SEQ ID NO: 300283 - DNA, 201 bp, Homo sapiens; identical to SEQ ID NO: 62724

SEQ ID NO: 300284 - DNA, 201 bp, Homo sapiens
tgggcgacagagcgagactccgtctcaaaaaaaaaaaaaaaaaaaaaaaaaagagatttgatcttatgctcttcaattcagcaccagaattcagcttttakgtattgtttctcacatccccatacaaatgattactgtagtcttaaacattcctctgtgcatttgctctcatttttcttgcttgaaataccctattatctc

SEQ ID NO: 300285 - DNA, 201 bp, Homo sapiens
agtcatgaaacagtgattaaagcaaaaattgatgctggctcaaaaaaaattccttaaaatatatcaattttcttattaggaattaaacatgggccagcgaygttcagatactagaggaattgtcttcgaagatgtgaaagtgcctaaagaaaatgttttaattggtgacggagctggtttcaaagttgcaatgggagcttt

SEQ ID NO: 300286 - DNA, 201 bp, Homo sapiens
gtgcccagactttctctaccctctatctacctgcaagattgctatcaactggcaccaatcttagaagtaaagctgtgatagagagaacactggactgaaaytcttaagtatacttctgctaattcattgtgagactgatactagaatttccttactctgcattagtttatcaataaaaagagagatttggctgggcgcagt

SEQ ID NO: 300287 - DNA, 201 bp, Homo sapiens
taaatagtgatgactttaaaaactatgagtatggtcaaaccagttgctgtactcacttatgattatcagtagtctcttatctgattaatgtttaacttatsaaatttattttaataaaagtgttctttacaggtcctgagaagtatttctcgttttcattggagatcacagcatacaaaagccaatcgacaacgtgaacca

SEQ ID NO: 300288 - DNA, 201 bp, Homo sapiens
aggattgcttaagcccaggagttcaagactagcctgggcaagatggtgagacctcatctctacaaaaaattagaaaattagctaggtgtggagatgcacayctgtggtcccagctacacagggggctgagtcaggaagatcccttgcgcctaggaggctgaggctgcaatgatccatgttcaaaccactacactccagcct

SEQ ID NO: 300289 - DNA, 201 bp, Homo sapiens
tattcgagggtatgagacaggtgcagagagggagagagccaggcaggaacaccaagaaaaaagctgtgactgctggttacatagtgctctgcttccttgcktgaggccaacagcatgtgcctgtcaccaggctaacctgggacccatgaggggacagggagaagactggttttcagttcctgcatgatcaatttgtagggt

SEQ ID NO: 300290 - DNA, 201 bp, Homo sapiens
ggatcttgctatattgctcaggctggccccaaactcctggcctcaaatggttcacctgcctcagcctcccaaaattctagaattataggcatgagctaccrtgcccagactttctctaccctctatctacctgcaagattgctatcaactggcaccaatcttagaagtaaagctgtgatagagagaacactggactgaaac

SEQ ID NO: 300291 - DNA, 201 bp, Homo sapiens
aaaagtccttttttttcttgttctttttttaaccctcctgggcaagagatcagcttctttgtggccctcctatgctgatgagcccagacttttaattgccyctttggaaagcaaagcttttacatgcagtgattctcagttttagccccttagattgttcatgctcacatcgaaatctcctgttcttatgtgtttcttaaa

SEQ ID NO: 300292 - DNA, 201 bp, Homo sapiens
tcccaccccttcccccctccccacccccaggcctcacttcttggctcaagatacaaaaaggcactctctactggccctagtgtcaaatgtcagcagcctcwggcctggatgcagttggatacaaagccatgaatcccagtagctccaaggaattccaatgattgtgcccagatccaccggcaacacatcttagaaatgacc

SEQ ID NO: 300293 - DNA, 201 bp, Homo sapiens
tcttgggatcaagcaatcctcccacctcagcctcctaaataactggaactataggggcacactaccatgcctgcctaatttttttatttttgtagagatgrggtctcactatgttgcccagactggtctcaaacacctgagctcaagcaatctttccacctcagccccccatgagcctcctattcctatctccatttgtca

SEQ ID NO: 300294 - DNA, 201 bp, Homo sapiens
ataagaatcaatagtatgagcctttaaaaagccaatgtaattttaagccaaagtaatagaagtacagcatcaaatagagaaaaaatggtgacagttctggkcaacacattttaaaacatgtattgaaaaacttgactaaatctagaagcatgtaagtatcttgcattaggaggagcctacaaaacatgttctgaaaagcaa

SEQ ID NO: 300295 - DNA, 201 bp, Homo sapiens
taatcccaggaggctgagtctgcagtgagcggagatctctccaccgcactctagcctgggtgacagagggagactctgtcaaaaaaaaaaaaaaaaagtcyctcagtagaccatttaacctggtttgagttctgacttttgtgcatggtatttaaaaacgcatttataatagagtcaggttttttgttctgatttttgtgg

SEQ ID NO: 300296 - DNA, 201 bp, Homo sapiens
gcctaattttttgtatgtttagtagagacaagatttcactgtgttagccaggatggtctctatctcctgacctcatgatctgcccaccttggcctcccaakgtgctggaattacaggtgtgagccaccatgcccagccaagtattgttattattttttttttctgaaatggagtctcgctctgttgcctaggctggagtgc

SEQ ID NO: 300297 - DNA, 201 bp, Homo sapiens
ttaatgtttaataagcttttcgttgtaacgtttccacgttgcttacgggaaaaaaaaaagtaaaaaaaaaacctgcagaattttatgtgaacttgtgtgtrtattctagtattggatcttaatagattctaaataagtttgtcactagatgaattttggtatcttaaatattcttgatatgttcacaccactgccatttag

SEQ ID NO: 300298 - DNA, 201 bp, Homo sapiens
ccgggaggagtgggaagtcgggctgaggaaggagccagcctaggggcccccaacctgctttcacgcctcctaccaccggacggaacgtagcctagcgtttmattttccgtatcctcccgtcaggcgaccccgttatagccggcatcctctctttagaatatcgtttttctttctctggtaaaccctccaaatatttaccgc

SEQ ID NO: 300299 - DNA, 201 bp, Homo sapiens
ttgagacggagtctcgctctgttgcccaggtcggagtgcagtggtgtgatcttggcccactgcaacctctgcctcccaggttcaagcgattctcctgcctyagcctcccaagcagctgggactacaggtgcgtgccaccacgcctgcctaattttttgtatgtttagtagagacaagatttcactgtgttagccaggatgg

SEQ ID NO: 300300 - DNA, 201 bp, Homo sapiens
ttcttattaggaattaaacatgggccagcgatgttcagatactagaggaattgtcttcgaagatgtgaaagtgcctaaagaaaatgttttaattggtgacrgagctggtttcaaagttgcaatgggagcttttgataaaaccagacctgtagtaagtaatatgggttcataatctttataggatcttttatttattacatt

SEQ ID NO: 300301 - DNA, 201 bp, Homo sapiens
caataaatgttagagtgatttcactgtacttttctttggctatattgcccttcagatgtttgagtatagttatatttatttatttatttattttttgagayggagtctcgctctgttgcccaggtcggagtgcagtggtgtgatcttggcccactgcaacctctgcctcccaggttcaagcgattctcctgcctcagcctc

SEQ ID NO: 300302 - DNA, 201 bp, Homo sapiens
tgacatgtttttatacctcaggtgcctgggaatcaacaccttctgaaacagcatcatttgcgagcatctgttatcattagaaaaatattttggattacatratgcttaagcacagaacctgtcatttttttttttataattttaccagttcatactgtaataggtgttcaataaatgttagagtgatttcactgtactttt

SEQ ID NO: 300303 - DNA, 201 bp, Homo sapiens
cctggacaacgttgagagactgccaccacacacacacacaaattatatatatatatatatatatatatatatatatatatatatatatatatatatatatragaaaccaaaaagaagaaaagaagacaaaaacaactctgaggaaccagtagtgacaagccattttgtatagaaaaaaacaggctcatttacttcacaggc

SEQ ID NO: 300304 - DNA, 201 bp, Homo sapiens
cgaacagcagaaagaatttcaagctactgctcgtaaatttgccagagaggaaatcatcccagtggctgcagaatatgataaaactggtgaagtaggtatayacattttaaagagggaaaaatcttttacattttttacaagattatgtaatcaaactatctggatttcaaaatatattttaactcagttctttttcttcta

SEQ ID NO: 300305 - DNA, 201 bp, Homo sapiens
tttgaaaataaatgttttttatttcagatacctaaaatttcaagcaaactgtttaataaaggaatttgtacatatttgctaggaaatttgcaattttttttaacaattgagaggttagctaaacattctcactattgtctataagaactgtgtgaaacgtctagattgttctcctgtagcatatacagtcagctctccata

SEQ ID NO: 300306 - DNA, 201 bp, Homo sapiens
tctcaaaaaaaaaaaaaaagcaattaatgtgggctgggcatagtggctcacacctgtaatgtcagcactttgagaggctaaggcaggagaactgcttgagyccgggagttcaagaccagcctgggtaacacagtgagaccctgtctctaaataaataaataaatgaataaataaataaaaattaatgtgaacctgtaactg

SEQ ID NO: 300307 - DNA, 201 bp, Homo sapiens
cctctgcctcccaggttcaagcgattctcctgcctcagcctcccaagcagctgggactacaggtgcgtgccaccacgcctgcctaattttttgtatgtttrgtagagacaagatttcactgtgttagccaggatggtctctatctcctgacctcatgatctgcccaccttggcctcccaaggtgctggaattacaggtgtg

SEQ ID NO: 300308 - DNA, 201 bp, Homo sapiens
gtgagctgagattatgccattgcactccagcctgggcaacaggagcgaaactccatcaaaaaaaaggaaagagagaagggaggaaggaagggagggaggaaggaaggaagggagggaggaaggaagggaggaaaagaaaaggtttctataccagatataaatgtactccaaaagaagggagggagggagggaggaaggaag

SEQ ID NO: 300309 - DNA, 201 bp, Homo sapiens
agtgagctgagattatgccattgcactccagcctgggcaacaggagcgaaactccatcaaaaaaaaggaaagagagaagggaggaaggaagggagggaggaaggaaggaagggagggaggaaggaagggaggaaaagaaaaggtttctataccagatataaatgtactccaaaagaagggagggagggagggaggaaggaa

SEQ ID NO: 300310 - DNA, 201 bp, Homo sapiens
aggtatgattgaaaaggtttataaggaataacagaagataactccaagaactcaagaaattccaagggttttaggagctctgtgccaggaacaaagacctrgggacctgggaacaaagaccaaataaatttcttataccacattaaattaccaaaataatcgaatttcttacaaatataaaatatttaaatgacatttcct

SEQ ID NO: 300311 - DNA, 201 bp, Homo sapiens
tagaagtttagaatggaaataaggtctgactcttgaaatccttccagcatctttttctttagcaactctgttccacaggcagtgggagaaaaaaaaaaaaattaagggtaagaataaaagactgaaggagacagctagctaagaacagttcagaaaattagacaaatattttggccacattaaactttagttttcccaaac

SEQ ID NO: 300312 - DNA, 201 bp, Homo sapiens
gtggtgggacagcagtgggttttactgcagacacaggtttgctagaaggaggttgtgagggcgagggcactggtggcatcgagtgggtatgggtgctgcayggggaggaactgccgctgctataggttctgcttttggggctgcagcagcaggagcttcagccggcttggccttagcaggagcagcaccagttttcctgag

SEQ ID NO: 300313 - DNA, 201 bp, Homo sapiens
tgggtcgagtggggacttggaggacttgtctgtctagctagatgattgtaaacacaccaatcagcactctgtaaaaatgcactaatcagcactctctgtctagctaaaggattgtaaacacaccaatcagtgctctgtaaaaatgcaccaatcagtgctgtgtctagctaaaggattgtaaactcaccaatcagcactgtg

SEQ ID NO: 300314 - DNA, 201 bp, Homo sapiens
ctcacatcaatctcattaaaaattgtcagcattggcacatgtattctgggcctccttcagacgctgagcaatgcactgccgcatcctgttcattttctccygatgttctgaatgcagacctttgccagctcctggctcagctagtggtgggacagcagtgggttttactgcagacacaggtttgctagaaggaggttgtga

SEQ ID NO: 300315 - DNA, 201 bp, Homo sapiens
ctgggtcgagtggggacttggaggacttgtctgtctagctagatgattgtaaacacaccaatcagcactctgtaaaaatgcactaatcagcactctctgtctagctaaaggattgtaaacacaccaatcagtgctctgtaaaaatgcaccaatcagtgctgtgtctagctaaaggattgtaaactcaccaatcagcactgt

SEQ ID NO: 300316 - DNA, 201 bp, Homo sapiens
tttcgggccttctctcccagttcagtgatggtctgttcaatatctgcataattcatagcttccacattcctgatgactggaaccaccagaccctgtggggkggccactgcaacactgatgtcaatataatccctatataccacctctttggttatatcatcaatcactgcgtttacaacaggctgttcctgcaaggcaaag

SEQ ID NO: 300317 - DNA, 201 bp, Homo sapiens
cctgggtcgagtggggacttggaggacttgtctgtctagctagatgattgtaaacacaccaatcagcactctgtaaaaatgcactaatcagcactctctgtctagctaaaggattgtaaacacaccaatcagtgctctgtaaaaatgcaccaatcagtgctgtgtctagctaaaggattgtaaactcaccaatcagcactg

SEQ ID NO: 300318 - DNA, 201 bp, Homo sapiens
tcctgggtcgagtggggacttggaggacttgtctgtctagctagatgattgtaaacacaccaatcagcactctgtaaaaatgcactaatcagcactctctgtctagctaaaggattgtaaacacaccaatcagtgctctgtaaaaatgcaccaatcagtgctgtgtctagctaaaggattgtaaactcaccaatcagcact

SEQ ID NO: 300319 - DNA, 201 bp, Homo sapiens
gcctttttttgtttgtttgttttttaagtagagacagggtttcatcatgttggccaggctggtctcaaactcctgacctcaggtgatccacccaccttggygtcccaaagtgctgggattacaggtgtgagccaccacgcccagccaggaaggatattttaaaggatacagatgaagagatgtgcagggtaaggtatgagg

SEQ ID NO: 300320 - DNA, 201 bp, Homo sapiens; identical to SEQ ID NO: 62700

SEQ ID NO: 300321 - DNA, 201 bp, Homo sapiens; identical to SEQ ID NO: 62725

SEQ ID NO: 300322 - DNA, 201 bp, Homo sapiens; identical to SEQ ID NO: 62726

SEQ ID NO: 300323 - DNA, 201 bp, Homo sapiens; identical to SEQ ID NO: 62727

SEQ ID NO: 300324 - DNA, 201 bp, Homo sapiens; identical to SEQ ID NO: 62728

SEQ ID NO: 300325 - DNA, 201 bp, Homo sapiens
tacttgtcatttttccttttttttttttttaagagacagggtttcactctgtcacccaagctggatgcaaccttgacctctggggctccatggattctctsgcctcagcttcctgagcagttaggacaataggtccatgtcaaccacacctagctgattttttaaatttttaaatgttttgttgagacaggatcttgctat

SEQ ID NO: 300326 - DNA, 201 bp, Homo sapiens
tcaaatatttcttgccattaaatgactttctacctttgtcttcctgctcagactacagtgtttgcccacttttggaagcttgcactctatacctagatgcrtttttccttcttctaactggttccaaccttaacttgcacctaaaccttggtaacttccgtttctagagttggtcaatttgttgtgttttattcctatctt

SEQ ID NO: 300327 - DNA, 201 bp, Homo sapiens; identical to SEQ ID NO: 62732

SEQ ID NO: 300328 - DNA, 201 bp, Homo sapiens
gtgctgggattacaggcatgaaccactgtgcccaacctaaatgaaaattttttttcttttctctttctgtagccaaagactaaatgaaagttttcaagcastgtgaggatagccatttgggatggtggattttttttttttttttttttttttttgagactgagtcttgctctgttgctcaggctggattgcagtagctcc

SEQ ID NO: 300329 - DNA, 201 bp, Homo sapiens
gaactaacgaatggctaaagttagaagtttagaatggaaataaggtctgactcttgaaatccttccagcatctttttctttagcaactctgttccacaggyagtgggagaaaaaaaaaaaaattaagggtaagaataaaagactgaaggagacagctagctaagaacagttcagaaaattagacaaatattttggccacat

SEQ ID NO: 300330 - DNA, 201 bp, Homo sapiens
cgaaaagtggaagatgcagtgagcagagatcacaccactgcactgctacctgggcgacagagtgagtgagaccctgtctcaaaaaaaaaaaaaaaaaaaaaggtgtcatcataattttgttgcttatttccaggagaagagagatctacttgtgatgtttttgggatgtcaaaaagtgtcataataatcctcttacttcag

SEQ ID NO: 300331 - DNA, 201 bp, Homo sapiens
gattataggcatgagctactgcacccagaccaaatgaaaagtttctgtgttttttttttttttttctgtgacttctagccaaagactggatgaaaattttytcttttcttttttttgagacagagtctcactctgtcacccaggctggtgtgcaagtggctcactgcaacctctacctcccaggatcaagcgattctcctg

SEQ ID NO: 300332 - DNA, 201 bp, Homo sapiens
gcctgtgatcccagctagttgagaagctgtggtgggaagatcatttaaggccaggaggtcgaggctacagtgagtcgtaattgcaccactgcactccagcytgagtgacaaaatgagactgtctcaaaaaaaaaaagcaaaattatgatattgatattcttatatgacactttgaaataagttttattgctttatgtcact

SEQ ID NO: 300333 - DNA, 201 bp, Homo sapiens
aggtaattttaatactgcttgctttgttcaaatgtaaagacactcattttcatttaatatttagaaatgatttttaaaccacaaactaatcaatttctacyttgatagcaagaagataatgtggttttatcaagatgagtttcaaagacatttctttttagagtgtgccactattggttacttctgaacctgacactgtgc

SEQ ID NO: 300334 - DNA, 201 bp, Homo sapiens; identical to SEQ ID NO: 62704

SEQ ID NO: 300335 - DNA, 201 bp, Homo sapiens
tacctattatgcttctattgcaaaggcatttgctggagatattgcaaatcagttagctactgatgctgtgcagatacttggaggcaatggatttaatacakaatatcctgtagaaaaactaatgagggatgccaaaatctatcaggtaaggttaaagatgatttttttggtttgcaaggagagagaatattcataaatgac

SEQ ID NO: 300336 - DNA, 201 bp, Homo sapiens
taggaaggatatctaatttttttactttttttttaattattatttttttcatacagagtctccctcttgttgcccaggctggagtgtaatggcgtaatctyggctcactgcaacctctgcctcctgggttcaattgattctcctccctcagcctcccacatagctgggattacaggcacctgccaccatgcctggcctttt

SEQ ID NO: 300337 - DNA, 201 bp, Homo sapiens
cctgtgtaacgcgactgtaaatcagagtagatttggtctgtgactgctggacaataagcaccagagaaactgtttcacttttttttttttttttttttttkagacggagtcttgctctgtcacccaggctggaatgcaatggtgcagtctaggctcactgcaacctccgccttccgggttcaagcgattctcctgcctcag

SEQ ID NO: 300338 - DNA, 201 bp, Homo sapiens
tgaattccagtaatttgctaaagcagctcacagaactcagggaaacacatttaccagtttattaggaaggatatctaatttttttactttttttttaattrttatttttttcatacagagtctccctcttgttgcccaggctggagtgtaatggcgtaatctcggctcactgcaacctctgcctcctgggttcaattgatt

SEQ ID NO: 300339 - DNA, 201 bp, Homo sapiens
ctagaactagaaatgccatttgacccagcaatcccattactgggtatatacccaaaggattataaatcatgctgctataaagacttctatgaccaaagatrtaggaggatttcccacccacaccaagcaacagacactagctgggtatcctccaacttagttctgacactacctacccagagatagcatcagatcccacag

SEQ ID NO: 300340 - DNA, 201 bp, Homo sapiens
gttggtgggactgtaaactagttcaaccattgtggaagacagtgtggcaatttctcaaggatctagaactagaaatgccatttgacccagcaatcccattrctgggtatatacccaaaggattataaatcatgctgctataaagacttctatgaccaaagatgtaggaggatttcccacccacaccaagcaacagacacta

SEQ ID NO: 300341 - DNA, 201 bp, Homo sapiens
aaagaggacacaaacaagtggaagaacattccatgctcatgggtaggaagaatcaatatcgtgaaaatggccatattgcccaaggtaatttatagattcartgccatccccttcaagctaccaatgactttcttcacagaattggaaaaaactactttaaagttcatatggaaccaaaaaagcccacattgcccagacaat

SEQ ID NO: 300342 - DNA, 201 bp, Homo sapiens
aaaatctccttaagcagataagcaacttcagcaaagtctctggatacaaaatcaatgtgcaaaaatcacaagcattcctatacaccaacaacacacatacagagagccaaatcatgagtgaactcccattcacaattgcttcaaagagaataaaatacctaggaatacaacttacaagggatgtgaaggacctcttcaagg

SEQ ID NO: 300343 - DNA, 201 bp, Homo sapiens
caaaatctccttaagcagataagcaacttcagcaaagtctctggatacaaaatcaatgtgcaaaaatcacaagcattcctatacaccaacaacacacatacagagagccaaatcatgagtgaactcccattcacaattgcttcaaagagaataaaatacctaggaatacaacttacaagggatgtgaaggacctcttcaag

SEQ ID NO: 300344 - DNA, 201 bp, Homo sapiens
tgttttaaagataacatgaacttttgctttataatatcttaaaatactaggtagctgctggtgctgttggattagcacaaagagctttggatgaagctacyaagtatgccctggaaaggaaaactttcggaaagctacttgtagaggtaattttaatactgcttgctttgttcaaatgtaaagacactcattttcatttaa

SEQ ID NO: 300345 - DNA, 201 bp, Homo sapiens
ccaaaatctccttaagcagataagcaacttcagcaaagtctctggatacaaaatcaatgtgcaaaaatcacaagcattcctatacaccaacaacacacatacagagagccaaatcatgagtgaactcccattcacaattgcttcaaagagaataaaatacctaggaatacaacttacaagggatgtgaaggacctcttcaa

SEQ ID NO: 300346 - DNA, 201 bp, Homo sapiens
aaccgcctcttcccgccccgccccatcccgcccacgggctccagtgggcgggaccagaggagtcccgcgttcggggagtatgtcaaggccgtgacccgtgyattattgtccgagtggccggaacgggagccaacatggcagcggggttcgggcgatgctgcagggtgagagggagcccagcggtgcggtggggctggaaca

SEQ ID NO: 300347 - DNA, 201 bp, Homo sapiens
cccaaaatctccttaagcagataagcaacttcagcaaagtctctggatacaaaatcaatgtgcaaaaatcacaagcattcctatacaccaacaacacacatacagagagccaaatcatgagtgaactcccattcacaattgcttcaaagagaataaaatacctaggaatacaacttacaagggatgtgaaggacctcttca

SEQ ID NO: 300348 - DNA, 201 bp, Homo sapiens
taattagaagagcctgggaacttggtttaatgaacacacacattccagagaactgtggtaagctttctttatatttttaatactggaatgcatatgagtamgaaaaattgtggaactctactcagtcatttttttcaaatatttcttgccattaaatgactttctacctttgtcttcctgctcagactacagtgtttgccc

SEQ ID NO: 300349 - DNA, 201 bp, Homo sapiens
cttgaatcaataaatgtaatccatcacatacagaaccaacgacaaaaacttatgattatctcaatagatgcagaaaaggccttcagcaaaattcaacagtkcttcatgctaaaaactcaataaactaggtattgatggaatgtatctcaaaataatagctatttatgacaaacccacagccaatatcatactgaatgggca

SEQ ID NO: 300350 - DNA, 201 bp, Homo sapiens
cagactgctattgaaggaaattctttgggggtaagtgacttagaaaattaactacctaactcagctcttgttaatgagatagttactcctgaagaagttgratttttagaagaaaaaaaaaggaaagtcagttactactaggtaaggttagtgggtacacacagttttctttaaagaggaacacaagattcagcagtgaag

SEQ ID NO: 300351 - DNA, 201 bp, Homo sapiens
gagtcttcttggtgtgagcctatgatggagagcgtgagggcagacctgggctctccttctatgatgattacaacacgtgacctcagggaacctctgctctytcctcccattcacacacccagatcccctggcctgtgcttcctggtagaggtagaagaggcatcttgaagtcaatgacaatggagaatgaaggtgccattg

SEQ ID NO: 300352 - DNA, 201 bp, Homo sapiens
aaattcttctgtaggaaaaaatcagcaaatattcataataactcagctataacaaaaacactgacttgctgcataaagaaacagtagttggaacatatggrtctccattttatttatttatttttttgagaacatctgccctttaatttgcatttaaaatcagtttctttaaatactttagttacaagttctgaatagtga

SEQ ID NO: 300353 - DNA, 201 bp, Homo sapiens
ccactgtactccagcctgcgcaacagagtgagatcttgtctaaaaaaaaaaagttatgtaaatgtcctctttgtctttcaaaatatcatatatatactgtrctgcgggtaactgaaaccacagaaagtgaaaccccatggaatgggggagggcctactgtgttattaagacatagacctcaaatactagctcttccatata

SEQ ID NO: 300354 - DNA, 201 bp, Homo sapiens
gaatttgtgccttatccaaagtcacaggtttatgtggtgatactcttcctctcctagagcctttaattataattattactattattatcatcaacagtttrgcttttctctgccatctgagaagatgaactaacgaatggctaaagttagaagtttagaatggaaataaggtctgactcttgaaatccttccagcatcttt

SEQ ID NO: 300355 - DNA, 201 bp, Homo sapiens
cttctattgcaaaggcatttgctggagatattgcaaatcagttagctactgatgctgtgcagatacttggaggcaatggatttaatacagaatatcctgtrgaaaaactaatgagggatgccaaaatctatcaggtaaggttaaagatgatttttttggtttgcaaggagagagaatattcataaatgacaacgtggattt

SEQ ID NO: 300356 - DNA, 201 bp, Homo sapiens
aagcagtcctcttatttcagcctcccaaagtgctgggattataggcatgagctactgcacccagaccaaatgaaaagtttctgtgtttttttttttttttyctgtgacttctagccaaagactggatgaaaattttctcttttcttttttttgagacagagtctcactctgtcacccaggctggtgtgcaagtggctcact

SEQ ID NO: 300357 - DNA, 201 bp, Homo sapiens
aatgaaatttttcttttctttttctttctttcttttttcttttttttttttttttttaagatgaggtttcattgtctcattatgttgcccaggccgatctygaactcctaggctcaagcagtcctcttatttcagcctcccaaagtgctgggattataggcatgagctactgcacccagaccaaatgaaaagtttctgtgt

SEQ ID NO: 300358 - DNA, 201 bp, Homo sapiens
aaggattgaggaattataatagcctgggaaagaataagaagaaataactaaattcaacgtataatggtggaaaaagaacattagtagaaaacttgaccagrtttgagtaaggcttatagtttagttgttaatactataccagtgttaatgtcctgttctcgatcatggcactatggtttggtaatatgttaacattagagg

SEQ ID NO: 300359 - DNA, 201 bp, Homo sapiens
ttggccttctaaagtgcttcttcaaaatttttattttttctctagttaaaaaccatttactcaatttatttggtctcagaaaatagttaaaggcagctgcrataactcacagctaggtacaaatgacaatctcaaagctctccagagttattttttttattatttgttgtgttttttaaagatttttcccttttctttata

SEQ ID NO: 300360 - DNA, 201 bp, Homo sapiens
tctggaagtaggggaatccgaggcagggcaaccaccagggtgacccaatgtgctcccacccccaggcctggtccaccttcatccgtatcatggaccccgaygtgatcaccggttacaacatccagaacttcgaccttccgtacctcatctctcgggcccagaccctcaaggtgagggctgggcaggtgggaggcttctctc

SEQ ID NO: 300361 - DNA, 201 bp, Homo sapiens
cagccttggctgcagcttagtccttactccggactccctccccagtctccagccacccacacccagccccagaccgtctttctgcccccagggttgctctygaccccctagggttgttataaggatgttgtggttggtctcaatctccgttcttcaggcttatgtgacggggacccgcagcctgctgcacaccctgcctct

SEQ ID NO: 300362 - DNA, 201 bp, Homo sapiens
tctttctgcccccagggttgctctcgaccccctagggttgttataaggatgttgtggttggtctcaatctccgttcttcaggcttatgtgacggggacccrcagcctgctgcacaccctgcctctcctcctcaggtacaaacattccctttcctgggccgtgtggccggcctttgctccaacatccgggactcttcattcc

SEQ ID NO: 300363 - DNA, 201 bp, Homo sapiens
cctgtgttacaccacgctccttcggcccgggactgcacagaaactggggtatagtgcccaattcagcatgtgtcccccgaggcccatctgggccttccctyggggggctcagtctggtggggggcataggcacaggcccagagatagtagggagtggaggggtgcttgaggggcctgcgtgtgctcatggccaaggccagg

SEQ ID NO: 300364 - DNA, 201 bp, Homo sapiens
tgtctccggtcagaacctccaccaagctccaacttgcccagcaggatggatggcaagcggcggccaggcccagggcccggggtgcccccaaagcgggcccrtgggggcctctgggatgatgatgatgcacctcggccatcccaattcgaggaggacctggcactgatggaggagatggaggcagaacacaggctgcaggag

SEQ ID NO: 300365 - DNA, 201 bp, Homo sapiens
gcttggagttggaggttcctgctgcccaacccattgcccctggtcttgcctttggtccaagagtcagctgcaaagctgacctgtgaccccactctggccarttttgaatcctacaaaggactgcccttccaccccgtgcagcctgtgtggcctacagtgattctggccctgacccttgaccctcattctcttccaagtttc

SEQ ID NO: 300366 - DNA, 201 bp, Homo sapiens
attgcgcccttgcgcgtgctcagcttcgatatcgagtgcgccggccgcaaaggtctgtccccgggcccgggctcctgcccgcctcattgatgtgccaagtygggggtcggaaaggcaggtccggtggagggaatggcaagcatgaaggtgccggggcaggagcaccccagcccatgtggccagatggagtgagcacagagg

SEQ ID NO: 300367 - DNA, 201 bp, Homo sapiens
gactctcgctatcccagccttggctgcagcttagtccttactccggactccctccccagtctccagccacccacacccagccccagaccgtctttctgccyccagggttgctctcgaccccctagggttgttataaggatgttgtggttggtctcaatctccgttcttcaggcttatgtgacggggacccgcagcctgctg

SEQ ID NO: 300368 - DNA, 201 bp, Homo sapiens
aggtagctctcgctccacgccccacaccatttcccggggtccccgccagcctccgcgtcctgagccatcagctcctgggtgctgcgacgcccatgtctgtkggtctgggtgggtgtctgtgggtctgggtgggcccctgtgcaattaggcttgagcacttcccctctgggttctgcaggattttcaggggtggctggggtt

SEQ ID NO: 300369 - DNA, 201 bp, Homo sapiens
cgtcctgagccatcagctcctgggtgctgcgacgcccatgtctgtgggtctgggtgggtgtctgtgggtctgggtgggcccctgtgcaattaggcttgagsacttcccctctgggttctgcaggattttcaggggtggctggggttctagaacattctggaagtaggggaatccgaggcagggcaaccaccagggtgaccc

SEQ ID NO: 300370 - DNA, 201 bp, Homo sapiens
acctccacctcacccttccccggcctctgacctcaacttcacgcccccacgtctgacctcactctttgacctgctgttatgacctgtgaccttacctgacrcccactttttcctgacctctgaccccagatttctctccactcctgtgacctctgtcactatgaccttgtctctgctttcctggcctgaccacaggtccac

SEQ ID NO: 300371 - DNA, 201 bp, Homo sapiens
atctgaatgccctggaggagcgcttctcgcgcctctggacgcagtgccagcgctgccagggcagcctgcacgaggacgtcatctgcaccaggtgtgtgccrtgtcccgaccctgggctgccccgccccttcccagctcccaggcctgtgggttgtggacccaacctctgactccaaggcctctcctgagcatcctccccgc

SEQ ID NO: 300372 - DNA, 201 bp, Homo sapiens
tgggtgaattgtatagtatgtgaattatagctcaataaagcagttagcaaatgaagtcttctaccctgtcccccaggaaaccagtttcttagctctccttrtagaatgatgcattaaaagcaaatagatttatacatatgccctgcattacaataaaaaagacgtctacatactccctgcattacaataaaaaagacgtct

SEQ ID NO: 300373 - DNA, 201 bp, Homo sapiens
agcagttagcaaatgaagtcttctaccctgtcccccaggaaaccagtttcttagctctccttatagaatgatgcattaaaagcaaatagatttatacataygccctgcattacaataaaaaagacgtctacatactccctgcattacaataaaaaagacgtctacatactccctgcattaaaagcaaaaagatttctacat

SEQ ID NO: 300374 - DNA, 201 bp, Homo sapiens
tatattctttatgtattaatttatgtataacatatattatatattaatatattttgtagagacaaatatatttatttgtacatataatatgtgtgtgtatktgtgtatatgtgtatatatatatatatatatatatatatattttttttttttttttttttcttttttttgagactgggtctcgctcttttgcccaggctg

SEQ ID NO: 300375 - DNA, 201 bp, Homo sapiens
gctccgcgccttcggggtcaccgatgaggggttctctgtctgctgccacatccacggcttcgctccctacttctacaccccagcgccccctggtgagtggyccctacccagcccctccctgagccactggagccccctgcacctctgatcatccctcccacaccaggtttcgggcccgagcacatgggtgacctgcaacgg

SEQ ID NO: 300376 - DNA, 201 bp, Homo sapiens
ggaggtagagcttgcagtgagccgagatcatgccattgcactccagcctgggtgacaagagcacaattccatctcaaaaaaaaaaaaaaaaaaaaaaagcragagatgtgctaaggacctagtgtgatgggagagagggtcggggagtcgacggggctgctgctgcagtagctaacaattgagcgtctggaatgtgctccc

SEQ ID NO: 300377 - DNA, 201 bp, Homo sapiens
gaggagcattgctagtgctgcagagcatgcaccagggcctcgctccctcattgtcccacaatctctgggggacctctctgtatttcccgacatctgtccaraccccaccctctccccttcctcttactccggccctttcaccacccgagacggtcccagtaacccttttagtatgagcttagcagggcagggctgcaggga

SEQ ID NO: 300378 - DNA, 201 bp, Homo sapiens
gagccactggagccccctgcacctctgatcatccctcccacaccaggtttcgggcccgagcacatgggtgacctgcaacgggagctgaacttggccatcarccgggacagtcgcggggggagggagctgactgggccggccgtgctggctgtggaactgtgctcccgagagagtgagtgctcccccaggatcagcgggttg

SEQ ID NO: 300379 - DNA, 201 bp, Homo sapiens
  misc_feature (1)...(201): n = A,T,C or G
cgggacagtcgcggggggagggagctgactgggccggccgtgctggctgtggaactgtgctcccgagagagtgagtgctcccccaggatcagcgggttggngggtcccctcgggaggccattggctggtcccagcttcttccatccacaggcatgtttgggtaccacgggcacggcccctccccgttcctgcgcatcaccg

SEQ ID NO: 300380 - DNA, 201 bp, Homo sapiens
cgctcactgcatgctcccaactcccctctgcctttcacagtccccggctgcctccccagcctccttggtggaaaggggtggctgtgtggacatcaggctcyagccctgaagcagaggccaggccaagagagcacagcttggccctcccctggggctgcctcttaccaatcctgtgtctctgtcttttctctctcagccgct

SEQ ID NO: 300381 - DNA, 201 bp, Homo sapiens
tgctgctgcgggagtacaagctccgctcctacacgctcaatgccgtgagcttccacttcctgggcgagcagaaggaggacgtgcagcacagcatcatcacygacctgcaggtgcctgctgcctccctgacctctcaccccaacctctgacctccacctcacccttccccggcctctgacctcaacttcacgcccccacgtc

SEQ ID NO: 300382 - DNA, 201 bp, Homo sapiens
cagtgcacagtacgcccaaccgtacatggcactcacttccagaaaggagccctgaccaatgcccaggtgccgcctgagtgtgctttccccgtgttccctcrcagggccaaggccgagctggccaaggagacagaccccctccggcgccaggtcctggatggacggcagctggcgctgaaggtgagcgccaactccgtatac

SEQ ID NO: 300383 - DNA, 201 bp, Homo sapiens
gctccacctcccacccccaacccctggtccctgaccccatccgtgcccatccccagaatgggaacgaccagacccgccgccgcctggctgtgtactgcctraaggatgcctacctgccactgcggctgctggagcggctcatggtgctggtgaacgccgtggagatggcgagggtcactggcgtgcccctcagctacctgc

SEQ ID NO: 300384 - DNA, 201 bp, Homo sapiens
ccctcagctgtgcgtgaattagcacaaggcatcccctcctggcagcttccttttgcccccttggccagaagcttctgtgcagtgcacagtacgcccaaccrtacatggcactcacttccagaaaggagccctgaccaatgcccaggtgccgcctgagtgtgctttccccgtgttccctcgcagggccaaggccgagctggc

SEQ ID NO: 300385 - DNA, 201 bp, Homo sapiens
ccctgcccactctcctgttgcatccttgggtcccgttggcattagccacctgccaccccccgacaccagtagttgacagaagggaccctgcttctcacatrcacacatccccaccgcccgcaggtggtgtatggtgacactgactccgtcatgtgccgattcggcgtgtcctcggtggctgaggcgatggccctggggcgg

SEQ ID NO: 300386 - DNA, 201 bp, Homo sapiens
aagaaagaggtgcacagggcagggtataggagggaccaggcgtgtcttccagttgtgctctcccagtagagttgccaggctggccctccttcctcccagtkttgatgcgtgcctgcacacatgcagcattgccaaccagaggctctcacccaagctttggggtccagggtttttcttgggtgtcagtcctataggcatgga

SEQ ID NO: 300387 - DNA, 201 bp, Homo sapiens
accctgacgacttggagggccctcctgcccgcctcacctcccaggccctccccaggctacctcaccctgacccccacttccttctcctgctccacctcccrcccccaacccctggtccctgaccccatccgtgcccatccccagaatgggaacgaccagacccgccgccgcctggctgtgtactgcctgaaggatgcctac

SEQ ID NO: 300388 - DNA, 201 bp, Homo sapiens
acccagccccagaccgtctttctgcccccagggttgctctcgaccccctagggttgttataaggatgttgtggttggtctcaatctccgttcttcaggctkatgtgacggggacccgcagcctgctgcacaccctgcctctcctcctcaggtacaaacattccctttcctgggccgtgtggccggcctttgctccaacatc

SEQ ID NO: 300389 - DNA, 201 bp, Homo sapiens
tgggccccagcaccctgcaaggcctcctgcagccaggcgccctccagcgccctcagcatccatctcagcccagctccacgccgcctcctgcctctgccccmacctggccgcctgctcacagtgtccccaaatctcttcctgtttcctgcctaggtacagcccgcagacactgggctccatccttggcccccagtccatcag

SEQ ID NO: 300390 - DNA, 201 bp, Homo sapiens
ggggaggctgaaatggacacagggaacggtacaggggcaggagtgccccaggctgcaggccccaaggtatttcgaggctgtggagacacaccttggaggaycctgagaggcatggccgctgtcttaccctgtgaccccacaggcccagcgcagcctgtgcctggggggcccccaccatcccgcggctccgtgcctgtgctc

SEQ ID NO: 300391 - DNA, 201 bp, Homo sapiens
ccccctgcacctctgatcatccctcccacaccaggtttcgggcccgagcacatgggtgacctgcaacgggagctgaacttggccatcagccgggacagtcrcggggggagggagctgactgggccggccgtgctggctgtggaactgtgctcccgagagagtgagtgctcccccaggatcagcgggttggagggtcccctc

SEQ ID NO: 300392 - DNA, 201 bp, Homo sapiens
aacagggcatccgtgtggcaggcctgggcacgcccagcttcgcgccctacgaggccaacgtcgactttgagatccggtacggcctctgcctcacttctccrgcctctatccccaccctcgggcagcccctgtccactgacccccagccccctccaggttcatggtggacacggacatcgtcggctgcaactggctggagct

SEQ ID NO: 300393 - DNA, 201 bp, Homo sapiens
ggtccggtggagggaatggcaagcatgaaggtgccggggcaggagcaccccagcccatgtggccagatggagtgagcacagagggtgtggagatggcctgkaggtgagagcagagcaggagccagggtgagccacgtagggccggcaggcagcggggacagccccggggagatggcaggtgcagcctccctgctgtgttgg

SEQ ID NO: 300394 - DNA, 201 bp, Homo sapiens
ggtggagtaagagaaggctgtgcattcaaggtcggcctgaagcttgcaggggttcaacaagccatgaagcagccactgaatcccagtcttcctttaggttmtatcagcataaggaaaagaatcataatggaggaggaggggggagtgtgttgactgatggggcaaattccggatgcttcttgagtctgcatgtgtgtaagg

SEQ ID NO: 300395 - DNA, 201 bp, Homo sapiens
ctccccagtctccagccacccacacccagccccagaccgtctttctgcccccagggttgctctcgaccccctagggttgttataaggatgttgtggttggyctcaatctccgttcttcaggcttatgtgacggggacccgcagcctgctgcacaccctgcctctcctcctcaggtacaaacattccctttcctgggccgtg

SEQ ID NO: 300396 - DNA, 201 bp, Homo sapiens
atccccaccctcgggcagcccctgtccactgacccccagccccctccaggttcatggtggacacggacatcgtcggctgcaactggctggagctcccagcygggaaatacgccctgaggctgaaggagaaggtgcagggcttcccagggcagggctgggtggggagctggtaccctgctgccaccgctgacccacccatgc

SEQ ID NO: 300397 - DNA, 201 bp, Homo sapiens
ccggaagggccatggcagcgcattgcgcccttgcgcgtgctcagcttcgatatcgagtgcgccggccgcaaaggtctgtccccgggcccgggctcctgccygcctcattgatgtgccaagtcgggggtcggaaaggcaggtccggtggagggaatggcaagcatgaaggtgccggggcaggagcaccccagcccatgtggc

SEQ ID NO: 300398 - DNA, 201 bp, Homo sapiens
ggtctgtccccgggcccgggctcctgcccgcctcattgatgtgccaagtcgggggtcggaaaggcaggtccggtggagggaatggcaagcatgaaggtgcyggggcaggagcaccccagcccatgtggccagatggagtgagcacagagggtgtggagatggcctggaggtgagagcagagcaggagccagggtgagccac

SEQ ID NO: 300399 - DNA, 201 bp, Homo sapiens
  misc_feature (1)...(201): n = A,T,C or G
ggaggagatggaggcagaacacaggctgcaggagcaggaggaggaggagctgcagtcagtcctggagggggttgcagacggtaaggcttggagttggaggntcctgctgcccaacccattgcccctggtcttgcctttggtccaagagtcagctgcaaagctgacctgtgaccccactctggccaattttgaatcctacaa

SEQ ID NO: 300400 - DNA, 201 bp, Homo sapiens
acaggctgcaggagcaggaggaggaggagctgcagtcagtcctggagggggttgcagacggtaaggcttggagttggaggttcctgctgcccaacccattrcccctggtcttgcctttggtccaagagtcagctgcaaagctgacctgtgaccccactctggccaattttgaatcctacaaaggactgcccttccaccccg

SEQ ID NO: 300401 - DNA, 201 bp, Homo sapiens
gcagatggcctgggcagatgggtggttggtaggcgaggtatcggagacagaggtttatggaaaataaagagatgtgccaaggccgggcgcggagactcagkcctgtaatctcagcactttgggaggctgaggcgagtggatcacctgaggtcaggagttcgagaccagcctggccaacatggcaaaaccccgtctctactc

SEQ ID NO: 300402 - DNA, 201 bp, Homo sapiens
ctcccaccccactgcctgcagggtgcagagagctatgttagtacagccagtccagagtaggaaaaggctcgtggtcatggtgggtgcatgggatgccatgsagacagggtaagaggtgtctccggtcagaacctccaccaagctccaacttgcccagcaggatggatggcaagcggcggccaggcccagggcccggggtgc

SEQ ID NO: 300403 - DNA, 201 bp, Homo sapiens
ctggccctgacccttgaccctcattctcttccaagtttcctgcctgacccagaccaccacctctgcctggctcctttcagaaccacatgccatcctggccrgggaagaccatgactccatgtactccacttccttcccttcccccaccagggcaggtcccaccatcagccatagatcctcgctggcttcggcccacaccac

SEQ ID NO: 300404 - DNA, 201 bp, Homo sapiens
tccgggccctgggcctccttcccactccctctccacatggcttggtgcatcttgctctgtgtgcctcagccgattgcctgcaggggcagcctaggcctggycctgccctgctccaagtcgaaaaagttactgtggcttttatcagaggcaaggagggcgttacggtggagtaagagaaggctgtgcattcaaggtcggcct

SEQ ID NO: 300405 - DNA, 201 bp, Homo sapiens
ggcctctgcctcacttctccggcctctatccccaccctcgggcagcccctgtccactgacccccagccccctccaggttcatggtggacacggacatcgtyggctgcaactggctggagctcccagctgggaaatacgccctgaggctgaaggagaaggtgcagggcttcccagggcagggctgggtggggagctggtacc

SEQ ID NO: 300406 - DNA, 201 bp, Homo sapiens
ctgggtgccaaggtgcagagctacgagaaggaggaggacctgctgcaggtagctctcgctccacgccccacaccatttcccggggtccccgccagcctccrcgtcctgagccatcagctcctgggtgctgcgacgcccatgtctgtgggtctgggtgggtgtctgtgggtctgggtgggcccctgtgcaattaggcttgag

SEQ ID NO: 300407 - DNA, 201 bp, Homo sapiens
tgctccgcgccttcggggtcaccgatgaggggttctctgtctgctgccacatccacggcttcgctccctacttctacaccccagcgccccctggtgagtgkcccctacccagcccctccctgagccactggagccccctgcacctctgatcatccctcccacaccaggtttcgggcccgagcacatgggtgacctgcaacg

SEQ ID NO: 300408 - DNA, 201 bp, Homo sapiens
ggagacacaccttggaggaccctgagaggcatggccgctgtcttaccctgtgaccccacaggcccagcgcagcctgtgcctggggggcccccaccatcccrcggctccgtgcctgtgctccgcgccttcggggtcaccgatgaggggttctctgtctgctgccacatccacggcttcgctccctacttctacaccccagcg

SEQ ID NO: 300409 - DNA, 201 bp, Homo sapiens
aggctgcaggccccaaggtatttcgaggctgtggagacacaccttggaggaccctgagaggcatggccgctgtcttaccctgtgaccccacaggcccagcrcagcctgtgcctggggggcccccaccatcccgcggctccgtgcctgtgctccgcgccttcggggtcaccgatgaggggttctctgtctgctgccacatcc

SEQ ID NO: 300410 - DNA, 201 bp, Homo sapiens
agttctgccagccccgggagtctgagctgtatcagaaggaggtgagagggccgggaggtgaggaggggccaggtggggaggcgggggcgccctgctcagcygctgccgtccccaggtatcccatctgaatgccctggaggagcgcttctcgcgcctctggacgcagtgccagcgctgccagggcagcctgcacgaggacgt

SEQ ID NO: 300411 - DNA, 201 bp, Homo sapiens
cagaggccgggccaggtcagcccctctggctctgcccctctggttgccatagagctgtagtgacagaacagaccagtgggtgccaggggttgtggagtgcsaagcgaaggtgacacagggtcagcttgagggaggtgcttggagcgttgatctgttttgcatacgtagtagctgcagcctgtgcaaggacctctgtgcctt

SEQ ID NO: 300412 - DNA, 201 bp, Homo sapiens
caggtggctgaggcacaagaatcctttcaacctgggaggtggttgaaatataaatataagatatatatatatgatatattctttatgtattaatttatgtrtaacatatattatatattaatatattttgtagagacaaatatatttatttgtacatataatatgtgtgtgtatttgtgtatatgtgtatatatatatata

SEQ ID NO: 300413 - DNA, 201 bp, Homo sapiens
ctctagccctgaagcagaggccaggccaagagagcacagcttggccctcccctggggctgcctcttaccaatcctgtgtctctgtcttttctctctcagcygcttccctctgtcactgttctgtttctgtctcttgacctctttccttatttctgtctctcaagcttatgggagcaagaggtggaataataaaaatgcaat

SEQ ID NO: 300414 - DNA, 201 bp, Homo sapiens
atcgagtgcgccggccgcaaaggtctgtccccgggcccgggctcctgcccgcctcattgatgtgccaagtcgggggtcggaaaggcaggtccggtggaggraatggcaagcatgaaggtgccggggcaggagcaccccagcccatgtggccagatggagtgagcacagagggtgtggagatggcctggaggtgagagcaga

SEQ ID NO: 300415 - DNA, 201 bp, Homo sapiens
cagagggtgtggagatggcctggaggtgagagcagagcaggagccagggtgagccacgtagggccggcaggcagcggggacagccccggggagatggcagstgcagcctccctgctgtgttgggagtgaggggcaggagtcaggcccctgcatcctcctgcctcgcaggcatcttccctgagcctgagcgggaccctgtca

SEQ ID NO: 300416 - DNA, 201 bp, Homo sapiens
cccatgtggccagatggagtgagcacagagggtgtggagatggcctggaggtgagagcagagcaggagccagggtgagccacgtagggccggcaggcagcrgggacagccccggggagatggcaggtgcagcctccctgctgtgttgggagtgaggggcaggagtcaggcccctgcatcctcctgcctcgcaggcatcttc

SEQ ID NO: 300417 - DNA, 201 bp, Homo sapiens
gagatcgcgccaccgcactccagcctgggagacagagcgagactccgtctccaaaaaaaaaaaaaaatagtgtaaagaacacctgcacgccctttgcccaratcacctgtttcaacattctgtcctatttatgatttgcatggatgtttcttatctcccttctctctgtatacgtacactcactttttacaaagaattccc

SEQ ID NO: 300418 - DNA, 201 bp, Homo sapiens
accacatgccatcctggccggggaagaccatgactccatgtactccacttccttcccttcccccaccagggcaggtcccaccatcagccatagatcctcgstggcttcggcccacaccaccagcgctggacccccagacagagcccctcatcttccaacagttggagattgaccattatgtgggtgagtttaggggttatg

SEQ ID NO: 300419 - DNA, 201 bp, Homo sapiens
  misc_feature (1)...(201): n = A,T,C or G
cgtagggccggcaggcagcggggacagccccggggagatggcaggtgcagcctccctgctgtgttgggagtgaggggcaggagtcaggcccctgcatcctnctgcctcgcaggcatcttccctgagcctgagcgggaccctgtcatccagatctgctcgctgggcctgcgctggggggagccggagcccttcctacgcctg

SEQ ID NO: 300420 - DNA, 201 bp, Homo sapiens
actggatccacacaaacaaaaacagaagaatcacacccatctctccttggtgtccccacccccagcctcaggtttggtggtggtggtggtggtggtggtgktgttgtttaagtattttttagttttgtgtgtgtgtgtgtgtgtatttttagtagagatggtgtttcaccatgttgtccaggctgatctcgaactcctgac

SEQ ID NO: 300421 - DNA, 201 bp, Homo sapiens
actcttaggacccccagtgtatattccacagcgtggcgctgatgcccgggccatggtactcctcctccccttccctgggtgtccctcaccctctgccctgkccccagctcaggcttcttctggcctcagtctcccccaggctgggccccagcaccctgcaaggcctcctgcagccaggcgccctccagcgccctcagcatc

SEQ ID NO: 300422 - DNA, 201 bp, Homo sapiens
cgcttcggaccccctggacctgaggcctggtgaccttgcaagcatcccatggggcgggggcgggaccagggagaattaataaagttctggacttttgctayatggtgctttgtggtctctgggggacactgtctggtttcataagccctggccttggctgggaccctcctgaggcccgcaccgcccctcatcctcagcaaa

SEQ ID NO: 300423 - DNA, 201 bp, Homo sapiens
cggactccctccccagtctccagccacccacacccagccccagaccgtctttctgcccccagggttgctctcgaccccctagggttgttataaggatgttrtggttggtctcaatctccgttcttcaggcttatgtgacggggacccgcagcctgctgcacaccctgcctctcctcctcaggtacaaacattccctttcct

SEQ ID NO: 300424 - DNA, 201 bp, Homo sapiens
ggtgggttcccacgccaggtgacaggtgatatacggccagccatggccctgcacctcgccaggcacccgctgttatcggctccccccccccaccccccccstgcctgctgagcaaacagcccgctgcgggagggggcgggtgggctgggcagcaggcggggaccaaagtcctgggaacagcccccacccctctcccaggct

SEQ ID NO: 300425 - DNA, 201 bp, Homo sapiens
agggaacgggtaggcggggtgggttcccacgccaggtgacaggtgatatacggccagccatggccctgcacctcgccaggcacccgctgttatcggctccscccccccaccccccccgtgcctgctgagcaaacagcccgctgcgggagggggcgggtgggctgggcagcaggcggggaccaaagtcctgggaacagcccc

SEQ ID NO: 300426 - DNA, 201 bp, Homo sapiens
cttctcgcgcctctggacgcagtgccagcgctgccagggcagcctgcacgaggacgtcatctgcaccaggtgtgtgccatgtcccgaccctgggctgcccygccccttcccagctcccaggcctgtgggttgtggacccaacctctgactccaaggcctctcctgagcatcctccccgcccatccccttccagctgtgagc

SEQ ID NO: 300427 - DNA, 201 bp, Homo sapiens
tgtgagttctgccagccccgggagtctgagctgtatcagaaggaggtgagagggccgggaggtgaggaggggccaggtggggaggcgggggcgccctgctyagccgctgccgtccccaggtatcccatctgaatgccctggaggagcgcttctcgcgcctctggacgcagtgccagcgctgccagggcagcctgcacgagg

SEQ ID NO: 300428 - DNA, 201 bp, Homo sapiens
ggtgagccacgtagggccggcaggcagcggggacagccccggggagatggcaggtgcagcctccctgctgtgttgggagtgaggggcaggagtcaggcccytgcatcctcctgcctcgcaggcatcttccctgagcctgagcgggaccctgtcatccagatctgctcgctgggcctgcgctggggggagccggagcccttc

SEQ ID NO: 300429 - DNA, 201 bp, Homo sapiens
gtaaatttgttactattttcattttatatatttcccccttaatattttgaaaagtttcaaacctgcagagaaggtacaaattgagtacagtgaacagccayggccctttgcctagattcactggctgttggcatgacacctcatttgctttatgctttatccaagcacatgcatatacctgtaccttttgtcctttttttg

SEQ ID NO: 300430 - DNA, 201 bp, Homo sapiens
ggatgtccgcctgcagaactacagtgtcattgtcatcatcatgcagtttaacatgagacagtgacgttattgaatagacgattcttatttagatctgccaygtgtccctgtaatattcttcaaggctataaataatttcttattttttttttttttccaagactgagtcttgctctatcgcccaggctggagtgcagtggc

SEQ ID NO: 300431 - DNA, 201 bp, Homo sapiens
ctcctgcgcatcttcgagcccatcctgggcgagggccgtgccgaggctgtgctactgcgtacgggggcaccaggggactgggggcaccctgggggggcagrggagatcaccggcccaccacctgcctcctctcctgcagggggggaccacacgcgctgcaagacggtgctcacgggcaaggtgggcggcctcctggccttc

SEQ ID NO: 300432 - DNA, 201 bp, Homo sapiens
agtttttcttatgtgataatatatctacagcgtacgtccctagatgtggaattgagcctccaaacttttatgtttataattgaggtggcatttacatggcrtgccatgcccaggtctccagtgtacagtcagctgtatagtgtgttttatcaccccagaaaccccctcatacccttcccagtctctcctaccctaggagca

SEQ ID NO: 300433 - DNA, 201 bp, Homo sapiens
gtactacctggagcagcagctggccaagcccctcctgcgcatcttcgagcccatcctgggcgagggccgtgccgaggctgtgctactgcgtacgggggcaycaggggactgggggcaccctgggggggcagaggagatcaccggcccaccacctgcctcctctcctgcagggggggaccacacgcgctgcaagacggtgct

SEQ ID NO: 300434 - DNA, 201 bp, Homo sapiens
accttataaatgcagtttttcttatgtgataatatatctacagcgtacgtccctagatgtggaattgagcctccaaacttttatgtttataattgaggtgkcatttacatggcgtgccatgcccaggtctccagtgtacagtcagctgtatagtgtgttttatcaccccagaaaccccctcatacccttcccagtctctcc

SEQ ID NO: 300435 - DNA, 201 bp, Homo sapiens
ggagactcagtcctgtaatctcagcactttgggaggctgaggcgagtggatcacctgaggtcaggagttcgagaccagcctggccaacatggcaaaacccygtctctactcaaaacacaaaaattagctgggtgtggtggtgggcgcctgtaatcccagctactcgggaggctgaggggagaatcgcttgaacctgggagg

SEQ ID NO: 300436 - DNA, 201 bp, Homo sapiens
tcgcttgaacccaggaggcagaggttgcagtgagccgagattgcgccagtgcgctccagcctgggcaacagagcaaaactccgtctcaaaaaaaaaaaaaagtaatgaattacagtgttcacgcctgtaatcccaacactttgtgacactgaggagggaggatcacttgaggccaggggtttaagaccagcctgggcaaca

SEQ ID NO: 300437 - DNA, 201 bp, Homo sapiens
tactgcatggcccagggccctaccataaaccatgttagtgtcaactacctggtgtggttcaaagtcccaggtacacaaacaccttttttttttttttttttgagacagagtctcactctctcacccaggctggagcgcagtggcacaatcgtggctcactgcagcctcaacctccgggactcaggtgagcctcccacgtta

SEQ ID NO: 300438 - DNA, 201 bp, Homo sapiens
ttttgttttttgttttgttttttttttcttttttgaaacagagcctcattgtcacccaggctggagtgcagtggtgcgatcttggctcactgcaacctccrcctcccaggttcaatcaattctcctgcctcagcctcccgagtagctaggattacaggcgcctggcaccacgcccagctaatttttatatttttagtagag

SEQ ID NO: 300439 - DNA, 201 bp, Homo sapiens
atactgcatggcccagggccctaccataaaccatgttagtgtcaactacctggtgtggttcaaagtcccaggtacacaaacaccttttttttttttttttttgagacagagtctcactctctcacccaggctggagcgcagtggcacaatcgtggctcactgcagcctcaacctccgggactcaggtgagcctcccacgtt

SEQ ID NO: 300440 - DNA, 201 bp, Homo sapiens
tcccaaagtgctaggattacaggcgtgagccaccatgtccagcctgtttttttttttgttttttgttttgttttttttttcttttttgaaacagagcctcrttgtcacccaggctggagtgcagtggtgcgatcttggctcactgcaacctccacctcccaggttcaatcaattctcctgcctcagcctcccgagtagcta

SEQ ID NO: 300441 - DNA, 201 bp, Homo sapiens
ccccagaggtcaaactgatactgcatggcccagggccctaccataaaccatgttagtgtcaactacctggtgtggttcaaagtcccaggtacacaaacaccttttttttttttttttttgagacagagtctcactctctcacccaggctggagcgcagtggcacaatcgtggctcactgcagcctcaacctccgggactca

SEQ ID NO: 300442 - DNA, 201 bp, Homo sapiens
tcttgagatggaatttcgctcttgttgcccaggctggagtgcaatggcacgatcttggctcaccacaacctccgcctcccagggggcgctggggtgtagaagtgattctcctgcctcagcctcccaagtagctgggattataggcacccgcttccatgcccgactaattttgtatttttagtagacagggtttctccatgt

SEQ ID NO: 300443 - DNA, 201 bp, Homo sapiens
tgtttcttgagatggaatttcgctcttgttgcccaggctggagtgcaatggcacgatcttggctcaccacaacctccgcctcccagggggcgctggggtgyagaagtgattctcctgcctcagcctcccaagtagctgggattataggcacccgcttccatgcccgactaattttgtatttttagtagacagggtttctcc

SEQ ID NO: 300444 - DNA, 201 bp, Homo sapiens
ttgtttcttgagatggaatttcgctcttgttgcccaggctggagtgcaatggcacgatcttggctcaccacaacctccgcctcccagggggcgctggggtgtagaagtgattctcctgcctcagcctcccaagtagctgggattataggcacccgcttccatgcccgactaattttgtatttttagtagacagggtttctc

SEQ ID NO: 300445 - DNA, 201 bp, Homo sapiens
tattgtttcttgagatggaatttcgctcttgttgcccaggctggagtgcaatggcacgatcttggctcaccacaacctccgcctcccagggggcgctggggtgtagaagtgattctcctgcctcagcctcccaagtagctgggattataggcacccgcttccatgcccgactaattttgtatttttagtagacagggtttc

SEQ ID NO: 300446 - DNA, 201 bp, Homo sapiens
ccactgcctgcagggtgcagagagctatgttagtacagccagtccagagtaggaaaaggctcgtggtcatggtgggtgcatgggatgccatggagacaggstaagaggtgtctccggtcagaacctccaccaagctccaacttgcccagcaggatggatggcaagcggcggccaggcccagggcccggggtgcccccaaag

SEQ ID NO: 300447 - DNA, 201 bp, Homo sapiens
cttgcccagcaggatggatggcaagcggcggccaggcccagggcccggggtgcccccaaagcgggcccgtgggggcctctgggatgatgatgatgcacctyggccatcccaattcgaggaggacctggcactgatggaggagatggaggcagaacacaggctgcaggagcaggaggaggaggagctgcagtcagtcctgga

SEQ ID NO: 300448 - DNA, 201 bp, Homo sapiens
ccaccccgtgcagcctgtgtggcctacagtgattctggccctgacccttgaccctcattctcttccaagtttcctgcctgacccagaccaccacctctgcstggctcctttcagaaccacatgccatcctggccggggaagaccatgactccatgtactccacttccttcccttcccccaccagggcaggtcccaccatca

SEQ ID NO: 300449 - DNA, 201 bp, Homo sapiens
tgcagggtgcagagagctatgttagtacagccagtccagagtaggaaaaggctcgtggtcatggtgggtgcatgggatgccatggagacagggtaagaggygtctccggtcagaacctccaccaagctccaacttgcccagcaggatggatggcaagcggcggccaggcccagggcccggggtgcccccaaagcgggcccg

SEQ ID NO: 300450 - DNA, 201 bp, Homo sapiens
gaacagggcatccgtgtggcaggcctgggcacgcccagcttcgcgccctacgaggccaacgtcgactttgagatccggtacggcctctgcctcacttctcyggcctctatccccaccctcgggcagcccctgtccactgacccccagccccctccaggttcatggtggacacggacatcgtcggctgcaactggctggagc

SEQ ID NO: 300451 - DNA, 201 bp, Homo sapiens
tgccatggagacagggtaagaggtgtctccggtcagaacctccaccaagctccaacttgcccagcaggatggatggcaagcggcggccaggcccagggccyggggtgcccccaaagcgggcccgtgggggcctctgggatgatgatgatgcacctcggccatcccaattcgaggaggacctggcactgatggaggagatgg

SEQ ID NO: 300452 - DNA, 201 bp, Homo sapiens
caggcctgggcacgcccagcttcgcgccctacgaggccaacgtcgactttgagatccggtacggcctctgcctcacttctccggcctctatccccaccctygggcagcccctgtccactgacccccagccccctccaggttcatggtggacacggacatcgtcggctgcaactggctggagctcccagctgggaaatacgc

SEQ ID NO: 300453 - DNA, 201 bp, Homo sapiens
cccaaagtgttgggattacagacgtgagcctcctagcccaggcaacttactttttcatgacatcgacagttttaaagattacagaccagtgttgtcacccytcaccttggattcgtttgtttctttttcttgttttgttttgagacagagtcttgctctgtcacccaggctggagtgcagtggcgtgatcgcagctcactg

SEQ ID NO: 300454 - DNA, 201 bp, Homo sapiens
agtgttgggattacagacgtgagcctcctagcccaggcaacttactttttcatgacatcgacagttttaaagattacagaccagtgttgtcacccctcacyttggattcgtttgtttctttttcttgttttgttttgagacagagtcttgctctgtcacccaggctggagtgcagtggcgtgatcgcagctcactgcaacc

SEQ ID NO: 300455 - DNA, 201 bp, Homo sapiens
cttggcctcccaaaatgctgggattacaggcgtgagccactgcacccaggctgtttgtttcttaatgactagaatcagggtaaacgttttcttagacattktttttcaacacaaaagataaaattgtgagtgcaccactgtgcatcttgctttatctactgaacaatgcctctttgagaaccttccctatcagtacacaaa

SEQ ID NO: 300456 - DNA, 201 bp, Homo sapiens
cattgtttttcaacacaaaagataaaattgtgagtgcaccactgtgcatcttgctttatctactgaacaatgcctctttgagaaccttccctatcagtacrcaaagagcttcctcattcctttacacagttgcatagtattccattgaacggacttaacatatttaaatagccccctgggggaggacagttaggtggtttc

SEQ ID NO: 300457 - DNA, 201 bp, Homo sapiens
ccaggttcaagcgattctcctgcctcagcctcccaagtagctgggattataggcgcccgccaccatgacaagctaatttttgtattttttttagtatagayggggttttcaccacgttggccaggctggtcttaatctcctgacctcaggtgatcggcctgcctcagcctcccaaagtgctaggattacaggcgtgagcca

SEQ ID NO: 300458 - DNA, 201 bp, Homo sapiens
gaggacagttaggtggtttccagtccttggggatttcaaacgatgcttccggaaataaccttataaatgcagtttttcttatgtgataatatatctacagygtacgtccctagatgtggaattgagcctccaaacttttatgtttataattgaggtggcatttacatggcgtgccatgcccaggtctccagtgtacagtca

SEQ ID NO: 300459 - DNA, 201 bp, Homo sapiens
gtacagtcagctgtatagtgtgttttatcaccccagaaaccccctcatacccttcccagtctctcctaccctaggagcagccactagtctgatttctagcrctgtagatcactttagtgtattctacaactttgtctaaatggtattgtacaatttttatggaggtaaaattagccattttaaagcaaacaatggctgggc

SEQ ID NO: 300460 - DNA, 201 bp, Homo sapiens
gctgctcccctcccaggtactacgacgtccccatcgccaccctggacttctcctcgctgtacccgtccatcatgatggcccacaacctgtgttacaccacrctccttcggcccgggactgcacagaaactggggtatagtgcccaattcagcatgtgtcccccgaggcccatctgggccttcccttggggggctcagtctg

SEQ ID NO: 300461 - DNA, 201 bp, Homo sapiens
gcttcccgcgcatgctcatgaagctggtgagcctgcgcacgctgagctctgtgcactcggagcaggtcttcgccttgcggctccaggacaagaagctgccrcctctgctgtcggagatctgggacgtccacgagtgaggggctggccacccagccccacagccttgcctgaccaccctccagcagatagacgccggcaccc

SEQ ID NO: 300462 - DNA, 201 bp, Homo sapiens
tgctttatgctttatccaagcacatgcatatacctgtaccttttgtcctttttttggctgaactatttgaaagttgtggtcatcatgatacttcacctctraaaactccagcagttaactcttttttttttttttttttttttttttgagacggagtcttgctctgtcacccaggctggagtacagtggtgcgaccttggc

SEQ ID NO: 300463 - DNA, 201 bp, Homo sapiens
taggacaggtggaacaagtaaaagctagacagtaaagtggtagacgtaagcccagctatatcagtaattacactaaatgtaaatggacaaaatgctctagwtagacagatttcctgactggatccacacaaacaaaaacagaagaatcacacccatctctccttggtgtccccacccccagcctcaggtttggtggtggtg

SEQ ID NO: 300464 - DNA, 201 bp, Homo sapiens
tcactggctgttggcatgacacctcatttgctttatgctttatccaagcacatgcatatacctgtaccttttgtcctttttttggctgaactatttgaaagttgtggtcatcatgatacttcacctctgaaaactccagcagttaactcttttttttttttttttttttttttttgagacggagtcttgctctgtcaccca

SEQ ID NO: 300465 - DNA, 201 bp, Homo sapiens
ttattgtttcttgagatggaatttcgctcttgttgcccaggctggagtgcaatggcacgatcttggctcaccacaacctccgcctcccagggggcgctggggtgtagaagtgattctcctgcctcagcctcccaagtagctgggattataggcacccgcttccatgcccgactaattttgtatttttagtagacagggttt

SEQ ID NO: 300466 - DNA, 201 bp, Homo sapiens
ctctaccgcttatcggccagcctctgcggggatcttgggcgtcaggtcaccagctggctgctgggcagcgacggggcagcgctccctacacggccccgggsgagaggcgggcggggggacgcggaggatgcgcgcgcaacacccgagggtgggaggagagagaacagaaccgcggcgcgcccagaccgcacgaggtcgtga

SEQ ID NO: 300467 - DNA, 201 bp, Homo sapiens
gttattgtttcttgagatggaatttcgctcttgttgcccaggctggagtgcaatggcacgatcttggctcaccacaacctccgcctcccagggggcgctggggtgtagaagtgattctcctgcctcagcctcccaagtagctgggattataggcacccgcttccatgcccgactaattttgtatttttagtagacagggtt

SEQ ID NO: 300468 - DNA, 201 bp, Homo sapiens
agggatgcaacttaaaggtgtatttatttggggcggggaacagcggaagtgagagtagttaccaatgatcaccttatcctaagagtagtgtaccgggcgcyccacaagtgtccctatcatgcgttgttgagtctaatttacgtatagggaaactgaagctaggatgaaggagaacagatcaagccaggactctaccgctta

SEQ ID NO: 300469 - DNA, 201 bp, Homo sapiens
tgttattgtttcttgagatggaatttcgctcttgttgcccaggctggagtgcaatggcacgatcttggctcaccacaacctccgcctcccagggggcgctggggtgtagaagtgattctcctgcctcagcctcccaagtagctgggattataggcacccgcttccatgcccgactaattttgtatttttagtagacagggt

SEQ ID NO: 300470 - DNA, 201 bp, Homo sapiens
tttgttattgtttcttgagatggaatttcgctcttgttgcccaggctggagtgcaatggcacgatcttggctcaccacaacctccgcctcccagggggcgctggggtgtagaagtgattctcctgcctcagcctcccaagtagctgggattataggcacccgcttccatgcccgactaattttgtatttttagtagacagg

SEQ ID NO: 300471 - DNA, 201 bp, Homo sapiens
ctaaggagatggggatgcagcatgtgcggaagcctgaagtggagaaagagctcgggctgtctcacgtgatggctgcacgctggtgtggctgagagaacagsggggaaggggacaagggataatcctggtgagattagacccccatttgggccaggaggggagggactagcagctgaagggtcacagggctcaagctccccc

SEQ ID NO: 300472 - DNA, 201 bp, Homo sapiens
ttttgttattgtttcttgagatggaatttcgctcttgttgcccaggctggagtgcaatggcacgatcttggctcaccacaacctccgcctcccagggggcgctggggtgtagaagtgattctcctgcctcagcctcccaagtagctgggattataggcacccgcttccatgcccgactaattttgtatttttagtagacag

SEQ ID NO: 300473 - DNA, 201 bp, Homo sapiens
tttttgttattgtttcttgagatggaatttcgctcttgttgcccaggctggagtgcaatggcacgatcttggctcaccacaacctccgcctcccagggggcgctggggtgtagaagtgattctcctgcctcagcctcccaagtagctgggattataggcacccgcttccatgcccgactaattttgtatttttagtagaca

SEQ ID NO: 300474 - DNA, 201 bp, Homo sapiens
agagggccctgcggccttccgcagtgtttgtgtccctgggtacttgagattagggagtggtgatgactcttaaggagcatgctgccttcaagcatctgttyaacaaagcacatcttgcaccgcccttaatccatttaaccctgagtggacacagcacatgtttcagagagcacggggttgggggtaaggccgtagattaac

SEQ ID NO: 300475 - DNA, 201 bp, Homo sapiens
aggacaggtggaacaagtaaaagctagacagtaaagtggtagacgtaagcccagctatatcagtaattacactaaatgtaaatggacaaaatgctctagtyagacagatttcctgactggatccacacaaacaaaaacagaagaatcacacccatctctccttggtgtccccacccccagcctcaggtttggtggtggtgg

SEQ ID NO: 300476 - DNA, 201 bp, Homo sapiens
ttttttgttattgtttcttgagatggaatttcgctcttgttgcccaggctggagtgcaatggcacgatcttggctcaccacaacctccgcctcccagggggcgctggggtgtagaagtgattctcctgcctcagcctcccaagtagctgggattataggcacccgcttccatgcccgactaattttgtatttttagtagac

SEQ ID NO: 300477 - DNA, 201 bp, Homo sapiens
ggcaccccttcctcttcctagggtggaaggggccctgggccgagcctgtagacctatcggctctcatcccttgggataagccccagtccaggtccaggagsctccctccctgcccagcgagtcttccagaaggggtgaaagggttgcaggtcccgaccactgacccttcccggctgccctccctccccagcttacacctca

SEQ ID NO: 300478 - DNA, 201 bp, Homo sapiens
cttttttgttattgtttcttgagatggaatttcgctcttgttgcccaggctggagtgcaatggcacgatcttggctcaccacaacctccgcctcccagggggcgctggggtgtagaagtgattctcctgcctcagcctcccaagtagctgggattataggcacccgcttccatgcccgactaattttgtatttttagtaga

SEQ ID NO: 300479 - DNA, 201 bp, Homo sapiens
gcatctgtttaacaaagcacatcttgcaccgcccttaatccatttaaccctgagtggacacagcacatgtttcagagagcacggggttgggggtaaggccrtagattaacagcatcccaaggcagaatttttcttagtacagaacaaaatggagtctcctatgtctacttctttctacacagacacagcaacaatctgatc

SEQ ID NO: 300480 - DNA, 201 bp, Homo sapiens
gacaaatatatttatttgtacatataatatgtgtgtgtatttgtgtatatgtgtatatatatatatatatatatatatatattttttttttttttttttttcttttttttgagactgggtctcgctcttttgcccaggctggtctcaaagtcctgggctctagcgatcctcccgccttggcctcacaaagcactggaatca

SEQ ID NO: 300481 - DNA, 201 bp, Homo sapiens
ctctcgaccccctagggttgttataaggatgttgtggttggtctcaatctccgttcttcaggcttatgtgacggggacccgcagcctgctgcacaccctgsctctcctcctcaggtacaaacattccctttcctgggccgtgtggccggcctttgctccaacatccgggactcttcattccagtccaagcagacgggccgg

SEQ ID NO: 300482 - DNA, 201 bp, Homo sapiens
gctctcgaccccctagggttgttataaggatgttgtggttggtctcaatctccgttcttcaggcttatgtgacggggacccgcagcctgctgcacaccctkcctctcctcctcaggtacaaacattccctttcctgggccgtgtggccggcctttgctccaacatccgggactcttcattccagtccaagcagacgggccg

SEQ ID NO: 300483 - DNA, 201 bp, Homo sapiens
agacaaatatatttatttgtacatataatatgtgtgtgtatttgtgtatatgtgtatatatatatatatatatatatatatattttttttttttttttttttcttttttttgagactgggtctcgctcttttgcccaggctggtctcaaagtcctgggctctagcgatcctcccgccttggcctcacaaagcactggaatc

SEQ ID NO: 300484 - DNA, 201 bp, Homo sapiens
atctccgttcttcaggcttatgtgacggggacccgcagcctgctgcacaccctgcctctcctcctcaggtacaaacattccctttcctgggccgtgtggcyggcctttgctccaacatccgggactcttcattccagtccaagcagacgggccggcgggacaccaaggttgtcagcatggtgggccgcgtgcagatggaca

SEQ ID NO: 300485 - DNA, 201 bp, Homo sapiens
tccctcctcctccctctggccctgtggactccctggcccccaaccctacctccatccccacccagaccctgacgacttggagggccctcctgcccgcctcmcctcccaggccctccccaggctacctcaccctgacccccacttccttctcctgctccacctcccacccccaacccctggtccctgaccccatccgtgccc

SEQ ID NO: 300486 - DNA, 201 bp, Homo sapiens
ccggggtccccacctgcactgcccctctgtggggcctcacccatgggcagtggtttctctgctcctcacggccggtgggtgggagtggaggggaggggtcygccctgtctcttgccccttctggttctgttccctcttcacttcggactctccatccccccagttcctatctttcctggtccccaaagatctcatttcccc

SEQ ID NO: 300487 - DNA, 201 bp, Homo sapiens
caaccattacctctgtctagtttcaaaacatttcatcacccctacagaaaaccccatactccgtaagcagtcactcctcattcccccagtgtgcactttgscttctgcacagcctgctttcaagattcatccgtgttgcatgtctgtcaggagctggcccctctctaatgctgagtgtctgttatgaacctccctgaacat

SEQ ID NO: 300488 - DNA, 201 bp, Homo sapiens
actgtgacggggaagagggtgggaggatgtcccagtagctgcacacctcatgatcactctcattcctggagggagaacttagtcacgtggccctcctggcrgcgcacactgggaaatgtagcctttggctgggcagcctgtggccactccggacacgcagggttggaggggtgtgttctattgcaaaaaagcaaagcaaag

SEQ ID NO: 300489 - DNA, 201 bp, Homo sapiens
tggagaaattgggaaaggtgccctttattttatatcaaccttgagtcagtgttaaatgtcctagattgtatcgtactgtgctcggtgaaaggaattccttrttgttaggcactacgtgctaacatgtggaggggtatgggatctgcaaggaactctcaaattactcaggaaaagaagtaacaatatgatgtgcataccgca

SEQ ID NO: 300490 - DNA, 201 bp, Homo sapiens
agaaattgggaaaggtgccctttattttatatcaaccttgagtcagtgttaaatgtcctagattgtatcgtactgtgctcggtgaaaggaattccttattsttaggcactacgtgctaacatgtggaggggtatgggatctgcaaggaactctcaaattactcaggaaaagaagtaacaatatgatgtgcataccgcacat

SEQ ID NO: 300491 - DNA, 201 bp, Homo sapiens
ttgtttaagtattttttagttttgtgtgtgtgtgtgtgtgtatttttagtagagatggtgtttcaccatgttgtccaggctgatctcgaactcctgacctyaagtgatccagccacttcagcctcccaaagtgctgggtgtacaggcataagccaccacgccagctagttttcttaactctaaaataagacagtgggtttc

SEQ ID NO: 300492 - DNA, 201 bp, Homo sapiens
cagggaacccacttctttccacctgaccattgaggagccgccttatagtcccattttgcagatttgggaactgaggcccaggaggggcagagtggcttgtrcataagcctatgccactgggaaatggcagaggcgggacccctcccccgccggcccacgttcactgcacatggcccccagggcttcactccgcatgattct

SEQ ID NO: 300493 - DNA, 201 bp, Homo sapiens
atattaatatattttgtagagacaaatatatttatttgtacatataatatgtgtgtgtatttgtgtatatgtgtatatatatatatatatatatatatatattttttttttttttttttttcttttttttgagactgggtctcgctcttttgcccaggctggtctcaaagtcctgggctctagcgatcctcccgccttggc

SEQ ID NO: 300494 - DNA, 201 bp, Homo sapiens
tgggataagccccagtccaggtccaggaggctccctccctgcccagcgagtcttccagaaggggtgaaagggttgcaggtcccgaccactgacccttcccrgctgccctccctccccagcttacacctcaagcccagcacgcagtgcaccttgaacagagggaggggaggacccatggctctcccccctagcccgggagac

SEQ ID NO: 300495 - DNA, 201 bp, Homo sapiens
gtattaatttatgtataacatatattatatattaatatattttgtagagacaaatatatttatttgtacatataatatgtgtgtgtatttgtgtatatgtrtatatatatatatatatatatatatatattttttttttttttttttttcttttttttgagactgggtctcgctcttttgcccaggctggtctcaaagtcc

SEQ ID NO: 300496 - DNA, 201 bp, Homo sapiens
atgtattaatttatgtataacatatattatatattaatatattttgtagagacaaatatatttatttgtacatataatatgtgtgtgtatttgtgtatatrtgtatatatatatatatatatatatatatattttttttttttttttttttcttttttttgagactgggtctcgctcttttgcccaggctggtctcaaagt

SEQ ID NO: 300497 - DNA, 201 bp, Homo sapiens
aagatatatatatatgatatattctttatgtattaatttatgtataacatatattatatattaatatattttgtagagacaaatatatttatttgtacatrtaatatgtgtgtgtatttgtgtatatgtgtatatatatatatatatatatatatatattttttttttttttttttttcttttttttgagactgggtctcg

SEQ ID NO: 300498 - DNA, 201 bp, Homo sapiens
taatctcagctgttcaggtggctgaggcacaagaatcctttcaacctgggaggtggttgaaatataaatataagatatatatatatgatatattctttatrtattaatttatgtataacatatattatatattaatatattttgtagagacaaatatatttatttgtacatataatatgtgtgtgtatttgtgtatatgtg

SEQ ID NO: 300499 - DNA, 201 bp, Homo sapiens
gccatgttggccaggctggtttcaaactcctaacctcaggtgatctgccgaccttggcctcccaaagtgctgggattacaggagtgagtaactgtgccccrcctattttttttttttttttttttttttttttgagacagagtctccctctgtcacccaggctggagagcagtggcacaatcatggttcactgtaacctca

SEQ ID NO: 300500 - DNA, 201 bp, Homo sapiens
actcttggctcactataacctccgcctcctgggttcaagtgatccttcttcctcagcctcccaagtagctgggattacaggcgcccgccatcacgcccggstaatttttatatttttagtagagacagggtttcgccatgttggccaggctggtttcaaactcctaacctcaggtgatctgccgaccttggcctcccaaag

SEQ ID NO: 300501 - DNA, 201 bp, Homo sapiens
ctccccgacagagcgtcacggggttcggacgtcagatgatcgagaaaaccaagcagctggtggagtctaagtacacagtggagaatggctacagcaccagygccaaggtcgggggctgcccaccgctgccctgagatgggcccagggcaggtggggggatggaagccgggccggacccccatgtccccgtgcctcctggtc

SEQ ID NO: 300502 - DNA, 201 bp, Homo sapiens
tggggtttcaccatgttggtcaggctggtctcgaactcctgacctcgtgatccgcccaccttggcctcccaaagtgctgggattacaggcgtgagccatcrcacccggccctgattatgtctttaaaagaaagaaaaagaaaacacaaatatatataagtagcagtctgtatgtgttttgtgttgtgttttgtttgctact

SEQ ID NO: 300503 - DNA, 201 bp, Homo sapiens
tcaagcaattctcctgtctcagcctcctgagtagctgggattacaggcgcctgctacctcacctggctaatttttgtatttttagtggagatggggtttcrccatgttggtcaggctggtctcgaactcctgacctcgtgatccgcccaccttggcctcccaaagtgctgggattacaggcgtgagccatcacacccggcc

SEQ ID NO: 300504 - DNA, 201 bp, Homo sapiens
aaaggaattccttattgttaggcactacgtgctaacatgtggaggggtatgggatctgcaaggaactctcaaattactcaggaaaagaagtaacaatatgrtgtgcataccgcacatgtgggagggcagagagaggcggtgagagagcacacacacgacacgctgaccaccggggagcctggggaagggcatacaggagtt

SEQ ID NO: 300505 - DNA, 201 bp, Homo sapiens
cctatttatgatttgcatggatgtttcttatctcccttctctctgtatacgtacactcactttttacaaagaattcccaataccttgcagacattatggcygtttactcctaaatacttgagtgtgtatctccttagaatattcttattgaaccacaataaagtcacccacttaagtttaacctgcatataaccttgtcta

SEQ ID NO: 300506 - DNA, 201 bp, Homo sapiens
tccagcctgggtgacaagagcacaattccatctcaaaaaaaaaaaaaaaaaaaaaaagcaagagatgtgctaaggacctagtgtgatgggagagagggtcrgggagtcgacggggctgctgctgcagtagctaacaattgagcgtctggaatgtgctcccaccccactgcctgcagggtgcagagagctatgttagtacag

SEQ ID NO: 300507 - DNA, 201 bp, Homo sapiens
tttcttgagatggaatttcgctcttgttgcccaggctggagtgcaatggcacgatcttggctcaccacaacctccgcctcccagggggcgctggggtgtagaagtgattctcctgcctcagcctcccaagtagctgggattataggcacccgcttccatgcccgactaattttgtatttttagtagacagggtttctccat

SEQ ID NO: 300508 - DNA, 201 bp, Homo sapiens
cccccaggctgcccagctctgctacgaaccccccacctacagccctgcagggaacctcgaactggcccccagcctggaggccccggggcctggcctccctscataccccacggagaacttcgctagccaggtgagtggtaaggggacagttaaaatcaagcccaaaccaggtgtggtggtgcacgcctgtaatcccagctg

SEQ ID NO: 300509 - DNA, 201 bp, Homo sapiens
gcgaggaggcctccgtgagacatcccagcttctgactcagtgcccttcccccagactccctgtgggactggactgtggccccacctgtcccagccaccccytatgaagccttcgacccggcagcagccgcttttagccacccccaggctgcccagctctgctacgaaccccccacctacagccctgcagggaacctcgaac

SEQ ID NO: 300510 - DNA, 201 bp, Homo sapiens
acccccaggctgcccagctctgctacgaaccccccacctacagccctgcagggaacctcgaactggcccccagcctggaggccccggggcctggcctcccygcataccccacggagaacttcgctagccaggtgagtggtaaggggacagttaaaatcaagcccaaaccaggtgtggtggtgcacgcctgtaatcccagct

SEQ ID NO: 300511 - DNA, 201 bp, Homo sapiens
tcgagaaaaccaagcagctggtggagtctaagtacacagtggagaatggctacagcaccagtgccaaggtcgggggctgcccaccgctgccctgagatggrcccagggcaggtggggggatggaagccgggccggacccccatgtccccgtgcctcctggtcacaccctgcccactctcctgttgcatccttgggtcccgt

SEQ ID NO: 300512 - DNA, 201 bp, Homo sapiens
cccaggctggagtacagtggtgcgaccttggctcactgcaacctctgcctcccaggttcaagcgattctcctattgcagcttcctgagtagctgggactayaggcgcgcaccaccacatctggctaatttttgtatttttagtaaagatggggtttcaccatctttgccaggctgctcttgaactcctgaccttatgatct

SEQ ID NO: 300513 - DNA, 201 bp, Homo sapiens
gcggagccaggagtgggcagggcgatgtcagtgcctcgcctcagcccttccactgaaggaacttgttgccactgtcttctcttttttttttttttttttttgagacagagtcttgctctgtcacccaggctggaatgcagtggtgcaaactcagctcattgcaacctccgcctcccgagttcaggcgagtctcgtgcctca

SEQ ID NO: 300514 - DNA, 201 bp, Homo sapiens
agcggagccaggagtgggcagggcgatgtcagtgcctcgcctcagcccttccactgaaggaacttgttgccactgtcttctcttttttttttttttttttttgagacagagtcttgctctgtcacccaggctggaatgcagtggtgcaaactcagctcattgcaacctccgcctcccgagttcaggcgagtctcgtgcctc

SEQ ID NO: 300515 - DNA, 201 bp, Homo sapiens
gagcggagccaggagtgggcagggcgatgtcagtgcctcgcctcagcccttccactgaaggaacttgttgccactgtcttctcttttttttttttttttttttgagacagagtcttgctctgtcacccaggctggaatgcagtggtgcaaactcagctcattgcaacctccgcctcccgagttcaggcgagtctcgtgcct

SEQ ID NO: 300516 - DNA, 201 bp, Homo sapiens
gaagccgggccggacccccatgtccccgtgcctcctggtcacaccctgcccactctcctgttgcatccttgggtcccgttggcattagccacctgccaccmcccgacaccagtagttgacagaagggaccctgcttctcacatacacacatccccaccgcccgcaggtggtgtatggtgacactgactccgtcatgtgccg

SEQ ID NO: 300517 - DNA, 201 bp, Homo sapiens
caggccttggacttggagcctcgcagagtggggaggtctctgcctcagggctcacccagccgtagtttctcctctctttcatgggatgcttcatcgactcscctgtctggatctcatgttttagggactatctggatttatcccagtctctgtttcagattggggtctctggtgtgggggctctggcattgccgaggggcc

SEQ ID NO: 300518 - DNA, 201 bp, Homo sapiens
ctggtggatctgaggcaggcagccagggctccggggaaggcgagggtgtccagctaacagcggctcaagaactaatgatccagcagttggtggcggcccarctgcagtgcaacaaacgctccttctccgaccagcccaaagtcacggtactgccccctccacaaccttgagtgtgacggtcccaatggggtagagccagct

SEQ ID NO: 300519 - DNA, 201 bp, Homo sapiens
ttagtgtattctacaactttgtctaaatggtattgtacaatttttatggaggtaaaattagccattttaaagcaaacaatggctgggcgtggtggttcatrcctgtaatcccagcactttggggaggccaaggcaggcagatcacttgagcccaggggtttcagaccagcctcagcaacatggcaaaacccgtctttacca

SEQ ID NO: 300520 - DNA, 201 bp, Homo sapiens
  misc_feature (1)...(201): n = A,T,C or G
gcagtcagtcctggagggggttgcagacggtaaggcttggagttggaggttcctgctgcccaacccattgcccctggtcttgcctttggtccaagagtcanctgcaaagctgacctgtgaccccactctggccaattttgaatcctacaaaggactgcccttccaccccgtgcagcctgtgtggcctacagtgattctggc

SEQ ID NO: 300521 - DNA, 201 bp, Homo sapiens
ccctgcccagcgagtcttccagaaggggtgaaagggttgcaggtcccgaccactgacccttcccggctgccctccctccccagcttacacctcaagcccascacgcagtgcaccttgaacagagggaggggaggacccatggctctcccccctagcccgggagaccaggggccttcctcttcctctgcttttatttaataa

SEQ ID NO: 300522 - DNA, 201 bp, Homo sapiens
accggtgtgtggggcctcctccctcagactcagggggctgggccccaaacccctcctccctcagacccaggagtctaggccccagcccctcctccctcagrcccacgggtccaggcccccagccccctcctcctcagatcccggggtcagggcccccagccccttcctctcttagatacaagagtccagacccccagcccc

SEQ ID NO: 300523 - DNA, 201 bp, Homo sapiens
ttagatacaagagtccagacccccagcccctcctcctctgggaacacaggtgtcaggcccagctcttcctcggtggtgaagcagtggaaagagtcggcttrggcagctgtgggttcaggccctgcctctgccactctgcagcctatggtaggaagggcccctctctgccctgagcctcagccctaagagctcatcctggtc

SEQ ID NO: 300524 - DNA, 201 bp, Homo sapiens; identical to SEQ ID NO: 62751

SEQ ID NO: 300525 - DNA, 201 bp, Homo sapiens
cacatcctgctccgccgacccactgcccttgcgcccggcctcgggcctacaccacacctggggctctgtgtttcagaagggagtggggtgggggtccggastccagggtctgaggtaggagagtggtgaggacccaccctcgcaggtttgaggctaggagctgggaatctgcgctgggttttcagggatgagtaggagtct

SEQ ID NO: 300526 - DNA, 201 bp, Homo sapiens; identical to SEQ ID NO: 62752

SEQ ID NO: 300527 - DNA, 201 bp, Homo sapiens
gtgccttgccttgggtctcacagcgggtcgggggaacccgggctctcggcccctgcgtctttgtcgcagtttctcccagatccaggagagcagcgtgggcyggggctcaccctggtctggacagaccagctcgaggacagtcttgcttctcggagccagctcaggcggccagacccagagctgcctctctctccacccgct

SEQ ID NO: 300528 - DNA, 201 bp, Homo sapiens; identical to SEQ ID NO: 62754

SEQ ID NO: 300529 - DNA, 201 bp, Homo sapiens
aacatgttttaagcaagtacactgacgataggatcagagattataaaagctgaaaaagtagattttagagattatttgctgggcattcgagatatctgaasgaaaggcaaagagaggtcttgttctctgtagtaaaaagcttacaatgggattaagctaatgtcgacatagtgggtgtaagaatgtcatgttacttttaat

SEQ ID NO: 300530 - DNA, 201 bp, Homo sapiens
gaaaacctacataaatgtttttcagccactatcggaatgtagctggtcatcagttatataatatattgaagggctgtttgttctgcccacccaaagctcarcaaattaatcaagacaggatatgagaaaaatcttttttcaaggttttaatgctgttttgttattacttagtggtcattttggtaagtatcgagtgttgtc

SEQ ID NO: 300531 - DNA, 201 bp, Homo sapiens
gtgagcagatggatcttccaccttgctgggattcctagggtggagtctgtaaaactcctgggttactgtgcgagcctgagtgactgttcttttgagacacrgctctgtgtattgaacccaaggccctggtggtgtggggtcatgaggggatctcctgatccacaggttacaaatatggagtgggagaagtgtggtttccct

SEQ ID NO: 300532 - DNA, 201 bp, Homo sapiens
agatatatttaaaacattttctttattggctccaccttaattgtcattaaaaaagaatctagccactgggcgctgtggctcacgcttgtaatcccagcacytggggaggctgaggtgggtggatcacttgaggtcgggagttcgagaccagccaggccaacatagcaaaacctcatctctactaaaaatacaaaaattaac

SEQ ID NO: 300533 - DNA, 201 bp, Homo sapiens
ggcataaggtattttagatgattgtgagttaataatcaatgatatactgtacagttttaagatgtttagcattggtctcacttatatatattttcttctcmctaggcaagaagttatgaaatggaatggatggggatataatgattctaaattcatcttcaataagaagggccaaattgaattgactgggaaaaggtaacc

SEQ ID NO: 300534 - DNA, 201 bp, Homo sapiens
ttgatggacatttgggttgattccatgtgtttgctattgtgaattgtgctgcaatgaacatatgcatgcatatatctttataatagaatgattttttttttgcctgtacaactatttaatgtctgtatgcctctgaatagtaattaggagaaaacatatggaaatgaaaattatttcaaattttaaaatcttgaaacagaa

SEQ ID NO: 300535 - DNA, 201 bp, Homo sapiens
tttcctcatcatagatatttttattgttttctcagttctttcccataagtcaattttactttctggttgcttttatacttcctgattgtaggttcctaacrtgtcagcagtatcaggtaatagaacaaatggcggtcatatcatgttacattaaagctatgtgtataagttatgtgcatttttcaggttctaggtttatag

SEQ ID NO: 300536 - DNA, 201 bp, Homo sapiens
aattacaaagcatatttgttcaatcatacctcagtaaaactggaaaaatattaaaaagaattctaaaggatatttgtgttattcctgtttgttctagatayggtcagaattgtaaaacgagttctttgttggttttaagcaatactgcctttgccaaagctctgtttttggtttgtctgttgaattttgatacatttgaaa

SEQ ID NO: 300537 - DNA, 201 bp, Homo sapiens
cttcttcctttttgcaactttttatttcttcctttgaatgcattaaatttattggttgtagccctctgtgaagcaggtgctgctcatcagagtgattctayattcagaaatattagtatatggacattttaatgtgtgctaattttatttaaccttatacaatatttgtgggcataaggtattttagatgattgtgagtta

SEQ ID NO: 300538 - DNA, 201 bp, Homo sapiens
gtttttcctgatgctctccctccttctactgctccccttgatgggccccagtgtatgttgttcccctccttgtgttcatgtgttctcattgttcagctccracttataagtgagaacatgcggtgtttggttttctgttcctgtgttagtttgctgaggataatggcttccagctctatccatgtccctgcaaaggacatg

SEQ ID NO: 300539 - DNA, 201 bp, Homo sapiens
tggtccgtctgtcccacctgggccctctcctaccctggcctaactcctgatagtttatacatacacaactgagtaattttgagaggcccaaggtactatasatattttacctcgtagccattatatattcacgaatcattaggaactgaaggcaattccagtttctgtcatccttttttacagtgctctttagtcattcta

SEQ ID NO: 300540 - DNA, 201 bp, Homo sapiens
tagttaaatgtatatttggtttaccatatagttgaagctgtttaattcataatggaattctatcattcaaaaaaatttgtagctattgctaagaagcccartagattttataataaaccatcatgaaagttctgtgtatatatggaagaaagaattattttctcagaacagagagaaactgcactgagattcaaaggctga

SEQ ID NO: 300541 - DNA, 201 bp, Homo sapiens
ttctctgacctggggttcttggcctcacggattccaaggaatggaatcttgggccatgtggtgagtgttatagctctattagaagccatgggtcatggaasagaaccgtggaacccagcgactagtgttcagcttgattaggatgaacttgggcacttagctgtgcaggaacaatggcaagcctttagcccgatcgggagt

SEQ ID NO: 300542 - DNA, 201 bp, Homo sapiens
tgtgtgaatatgtaagtttaaaacattttatgaagaaacattgagacaaggcagctactttatttaaattaatatattcatcagaatgccgtattttcaartgttttattgggtggagggagttgaagaaaatttgtctgtgatccaaagaacgaaggtattgttgaagtttacattttgaagaatgttattgaatgctca

SEQ ID NO: 300543 - DNA, 201 bp, Homo sapiens
ctaagtgtcataggatataatatgtaggtctagagccttgaattcatttaaatcacctaggtactcttcagccacctcacccatttgaaacttcgtctacyggctggccgcggtggctcacgcctgtaatcccagcactttgggaggctgaggcgggtggattacctgaggttaggagttcaagaccggcctgactaacat

SEQ ID NO: 300544 - DNA, 201 bp, Homo sapiens
ggcatgagccaccacagccagcctaggttgcagactttacgacacttaacttaaatacatcagcaccatctcctaaagacagaagaatagtgttcttcttyataactataataccattatcatgtctaagaaaatcagtagtaatttttttttttttttttttttttggagacagagtcttactctgtcgctcagcaggct

SEQ ID NO: 300545 - DNA, 201 bp, Homo sapiens
gctgggattacaagcgtgagctaccgcacacagccgagggttcttatagattactttgcagtgggatgtggtccgtctgtcccacctgggccctctcctaycctggcctaactcctgatagtttatacatacacaactgagtaattttgagaggcccaaggtactatagatattttacctcgtagccattatatattcacg

SEQ ID NO: 300546 - DNA, 201 bp, Homo sapiens
gaaaaactataaagttataattaggagactggcattatcttttggtcttttccttaatataagtggagggcaatattcactccctattatgtattattttrttctttaaaaccaagcaacaattgacttgtcaaaataaaaagttcttattgtttatcatacagactcctagctgtaagtcagtatgtcatctctaagatg

SEQ ID NO: 300547 - DNA, 201 bp, Homo sapiens
ggagactattattccagggagaaatgctgggattctgaactaaggcatattattgggagtaggcaacttaattgagaaaatgctaggaggtaaattttccrtaacttggttactgagtggtggggaggggaggaataaaggatttcatctcgtctcctggcttcaattgaggttatattattaatagctgtcattaggttt

SEQ ID NO: 300548 - DNA, 201 bp, Homo sapiens
ttcttctttttgaagttaggaatggagggctcaatttgagtgatcagggctcttttccattcttgaaaggacaactatgaaagctttagctaagaaaatgwcagacttgaatgatgccagattaaccaacgtttattagcacttgtgtagttctcacttgaaaacttaatattgtattcatttatctttttttagggtggt

SEQ ID NO: 300549 - DNA, 201 bp, Homo sapiens
tctccttttcattattcaactatcagtgagggtttagatataaggagctcttaatattttcctgtttactattgtatttaagatgattggatacatttaaktgcgtttaaactgaaatgcagttcacacagtgccataacttgcaaaggactgtaacagcagatgattgtattcttagattttttttagactacttagctg

SEQ ID NO: 300550 - DNA, 201 bp, Homo sapiens
ggcacttagctgtgcaggaacaatggcaagcctttagcccgatcgggagtggcaatgggtgcctcgctggatcaggagcacagtggacaccctgctggatytggaggggtggaagtcagcatcagcggcgggtctgcgatggcggcaaacaacagtggtggatggcaagtgaaagcacagctggagccataacaaacacag

SEQ ID NO: 300551 - DNA, 201 bp, Homo sapiens
gttaactttttttcctctgtaaatccttaggaactaagctcttgatctcttaaatatagaaagataatattcacattctacctgtctagcttcttactgtrttaaatttgtatcacttttttttttctttttaaaacagagatgtgctccggcatctattcgcctcatggacaacaagcagtttcagtttggtaagtaagg

SEQ ID NO: 300552 - DNA, 201 bp, Homo sapiens
actccatcacaggcagtgtaccacagaaggcctcctctgcaggtgtagagcctaacacatgctaccaaaacagtagagagagaacttacagcataattaayttttgcagaatgaacacatctattttatctgtatttagattaagaaacagcattaccagtactctaggaagccctctttgtgctcatcccagtggctcct

SEQ ID NO: 300553 - DNA, 201 bp, Homo sapiens
cctgctacagcctccccagtagctaggactacaggcatgtgccaccatgcttggctaattttttaatttttctggagacagggtcttgccatattgctgaractggtctcaaacttctcgcttcaacctaccaccctggcctcccaaagtgttgggattatcggtatgagccaccatacctggcctcgtatatttttaaaa

SEQ ID NO: 300554 - DNA, 201 bp, Homo sapiens
ttggagtaaatagtatttgttatactaaagtaacatctgagcactgagtggtgacattccagtgtgttctggtacttgtttctaaaatattccatcattcraaggcagaggaaaggagtttcaaattaagataccccagatattaagaagtaaaagaacttgcagagccttatggttttgcctatgaattaatacataaaa

SEQ ID NO: 300555 - DNA, 201 bp, Homo sapiens
actgcactccagcctgggtgacagagcaagactctgtctcaaaaaaggagaaaaaagaaaaaaagaaacttcatctacccaggtttgcaattactttgtgwcttccatatgctaagcactggggaggattattgacacatggtttttgcctactgggacatgtaggtctactaaggaagactgatgtgtcttctattactg

SEQ ID NO: 300556 - DNA, 201 bp, Homo sapiens
ataaattggctcattcacggactctcagttcttaaatgagatccttctactttggagggactgagagaaaaattatactttaatgtgggggcaagaggcargtgagatacacagaaggaaaatccaagagcatatgtagcagagatgaagttactttcctgatacttgtatattagtctatgcatttggaatatttatgaa

SEQ ID NO: 300557 - DNA, 201 bp, Homo sapiens
gtattccgtgctttcagtgtgtgttcagattctcctcttactggttttcttagactgtattgttctataagcaaatgcccatgtgtgatttttaagatgtrctggggaaaaataaatcaataccacaaccacccattgttatagaaattgttgtttatttcatattggttctatttaacctttattgacagcatgctatac

SEQ ID NO: 300558 - DNA, 201 bp, Homo sapiens
tttgagggggatcgtgagaaggttcttcaacatgaaaaacaagtgtatgatattgctgcaaaatttgggtatggcttcaagttcataatgccaagagaaasagttaaaagctaagattctaatatcaccaagcaattattaaagtactaggcattaatgtctccaaacagactgcatgtctcaaagtagttattaatttca

SEQ ID NO: 300559 - DNA, 201 bp, Homo sapiens
cttttcattattcaactatcagtgagggtttagatataaggagctcttaatattttcctgtttactattgtatttaagatgattggatacatttaagtgcrtttaaactgaaatgcagttcacacagtgccataacttgcaaaggactgtaacagcagatgattgtattcttagattttttttagactacttagctgtagc

SEQ ID NO: 300560 - DNA, 201 bp, Homo sapiens
aacattgttttgttctttaatggtatcaagaaggcatttttcctttgacagtaaatgttaagacaacagtgtgtttaaatacttctatgtattattctatrttaaaatcactttttcaccaaagaacatataaatgtttttaaatacctcataatctagacattttaagcttgtttctattctaatttattaaagcttttt

SEQ ID NO: 300561 - DNA, 201 bp, Homo sapiens
gtaacagtagtgttttaagagaaaataattcatagtattttgtttggagatggagttagggaagaaatataatgtaacagtctgataatcttcattttaayctcttcagccatttatttaagcttctttttaatagatggatattaatctcttaaaactaaataatatattgaatatttagtggagaaacttttattatat

SEQ ID NO: 300562 - DNA, 201 bp, Homo sapiens
gtggagcataaaactacctctaaagtaagcaaacaaaaattattactaactcatttaactgtgtttttaaaacccaaattaatttgatttatctttgtaaktcattatattggatttactgcaactgtcatgttttttgttataaagcctattaattatattggccttgttagactgttagcggcagttattcattgtcac

SEQ ID NO: 300563 - DNA, 201 bp, Homo sapiens
atctacctatagtggcaagtcaggaaattttgatttagcccatttagcttgaaattatcttacagtatttgtacagaacaagagtacatctacattgtagygtttacttactaccaaattcaacacaacttcagaagaagaaaatatttaattataaggtgttaattgaggcgataagataaacaatttttcctttagttg

SEQ ID NO: 300564 - DNA, 201 bp, Homo sapiens
tgggctgcaaatgaaggaattgattcttcttgattttgcttgaggataaagagtcagaaaaggcttttataagagagatgcttgagctaaatcttcaaagktgaatataagtttgcctagatgtctcttcttcttctcaaccagacttcttcacttggcagcaaaaatgtgaaggtgtgaaactcaatgatgtgtgttagg

SEQ ID NO: 300565 - DNA, 201 bp, Homo sapiens
gtttctgtttcctagacctgtggtgctttttctctcttggactcagagtctgactctattttatatctacttgagctatgggctaagctgttttcctttamgcacttgccacagcagttttctgacttgttttccttttcttttgaaactttatttggctttctacctccaacctcacatccaactcagaattgtgtttta

SEQ ID NO: 300566 - DNA, 201 bp, Homo sapiens
aggtaattttgcatacctgcatatagcttttacagctgttgattaatttcaataaattttactgtcaatttatgaattttaagttgagtctctttaatcayacatggtttgcctagctgttagcccttagaaatgaaaagcatatttgtttccctggcttatgtactgaattgtgagtctaaaattaaggtactgtacacc

SEQ ID NO: 300567 - DNA, 201 bp, Homo sapiens
agggagctcctaggtctgggctccttgaagggccacagctcttctctccttctctttcctctctttccctctcgttgccctccatggggcaaacaaggggygtgtttcagccctgtttgtgttacagccctttcagctccgccatttagcgggtcctgagtttttgtcccacatccaggaagaatgaggtatgcggacaag

SEQ ID NO: 300568 - DNA, 201 bp, Homo sapiens
aatgggaccattttcactgtaaaatgttaaatttttgtttttcagcttaaagaaagtggttattgtacaggtcatgaaccagattccctggagttcagtaytgtaggaggatgggtatctactcgcgcatcaggcatgaagaagaatatctatggcaatatcgaggacctggtaaatatttttctagttattatgtaataa

SEQ ID NO: 300569 - DNA, 201 bp, Homo sapiens
tacagaacaagagtacatctacattgtagtgtttacttactaccaaattcaacacaacttcagaagaagaaaatatttaattataaggtgttaattgaggygataagataaacaatttttcctttagttgactaaagttaaaattttaatttctgtatgataatggaaaaagcataattaaaaactatttactaaaggtag

SEQ ID NO: 300570 - DNA, 201 bp, Homo sapiens
taatcatttgggtcgtcttgactttcagtttctagatgttaaatctgatttcacttaacttaaagcccctgtggggattttgtttgttttttagggtgacrcagacttacgatgcaggtgcttgtatctacttctattttgcctttaactacaggggaattagtgacccactgaccgtatttgaacaaactgaggtaattt

SEQ ID NO: 300571 - DNA, 201 bp, Homo sapiens
acacattggaatttgaataaatatattcttgtgctaaaggaaagttatttgataaataattgttttaatttttatactttttaagacttttataaacatayatgaactaggcaaatttccatagcggatcaaacttcctaaaatttgcatcagaaaatatgatctctgtatagccctcatttctccttccagatagtcctt

SEQ ID NO: 300572 - DNA, 201 bp, Homo sapiens
ttatttaaccttatacaatatttgtgggcataaggtattttagatgattgtgagttaataatcaatgatatactgtacagttttaagatgtttagcattgrtctcacttatatatattttcttctcactaggcaagaagttatgaaatggaatggatggggatataatgattctaaattcatcttcaataagaagggccaa

SEQ ID NO: 300573 - DNA, 201 bp, Homo sapiens
aattccaaatgactgtgacaagcaaatagtggttactgatcacaggcatcacgttcttaaccaacagttcatgaactcactttgtaaaattacgctgaacyttacagattaacaccccctgtacttcttgtggaaggtgactttcacatgttttctttcatgcagaacttatggaagtatcagtcaagaatttattcgata

SEQ ID NO: 300574 - DNA, 201 bp, Homo sapiens
atttatgaaacatcagtaggaagagtacggagtgcagaggtagaaagaacgtcagtcttgcctttcaggaagatgtcagtctaatgaagatagacaattayataaatgagtgagggtagcagtgttggagggcctgtgaaagaagactgcactggataccatgggctgcaaatgaaggaattgattcttcttgattttgct

SEQ ID NO: 300575 - DNA, 201 bp, Homo sapiens; identical to SEQ ID NO: 62756

SEQ ID NO: 300576 - DNA, 201 bp, Homo sapiens
gaagtttatacattttagactttggatccttacagccaaattgccctataaaaattttgtaccaattgacattctcactaacaccatgagaatctttgtawtttactggacgtcttatttatgtttttgtattttgttaattgctagtgaatgtaaacttttaaggggtcctcattggcaatttttattttgtattttgtg

SEQ ID NO: 300577 - DNA, 201 bp, Homo sapiens
cttctctagtgatgcctccagctactcttacaaacaatgctccagggaatatatcaaatgtgttcccttatggaattgtatacgaatttcctatgcaatayatacccaggagttgtatagttgggtcatagaattggcattacctatgaaagcttactacatgattgctctgtggagtggcttaccagtatgcatgtggat

SEQ ID NO: 300578 - DNA, 201 bp, Homo sapiens
atgtctgtatacaaatattattttacaagcctcgtggaaatgaagtcttcaactctaccgtgattttagtccatttacttagatgatttcgtttttgctaytctgtttccttaggagattttgcatttttctgaaaataatttttcctgtatagaattaaataggctgattgaaattgttctaccaagtagtggtaagacc

SEQ ID NO: 300579 - DNA, 201 bp, Homo sapiens
gtaaaatattctgccttagggcacattctgtaattacacttaaatctaggttcttcagaatgtattcatgaggcctaagaatcttcattctgtattgtagrtaagtagaattagtatatttagactgaattggccatatgtcatttttattaaatagcagtagctatgttttaagaatggttttcctataaaagcttatgt

SEQ ID NO: 300580 - DNA, 201 bp, Homo sapiens
aaccccaaaagttttcctctttctcctttataatcctttcccactcccacccacaacccttaagcaaccccccaggaatcactgatttgctttctgtcacrtagatttgcttaaattccctacaattttaataaagtggaatcctacagtatgtatgggaggagggtctggcttctttcactaggcataattattttgaaa

SEQ ID NO: 300581 - DNA, 201 bp, Homo sapiens
aaattaggaaagaagtgatagggaaagatcagtcatttttgtgatagcttttctatgtcttaaatgtggttatttgttgataagaattacaaagcatattkgttcaatcatacctcagtaaaactggaaaaatattaaaaagaattctaaaggatatttgtgttattcctgtttgttctagatacggtcagaattgtaaaa

SEQ ID NO: 300582 - DNA, 201 bp, Homo sapiens
gaagaaggaaccacagtatatatctaataaggtgtgagtatgcctatatgtcaattattttggaataattttgtgatttgtgtattattccttcccttttrttactttggatgataacattgcttgtaattgttttatcacatggttgttttatcacatggttggttatatcacatggcctggagtagtgacttcttgaaa

SEQ ID NO: 300583 - DNA, 201 bp, Homo sapiens
ttctccaaggcagccatttctggttccttccattttcaaacttcttcccatagccagggctatggactaccaagtcctgtataatattttggcattattawtgcacttttgttttctgggagtaattttggctgtacttcctctagttcctctgttactctctactttttgtgtgtagtcttttaataagactccttttat

SEQ ID NO: 300584 - DNA, 201 bp, Homo sapiens
ttcacaaattttgatgctaaattttaacaaggggaataaatcctttcaataaaaaaattatcaagtcatcagcctttgagtagtagaaatagtttggcagyggctgggcgcggtggctcacgcctataatcccaggactttgggaggccgagacgggcagatcacgaggtcaggagatcgagaccatcctggctaacacgg

SEQ ID NO: 300585 - DNA, 201 bp, Homo sapiens
gcagccatttctggttccttccattttcaaacttcttcccatagccagggctatggactaccaagtcctgtataatattttggcattattattgcactttygttttctgggagtaattttggctgtacttcctctagttcctctgttactctctactttttgtgtgtagtcttttaataagactccttttatttacttttc

SEQ ID NO: 300586 - DNA, 201 bp, Homo sapiens
tcccaaatctggaaatttcactggaaatcactgcagcatttcttttgatcatcatgttggtactcaaaaactctcagatttgggggcatttcacattttgkttttttgcaggatattcaacctgtatatttttatttgtttctagtatactgatattttacttttctttataaaatttataaagtactttaaatctacaat

SEQ ID NO: 300587 - DNA, 201 bp, Homo sapiens
tggagtagcttcttgatcttctgaaaaacatagactaacctattaatataaacttttttctcttcttaggtcatgctcttaaacctcaggtttcctctatytttacatcatttttggacggattaaaaaagttttatattacaaaggtaagaatttttataaaatgctaaaattgtaaatgcttaagatatctgttttctg

SEQ ID NO: 300588 - DNA, 201 bp, Homo sapiens
aaaatactggcaaaccgaacgaatccagcagcacatcaaaaagcttatccaccacaagcaagttggcttcatacctgggatgcaaggctggttcaacataygcaaataaatcaatgtaatccatcacataaacagaaccaaggacacaaaccacatgataatctcaatagatgcagaaaaggccttcaataaaattcaaca

SEQ ID NO: 300589 - DNA, 201 bp, Homo sapiens
tctgctttttatttttttcatcacacttctaattattctgtataatttaattatgattcttaatttcagtttcctttactatttctcctgtttttttttttagcagcatatacatttttctcaatattgctctataatataagcaccataatttagggattttttaaggaatatatctgaaggtcagcttgtagtcagtaa

SEQ ID NO: 300590 - DNA, 201 bp, Homo sapiens
gtttcctctatttttacatcatttttggacggattaaaaaagttttatattacaaaggtaagaatttttataaaatgctaaaattgtaaatgcttaagatrtctgttttctgctttcttcccacatgcacctattataagggtgtttttccatgttgctatgtacatttcagaattacagtttttcatgttggaataaata

SEQ ID NO: 300591 - DNA, 201 bp, Homo sapiens
tcaatagcaaagtttatgtcagccatgtatttaatttcaatttatgacttaagtttttaagttgttcatttgctaaaatcatacctaagtccttgtcaggragttaaaaaccttgattaagtataaccagccttagtttaaatattgattttttttacctaaccaaaattactccctattataattatagggcagctgctg

SEQ ID NO: 300592 - DNA, 201 bp, Homo sapiens
gactcagagtctgactctattttatatctacttgagctatgggctaagctgttttcctttaagcacttgccacagcagttttctgacttgttttccttttsttttgaaactttatttggctttctacctccaacctcacatccaactcagaattgtgttttatctcttcttctcactttcagctgcttgaccaaagtttta

SEQ ID NO: 300593 - DNA, 201 bp, Homo sapiens
actccattcattactgagattgtttccacattttggctgttatgaattgtgctgcattaaacatttatgtacaaacttttgtgtgacatatttttattttkgggggtttatagcctaggagtggagttgctggccatataagtcataaccctatgtttcaccatttgaagaatagccagactgttttctagcatggctgca

SEQ ID NO: 300594 - DNA, 201 bp, Homo sapiens
gatgtctttacaaggttaaaaggaaaaccgagtgttaaaacaagctcagaagcagtttctgaagcttgggttttttttgtttgttttcaataaaaacttargagtagtgccctatggtattttgagaggagcatttattccaacaagaggaaaaactgtatttggtattgattagtactcattcctctcaaaactcttctc

SEQ ID NO: 300595 - DNA, 201 bp, Homo sapiens
agcataaaataaaggtgagtttgcttttagtgtgttagcatttgcaagttgtattttgcaaagtattaataggtatcacttttctagtggccctatctgtwtacttgatatgagggatttgccatagaaatatagctaaaaacagaatatttaaacataaaagttgttgtttcctattttggcaggaggaacaagtgtttc

SEQ ID NO: 300596 - DNA, 201 bp, Homo sapiens
ctcataaagctgatttctatatatgttgtgttgtattttcctatgcttcagccttactttgaatgtttaaaaaaaagtctacattttatagtcattctctytaactgaagtacccaaaattcgttgtctaaaaataagtcaaagaaatcaattttattttctaggcatccttaaatcctagtgatacacctccttctgttg

SEQ ID NO: 300597 - DNA, 201 bp, Homo sapiens
tttattggcgttttctgacttttgtagttgttttgtttacagatctgatatgcctttttctagtcctatttgttacttggaaagggctcctattttgagartgttctttcctgacacttctaccctctgctatgctatttgtttataaatggtggtgtttttagtgaaggaagaattggcatgtcttgtttctctttcatt

SEQ ID NO: 300598 - DNA, 201 bp, Homo sapiens
tggtttttgtttgtttgtatttctgattcaaggtattttttcatatccctgttgcttgattgatgatatttaattcatgttgtgttacagctttcttcagratcgtggctggttttagggtggagacttttcaccaatagtaatgtttttattggcgttttctgacttttgtagttgttttgtttacagatctgatatgcc

SEQ ID NO: 300599 - DNA, 201 bp, Homo sapiens
agtgagtagtaggtactatatttataaatctgaagtttttacctatctcttttagcaggtaatttaaagcaagatgggtatattgttccttgctgtccatyattgcattttttaaagagttctattgatcttctgattcattttctcttcagatcttccttttcagagtgtatattttattttttaataaattggctcatt

SEQ ID NO: 300600 - DNA, 201 bp, Homo sapiens
gctatagcttaaattaaggaatatactatgtgtaataagctaaaaagaatttttattttctcccctccttaaaaaatatattattaagattttttttaagacaagataatgctaagtaattttatttatgtatttagttctgtcagtatggaaatttctacgtctctctcggcatttggtttattgtttaaactacaactg

SEQ ID NO: 300601 - DNA, 201 bp, Homo sapiens
aaaaagcatcataagttcccactccagtccgtggaactggcagcccagcccccaggcgtcaggccctccctggcttgaaggtggggtttcaccggggaccrcccatttccgcccaggagcctgtctgcctcctgccactgtttatggtgcccagatgcccaggctgttcgtgctaagggcctcctgcaggccagtgccaag

SEQ ID NO: 300602 - DNA, 201 bp, Homo sapiens; identical to SEQ ID NO: 62761

SEQ ID NO: 300603 - DNA, 201 bp, Homo sapiens
ggaggctgcgggttctctctggccatctgctgggccggccccgggaggctctgagtaccaatgagtgcaaagcgcggagagccgcgtcggcggccacggcrgcgcccacggccactcccgccgcgcaggagtcgggcaccatcccaaagaagcggtgagtagcggtatgtggaaggagttagcgtcgagggaccaggccgg

SEQ ID NO: 300604 - DNA, 201 bp, Homo sapiens
catatatataacaaggaaatagaggcttaattgtctttaggtaattggttattagatgagctgtttccttaattgtgggatgatgttctcagtttattcartctttatacagtgtcagaaattctctagaagttggaaatgaccaaatgactgcatgcattacagaggaaaaccaaaccaacagttttttcctcggccagt

SEQ ID NO: 300605 - DNA, 201 bp, Homo sapiens
aatgtcccttctgtacagtaccacagagtgaaattattccttctttctcagtccaaactgctggtctctaagtgctactgatctcaagtagctattgcttwatttaaagtaatttgttagaggatataaattcttagagcaggggagggcatatgtatgattcattcggaaaaccctaagtaatgagggttttttggagat

SEQ ID NO: 300606 - DNA, 201 bp, Homo sapiens
ttatcctcccttctgtgctcattggtgcccaaagtctggagggggctgaggcagcagggtgctggcatgtcagcactgccctgagcatgcgcacacccggmtgggttgcaacagcacgcaggctcggcctcaacttttctccaagattggagcaggcactggaatggggagaagccaggcggtggaagcagacacttccga

SEQ ID NO: 300607 - DNA, 201 bp, Homo sapiens
attcccaacacaggtgccttgcaccttttcctactcctcactctcttttcctttccttccaccactaggttcaggatggatgaactgtttctgtttcctaracctgtggtgctttttctctcttggactcagagtctgactctattttatatctacttgagctatgggctaagctgttttcctttaagcacttgccacagc

SEQ ID NO: 300608 - DNA, 201 bp, Homo sapiens
ccagtccctgaataccaaaagtatggctcagtagctttccctaattttgaacaaggagtagcctgtttaagagaaattgcaaaacaggtaaaagaaaaaawatatatatatacatacatacatatatgtttatgtatttatatttttcaaattctactacatagttgattgtgatatgttacaactaatcttcatttttag

SEQ ID NO: 300609 - DNA, 201 bp, Homo sapiens
ttgcctagatgtctcttcttcttctcaaccagacttcttcacttggcagcaaaaatgtgaaggtgtgaaactcaatgatgtgtgttaggggacttcaaatygttctatgtggctcaaatagagggtggggttagagttgttacatgagataaagttggttgggtgggctagggctttgcaggatagatttggattttgtct

SEQ ID NO: 300610 - DNA, 201 bp, Homo sapiens
tctcatttttgaataaaagcatttatcacacagtgtttgttcactcatggtcacaagattgattggttcccagtatcatagcatatattgaagcatttttkattttgtttttccagtgggcaagttacggaagcaatggctaaaggaaagtatctctgatgtcggctttgggatgctgaagtctgtcaaggaatatgtgga

SEQ ID NO: 300611 - DNA, 201 bp, Homo sapiens
gagagatgtgttcagtcctttaactattaagtatttgttaactataggtgttttttgtagatgccctttatcaagttgaagaagtccctttcttgtgttartttatagagtttgaattaggaatggatgttggatttgtgaaaaaaatgttattttgtgtcttatagttgaggttaagttgaagtaatttatttgagttca

SEQ ID NO: 300612 - DNA, 201 bp, Homo sapiens
aaatacccgagactggataatttataaagaggtttaattaattcacggttctgcaggctgttcagaaaacataactctggcatcagcttctgggaagacckcaggaagcttacaatcatggcagaagatgaagtgggagcaggcacttcacatagcaaaagcaggagcaagagttgaggttgggtgtgggagggggaagtg

SEQ ID NO: 300613 - DNA, 201 bp, Homo sapiens
gtctttcatatatatatatatatacacatatatgtatatatgtatatatatattttagagacaagatctcattctgttgcccaggctggagtctagtggcrccatcatagctcactgtaaccttaaactcctgggcttaaatgatcctcctgctacagcctccccagtagctaggactacaggcatgtgccaccatgcttg

SEQ ID NO: 300614 - DNA, 201 bp, Homo sapiens
gaaaaggtaaccctggtttatttcttcttttgttcctcctttaattctttctttctatgaaaaattttaaacacacatgaaaatataatgattcctccttragtttaaacattatcaacattttgccataactgctttttgtctcctggtaatatttcaaattctgatgttgtcatgtcacctctaaatatatgtatttgt

SEQ ID NO: 300615 - DNA, 201 bp, Homo sapiens
atgaacatggtatatctttagttttttgtaggtctgtaatttctctcagcagtgtcttacggttttctatgtacatgtctttcatatatatatatatatayacatatatgtatatatgtatatatatattttagagacaagatctcattctgttgcccaggctggagtctagtggcgccatcatagctcactgtaacctta

SEQ ID NO: 300616 - DNA, 201 bp, Homo sapiens
ccttgaattgatgtttgaaatttgtggggacagcaggaagtaggggatcgatgttgctactttaacataaagcagtttgaatctacatgcagtcattttgragtgattacaaaagtcacaatttagaagcatttgatttttaagccctactattctttaatatattgtattttaaggtaattctggctagaatattgacag

SEQ ID NO: 300617 - DNA, 201 bp, Homo sapiens
attggttttaacaattcattttgttgctgataattaaatcatcattttaaatgtaaataatcatatttgagatgtcagtggaaaaacatatttttggatartttggaagcttcatgaaattagtgtcagtaatacattcagatatatagaattattaatataattgagtactgcaaactaatattagtaataatttgttga

SEQ ID NO: 300618 - DNA, 201 bp, Homo sapiens
cctgagaaaatattagtagttcctggagatcagatttctttcttcctttgcaacagaatcgaattctctgggttgatgagaacaatttgacagctcatgtrgaggctggcataacaggacaagagttggaaagacaggtatgttatttatttttcttatttttttaaattaacttattctaatatcaattctgatgttatt

SEQ ID NO: 300619 - DNA, 201 bp, Homo sapiens
ttcactctctctctcttatactaaatgagaatttaaaaaaaaaaaagtctttattactatttgtatttatttcaattttattatgtgaaaaagatctaaaytaatcttcacctcctgctcctccaattgttaaccggttgtggcagcaccattaattaatctgtgcttctcatacattgatttgctatgcctcatatctta

SEQ ID NO: 300620 - DNA, 201 bp, Homo sapiens
gattgaggattttagtttgttcatgtagtttcacttttctgaaagtgggattaggaaactttaaactgtaggggtatatatatatatatatatatatatawatatgtatgaaactaatgaaatatttagcgtttctttttattatttttgttgtgtttttattattgttgcatttctttttattatttttgatgtgttttt

SEQ ID NO: 300621 - DNA, 201 bp, Homo sapiens
aaccaacataatgcaatggatagtatgcagttatatgtggttcctcacttctagtgaggatgttgcatattatgataattttttgtgcccaaatttttgtrtagcacatggagtttagtattgaagcatttgcttctgatacaacatgagattgatagtctatttccaaggtagtctctaggctcaagaatttgggctgtt

SEQ ID NO: 300622 - DNA, 201 bp, Homo sapiens
aaaccaaaagaaaccctgaaacaacccctccccacaaatacaacacaagacaagggacttgaaaagttggggaaaaccttttaacgcgtctaagaccattktagtgtttaattcctctctttgggtatcttagccagtttggcctgctatacagagcaccttagactgggtagcttaaatgttcttagacaagaaacaatt

SEQ ID NO: 300623 - DNA, 201 bp, Homo sapiens
aagtaaaaatttgattaagatatgagtgattgaggattttagtttgttcatgtagtttcacttttctgaaagtgggattaggaaactttaaactgtaggggtatatatatatatatatatatatatatatatgtatgaaactaatgaaatatttagcgtttctttttattatttttgttgtgtttttattattgttgcatt

SEQ ID NO: 300624 - DNA, 201 bp, Homo sapiens
aaagtaaaaatttgattaagatatgagtgattgaggattttagtttgttcatgtagtttcacttttctgaaagtgggattaggaaactttaaactgtaggggtatatatatatatatatatatatatatatatgtatgaaactaatgaaatatttagcgtttctttttattatttttgttgtgtttttattattgttgcat

SEQ ID NO: 300625 - DNA, 201 bp, Homo sapiens
ataggaatagatgctcaatttcataagtactcagtaaaattcaaattaaaattgtaatgagatgccaatggaatgtctcagattcaattatagaatttctrttgtgttcttttttatagttttttatttctctgctaagattttttttctaatattcaccaggagtacattttccattttgtccattggcgtagcaacaat

SEQ ID NO: 300626 - DNA, 201 bp, Homo sapiens
agtatttacattgtattattcataaatattctaaaatgatttaaagcatgtgagaggatgtgcataggttttatataaatactgtgctgttttatgtaagrgacttgagtactatggattttggtatcctcgaaggtcctagaaccagttctatggggatactgatggatgtctgtatacaaatattattttacaagcctc

SEQ ID NO: 300627 - DNA, 201 bp, Homo sapiens
ataaattaaaataaacaagtgtttctacattaacagaggagctcattattcacttcagaaggtggtccaagctgcagaagatatattttggtaacatttakctatattcatgaataaaagagcaggtacaataaactaagatgttaggcataaattctattctttgacagtaacatcaaagagggaaagtataataaacta

SEQ ID NO: 300628 - DNA, 201 bp, Homo sapiens
ataaattgatctcaccttatattttacaacaaaagccatttaatattctcaaactaatcttcagtcatggaaaagaagaagatccattcagtagtcactgkgattcaacaattggtataagtgcttaactttccctttatcacatctctggttaaagtttcatgttctctgcccatgtgttcatctcacaaattaaatgtt

SEQ ID NO: 300629 - DNA, 201 bp, Homo sapiens
gagaaattgcaaaacaggtaaaagaaaaaatatatatatatacatacatacatatatgtttatgtatttatatttttcaaattctactacatagttgattktgatatgttacaactaatcttcatttttagttgtattatatttgtggtttttacccagttctatatgaaaaggtagtgttgtacagtcatcctttaagtg

SEQ ID NO: 300630 - DNA, 201 bp, Homo sapiens
tttattgttttgtaggataagacttatctgtaataataaatttttttttttttgtagtttaaaggatttgacccaaatcagctaagtgtagccacattacygtttgagggggatcgtgagaaggttcttcaacatgaaaaacaagtgtatgatattgctgcaaaatttgggtatggcttcaagttcataatgccaagagaa

SEQ ID NO: 300631 - DNA, 201 bp, Homo sapiens
atatatttagaataatagagaattatggaatgcaaggtacttatcttgttttcagagatggtgatcttggctttttgtagctctagtgttgactctcaggytagatttatacttctagagcatcagaagtcaaaggaatatgttgggtcagtagctatgaatatcccacatcagatgattcaggtctaaaaaagaagaata

SEQ ID NO: 300632 - DNA, 201 bp, Homo sapiens
aaagtgctgggattacaggcgtgagccaccgcgcctggccaaggaaatatttttaaataaaatgataggattgagaaatatgttgctttttaagttagtgyagagagtactaagtaaataagactaatcagaatagtttttactattcagattatgcaatcaagtaaattcctggttgtagcatccctaaagggaagaaat

SEQ ID NO: 300633 - DNA, 201 bp, Homo sapiens
atcaatggtgctaaaattagtaggtgaaagtatgatgagaatcatgatattttacatagtctaagatatgtaaatactgtgtcactaggttttcccactayaaggatactgtgtttcttgttgaaattaataggtatttaaataataggtatttgaacaattaatacctattaattttgacaagaaacagagtatccttat

SEQ ID NO: 300634 - DNA, 201 bp, Homo sapiens
gaagaaaagtggaaaataacaagtgcccatttaggtttgaagaatccagaatgttttacctttgactttatgagttatagaagcttggctttgctctaggyttcatgttcccaaatgagccatctgtcagtatattcacttaattcttactaatttcagtttcctgtaaaggaaacaacttacatattgatgcttaaatcc

SEQ ID NO: 300635 - DNA, 201 bp, Homo sapiens
cctcttgatggagatgggccaattggaaaaacatttacattgcttttaaatttctaattttgggggaggtgtaactagacttaaaaaaaaatagtattgtrcaaatatttcctgtgtaccctttactcatcttcctcaaatgctgatatctcatgtaattatagtatgattatcaaaaccaaaaaattagtgttgtttcaa

SEQ ID NO: 300636 - DNA, 201 bp, Homo sapiens; identical to SEQ ID NO: 62757

SEQ ID NO: 300637 - DNA, 201 bp, Homo sapiens
tcccctctctctgccctttacttagccaccaaagtgatccttttgaaatacagatctgatcatgctttttggctgtctatataaccttttttatttctcarttttaattgaagcctttacattaatatatcctgccatggcttcatgatcaagcaaaagaggaaataatgcttagcacaacaaaaggtgccccagaccctg

SEQ ID NO: 300638 - DNA, 201 bp, Homo sapiens
tttcacctttgtttttaaaaaagatatttgaagtgagtatataattgtagattgatattctttcagcagtacaaagatgttgctccactgttacctacttyattgcttttcatgagaaatctgatattatctttgtctttgtttctgtgtatgtaatatgctttttccccctctggctactttttttttttttctttgaga

SEQ ID NO: 300639 - DNA, 201 bp, Homo sapiens
tctctatcccaagcccatctctgatgatgaagccagtgatggggaagaaacccaggttagtgcagctgatctggaagccctcatcagtggccactaccccmcctcccttgagggagattgtgagcctagcccagcccctgctgtcctggataagtgggtctgtgcacagccctcaagccagaaggcgaccaatcacaacct

SEQ ID NO: 300640 - DNA, 201 bp, Homo sapiens
ggcctttaactctgggctgctgtgtgtggcatgtggttcataccgacggggaaaggcgacctgtggtgatgtcgacgtgctcatcactcacccagatggcyggtcccaccggggtatcttcagccgcctccttgacagtcttcggcaggaaggtataagctccatctctgggtgagcaggttgacagagggcagcacaggt

SEQ ID NO: 300641 - DNA, 201 bp, Homo sapiens
tgatggaatcatgaacgagcatcttaggatagtggcagggctggatgatggcatgtttcccatgctccctgcctttcccaagtcctgctgagtacagaccmaactgcccctaggttggtcctgcctctagccttccctagagtctggggcgatggaagccttgtgtgtgtgctcactcatgcctcttcattggtcctggat

SEQ ID NO: 300642 - DNA, 201 bp, Homo sapiens
tcctggcacccatgaggccctgcttcagacagccctttctcctcctcctcctcccaccaggcctgtgtctcctccccaaaaggcaaaagaggcaccaaacmcccaagcccaggtcaggagcctcccatccctcagaactcccttcccctaggaagcagatcacagaaatggggtgggcctggtggctgttcagaaagtccc

SEQ ID NO: 300643 - DNA, 201 bp, Homo sapiens
ccaccaggcctgtgtctcctccccaaaaggcaaaagaggcaccaaacacccaagcccaggtcaggagcctcccatccctcagaactcccttcccctaggargcagatcacagaaatggggtgggcctggtggctgttcagaaagtcccaggcccctgagagaggagggctctattgtgaagccatttagctcttcccaaca

SEQ ID NO: 300644 - DNA, 201 bp, Homo sapiens
tctatccaaaattctcatcttcaactacacccaagctttacacagccacacagttgccaagcagccaggctggcttttatgtcagcatctgctagaggagycagcttcctttccactggctctacctcttccatctcctcactcttctttcttgcctctgcctcctcctcctctaggaggcctgcagtatccctgggattg

SEQ ID NO: 300645 - DNA, 201 bp, Homo sapiens
ggcataagctgagggtgtgggcccgagtctgggaaggcccttgtactgctgtgggagaggagctccccacgcacagcccctcacctgtcaccgctctcttycccaggtccagaaagcagcccaggcctttaactctgggctgctgtgtgtggcatgtggttcataccgacggggaaaggcgacctgtggtgatgtcgacgt

SEQ ID NO: 300646 - DNA, 201 bp, Homo sapiens
ggcccttgtactgctgtgggagaggagctccccacgcacagcccctcacctgtcaccgctctctttcccaggtccagaaagcagcccaggcctttaactcygggctgctgtgtgtggcatgtggttcataccgacggggaaaggcgacctgtggtgatgtcgacgtgctcatcactcacccagatggccggtcccaccggg

SEQ ID NO: 300647 - DNA, 201 bp, Homo sapiens
gggagagggaagcagccgtgctgtcaacatcatccggcaccctctggggtaggagaacagccattccacatgtgttccctctatccgtcctgcttcctggkcagctggtggtgctgggaatggggtgccccagccttggtgaggacagtgttgggaggcccaggggcccagtaaagtgcatttgacattgaacctgcctgg

SEQ ID NO: 300648 - DNA, 201 bp, Homo sapiens
agaacagcagctcctcagggtggattcccctgggcttgcagcaggcatctggaatgggcataagctgagggtgtgggcccgagtctgggaaggcccttgtrctgctgtgggagaggagctccccacgcacagcccctcacctgtcaccgctctctttcccaggtccagaaagcagcccaggcctttaactctgggctgctg

SEQ ID NO: 300649 - DNA, 201 bp, Homo sapiens
caggggagagggaagcagccgtgctgtcaacatcatccggcaccctctggggtaggagaacagccattccacatgtgttccctctatccgtcctgcttccygggcagctggtggtgctgggaatggggtgccccagccttggtgaggacagtgttgggaggcccaggggcccagtaaagtgcatttgacattgaacctgcc

SEQ ID NO: 300650 - DNA, 201 bp, Homo sapiens
gacctcctccttccattctcttgggaggctcaagaagggagtaaggggattagcggagccctcctgtcaggatacttgaggtgtccggggccccagaattytcagtgtcctggggtggaggcaggaggccatctgcatatgaaagaacctcagtgtctcaggggtggaggctaatgggtttatttttcctcagagggacaa

SEQ ID NO: 300651 - DNA, 201 bp, Homo sapiens
acctggccccttgtcctaagtggagtttcacagacctgggcacgtgggctggggcaggggcagagagagtctgtgtctccctactcttaaagagctccacrgggcaagctcagtgcccactctcagaagcagagccggcaccttctcccgtctctcctcaggcttgcctcctgcacagtgagctttttcttctctcctgtc

SEQ ID NO: 300652 - DNA, 201 bp, Homo sapiens
agccaggcatggtggcacacgccggtaatcccagctactcgggaggctgaggcatgagaatcgcttgaactcgggagatggaggttgcagtgagccaagaygatgccactgtactccagcctgggcgacagagtgagactgtctccaaacaaaaacaaaacaaaagaaaacaaaacaaacaaacaaaaaacaaagtaagaa

SEQ ID NO: 300653 - DNA, 201 bp, Homo sapiens
ggaatcatgaacgagcatcttaggatagtggcagggctggatgatggcatgtttcccatgctccctgcctttcccaagtcctgctgagtacagacccaacygcccctaggttggtcctgcctctagccttccctagagtctggggcgatggaagccttgtgtgtgtgctcactcatgcctcttcattggtcctggatcctt

SEQ ID NO: 300654 - DNA, 201 bp, Homo sapiens
gaggattgcttgagcctgggaggcagaggttgtagtgagcagagatcataccattgctttcaagcttgagtaacagagcaagacttttgtttaaaaaaaaataataataattgatttacatcagtgtagggaataaatttttttaaaaagcccaaatccatgttctcgggtgctcagttcagttggagtgtcattagttct

SEQ ID NO: 300655 - DNA, 201 bp, Homo sapiens
tggcgtgaacctgggaggcggagcttgcagtgagccaagatcgcaccactgcactccagcctgggcaacagagcgagactccatctcaaaaaaaaaaaaamaccaaaaaaaaaacctgtcacttttcacattgaataagttacagttttaggtgaattctccagagagaaaatctgaagtagttaagacgggttaagtaat

SEQ ID NO: 300656 - DNA, 201 bp, Homo sapiens
tgatctcctgatctcgtgatccgcctgcctcggcctcccaaagcgctgggattacaggcatgagccaccacacctggcccacacacaagtattttttttttaaaaaaagataaaatgctgtgaaagttacttaaatatttgtctcagttaaagccttttttttcccatttgtaacagtgtgactggtgtcttaaccagtgt

SEQ ID NO: 300657 - DNA, 201 bp, Homo sapiens
gtcaaagttagtgaggaagaaaacgaaaagtattaactaaagagaatacttcagttgtggtactaaagtattcttgagctgtgggattttctttttttctyttttttttgagacagagtctcgctctgtcgcccaggctggagtggcaccatctcggctcactgcaagctccgcctcccgggttcataccattctacctca

SEQ ID NO: 300658 - DNA, 201 bp, Homo sapiens
cctgtgtcaaaaacaaaaagaagaagaaatgtctggcaaagagtaggttgagtaagtaaataagtacttgcatcctttttttttttttttttttttttttttaaagagaaacgtcttactactttgcccaggcaggtctcaaatgcctgggctgaagtgatccttctgcctcagtctccagaagtagctgtgactgcaggc

SEQ ID NO: 300659 - DNA, 201 bp, Homo sapiens
gctttttgatgatctcccacccgctagcagtggcgattcaggtaagtggtaggaaaaatccaaggtgctgatggaaataatacatagtattttactcttaygtgaaatttatgtataggttttaacgggattttggatgacattaagtcataatacagcataaggtttactaaaactataaacaggcacattaattggaag

SEQ ID NO: 300660 - DNA, 201 bp, Homo sapiens
agacggggtttcaccatgttggccaggatggtctcaatctcttgacctcatgatccgcctgcctctgcctcccaaagtgctgggattacaggcatgagcckctgcgcctggcctttttctttttcttttttttttttttgagatggagccttgctctgttgcctaggctggagcgcagtggcgagatctcagctcactgca

SEQ ID NO: 300661 - DNA, 201 bp, Homo sapiens
ggcagtgagcgaagatcacattactgcactccagcctgggcaacagagtgagactcagtctcaaaaaaaaaaaaaaaaaaaaaaaagtgaattggtttttmagtgagtacttttttttttttttttttttttttgtgacagagtctcactgtgttgcctaggctggagtgcagtggcccaatcatggctcactgaagcctt

SEQ ID NO: 300662 - DNA, 201 bp, Homo sapiens
caggaaagtgacagggtgcggggtcactccattcactcattccctttctcatctggtaggatgaaaagatccagacccgggaagggaagtccgcagccgaygcccgctacgaagcagcctgcaacaggctggccaacaaggcggtgcagcggggctcggccgacaacgtcactgtgatggtggtgcggatagggcactgag

SEQ ID NO: 300663 - DNA, 201 bp, Homo sapiens
ctaggatgaagcccagtctactagtgactttttccaacagtctacagctgtgtttctgtctggcttttactttatttccaggttctcttgccacatcaatrtcccagatggtaaagactgaagggaaaggagcaaagagaaaaacctccgaggaagagaagaatggcagtgaagagcttgtggaaaagaaagtttgtaaag

SEQ ID NO: 300664 - DNA, 201 bp, Homo sapiens
cacagcactttgggaggccaaggccagaagatcactcaagcccaggagtttgagaccagcctggcaacatagggagactctatctctataaaaaaaaaaaacaaacctaactggacatggtggtatgtgcctgtggtcccagctgctcaggaggctgtggtgggaggattttctgagccccaggaggttcaggctgcagtg

SEQ ID NO: 300665 - DNA, 201 bp, Homo sapiens
tgtcagagagaggagaaggggcttcctggcagagggaacacacagtaaggcattaaaatgtgacagtgtgaaagcatggccagacaggcgcttgagggacrgagggagtggtgggaaagtgatagcagggtactttgggggcagatcctgaagggccggccctcagccccatgctggagagtttgaactttagttgatcat

SEQ ID NO: 300666 - DNA, 201 bp, Homo sapiens
gtacaaaaaaaattttttttttatttacctggacttggtgacacctgtagttctagctactcaggaggctgaggtgggaggatcacttgagcccagcgagygattgcaccactgccctccagcctgggcaacagagggagaccctgtctcttaaaaaaaaaaagagagaatgagagatggcagttcctgtgctgctcatat

SEQ ID NO: 300667 - DNA, 201 bp, Homo sapiens
tctttcttttcaatctgataatggccctgaattcatttctcaaattattcaaacacttgcacaagccctacaaatcacctggaagttgcacctcccctctsgacctcaatcttcaggaaaggttgaagaaatgaatggcattctacaaaaacaccctcaccaggtactcacaccaaacacataaagactgggttacacttt

SEQ ID NO: 300668 - DNA, 201 bp, Homo sapiens
ttaagtgatgcatgactgtattttttactgttttcgataaataacttgatctgtttgttaatgtttaaaaccaaatccgatttaaataggaacggagttctgaattttagttttgttgtcagtgaaaaatcagaattaacagatcttgatctttgaagcaaatgtgagttttaaacatttaatgtaaaatactgggaaaag

SEQ ID NO: 300669 - DNA, 201 bp, Homo sapiens
tttcttacattgaaggtagctatgtagcagtgaatttttctgagaagattaagacaagttttatttttattttacaaggaaggcagctgaacagatgggamgtttacatatagcatttaaatttaaatgtcagtactgtgtgcctagaacttgatcaagtgcaggcctctgataaccaaaagtaactgttctagcattgta

SEQ ID NO: 300670 - DNA, 201 bp, Homo sapiens
tattgctcactgtctgaaaagtgcgtagcactcagcttttataaccgttagctaaatctaaaacagaaaaaaagcaagtatcaaggaaatggttcattttraaatataagatacttcccattgagctctggaaattagtctcaaagtgctgggctattggtggtgactgtgtttctgatgtgtttccccccaggaagcctg

SEQ ID NO: 300671 - DNA, 201 bp, Homo sapiens
taaatcgcaagcttggagtgctatttcttactcatatttaacgttacagagttttctcttctttggtttaatatttgtagctcgtttctcttaatgctagwaatcttggttcttaacaacagtatatttatttgttaaaacagtttcatagtatcaaaattatcactactaggggagcagagggctcacacctgtaattcc

SEQ ID NO: 300672 - DNA, 201 bp, Homo sapiens
atgtttcattctgtcctttatccatttgaaaggaagatagtcacctatagttgtggaaatcagtgttttcctttcactcctctgcttctttccctccatcyttcctttgtgaatcactgtgtgccaactgactattcattgtgttgtagtcacagtcatggggttttctgctgctcacttgatttcagatatggccagtgg

SEQ ID NO: 300673 - DNA, 201 bp, Homo sapiens
tctggggaggttcactggtaccttgtgaatattctgtttcctgtcagcctttcacctaatggtcttagcatccctaaatcattatttcatcagggatgtcmaagatgatttccatattctgtgattcttttcacatgtattagcgggcattctgtaaagaaacttcttatcatcaataagagaacatcatagattcttcta

SEQ ID NO: 300674 - DNA, 201 bp, Homo sapiens
gttggaaacagatgtccatattaaaaaagctgttaagaaaatatgttttaaaaatttgcccaacaggaaggagaaaattagaatctaatagcaaacttgtstcaaagcaggggagaccacatgatcttcctctttgaaaatctgtcctgggtgatgaccatatgctctctaaacaggttttctgtgttttagggaaagaag

SEQ ID NO: 300675 - DNA, 201 bp, Homo sapiens
tctgttctcctgcctgaggccagggctggctgccccactctcagcttttatcattaaatttttcagacatacagaagaaacttgacaatagtaaaacattkccaaatctactagcagtgaacattgtgtcatgtttagtctgtatagatgtgtgtcaggctgagctgtttaaaagttgcagatatgatgacataacagcct

SEQ ID NO: 300676 - DNA, 201 bp, Homo sapiens
ggattctattttaaagaaagacttttaaatgtttcatgctttcaataatgaaattatcaagaaaatacttgttttcctcaaaatattcagtggccctgaaratgcctgttagggcatcaatcattgcttttatgttgactgtaactgttggaaacagatgtccatattaaaaaagctgttaagaaaatatgttttaaaaat

SEQ ID NO: 300677 - DNA, 201 bp, Homo sapiens
gattttcttcccttgcagaatgttaccgaaataggatttttataaacctgtaggtctttgaaggcccctcctccaccccaccccaaatttctgaacgtctrtcatgaagtctcaagtattgttttcctggtctagaatcagtttttttcttcccaggattctattttaaagaaagacttttaaatgtttcatgctttcaat

SEQ ID NO: 300678 - DNA, 201 bp, Homo sapiens
gattctgaaacttaagtcttacatattttttgtgggctcactaagtgttctgctgtgtttcaggatcagggggacctttgctttttgatgatctcccaccmgctagcagtggcgattcaggtaagtggtaggaaaaatccaaggtgctgatggaaataatacatagtattttactcttatgtgaaatttatgtataggttt

SEQ ID NO: 300679 - DNA, 201 bp, Homo sapiens
acttttggagtgtaaatcttcacattttttgttaaaagagtttcgtgactttctcctgaggctatctgtctttggttacctgaaactcctttattttctcyatagctatttattgaatcagacactgtgctggggctagggacaccaggttccaacagattttcttcccttgcagaatgttaccgaaataggatttttata

SEQ ID NO: 300680 - DNA, 201 bp, Homo sapiens; identical to SEQ ID NO: 62797

SEQ ID NO: 300681 - DNA, 201 bp, Homo sapiens
gaggtgaacgtgtatactttcaacttggattcttgtgtgccagttcagatatctaatagcttaaacagaatttcaggaaaaagctggaaaataaggaatgktcgttaaattttatgtggaaaaagataattgggcataaaacatttaagacatacttttggagtgtaaatcttcacattttttgttaaaagagtttcgtga

SEQ ID NO: 300682 - DNA, 201 bp, Homo sapiens
ggtcagggtcacactttgtccaatgattgcagcccccaatgctttgaatttcagtttattcaaaatagaatgtaagggcctggagcagtgggtcacatctktaatcccagcactttgggatgctgaggcaggaagattgcttgagtacagtagttcgtgaccaacctgggcaacatagtgagaccccgtctctacaaaaag

SEQ ID NO: 300683 - DNA, 201 bp, Homo sapiens
catgtgggtttatttctcttcctcacttccagtttctatcaagcctttgttggagggaaggtgtgcatggtgctaggccctgggggtgcagagataaacaraatgtggtttctgctctggtggggtccacagtggtaggggggacacatggggatgggcagctgcagtccagtgtgtcctaggcatgtgctgtgtgctggg

SEQ ID NO: 300684 - DNA, 201 bp, Homo sapiens
tcaggtattttgctaaattagtagttttcatccaagcccttaaaagttttaattgctgaatgaatcaagttttttaaaggagagatgtatatattttacctaaaaaaagtgtttgttcatatcaggcagaaatggaactttcctatgtcatacccataaaagtgccgacctgatgtctttaagattggcagcttatattga

SEQ ID NO: 300685 - DNA, 201 bp, Homo sapiens
atcctaaatactttttttgggtgctggggacagagtctggttttgtcccccaggctggagtgcagtggcgctatctcagctcaccgcaacctccgcctccyaggttcaagcagttttcctgcttcagcctcccaagtagctggggctacaggcacccgccaccatgcctagctaatttttgtatttctggagagacagggt

SEQ ID NO: 300686 - DNA, 201 bp, Homo sapiens
tgagtaatggttatcctaaatactttttttgggtgctggggacagagtctggttttgtcccccaggctggagtgcagtggcgctatctcagctcaccgcawcctccgcctcccaggttcaagcagttttcctgcttcagcctcccaagtagctggggctacaggcacccgccaccatgcctagctaatttttgtatttctg

SEQ ID NO: 300687 - DNA, 201 bp, Homo sapiens
ctacaaccaacaagatgagatttgacaggttaaaatcgtttgtacaagaacagaatctggtttcacatacttgtgaaaatactgtgatttaaaaaaaaaaaccatactttgaataaatcatattgattgctaaagtgaatggaataatgagtctaaactgtgcatcatgaccctcacacatgatatgtgggtaccacaaat

SEQ ID NO: 300688 - DNA, 201 bp, Homo sapiens
gctacaaccaacaagatgagatttgacaggttaaaatcgtttgtacaagaacagaatctggtttcacatacttgtgaaaatactgtgatttaaaaaaaaaaaccatactttgaataaatcatattgattgctaaagtgaatggaataatgagtctaaactgtgcatcatgaccctcacacatgatatgtgggtaccacaaa

SEQ ID NO: 300689 - DNA, 201 bp, Homo sapiens
ttgctatttaacagtttgtatcctagaagatcgctaggctttttgcagataccagcagaagtctttgaagaagaaaaaacatgtttgttacggatactgamctgtgagccactgagagggtaactggggcccagagaagggccaggctgaattctgcctttaggacagcagcccaggaagcatttcctaccatgtgcagcc

SEQ ID NO: 300690 - DNA, 201 bp, Homo sapiens
aactggtcctggagtctttgaacttgactcagccattcattttcaaaataaccacggttttagctgtgggtaaaaattggatttgtgtagcagtcttttttctcttgtcaatggagtataatttctatctgaatatatttgggacagcatttggattcaccagtgtgcgtgtaaacctatgagtcttaaaatctccattgc

SEQ ID NO: 300691 - DNA, 201 bp, Homo sapiens
taactggtcctggagtctttgaacttgactcagccattcattttcaaaataaccacggttttagctgtgggtaaaaattggatttgtgtagcagtcttttttctcttgtcaatggagtataatttctatctgaatatatttgggacagcatttggattcaccagtgtgcgtgtaaacctatgagtcttaaaatctccattg

SEQ ID NO: 300692 - DNA, 201 bp, Homo sapiens
ggtgagactgagaactaaatcagttgatactcaagttggttattgctgtttggttggctgtgtgaagcagtcagatgtgttattttggctttagcagagartcattgatgagtcttaaaagagtggtgctgaggagtggatgccaaggcttccaggagtagcggccatgcaggtgtgacttagaatggcacttctcatgat

SEQ ID NO: 300693 - DNA, 201 bp, Homo sapiens
tcacctgaggttaggagtttgagaccagcctggccaacgtggtgaaaccctgtctctactaaaaatacaaaaaattacccgggcgtggtgccgggcacctstaatcccagctactcaggaggctgaggcaggagaacagcttaaactgggaaggtggaggttgcagtgagccaagattgcgtcattgcactccagcctggg

SEQ ID NO: 300694 - DNA, 201 bp, Homo sapiens
ccttgcctttacaaacaagggcctgaaggggagagagcttgcagctgcctaaggtgacagtgctgcagcctagaccagaattgttctttggggcagtaggyttccccaaatggtttttccttggcaataggactgtcccttagatgtctcttcccatttgtagatcactgccccatctcctccatatcccctcacctaaaa

SEQ ID NO: 300695 - DNA, 201 bp, Homo sapiens
ctaagcctggaaaaagccgttgaaatttgtagtcagttgtgtaacttgtcaaagttagtgaggaagaaaacgaaaagtattaactaaagagaatacttcasttgtggtactaaagtattcttgagctgtgggattttctttttttctcttttttttgagacagagtctcgctctgtcgcccaggctggagtggcaccatct

SEQ ID NO: 300696 - DNA, 201 bp, Homo sapiens
ctcttggattagtaagaagcagtttcattcacggtcgctgcagtttacatgagcagtgatgggattataggcctggtttcaggcctcaagcagtgctgttkgcccagtttttgccaccgtaactactgtcctggtaactactgtggacagtcatgcctgagaatgtgactctaacatgagcgtaagcatcacctcttctcc

SEQ ID NO: 300697 - DNA, 201 bp, Homo sapiens
tgtaccagagttgatatcaaaaccaggggcgactctctccctaactgttgtgtctttgacacttctttgctgcttgattctctgaacttacgtttatcagyaggaggctgaatgtgaaactccattgttaactgttttcttcaaactccattgttaactgtttttttcaactggtacctttagatgctgcgcccactgaat

SEQ ID NO: 300698 - DNA, 201 bp, Homo sapiens
tgtctctggccttctagactccaggccaaaagggaccttgatacttgttgagtgcttcctttcatgtcacaaatgtgacaacagccagagtgagcacttgkctgtagttattcagcagagtttgtaccagagttgatatcaaaaccaggggcgactctctccctaactgttgtgtctttgacacttctttgctgcttgatt

SEQ ID NO: 300699 - DNA, 201 bp, Homo sapiens
ggacatgtctctggccttctagactccaggccaaaagggaccttgatacttgttgagtgcttcctttcatgtcacaaatgtgacaacagccagagtgagcrcttgtctgtagttattcagcagagtttgtaccagagttgatatcaaaaccaggggcgactctctccctaactgttgtgtctttgacacttctttgctgct

SEQ ID NO: 300700 - DNA, 201 bp, Homo sapiens
cctggcatggttgcgcgcgcctgtattcccagctactcaggaggctaaggcagaagaatctcttgaacctgggaggcggaggttgcagtgagctgagatckcgccactgcattccagcctggtgacagaacgagactccgtctcaaaaaaataaaacaaaaaacaaaccaaaatgacagtgggaggaggataatcttccct

SEQ ID NO: 300701 - DNA, 201 bp, Homo sapiens
ataaatttttaattaaagcttttgtttttaaaagaagaaagttgatacccagctcatttctaaatggaggcaaaaagatgatagggatgaccctcttgggrgatataaatttatttgtttagttgaattggtgtttggcctggcacaatagctcatacctgtaatcccagcactttgggaggctgaggcgggtggaccact

SEQ ID NO: 300702 - DNA, 201 bp, Homo sapiens
gtgtcacgctccattggggacgggcagtacaagcgctgcggtgtcacctctgtgcccgacatcagacgctgccagctgacccccaatgacaggtaaaaggsccctataagaggcacaggtgtgtgtgcatgtgggtttatttctcttcctcacttccagtttctatcaagcctttgttggagggaaggtgtgcatggtgct

SEQ ID NO: 300703 - DNA, 201 bp, Homo sapiens
gatgaagtttgagtggactgtgtgtggtgttttcctaaatgcatttcagtcttctgatgtggtttaacactattgctcactgtctgaaaagtgcgtagcaytcagcttttataaccgttagctaaatctaaaacagaaaaaaagcaagtatcaaggaaatggttcattttaaaatataagatacttcccattgagctctgg

SEQ ID NO: 300704 - DNA, 201 bp, Homo sapiens
cattttattatttgtctggcattaggtatcagaaaataagcttaaatgagtctaaccattaaatgtaaatagatctctgcctgcactggaatcttttatcsttttcttcctcagttgaagtaaaagcagctgatcttactgtttgttcaaattcttcaccagccttgagcatggaaatacatattttcagggcatcttaag

SEQ ID NO: 300705 - DNA, 201 bp, Homo sapiens
ggcagccactggaggtgctgttcccacccatgtgcagctgggcagggtccctaccccagggcagcagttaatggcctagacacccctgcatatttgagatsaagaaatgtcagtagtggttaataatgtgaattccacagtctgtatctttcacacttccattctctgcttttaaggtgagattctaagtactgtggaccc

SEQ ID NO: 300706 - DNA, 201 bp, Homo sapiens
ggccctataagaggcacaggtgtgtgtgcatgtgggtttatttctcttcctcacttccagtttctatcaagcctttgttggagggaaggtgtgcatggtgytaggccctgggggtgcagagataaacagaatgtggtttctgctctggtggggtccacagtggtaggggggacacatggggatgggcagctgcagtccagt

SEQ ID NO: 300707 - DNA, 201 bp, Homo sapiens
ggactgagaggagctcatgggaaggagggctgttagctgtagaagggtcccgagaccttcaaggagtagaacttcccctgttacgtagtcttcagtgtgaygaggctctgtctgagatctaacactggtgacataggtggatgacagttgtagatttcacatgtgtccacgtggaaggaaacttgcctccctacatttgca

SEQ ID NO: 300708 - DNA, 201 bp, Homo sapiens
ggaaacgtcaggtaaccaagggactgagaggagctcatgggaaggagggctgttagctgtagaagggtcccgagaccttcaaggagtagaacttcccctgytacgtagtcttcagtgtgacgaggctctgtctgagatctaacactggtgacataggtggatgacagttgtagatttcacatgtgtccacgtggaaggaaa

SEQ ID NO: 300709 - DNA, 201 bp, Homo sapiens
atggttcattttaaaatataagatacttcccattgagctctggaaattagtctcaaagtgctgggctattggtggtgactgtgtttctgatgtgtttcccyccaggaagcctgcctggaaagatgggtccactgccacgtgtgttctggctgtagacaacattctttatattgccaacctcggagatagtcgggtatgtgg

SEQ ID NO: 300710 - DNA, 201 bp, Homo sapiens
ggctcttcaaggtctttaccccagaagaagccgtgaacttcatcttgtcctgtctcgaggtgagaaatctcacacgggggtggtggttgtcccaattgtgycttagttttcagagaagtagaagttctgagaccccatttcctcccattgtgggacagcccttgtgccctttttcagtgtgaactctgcctactgactcac

SEQ ID NO: 300711 - DNA, 201 bp, Homo sapiens
atctggctgttgcatacttttatacctaaatgcagagaacatttcaagtcatttattaggacagcagctgcccttattggagattgatgtgttaggcactrtgacaaatgctcttcctacttgtcctgacccattttcaaacatccctctgagatgacagtattcttaccatgttacgcacgggtgaagacagctgagact

SEQ ID NO: 300712 - DNA, 201 bp, Homo sapiens
tgtttgctcttcatgttgggctgttacctgtaaatgtcccctcccttgtcctaagacatctggctctgtgacaccactgaatgcagcgtgattgtctggawcatctcatgtggtttttgagtctgtccggagaacgggcgttgtgattgttagacccaatgtttgggcaaaagtgacctacttcgggatattaggaattct

SEQ ID NO: 300713 - DNA, 201 bp, Homo sapiens
atcatcataggattgttgtaagggtaaaatgagttgatgtttatgaagtttctggaagggtgcccatgtatggaggcagcatagtacctcactaaaagcayggactgcatggctttgaatccccactccactccttactggctctgtgatcttgaacaggtaattgacctcagtgcctcagttttttcatcggtaaataat

SEQ ID NO: 300714 - DNA, 201 bp, Homo sapiens
catcctatgtaggacatcgcattgagtgtaggcatagtgccagggcagcttgcctcatcgttaccaaacgcgtttcctgggatctgtcattctgtccattktgctttctcctgttactctagcagttcagtgaatgtaagattactactctgtatatggaactttgaaaacaagaatgaggccacattacgcctgtaatct

SEQ ID NO: 300715 - DNA, 201 bp, Homo sapiens
gtatttgaatgtgcacatcctatgtaggacatcgcattgagtgtaggcatagtgccagggcagcttgcctcatcgttaccaaacgcgtttcctgggatctrtcattctgtccattttgctttctcctgttactctagcagttcagtgaatgtaagattactactctgtatatggaactttgaaaacaagaatgaggccaca

SEQ ID NO: 300716 - DNA, 201 bp, Homo sapiens
cttttatagggtggttcttttacttatttggttgctacactagtactttaaaaattgatggtcagttgttgaggaggaaataaaatatttgatggccacaycatcttaaaaatactttaaaaaaattggaggctgggctcgatggcgcatacttgtaatcccagcgctttgggggaacaaggcaggaggatggcttgaggc

SEQ ID NO: 300717 - DNA, 201 bp, Homo sapiens
gagacaaggctttgccatgttgcccaggctgctctcgaactcctggggctcaagtgttctgcccaccttggccctcccagagtgctgggattacagtggtragccactgtgcctggctgagccattaacagttgtttaaaagtggaaaaacgcagtcttaaatgaattatgggaaagcactgagtgtccaaagggagaata

SEQ ID NO: 300718 - DNA, 201 bp, Homo sapiens
atttttgagacagcctcattgtgtcgcccaggctggagtgcagtgacataaacacagctcactgcagtctcgacctccgtgggcacaggtgattcttccayctcagcctccttggtagctgggactacaggtgcgcaccaccacagccagctaatttttgtatgttttgtagagacaaggctttgccatgttgcccaggct

SEQ ID NO: 300719 - DNA, 201 bp, Homo sapiens
agtcaaatccgattctggagttgggacctaggtgtgtgatgagaactgctgagtcctgtcgaaggttaagctgggcagcactgcttggcagccactggagrtgctgttcccacccatgtgcagctgggcagggtccctaccccagggcagcagttaatggcctagacacccctgcatatttgagatcaagaaatgtcagta

SEQ ID NO: 300720 - DNA, 201 bp, Homo sapiens
agaagggccaggctgaattctgcctttaggacagcagcccaggaagcatttcctaccatgtgcagccatctgcaccgcatctcctgaacttgcttggtccrtgatttgggagccccgtggtgatcttaaacgcccatgcgcagccgtggcatttgcggagtgctctctcacacgttgagtatggttctctgccttgccttt

SEQ ID NO: 300721 - DNA, 201 bp, Homo sapiens
ggattacaggtgtgagccaccgtgccctgcccccactgaccgttctgatggtacagagcatctcagtaactggtcctggagtctttgaacttgactcagcmattcattttcaaaataaccacggttttagctgtgggtaaaaattggatttgtgtagcagtcttttttctcttgtcaatggagtataatttctatctgaat

SEQ ID NO: 300722 - DNA, 201 bp, Homo sapiens
atgccttgcaaataacaggcagtaagaacagctctgagttataaaccagatgaggttttttttctcatggctcaggatgtcctaaattgaaaaggaattcyaaaaaacttgaaagaaaagcagctctctagaataaatgtcatttctcgtgggcatttttgttttttttttttccttgaaatagtttatttgatgtctttt

SEQ ID NO: 300723 - DNA, 201 bp, Homo sapiens
tctatccaaggcagctaaaggagggcataagtcttttctttagaattccacttcaaggacattgcattatgaattagaccaggagtattttctggtttatygtacagtttgactattaaaattttattttctgccagagataagagagatgtcatctcttagtataagactgcacttacctatcctttgaagtgtagtttc

SEQ ID NO: 300724 - DNA, 201 bp, Homo sapiens
gcattaaaaccaggaaagggacctctggagcccaagaaggcagatccattgagtgtaaatttaattgggaacactacatcatgccttgcaaataacaggcrgtaagaacagctctgagttataaaccagatgaggttttttttctcatggctcaggatgtcctaaattgaaaaggaattccaaaaaacttgaaagaaaagc

SEQ ID NO: 300725 - DNA, 201 bp, Homo sapiens
gaggctgaggcgggtggaccacttgaggccaggagtttgagaccaacctggccaacatggtgaaaccccgtctctactaaaaatacaaaaattagaccagrcatggtggctcacccctgtaatcccagcgctttgggaggctgaggcaggcagaacacttgaggtcaggagttcaagactagcctggtcaatatggtgaga

SEQ ID NO: 300726 - DNA, 201 bp, Homo sapiens
taggcatgtgccaccacagccggctaattttttgaattttttgtagagacagtgtctccttaagttgctcaggcttgtctcagagtcctgggctcaagccrtcttcccaccttggtctcccaaagtgccaggattactcgcatgagccaccatacccagcctgggatttgcattaaaaccaggaaagggacctctggagcc

SEQ ID NO: 300727 - DNA, 201 bp, Homo sapiens
ggagtacagtggcacaatcatagttcattgcaggcttgacctcctaggctcaagcagtcctcccacctcagcgtcctgagtagctgggaccataggcatgygccaccacagccggctaattttttgaattttttgtagagacagtgtctccttaagttgctcaggcttgtctcagagtcctgggctcaagccatcttccca

SEQ ID NO: 300728 - DNA, 201 bp, Homo sapiens
tctgactggcattttggactggctagtttgtatttactagaaaatctaacacatcacttgattgtacatcagtgattctcagctggggttgattttgctcmccgcccaggggacatttgtcagtgtttgggtacatttttgtcacaactgcgggagggagttgttactggcatctggtgggtagagactagggatgctggt

SEQ ID NO: 300729 - DNA, 201 bp, Homo sapiens
atgatccttttgcctgatttgaatctcacttctctgggatggcagcacatcccttgccctgatgctttgacttacaccctagacagagttgttttgtgctyactgactcctcttttgtgtccctgtgcaacctcttagagctcaccctgtccaacagtgctccgatttgagttatagacttgcagctgggggagatgcctt

SEQ ID NO: 300730 - DNA, 201 bp, Homo sapiens
gctcttcacagtgttcattttattatttgtctggcattaggtatcagaaaataagcttaaatgagtctaaccattaaatgtaaatagatctctgcctgcaytggaatcttttatccttttcttcctcagttgaagtaaaagcagctgatcttactgtttgttcaaattcttcaccagccttgagcatggaaatacatattt

SEQ ID NO: 300731 - DNA, 201 bp, Homo sapiens
tgcatttcagtcttctgatgtggtttaacactattgctcactgtctgaaaagtgcgtagcactcagcttttataaccgttagctaaatctaaaacagaaamaaagcaagtatcaaggaaatggttcattttaaaatataagatacttcccattgagctctggaaattagtctcaaagtgctgggctattggtggtgactgt

SEQ ID NO: 300732 - DNA, 201 bp, Homo sapiens
gcctttaagaattaagagttcactaatttactcttaactttgttattaacattttttaaaaattcagagttcattattccgatttgccttgttaaacagartgcttgactcaaatgtatcgaggctagtagcattggctctacctcctcctgaaaatgttccttttcatgtcctaattaagtagaagggaagaatagagca

SEQ ID NO: 300733 - DNA, 201 bp, Homo sapiens
ggaattcgagcctcaaaatttgctgcacagaatttgcatcaaaacttaatcagaaaatttcctaaaggtgagactgagaactaaatcagttgatactcaarttggttattgctgtttggttggctgtgtgaagcagtcagatgtgttattttggctttagcagagaatcattgatgagtcttaaaagagtggtgctgagga

SEQ ID NO: 300734 - DNA, 201 bp, Homo sapiens
tgtgattttgtgataattaacagtagttttttttttttttttctggtccacgggaagttccccctctccttgaagttaaggggtccgctcatctcctaagygctggcccctgccagtgggagtccctgtgggctgtggtttgagctcagcatcctagcagcttgaaacagggcctgtgttaatccctgcgtcctgtgggtt

SEQ ID NO: 300735 - DNA, 201 bp, Homo sapiens
ttgacagagcaggaccattgccatcttggacaaacaccacctttctaagttccccttgattaaaaaaccacctaaatcctaccccaaaacatcagcctaayggctaatgtcagcataaccagaaatattccaaccctaagataaacctctcttcaaccagaaacatgctaaccctgaaatagcctctcctccaatagcctc

SEQ ID NO: 300736 - DNA, 201 bp, Homo sapiens
aaagaactctctgctcactcccccagcaggaagtagccagaaaaaatgcgctgccccttgtccttttcataactatagagactggattgacagagcaggascattgccatcttggacaaacaccacctttctaagttccccttgattaaaaaaccacctaaatcctaccccaaaacatcagcctaacggctaatgtcagca

SEQ ID NO: 300737 - DNA, 201 bp, Homo sapiens; identical to SEQ ID NO: 62794

SEQ ID NO: 300738 - DNA, 201 bp, Homo sapiens
aaaattcccacagtgccagagatggtcacttagggttttgggtaggaaaataacgtatctggcttcccatagtcacaggggactcagggcgtcagcctggrcagagtgctggcctccattccctccctgcaccagtcccttcagcgggcttgtggtggccaggagtactgggcctcaggatgaggtgctcagggagtctga

SEQ ID NO: 300739 - DNA, 201 bp, Homo sapiens
agttttgatgtataacatcctatccacaaatacttgtaagtagtttaaacctttgtctcagaaattaagtgggtttaaacaaatcttagcctggccaggcrctgtggctcatgcctgtaatcccagcactttgggaggctgaggcaggtgaatcacctgaggttaggagtttgagaccagcctggccaacgtggtgaaacc

SEQ ID NO: 300740 - DNA, 201 bp, Homo sapiens
cctaatgtttgaggtaattaataattctgttaattggcgaagagaaggatagtctcagttttgatgtataacatcctatccacaaatacttgtaagtagtktaaacctttgtctcagaaattaagtgggtttaaacaaatcttagcctggccaggcgctgtggctcatgcctgtaatcccagcactttgggaggctgaggc

SEQ ID NO: 300741 - DNA, 201 bp, Homo sapiens
tctgacacaggcggttcaagaccaacctacccaacatggtgaaactccgtctctactaaaaatacaaaaatacaaaaattagctgggtgtgatggtgcackcctgtaggctgaggcaggagaattgcttgaaccctggaggtggaggttgtagtgagctgacgttgcgtcactgcactcgagcctgggcgacagagtagac

SEQ ID NO: 300742 - DNA, 201 bp, Homo sapiens
cctcccgagtagctgggattacaggcgctaccatgcccggctaattttttgtattttaattagagaccgggtttcgccatgttggtcaggcttgtcttgamcttctgaccttagatgatctgcccatctcagcctcccaaagtgctgggatgacaggtgtgaaccaccacacctggccatctgttttggaattttaaagga

SEQ ID NO: 300743 - DNA, 201 bp, Homo sapiens
ctcctgggttccagtgagtctcgtgcctcagcctcccgagtagctgggattacaggcgctaccatgcccggctaattttttgtattttaattagagaccgrgtttcgccatgttggtcaggcttgtcttgaccttctgaccttagatgatctgcccatctcagcctcccaaagtgctgggatgacaggtgtgaaccaccac

SEQ ID NO: 300744 - DNA, 201 bp, Homo sapiens
gaacagcttaaactgggaaggtggaggttgcagtgagccaagattgcgtcattgcactccagcctgggcaacaagagtgaaactccatctcaaaaaaaaaraaaaaagaaaaaagaaaaaaaaaaccttagcctttgaatagttggacaaatatttattttatctccatctccaggccctttttttattttttattttttg

SEQ ID NO: 300745 - DNA, 201 bp, Homo sapiens
gaacttcttaggtagagctcctctggttggggaaggtgagggttaggagaggttgggagatagatggtgtgggggcagtggggaatgcaggtaatcccatktcgtatgcaggtatattttctatattttaggaaaagtactccagtcatcttatataagaattctcaatcttcagggctgtagacccataccaaaaaattg

SEQ ID NO: 300746 - DNA, 201 bp, Homo sapiens
tgtcatttacattaacattaaaccgtacctgtacttgatgcaaaggacatgtgctccacaatccaggaatagccactttcagggattttccaaatctaatkagattgaaatgcaaaatatccctctgttctagctattgttaaccctggctgcatgtgggaaacactcaaggagctttaagatacaaaacactgccaggct

SEQ ID NO: 300747 - DNA, 201 bp, Homo sapiens
ctgttaagaaaatatgttttaaaaatttgcccaacaggaaggagaaaattagaatctaatagcaaacttgtgtcaaagcaggggagaccacatgatcttcytctttgaaaatctgtcctgggtgatgaccatatgctctctaaacaggttttctgtgttttagggaaagaagctcagaaaggacccctgctctttgatgac

SEQ ID NO: 300748 - DNA, 201 bp, Homo sapiens
tctagctactcaggaggctgaggtgggaggatcacttgagcccagcgagtgattgcaccactgccctccagcctgggcaacagagggagaccctgtctctwaaaaaaaaaaagagagaatgagagatggcagttcctgtgctgctcatattgtccttctttagacttagagattgtttcacattgtctgtactgtgttgtg

SEQ ID NO: 300749 - DNA, 201 bp, Homo sapiens
gtcactcttttatcagtgggactgcgcccctcaaccaagagactgccgagttctttctaagcttggacatacctataggcgagttgtatgggttgagtgaragctcgggaccccacacgatatccaaccagaataactacaggcttctaaggtaccagcccccggggcagacccctgctcctcccataacatggggtcaag

SEQ ID NO: 300750 - DNA, 201 bp, Homo sapiens
cgactcaagattaataataacaacagcaacgacagcagcagcagcagccacggccatgacaaaattgagcggctgggcacagtgactcatgcctgtaatcycagcactttgggaggctgagatgggaagactgccttagcccaagagttcaagaccagcctggacaacatcgcaagattctgtctctaaaaaataaaataa

SEQ ID NO: 300751 - DNA, 201 bp, Homo sapiens
tctttcccagggctgggttgccatgaagcccacagggaactttctttcagattccacagagcagcctagagcccctaaaagcgatcatccagtacagactrccaatgaagaagaacaacaacttgtactctgtaagtgtgggaggtgggcactggggaaaggggagggcggggccttgcaagaaaagtgggcgtggcctaa

SEQ ID NO: 300752 - DNA, 201 bp, Homo sapiens
tccagaccatcctggctaacatgctgaaaccccatctctactaaaaataccaaaaaaatcagccaggcgtggtggcaggtgcctgttagtcccagctacgygggaggctgaggcaggagaatggcgtgaacccaggaggccgagcctgcagtgagccgagatcgcgccactgcactccagcctgggcgacagagcgagact

SEQ ID NO: 300753 - DNA, 201 bp, Homo sapiens
tggtgccgccactgtggaaaagtctggcgatttctaaaaaaagaaaaaatgtaaacagagaattgccatatgattcagcagtctcactcctggatatttamcaaaaaaaaaaaaaaaaaaggaaagccagagacatgaagagttatttgtagactcagggtcatagcggcgttattcacaagagacagagggtggaagcag

SEQ ID NO: 300754 - DNA, 201 bp, Homo sapiens
gggtagtgaggttgcagtgagccaagatcacaccactgcattccagcctgggcaacagagtgagactctgtctcaaaaaaacaaaaacaaaaacaaaaacraaaacaaacaccagtcattggatttagggatcaccctaaatccaagatgatgccatgatgtcatctcaagatccttcactaaatccacctacaaaaaccc

SEQ ID NO: 300755 - DNA, 201 bp, Homo sapiens
gattactgagatgaaggtgtgggtagtgaggttgcagtgagccaagatcacaccactgcattccagcctgggcaacagagtgagactctgtctcaaaaaaacaaaaacaaaaacaaaaacaaaaacaaacaccagtcattggatttagggatcaccctaaatccaagatgatgccatgatgtcatctcaagatccttcact

SEQ ID NO: 300756 - DNA, 201 bp, Homo sapiens
gcgtgaacccgggaggtagagcttgcagtgagccgagatcatgccactgcactccagcctgggtgacagagcgagactctgtctcaaaaaaaaaaaaaaaatagtgaaagtactgaggtttatggcaaataaaagtacttgcattgcaaagtacacattcaaggagagggagtgcaggcgtgcttgaaagatagcatcaca

SEQ ID NO: 300757 - DNA, 201 bp, Homo sapiens
aaaaagaggctagagttgctggagagagcttacttaggacatctaacccagctttagtctttcccagggctgggttgccatgaagcccacagggaactttytttcagattccacagagcagcctagagcccctaaaagcgatcatccagtacagactgccaatgaagaagaacaacaacttgtactctgtaagtgtgggag

SEQ ID NO: 300758 - DNA, 201 bp, Homo sapiens
tttttagtagagatggggtttcgccataccagccaggctggtcttgaacttctgacctcaggtgatccacccgcctcgacctctcaaagtgctgggattayaggcacgcgccaccatgcccagctaatttttgtatttttagtagagatggggtttcaccatgccagccaggctggtctcgaactcctggcctcaagcgat

SEQ ID NO: 300759 - DNA, 201 bp, Homo sapiens
tgagtggccatgacatttggaggctggtcccttgttagcatctgggactgtgtgggctctgaagagacaggtccttttctgaaggtcagagggtctatgaraccagccagggaccaggagagggaggctgccaccttcagctaactggtccccagctcctcatcttggaaataaaatccaacctccttactatagctctat

SEQ ID NO: 300760 - DNA, 201 bp, Homo sapiens
cagttgcaagccagagggagtgccacacatttttaaatgaccagatcttttgagaacacactatcgtgaagacagccccaagccatgagggatccgccccyctgccatgacccaaacacctccaccaggccccacctccagcacaggggattacagtgcaacatgagatttgggcagggacaaatatccaaaccacatcaa

SEQ ID NO: 300761 - DNA, 201 bp, Homo sapiens
atttttgtatttttagtagagacgggatttcaccatgttggcaaggctggtcctgaactcttgaactcaagtgatctgcttgcctcagcctcccaaaatgstgggattacaggcataagcaagcgcgcctggtccatttattatcttatagttctggtggtcagaagtttgaaaatggtctcactgggctaaaatcaatat

SEQ ID NO: 300762 - DNA, 201 bp, Homo sapiens
tcccatcataggtggatgtgcaatttccttccaacacagctgcctactctaccattgccatctaccacctccccagtagaccaggttcagttgaacaaackcaaggttacacacccaattctccaagagggtctcttggactttctctcacttgcccgttactgggtggtagtgagaaacacacaacaaaccaacaactgt

SEQ ID NO: 300763 - DNA, 201 bp, Homo sapiens
tagtttcctgttaatgccacaacaaatgaacagaaacttagtgacttaaaacaatatttatttatttatttagaaatggagtctcgttctgtcacccaggmtggagtgcagtggcagtggcatgatctcaactcactgcaacctccacctccgggttaaacgattctcatgtctcagtctcccaagccgggattacaggcg

SEQ ID NO: 300764 - DNA, 201 bp, Homo sapiens
cggcctcccaaaagtgttgggattacaggcatgaaccagcctgctgtctgttgatgactatctgaacatacatctccagtccttgggtcctactactggcmccaagccaagagcctttagaagcccatctatgaggcccatgtctagtcaaggggaaaaagtagcatcccggccgggcgcggtggctcatgcctgtaatcc

SEQ ID NO: 300765 - DNA, 201 bp, Homo sapiens
ggaaggaaccctcaaatctctctttgaggaattctgggctggggttttaaggggatctttgggggtgaagggctggaaaattagagtcattgattggttgrggtaaaggggatgaaatcatcggatgtggaagctgcattctttggtaagtcagctcccgtggggtccttcagatcagtgggcatcagtagtttcactggt

SEQ ID NO: 300766 - DNA, 201 bp, Homo sapiens
ggctggagtacagtgccgcgatctcggctcactgcaacctccgcctcctgggttcaagcaattctcctgcttcagcctccagagtagctgggactccaagygcgcgccaccacgcccggctaatttttgcattttttagtagagacggtttcaccatattggacaagctggtctcaaactcctgacctcgtgatccgccca

SEQ ID NO: 300767 - DNA, 201 bp, Homo sapiens
tcctgacctcaagtgatctgccggcgtcggcctcccaaaagtgttgggattacaggcatgaaccagcctgctgtctgttgatgactatctgaacatacatytccagtccttgggtcctactactggcaccaagccaagagcctttagaagcccatctatgaggcccatgtctagtcaaggggaaaaagtagcatcccggcc

SEQ ID NO: 300768 - DNA, 201 bp, Homo sapiens
gatgcacacacgaatttgttttcttttcccaggggtctttgtgttggtatttatgccaccaactctgccgaggtttgtcaatatgtcatcactcatgccaragtgaacatcttgctggttgagaatgatcaacagttacagaaaatcctttcggtaaacccctacccagcactgcctgccaaagtcacccaggggtacctc

SEQ ID NO: 300769 - DNA, 201 bp, Homo sapiens
caaaaaagatgttggggtaggtggagcatccagagggctgggagggtagttggtgaggaggctcagccttctccagtgggtcccatcagcccttctccacytgacggcattcttattcacaggaaatataatactcccgtgagctaccgcatggctaagactctcgtgttcagcaaagtcaagacatcccttggcttggat

SEQ ID NO: 300770 - DNA, 201 bp, Homo sapiens
gaccattctgcctttaaggtgtgtgtggatgcacacacgaatttgttttcttttcccaggggtctttgtgttggtatttatgccaccaactctgccgaggyttgtcaatatgtcatcactcatgccaaagtgaacatcttgctggttgagaatgatcaacagttacagaaaatcctttcggtaaacccctacccagcactg

SEQ ID NO: 300771 - DNA, 201 bp, Homo sapiens
tgaatccaggaggttgaggttgcagtgagctgagattgcaccactgcaggccagcctgggtgaccgagctagaccctgtctcaaaaaaaaaaaaaaaaaaatggtgaacaggcaaactgcatacttggagaaaatattcttaaaactcgaatttctaacaaaggactggtatctaagatagataaagaaattctgtaactc

SEQ ID NO: 300772 - DNA, 201 bp, Homo sapiens
gctttgtcctgctgattgatctactttgtgtgtgtaaactccgtaggctcattcaagttcactttacttatttttaaaattaaacttatttttttttttttgagatacagttttgctctgtcacccaggctggagtccaatggtgctatcttggctcactacaaccttcacctcccaggttcaagggattctcctgactcg

SEQ ID NO: 300773 - DNA, 201 bp, Homo sapiens
cagagcaagggaagctctgaactgagatctgaaccaggagtgtctaaaccattgtacatcatagactatacacaacaagccccttctctcaacaagtgtgmtaggttccttgaaccctggactgtgcatgacaaggtttatgggagccttcatcctgagcccagggaaagaagtggaactagccttgagggatattttggg

SEQ ID NO: 300774 - DNA, 201 bp, Homo sapiens
tctgttgcctggtcatgcatgggtgtgtgtaattttcttttatctccacaactcaattgatttctcctttctcgataggtccaatgatgaaacttaagagmcattttgtagcccagaaatacaaaaaacaaattgatcacatgtaccactgactgctttgatggagctgctctcagctgttctgatggtgagattcagttg

SEQ ID NO: 300775 - DNA, 201 bp, Homo sapiens
acagactaaatcatgcaagttaaattctaaagcttctagaaaaagaaaagcacggaatggtttcacaacctgggggtagtcaaagatttcttagacaggayacagagagcaaaaagcataagagaaaaagttgccaaataggactttattagcattaaaaacttctgcttattaaaagacaccaacaagatgaacagttgt

SEQ ID NO: 300776 - DNA, 201 bp, Homo sapiens
tagccccaggcatgggactctgttgcctggtcatgcatgggtgtgtgtaattttcttttatctccacaactcaattgatttctcctttctcgataggtccratgatgaaacttaagagacattttgtagcccagaaatacaaaaaacaaattgatcacatgtaccactgactgctttgatggagctgctctcagctgttct

SEQ ID NO: 300777 - DNA, 201 bp, Homo sapiens
gttttcacctgctgtgttcctgcactcactgatggaaacttttagagttcataaaacattactgcaaatctagaatccagaacaactgcttgattcttgtrtcaagcacgctctttatcatgaacaaaatcgtacaattttcctccctgaaagccactagaaaaatcagtttcaataaatgttgaccaacaatttggcctc

SEQ ID NO: 300778 - DNA, 201 bp, Homo sapiens; identical to SEQ ID NO: 62807

SEQ ID NO: 300779 - DNA, 201 bp, Homo sapiens
gccaggatagtctcaatctcctgacctcgtgatccacccgccttggcctcccaaagtgctgggattacaggcgtgagccgccatactcggcctaatttttrtatttttagtagagatggggtttcgccataccagccaggctggtcttgaacttctgacctcaggtgatccacccgcctcgacctctcaaagtgctgggat

SEQ ID NO: 300780 - DNA, 201 bp, Homo sapiens
ttttttttgagacagagtcttgctctgttgcccaggcgcaatctcggctcactgcaagcttcgcctcccaggttcacaccattctcctgcctcagcctccygagtagctgggactacaggtgcctgccaccatgcccggctaattttttgtattttttagtagagatggggtttcaccacattagccaggatagtctcaat

SEQ ID NO: 300781 - DNA, 201 bp, Homo sapiens
atatatgtagtcatgtgtccatatgagggtgtgtgtgagcagtgcgtgcatatgtgtgcatatatataattgtgtctgtacgagggtgagagtgtgagcawgtgtgtgcatatgtatgtgaatgtgtgagtgtgggtgtgtaattgtgtgtctgtatgagggtgtgtgtgaccatgtgtgtccatatgtgtgtgtgcatgt

SEQ ID NO: 300782 - DNA, 201 bp, Homo sapiens
agtactatgaggcttgtcggaaggctgcaaaatccttgatcaaggtaagattcattcattcattctcctttgttcaaccattcattctgaataggtaacasacatacatacatgtggtacaaaattcacaaggcaccaaaagatacaaaggttaattggcgaaaatttccctctgattcatgagcctcagccactcagttc

SEQ ID NO: 300783 - DNA, 201 bp, Homo sapiens
acagagcaagaccgtgtctccagaaaaaaagaaagaaagaaaaaaaaaatggacataacaaagacagcaggatagatgtgtgataaaatatggtaaaacgytagcagttgtagaatctaggtgttggataagaaagtatttggtatacaatccttttgactattaaaatttggcggggcggggaatgaaaaaataaataaa

SEQ ID NO: 300784 - DNA, 201 bp, Homo sapiens
taagatggggccaggtgcggtggctcatgcctgtaatcccagcactttgagaaactaagggaggaggattgtttgagcccaggagtttgagatcagcctcrgaaacacagtagaaccccatctctacaaaacattaaaaaataaattagctaggcatggtggtgtttgcctgtagttccagttatttgggaggctgaggtg

SEQ ID NO: 300785 - DNA, 201 bp, Homo sapiens
actgtgtgtcagtttgcccaactgtaaaatggggagagtagagggcccaattctggcagagggcctggcccatggaaggtcagcaatggaagattgcaaargtcagcctccactcccttaatacactgtctcagctagtgctgtatagcaaggtgtggagctaggatcatccccctgggtctggaggtcccgatcctagat

SEQ ID NO: 300786 - DNA, 201 bp, Homo sapiens
accagtgctgtccaatatggcagccactggccactatgtggtctgtccaaaccaagatgtgctgtaatacataaaacacactgggcttcaaaagcacagcmccaaaaaaaaaaaaaaaaaaaaaaaaatagaatatacaatatctcatcagtattttaaaattttgattacatgttgagatgatattttggaataccgggt

SEQ ID NO: 300787 - DNA, 201 bp, Homo sapiens
ctttgctgggctatgcattcagagtccaagagagggctccactgtgtggcaggcagatctgtgactggaactgcagaaaacacacacatacacacatacayacacacacacacacacacacacacacacacacacacacactcttagttgcagtggattctgagtagcaggcttcaactcatgctgtctctactctaccag

SEQ ID NO: 300788 - DNA, 201 bp, Homo sapiens
accatcgagagtgaattcaagaaacaagtcagaaaatagtgaaagtgggccgggtgcggtggctcacacccgtaatcccagcactgtgggaggccgagacrggcggatcacgaggtcaggagatcgagaccatcctgactaagatggtgaaaccccgtctctactaaaaaatacaaaaaattagccaggtgtggtggcggg

SEQ ID NO: 300789 - DNA, 201 bp, Homo sapiens
cccttctccatgtcttttcccaggcatgggtgctgcccactccagtggtttgtgccacacccacatttcctttgtcccaaggggggctttggtgggctgcrttctcctcctcctttaggggttacccatgccaagggttagatcttcagggatcctgcggccccccagaggctcactggtcccttgtgcttgccaaagtca

SEQ ID NO: 300790 - DNA, 201 bp, Homo sapiens
tgcttggctttgctgggctatgcattcagagtccaagagagggctccactgtgtggcaggcagatctgtgactggaactgcagaaaacacacacatacacwcatacatacacacacacacacacacacacacacacacacacacacactcttagttgcagtggattctgagtagcaggcttcaactcatgctgtctctact

SEQ ID NO: 300791 - DNA, 201 bp, Homo sapiens
tggccactatgtggtctgtccaaaccaagatgtgctgtaatacataaaacacactgggcttcaaaagcacagcaccaaaaaaaaaaaaaaaaaaaaaaaaatagaatatacaatatctcatcagtattttaaaattttgattacatgttgagatgatattttggaataccgggttacgtaaaatatttattattaaaagta

SEQ ID NO: 300792 - DNA, 201 bp, Homo sapiens
ggaggctgaggcatgagaattgcttgaatccaggaggttgaggttgcagtgagctgagattgcaccactgcaggccagcctgggtgaccgagctagacccygtctcaaaaaaaaaaaaaaaaaaatggtgaacaggcaaactgcatacttggagaaaatattcttaaaactcgaatttctaacaaaggactggtatctaag

SEQ ID NO: 300793 - DNA, 201 bp, Homo sapiens
cacatgcctggattatagtgagtctcaacttattgcaacctctgcctcccaggctcaagcgattctcatgcctcggccacccaaacagctggcattacagkcatgcaccaccgtgcctggctaattttttttttttaacaaagcgccccaaagtgggtgtctgaaacagcagaaatgtattgtctcacaattctggaggcc

SEQ ID NO: 300794 - DNA, 201 bp, Homo sapiens
caccgtgtgaaccatggccaggctggtctcgaactcctgacctcaggtgatccacccgcctcggcctcccaaagcactgggattacaggcatgagccaccrtgcttggcattcatttttatttgtaaacacttttatcgtggaaagtttcaaacacaaaagtagagctgatcataacataagcccccagctacctatcact

SEQ ID NO: 300795 - DNA, 201 bp, Homo sapiens
atggcacagccagccacccagcctagccccaggcatgggactctgttgcctggtcatgcatgggtgtgtgtaattttcttttatctccacaactcaattgwtttctcctttctcgataggtccaatgatgaaacttaagagacattttgtagcccagaaatacaaaaaacaaattgatcacatgtaccactgactgctttg

SEQ ID NO: 300796 - DNA, 201 bp, Homo sapiens
gactgagattgtgaagcagcaagaccccctggtctacaaggccatccagcaaggcatcaatgctgtgaaccaggaagccatgaacaatgcacagaggattsaaaagtgggtcatcttggagaaggacttttccatctatggtggagagctaggtgagtggccatgacatttggaggctggtcccttgttagcatctgggac

SEQ ID NO: 300797 - DNA, 201 bp, Homo sapiens
accgtgactgagattgtgaagcagcaagaccccctggtctacaaggccatccagcaaggcatcaatgctgtgaaccaggaagccatgaacaatgcacagargattgaaaagtgggtcatcttggagaaggacttttccatctatggtggagagctaggtgagtggccatgacatttggaggctggtcccttgttagcatct

SEQ ID NO: 300798 - DNA, 201 bp, Homo sapiens
tcaactctcagcaccttaggtccaaaaagacaccaaccgccccccgtccaaagttattaaataaataaaaacatttgccacccaactctggtgactatttscagttactcccaggctgtggaccacctgtcgagatggagaagtccttctgaggctatccaaacacggaccaggccatgagaccccgatgaccatccctga

SEQ ID NO: 300799 - DNA, 201 bp, Homo sapiens
ctctccaatgcatgccagaggcgtggttatgattagcaaaatggatgttgcaagtaactttttcattggattggctagaagtgtcatagagagaccccatyccgctttctttggcatgaacagagtataaaaatctcgcaggggccgggcgtggtggctcatgcctgtaatcccagcactttgggaggctgaggtgggcgg

SEQ ID NO: 300800 - DNA, 201 bp, Homo sapiens
gcacgcgccaccatgcccagctaatttttgtatttttagtagagatggggtttcaccatgccagccaggctggtctcgaactcctggcctcaagcgatccrcccgactcagcctcccaaagtgctgggattacaggtgtgagtcaccacatctgaaccctacatggccttttaaaattgtgaaacatataatgcatataaa

SEQ ID NO: 300801 - DNA, 201 bp, Homo sapiens
aaaaaataataataggccaggcgcggtggctcatgcctgtaatcccagcactttgggaggccaaggcgggcggatcacctgaagtcgggagttcgagaccmgcctgaccaacatggagaaactccatctctactaaaaatataaaattagcgaggcgtggtggtgcatgcctgtaatcccagctactcgggaggctgaggc

SEQ ID NO: 300802 - DNA, 201 bp, Homo sapiens
tcagttgcttggctttgctgggctatgcattcagagtccaagagagggctccactgtgtggcaggcagatctgtgactggaactgcagaaaacacacacayacacacatacatacacacacacacacacacacacacacacacacacacacactcttagttgcagtggattctgagtagcaggcttcaactcatgctgtct

SEQ ID NO: 300803 - DNA, 201 bp, Homo sapiens
gggctcaaagaatgtgcccaggctctattttcctttctctatttcttggctccgctccagccttgctttctcacatagtcctgagatggttcagcagctcytagagctacatcttgactcattcacatacacagtctgtgtctcagaattcccaggtaaagtcttcatcttcattatgattggaccacttgaggtcacatg

SEQ ID NO: 300804 - DNA, 201 bp, Homo sapiens
cctatcatactctcttgggtccccactctggccatcctggactttttgtatccctcagacatcccaagctgttgcctgccccaggctccttgaatgtctgyttcttcttctctctggaaaactcctgtccagctgctatacgggcttctgccatcttttctctccaatgcatgccagaggcgtggttatgattagcaaaat

SEQ ID NO: 300805 - DNA, 201 bp, Homo sapiens
atggttatgtagattgaacactgaacaacccaagacaaagatgtacttggtactgaaagtaaagagtgtgtgtgtgtgtgtgtgtgtgtgtgtgtgtgtgtgtttataagtcagtattcccaaatctaaaaagctccaaaaaacaggagtttttggcagcaaagtctgatctgaattgataagatgttgtttgtggtcttc

SEQ ID NO: 300806 - DNA, 201 bp, Homo sapiens
tatggttatgtagattgaacactgaacaacccaagacaaagatgtacttggtactgaaagtaaagagtgtgtgtgtgtgtgtgtgtgtgtgtgtgtgtgtgtgtttataagtcagtattcccaaatctaaaaagctccaaaaaacaggagtttttggcagcaaagtctgatctgaattgataagatgttgtttgtggtctt

SEQ ID NO: 300807 - DNA, 201 bp, Homo sapiens
gtatggttatgtagattgaacactgaacaacccaagacaaagatgtacttggtactgaaagtaaagagtgtgtgtgtgtgtgtgtgtgtgtgtgtgtgtgtgtgtttataagtcagtattcccaaatctaaaaagctccaaaaaacaggagtttttggcagcaaagtctgatctgaattgataagatgttgtttgtggtct

SEQ ID NO: 300808 - DNA, 201 bp, Homo sapiens
tgtatggttatgtagattgaacactgaacaacccaagacaaagatgtacttggtactgaaagtaaagagtgtgtgtgtgtgtgtgtgtgtgtgtgtgtgtgtgtgtttataagtcagtattcccaaatctaaaaagctccaaaaaacaggagtttttggcagcaaagtctgatctgaattgataagatgttgtttgtggtc

SEQ ID NO: 300809 - DNA, 201 bp, Homo sapiens
cagagtgagaccctgtctggaaaataaaagtaaagaaaagaaaagaaaagaaaaggaaaagaaaaaagaaaagaaggaaaagaaaaaagaaaagaaaagaaggaaggaaggaaaagaaaagagaaaagagagagaaaaaaattgagggtggtgactagaaataaatattaacattagttatatctcatcatcgagactaac

SEQ ID NO: 300810 - DNA, 201 bp, Homo sapiens
ctgtaattccaacactttgggagtggaacacctgaggtcgggagtttgagaccagcctgaccagcatgtagaaactctatctctactaaaaaaaaccccamaaaattagccaggcgtagtggcacatgcctgtaatcccagctacttggagggctgaggcaggagaatcacttgaacccgggacgcagaggttgcagtgag

SEQ ID NO: 300811 - DNA, 201 bp, Homo sapiens
acagagtgagaccctgtctggaaaataaaagtaaagaaaagaaaagaaaagaaaaggaaaagaaaaaagaaaagaaggaaaagaaaaaagaaaagaaaagaaggaaggaaggaaaagaaaagagaaaagagagagaaaaaaattgagggtggtgactagaaataaatattaacattagttatatctcatcatcgagactaa

SEQ ID NO: 300812 - DNA, 201 bp, Homo sapiens
aacagagtgagaccctgtctggaaaataaaagtaaagaaaagaaaagaaaagaaaaggaaaagaaaaaagaaaagaaggaaaagaaaaaagaaaagaaaagaaggaaggaaggaaaagaaaagagaaaagagagagaaaaaaattgagggtggtgactagaaataaatattaacattagttatatctcatcatcgagacta

SEQ ID NO: 300813 - DNA, 201 bp, Homo sapiens
tacctatatgatatcattgactgctcatggtagccctttgaggtaggtgccatcatgatcccaagtaataatgatggtgacgataatctgggaccaatagrggttaagtgtcttccccagaatcatgctgtggttggataaagaccctgagatctgaactcgtttgttcgactcaagattaataataacaacagcaacgac

SEQ ID NO: 300814 - DNA, 201 bp, Homo sapiens
gccggccactctcctctcctcccaggcccaggacaggcatgaccaatggatcctaggattctaggcagacatgaccagtggatggaagagttggcctcatmcctacagcccctttgccaatcctgttaaactccctgcttttttgctttgcagtgctgtggagcatggtttctgcacacctggaatgactggaaccccaaa

SEQ ID NO: 300815 - DNA, 201 bp, Homo sapiens
tttctgttgtatttctcataggactgagtttgagcatgtttacttctttttaaaagtcatttttcagtttcagataattatctattcatgtcctttgcccrctttcccattgggttttggtctttttctgattaattcctcagggttctttacatatgagggaaatcaagcttttatactttggatgtattgtccacatct

SEQ ID NO: 300816 - DNA, 201 bp, Homo sapiens
gcactccagcctaggcgacaaaaccaaaccaaaccccatgtgatcttaagtctgattactgataagtgttttcgaaagaggtggcattgatttttaccacratgaatgagagcacctgttttcccacattttcataatagacaatattgtcagcttttttgatcttacttaacctgaaaggtgaaaactgcatcatatttt

SEQ ID NO: 300817 - DNA, 201 bp, Homo sapiens; identical to SEQ ID NO: 62809

SEQ ID NO: 300818 - DNA, 201 bp, Homo sapiens
aagtggatgcatgtacatttcagagcaaccctgcaaggtttccgtatgaaccagcgaccatgcatcctctgtgggggatagaccttgggttcatggatgakttggttaattgggtgtcttggaggttggctgagagctcccactgttcttgactcttaagacaagatggcacatgaggtgaaagcaggtgccccagtggag

SEQ ID NO: 300819 - DNA, 201 bp, Homo sapiens
agcatgggtggtgacagaggtgtctgggggcagtgtgagatgaatcagatgagcggagaacctctggacaagctgaacttcgaggccatcaacttctgtcrgggtctgggcagccaggcatccaccgtgactgagattgtgaagcagcaagaccccctggtctacaaggccatccagcaaggcatcaatgctgtgaaccag

SEQ ID NO: 300820 - DNA, 201 bp, Homo sapiens
gggaggggtgctggtcaaggagcatgggtggtgacagaggtgtctgggggcagtgtgagatgaatcagatgagcggagaacctctggacaagctgaacttygaggccatcaacttctgtcggggtctgggcagccaggcatccaccgtgactgagattgtgaagcagcaagaccccctggtctacaaggccatccagcaag

SEQ ID NO: 300821 - DNA, 201 bp, Homo sapiens
gtaacgccatgttagtaggagataaactgaagtttctgagcatgttgctgacgctgaaggtaacatgggtttgctgtcattgggggaagtctctgcagccrgtcttgggttccctggccccaccccagggtcaagaggatgcatctgtgggttcaagacccacttcttggtctgtgggcctggggaggggtgctggtcaag

SEQ ID NO: 300822 - DNA, 201 bp, Homo sapiens
tagctttggctcacttggaaatgcatcaaaaaatcagatggagccaggcgcggtggctcatgcctgtaatcccggcactttgggaggccgaggcaggtggrtcacttgacgtcaggagttcgagaccagcctgggctacatggtgaaaccccatctctactaaaaatacaaaaattagccagatgtggtggcgggtgcctg

SEQ ID NO: 300823 - DNA, 201 bp, Homo sapiens
accatgcttggcattcatttttatttgtaaacacttttatcgtggaaagtttcaaacacaaaagtagagctgatcataacataagcccccagctacctatsactcggctccaacttaaagtcagccttggtcatttctgtgtcaccccactcctcgtgggtagttttaaagcaagcaccagacagtgtgttctttcatgca

SEQ ID NO: 300824 - DNA, 201 bp, Homo sapiens
cacagctgcctactctaccattgccatctaccacctccccagtagaccaggttcagttgaacaaacgcaaggttacacacccaattctccaagagggtctsttggactttctctcacttgcccgttactgggtggtagtgagaaacacacaacaaaccaacaactgtctccagaggaaaccctgttctcttctttctcagt

SEQ ID NO: 300825 - DNA, 201 bp, Homo sapiens
ttcctcagtgaagccctccctaacttccatgtttgaaatagcaaacaataaaccaccccattactacctaattcccatttggctactttttttcttccttagaaaattttgacactgtcatattatatgctcatttgtttatcaggaacatcagctccttgaggtcaggggttttctgtcttattcactactgtaactgca

SEQ ID NO: 300826 - DNA, 201 bp, Homo sapiens
ggtgggtgctggtgggtgggtggggtccttcttccagctgggaatgctggcttaatttgagttttccataactggaaaatgccacatacacaaccttcccytctacacccacctggctgctgtggatttctgtcctggttctagcaggtccagcattaagtgaataaagcaatatctgaattatttctgactcctagtttc

SEQ ID NO: 300827 - DNA, 201 bp, Homo sapiens
gcatgagccaccatgcttggcattcatttttatttgtaaacacttttatcgtggaaagtttcaaacacaaaagtagagctgatcataacataagcccccarctacctatcactcggctccaacttaaagtcagccttggtcatttctgtgtcaccccactcctcgtgggtagttttaaagcaagcaccagacagtgtgttc

SEQ ID NO: 300828 - DNA, 201 bp, Homo sapiens
ttttccttcccagctgggtttggagcgtttccacggagttggtatcctggggtttaactctgcagagtggtttatcactgctgttggtgccatcctagccrggtaaggtcattggcttggttcatggtgagggttaaggagccgctaccctgggcctgggacccctgggcttgtccagtgtgagatgcaaacaggaatttt

SEQ ID NO: 300829 - DNA, 201 bp, Homo sapiens
ccatgtgactacctttgattctgtcgtcacatatcctaatgatataacatctctgtgtttatgttttgtttttctgtttgctttttccttcccagctgggyttggagcgtttccacggagttggtatcctggggtttaactctgcagagtggtttatcactgctgttggtgccatcctagccgggtaaggtcattggcttg

SEQ ID NO: 300830 - DNA, 201 bp, Homo sapiens
tgagccactgcgcctggcctccatgtgactacctttgattctgtcgtcacatatcctaatgatataacatctctgtgtttatgttttgtttttctgtttgytttttccttcccagctgggtttggagcgtttccacggagttggtatcctggggtttaactctgcagagtggtttatcactgctgttggtgccatcctagc

SEQ ID NO: 300831 - DNA, 201 bp, Homo sapiens
caacagagtgagaccctgtctggaaaataaaagtaaagaaaagaaaagaaaagaaaaggaaaagaaaaaagaaaagaaggaaaagaaaaaagaaaagaaaagaaggaaggaaggaaaagaaaagagaaaagagagagaaaaaaattgagggtggtgactagaaataaatattaacattagttatatctcatcatcgagact

SEQ ID NO: 300832 - DNA, 201 bp, Homo sapiens
gcaacagagtgagaccctgtctggaaaataaaagtaaagaaaagaaaagaaaagaaaaggaaaagaaaaaagaaaagaaggaaaagaaaaaagaaaagaaaagaaggaaggaaggaaaagaaaagagaaaagagagagaaaaaaattgagggtggtgactagaaataaatattaacattagttatatctcatcatcgagac

SEQ ID NO: 300833 - DNA, 201 bp, Homo sapiens
tgagccgagattgtgtcactgcactccagcctaggcgacaaaaccaaaccaaaccccatgtgatcttaagtctgattactgataagtgttttcgaaagagrtggcattgatttttaccacgatgaatgagagcacctgttttcccacattttcataatagacaatattgtcagcttttttgatcttacttaacctgaaagg

SEQ ID NO: 300834 - DNA, 201 bp, Homo sapiens
gttgagactgcagtgaattatgatcataccactgcactccagcctgggcaacagagtgagaccctgtctggaaaataaaagtaaagaaaagaaaagaaaagaaaaggaaaagaaaaaagaaaagaaggaaaagaaaaaagaaaagaaaagaaggaaggaaggaaaagaaaagagaaaagagagagaaaaaaattgagggtg

SEQ ID NO: 300835 - DNA, 201 bp, Homo sapiens
actttacttatttttaaaattaaacttatttttttttttttgagatacagttttgctctgtcacccaggctggagtccaatggtgctatcttggctcactrcaaccttcacctcccaggttcaagggattctcctgactcgacctcccaagtagttggaactacaggtgtctgccaccatgcctggctaattttttttgta

SEQ ID NO: 300836 - DNA, 201 bp, Homo sapiens
gttgctgacgctgaaggtaacatgggtttgctgtcattgggggaagtctctgcagccggtcttgggttccctggccccaccccagggtcaagaggatgcayctgtgggttcaagacccacttcttggtctgtgggcctggggaggggtgctggtcaaggagcatgggtggtgacagaggtgtctgggggcagtgtgagatg

SEQ ID NO: 300837 - DNA, 201 bp, Homo sapiens
caagaactcttcatgccctgaagctctgagctggttccctcccattggtggaccttatttcattttattgggaggcgtaactttcaggtcacagagcagtsataactacctgccagtgtctcttaggagtgaggtacctggagttcggggaccccaacctgtgacaatgacagcagacaaattggttttctttgtgaatgg

SEQ ID NO: 300838 - DNA, 201 bp, Homo sapiens
gtggattgcctgagctcagaagttcgagaccagcctgggcaacatggcaaaaccccatctctactaaaaataaaaaaaattagctgggcatggtgggacaygcctgtaatcccagctactcaggaggcttaggcacgagaatcttttgaacctgggaggcagaggctgcagtgagccgtgactggaccattgcaccccagc

SEQ ID NO: 300839 - DNA, 201 bp, Homo sapiens
agtcaattgtgagaattaacaaatttattttggtggtaccactttttacagttttttaaatcttaattttgtaaccatagtagttacgtatgtatagattyttgtttgaaaaaaaaaaaaaaagaggtggctgggtgcggtggctcatgcttataatcccagtactttgggaggccgagatagacagatcacttgaggtca

SEQ ID NO: 300840 - DNA, 201 bp, Homo sapiens
gttgtttagaaaaataactagagggcttggatgaaataaagtcaattgtgagaattaacaaatttattttggtggtaccactttttacagttttttaaatyttaattttgtaaccatagtagttacgtatgtatagattcttgtttgaaaaaaaaaaaaaaagaggtggctgggtgcggtggctcatgcttataatcccag

SEQ ID NO: 300841 - DNA, 201 bp, Homo sapiens
cttgccctgtaatctcagctacgtgggaagctgaggcaggagaatcacttgaactcgggaggtggaggttgcagtgagccaagatcatgccattgcactcyagcctgggctacaagagcgaaactctgtctcaaaaaaaaaaaaaaaaaaagaaagaaagaaagaaagaaagaaagaaaggaaaaaaagaaagggaatgca

SEQ ID NO: 300842 - DNA, 201 bp, Homo sapiens
gagttcttctccccctggaagcctgggggtaatctgagacttagaggagtcagtgcacgagctccatgtccctggcggtgggggctggaagaggaacctayggtgagtcggtgatggcagactgtggggatggtgatggtgcacgttagccccgggtcctgtaactgagactctctcattcctgcctcccagggattacct

SEQ ID NO: 300843 - DNA, 201 bp, Homo sapiens
ctcaatgagattaattaaagttgcctaaagtcacccaactctaagtatccaagccaaattttgaaccaagctttgtacagctccgaggccctgggcacacrgctctacacaaaggggtctggagggctgggcgggagcgctgtcccacgccctgctctctggcaggctctggaaggaggagctgctgcaggacgtgtgtgc

SEQ ID NO: 300844 - DNA, 201 bp, Homo sapiens
actctgggcaacaggcaggcaggatgcccctgctgttgatgctgggacaggcgtcagagctggagtgttctggatattagtaatctagattccttagcttytgcaaatactctttgtaaatacccttgtgcagatgttcatcatctctctaggatggtggatgctgtggaggagatgggaataatccaaattgctgcatga

SEQ ID NO: 300845 - DNA, 201 bp, Homo sapiens
tcaatagcttatttgggccacaagagataattatcagagacatgcatactaattgttggttcctattgtcagaaacttcatcttctaaagtgatgtgttgkacaaaaattttttgttgtttactttttcggggatgttggatgacaattatctctgaaggagatccattaagcttttatgaaactgaattattaaacaaaa

SEQ ID NO: 300846 - DNA, 201 bp, Homo sapiens
tcactaacattatcctaggaaatccttacagcacccacataggatcaataaagcttaacttggagtttggttccttggttccgaaattcctggctttgtcrtttaccaaatagataacataagtcaagttacttaatctccgtgtgcctcagttttctcattggtaaatgggtgtaggaattttgcttactacattttcaa

SEQ ID NO: 300847 - DNA, 201 bp, Homo sapiens
ctactattgctaccactatggctgtgattagtactactgctactactattactatttctatggttattatataacagaaattgtaccgaacacttcactarcattatcctaggaaatccttacagcacccacataggatcaataaagcttaacttggagtttggttccttggttccgaaattcctggctttgtcatttacc

SEQ ID NO: 300848 - DNA, 201 bp, Homo sapiens
aattatgtgctccagtgcatctctgccttgtcagagggtccccaagaccaccccggctctgatattcactgagaggattcagcatgccgtcatattcctgsctatgacttattatagcaggaggatgcaaaatcagcaaagggaaaagatacatgggagcaaagtctggaggaaccaggtccaatcttccagagacttctc

SEQ ID NO: 300849 - DNA, 201 bp, Homo sapiens
cttctaggatttctgaagggagctttgaagattctggaatctggggatccacaaagcctagggcccccttcagaaatcctaaacagcacctggggggaagsgggggcaaagaggtcacaggtatttcttttttaaccttttccatctatacactgttggcagggctgggagaggtgctgagccaactgggtctaaggaaca

SEQ ID NO: 300850 - DNA, 201 bp, Homo sapiens
ctccctccctccctctctccctccctccctcccttctcatgccttgtccatggtgccccctggagatattatggggcactgcaaggaatctgggctttcakccaggtctgttggggacccctcatggcaggtgaccttcagcaggtcccataacctccttgaccctcaggatcttctttcactggtgaaaatgaggctcat

SEQ ID NO: 300851 - DNA, 201 bp, Homo sapiens
tccaaattgctgcatgaaccagaagaaagaccactcagtaagtgagttcttctccccctggaagcctgggggtaatctgagacttagaggagtcagtgcaygagctccatgtccctggcggtgggggctggaagaggaacctacggtgagtcggtgatggcagactgtggggatggtgatggtgcacgttagccccgggtc

SEQ ID NO: 300852 - DNA, 201 bp, Homo sapiens
tgctgaagtgggctctgtacagtggctttaattgcctttgcaactgcaacctgtgtggagttagcaggactgggttcttcctgatactcaggtggggcttyctctttttaaaattcgatatgctttttggatttataggtaaagtgggtacatgtggtcccaagtggggagggcacagaggaaccccaggggcagacaaat

SEQ ID NO: 300853 - DNA, 201 bp, Homo sapiens
attcctgtttgttcttatgcctataattcctgcggatgctgtaatatgactatggtgcctgtaaatgttggtgtcagagttgcaggtagactcttcccctyggctagtgactgaggaaaaggttaaaactcacgtcagattttgtggtctgtaaaatacaattaccgagtataactttaaatggtacattatatgtgcatg

SEQ ID NO: 300854 - DNA, 201 bp, Homo sapiens
catttatttgttttctcttggtttctgtgacactgtggttctggcttttccttctctccccacacttgctcctcctctgctcagtctctaattgctgcagkgccctgagccctgacctgggcccctccccttcttcatccctatactctcatttacaacttcagctttgacctcccctcagaagttacatttccaattgcc

SEQ ID NO: 300855 - DNA, 201 bp, Homo sapiens
tctgaaacttctttgtgatcctcaggatgctataaagaacaactccttttatggacctgagctgaagatcgagaaaggggacctaaagaaggggttttccraagcagataatgttgtgtcaggtagagctgttccatgccgcagtgggaatggggtggccctggtttgcaaattaaattcaagagatatgcattgaaccct

SEQ ID NO: 300856 - DNA, 201 bp, Homo sapiens
gtcactatgaagccaactctccaacaagcctggtatgaagccgactctccaccaggcctggtagcttaggttcgggaacatgcgctggttttcagtgtttyaatcacatctattaatccctgctttactttttccaaaattttacaatgatggtttttgaaatccttgatttccataagctgcagtgagaagagaactttg

SEQ ID NO: 300857 - DNA, 201 bp, Homo sapiens
acgccctgctctctggcaggctctggaaggaggagctgctgcaggacgtgtgtgcaggactggcagaggagctgcatctgcctcccgatgcccctggtggsatggtggacttccggtgcaccctcaccctcagcttcttcttcaagttctacctgacagtccttcagaagctgggccaagagaacctggaagacgtgagtg

SEQ ID NO: 300858 - DNA, 201 bp, Homo sapiens
catcgcctgttccgttgtggtctggcacaggtatccacctctgatctctcctactggctgtgagctctctaaatgaaagcacatacctcgcttccttataytctccaccttgtctagcacagtgcctagatggcaaagcagccctgtacaggtctgctcagcgtgcaggtggaaaagatggcttcccggctgtttttattc

SEQ ID NO: 300859 - DNA, 201 bp, Homo sapiens
gcacccaacttagttgcaagcaaagtcacaaactcctcacccatcccagggccctgcactgacattgcagttttttccttggcccacaggaaatctgtgcygctgcacaggctacagacccatcctccagggcttccggacctttgccagggtaagtggggaccccagaacatcagtgtctctgcttctaaaatggcaaca

SEQ ID NO: 300860 - DNA, 201 bp, Homo sapiens
ggcaggcaggatgcccctgctgttgatgctgggacaggcgtcagagctggagtgttctggatattagtaatctagattccttagcttctgcaaatactctytgtaaatacccttgtgcagatgttcatcatctctctaggatggtggatgctgtggaggagatgggaataatccaaattgctgcatgaaccagaagaaaga

SEQ ID NO: 300861 - DNA, 201 bp, Homo sapiens
cctgggccccaccctcagagattctgatacatgggtctgggatgtagcccagctcttcaggtgcttctgatgaaggtggtctgtggggcaccctgggaaaygcactccacgactcataggcttcattctgtggttgcagagatgaggcttcctgcctccctcccccttcctgagcttggctgagccaaacagtaggtgaac

SEQ ID NO: 300862 - DNA, 201 bp, Homo sapiens
aagagggaatgtagcggaggcctccactctgggcaacaggcaggcaggatgcccctgctgttgatgctgggacaggcgtcagagctggagtgttctggatrttagtaatctagattccttagcttctgcaaatactctttgtaaatacccttgtgcagatgttcatcatctctctaggatggtggatgctgtggaggagat

SEQ ID NO: 300863 - DNA, 201 bp, Homo sapiens
  misc_feature (1)...(201): n = A,T,C or G
gaaatgggcataagggataggttttgataaagtaggacctagcttttatggagaaaagttcctgaaattcagtggccttgttgctcctatttgtttatccntgagttgtttaatctacgttagccaagcaagagggaatgtagcggaggcctccactctgggcaacaggcaggcaggatgcccctgctgttgatgctggga

SEQ ID NO: 300864 - DNA, 201 bp, Homo sapiens
tctgtctctatgaatttgactaaactacctcacttaaggggaatcatacagtatgtctttttgtgactggcttatttcatttagcataatgttcacctatkttgtagcatatgtcaaaaattccttcctttctcaggttgaataatattccattgtatggatgtatcacattttgcttatccattcatctattgatggaca

SEQ ID NO: 300865 - DNA, 201 bp, Homo sapiens
cctgcacaggcatgcttacaacaaccttactcataattgccaaaacttagatgcaaccaagatgtccttcagtaggtgaataaactgtagaacatccaaayaatggaatgttaattcagtgccaaaatgaaaggagctatcaagctatgaaaagacatagacaaaccttaattgctactactaagtgaaagaaatcaatct

SEQ ID NO: 300866 - DNA, 201 bp, Homo sapiens
tactaaataataactccctattctacctttctcccagtccctggaaaccatcattttttctgtctctatgaatttgactaaactacctcacttaaggggamtcatacagtatgtctttttgtgactggcttatttcatttagcataatgttcacctatgttgtagcatatgtcaaaaattccttcctttctcaggttgaat

SEQ ID NO: 300867 - DNA, 201 bp, Homo sapiens
cctgagcttggctgagccaaacagtaggtgaacaagagatatggatatgctagggagaagtcagaattgagaggggaatttcctttcagagctatagggaraaccagagacagagccctcccacagagggaggaatacacctgttgattattcagtcagccttcagacaagtccccacattcccagtttgcaaatggtggc

SEQ ID NO: 300868 - DNA, 201 bp, Homo sapiens
atgtacattaaatggataatgaaggaatattaagaacaactctatgctcatatacttgataacctagatgaaataaaacaattccttgaaagatgtaagcyaccaaaactcatacaaaaagtagataatctgaataggcctataactattgaagaaattgaatcattaattaataacctttaacacagaaagcaccaggcc

SEQ ID NO: 300869 - DNA, 201 bp, Homo sapiens
tcattgaaaacagacaatcaatagagaaaatcaacataactgaaatttgggtccttaaaaagatcaatgaaattaataagcctctggccaggctaactaaraaaaaaaagagaagatccaaattactaatatcaaaataaaaagatctcactatagagctcatgtacattaaatggataatgaaggaatattaagaacaac

SEQ ID NO: 300870 - DNA, 201 bp, Homo sapiens; identical to SEQ ID NO: 62846

SEQ ID NO: 300871 - DNA, 201 bp, Homo sapiens
ttctgcctgagcacacccagggctttctgcttgggaacgtactctttggttggcacttgtagtctgagggtcactatgagtcatctgtcatattccaaacrtcttttcctcctctaacttcttgtaattttgctgtctactctagaacctccgcacagatattgtcatggatgttggctccagtctaaaccctgccattga

SEQ ID NO: 300872 - DNA, 201 bp, Homo sapiens
taaaatacaaataaaatcagcaatctgggctcccactttagaaaactagaaaaaaaaaggcaaattaaattcaaagtaagctgaagaaaaataaaatttgsagcaaaaatcaatttcattgaaaacagacaatcaatagagaaaatcaacataactgaaatttgggtccttaaaaagatcaatgaaattaataagcctctg

SEQ ID NO: 300873 - DNA, 201 bp, Homo sapiens
ctgttacctctctttctactgtgcagaggctagcatggtactaaacactgctaggctgtacagaatgagtacagaagggctactggcaaaatagaggaggrcccagagacaaaatgttctggaatatctgggtttcgttaacaggttcaaattgttcaaaccatggacttttttggagaacagctgaatgcaaaaacttgt

SEQ ID NO: 300874 - DNA, 201 bp, Homo sapiens
tcttcaccctagaggagctacactattcccccgaggggagcctgcacacccgtggccctagcacctacaagatcccggcatttggcagcatccccattgarttcagggtgtccctgctccgcgactgccccaacaagaaggccatctatgcatcgaaggtaccattgctctggctctgtgctgtctcttctgatctgccct

SEQ ID NO: 300875 - DNA, 201 bp, Homo sapiens
  misc_feature (1)...(201): n = A,T,C or G
gccagtcggtttcttttctgaatgctcgttgaggtatggtagtgccccatgtcacgcttctgagcagggggctgagagagcagatgtgtgggcctgtctancatggcagttaccctaggagagacctgtaagctgaactgcagtgggggcactttctcccagaggacaggcaggggtgggcgttcaaaaaggctggaggta

SEQ ID NO: 300876 - DNA, 201 bp, Homo sapiens
aataatagtataggttttctggggttgtgagtataagtaagataatgtatgcaaagtgctaaatagcgcgtgtgacacagtaaatcgtttggtggctgctratgaagaaggcataaattatatcaagtacaacttaaatctgagtctgtgctagtgtttggggataccaaaaaagcacattatatagtccaagggatagga

SEQ ID NO: 300877 - DNA, 201 bp, Homo sapiens
gtgtataagtaaaatgaatgacaacaatgataaaataaacaagagggaaaaattagaaatattttgttattataagatacaatcactacctgtaaagcggygtagtgttatttaaaagtggacttggattagttaaaaatgtatactgcaaactctagggcaactaccagaaaaaaaaaaaaaagaaaaaaggaagtataa

SEQ ID NO: 300878 - DNA, 201 bp, Homo sapiens
cttttcccagaaaccatgcaagcaagaggcatggagagaaatacttaaagtattgaaagaaaaaaccaaagcacctaaaattctgtaacctccgtaagtawccttcaaaagcgagtgagaaatattttctcaaacaaaacttgagataatttgttgccagtagacccatcttgtaagaaatattaaaagaagttctttaaa

SEQ ID NO: 300879 - DNA, 201 bp, Homo sapiens
gtgtaccaatagcacatgaaagtagcctgattttggtagttgggttttagcatggatttatcaggcagtttaaatgtttttaacaacagtcccgacaacartgttctatcatctgacctgtggatctgagctttgtcttcaaccaccagccatgtagaccagtgtgcctgggaaacagataaccccaataaatgaaccaca

SEQ ID NO: 300880 - DNA, 201 bp, Homo sapiens
gcagtaaaagaagaaaaagagaaaggaaaagaagcaatatttgaaacaaaaatgactgagaatttcccaaaattaatgtcagattttaaaccacagagtcwggaaattcagagaacacaaaccaggataagtaccaaaacccaaaaccaaacaaaaactataccaaggcatgtgatattcaaacttcaaaaaatcaaaggt

SEQ ID NO: 300881 - DNA, 201 bp, Homo sapiens
cattctggctgggtccctttctctatagctttcatcattgagggaggtcatttgagggaagtttttgatccaggatcttgacagccttgtgggaatcaggsttttctttgcctgagcctgagaggatgggtgcctgctgaacatgcctcatcggattgtcttgactcagtgggtctgctcccacaccccgcttgtcccaga

SEQ ID NO: 300882 - DNA, 201 bp, Homo sapiens
tgcaggatggggagatgaggataccgagggaaagcagaggcttctggaattactgcctggtgctggagctagcaataggacaatgggctgaagctgaaatytgattatagaggcaggttggccacactggctcctctgccatatgggggatataatcaaacaagcagtttgagggaagaagacacctctctggggatccct

SEQ ID NO: 300883 - DNA, 201 bp, Homo sapiens
tgtgagcacaacgtagaatggggattgagtttgggatcaatgcccagacagtggggtctgaggtcagaagagttttctgtcttctcattcctcctccaccyaggacagcttttgtaccccaggaagcagatgctgccaaacatggagtggtggaaggccctgggagcaaaacacaaaggcttaagcagaagtagtaaaggg

SEQ ID NO: 300884 - DNA, 201 bp, Homo sapiens
tgggaagggcactcacaactcaaaaacaagatgagaaatgaggaaacatggcatgcacatgtgaacatgcacacacacccaatttgagtgtgagcacaacrtagaatggggattgagtttgggatcaatgcccagacagtggggtctgaggtcagaagagttttctgtcttctcattcctcctccacccaggacagctttt

SEQ ID NO: 300885 - DNA, 201 bp, Homo sapiens
aggcccaagaatcataatcactgccctcaaagctgggaaggatgagtgcaggatggggagatgaggataccgagggaaagcagaggcttctggaattactscctggtgctggagctagcaataggacaatgggctgaagctgaaatctgattatagaggcaggttggccacactggctcctctgccatatgggggatataa

SEQ ID NO: 300886 - DNA, 201 bp, Homo sapiens
ggaaccccttccactacttcagctatggggtggcttgctctgaagtagaaatcgactgcctaacaggagatcataaggtaagaagtttgcaaaactttagkacttagtgggaaagagaagagaaacaactgagttgtaatacctagagctgatagagacaagatttctggttggaaaaataatgccttccattaaggatag

SEQ ID NO: 300887 - DNA, 201 bp, Homo sapiens
atatcagcgagacaagcactaacactgtgcccaacacctctcccacggctgcctctgtcagcgctgacctcaatggacaggccgtctatgtaaggagcccrtgggatcccgcagagcagagggccagcccagagctgtgggcctggagagtctccctgggtgggagctagaagggttccttgcaggctctttggctctggc

SEQ ID NO: 300888 - DNA, 201 bp, Homo sapiens
tacacatacataaacacattttctcataaattcctattacatttctggagttcatgaaactaaggttttataaaggtcaaagcagaggagcatggtgaaarcagaggtcaaaggaattggtggtggttttttctgggagaagccttttccctcagccccatattggttttgtttttgtgcagatctggtcatatcagctca

SEQ ID NO: 300889 - DNA, 201 bp, Homo sapiens
aggtttttaatatctgacctacacatacataaacacattttctcataaattcctattacatttctggagttcatgaaactaaggttttataaaggtcaaascagaggagcatggtgaaagcagaggtcaaaggaattggtggtggttttttctgggagaagccttttccctcagccccatattggttttgtttttgtgcag

SEQ ID NO: 300890 - DNA, 201 bp, Homo sapiens
tttttcatgggatgatgtggtgttctgtttatttcctccaggtgacataagtgggagggaggatcagagggagacagagaggtgggggaaacgggacttaygataaatccctctcctttctccttttatcaggttggcttcatgaagactgggacagttgtggctcttgaggtggaccacttcagcaatgtggggaacacc

SEQ ID NO: 300891 - DNA, 201 bp, Homo sapiens
agcagatgctgccaaacatggagtggtggaaggccctgggagcaaaacacaaaggcttaagcagaagtagtaaagggaggtcccagagaaaatcgctttargagaatatgggattactatgaagaataggtgaaatagggctgggacctgtggctcacacctgtaatcccagcactctgggaggccgaggcaggcagatca

SEQ ID NO: 300892 - DNA, 201 bp, Homo sapiens
tgccggtagcaggaggaagaggtgtggggacaagggcttccaggggtggggagccaagtgtgtgccactggggagaggtcagttcctctcttcttcacttsttaccttctggtgacttctgaaggtcacctttttttcatgggatgatgtggtgttctgtttatttcctccaggtgacataagtgggagggaggatcagag

SEQ ID NO: 300893 - DNA, 201 bp, Homo sapiens
tgtcccttctccctgggaggggaaatgtgtcctctggcagagccatatcttgttctctgtctttcctgtcccctcttacttgttctgtctttctctctctygctttaaaggtgtcgctgcattttggtaacattagggaagaagaccttctcggggctagagcacagacaagatactcagaggccaaagaatgagggagag

SEQ ID NO: 300894 - DNA, 201 bp, Homo sapiens
tatcttgggcatctcccatgggggcagatgacaggcaggggctgctgagggggttggaagcttaactttaggttgtgccctgcccccacagtctcttgccrccaacaaggcctctgtgtctctctccttgggaaggtgcggagaaaaaacctgtacaaagaaggggacctgacacacttcaaccagaagcttgagggtttc

SEQ ID NO: 300895 - DNA, 201 bp, Homo sapiens
gcctgccctggtgatacaacaatgggcctacaacttcagcttcttgtttctctctaggcattgagatgaagttcaagaatatgctgtttcctatgattgtytgcccagcctggatccctgagctgaattcggtagaacatggacccgacggtaagaggaggttcactccaagcttatggaggggctgtgaggctggggata

SEQ ID NO: 300896 - DNA, 201 bp, Homo sapiens
gatataatgtaatcagtcctcttaatttttcaaaagagaaggatttttgagtatagcagttgccttccctcctggaagttgaaatcgctcttgatttcacyatgcagaacttacctccctcaattcagctaccctgcagtgcagagcagagcaagactgagagctctgagcagccaaaatgcctgacacacaaaaggtgct

SEQ ID NO: 300897 - DNA, 201 bp, Homo sapiens
aagaattaacaagtgtggaattaaatgaaaatgcctaaaagcacaaattcagattctgcagacctgggttcaatttgaggcacttaattgatgcacgaccytgggcaagtctccttgtttctattaggttggtgcaaaagtaactgtggttttgccattaaaagtatgggaaaaactgtaattatttttgcaccaacctaa

SEQ ID NO: 300898 - DNA, 201 bp, Homo sapiens
gaggggaaattactaaacttgtccaacctgaaggagacgtgagagggttaattaaggcttgttattttctttgaaacaaacagatgaaagaaagaataaayagtttaaacataggagtcaagtattagtctattctcacactgctgataaagacataaccaagactgggtaatttacaaagaaagagaagtttaatggatt

SEQ ID NO: 300899 - DNA, 201 bp, Homo sapiens
ttgtcagtttatgaattttttatccaaccgaactccaccaagtgctccttcaaattcagccagatgtaaggacatcccagacaatgagattagagtttacraaattgttttcttgcctgtaacagtgaatgtgaatcctgtcttggggagaaggcagccaagccccatgataaccccttccctagagggcaatgtcttctc

SEQ ID NO: 300900 - DNA, 201 bp, Homo sapiens
actgtttgtcagtttatgaattttttatccaaccgaactccaccaagtgctccttcaaattcagccagatgtaaggacatcccagacaatgagattagagyttacgaaattgttttcttgcctgtaacagtgaatgtgaatcctgtcttggggagaaggcagccaagccccatgataaccccttccctagagggcaatgtc

SEQ ID NO: 300901 - DNA, 201 bp, Homo sapiens
gccatggatttgcatgagcagctgattctatgaactttttaaggactgtgagtttcaaaagggatcacatctgtattgtttgtcaccatatctccaaaacstaatagaacgcctgccatgtggaaagtgctcagtgaaaataaatgaatggcttaggaaattaaggagtcctgccctgaggcattctcaacagctaggcct

SEQ ID NO: 300902 - DNA, 201 bp, Homo sapiens
tctgctgagtcttcaggcctggtctcctttttaatttactttaacaagatttaaattgcaccttcatatggactttggttttctcagttgactgcagtctrttgaagggcagagctttcatcttattcatctttattttcccagccctcagcagagtgcctgacttatgtctggcactcaataactgatgctgaatgtaag

SEQ ID NO: 300903 - DNA, 201 bp, Homo sapiens
tgccattctgatactggggacacatagatgtccttgaggactttgcaaccttgggaaaccagatgattccattatagggtgattgattactgccttggagrtgtatgtggcagaaagtagtagaagaattccgtagtcattggaatcactttaagaagcacctatgtgatacttgtagttggcaatgcctaacaaaagaag

SEQ ID NO: 300904 - DNA, 201 bp, Homo sapiens
gcgcatggagactggccagattggatcttttgaaaagtgagtgttagtgtaaaaaggcactgtttgtcagtttatgaattttttatccaaccgaactccaycaagtgctccttcaaattcagccagatgtaaggacatcccagacaatgagattagagtttacgaaattgttttcttgcctgtaacagtgaatgtgaatcc

SEQ ID NO: 300905 - DNA, 201 bp, Homo sapiens
tgctgataaaatgacttttctaaaatccacatttatatcacattccataaagcccttcaatagctcttcattgcccccaggacaaaatctctttgcttagmgggcaaggccctgcacagtatgccccaggtttcttctccagttttctttctcaccatgggcccagcactccattcaagcagagataattgtgaaatacca

SEQ ID NO: 300906 - DNA, 201 bp, Homo sapiens
tgatagcgaaggttctataagaatattcctttttctctagggagaattgttggaaaaagagaggattgtgcataattcccaccaagtttggaataagcttyacagttccttttctgaatcaggtaattgctttatagaattgtgtccatctccgctggactgggaccccatttccctgttgtttacagtattgcaagggaa

SEQ ID NO: 300907 - DNA, 201 bp, Homo sapiens
gctatgcatccttctttgtactgtgtgtgggacttttttatagaatgagaggaggatttagagcacgtggtcttattacaaaatgcagaatacagtggaamcttattaatacagggagattttcaagagagcgtatgacttctgcaactttaaatttagtagcagcgtgaatagctagagaccctgcccatctgacttagc

SEQ ID NO: 300908 - DNA, 201 bp, Homo sapiens
ctccctagggtgcagtgcagcccctctgaataaggaggccagtgggcctgctgccttccttggttgaggggcctgagcacgtgtgggaatgaatggctctkcccacagctctgcccaggcatttcctagcaacccagcagactcctctccctgagttcattctccttaactcttgaccacccagtggggctgagtggaacc

SEQ ID NO: 300909 - DNA, 201 bp, Homo sapiens
gggcataattgggctggctctgtcttcctcacagagttactcagataattaaatataaagcacagagaaggctttattattgtcagtgaggcacagtgcckcctggagatgatgacagcccaagattaccagggcactctgacccagtacgggttgcactcagggaagaagagtgttgacaagaccccctggtgtgggctg

SEQ ID NO: 300910 - DNA, 201 bp, Homo sapiens
tgtgtgtcagaagacccgacttctagttctggtctcagggtgcaccatttcaccagaggaagtcagtggtcctgctgaacctgttcccctgtttcctcatkggtgacgtattggggccagtacctaaccattcctccctcagtgttctcctgcagaaaccaggctgtgtagtgttatgagttaggcattgctgttagctat

SEQ ID NO: 300911 - DNA, 201 bp, Homo sapiens
gcccaaaaagttcagagtgaaaagcaaggactcagaggtcccagaacagatcaatgtctcattctggcccaagtggcttcatggtgtgcccagctgggagygatgtgagaactgccccgtatgctcaggtgtatgatttacctgctcacacatagaagacctcaacccaagagaaggctctaggactgaccagtcctagaa

SEQ ID NO: 300912 - DNA, 201 bp, Homo sapiens
agaacactggcctaggactaacacgtcacagttatgcacctgcctctgacactgatctataaatatgaatttgggagtccctgggcctcagtttcatcatstgaaaagtgggcataattgggctggctctgtcttcctcacagagttactcagataattaaatataaagcacagagaaggctttattattgtcagtgaggc

SEQ ID NO: 300913 - DNA, 201 bp, Homo sapiens
tgctctaaaatatgtggaatggccacactgtgtgccaaggggtaaaagcaccagctgtgtgtcagaagacccgacttctagttctggtctcagggtgcacmatttcaccagaggaagtcagtggtcctgctgaacctgttcccctgtttcctcattggtgacgtattggggccagtacctaaccattcctccctcagtgtt

SEQ ID NO: 300914 - DNA, 201 bp, Homo sapiens
  misc_feature (1)...(201): n = A,T,C or G
ggagaagcagccatgtgactcagggaaagtgacctccacaatagctgttctctagaatagcttaccagttaggcacttttaaaactcaaagtagcagatgntctttctgcaagtatatgtaagagtgaggcccaatattggacccagacctaaaaaaaccactctattttaatttccattcacatatcttttggaccaaat

SEQ ID NO: 300915 - DNA, 201 bp, Homo sapiens
tcctgccaggctgtggtcaggagagagcagctccacttatctcttcaacagacttccgctaatttcagtctaaagatgctctaaaatatgtggaatggccwcactgtgtgccaaggggtaaaagcaccagctgtgtgtcagaagacccgacttctagttctggtctcagggtgcaccatttcaccagaggaagtcagtggt

SEQ ID NO: 300916 - DNA, 201 bp, Homo sapiens
gctcggaagagtgaggttgacaagttcaacaagtaagcactaggagtagaagtccagttgctcttctgggtttcatatcctacagcctttctgctgacccmatataggaagctaataattcaatggataacttatgagactgctgagtttgccaactcattcacagccatctctttaagatcttataatgatcttcagccc

SEQ ID NO: 300917 - DNA, 201 bp, Homo sapiens
aacatggtgaaaccccatctctactaaaaatacaaaaattagctgggcgtgtggtgcgtgcctgtaatcccagctactcaggaggctgaggcaggagaatygcttgaaccagggagtaggagtttgcagtgagccaagatcgctccactgcactccagcctggtgacagagcgagactccatctcaaaaaaaaaaaaaaaa

SEQ ID NO: 300918 - DNA, 201 bp, Homo sapiens
  misc_feature (1)...(201): n = A,T,C or G
tggaaatgggagtcactagtaaaatgagttgattggcttccagaggaggtgagctcctgaaagcttagtggcaggtcagggttcctgaaaacctcacttcncctgcctgatggccatctcctctcctcaggtcacagctgcctacatggacacagtgagcttgtctgccactgggttttataggtaagtatggtgttgtcc

SEQ ID NO: 300919 - DNA, 201 bp, Homo sapiens
ggggagacaactcaagggaggaagaccagttaagaggtgactacagtgttccaggcttcagataatgaggacctggtgcaggtggtgccagtgacaatgtraggtaaggtatggaaatgggagtcactagtaaaatgagttgattggcttccagaggaggtgagctcctgaaagcttagtggcaggtcagggttcctgaaa

SEQ ID NO: 300920 - DNA, 201 bp, Homo sapiens
ctgatgtgcttgaacatgttggaagcagagctcaggagggaaaagagaaaatatattaggagcagatttttagaattggggaaaactttaagttggcttartaataagtacatacaaaatgaagcagatgaaaaaataaagacaattattaactccagggtgaaaaaaatattatcaagagagaagaaattgtaatgtaac

SEQ ID NO: 300921 - DNA, 201 bp, Homo sapiens
gctggggagacaactcaagggaggaagaccagttaagaggtgactacagtgttccaggcttcagataatgaggacctggtgcaggtggtgccagtgacaaygtgaggtaaggtatggaaatgggagtcactagtaaaatgagttgattggcttccagaggaggtgagctcctgaaagcttagtggcaggtcagggttcctg

SEQ ID NO: 300922 - DNA, 201 bp, Homo sapiens
cagctgactgttctcatctttgtgggcaaccccaaggatgtcctgttttgatgtgaacatccaaagatattcatgtcctcaatatgatagcgaaggttctrtaagaatattcctttttctctagggagaattgttggaaaaagagaggattgtgcataattcccaccaagtttggaataagctttacagttccttttctga

SEQ ID NO: 300923 - DNA, 201 bp, Homo sapiens
gaattgagagagatttagctcttgagtgtggctggggtggccctcgtgtgctgcaaaatgccagagagactgtggtccttaacatcaggcatttgctctayaggcaataaggagccgtggaaagctctagagtagggtagtgacatgcacagtgtggtatgttaagatggccactctggctgggctggggagacaactcaa

SEQ ID NO: 300924 - DNA, 201 bp, Homo sapiens
tgtgggctgtgcaccagctgactgttctcatctttgtgggcaaccccaaggatgtcctgttttgatgtgaacatccaaagatattcatgtcctcaatatgrtagcgaaggttctataagaatattcctttttctctagggagaattgttggaaaaagagaggattgtgcataattcccaccaagtttggaataagctttac

SEQ ID NO: 300925 - DNA, 201 bp, Homo sapiens
cagattatggaacgagctttattccacatggacaactgctataaaatccccaacatccggggcactgggcggctgtgcaaaaccaaccttccctccaacamggccttccggggctttggggggccccaggggatgctcattgccgagtgctggatgagtgaagttgcagtgacctgtgggatgcctgcagaggaggtaagc

SEQ ID NO: 300926 - DNA, 201 bp, Homo sapiens
tacgggttgcactcagggaagaagagtgttgacaagaccccctggtgtgggctgtgcaccagctgactgttctcatctttgtgggcaaccccaaggatgtyctgttttgatgtgaacatccaaagatattcatgtcctcaatatgatagcgaaggttctataagaatattcctttttctctagggagaattgttggaaaaa

SEQ ID NO: 300927 - DNA, 201 bp, Homo sapiens
ggagatgatgacagcccaagattaccagggcactctgacccagtacgggttgcactcagggaagaagagtgttgacaagaccccctggtgtgggctgtgcrccagctgactgttctcatctttgtgggcaaccccaaggatgtcctgttttgatgtgaacatccaaagatattcatgtcctcaatatgatagcgaaggttc

SEQ ID NO: 300928 - DNA, 201 bp, Homo sapiens
agccctctctggcagtgttgtgtccgttgttagaggaagtggtataagaaattgagcagtgggacctatcagagcagaagcaggcccggggtctggccctrgccctgttgcttatgtccgtgtagcctcgggcaagtcttttcccccacttgaactcagtttcctcatctgtgcaaaggagttggccaggtgacctctgag

SEQ ID NO: 300929 - DNA, 201 bp, Homo sapiens
accccgtgttcatggccagtggggccaagctgacacttgtgtccagaggtgagctgcctgaagcagaggtccaggaagaaggacttgggggagaaaagtcycaccagataggtcattttctggagaaacagagctcaaagttcagtgacccagctttccctgtgatttggatccagggaagcatggagaatgtacctggtt

SEQ ID NO: 300930 - DNA, 201 bp, Homo sapiens
gggccaaggccttcataccaaaatggtccaggtgagcagccctctctggcagtgttgtgtccgttgttagaggaagtggtataagaaattgagcagtgggrcctatcagagcagaagcaggcccggggtctggccctggccctgttgcttatgtccgtgtagcctcgggcaagtcttttcccccacttgaactcagtttcc

SEQ ID NO: 300931 - DNA, 201 bp, Homo sapiens
tcaacaattcagagagcttctctttccctaatcagaacctatctttccctccctgctaaaagccacatttctgaaacttctttgtgatcctcaggatgctrtaaagaacaactccttttatggacctgagctgaagatcgagaaaggggacctaaagaaggggttttccgaagcagataatgttgtgtcaggtagagctgt

SEQ ID NO: 300932 - DNA, 201 bp, Homo sapiens
tgccaccattcatcttcaggtgccaccattcgtcttcaggtgcccccaaagttgtttgacctgctgagagctgcatatatcctgactaggacacagaaaascttcccaggtgtgctggggaggaaggagcgtgatgaagggagctcacccagtctggagtccgatggctgtgatggggccacaccggcagggtaacgtgtt

SEQ ID NO: 300933 - DNA, 201 bp, Homo sapiens
ggaagcgtaacactcccttttcacagaggaggaactgaggccttgatatgtgaagtgacctgccttttgctagtgtgttctggggaaatagtgatggagaytgcaccaaagcctagagctgtgttcccaacctctcacccgcactggcaactctccagggggcctgtgagcaggactgtgctcatcctgacctctgtcaac

SEQ ID NO: 300934 - DNA, 201 bp, Homo sapiens
agacaacccttttggcctacctgagaagaaagtgtatcctgactttggagtgggagtgacggagaaggggggcaatggtgactgattctgtaggccttacmttgtttcctagtgactggtggggtggccttgaggtgtggaggaaagagcactggattaggacttgggacacttgcattttagttgcacctgtaatctgaa

SEQ ID NO: 300935 - DNA, 201 bp, Homo sapiens
attcatgagaaatctgcccccatgatcatattgcttcccactaggccccaccttcaacactggggattacaattaaacatgagatttagaggggcagagtscaaactatatcacacttcctactaactctacaaattattgagtgagacactgaaggaagaaattaattgcagaaagatgactaagtatacctatgatata

SEQ ID NO: 300936 - DNA, 201 bp, Homo sapiens
cagatggctctaggatagaaaatctgatgtgcttgaacatgttggaagcagagctcaggagggaaaagagaaaatatattaggagcagatttttagaattrgggaaaactttaagttggcttagtaataagtacatacaaaatgaagcagatgaaaaaataaagacaattattaactccagggtgaaaaaaatattatcaa

SEQ ID NO: 300937 - DNA, 201 bp, Homo sapiens
gagaagggggtgatgccacatacttttaaatatctcgtgacaactaattcacaactaaggggatggcactaagccattcatgagaaatctgcccccatgakcatattgcttcccactaggccccaccttcaacactggggattacaattaaacatgagatttagaggggcagagtccaaactatatcacacttcctactaa

SEQ ID NO: 300938 - DNA, 201 bp, Homo sapiens
ggaatccctgggatgaatccctttacccctttggatcccactgggggatttaagatttaaatccttaggtaacagctgaatagcagatctagtgggcagcsaatttaaattggagtaggccagatggctctaggatagaaaatctgatgtgcttgaacatgttggaagcagagctcaggagggaaaagagaaaatatatta

SEQ ID NO: 300939 - DNA, 201 bp, Homo sapiens
gtcttgggaattgtaatgagcaagcagctaaattgtgtcccatccaggtgaggttgggtaggggcttataaaggtttactgtaagtttacctatctggaakgttctagcagagtctttaattgatgatggctggtcacagcttaggatgtgtctgatgatcaatccagtttggcatagctgtttctccaggaggttaatga

SEQ ID NO: 300940 - DNA, 201 bp, Homo sapiens
ttaccttgaatatgtgggtggtcatgaaaagcactgagcagggaactgatgtgatgtgataaaagcagaactgcagtacgggagaaatgaacaatgtggtrgtaagctaagaggctcttaatgttgtctacaagaaaggtgataaagattgctattttgtgcatttatgattacttctatgatttgtaaccaggatattga

SEQ ID NO: 300941 - DNA, 201 bp, Homo sapiens
ttcagattatggaacgagctttattccacatggacaactgctataaaatccccaacatccggggcactgggcggctgtgcaaaaccaaccttccctccaamacggccttccggggctttggggggccccaggggatgctcattgccgagtgctggatgagtgaagttgcagtgacctgtgggatgcctgcagaggaggtaa

SEQ ID NO: 300942 - DNA, 201 bp, Homo sapiens
aatctctactctcctgtctctaggctggacctaatgattctagagagattctagagtattctgatccggaagaccaactagggatgataacagccacataygcctgacagccttaggtctgccaggcctctaaccgcataaattctcatcctccccctacctgaaggcagtccttacccatcttcaactagcatcctccct

SEQ ID NO: 300943 - DNA, 201 bp, Homo sapiens
atagagaaaatacaaaaaaattttgaggatcagttcaagaggtccaaatcatagacatttcagaaagaaagaatggaaaaaacagagaaggggaagctatyaataattcaaaaaattttccaaaactgatgggcatacactttgggattaaaacagcccatataataaccagcacaatgaaagaaaatagacctatgccag

SEQ ID NO: 300944 - DNA, 201 bp, Homo sapiens
acagcctaaggaacttggatgttaccttgaatatgtgggtggtcatgaaaagcactgagcagggaactgatgtgatgtgataaaagcagaactgcagtacrggagaaatgaacaatgtggtggtaagctaagaggctcttaatgttgtctacaagaaaggtgataaagattgctattttgtgcatttatgattacttctat

SEQ ID NO: 300945 - DNA, 201 bp, Homo sapiens
gacatttcctgacagaagattccctcttacgtttgtagcaaaataggagacagttggatgggaaagagcttcagttatcttaatctctactctcctgtctstaggctggacctaatgattctagagagattctagagtattctgatccggaagaccaactagggatgataacagccacatatgcctgacagccttaggtct

SEQ ID NO: 300946 - DNA, 201 bp, Homo sapiens
  misc_feature (1)...(201): n = A,T,C or G
gcctgggtgggttgtcataattattagatgagttttaatatttagactagagtttggtacatgttggcagttatcatttcagtgcctatggcctcggtcangtcatatcctgcctcagtttcctcatatgtaaaatgaaggtgttggattaagtcatagccacagggaccactaaattatctacagcagctcaaatattct

SEQ ID NO: 300947 - DNA, 201 bp, Homo sapiens
gttcaaagaaacttgacaaatctcccaaaaatggaaaacaatgtgaaaaaatagagaaaatacaaaaaaattttgaggatcagttcaagaggtccaaatcrtagacatttcagaaagaaagaatggaaaaaacagagaaggggaagctatcaataattcaaaaaattttccaaaactgatgggcatacactttgggattaa

SEQ ID NO: 300948 - DNA, 201 bp, Homo sapiens
gcaggggaagtagatgataaaagaaacagaaatacaagttgataaagtactagggaaagcaaaagtagaattaattgagacatagaaaaatcatttaggakgagtaagactgaaattatcaaagacacataaagcaacttgtgggagagagagagtacccatagggaaataaaccaaaaccaaaataaaacaaacaacaaa

SEQ ID NO: 300949 - DNA, 201 bp, Homo sapiens
tatatatataggtttaacagccagtcctgattcactgtgaggtgacatatactgacaccttgtggcaaaccacaatttttttttcataaagggcatctccygcattccccccactccccacccacacacagtgagttctacatgtaagctgcaaatctgttacctacttgaatttaccttattggtacacagggacttagg

SEQ ID NO: 300950 - DNA, 201 bp, Homo sapiens
aggggttttccgaagcagataatgttgtgtcaggtagagctgttccatgccgcagtgggaatggggtggccctggtttgcaaattaaattcaagagatatrcattgaaccctgaagcagggaagtgatttctggacatttcctgacagaagattccctcttacgtttgtagcaaaataggagacagttggatgggaaagag

SEQ ID NO: 300951 - DNA, 201 bp, Homo sapiens
accaggcctggtagcttaggttcgggaacatgcgctggttttcagtgtttcaatcacatctattaatccctgctttactttttccaaaattttacaatgayggtttttgaaatccttgatttccataagctgcagtgagaagagaactttggactggatgcatttcagtgtcgttctttctttgttgtgggggtggggatg

SEQ ID NO: 300952 - DNA, 201 bp, Homo sapiens
gaaataaagtcaattgtgagaattaacaaatttattttggtggtaccactttttacagttttttaaatcttaattttgtaaccatagtagttacgtatgtrtagattcttgtttgaaaaaaaaaaaaaaagaggtggctgggtgcggtggctcatgcttataatcccagtactttgggaggccgagatagacagatcactt

SEQ ID NO: 300953 - DNA, 201 bp, Homo sapiens
ctgctctccctccacctctgtctctgacactgtgaaatcaaatccattgctcccaccccaggacaacacagctgactacctcttttggaactgttttttayattggctgttgtgctttgcaaagtcactatgaagccaactctccaacaagcctggtatgaagccgactctccaccaggcctggtagcttaggttcgggaa

SEQ ID NO: 300954 - DNA, 201 bp, Homo sapiens
tttagtctcagttgatgctcctccagtcacattgtaaatgaccagggtaagaccagaagtgggagctacgtactcctcattattgtggtcacagctttggsagatgaacttggaatattgagttgtttagaaaaataactagagggcttggatgaaataaagtcaattgtgagaattaacaaatttattttggtggtacca

SEQ ID NO: 300955 - DNA, 201 bp, Homo sapiens
ttgtctaaaagtgtttagttttgctagactgcccttttcttggtcttttggctagagataaaaggatttggaatatatagtgagctttttggtctctgtcrtcattggcatttctggattgccagctcctgccccaagtctgggatatatagatgaggcaaaaaggaaacccctggaactcaccatcatgtcattccttgg

SEQ ID NO: 300956 - DNA, 201 bp, Homo sapiens
ttctgctgttgaatccacccaataagctatttattttggttgttgccttttcaattctgaaaggcccattaggttcttctttgtatcttctatgtctttgstgagactatctgtttatttccagaagctttttatttctgtcaagtgtgttcacaattgatctcagaggcatttttttcatggctgcattaaaactacagt

SEQ ID NO: 300957 - DNA, 201 bp, Homo sapiens
  misc_feature (1)...(201): n = A,T,C or G
atccttgcatgtagttgacttctctccacaaacatttacagagcaccgagcatgagccaggtactctggaaggggcttgggatacaaagctcaattggacntggttccttgccttcaagggccttctagtctaagggaggaggaactaatttaagcaaagtgtctaggccagtggctgatggacactagaggttccataaa

SEQ ID NO: 300958 - DNA, 201 bp, Homo sapiens
tacacagatggctctgtgctgctgacccacggggggactgagatgggccaaggccttcataccaaaatggtccaggtgagcagccctctctggcagtgttstgtccgttgttagaggaagtggtataagaaattgagcagtgggacctatcagagcagaagcaggcccggggtctggccctggccctgttgcttatgtccg

SEQ ID NO: 300959 - DNA, 201 bp, Homo sapiens
tggtctctatggcttctgatgagaaatcctctgtcattctaattaggctccccctataggtaagttgtcatattctctgggtgctttcaagatttttcctktgtctttagttttcagaagtttaattatgataggacttaccatagatttcttcaggcttatcctgttttaagatcaccaagcatcttgaatctgtaggtt

SEQ ID NO: 300960 - DNA, 201 bp, Homo sapiens
cccactggaaatccctggacactccagttcctgcaaaggcccctagctgtggagtcccacaggcctggctcagccccttgctggatgtgtgacctcagaawagttgcttgtcctcatctaccctcattttctgttttttatatggggatactaacaactccttgaaggattgttttgggtgtgaaatgagatccttgcatg

SEQ ID NO: 300961 - DNA, 201 bp, Homo sapiens
tgcctacattattatatttgaagtgattttcttgaagacagtatgtaattgggtcatgtttgtaaatccattctgctaatctcttttaactgtatttatasaatttatacatcatataatgattgatgtgttgaggcataagactgccactttattttttgttttctgtttgttctatcagcttttcatttctctgtattc

SEQ ID NO: 300962 - DNA, 201 bp, Homo sapiens
cttcttcctgttagatattttcattctgaatgtcagtaaaacatcccattgaggacttaaagcaatttataagaggaatgacagtaggaagagggagacaktgtagtaagaaaactgcatttcccagaggctgaaagacactcctcggaagcagctgcgatttgaaggggagcgtgtgacgtggatacaggcctcaaccct

SEQ ID NO: 300963 - DNA, 201 bp, Homo sapiens
acagtaggcacaggacctcaggggtttgcctgcagcaggtgtcacctggctggtatgttcaggagcctgctacgtgagcaggggtttcctggggtgggctytcactgcatgctctctgcttgttttagtccgttggagggaacatcatcactgccagccccatctccgacctcaaccccgtgttcatggccagtggggcca

SEQ ID NO: 300964 - DNA, 201 bp, Homo sapiens
caaaaaacatttatatgccctatatatgaacatatatatggctaatatatatgtatagatattacactgaatatatatgccttatacatatatgtataagrcatatatctgtataaacatatgtacacacacaaaacatttctatgccatatatatgaacatacatatggctaatatatgtatagatattacactgaatat

SEQ ID NO: 300965 - DNA, 201 bp, Homo sapiens
tcccagcctttccctcactttggctcctcttcatcttgcttctgtacaggcaccaggagaactgtccagatggaccacaccttcttccctggctacagaawgaccctgctgagcccggaggagatactgctctccatagagatcccctacagcagggaggtgagatgttggaagtggttccaggctctgctcaaataagtc

SEQ ID NO: 300966 - DNA, 201 bp, Homo sapiens
accagcatgaagaatcccactgatggttatcctttctccccatggggggttcccagcctttccctcactttggctcctcttcatcttgcttctgtacaggyaccaggagaactgtccagatggaccacaccttcttccctggctacagaaagaccctgctgagcccggaggagatactgctctccatagagatcccctaca

SEQ ID NO: 300967 - DNA, 201 bp, Homo sapiens
ataaggtaagtcttggatttttttatatgaagtaaattgaataagtattgaagttttaatttgtgtacattgctccaaactcctgatctggaaaggttatrcatttgcatggattatggccatcatccagttggcccatattcaggacaatccaaaaagatagaatatgttacttgtttatttaattgatggctgctgttt

SEQ ID NO: 300968 - DNA, 201 bp, Homo sapiens
atttctgaaccttttgacagtaagtttcagacatcatgttcctttagctcttatcctaagaataaatatattctttttttttttttttttcctgagacagrgtttcactgtgtcgcccaggctggagtgcagtggcgcgatctcggctcactgcaaccttgccgcctgggttcaagcaattgtctgcctcagcctcctgag

SEQ ID NO: 300969 - DNA, 201 bp, Homo sapiens
ccttttgacagtaagtttcagacatcatgttcctttagctcttatcctaagaataaatatattctttttttttttttttttcctgagacagggtttcactstgtcgcccaggctggagtgcagtggcgcgatctcggctcactgcaaccttgccgcctgggttcaagcaattgtctgcctcagcctcctgagtagctggga

SEQ ID NO: 300970 - DNA, 201 bp, Homo sapiens; identical to SEQ ID NO: 62844
  misc_feature (1)...(201): n = A,T,C or G

SEQ ID NO: 300971 - DNA, 201 bp, Homo sapiens
aaatatattctttttttttttttttttcctgagacagggtttcactgtgtcgcccaggctggagtgcagtggcgcgatctcggctcactgcaaccttgcckcctgggttcaagcaattgtctgcctcagcctcctgagtagctgggattacaggcgcccaccaccgtgcctggctaagtttttgtatttttagtagagttg

SEQ ID NO: 300972 - DNA, 201 bp, Homo sapiens
ggaagggggtgtgttcatgttaatacatgtgcagtaccttctctttcctctcccagaacacccaatctgggctacagctttgagactaactcagggaaccscttccactacttcagctatggggtggcttgctctgaagtagaaatcgactgcctaacaggagatcataaggtaagaagtttgcaaaactttagtacttag

SEQ ID NO: 300973 - DNA, 201 bp, Homo sapiens
agcaattgtctgcctcagcctcctgagtagctgggattacaggcgcccaccaccgtgcctggctaagtttttgtatttttagtagagttggggttctaccrtcttggccaggctgatgttgaactcctgacctgtgatccacccacctcggcctcccaaagtgctggtattacaggcgtgagccaccgcgcctggccagaa

SEQ ID NO: 300974 - DNA, 201 bp, Homo sapiens
atgtataaggcatatatatgtataaacatgcatatatatatatatatatatatatatatatatatatatatatggtgaagaaatgttttgccaatgctttytaggtttttaatatctgacctacacatacataaacacattttctcataaattcctattacatttctggagttcatgaaactaaggttttataaaggtcaa

SEQ ID NO: 300975 - DNA, 201 bp, Homo sapiens
ctagtactatagttataagtttgttgactacttctgattggttgatcgtaaggcttttttttaatataaagatattcgtaagaagtagctcaagttaagactctgctgcaaatcaagcacagtttaggtcacttgtgaggcctaactggtttcctctgctgagtcttcaggcctggtctcctttttaatttactttaacaa

SEQ ID NO: 300976 - DNA, 201 bp, Homo sapiens
cctttctgctgaccccatataggaagctaataattcaatggataacttatgagactgctgagtttgccaactcattcacagccatctctttaagatcttayaatgatcttcagcccggggcaggtgggctcacagcctgcaatcggtgtcatagcctgtcagttgtggttcatctttacgcgtttgtaaacctttgggcac

SEQ ID NO: 300977 - DNA, 201 bp, Homo sapiens
tagtactatagttataagtttgttgactacttctgattggttgatcgtaaggcttttttttaatataaagatattcgtaagaagtagctcaagttaagactctgctgcaaatcaagcacagtttaggtcacttgtgaggcctaactggtttcctctgctgagtcttcaggcctggtctcctttttaatttactttaacaag

SEQ ID NO: 300978 - DNA, 201 bp, Homo sapiens
tttgggagatcgagactatcctggctaacatggtgaaaccccatctctactaaaaataccaaaaaattagccaggcggagtggcgggcgcctgtagtcccrgatactcaggaggctgaggcaggagaatggcgtgaacctgggagatggagcttgcagtgagccgagatcgtgccactggactccagcctgggcgacagag

SEQ ID NO: 300979 - DNA, 201 bp, Homo sapiens
ccactttattttttgttttctgtttgttctatcagcttttcatttctctgtattcttttgtgtgccttgctgtgggtgggttacttggacattttttttartattccatttttattaaaagtatctcttacatagctttcttagtcattgttcaaggtattatgttatatatacacaacttatcacagcctactgaagttc

SEQ ID NO: 300980 - DNA, 201 bp, Homo sapiens
attcttgaaggcaacatctgacatggttctcagcaagttggaatagtaaagattgctgggctgttacgatgagtggaaggagcgtgtttgtagcatacaarttattcagcaatcttgtgctgttgacctaaaaatatgtcttaattcttcatcaaggcaagcctggtgaagcctttacttgttactacttcaacagttgga

SEQ ID NO: 300981 - DNA, 201 bp, Homo sapiens
tttttgttctgcttcaaagctcagtttattgaagacatttataagctattggatcatcacttgaatcaagattttgactagtgagcttaattgtccatttyttatgatttcaaagttacagtctgagaaatggctgattttaataactgtcctttcataaattaatgttggaataaactgaagctggagataaatacttca

SEQ ID NO: 300982 - DNA, 201 bp, Homo sapiens
  misc_feature (1)...(201): n = A,T,C or G
ctagtgaaagtcagccagatttaaccaccattgcaataaccaacagccagatttaaccaccattgcactaaccaactgagtcaatagcttatttgggccanaagagataattatcagagacatgcatactaattgttggttcctattgtcagaaacttcatcttctaaagtgatgtgttggacaaaaattttttgttgttt

SEQ ID NO: 300983 - DNA, 201 bp, Homo sapiens
attttgagagaggagcattgaaatctccaactgtaattgtggagttttctatttctccttttagttctaccagtctttacttcatatctttttcagctctkttatttggggcagacacaattagtattgctgtcttttgggaggattgacacttttatcattatgtaatctccttctctctgtctctggtaattgtatttg

SEQ ID NO: 300984 - DNA, 201 bp, Homo sapiens
atcccagtcacactgctttctggcttagtgactttggaaaaactacctaacttccttgagtctgagtttccccaaacataaaatgggaattaggataagtrctttcagggtttcttgtgaggattaagcatttggaagatggttagaacttcagggcagtttacatacctttccctgaaatgtgttgccctatttccccat

SEQ ID NO: 300985 - DNA, 201 bp, Homo sapiens
tggcactccttgacttgtggttgcatcagtccaatctctgtctttgtcttcccatcaccttctcctgtgtgtccattcttgtctacctagacatacttctstcttacagagacatgtgattgcatttaggatccactccaatggttcaggataagctacttctctccagatccttaactttatcacatattttgccatata

SEQ ID NO: 300986 - DNA, 201 bp, Homo sapiens
tagggactggctctctaggcacactgtgtagtgtagcaggttcactataaccatttgttgatctcctgcctatatctaatacataagcactccaagaaacstattccctctataagcaatccatttatttaaaacaaaacaaaacaaaacaaaaaacgagagctctcttcaaaggacatgatctgcagctcacagctctgt

SEQ ID NO: 300987 - DNA, 201 bp, Homo sapiens
tattaaaaaattcatgtgtgtagaatcgttcatagtgtgttcttatttctcttttgatgtcttcagggtctgtagtgatagcccgtgtttcaatcctgatwtggtaatttgtggcttcactttgtttttctgtcttgccagaggtttgtcaattttattgctctttttaaagacccgggtttttgtttcattgattttctc

SEQ ID NO: 300988 - DNA, 201 bp, Homo sapiens
gaaaggttgtgcgtgtatgttgggataggggtatttgggaattctctacatcttccactcagttttttctgtgaaccttaaaccactctaaaaaaaaaacytttttttttaaaggcaccagtgcagaagccttagcctatttagtaaagtaggaatctcaggagggtggggatgagaaaatgtagtcttatccaacctcaa

SEQ ID NO: 300989 - DNA, 201 bp, Homo sapiens
gaacatttcaattctactcttatttatttttaaatatacgataaattatcatatatttaaaaatattatagtcaccatattgttctactgtatgctagatrttactcattctaactatatttttatatgtattaaccatccccattttatcctctgtccccctaccctccccagcctctggtaaacatcattctactcttt

SEQ ID NO: 300990 - DNA, 201 bp, Homo sapiens
aaaaaatgaatctaaacacagaccttatacacttctcaaaattaactcaaaatgaatcataaacctaagtgtaaagcaataaaactcctagaagatgacayaggagaaaacctagatgaccttggaatgatgatgactttttagatgcaacaccaaaggcatgatccataaaagaaataattataagctggacttcattaa

SEQ ID NO: 300991 - DNA, 201 bp, Homo sapiens
acagaatagagagcccagaaatagaccaacataaatacagtcaactgatgtttcacaaagaagaaaaggcgatacgatggagcaaagattgtctttttaayaaatggtgctgcaacagttggacattcacatacaaaaaaaaatgaatctaaacacagaccttatacacttctcaaaattaactcaaaatgaatcataaac

SEQ ID NO: 300992 - DNA, 201 bp, Homo sapiens
tagagaaaatcaacataactgaaatttgggtccttaaaaagatcaatgaaattaataagcctctggccaggctaactaagaaaaaaaagagaagatccaarttactaatatcaaaataaaaagatctcactatagagctcatgtacattaaatggataatgaaggaatattaagaacaactctatgctcatatacttgata

SEQ ID NO: 300993 - DNA, 201 bp, Homo sapiens
aaacaaatcagggtaacgtcaatatctatcacctcaagaatttatcatttttctgtgttagggaacatttcaattctactcttatttatttttaaatataygataaattatcatatatttaaaaatattatagtcaccatattgttctactgtatgctagatgttactcattctaactatatttttatatgtattaaccat

SEQ ID NO: 300994 - DNA, 201 bp, Homo sapiens
atgcctggcacatttctgttattcaataaatgggaactataaattatgaagctggtatatttcttccagtagcctctatataatcttcccaagttactcastgtttcctgagacccagagattgttaatcttgcctctatttacttcataagaacctgctcaaagtgatataatgtaatcagtcctcttaatttttcaaaa

SEQ ID NO: 300995 - DNA, 201 bp, Homo sapiens
atctgtcctagagcttaaaagtataatacttgaaaaaaaaagaaacaaacaaaaaaacactattgattaaatttccttaatagttctaggactattcaaaktatctatctcatactgaagtggtagttttgtattttgagacattcatttaaaaatgttttgtttttcattattattggtacatagtagttgtatatattt

SEQ ID NO: 300996 - DNA, 201 bp, Homo sapiens
tcatttattttaataggtggtggagaaaaatgcagatccagagacaacccttttggcctacctgagaagaaagtgtatcctgactttggagtgggagtgayggagaaggggggcaatggtgactgattctgtaggccttacattgtttcctagtgactggtggggtggccttgaggtgtggaggaaagagcactggattag

SEQ ID NO: 300997 - DNA, 201 bp, Homo sapiens
tttggtcccaaaccttaatgagttggattttactgaattttgtgtctggcatccttctctttccctaggcaggagccctacttcatgtgtacacagatggytctgtgctgctgacccacggggggactgagatgggccaaggccttcataccaaaatggtccaggtgagcagccctctctggcagtgttgtgtccgttgtt

SEQ ID NO: 300998 - DNA, 201 bp, Homo sapiens
tctcactctgtcacccaggctggagtgcagtggtgcagtcttggctcactgcaacctccgcctcctgggttcaagtgattctcctgcctcagcctcccaartagctgggattacaagtgccctgccccaccacgcccagctaatttttgcatttttagtagagacggggtttcaccaggttggccaggctggtctcgaact

SEQ ID NO: 300999 - DNA, 201 bp, Homo sapiens
acatccaaaatgctgctggttctcttgttcctgggctccatacctttggtcccaaaccttaatgagttggattttactgaattttgtgtctggcatccttstctttccctaggcaggagccctacttcatgtgtacacagatggctctgtgctgctgacccacggggggactgagatgggccaaggccttcataccaaaat

SEQ ID NO: 301000 - DNA, 201 bp, Homo sapiens
atgttttcatctccttttctttacatactgagatggctagccagaccttgcagaactataggtcatatatccttcctttgtttttattcttaaggggaagrcatccagtctttcaccattaaatatgttattggtagggttttgtttgtttgtttgttttttgtagatactcatgatcagattaagaaagttttcttccat

SEQ ID NO: 301001 - DNA, 201 bp, Homo sapiens
gtgggtggccaggctgtttgagtggcaccctgggtacagcattgcttggaggtagccttgctggggccctcgggttttgcctgggctacagaatgcagagractgatgtgtctggggtgtggggggtgtttactttaggcggcttgtcagaccatcttgaaaaggctggaaccctacaagaagaagaatcccagtggctcc

SEQ ID NO: 301002 - DNA, 201 bp, Homo sapiens
ctgatctcttttagggggagtatttctcagcattcaagcaggcctcccggagagaagatgacattgccaaggtaaccagtggcatgagagttttattcaarccaggaaccacagaggtacaggagctggccctttgctatggtggaatggccaacagaaccatctcagccctcaagaccactcagaggcagctttccaagt

SEQ ID NO: 301003 - DNA, 201 bp, Homo sapiens
ctttgattcccggggccagttcacccactgatgtgtgatggtgttatcccctcacctcacctcatagccctgtggtttgggtctgccatttgcagcccctrcagagcaaggtggaaaacaggcaccttcctgatctcttttagggggagtatttctcagcattcaagcaggcctcccggagagaagatgacattgccaagg

SEQ ID NO: 301004 - DNA, 201 bp, Homo sapiens
aggctctctgtagcatgtttggggatataagaagttggtctgggtagtaaatttgctcctctcctctggacatctgagggcagaatagcagggaccagggycacagcacaagaatcttggaaatgggagtgaccagctggcttagaggcagagtgctgggctgggctttggcgacagaggttcttgccctgtaatctcagc

SEQ ID NO: 301005 - DNA, 201 bp, Homo sapiens
ctggtggcatggtggacttccggtgcaccctcaccctcagcttcttcttcaagttctacctgacagtccttcagaagctgggccaagagaacctggaagaygtgagtggggcctggccaggcacaggctctctgtagcatgtttggggatataagaagttggtctgggtagtaaatttgctcctctcctctggacatctga

SEQ ID NO: 301006 - DNA, 201 bp, Homo sapiens
tataagatacaatcactacctgtaaagcggtgtagtgttatttaaaagtggacttggattagttaaaaatgtatactgcaaactctagggcaactaccagaaaaaaaaaaaaaagaaaaaaggaagtataattgatactttatgaaaggaaaggagatgaaattatatataatgctcagttcaaaccacaaaagtcagaaa

SEQ ID NO: 301007 - DNA, 201 bp, Homo sapiens
aaactaccttgtagcttcaacaggccagagagaatggctttgcagcaggccaccagcagatctttctctggactgtgaaactttgaaaatactggcagttygatttgagggcttcgttctcagcccagtgtcttcctgcaagcactaaagccagccttcctaggcatccccttataacaaactccttccttccttccttcc

SEQ ID NO: 301008 - DNA, 201 bp, Homo sapiens
tcattccagtactgaaatttggttattcttagctgtgtgatttgggcaagaaacttaacttttctgtgcctcagcttcttcatctataaacagaaaaatcrtagtacctcatagggttgttgtgagcattaattaagttaaaatagggaaagtgcttagaagggttcctgacataccttaatttcctgtgttttctaatgt

SEQ ID NO: 301009 - DNA, 201 bp, Homo sapiens
tgctactactattgttactattattgcaactataattaatattatgattgctactactccagctgcttctactaaaattactactgttactcattattgcyattactatgactactgttgctactactatcactgcagctatgatcactgctgcaattcctactgtcactattatgattagtattattgctgttattacta

SEQ ID NO: 301010 - DNA, 201 bp, Homo sapiens
aggaaggaaaatgtgtttaaagcacaagggcagtgattgtttcatagtgtgatagtgatattttctttcttgcttgctttcttgctttgcttgcttgcttsccttccttccttccttccttccttccttccttccttccttccttccttccttccttccttccttcctttctttctttctttctttctttctttctttctt

SEQ ID NO: 301011 - DNA, 201 bp, Homo sapiens
tggcagtaaaacaacactggtgattgcatttgaactaacaattcggttcttaagggacaacagtaagctctttaattaaaataaaataagaatacatttartacactaactagaaatcacaataccaccactacgtgaattggtaattcacttacatgaaagtttatctattgatttcaactatgtggaattcttcaacaa

SEQ ID NO: 301012 - DNA, 201 bp, Homo sapiens
gtgaccagctggcttagaggcagagtgctgggctgggctttggcgacagaggttcttgccctgtaatctcagctacgtgggaagctgaggcaggagaatcrcttgaactcgggaggtggaggttgcagtgagccaagatcatgccattgcactctagcctgggctacaagagcgaaactctgtctcaaaaaaaaaaaaaaa

SEQ ID NO: 301013 - DNA, 201 bp, Homo sapiens
aactcgggaggtggaggttgcagtgagccaagatcatgccattgcactctagcctgggctacaagagcgaaactctgtctcaaaaaaaaaaaaaaaaaaagaaagaaagaaagaaagaaagaaagaaaggaaaaaaagaaagggaatgcagagtgtgatgagtatgtagggtggaatgggaatgtcaggtggggctgcaat

SEQ ID NO: 301014 - DNA, 201 bp, Homo sapiens
ctttgggattaaactcttagctgcccctcttccttacagattttttttttttacgtgatggataatgtacaaagccagacgtcttcttgagtatgctaaaacaaacaaacaaacaaacaaacaaacaaacaaaccatctatctgctccagctttttgagaggtgctacgtaaagggtcagcaaacttttcctgaaaacatt

SEQ ID NO: 301015 - DNA, 201 bp, Homo sapiens
tttgggattaaactcttagctgcccctcttccttacagattttttttttttacgtgatggataatgtacaaagccagacgtcttcttgagtatgctaaaacaaacaaacaaacaaacaaacaaacaaacaaaccatctatctgctccagctttttgagaggtgctacgtaaagggtcagcaaacttttcctgaaaacattt

SEQ ID NO: 301016 - DNA, 201 bp, Homo sapiens
agaacaggatgggggaaccacccccatgattcagttatctcccacagggtccctctcgcaacacatgggaattatgggggctacaattcaagatgagattkgggtgaggacacagccaaaccaaattaggttgtatctgtataatcaacctaaaatcctccctatccaatggtacaggttcttattcctaatcaacttatt

SEQ ID NO: 301017 - DNA, 201 bp, Homo sapiens
gctgccttccttggttgaggggcctgagcacgtgtgggaatgaatggctctgcccacagctctgcccaggcatttcctagcaacccagcagactcctctcsctgagttcattctccttaactcttgaccacccagtggggctgagtggaaccaagctcggctgtggagaggggggctgcggggcttgcacagtgatgctct

SEQ ID NO: 301018 - DNA, 201 bp, Homo sapiens
agtggaaggagcgtgtttgtagcatacaagttattcagcaatcttgtgctgttgacctaaaaatatgtcttaattcttcatcaaggcaagcctggtgaagyctttacttgttactacttcaacagttggaattagttgctctttttacttgatgaaacaaaactatacctctgaatatttatggatactttttactaaatc

SEQ ID NO: 301019 - DNA, 201 bp, Homo sapiens
taagccaacctgccttctgtaagtcatagtgcttaaatctcaggatttttcattaggagagacctgtcattaaggatttgtaggtataattgcttagcctycattattggtgcttgggatagagaggttttagatttttctgttttttgttctgcttcaaagctcagtttattgaagacatttataagctattggatcatc

SEQ ID NO: 301020 - DNA, 201 bp, Homo sapiens
ggggaatggggacagccatgttcttctgggttcagagtttcctctctgagctgcatccttttcagggttggcacctggtaccaacccaagaagtagggcaragctttcaagtgtaagattttgcatccagcatttcaaacaacttctttccttcagcaattacattgtagaaatctaggaaaccattgtgcaattggcttt

SEQ ID NO: 301021 - DNA, 201 bp, Homo sapiens
tgaaatgctaagtgtccaaaataaaatattgctgattgtctttttattgaaagtaaatttcctcattaagccaacctgccttctgtaagtcatagtgcttraatctcaggatttttcattaggagagacctgtcattaaggatttgtaggtataattgcttagcctccattattggtgcttgggatagagaggttttagat

SEQ ID NO: 301022 - DNA, 201 bp, Homo sapiens
ctttgaaaaaaaaaaaaaaaggttaaagttttcaggaaaagccgacattcccctttacccttttggatcacactcctctctgctaggggctgcctaattgrctcagttaggaaacttcacacttcagatctagggttaaaattgttcaaaaaaagaattattcttatttcttgttctcttcaagtataagacatgctttct

SEQ ID NO: 301023 - DNA, 201 bp, Homo sapiens
ttatatatatatatatatttgtaatgagagcaagtatatactcattataggataaatttaaggagtttaaaatatcccaaagtagaatttctatatctagycttttgtttctttcatgaatatttgcaagcaattaccattaaattcacacatgaaagattaatctgaaagatcagagagaccgtattattcctgaccatg

SEQ ID NO: 301024 - DNA, 201 bp, Homo sapiens
tcagtcctgtgctcatttgtaattgtaaagatcagttatatatatatatatatttgtaatgagagcaagtatatactcattataggataaatttaaggagwttaaaatatcccaaagtagaatttctatatctagccttttgtttctttcatgaatatttgcaagcaattaccattaaattcacacatgaaagattaatct

SEQ ID NO: 301025 - DNA, 201 bp, Homo sapiens
tgctctgaacactctcatactagccttatgtagacatgtattttgatttctcttgactaaattcctaggaatagaattgctgaatctgtggtgagcttaasattttaagaaatgatcgcattttcatgggcggaggcggcccggcaggcactgggagagctgggctttattattactaatattctacaattgtttaaataa

SEQ ID NO: 301026 - DNA, 201 bp, Homo sapiens
cccaaagtgctgggattacaggcgtgaaccactgcatccggcccatctatattatagcatgtatcactacgtcactcctgttcattgatgaataatattcyatcatagggatataccatatgttgtttcccattcaccacttgatggacatttgtgttgtttccagttttttgcttttatgcataatactgctctgaacac

SEQ ID NO: 301027 - DNA, 201 bp, Homo sapiens
ccaggggtggggagccaagtgtgtgccactggggagaggtcagttcctctcttcttcacttgttaccttctggtgacttctgaaggtcacctttttttcaygggatgatgtggtgttctgtttatttcctccaggtgacataagtgggagggaggatcagagggagacagagaggtgggggaaacgggacttatgataaat

SEQ ID NO: 301028 - DNA, 201 bp, Homo sapiens
ggggtcccagtttccgtgtgtgtaaaacagcctgtaaagggtattttaacagtgtacataaggtcaaggatttgcgtgctcctgtgaaatgaaactttttktgtcttctgaccaaaatctgtgaggagacagtccggtatctttcctagtttctcttccctgcgcttcccccccgccctatcgtgaccagccttctctttc

SEQ ID NO: 301029 - DNA, 201 bp, Homo sapiens
ccccacctctaagatttatatcagcgagacaagcactaacactgtgcccaacacctctcccacggctgcctctgtcagcgctgacctcaatggacaggccstctatgtaaggagcccgtgggatcccgcagagcagagggccagcccagagctgtgggcctggagagtctccctgggtgggagctagaagggttccttgca

SEQ ID NO: 301030 - DNA, 201 bp, Homo sapiens
ttgggattaaactcttagctgcccctcttccttacagattttttttttttacgtgatggataatgtacaaagccagacgtcttcttgagtatgctaaaacaaacaaacaaacaaacaaacaaacaaacaaaccatctatctgctccagctttttgagaggtgctacgtaaagggtcagcaaacttttcctgaaaacatttt

SEQ ID NO: 301031 - DNA, 201 bp, Homo sapiens
tagatgttggggctgtgctggggcgggatgtgccattttgtgaggaaagctgggaccgaatgtccaggcatcctgagctgcactcctactttttgcctatytgtagaagttcaaataagatatagcaagaagagaaattcaaataggctaacagcaacacagaaaggtagtgctgagggaggctggcaccccatctcccaa

SEQ ID NO: 301032 - DNA, 201 bp, Homo sapiens
tgggattaaactcttagctgcccctcttccttacagattttttttttttacgtgatggataatgtacaaagccagacgtcttcttgagtatgctaaaacaaacaaacaaacaaacaaacaaacaaacaaaccatctatctgctccagctttttgagaggtgctacgtaaagggtcagcaaacttttcctgaaaacatttta

SEQ ID NO: 301033 - DNA, 201 bp, Homo sapiens
gctgctgctcctagtttggagacgggatccctccaggaatggtgaaccaggcacagctgaaatctaacagataaataaacttgtccaggtccctgaaaacaaaaaaaaaagtgtttaagttcccatggttggcagctataggatacattctttcccttttgttccttgtcttgagcccatattgacaataccataacccac

SEQ ID NO: 301034 - DNA, 201 bp, Homo sapiens
ccttcctagtgtgtcactggtgtcccagaaaactgcaaaccctggtctgtgagggtctaaagagagagtcctcagcagagtcttcttgtgctgcctttggscttccatggagcaggaggaacataccacagaacatggatctattaaagtcacagaatgacagacctgtgatttgtcaagatgggatttggaagacaagtg

SEQ ID NO: 301035 - DNA, 201 bp, Homo sapiens
tctgaggaaagcttgctgattatcttcctgctctactcaccccaaaaggcagaaaagcaacatagtcagtcctgtgctcatttgtaattgtaaagatcagttatatatatatatatatttgtaatgagagcaagtatatactcattataggataaatttaaggagtttaaaatatcccaaagtagaatttctatatctagc

SEQ ID NO: 301036 - DNA, 201 bp, Homo sapiens; identical to SEQ ID NO: 62835

SEQ ID NO: 301037 - DNA, 201 bp, Homo sapiens
tgaggaaagcttgctgattatcttcctgctctactcaccccaaaaggcagaaaagcaacatagtcagtcctgtgctcatttgtaattgtaaagatcagttatatatatatatatatttgtaatgagagcaagtatatactcattataggataaatttaaggagtttaaaatatcccaaagtagaatttctatatctagcct

SEQ ID NO: 301038 - DNA, 201 bp, Homo sapiens
gcctgctggctgaccacccacatgggggctgcgatgcaggaccagcttgtgagggagtgcatgagtgtatgtgtgtatgtgcatgtgcgcatgtgtgagcycctgtttttatggagaatctgtgcacaggaaaactgtagaatgatctcttagcaagtatcttctaggcttataatattgaccaggctccgaactgctgat

SEQ ID NO: 301039 - DNA, 201 bp, Homo sapiens
atccaaattagtaaagttttatggaagctgaaatgtaacacagtagtctccccttatctgcaagagatacattccaagactcccagtggatgcctgaaacmtcagatagtactgaactccttgttatacagtcatctccccttatctgcaggagatacattccaagaaccctagtggacacctgaaacctcagatagtact

SEQ ID NO: 301040 - DNA, 201 bp, Homo sapiens
gtacagaccattcagtctacagggtccactggggggctagcagtgaagctgaggctgctcttaaattctgagctctcagagcccgtgtttggatgctgagrgatccagtcagcactcaaaggcgtatgaagtgaagagacaaggggatcagttatcagtttggtcatttttatggacaagcaaggaaggaatcagtgattg

SEQ ID NO: 301041 - DNA, 201 bp, Homo sapiens
aatatctatcacctcaagaatttatcatttttctgtgttagggaacatttcaattctactcttatttatttttaaatatacgataaattatcatatatttaaaaatattatagtcaccatattgttctactgtatgctagatgttactcattctaactatatttttatatgtattaaccatccccattttatcctctgtcc

SEQ ID NO: 301042 - DNA, 201 bp, Homo sapiens
ttcagtttgattctgggtccaggggagttacagactcctgtgctttccactcacctttagggttggagcatcatgaaaaagagtgctgtgtctgtataatygtataatccaagaaggggtgggtaaacaaggagacaggaccttataaggatggaaaacaccacactctgattaatgctgctgctgatgaagaattaacaa

SEQ ID NO: 301043 - DNA, 201 bp, Homo sapiens
ctatcacctcaagaatttatcatttttctgtgttagggaacatttcaattctactcttatttatttttaaatatacgataaattatcatatatttaaaaatattatagtcaccatattgttctactgtatgctagatgttactcattctaactatatttttatatgtattaaccatccccattttatcctctgtcccccta

SEQ ID NO: 301044 - DNA, 201 bp, Homo sapiens
tctccacagaagtgtggtaaactggaccccactttcgccagtgcaactttactgtttcagaaagaccccccagccgatgtccagctcttccaagtgagtayggtcagtgtatggctaatatcaggggactttgcaggccacatgagttggctagtggctgaccatcggctaatgactaacttgaattgtatataggtccat

SEQ ID NO: 301045 - DNA, 201 bp, Homo sapiens
atcacctcaagaatttatcatttttctgtgttagggaacatttcaattctactcttatttatttttaaatatacgataaattatcatatatttaaaaatattatagtcaccatattgttctactgtatgctagatgttactcattctaactatatttttatatgtattaaccatccccattttatcctctgtccccctacc

SEQ ID NO: 301046 - DNA, 201 bp, Homo sapiens
cattcagtctacagggtccactggggggctagcagtgaagctgaggctgctcttaaattctgagctctcagagcccgtgtttggatgctgagggatccagycagcactcaaaggcgtatgaagtgaagagacaaggggatcagttatcagtttggtcatttttatggacaagcaaggaaggaatcagtgattgaaatataa

SEQ ID NO: 301047 - DNA, 201 bp, Homo sapiens
tttattttggtggtaccactttttacagttttttaaatcttaattttgtaaccatagtagttacgtatgtatagattcttgtttgaaaaaaaaaaaaaaaraggtggctgggtgcggtggctcatgcttataatcccagtactttgggaggccgagatagacagatcacttgaggtcaggagttcaagaccagcctggcca

SEQ ID NO: 301048 - DNA, 201 bp, Homo sapiens
cacctgccatctggcaaggaaggcagagagctggcatctcctttcttggcttaatctccccccaggttttacttgacttctcaattgggccacgttaatcytgactccaaatcaaaccatctcatttcagtttgattctgggtccaggggagttacagactcctgtgctttccactcacctttagggttggagcatcatga

SEQ ID NO: 301049 - DNA, 201 bp, Homo sapiens
cctttcattcttcttgtgatggctttcaaggatcttcaagggccaccacagggaatatttgcatgcatgtctcatgatatgagtgatgcacttttctcagrctgctgttctccatcagcctccagtttggggaagtccactccacacagtctctctttattgaatgctctatcctgtattttgggaaatgatttaaagacc

SEQ ID NO: 301050 - DNA, 201 bp, Homo sapiens
gcttataatcccagtactttgggaggccgagatagacagatcacttgaggtcaggagttcaagaccagcctggccaacatggcaaaagcctgtctctttgaaaaaaaaaaaaaaaggttaaagttttcaggaaaagccgacattcccctttacccttttggatcacactcctctctgctaggggctgcctaattggctcag

SEQ ID NO: 301051 - DNA, 201 bp, Homo sapiens
taaaactgaaaaagtcaagacatagcaatgtagccacattatctagagacgtataagtttatctaaatagctgatagatgataagctatgagaattgtaagtagttgcttctggagactagaaggaaggaaagtggaagaggctactgtttttcataccatgacttacagaagtatgggacacttcaaactatttgcagta

SEQ ID NO: 301052 - DNA, 201 bp, Homo sapiens
aaaactgaaaaagtcaagacatagcaatgtagccacattatctagagacgtataagtttatctaaatagctgatagatgataagctatgagaattgtaagtagttgcttctggagactagaaggaaggaaagtggaagaggctactgtttttcataccatgacttacagaagtatgggacacttcaaactatttgcagtac

SEQ ID NO: 301053 - DNA, 201 bp, Homo sapiens
aaactgaaaaagtcaagacatagcaatgtagccacattatctagagacgtataagtttatctaaatagctgatagatgataagctatgagaattgtaagtagttgcttctggagactagaaggaaggaaagtggaagaggctactgtttttcataccatgacttacagaagtatgggacacttcaaactatttgcagtaca

SEQ ID NO: 301054 - DNA, 201 bp, Homo sapiens
catgctcggaagagtgaggttgacaagttcaacaagtaagcactaggagtagaagtccagttgctcttctgggtttcatatcctacagcctttctgctgaccccatataggaagctaataattcaatggataacttatgagactgctgagtttgccaactcattcacagccatctctttaagatcttataatgatcttcag

SEQ ID NO: 301055 - DNA, 201 bp, Homo sapiens
ttcccaagggccagccttgtaagcaacccctacagaggacagcagtccgggttgctgtgctaactctttcctgccttcttcccagcttcacattcagtgaygcaactttggtggcctggaagtatttacaccacagaaattggcaaatgctataaaccagggcttttccccctacacggaactggttgttaaagattcacc

SEQ ID NO: 301056 - DNA, 201 bp, Homo sapiens
agtgattactacccccactatctctcaacatgtgctggctccagtcgagtcctttggggagcctgggagggttctgccatcccaggtgtctatgtcatctrtatcttttaggagagaattgccaaaagccacggctcccagtgcgggttctgcacccctggcatcgtcatgagtatgtacacactgctccggaatcagccc

SEQ ID NO: 301057 - DNA, 201 bp, Homo sapiens
atgctggaccgtgatgaggacatgctgataactggtggcagacatcccttcctggccagatacaaggttctagatgttggggctgtgctggggcgggatgwgccattttgtgaggaaagctgggaccgaatgtccaggcatcctgagctgcactcctactttttgcctatctgtagaagttcaaataagatatagcaagaa

SEQ ID NO: 301058 - DNA, 201 bp, Homo sapiens
gtggctcacacctgtaatcccagcactctgggaggccgaggcaggcagatcacctgagatcaggagttcgagaccagcttggacaacatggcgaaactccrtctctattaaaaatacaaaaattagctgggtgtggtggcatgcacctgtaatcccagctactcaggaggctgaggtaggagaattgcttgaacctgggag

SEQ ID NO: 301059 - DNA, 201 bp, Homo sapiens
gcactggggcttgactctgtgcagtgattactacccccactatctctcaacatgtgctggctccagtcgagtcctttggggagcctgggagggttctgccrtcccaggtgtctatgtcatctgtatcttttaggagagaattgccaaaagccacggctcccagtgcgggttctgcacccctggcatcgtcatgagtatgta

SEQ ID NO: 301060 - DNA, 201 bp, Homo sapiens
gtggtctggcacaggtatccacctctgatctctcctactggctgtgagctctctaaatgaaagcacatacctcgcttccttatattctccaccttgtctakcacagtgcctagatggcaaagcagccctgtacaggtctgctcagcgtgcaggtggaaaagatggcttcccggctgtttttattctgagacttgcagggct

SEQ ID NO: 301061 - DNA, 201 bp, Homo sapiens
ctgggtgtggtggcatgcacctgtaatcccagctactcaggaggctgaggtaggagaattgcttgaacctgggaggtggagtttgcagggagccaagatcscaccactgtactccagcctgggcgatagagcaagactcagtctcaaaaaaataaataaaataaaataaagaataggtgagataggaaaaaacagaggagg

SEQ ID NO: 301062 - DNA, 201 bp, Homo sapiens
gatgctgtggaggagatgggaataatccaaattgctgcatgaaccagaagaaagaccactcagtaagtgagttcttctccccctggaagcctgggggtaawctgagacttagaggagtcagtgcacgagctccatgtccctggcggtgggggctggaagaggaacctacggtgagtcggtgatggcagactgtggggatgg

SEQ ID NO: 301063 - DNA, 201 bp, Homo sapiens
acttccccctgttagaattagtttccccctgctttgaattctcacagccctctgtttttagaacccttgggcatagtgggagggtaacatcgcctgttccrttgtggtctggcacaggtatccacctctgatctctcctactggctgtgagctctctaaatgaaagcacatacctcgcttccttatattctccaccttgtc

SEQ ID NO: 301064 - DNA, 201 bp, Homo sapiens; identical to SEQ ID NO: 62840

SEQ ID NO: 301065 - DNA, 201 bp, Homo sapiens
gaacaccatgaagacccaggtagatgccttttgggtcagctcaaggggctgtcagggtagcggggagctcctagcagaccaggagggccatgtgggaaatrggaagagggagatgtgggctggtccagagggtactcgagtgtcatagtcctggagccagactctttcaccaacaagctggtatcactgaccttgttccat

SEQ ID NO: 301066 - DNA, 201 bp, Homo sapiens
tgcctgtaatgtgacagcggttgccagtgttttcggcagctggtcctactctcatgatctaccagtcgctggtcacctggtcagacagaataagtttctaraagtattctgtgaccaactgcttgccctctggttaaaaaccaatgctgaattcagtctggcaggccccagcatcactaaccacaaagctgcatgggattt

SEQ ID NO: 301067 - DNA, 201 bp, Homo sapiens; identical to SEQ ID NO: 62841

SEQ ID NO: 301068 - DNA, 201 bp, Homo sapiens
cacttggcagagtatactctctccttaggcaagctggccccttctgcagcattgggctcactgtgagggatctcactgcttccccaggggagatatacatyggtggccaagagcacttctacctggagactcactgcaccattgctgttccaaaaggcgaggcaggggagatggagctctttgtgtctacacagaacacca

SEQ ID NO: 301069 - DNA, 201 bp, Homo sapiens
gaagatcgagaaaggggacctaaagaaggggttttccgaagcagataatgttgtgtcaggtagagctgttccatgccgcagtgggaatggggtggccctgstttgcaaattaaattcaagagatatgcattgaaccctgaagcagggaagtgatttctggacatttcctgacagaagattccctcttacgtttgtagcaaa

SEQ ID NO: 301070 - DNA, 201 bp, Homo sapiens
ctatagcgtgttgcttttataatggccagttagggagagttcaccaaggaggggagaatggagggcaagtttgagtagttgttgagggaagaaaaggattwgcacatatatagaagaggaaccacataaataaaggtgcagaggtgtgggagatggaagaattgagagagatttagctcttgagtgtggctggggtggccc

SEQ ID NO: 301071 - DNA, 201 bp, Homo sapiens
cacttctttgggtgaatttagagggattccttcatcaaatcttctcatttaaatcctggcccacacccatatctcaggcgtacgtcactggtgcttgatcytaagagatgattttacaggtacagcattagtatggtccaatgacaatcagcacattcactgccaatgggatagcacctttgtacacacccttttacctcc

SEQ ID NO: 301072 - DNA, 201 bp, Homo sapiens
agtcacactgctttctggcttagtgactttggaaaaactacctaacttccttgagtctgagtttccccaaacataaaatgggaattaggataagtactttsagggtttcttgtgaggattaagcatttggaagatggttagaacttcagggcagtttacatacctttccctgaaatgtgttgccctatttccccatggggg

SEQ ID NO: 301073 - DNA, 201 bp, Homo sapiens
gggatccctccaggaatggtgaaccaggcacagctgaaatctaacagataaataaacttgtccaggtccctgaaaacaaaaaaaaaagtgtttaagttccyatggttggcagctataggatacattctttcccttttgttccttgtcttgagcccatattgacaataccataacccacattgtctacgctcaaaccacctc

SEQ ID NO: 301074 - DNA, 201 bp, Homo sapiens
tgggcttgtgttggcccccatgccacaatttactgccccctgcacactagagtgtagtcgtcccaggcatgaactctggaacctgactgcctgaatttgtrtccacactctgccatttcctaattgtgcaaccttgaacaacttacttattcccttgtgtgcctcttaagcaagttaattatacccacctgcaaatgtgga

SEQ ID NO: 301075 - DNA, 201 bp, Homo sapiens
tattcccaacagagacagcagcaggcataaatgcaagaaggagggaaagagtttggggtgttggagaaagtacagaccattcagtctacagggtccactgkggggctagcagtgaagctgaggctgctcttaaattctgagctctcagagcccgtgtttggatgctgagggatccagtcagcactcaaaggcgtatgaagt

SEQ ID NO: 301076 - DNA, 201 bp, Homo sapiens
gaatgatggttggcagtggtgggaggtgaggtatgcaagagagtgggaggagcatgatcagcagaccctggcaatgagaacactatcattccttcctagtrtgtcactggtgtcccagaaaactgcaaaccctggtctgtgagggtctaaagagagagtcctcagcagagtcttcttgtgctgcctttgggcttccatgga

SEQ ID NO: 301077 - DNA, 201 bp, Homo sapiens
tcagtctgaggaggacatggtgggccggcccctgccccacctggcagcggacatgcaggcctctggtgaggccgtgtactgtgacgacattcctcgctacragaatgagctgtctctccggctggtcaccagcacccgggcccacgccaagatcaagtgagtgacaccgccaggaggagctggtggaatgctgtgaggggg

SEQ ID NO: 301078 - DNA, 201 bp, Homo sapiens
tcacaccactcattcttgcaggtccatagatacatcagaagctaagaaggttccagggtttgtttgtttcatttccgctgatgatgttcctgggagtaacrtaactggaatttgtaatgatgagacagtctttgcgaaggataaggtaagtcttggatttttttatatgaagtaaattgaataagtattgaagttttaatt

SEQ ID NO: 301079 - DNA, 201 bp, Homo sapiens; identical to SEQ ID NO: 62853

SEQ ID NO: 301080 - DNA, 201 bp, Homo sapiens
accttccctccactgttgtcctgtgaccctgccaagtccccctctgcgagaaacacccaagaatgatcaataaagaaaaaaataataataataataataataaaaccctcccctttgcatagttgcaaaaattgaagttgtcagcacagagtcctgtgtaatcaggcccctaccaaccttactaaccatccatctatctat

SEQ ID NO: 301081 - DNA, 201 bp, Homo sapiens; identical to SEQ ID NO: 62854

SEQ ID NO: 301082 - DNA, 201 bp, Homo sapiens
agatcaagaccatcctggctaacacggtgaaaccccatctctactaaaaatgcaaaaaattagccgggcatggtggcgagtgcctgtagtcccagctactyaggaggctgaggcaggggagtggcttgaacccgggaggcggagcttgcagtgagccaagattgcgccactgcattccagcctgggcgacagagcgagatt

SEQ ID NO: 301083 - DNA, 201 bp, Homo sapiens
cttccctccactgttgtcctgtgaccctgccaagtccccctctgcgagaaacacccaagaatgatcaataaagaaaaaaataataataataataataataaaaccctcccctttgcatagttgcaaaaattgaagttgtcagcacagagtcctgtgtaatcaggcccctaccaaccttactaaccatccatctatctattc

SEQ ID NO: 301084 - DNA, 201 bp, Homo sapiens
ccttccctccactgttgtcctgtgaccctgccaagtccccctctgcgagaaacacccaagaatgatcaataaagaaaaaaataataataataataataataaaaccctcccctttgcatagttgcaaaaattgaagttgtcagcacagagtcctgtgtaatcaggcccctaccaaccttactaaccatccatctatctatt

SEQ ID NO: 301085 - DNA, 201 bp, Homo sapiens; identical to SEQ ID NO: 62858

SEQ ID NO: 301086 - DNA, 201 bp, Homo sapiens
ctgtttcagctttaaattcaaaattatatttctaaaagtgctggatttttttttttaggcgtttcatcaaacgggtatatgtgtctttaccaaatgaggasgtatgtatctgtgtttgaattttttttgttttagagcagaaacaagaactaccatcttgacaatattaagtcttccaatccatggtacagctactttgga

SEQ ID NO: 301087 - DNA, 201 bp, Homo sapiens
gtacatagtatactatatagtatacatatagtacactatatagtatatatagtatagtatatatagtatacatagtatactatatatagtatagtatacayagtatactatatagtatatagagtatatatacagtatactatatagtgtgtatagagtatatatacagtatactatatagtgtgtatagagtatatatac

SEQ ID NO: 301088 - DNA, 201 bp, Homo sapiens
atagtgtgtatatatagtatatatatagtgtatatatcgtatatacactatatactatatagtgtatatatagtatatgtagtatatatagtatatatagkatagtatatatagtatatatagtgtatatatactgtatatatagtgtacatagtatactatatagtatacatatagtacactatatagtatatatagtat

SEQ ID NO: 301089 - DNA, 201 bp, Homo sapiens
gcatttattacagacaatatttactcatgtgtccatcttacatattatttccttactctcagttttaagactaaattcactattttcttccagtactatckctagcctcttgttaccaactacataaggattttgaggtcaacagcttgatatcaggagaattagtctagtaaaggtttagttacggttttaggcaaattg

SEQ ID NO: 301090 - DNA, 201 bp, Homo sapiens
tcgtttccttttactcttttttctctaaacttctcttctggcttcatttcattcatttgatcttcaatcactgataccctttcttccacttgatcgaatcrgctactgaagctcatgcatgcatcacgtagttttcgtgccatggttttcagctccatcaggccatttaaggtcttctccatgctgtttattctagttagc

SEQ ID NO: 301091 - DNA, 201 bp, Homo sapiens
tttccaacttggttccattctccccgtcactttcaggtacacccgtcagacatagatttggtcttttcacatagtcctatatttcttggaggttctgttcrtttccttttactcttttttctctaaacttctcttctggcttcatttcattcatttgatcttcaatcactgataccctttcttccacttgatcgaatcggc

SEQ ID NO: 301092 - DNA, 201 bp, Homo sapiens
agtatgatattggctgtgggtttgtcataaatagctcttattattttgagatacatcccatcaatacctagtttattgagagtttttagcatgaagggctrttgaattttgtcaaaggccttttctgcatctattgagataatcatgtggtttttgtctttggttctgtttatatgatggattacgtttattgatttgcat

SEQ ID NO: 301093 - DNA, 201 bp, Homo sapiens
gttttgatttgcatttctctgatggccagtgatgatgagcattttttcatgtgtcttttggctgcataaatgtcttcttttgagaagcatctgttcatatmctttgcccactttttgatggggttgtttgatttttttcttgtaaatttttttaagttctttgtagattctggatatcagccctttgtcagatgggtagat

SEQ ID NO: 301094 - DNA, 201 bp, Homo sapiens
ttcccatcaacagtgtaaaagtgttcctgtttctccacatcctctccagcacctgttgtttcctgagtttttaatgatcgccattctaactggtgtgagayggtatctcattgtggttttgatttgcatttctctgatggccagtgatgatgagcattttttcatgtgtcttttggctgcataaatgtcttcttttgagaa

SEQ ID NO: 301095 - DNA, 201 bp, Homo sapiens
ctttgggaggttgagtcgggggtattgcttgagtccaggagtttgaaaccagcctggacagcgtactgagaccccatgtctaaatttaaaaaaaaaaaaaatagccaggagtggtgatgtgcacctgtagtcctagctacttacttgggaggctgaggcaggaggattgcttgagctcaggaggtcgagactgcagtgagc

SEQ ID NO: 301096 - DNA, 201 bp, Homo sapiens
tgaacccaggaggcggagcttgcagtgagccgagatcatgccactgcactccaggctgggcaaaagagcgagactctgtctcaaaaaaataaaataaaatmaatagataaataataataataaagtgctgggattacaggcatgagccaccacgcccagctgaagctaatattattagctaataataatatctcatatttt

SEQ ID NO: 301097 - DNA, 201 bp, Homo sapiens; identical to SEQ ID NO: 62877

SEQ ID NO: 301098 - DNA, 201 bp, Homo sapiens
ttctaatcacaatggttttactttttccttgtcagaaagtggagctgttccaaaaagaaaagaccccttaacacacactagtaattcactgcctcgttcawaaacagttatgaaaactggatctgcaggcctttcaggccaccatagagcacctagttacagtggtttatccatggtttctggagtgaaacagggatctgg

SEQ ID NO: 301099 - DNA, 201 bp, Homo sapiens
tgggttcaagtgattctcctgcctcagcctcccgagtagctgggactacaggtgcacgccaccacgcccagctaattttttttttttttttttttttttgkatttgtagtagagacagagtttcaccatgttggccaggatggtctcgatctcctgaccttgggatccgcccaccttggcctcccaaagtgctagggatta

SEQ ID NO: 301100 - DNA, 201 bp, Homo sapiens
actgtgaagagtgtgcagcttcctctgaaccaaggtttccaaaaggttttgatattgaagaagcagtgccgccttactggcttttaatgaaagcagagtaytgtagtgtcagaaaaaaagaacaaatggtgacaattttgaaagaaatagctgcatatgactgcagttgaatttgcatcattttaatcaagataatcattt

SEQ ID NO: 301101 - DNA, 201 bp, Homo sapiens
ttccaaagtagcctttaatttccaagttgaaatgtttgatgaatggattgcgtaaacttaaacataccactttacagtaaaacctaaaacaactatgtatktttctgaatgaaagcaaggatactacatctttcgggtttcttttaagctaacttttttttttttttgagacggaatctcgccctgtcgcccaagctggag

SEQ ID NO: 301102 - DNA, 201 bp, Homo sapiens
aatgaaagcaaggatactacatctttcgggtttcttttaagctaacttttttttttttttgagacggaatctcgccctgtcgcccaagctggagtgcaatrgtgcagtctcggctcactgcaacctccgactccctggttccagcgattctcctgcctcagcctcccgagtagctgggattacaggcacgcaccaccacgc

SEQ ID NO: 301103 - DNA, 201 bp, Homo sapiens
gtgtttcaccatgttggccagactggtcacgaactcctgacctcaggtgattcgcctgcctcgaccttccaagtgcttggattacaggtgtcagccactgygcccacccagcaagctccattctttatcacctcttaagaacatccaggatcccttggggagaattaaaacggttgcaaagttttagaatagaggaacatg

SEQ ID NO: 301104 - DNA, 201 bp, Homo sapiens
ggcgggtggatcatgaggtcaagagtttgagaccatcctggccaacatggtgaaatcccatctctactaaaaatacaaaaattagctgggcatggtgacayatgcctgtagtcccagctactcaggaggctgaggcaagagaagtgcttgaacctggaaggtggaggttgcagtgagccgagatcgtgccactacactcca

SEQ ID NO: 301105 - DNA, 201 bp, Homo sapiens
ccagtggttgaaagagagtgcacttttgaagtctgcctcttggctgtccttgacaacacaaaccttagttccaagagaatgtaattcttcctctttctcastgcttcaaaatatatatgatcaaatagaaacgagttgaataggcagtctcttcaaaggtttcctaactctgtggttaactatcaaggagctggtaatatc

SEQ ID NO: 301106 - DNA, 201 bp, Homo sapiens
gcctaggcaacatggtgaaaccccatctcttccaaaaataaaaaatagagccaggtgtggtggcatgcacctgtagtcccagctactcaggaagctgaggygagaggatctcttgagcctgagaggttgaggctgcagtgaactgtgatcatgccactgcactccagcctgagtgacagtgtgagaccctgtctcaaagaa

SEQ ID NO: 301107 - DNA, 201 bp, Homo sapiens
gaaagtggagctgttccaaaaagaaaagaccccttaacacacactagtaattcactgcctcgttcaaaaacagttatgaaaactggatctgcaggcctttmaggccaccatagagcacctagttacagtggtttatccatggtttctggagtgaaacagggatctggtcctgctcctaccactcataaggtattctgggac

SEQ ID NO: 301108 - DNA, 201 bp, Homo sapiens
ggagaatggcatgaacccaggaggcggagcttgcagtgagccgagatcatgccactgcactccaggctgggcaaaagagcgagactctgtctcaaaaaaawaaaataaaataaatagataaataataataataaagtgctgggattacaggcatgagccaccacgcccagctgaagctaatattattagctaataataata

SEQ ID NO: 301109 - DNA, 201 bp, Homo sapiens
ctgtgatgtggtcacctctcactgcaacatccacttcctggggctgaagtgatccttgcaactcaccctcccatgctcggctaattttttttttttttttytaagtagagaccagatctctttatgttgcccaggctggtcttgaactcctgggctcaagtgattctgctttgtctgcccagagtgctgggattacagaag

SEQ ID NO: 301110 - DNA, 201 bp, Homo sapiens
gtattgaagaactggaaaaaggaatagctgttatagttacaggacaaggtaagattgtatttgtttatagccatcccaaattatgatatattcacatgatygtccagatttcagatctatttatttatttatttatttttctttctttcttttcttttcttttcttttttttttttttttttgagacagggtctttcctct

SEQ ID NO: 301111 - DNA, 201 bp, Homo sapiens
ggctctgccagcgcttctcccgcgccctcatggcagccaagaggagctccggggccgcgccagcacctgcctcggcctcggccccggcgccggtgccgggmggcgaggccgagcgcgtccgagtcttccacaaacaggccttcgagtacatctccattgccctgcgcatcgatgaggatgagaaaggtaactagggggctg

SEQ ID NO: 301112 - DNA, 201 bp, Homo sapiens
cctgggaaatggaggttgtagtgagccgagatcatgcctactgcactccagcctgggcaatagagtgagactccgtctcaaaaaaaaaaaaaaaaaaaaaagggaaggagcatgggaatgggaagaggcactaaaaaaggaacttcttttgtatctgttacattgtactcattttgtttttaaaattttaagccaaatatg

SEQ ID NO: 301113 - DNA, 201 bp, Homo sapiens
gctctgccagcgcttctcccgcgccctcatggcagccaagaggagctccggggccgcgccagcacctgcctcggcctcggccccggcgccggtgccgggcsgcgaggccgagcgcgtccgagtcttccacaaacaggccttcgagtacatctccattgccctgcgcatcgatgaggatgagaaaggtaactagggggctgg

SEQ ID NO: 301114 - DNA, 201 bp, Homo sapiens
atatatatatatatatttttatgctatatatagagtatatatatttttatactatatatatttatatatactatatatatatatatatatatatatatttwttttttttttttttgagatgaagtcatgctctgttgaccaggctggatgcagtggcatgatcttggcttaccgcaacctcaacctctgcctcccaggttc

SEQ ID NO: 301115 - DNA, 201 bp, Homo sapiens
taaacaatgctttttgtttcattgttattgaaatcatatttgtatttttcaaaagtatatatacttaaaaattcctaaataaaatgtctttctgtaatacwgcattttaggttataaggatcaataccatgggctgataagcaaaataggactcacggccccaaaatgttgataaacatcatgaccatattccccataatg

SEQ ID NO: 301116 - DNA, 201 bp, Homo sapiens
atatatatatatatatatttttatgctatatatagagtatatatatttttatactatatatatttatatatactatatatatatatatatatatatatatwtattttttttttttttgagatgaagtcatgctctgttgaccaggctggatgcagtggcatgatcttggcttaccgcaacctcaacctctgcctcccaggt

SEQ ID NO: 301117 - DNA, 201 bp, Homo sapiens
tcttttgtttttttgccattcaaaattgggtgcattgttgtatctttggattttaatttgtacttccctaacaactaatgatgtggagcatctttttataygcttacttgccaattatgtcttaattctttggcaatacttatatttgactctgcctactatatatatatatatatatttttatgctatatatagagtata

SEQ ID NO: 301118 - DNA, 201 bp, Homo sapiens
tctcatgatccacccgcctcagcctcccaaagtgctgggattacaggcgtgagccacctcacctggcgtttttttgtgtgtgttttcagtagagatggggyttcactgtattagccagaatggtcttgatctcctgacctcgtgattcacctgcctcagcctcccaaagtgctggaattataggcatgagccaccacgcct

SEQ ID NO: 301119 - DNA, 201 bp, Homo sapiens
tgtcgcccaggctagagtgcagtggcacaatctcggctcactgcaacctctgtttcccaggttcaaacgattctcctgcctcagcctcccaagtagctggrattacaggcgcctgccaccatgcctggctaatttttgtatttttagtagagatggggtttcaccatcttggccaggctgatctcgaactcttgacctcat

SEQ ID NO: 301120 - DNA, 201 bp, Homo sapiens
tgtacagctctgcattttagatatttgagaaatatttatttcctctccagtgagatgtgttaaaacattagttatgtgattaacaaatatgtgtacatacrtatatatgtacatacacattttgagacagggccttggtctgttgttcaggctggagtgcaatgacaccatcttagctcattgaagcttcagcctcgcagg

SEQ ID NO: 301121 - DNA, 201 bp, Homo sapiens
acaggcgtgagccactgtgcccggcctcaaaatacttcaatttctttcatggcctgctatctgacgtgatgctgtactagagtcaggctgggaatttggcrtcttattgctacaaaacatcttaatatctctgttttaatgttaatgctgatcagttgtccctgaattccaaagggaagagggtatatgagtcatgtccaa

SEQ ID NO: 301122 - DNA, 201 bp, Homo sapiens
atctgataaatggacattcagatgataccatacttttccaaaagataacattgcttttgattacatatgcaataaacatttcacattttttctcaagattwtttactggcatctgcaccaaagacacaaaaaagcagccactgttaaggactttatcccttgttctgtttttagctggtttgttgttgtatttttcctcat

SEQ ID NO: 301123 - DNA, 201 bp, Homo sapiens
gcatccataagtaggggaatggataaacagactttggtatatcatgtaatggagtattattcagcaataaaaagaaatgatctatcaagccacaaaaatayatggaggaaccataaatgcatattgctaaatgaaagaagccagtctgaagaggctacactataggattctgactatatgatgttttggaaaaggcaaaac

SEQ ID NO: 301124 - DNA, 201 bp, Homo sapiens
attttctgtaaacctaaaatcactaaaaaaaaagtttatttttatttttatttttttttaatttttaattttttgagatggagtttcactcttgttgcccrggctggaatacaatggcacgatctcggctcactgaaacctccgcctccagggttcaagcgattctcatgcctcaacctcccgagtagctgagattacagg

SEQ ID NO: 301125 - DNA, 201 bp, Homo sapiens
tcctcctacctcagtcttccaaagtgctgggactacagacatgagccatcacactgggtcttttttaccaaattatagtagaaagcactttttctctaatrgtgaactatgagagaattaatcaggggctattagtaattcatccctgaattaatcagtgattataatgctttgtggtccatgtagtttgctggggattaa

SEQ ID NO: 301126 - DNA, 201 bp, Homo sapiens
ttgttgcccaggctggaatacaatggcacgatctcggctcactgaaacctccgcctccagggttcaagcgattctcatgcctcaacctcccgagtagctgrgattacaggcatgtgccaccacgcccagctaattttgcagttttagtagagacagggtttctccatgttggtcaggctggtcttgaactcctgatctcag

SEQ ID NO: 301127 - DNA, 201 bp, Homo sapiens
tgagctatgataatggcattgcactccagcttgggtgacagagtgagaccctgtctctaaaaaatgaagtaaaatagtgcacaagtatagaacttgaaaawcttccttaaccttaccataagggaaatgattactaataagtttcttaactttttgtacttacataaacataaatattcatcagagaaaaaaatatgcaaa

SEQ ID NO: 301128 - DNA, 201 bp, Homo sapiens
tggagtgaagtggtaagaacatggcttattgcagcctcaatctcctgctcccattcagcccctcaagtagctgggactacaggtacatgtcaccacgcccrgctaatttttatttttattttggtagagatggggtttcaccatgttgcccaggctgatcttgaattcctgggctcaagtgacccgcccacctcagcctcc

SEQ ID NO: 301129 - DNA, 201 bp, Homo sapiens
cttggcctcccaaagtgctgggattataggcgtgagcaaactgtgcccagtcttcataaacttttctttacatgtccttatcaagtactttttgagcaccwactgtcaaccagccgtagtatataatactgataattctataacataagaaattgacctgtttaaggggatgaatatggttagttattttcagggtgaaga

SEQ ID NO: 301130 - DNA, 201 bp, Homo sapiens
tgggattacagaagtgagccacaacacctggcctaaagatagtatttttaaaatttcttctgttttctttcttttgggtatacattttcttcttttttttwaaaaaaaatttctgtataaagactgtgactccccatgaaagtagtttgggtgataatttatcgtgaaacaatattagttgggaaatgtagatattttaat

SEQ ID NO: 301131 - DNA, 201 bp, Homo sapiens
ccccctccttggcctcccaaagtgctgggattacaggcgtgagccctgctcccagactcctggcttttttttttttttttaatgaaaaattcaaaatgctyttttttttttttttttttttttgagacagagtctcgctctgtcgcccaggctgaagtgcagtggtgtgatctcggctcactgcaacctctgcctcccagg

SEQ ID NO: 301132 - DNA, 201 bp, Homo sapiens
aactcctgagctcaagtgatcccccctccttggcctcccaaagtgctgggattacaggcgtgagccctgctcccagactcctggcttttttttttttttttaatgaaaaattcaaaatgctcttttttttttttttttttttttgagacagagtctcgctctgtcgcccaggctgaagtgcagtggtgtgatctcggctca

SEQ ID NO: 301133 - DNA, 201 bp, Homo sapiens
tcaccctcaaaaatgctattacctatttatgaaatatctttaaaagtgtggagtggtagatgggaaaggtgacatcggctgggcgcggtggctcacacctrtaatcccagcactttgggaggccaaggtgggcggatcacctgaggtcaggagttcacgaccagtctggtaacatggtgaaacctaatctctactaaaaat

SEQ ID NO: 301134 - DNA, 201 bp, Homo sapiens
caaaaatatttgtgttaattgtgatgacaaaaaaaaaaaaagagatggaagtctctccctaacctcactcctcatttagtgtcatggcttttttctttttytttttttttttttttgagacaaagcctcactctgtcacccaggctggactgcagtggtgcaatctcagctcactgcaggctctgcctcccagattcaagc

SEQ ID NO: 301135 - DNA, 201 bp, Homo sapiens
aatataaactctatggaggagggatccttgtctatatcccaagtgcctacaacagtgtctagcacatgctagttaccgaataaatatttgccaagttaatraagttgtttataacccttggcactatacctgatacagtgtagggacttaataaatgaatgttaaatgaagctatcttaaaaatatatatatatatataac

SEQ ID NO: 301136 - DNA, 201 bp, Homo sapiens
tttctcaagattatttactggcatctgcaccaaagacacaaaaaagcagccactgttaaggactttatcccttgttctgtttttagctggtttgttgttgkatttttcctcatgttgaatacagttaaaccctattaaactggattccccatattactgttagttgtcctgatgacaattaaggatagttagtaaatggat

SEQ ID NO: 301137 - DNA, 201 bp, Homo sapiens
gagtctcgctctgttgcccaggctggagtgcagtggcatgatctcggctcactgcaagctccgcctcctgtgttcacgccgttctcctgcctcagcctccygagtagctgggactacaggcgctggccaccatgcccagctattttttttgtatttttagtagagacgggatttcaccatgttggccaggatggtctcgat

SEQ ID NO: 301138 - DNA, 201 bp, Homo sapiens
tatttttagtggagatggggtttcaccatgttggccaggctggtcttgaactccatacctcaggtgatctgcccgcctcagcctcccaaaatgctgggatwacaggcgtgagctactgcacccggcctaaaattgattagtttttaagaccctcttggtgggaacagactttcatagtgtttatagttataatagtttgga

SEQ ID NO: 301139 - DNA, 201 bp, Homo sapiens; identical to SEQ ID NO: 62876

SEQ ID NO: 301140 - DNA, 201 bp, Homo sapiens
taatgaaatctcgtgtaaatgtgttttatatggtgactatgtttattctgaattttattcttatggcatactaaaaaaaaaaaaaatttttttttttttttgtaatggagtcttgctctgtcacccacgctggagtgcagtggcgcaatctcggttcactgtaacctccacctcccgggttcaagcgattctcctgcctca

SEQ ID NO: 301141 - DNA, 201 bp, Homo sapiens
aattaaatctcattttaatgaaatctcgtgtaaatgtgttttatatggtgactatgtttattctgaattttattcttatggcatactaaaaaaaaaaaaaatttttttttttttttgtaatggagtcttgctctgtcacccacgctggagtgcagtggcgcaatctcggttcactgtaacctccacctcccgggttcaagc

SEQ ID NO: 301142 - DNA, 201 bp, Homo sapiens
aggttcaagcgattctcctgcctcagcctccccagtaactgggattacaggcatgtgccaccccacacccagccaatttttgtatttttagtagagacagsatttcaccatgttggccaggctgttctcgaactcctggcctcaagtgatccactcgccttggcctcacaaactgctaggattacaggtgtgagccaccgt

SEQ ID NO: 301143 - DNA, 201 bp, Homo sapiens
aagtgctgggattacaggcgtgagccaccgcgcccggcacatattttgatttctaatgtggacatcagaatgggctgttgacagctcttttttttttttttgaggcagagtctcgcttcttcacccaggctggagtgcaatggcgcgatctcagctcactgcaacctccacctcccaggttcaagcgattctcctgcctca

SEQ ID NO: 301144 - DNA, 201 bp, Homo sapiens
gaggctgaggtgggtggattgcttgagcccaggagtttgagaccagcctgggcaacatagtgaaaccctgtctttgtgaaaaatacaaagattagctaggygcagtggcaaatgcctgtagtcccagctacttggggggctgaggtaggaggatcacttgagctcaggttgttcaggctgcaatgagctgagatcgtgcaa

SEQ ID NO: 301145 - DNA, 201 bp, Homo sapiens
agtcagtccacttttgcctcggcatgagccactgtgtgcagcccacgttttttattaatggatatttggattgtttccatctattgtgaataatgtggctrtgaacattggtctaaatatctgtttaagtcccggctttcaatacttttggatatatacctaggagtagaattactgaattatatggtaactttctgttta

SEQ ID NO: 301146 - DNA, 201 bp, Homo sapiens
cccacgttttttattaatggatatttggattgtttccatctattgtgaataatgtggctatgaacattggtctaaatatctgtttaagtcccggctttcartacttttggatatatacctaggagtagaattactgaattatatggtaactttctgtttaaatttttgaactgccaacctgttttccataggggctgcacc

SEQ ID NO: 301147 - DNA, 201 bp, Homo sapiens
gattagctgggtgtgatggtgcacacctgtaaccccagctactccagaggctgagacagcagaatcgcttgaacccgggagggggaggttgcaatgagccragattgcaccactgcactccagcctaggtgacagagcaagactctgtctcaaaaaaaaaagaaaaaaagtctaagaagttaattttcattcagacaaatg

SEQ ID NO: 301148 - DNA, 201 bp, Homo sapiens
agttacatatacacattacaatgataaaaatactaagaagttatatagtaatgtttctcagacttgttcacaaccctgttttttatgtattacctctcaamagcatgatttgcaatatttagtgtactcttcatacgatctatacaaataattttttattttaaagcaggacagaaggagcaagctgtggaatggtataag

SEQ ID NO: 301149 - DNA, 201 bp, Homo sapiens
taatgggatggctgggtcaaatggtatttctagttctagatccttgaggaatcgccacactgtcttccacaatggttgaactagtttacgttcccatcaayagtgtaaaagtgttcctgtttctccacatcctctccagcacctgttgtttcctgagtttttaatgatcgccattctaactggtgtgagatggtatctcat

SEQ ID NO: 301150 - DNA, 201 bp, Homo sapiens
aagaccccttaacacacactagtaattcactgcctcgttcaaaaacagttatgaaaactggatctgcaggcctttcaggccaccatagagcacctagttasagtggtttatccatggtttctggagtgaaacagggatctggtcctgctcctaccactcataaggtattctgggacagtaactttaattgctgtctttttg

SEQ ID NO: 301151 - DNA, 201 bp, Homo sapiens
gttcttatctgttttctggctcttttcagtattctgacatcatttgaaattaatgtgtctaaaggaaattctataagagaagttttcacttttttaattatatcttttgagggattgcagcaaaatatttattgctatgtttttattcaggttacttggttgattctgaaataccacgaccaattctttttaggttaggtt

SEQ ID NO: 301152 - DNA, 201 bp, Homo sapiens
aagtatatatcatacagaataaatttgattgtggagcattttgtaacatctttcaaaattaataagagttggtttttatgttttgtttgatgttatgatayaggacattagaagtattaatatcaattagagactcatctttgaatgtgactttgtactttcttatttgtgttagtagaggagagaacaaaaagaagatat

SEQ ID NO: 301153 - DNA, 201 bp, Homo sapiens
ctagatttgctgatagattggataaaatggtcctctctttatggatctcataatacagtaggagaaacagacacataaatagtcatcactgcaggatgggkattagaaatattttgcaagggtgtaaaaggtgctaagaaagctttcttgtgtgacaaagctggttaaagaaagaaaagaaagcttcctagaagtgaaacc

SEQ ID NO: 301154 - DNA, 201 bp, Homo sapiens
ttacaccttaggcaacatggtaaaaccccatctctacaaaaaataaaatgagtcaggaatggtggcacatacctgtagtcccagctacttgggaggttgakgtgggaggatcgcttcagcccgggaggtggaggttgagcaacagagtgagaccctgtctcaaaaaaaattttaaacatttcatattgcacactaacacag

SEQ ID NO: 301155 - DNA, 201 bp, Homo sapiens
ccatgtgttcttcacttcaattttcagtagttggctgtgagtaggtattgaataaatatttgtggagtaatcataatgaggtatagatattattctcatasctctattttattaattagggaattacagaattcagtgatctgctcaggatctcataaccaggaagtgggaaactaggatttgagctccagtgagtgtggc

SEQ ID NO: 301156 - DNA, 201 bp, Homo sapiens
ggtgatgattgcacatctataaatgtattaaaactcattgaattatatacttacaatgggtgaaattcatagtagatgaattcatacctctataaaactgkttttttgcagcaaaatatttattgctatgtttttattcaagtgtggtgaattattgctatgtttttatccaggtgtggtgtctcacgcctataatcccaa

SEQ ID NO: 301157 - DNA, 201 bp, Homo sapiens
ggttaagagaggtcaaggagggtgttaacatttaagaatactatgtgtttgtagaaggaaattttttgttaactgctccattcttttttttttttttttttgagatggagtctccctgtgtcacccagactggagtgcagtggcgtgatctcagcttactgcaacctctgcctcccagacgcaggcgattctcttgcctca

SEQ ID NO: 301158 - DNA, 201 bp, Homo sapiens
ggcacgcaccaccacgcctggctaatttttgtatttttagtagagtagggatttcaccatgttggccaggatggtctccatctcctgacctcgtgatcggstcgcctcggcctcccaaagtgctggtaatacaggcatgagccaccgcgcctggccttaagctaacattttttattatatgtgccaggcattgtgctatta

SEQ ID NO: 301159 - DNA, 201 bp, Homo sapiens; identical to SEQ ID NO: 62856

SEQ ID NO: 301160 - DNA, 201 bp, Homo sapiens
tttgtaaagaacaagttgcattcttttaagttccctttcaaatttgtgaactattgtttttgggcagtatgcaagaaattgaacactttccagttattccwaagaaggaatattctcttctcagcatttataaattgtatttgctctcaaagttaacatgtgtctcttttttttaatataatgatttgtactgaatagata

SEQ ID NO: 301161 - DNA, 201 bp, Homo sapiens
cctcctgggttcaagtgattctcctgcctcagcctcctgagtagctgggattacaggcatgcgccactatgcctggctaattttgtgtttttgtagagacrgggtttcactatgttggtcaggctgatctggaactcccaacctcaggagatccgcccacctcggcctcccaaagtgctgggattgcaggtgtgagccacc

SEQ ID NO: 301162 - DNA, 201 bp, Homo sapiens
gggcatggtggcacgtgcctgtggtcctggctacttgggaagctgaggcaggagaatcacttgaacttgggaggcagaggttgcagtgagccaagattgcmccattgcactctagcctgggcgacagagtgagacccagtctcaaaaaaaaaaaaattacatgaaacttgtgggggtttatacaataaaaataacctataa

SEQ ID NO: 301163 - DNA, 201 bp, Homo sapiens
gcgtgaacctgggaagtggagcttgcagtgagccgagatcgtgccactgcactccagcctgggcgacagagcaagactccatctcaaaaaaaaaaaaaaaatagctgggcatggtggcacgtgcctgtggtcctggctacttgggaagctgaggcaggagaatcacttgaacttgggaggcagaggttgcagtgagccaag

SEQ ID NO: 301164 - DNA, 201 bp, Homo sapiens
ctccctgttgcccagggtggtctcagactcttggcctcaagtaatcctcctgcctcagtctctcagagtgcttgggactaattttttttaatggatttttytagttgattagaagctagaaaaaattaactttgcttcatttcaaaatatggaaacctatgaaatagtcaaaattttttttggtaatagacaaaacatata

SEQ ID NO: 301165 - DNA, 201 bp, Homo sapiens
tcgaaccccccaggctcaggtgattctcccacccagccttcccagtagctgggactacaggcatgcaccatcatgcccagataattattttattttatttyttgtagagacagggtttcaccatgttgcccaagctggtcttgaactcccgggctcaagtgagcagcctgccttggcctcccaaagtgctgggattacagg

SEQ ID NO: 301166 - DNA, 201 bp, Homo sapiens
tgcaaacaggtatgagtgaactaaaaagtgttctaaaactggattgtggtgatgattgcacatctataaatgtattaaaactcattgaattatatacttayaatgggtgaaattcatagtagatgaattcatacctctataaaactggttttttgcagcaaaatatttattgctatgtttttattcaagtgtggtgaatta

SEQ ID NO: 301167 - DNA, 201 bp, Homo sapiens
ggatttcaccatgttggccaggatggtctccatctcctgacctcgtgatcggctcgcctcggcctcccaaagtgctggtaatacaggcatgagccaccgckcctggccttaagctaacattttttattatatgtgccaggcattgtgctattagctttgcatgtgttatcttttttctttttaaaaaaaatagcaaccatc

SEQ ID NO: 301168 - DNA, 201 bp, Homo sapiens
ctgccagcgcttctcccgcgccctcatggcagccaagaggagctccggggccgcgccagcacctgcctcggcctcggccccggcgccggtgccgggcggckaggccgagcgcgtccgagtcttccacaaacaggccttcgagtacatctccattgccctgcgcatcgatgaggatgagaaaggtaactagggggctggggg

SEQ ID NO: 301169 - DNA, 201 bp, Homo sapiens
atttgagaaaagatatgtcaggaaaatgtgatgacatgaacaaatactcaaaggcaagaaaagcatggtgagtaggggagggtacaggttgagacatgaarttgggattgccgaggcgtaagaggtataggcagatcatggatggcctggtttgtcataggaaggagcttgggctcttatctgtgggcaatgggaagccac

SEQ ID NO: 301170 - DNA, 201 bp, Homo sapiens
ggttgaaatactcccttttaattgattaatataaaaaataggtaatgtagacgtatgtcacaaaattttaacaagtttgagtgtgaaaagcatccatcccrttctatgccctggctacccatttcccctccctagaggcggctgttattatcagtttctctgggtcctttttagaggtaatctttttgtatgcaactgtgc

SEQ ID NO: 301171 - DNA, 201 bp, Homo sapiens
aggtaatgtagacgtatgtcacaaaattttaacaagtttgagtgtgaaaagcatccatcccattctatgccctggctacccatttcccctccctagaggcrgctgttattatcagtttctctgggtcctttttagaggtaatctttttgtatgcaactgtgcacatgtatgtttacacaaatggtagggtattgtatatat

SEQ ID NO: 301172 - DNA, 201 bp, Homo sapiens
caccagcatttggtactttttttgtctttttgataatagccatcctaactggggtaagataccttgttgtggttttgatttgcatttccctcataattaaygatgttgagcattttttcatatctttgtttttgacggtccagctagttttattggttactttttttttttttttttagcaatagtttcatgtgcagggct

SEQ ID NO: 301173 - DNA, 201 bp, Homo sapiens
tttccctcataattaacgatgttgagcattttttcatatctttgtttttgacggtccagctagttttattggttactttttttttttttttttagcaatartttcatgtgcagggctcaaattatatttaatattacttttttcaaattataccagaacaaccttaggttaggctataaaacaactgccttctttttcttt

SEQ ID NO: 301174 - DNA, 201 bp, Homo sapiens
tttccaggtaccatatgtcacggcttcccttggctaggagagggaattccccaaccccttgcgcttcccaggtgaggcaataccccgcccttcagctcacrctatgtgggctgcacccactgtctgacaatccccagtgagatgaacccagttcctcagttggaaatgcagaaatcagctgtcttctgtgtcgctcacact

SEQ ID NO: 301175 - DNA, 201 bp, Homo sapiens
gtctgagactcctgaccttaagtgatccacctgccctggcctcccaaagtgttgggattacagtcatgagccactgtgcctagccaaatatccaaaacttyttgagcgctgacatgatgctcaaaggaaatactggagtattttgcattttggatttttgggttaaggatgctgaaccagtaagtataatgtaaacattgc

SEQ ID NO: 301176 - DNA, 201 bp, Homo sapiens
gtagtagtagtagtagtttttttttttttagatggagcctccatctcccgggttcaagtgattctcctgcctcagcctcctgagtagctgggattacaggsacacaccaccatgcctggctaatttttgtattttgagtggagatggggtttcaccatgttggccaggctgatcttaaactcctgacctcagatggaccac

SEQ ID NO: 301177 - DNA, 201 bp, Homo sapiens
ggattacaggcatgaaccactgcgtctggccttaagttattattgactattgatgccctgttgctctatcaagtagtaggtcttatttattctagaacctygttttaaggtatcctgaatgtggcttttttttttttttttcctaagacggagtctcactctgttgcccaggctggagtgcaatggagtgatcttggctca

SEQ ID NO: 301178 - DNA, 201 bp, Homo sapiens
gcgcttctcccgcgccctcatggcagccaagaggagctccggggccgcgccagcacctgcctcggcctcggccccggcgccggtgccgggcggcgaggcckagcgcgtccgagtcttccacaaacaggccttcgagtacatctccattgccctgcgcatcgatgaggatgagaaaggtaactagggggctgggggaggggg

SEQ ID NO: 301179 - DNA, 201 bp, Homo sapiens; identical to SEQ ID NO: 62873

SEQ ID NO: 301180 - DNA, 201 bp, Homo sapiens
ggaaatcatcatgagaaactgtaactatttttttttataggtattatatgtattctttgagacagggtctcaccctgttgcccaggctggaatgctgtgaygtggtcacctctcactgcaacatccacttcctggggctgaagtgatccttgcaactcaccctcccatgctcggctaattttttttttttttttttaagta

SEQ ID NO: 301181 - DNA, 201 bp, Homo sapiens
caaaatcttctcatgcatgttcttcattttatctagtttatgtttattgtgttttgtttgctcttttttgggggcaggttttgttgttgttgttttttttkttttttttttaaatgagccctgtcctggtttttccttttttgcttattatttttctttgaataaaaggagttttcttggaaaacctagttttggaaggat

SEQ ID NO: 301182 - DNA, 201 bp, Homo sapiens
tggcaaaatcttctcatgcatgttcttcattttatctagtttatgtttattgtgttttgtttgctcttttttgggggcaggttttgttgttgttgtttttktttttttttttttaaatgagccctgtcctggtttttccttttttgcttattatttttctttgaataaaaggagttttcttggaaaacctagttttggaag

SEQ ID NO: 301183 - DNA, 201 bp, Homo sapiens
ctatggcaaaatcttctcatgcatgttcttcattttatctagtttatgtttattgtgttttgtttgctcttttttgggggcaggttttgttgttgttgttkttttttttttttttttaaatgagccctgtcctggtttttccttttttgcttattatttttctttgaataaaaggagttttcttggaaaacctagttttgg

SEQ ID NO: 301184 - DNA, 201 bp, Homo sapiens
ttaaagtcaggtaacgtgatacttacagctttgttctttttgcttaggattgctttgtctatttggactctttttttgcttccatatgaattttagaatawttttttctaattttgtgaaaaacaacattgatagtttgatagaaataccattgaatctgtaaattgctttgggcagtatagtcattttacgaccagataa

SEQ ID NO: 301185 - DNA, 201 bp, Homo sapiens
acgatgctagtagacgcctaaaaactgaatttctaatagaatttgatggtgtaagtgttgattatgatatttttaatgtggcagcattttagtatatatttcctattaaatggccaaggttaaaaatacaaatatctttatatttgttattacttttctaaatgaattgaaaaaagattttttgcttgtaggtacagtctg

SEQ ID NO: 301186 - DNA, 201 bp, Homo sapiens
attttgctcgttagttgatgcagtttcttcctagcctcgatggtctttacaatttggcatgtttttgcagtggcttgtaccggttgttcatttccatgttyagtgcttccttcaggagctcctgtaaggcaggcctggtagttacaaaatctgtcagcatttgcttgtctttaaaggattttatttctccttcacttatga

SEQ ID NO: 301187 - DNA, 201 bp, Homo sapiens
agcacgatgctagtagacgcctaaaaactgaatttctaatagaatttgatggtgtaagtgttgattatgatatttttaatgtggcagcattttagtatatatttcctattaaatggccaaggttaaaaatacaaatatctttatatttgttattacttttctaaatgaattgaaaaaagattttttgcttgtaggtacagt

SEQ ID NO: 301188 - DNA, 201 bp, Homo sapiens
cagttctatctaatacaattttttccttatgtctaactgaaatctgctttttctaatttttacatacttgatttaacaaaactcaatctttttttttttttatgagacagcctttcaaatatataggaacttaatgttatatctgcttccctccagtccccagaatagttactattttagttgtctttctatggtctcatg

SEQ ID NO: 301189 - DNA, 201 bp, Homo sapiens
tcagttctatctaatacaattttttccttatgtctaactgaaatctgctttttctaatttttacatacttgatttaacaaaactcaatctttttttttttttatgagacagcctttcaaatatataggaacttaatgttatatctgcttccctccagtccccagaatagttactattttagttgtctttctatggtctcat

SEQ ID NO: 301190 - DNA, 201 bp, Homo sapiens
tgttacctgtaaaagtttgaagtgtcagcatttgttgcaccgaaatccagaggtgaggccaggtgtggtggctcacgcctgtaatcccagcactttgggargccaaggctggcagatcacctgaggtcaggagttcaaaaccagcctggccaacattgcaaaaccccgtctcgactaaaaatacaaaaattagccagactt

SEQ ID NO: 301191 - DNA, 201 bp, Homo sapiens
ccagctacttgggaggctgaggcaggagaatggcatgaacccaggaggcggagcttgcagtgagccgagatcatgccactgcactccaggctgggcaaaasagcgagactctgtctcaaaaaaataaaataaaataaatagataaataataataataaagtgctgggattacaggcatgagccaccacgcccagctgaagc

SEQ ID NO: 301192 - DNA, 201 bp, Homo sapiens
gaacacagatctgatggcataaactgagtatttctggccttctgattctgatctaaaatatgacagaagattttccctgttttaattttttttttttttttataatagagacacagtctcgctatgttgccaggctactttcaaattcctgggcttaagcaatcctcctgcctcggactctcaaagtgctggaattacaag

SEQ ID NO: 301193 - DNA, 201 bp, Homo sapiens
tagcagagacgaggtttcaccatgttggccagcctggtcttgaactactgacatcaggtgatccgtccacctcgatctcccaaagtgctgggattacaggygtgagccatcgcgcccggcgcttcataacctttttatattgtctttctgttccccaaaatgaagtagtttcttcttaaaaatactgttttttgttttttt

SEQ ID NO: 301194 - DNA, 201 bp, Homo sapiens
acagggtttctccatgttggtcaggctggtcttgaactcctgatctcaggggatctgcccgcctcggcctcccaaagtgctgtgattataggcgtgagccrctgcgcccagcaggtttttttttttaagttggatattagccatttcatatgattcaacttaaaagtacatacaccttcactgttattaaagtgtaggtga

SEQ ID NO: 301195 - DNA, 201 bp, Homo sapiens
gtcttgaactactgacatcaggtgatccgtccacctcgatctcccaaagtgctgggattacaggcgtgagccatcgcgcccggcgcttcataacctttttrtattgtctttctgttccccaaaatgaagtagtttcttcttaaaaatactgttttttgtttttttgtttttttttttatttgagatggagtctctctctgt

SEQ ID NO: 301196 - DNA, 201 bp, Homo sapiens
actactgacatcaggtgatccgtccacctcgatctcccaaagtgctgggattacaggcgtgagccatcgcgcccggcgcttcataacctttttatattgtytttctgttccccaaaatgaagtagtttcttcttaaaaatactgttttttgtttttttgtttttttttttatttgagatggagtctctctctgtcgccagg

SEQ ID NO: 301197 - DNA, 201 bp, Homo sapiens
ggaggctgaggaaggagaatggcgtgaacccgggaggcggagcttgcagtgagccgagatcccgccactgcactccagcctgggtgacagagcgagactcygtctcaaaaaaaaaaaaaaaaaaaaaaatagccgggcatggtggcgggcacctctaatctcacctacttgggaggttgaggcatgagaattgctcgagcc

SEQ ID NO: 301198 - DNA, 201 bp, Homo sapiens
gcgcgatctcggctcattgcaacctccgcctcccaggttcaagcgattctcctgcctcagcctcccaagtagctgggattacaggcatgcaccaccacgtygagctaattttgtatttttagtagagacggggtttctccatgttggtcaggctggtctcaaactcccgacctcaggtgatccgcctgcctcagcctccca

SEQ ID NO: 301199 - DNA, 201 bp, Homo sapiens
tcatttttctataataccatctgttactgaatccatagtagtagtagtagtaaagaaatatttgagctatactaaaataattaattcatataaggtaacartagatttaatgttttaaaaaagataaaacattaacaattgatgttgagaagttattatagaataggaaaatggatatgagttcctaatttccaatccttt

SEQ ID NO: 301200 - DNA, 201 bp, Homo sapiens
tataataccatctgttactgaatccatagtagtagtagtagtaaagaaatatttgagctatactaaaataattaattcatataaggtaacaatagatttartgttttaaaaaagataaaacattaacaattgatgttgagaagttattatagaataggaaaatggatatgagttcctaatttccaatccttttatattttt

SEQ ID NO: 301201 - DNA, 201 bp, Homo sapiens
atagggttttaccattttggccaggctggtctcaaactcctggcttcagatgatccgcccaccttggcttcccaaagtgctgggattacaggcagaggccmctgtgcctggcatgaagaacaatttttaaaagaatgacttttaaggatattaagtcatcaaagtagatagagccattaaatgatgggtagaaacctaatc

SEQ ID NO: 301202 - DNA, 201 bp, Homo sapiens
gttcagctacaattttctaatcacaatggttttactttttccttgtcagaaagtggagctgttccaaaaagaaaagaccccttaacacacactagtaattsactgcctcgttcaaaaacagttatgaaaactggatctgcaggcctttcaggccaccatagagcacctagttacagtggtttatccatggtttctggagtg

SEQ ID NO: 301203 - DNA, 201 bp, Homo sapiens
tagcaccgttttgaatttttccagttcacagatggtatatttagtgctgttccaataatattgcaaaaaataaatctgaagactcacttctgggtcacagwtatttcactattaacattaaaatcttacggacctacctgcaacatgtagtggaaataagttgtgtggcacgttgtggtgggtgcattattaaataaatgt

SEQ ID NO: 301204 - DNA, 201 bp, Homo sapiens
tacgtattgagctaacattttgctggagttatataagattagtaaatgctatagactaaatattgaaaaaaaagcttgcttaaagaggatttacataattrtagacctgaaaaggatcttagcagtcttctgatcgattcattgataaagaaactagtcctaagagctaaaatgacttgctcaagattttagttaagtggt

SEQ ID NO: 301205 - DNA, 201 bp, Homo sapiens
ttttctaatcacaatggttttactttttccttgtcagaaagtggagctgttccaaaaagaaaagaccccttaacacacactagtaattcactgcctcgttsaaaaacagttatgaaaactggatctgcaggcctttcaggccaccatagagcacctagttacagtggtttatccatggtttctggagtgaaacagggatct

SEQ ID NO: 301206 - DNA, 201 bp, Homo sapiens
ataatgttgcattttatgtgtataacagtataatgctttgttttaggtgggagaaggagagaaattggtgagggctctttttgctgtggctcgagaacttyaaccttctataatttttataggtaagaacatattttccaactaagttattgactatttgtgaaatttccctctccaaataggaaagatacgattggaaac

SEQ ID NO: 301207 - DNA, 201 bp, Homo sapiens
gtgtcgcccaggctagagtgcagtggcacaatctcggctcactgcaacctctgtttcccaggttcaaacgattctcctgcctcagcctcccaagtagctgrgattacaggcgcctgccaccatgcctggctaatttttgtatttttagtagagatggggtttcaccatcttggccaggctgatctcgaactcttgacctca

SEQ ID NO: 301208 - DNA, 201 bp, Homo sapiens
ggaggggaaataatttgctgtttcttccttcccttcctcagaatgactgatggatactcaggaagtgacctaacagctttggcaaaagatgcagcactggytcctatccgaggtaggtatacaagagcttaaaacatttagaactatttattataccaccttagaagtttaagaagtccaaaaaaatctaccaagagattt

SEQ ID NO: 301209 - DNA, 201 bp, Homo sapiens
caagttaggtggatcacttgaggtcaggagtttgagatcagcctggccaactaagttagttgactatttgtgaaatttccctctccaaataggaaagatakgattggaaacattattcagaaggaagaagttttaaagaagggcaggcttaaagactatctaatgaatttaccaatatggtaaaaccccatctttactaaa

SEQ ID NO: 301210 - DNA, 201 bp, Homo sapiens
ataatttgctgtttcttccttcccttcctcagaatgactgatggatactcaggaagtgacctaacagctttggcaaaagatgcagcactgggtcctatccyaggtaggtatacaagagcttaaaacatttagaactatttattataccaccttagaagtttaagaagtccaaaaaaatctaccaagagattttttttttct

SEQ ID NO: 301211 - DNA, 201 bp, Homo sapiens
gatctcagctcactgcaacctccacctcccaggttcaagcgattctcctgcctcagcctccccagtaactgggattacaggcatgtgccaccccacacccrgccaatttttgtatttttagtagagacagcatttcaccatgttggccaggctgttctcgaactcctggcctcaagtgatccactcgccttggcctcacaa

SEQ ID NO: 301212 - DNA, 201 bp, Homo sapiens; identical to SEQ ID NO: 62869

SEQ ID NO: 301213 - DNA, 201 bp, Homo sapiens; identical to SEQ ID NO: 62878

SEQ ID NO: 301214 - DNA, 201 bp, Homo sapiens
cagtcttactctatcacccaagctggagtgcagtgatgtgatctcggctcactaccatctcttccttctgggttcaagcaattctgccacgtcagcttccygagtagctgggattacaggcatgcgccaccacgcctgactaatttttgtatttttattagagatgggatttcaccatgttggccaggctggtctcaaact

SEQ ID NO: 301215 - DNA, 201 bp, Homo sapiens
gttggagtgcagtggcgcaatcttggctcaatacacgctccgcctcccgggttcacgccattttcctgcctcagcctcctgagtagctgggacgacaggcrcccgccaccacgcccggctaatttttttgtatttttagtagagacggggtttcatcgtgttagccaggatggtctcgatctcctgacctcgtgatccgcc

SEQ ID NO: 301216 - DNA, 201 bp, Homo sapiens
ctttaattcattgctgatggaaatctaaaatggtagaaccattttggaaggtagttggacagttttttacagaactaaagacagtttgacagtttcttacaaaactcttaccatatggtccagcagtcttactccttagtatttacccaaataagtttaaaatgtacatccaataaaaaaaactgcacatgaatatttcta

SEQ ID NO: 301217 - DNA, 201 bp, Homo sapiens
actttaattcattgctgatggaaatctaaaatggtagaaccattttggaaggtagttggacagttttttacagaactaaagacagtttgacagtttcttacaaaactcttaccatatggtccagcagtcttactccttagtatttacccaaataagtttaaaatgtacatccaataaaaaaaactgcacatgaatatttct

SEQ ID NO: 301218 - DNA, 201 bp, Homo sapiens
cgagatcccgccactgcactccagcctgggtgacagagcgagactccgtctcaaaaaaaaaaaaaaaaaaaaaaatagccgggcatggtggcgggcacctstaatctcacctacttgggaggttgaggcatgagaattgctcgagcctgggaggcagaggttgcagtaagcagagaccacaccactgcactctagcctgga

SEQ ID NO: 301219 - DNA, 201 bp, Homo sapiens
cactttgggaggccgaggtgggcagatcacctgatgtcaggggttcaagaccagcctgaccaatatggtgaaaccccatctctactaaaaatacaaaaatyagctgggcatggtggcgggtgcctgtaatctcagctactcaggaggctgaggcaggagaatcgcttgaacccaggaggcagaggttgcagtgagccaaga

SEQ ID NO: 301220 - DNA, 201 bp, Homo sapiens
acagtaggagaaacagacacataaatagtcatcactgcaggatgggtattagaaatattttgcaagggtgtaaaaggtgctaagaaagctttcttgtgtgmcaaagctggttaaagaaagaaaagaaagcttcctagaagtgaaacctaaaatatacacttagataaatgaataaaagttatgaaagaatgtgagggctgg

SEQ ID NO: 301221 - DNA, 201 bp, Homo sapiens
ttttgagacagagtctcactctgttgcccaggctggagtgccttagcatgatcttggctcactgcaacctctgcctcccaggttcaagcaattctcatgcytcagcctcccaagtagctgggattataggcatgcaccaccacgcctggctaatttttgtatttttagtagagacggggttttgccatgttgaccagtcta

SEQ ID NO: 301222 - DNA, 201 bp, Homo sapiens
gatattcatccttcaattctgagaaaggttctataattctttaatttaaaaaaagtttttttgtttcatctttctcactttttttttttttttttttttttaagacacagtcttgctctgtcacccaggctggagtgcagtggtgcgatctcagctcactgcgcccttcgcctcctgggttcgagtgattctcctgcctca

SEQ ID NO: 301223 - DNA, 201 bp, Homo sapiens
tgtatttttagtagagacggggtttcaggctggtcttgaactcctgacctcaggtgatccgccctcctcagcctcccaaagtgctgggattagaggcatgrgccactgcgcccagcccctcttggacctttctagatattcatccttcaattctgagaaaggttctataattctttaatttaaaaaaagtttttttgtttc

SEQ ID NO: 301224 - DNA, 201 bp, Homo sapiens
ttttaagatactattcctgcttaagttgatcataagtactttataatactttagagaatggataagtttccataaagttaaatttttttttttttttttttgagactcttgttttccaggctggagtgcaatggcgcgatctcggctcattgcaacctccgcctcccaggttcaagcgattctcctgcctcagcctcccaa

SEQ ID NO: 301225 - DNA, 201 bp, Homo sapiens
tggaggtccactccagaccctgtttgcctgggtatcaccagcggaggctgcagaacagcaaatgttgcagaacgacaaatgttgctgtctgatccttcctytggaaccttcgtctgacaggggtacccaggtatatgaggcgtcagtcagcccgtatggggaggtgtctcccagttaggctacttggggatcagggaccca

SEQ ID NO: 301226 - DNA, 201 bp, Homo sapiens
tattgagctaacattttgctggagttatataagattagtaaatgctatagactaaatattgaaaaaaaagcttgcttaaagaggatttacataattgtagwcctgaaaaggatcttagcagtcttctgatcgattcattgataaagaaactagtcctaagagctaaaatgacttgctcaagattttagttaagtggtagac

SEQ ID NO: 301227 - DNA, 201 bp, Homo sapiens
atataagattagtaaatgctatagactaaatattgaaaaaaaagcttgcttaaagaggatttacataattgtagacctgaaaaggatcttagcagtcttckgatcgattcattgataaagaaactagtcctaagagctaaaatgacttgctcaagattttagttaagtggtagacctaggaaatacctttctaagattaga

SEQ ID NO: 301228 - DNA, 201 bp, Homo sapiens
tacaaaaaaatataataaattaaccaggcccgttggcatgagcctgtaatcccagctactcgggagtctgaagtaggaggatcacttgagcctggaaggtscaggcagcagtgagccatggtcatgccactcactgcactccagcctgggtgggtgacatagtgaggtgctgtcttaaaaagtaaataaataggccaggca

SEQ ID NO: 301229 - DNA, 201 bp, Homo sapiens
ttggaagaatcaatatcgttaaaatgggaaatttatcttaatttttttccctagttcatttttctgttttcttttgcacataaattatgtgttatgttgcrtccttttgttttccctatctgtaattttcttcttcatccttttaaactcttaggtctttttgttttgttctgttttcccaagcctgttgcctttatttct

SEQ ID NO: 301230 - DNA, 201 bp, Homo sapiens
aatcagggttcatggaaaatgtgttttctgttcttgtgtgtttgagcagtttattcccttcatactggaaggacggtttgggtcagcataaaattcttggkcatcctttcccaaggaatttacaatattgctccattgtttctagattggctgtagtagtgtaaaagtctgaatccaaattgattttttcaaatttgtaaa

SEQ ID NO: 301231 - DNA, 201 bp, Homo sapiens
aaatgtctagtctatcattttgtcagttctatctaatacaattttttccttatgtctaactgaaatctgctttttctaatttttacatacttgatttaacraaactcaatctttttttttttttatgagacagcctttcaaatatataggaacttaatgttatatctgcttccctccagtccccagaatagttactatttt

SEQ ID NO: 301232 - DNA, 201 bp, Homo sapiens
ggagtgcagtggcgtgatctcggctcactgcagcctctgcctcccgggttcaagtgatccccctgccttagcctgctgagtagctgggactacaggcaccygccacgacacttggctaatttttgtattttagtagagacggggtttcaccatgttggccaggatggtctcgatctcctgaccttgtgatccgcccgcatc

SEQ ID NO: 301233 - DNA, 201 bp, Homo sapiens
ctctagaatcatagttgtaaactaaagtatatattttttagttgttcacagggcttagagctcctgccagagggctgttactctttggtccacctgggaakgggaagacaatgctggtaagggttctcttcaaatttgagttttctgttgagatatttgggataatatgaaaaaaagaaactttatcttgtccttgagtct

SEQ ID NO: 301234 - DNA, 201 bp, Homo sapiens
gaatcatagttgtaaactaaagtatatattttttagttgttcacagggcttagagctcctgccagagggctgttactctttggtccacctgggaatgggargacaatgctggtaagggttctcttcaaatttgagttttctgttgagatatttgggataatatgaaaaaaagaaactttatcttgtccttgagtctattat

SEQ ID NO: 301235 - DNA, 201 bp, Homo sapiens
aaaaaagcgggaggggaaataatttgctgtttcttccttcccttcctcagaatgactgatggatactcaggaagtgacctaacagctttggcaaaagatgragcactgggtcctatccgaggtaggtatacaagagcttaaaacatttagaactatttattataccaccttagaagtttaagaagtccaaaaaaatctacc

SEQ ID NO: 301236 - DNA, 201 bp, Homo sapiens
aataatttgctgtttcttccttcccttcctcagaatgactgatggatactcaggaagtgacctaacagctttggcaaaagatgcagcactgggtcctatcvgaggtaggtatacaagagcttaaaacatttagaactatttattataccaccttagaagtttaagaagtccaaaaaaatctaccaagagattttttttttc

SEQ ID NO: 301237 - DNA, 201 bp, Homo sapiens
acttctgatagagagtctgctgtcattctcatacttgttccttgtggaaatgtctatatataaagtctcagaactatatatttttaatatatatacatatwtttatttatttaaaaatgtataattaagttagtagtagtagtagtagtagtagtagtagtagtagtagtagtttttttttttttagatggagcctccatc

SEQ ID NO: 301238 - DNA, 201 bp, Homo sapiens
gtagtggcccctgacacaatgagttttcccagaattggattgcttggaaatgccgctcaaagagtgtggtaaactccatcgaaggctaaataccaacgtgmcagtgataataaacaagtactttatgggaaagttttttttttaattatttttaaaaagagagaaattgtactggagaaaagaggaattcaggtagaataa

SEQ ID NO: 301239 - DNA, 201 bp, Homo sapiens
agtagattttccctgctttcttttgattgtttataattttgttttctttttccattcaccctctgctgaccctatagtattattcaaagaagtgttcagtytagttttggggtagggcaagcataactacagtgcttaaagagagtaatttgtctggtgtgcagaactagtgtgtaaatataactggtgcattgcaaaact

SEQ ID NO: 301240 - DNA, 201 bp, Homo sapiens
tcctggcttctggtggcttgctggcaatcttttgtattccttggcttgtagatgcatccctcctatctctgtctttatctttatgtggcattctccctgtrtctgtcaccatgtccaaatttcccctgtggattaggacccaccctaatgatctcaatttaagtttgtcatcagcaacaattctatgtccaaataatgtca

SEQ ID NO: 301241 - DNA, 201 bp, Homo sapiens
tgactaatttttgtatttttattagagatgggatttcaccatgttggccaggctggtctcaaactcttggcctcaagtgatgcgcctgcctcggcctccgmaagtgctgggattacaggcatgagccaccacacctggcctcatagcttacatttttagagaatcttttctagtacttaaatcggtaaatatggttatctt

SEQ ID NO: 301242 - DNA, 201 bp, Homo sapiens
agatggggtttcaccatgttggccaggctggtcttgaactccatacctcaggtgatctgcccgcctcagcctcccaaaatgctgggattacaggcgtgagstactgcacccggcctaaaattgattagtttttaagaccctcttggtgggaacagactttcatagtgtttatagttataatagtttggaatcaaagtagtc

SEQ ID NO: 301243 - DNA, 201 bp, Homo sapiens
gtccaggctaagagtcaaatcaagaacacagtcccatttacaatagccacaaagaaaatgaaataatggctgggcacagtggctcatgcctgtaatcccakcactttgggaggctgaggcaggtggatcacctgaggtcaggagttcgagaccagcctgaccaacatggtgaaaccccgtctctactaaaaatacaaaaaa

SEQ ID NO: 301244 - DNA, 201 bp, Homo sapiens
accacgcctgactaatttttgtatttttattagagatgggatttcaccatgttggccaggctggtctcaaactcttggcctcaagtgatgcgcctgcctcrgcctccgaaagtgctgggattacaggcatgagccaccacacctggcctcatagcttacatttttagagaatcttttctagtacttaaatcggtaaatatg

SEQ ID NO: 301245 - DNA, 201 bp, Homo sapiens
ttctataaatgttcatttgcatatatacagcccatataatacttagcatatgtaaaagcacatctttatactctttcaattaaaattgattattattattwttttttttttgagacagagtccctctcagtcacccaggctggattgcagtggtgtgatcagggctcactgcaatcgggtagctggaactacagggatgtg

SEQ ID NO: 301246 - DNA, 201 bp, Homo sapiens
catagctaagatttttatgatttagcaaaatattgtttaccccaaagccacgtattatatattaatgatattttttcccttttgagtttttcttccccacrggttttctgatctttttttttgttctctaactttatattataggtatatactcttttctctgtttaatttgctttttaactagaagacctcctttagtag

SEQ ID NO: 301247 - DNA, 201 bp, Homo sapiens
tagtgtgtatagagtatatatagtatactgtatagcgtatagagtatatatatagtatactgtatagtgtatagagtatatatatagtatactgtatagtrtatagagtatatatagttacatatacatatagttatttttagtaatatcaaaaaaccatagctaagatttttatgatttagcaaaatattgtttacccca

SEQ ID NO: 301248 - DNA, 201 bp, Homo sapiens
atagtgtgtatagagtatatatacagtatactatatagtgtgtatagcgtatatatacagtatactatatagtgtgtatagcgtatatatacagtatactrtatagtgtgtatagagtatatatagtatactgtatagcgtatagagtatatatatagtatactgtatagtgtatagagtatatatatagtatactgtata

SEQ ID NO: 301249 - DNA, 201 bp, Homo sapiens
tatatatacagtatactatatagtgtgtatagagtatatatacagtatactatatagtgtgtatagcgtatatatacagtatactatatagtgtgtatagmgtatatatacagtatactgtatagtgtgtatagagtatatatagtatactgtatagcgtatagagtatatatatagtatactgtatagtgtatagagtat

SEQ ID NO: 301250 - DNA, 201 bp, Homo sapiens
atttttagtaatatcaaaaaaccatagctaagatttttatgatttagcaaaatattgtttaccccaaagccacgtattatatattaatgatattttttccyttttgagtttttcttccccacaggttttctgatctttttttttgttctctaactttatattataggtatatactcttttctctgtttaatttgcttttta

SEQ ID NO: 301251 - DNA, 201 bp, Homo sapiens
atatatacagtatactatatagtgtgtatagagtatatatacagtatactatatagtgtgtatagagtatatatacagtatactatatagtgtgtatagcrtatatatacagtatactatatagtgtgtatagcgtatatatacagtatactgtatagtgtgtatagagtatatatagtatactgtatagcgtatagagta

SEQ ID NO: 301252 - DNA, 201 bp, Homo sapiens
tatatatacagtatactatatagtgtgtatagagtatatatacagtatactatatagtgtgtatagagtatatatacagtatactatatagtgtgtatagmgtatatatacagtatactatatagtgtgtatagcgtatatatacagtatactgtatagtgtgtatagagtatatatagtatactgtatagcgtatagagt

SEQ ID NO: 301253 - DNA, 201 bp, Homo sapiens
tgtgtatagagtatatatacagtatactatatcgtgtgtatagagtatatatacagtatactatatcgtgtgtatagagtatatatacagtatactatatmgtgtgtatagagtatatatacagtatactatatagtgtgtatagagtatatatacagtatactatatagtgtgtatagagtatatatacagtatactata

SEQ ID NO: 301254 - DNA, 201 bp, Homo sapiens
tgtgtatagagtatatatacagtatactatatagtgtgtatagagtatatatacagtatactatatagtgtgtatagagtatatatacagtatactatatmgtgtgtatagagtatatatacagtatactatatcgtgtgtatagagtatatatacagtatactatatcgtgtgtatagagtatatatacagtatactata

SEQ ID NO: 301255 - DNA, 201 bp, Homo sapiens
aagttaacatgtgtctcttttttttaatataatgatttgtactgaatagatacatgtagatcattgtacttggttttgcccttcaacaatttcaactgcaraatgtatgtatttttaagtgcctgacttttatgttttacagaactaaaaccagaacaggtgaagaatatgtctgccagtgaggtatagtattttacaatg

SEQ ID NO: 301256 - DNA, 201 bp, Homo sapiens
atgtcattacaggttctctatgcattaaaattttttagaaatggggtgttgcagccgggcgcagtggctcacgcctgtaatcccagcactttgggagactraggctggtgtatcacctgaggtcaggagttcaagaccagcctgggcaacatggtgaaaccccatctctactaaaaattcaaaaattagctgggcatggtg

SEQ ID NO: 301257 - DNA, 201 bp, Homo sapiens
cagaaattatcttgcattatgtatttatagtctgtcttccgcctactagatggtgggttgcttgaggcaggaactctgtcttgtttacatctctatctccrgataacgtgtctggcacgtgatgggtactcagtaaatacttgtggaataaagaaatgtcattacaggttctctatgcattaaaattttttagaaatgggg

SEQ ID NO: 301258 - DNA, 201 bp, Homo sapiens
caacttttggttttggatgggaataaacagaaaaagtctcatctccagttcatttctggggagggtcaggaggtggggggtgcttggctctactcccttcrtatgattttcccttctttatctccaggatcttccccatttcacggagagacatggatgagaatgaaggctgctgagtgggaggggcttatggggccagtt

SEQ ID NO: 301259 - DNA, 201 bp, Homo sapiens
agtgtgttgccttccttggttggttagtttttctacatccacttaactcctagcctaattttatcttttttttcctctgtttttctttccctgaatgtttwtttaagctctgataaatcattttgaattaaggtcgggtatgtatttcctttcttctcatcttcttccccctccatgactgcctgcatttgaatacatttc

SEQ ID NO: 301260 - DNA, 201 bp, Homo sapiens
aaaagaaataacttgattatgggttatggaagtttagcaatggcttcaaaaaatgtcagcagggaatggatgtctttttctatcagatgaaatttcagtaktcatctgatacagccaaccaggagaaggaaaactactaagtagaaagacttagataagtggagtcgaacatctctgggcttaaaaggagcatcactcctg

SEQ ID NO: 301261 - DNA, 201 bp, Homo sapiens
actgatctattaaaggaaatagattgataaatatcattttgactaaaaatatctatcgctgttggtgaagtgatggtttttttttacatacaatttttaaragctgtctttaagaggcttatgcatgtgcagatgcatgaacacacatgtacagtcttccttcctagaacatgcttcctcttagttttgggggatatctgg

SEQ ID NO: 301262 - DNA, 201 bp, Homo sapiens
caccgtgcctggatgaaaaagaaataacttgattatgggttatggaagtttagcaatggcttcaaaaaatgtcagcagggaatggatgtctttttctatcrgatgaaatttcagtagtcatctgatacagccaaccaggagaaggaaaactactaagtagaaagacttagataagtggagtcgaacatctctgggcttaaa

SEQ ID NO: 301263 - DNA, 201 bp, Homo sapiens
agccaccgtgcctggatgaaaaagaaataacttgattatgggttatggaagtttagcaatggcttcaaaaaatgtcagcagggaatggatgtctttttctwtcagatgaaatttcagtagtcatctgatacagccaaccaggagaaggaaaactactaagtagaaagacttagataagtggagtcgaacatctctgggctt

SEQ ID NO: 301264 - DNA, 201 bp, Homo sapiens
ctgaggaaacatcttcctcctacgtacttagctgatgtaggcattaatggaaatggatattggagtgggaggctccttttagggggcagaaaagaaagaaygtttttatttttaattaaaaaaatattttcttttgagacagggtcttgctctgccatccaggctggagtgcagtggtgcgaatatggctcactgcagcct

SEQ ID NO: 301265 - DNA, 201 bp, Homo sapiens
aacagatccagaggacagctcctttcccctggtctatgtatgccttttgaacgccaagaccttatcctaaactcaagtttcacgaataggattaaaatacyctttggggacctttcttacattgagaacagaggctgggccacagcttggctaaagcattccagatctctcttctgagcaagagattttgacttgttcata

SEQ ID NO: 301266 - DNA, 201 bp, Homo sapiens
tcctggcagccaagacaaagacagaagcatgctgggatgatgcatcctcgggctcggtaaaggaagcacaggacctgcctgctgctgtgggctcagggaartgagtactattttccctgtctggagtggggaggagcacttgtctgtggtagggtgaggaggaccacttccttgggctatcagtcattaaggccccttaac

SEQ ID NO: 301267 - DNA, 201 bp, Homo sapiens
caaggactcctgaagccaatggcagctctgagtttcctggcagccaagacaaagacagaagcatgctgggatgatgcatcctcgggctcggtaaaggaagyacaggacctgcctgctgctgtgggctcagggaagtgagtactattttccctgtctggagtggggaggagcacttgtctgtggtagggtgaggaggaccac

SEQ ID NO: 301268 - DNA, 201 bp, Homo sapiens
gcttgctaatacactgtcctcatcttttgtcagcgaagtaaatccaataatgtttccttctctttaatccaagccagtcttcattgaaaacacttcacctytaagctctcaggctctgcagtctgccctctccaaccttacccctcatgccccaccttccctttgtccccatctttcccttctgttccagtcattctcatg

SEQ ID NO: 301269 - DNA, 201 bp, Homo sapiens
agactctaaggggtgtaagacggccctttgttttagagacttaggattggtgtgagtgactggcagggactgctttagtgcccagacctttagtagcacasacacaatataggaaaactcttcaaggaaaaccagccccaaataagagagtaggtaatgttctgcttctcttgctttatattctgcttgctttacagaata

SEQ ID NO: 301270 - DNA, 201 bp, Homo sapiens
agatcctcttcagccccccaagcggaactgggtttctcttgaaggtcctaacctcagctcacaccacctgctactacctttctgggtcttggattttgttsttacccaggcccggggtcatcccaaaggctcttgatagccctgtggctgtgcttgctaatacactgtcctcatcttttgtcagcgaagtaaatccaataa

SEQ ID NO: 301271 - DNA, 201 bp, Homo sapiens
cctgtgtcctgtgggtgggggagctgacatcacactcagtgctgacatttcttgttccctgggtgggcgctgattccagatcctcttcagccccccaagckgaactgggtttctcttgaaggtcctaacctcagctcacaccacctgctactacctttctgggtcttggattttgttgttacccaggcccggggtcatccc

SEQ ID NO: 301272 - DNA, 201 bp, Homo sapiens
cttggcctcccaaagtgctgggattacaggcatgagccaccgtacccggcaggtttgtttttcttatgacaaaatcaagcctggatggtgtcgttaacggygaagttaaaatttttcttttgctttccttaatatttccgtgtttttttctttttctttttttttttttttttaacaaaagtctggtttctaaaccaaaat

SEQ ID NO: 301273 - DNA, 201 bp, Homo sapiens
tgtgacgtgaggctgtggatgcagaatttgtggtctgaacatttttgagtagataaaaatggaaactgaaattggtgaagcagacttgtggcttttcctaytttctcatctcttttatggatataactagaagctctgcttcatcaatgagtgtgttaaaacaatttgtttacaaaatcctatttattaaaataaaaatct

SEQ ID NO: 301274 - DNA, 201 bp, Homo sapiens
tcacctaaaaaataactcatagggttgtttttctttctttcttttttttttctttgagacagggtctcactctgtcgcccaggctggagtgcagtggtgcratcccggctcactgcaacctccgcctcctgggttcaagcgattctcctgcctccattctcctgcctcagcctcctgagtagctgggactactggcatgca

SEQ ID NO: 301275 - DNA, 201 bp, Homo sapiens
gcacttgtcaggtgcttatgatgcctgtgacgtgaggctgtggatgcagaatttgtggtctgaacatttttgagtagataaaaatggaaactgaaattggwgaagcagacttgtggcttttcctactttctcatctcttttatggatataactagaagctctgcttcatcaatgagtgtgttaaaacaatttgtttacaaa

SEQ ID NO: 301276 - DNA, 201 bp, Homo sapiens
cccagttgccttggagcaggaaaaacagttcatcctcattaccatccagaataatttatgttcaagataatacacaatcaatttactttttatcatattcraatttgatttgtgtacacttttgagtttggatgtcagccacattgcttctgtgtgttaatctttatttacgggaataaatgggaagcagtcagccatttt

SEQ ID NO: 301277 - DNA, 201 bp, Homo sapiens
ttgtgagtcacctaaaaaataactcatagggttgtttttctttctttcttttttttttctttgagacagggtctcactctgtcgcccaggctggagtgcartggtgcaatcccggctcactgcaacctccgcctcctgggttcaagcgattctcctgcctccattctcctgcctcagcctcctgagtagctgggactactg

SEQ ID NO: 301278 - DNA, 201 bp, Homo sapiens
tttcttaccctggttggagtgtgtgagggtgggagaggcaggaggaatatgctggacagagcttcttccatctagaagggaatttcaggagtaagaaagcrgcagctcttaacatacctgggagaaagcaagtgcttagtaaacagttgaggaatgaactaagaattttcagacagattttcctcttctggagcatttgca

SEQ ID NO: 301279 - DNA, 201 bp, Homo sapiens
gtgctgctgtcacttatggctcgggcaccttatcttgttttatgtcttgatgaagaagtacaaaattcagtgtaaaagaaaaacatatgtaaagcttataraatcaccccgttacacaataacaatgcagaacaatagattaataacaggaagagatgctgaaacttctcttcagcctagtttctactctgatgtttcttc

SEQ ID NO: 301280 - DNA, 201 bp, Homo sapiens
accttcagattaccacctgtttctcagtttggacactattagtgtgctgctgtcacttatggctcgggcaccttatcttgttttatgtcttgatgaagaaktacaaaattcagtgtaaaagaaaaacatatgtaaagcttatagaatcaccccgttacacaataacaatgcagaacaatagattaataacaggaagagatg

SEQ ID NO: 301281 - DNA, 201 bp, Homo sapiens
tacgtgatcctggggtcacagtggctccctgtgcaggaagaacactatttcccagctcagataccatctttttaggagagtacctgccattgtggaaaatmaggataaaggataacaagttacctccttaagacaaagtcataggagaaatggtaaattccagtatcttgagttttgagttggaacttgaaatttatttta

SEQ ID NO: 301282 - DNA, 201 bp, Homo sapiens
ttgataagtgaaactgagatttccccccaccccatggatacagtgaacatttgtcagcagctggtaatggctagtataaagatgtattcagttttcccttyccttcctctccctccagccttccagccacccccttcccaaacatttatgctcatttagagaaaagcaaccccagttctcttacctgggatatcaccagta

SEQ ID NO: 301283 - DNA, 201 bp, Homo sapiens
tatgctggcttagttattttttaaagcaactaaagttaagtaatgtatacgtaacttacatatttatgtggtccaaaaaacgttggtcatctgttttaatscagagagtgtttaccctaagcctgcaaatgtgatgggtaatagctagaactagaaaagtactttagaatatggaaggtaaatacatgaattaatttaggt

SEQ ID NO: 301284 - DNA, 201 bp, Homo sapiens
gggtttcaccatgttggccaggctggtcttgaactcctgacctcaagtgatccgtctgccttggcttcccaaagtgctaggattacaggcgtgagccaccrtacccagcctggtgtttcgtgatatatctatgtgtgagggtttctgtagttaagttcccatagttgaattcctggttcaaaggacaagaacatttacaat

SEQ ID NO: 301285 - DNA, 201 bp, Homo sapiens
ggatgagtaggcagagcaccgaggatttttaggacagtggaaatgctctgtatgatactataatgggggatacatgtcattatacatttgtccaaactcawggagtgtacaacaccaagagtgagccctaaggtaaacgatgggcttcgggtgatttcgatgtgtgaattgtaacagggatactactctggagcaggatgt

SEQ ID NO: 301286 - DNA, 201 bp, Homo sapiens
agccttgaaggggaccgttgctccgagaggcctgaacactccagctgcagctttctccccagtcattattgagatcaaattcacatctcttacaattcacscatttaatgggtgatgcaatgcggtggcttttagtatattcacacacatgtgcagacatcaccatagccaattttagaaaattttcatcagctgaaagag

SEQ ID NO: 301287 - DNA, 201 bp, Homo sapiens
tctgcagtattcaattgaaactccagatttttaatagctggacgttaatagaatatttgaattggaggagccttatacaataactcatttaactcctgttrttgtcgatgagaagaaccaggtctagagcctttacataaacacatcagtcagtggaggtgccagggtctgacctgctggcctcctaagtcccagcccagt

SEQ ID NO: 301288 - DNA, 201 bp, Homo sapiens
ggtttctcagctgagatgccaggaacacttcgcgagtgagcatgccaccacatttgagtgcatatagaaagttagctgtttgctacaactggggacacttyctattagagccgcatctgctggggtggagggctgcatgggttggagagtagggtttgacttcttccagcaagaggaaagagaagtagcatagtgcccatc

SEQ ID NO: 301289 - DNA, 201 bp, Homo sapiens
aaggcttaacatagaggaatgtggcttctatgtccaggccagtgggcttcctaacacagaacatggaattaggcagacttaacatcccccatgcccacccyggtgagtgccagcatgggcttgagctgctcttcacactgatggtccatcctttggactgatctccttgtgaaggatacaatacagcaaggagcgggggct

SEQ ID NO: 301290 - DNA, 201 bp, Homo sapiens
tagtagcacagttctaagctcaagggactcaagggggtccagtaagtacagttcaccagagaaataacaaaagcatttgcagagggagaccagagcatcayctttgttagggcaaaggcttaacatagaggaatgtggcttctatgtccaggccagtgggcttcctaacacagaacatggaattaggcagacttaacatcc

SEQ ID NO: 301291 - DNA, 201 bp, Homo sapiens
tccttcttaggtggctcaagctggctatggggctggtctcatcatatctaaagaactgcccagcttttacgcattttgaatgtggtggaaccagctgcatmtttttatatgagagcggcaaatagtcattgtgttccagtttgcttctcgggtcatctaaacatcagaggccatgccacaagcaccgtaactgagggatat

SEQ ID NO: 301292 - DNA, 201 bp, Homo sapiens
gtaaactgtactgccctatacaatagtagcacagttctaagctcaagggactcaagggggtccagtaagtacagttcaccagagaaataacaaaagcattwgcagagggagaccagagcatcacctttgttagggcaaaggcttaacatagaggaatgtggcttctatgtccaggccagtgggcttcctaacacagaacat

SEQ ID NO: 301293 - DNA, 201 bp, Homo sapiens
tgcagtcctggtgggctgctttcatttccaccctgggtctttgttctcaccactcacatcttacgcctctgttccaccgctgtgtaagaggcaactgtgcrcacaccttgcctctgccattgactgtaagctcctgagagagagagagaatgtgtctggttcagttttgtggccctcctttttgctagcataatgcattga

SEQ ID NO: 301294 - DNA, 201 bp, Homo sapiens
atttgattacagcgcttcttccagacagcacgctcagaattgcgtttcttacttccagtcttcttgccctgtaagcattttctgtgagtcaccaaatcaamcacaaaatcatttaattttatggaagtggaaaatcagacttattaaaatactgtgtttttgttttaaagctcagaggtatagagatccatgaattttttt

SEQ ID NO: 301295 - DNA, 201 bp, Homo sapiens
tgcctaaatggagggaatgtgcatcctctcttgtgttgcgtggcaatgccgtggggacacttgggacatgagcaaaacgttgacagaggggagcacttccyggaatattattaatacagagttagttttaacttcaccttttgggcaaacttgacattatagatcttgaaataggattatttttcccttgctaagaggtta

SEQ ID NO: 301296 - DNA, 201 bp, Homo sapiens
tggacttttgaaagattgacttactctctcccgttagttctgttgaactgctgcctaaatggagggaatgtgcatcctctcttgtgttgcgtggcaatgcmgtggggacacttgggacatgagcaaaacgttgacagaggggagcacttcccggaatattattaatacagagttagttttaacttcaccttttgggcaaac

SEQ ID NO: 301297 - DNA, 201 bp, Homo sapiens
tgttaaccctttttctacttggcataatagcagccattacccagtagaagttgagagatttaggttgcacagaatcccacagtcttttcagaaactcatayccttagggtgtctgcttgttgacagcattgtagaattgaaacttgaccacgtgttatgtgttgggctgccagtggtgatcagagatgacggtgagtagtc

SEQ ID NO: 301298 - DNA, 201 bp, Homo sapiens
ttgaggatttttggacttttgaaagattgacttactctctcccgttagttctgttgaactgctgcctaaatggagggaatgtgcatcctctcttgtgttgygtggcaatgccgtggggacacttgggacatgagcaaaacgttgacagaggggagcacttcccggaatattattaatacagagttagttttaacttcacct

SEQ ID NO: 301299 - DNA, 201 bp, Homo sapiens
ttacccacctcatgaagaaagaaatatcgagaatttgtggacctgtttcacaaccacacagcatcattttttgaaggtagagtcaccttgagcatttaaaktagggttctgctctagaagtctatccctttattttttcccatttgttaaccctttttctacttggcataatagcagccattacccagtagaagttgagag

SEQ ID NO: 301300 - DNA, 201 bp, Homo sapiens
gagaatggggattgaggatttttggacttttgaaagattgacttactctctcccgttagttctgttgaactgctgcctaaatggagggaatgtgcatcctstcttgtgttgcgtggcaatgccgtggggacacttgggacatgagcaaaacgttgacagaggggagcacttcccggaatattattaatacagagttagttt

SEQ ID NO: 301301 - DNA, 201 bp, Homo sapiens
atgagactgtaattattgcattgggtttttcacaatgtatgttagttatctattgctacataacaaattagttttagagttagcagcttataaagcaacaratatttattatctcacagtttctgtgggtcagtaaatcaaaagtggcttaactgggtggttctgacatgtgcctttccacagtgactggtatgtagcagg

SEQ ID NO: 301302 - DNA, 201 bp, Homo sapiens
ttttcctcattaatgcaggatattaaaatattcagagggaacccaggagtcctctcaagatgagtttaaatttctcatacttgtagaagttgttgagaaayactggattctaatttccagaactctggtggggaaggagactgtgaacctggtctgaattgagaatggggattgaggatttttggacttttgaaagattga

SEQ ID NO: 301303 - DNA, 201 bp, Homo sapiens
aaaaacctatgtaattttcttcagctttcagaaggaatgtcttgtatcttcctatgggggtgttgggggaactgatattgacagaggtcctctgacatttsatagcctggcaaatagggtcaaacatgttccagacctcagaggattgctgaggatagctttctacttaagctagataaaagaagttttgggaatcttacc

SEQ ID NO: 301304 - DNA, 201 bp, Homo sapiens
ccttcagccacagggatgacagaagggaagtgaggaatcagggatgggtttgaactgcggcgttgctttgggagtctctagacatgatcagttgcacatgkactgttctccttgtcaccctcaggatctactgtcctgtggttgaagcctgcagctctcccaagttggtggcactgggcttcctgacttctcgatgtctaa

SEQ ID NO: 301305 - DNA, 201 bp, Homo sapiens
aggccttcagccacagggatgacagaagggaagtgaggaatcagggatgggtttgaactgcggcgttgctttgggagtctctagacatgatcagttgcacrtggactgttctccttgtcaccctcaggatctactgtcctgtggttgaagcctgcagctctcccaagttggtggcactgggcttcctgacttctcgatgtc

SEQ ID NO: 301306 - DNA, 201 bp, Homo sapiens
tgctagtgagtctttgatgtgagttatttctttgcagtaaggtggcatggatgggtgatgaggctaagctgaaaagttaaatctcataatggacatttgcrccctttaaggaagtaaagctctcaaagcatgattatggccaagatgaggccggtggcatgtttgtctcctaaatgtgcagccaggaatctcgacggtttg

SEQ ID NO: 301307 - DNA, 201 bp, Homo sapiens; identical to SEQ ID NO: 62929

SEQ ID NO: 301308 - DNA, 201 bp, Homo sapiens
tcctgcgggtggtccctgtgaagaagacacagcggccggtggtgtgacagcccacagctgtcgaaggaagggagaagagagggaccgagggccagcaatarggttttacagctacgtgctaggttgtctcacatctaggaaagagaatgttcatattatatagaaatgggcattttccctgtggcctgatatgaggtatcc

SEQ ID NO: 301309 - DNA, 201 bp, Homo sapiens
cattctcctagctgatgactttgctgcttgtctcattgaggaaagaagccgttcagtcagtgagaccccctgtctcgcctccacctttccacctgctgccrcggaggcttccccagctcctgtctcactcaggccccttgccactctcaaggcatcttcttcctgcttcccaaggatgtcactcctgcagttaaccctttt

SEQ ID NO: 301310 - DNA, 201 bp, Homo sapiens
gaaaagaagtttaattggttcttggctctgcacgctgtactggatgatacaggatgcatgatgctgacatctgctcggctactggggaggcctcaggaagmttctaatcatggtggaagatgaagggggagcaggcatctcacgtggccagagcaggagcaaggggttgggtcacacacttttaaacaaccagatctcatg

SEQ ID NO: 301311 - DNA, 201 bp, Homo sapiens
tatcgagtatgtatacacatatttactgccttttctttgaataattgaaatgcatgtttggtcactgtcccttgctgaaacagctcatgcatttattatgsgcatgagtttattggtcagttttcaacaaggtaagttcttttctggcttgggctaatgggaagttgaatatgggatggaaagtctgtcttgtatcatgac

SEQ ID NO: 301312 - DNA, 201 bp, Homo sapiens
ctaaatttcttaaagcttttctgtcttttctgagcttctcaagtgagcaggggcatgagttcctgtgttgtgcctggggacagggaaggctttgggacctmctgtggtcttaagtctgagcagtgctaatagcctcggctcaccaagtgctgggcactgtgctagagggtgtacaaacctctcatctcatgaggcctcact

SEQ ID NO: 301313 - DNA, 201 bp, Homo sapiens
ctttaacccaggaggcggaggttgcagtgagctgagattgcaccactgtactccagcctgggcgacagagcaagagactctgtctcaaaaaaaaaaaaaaatagtgaaatcagccaaatagagaactaacaggcacactgcctaattccttgtgtaactgtcattggtgtgagtcactggggcagcgtgattaggtctgtg

SEQ ID NO: 301314 - DNA, 201 bp, Homo sapiens
cccaggtgcagaaaccttccttgggttatgcaacgcccagcgtgggtggaaccgcactcacactttacctcttcctgaaccacagccctgctctgattgcrtgatggaagctgaggtgcctgacaagtggaaggaggaaaaggaacattctgccttccttttctctgtaatgccaaagctggcgtcatgcattactgaggg

SEQ ID NO: 301315 - DNA, 201 bp, Homo sapiens
gattatcaagtgctcctcctgcaaaaaaaaaaaaaatggtgattcttgtggcccttagttgaccccgcacctgggatatgcttatatttggtgtggggcasagaactgagtgttcttgaaccacttccacccaaccagagggaggtggggacatcaggtacacctcatcccctgatgtcacagccaagtacctggagccac

SEQ ID NO: 301316 - DNA, 201 bp, Homo sapiens
cctttcagtttataagtgattactaacagcctcatcaggtttctggaattaaatgttttattatttcctcccaaagttagtcctcaaacattagtatttcktgtgttcttttgatttgaatatttgtttttaacacacaaggatatcaactctataagtcagttaatatgttcatgcttttagttaatcgaaagtggctta

SEQ ID NO: 301317 - DNA, 201 bp, Homo sapiens
gggcatctagttggcagagtcctatcccagtgttcgcacccccagtttcctgggtcttaagttcagattatcaagtgctcctcctgcaaaaaaaaaaaaaatggtgattcttgtggcccttagttgaccccgcacctgggatatgcttatatttggtgtggggcagagaactgagtgttcttgaaccacttccacccaacc

SEQ ID NO: 301318 - DNA, 201 bp, Homo sapiens
ctgtcctcagcgctgtcctcggcgctctctctccagtcagctctcctgctcaggcacctttttgggacacagtccttgccagttattccctgtttaatgtsctcatgtgtcttcacttgccctgggagactgtcgtcttgagagagcaagccatatgggaccctgaggcctggcctcagtttccctcccccccactgcccc

SEQ ID NO: 301319 - DNA, 201 bp, Homo sapiens
aagactgcctgggttcatgtttgggccactacctactagctctatgactttgggcaagtttctttcttcttttttttttttgaaatggaattttgctcttrtcacccaggctggagtgcaatggtgcaatctcagctcactgtaacctctgccttttgggttcaagcaattctcctgcctcagcctcccaagtagctgaga

SEQ ID NO: 301320 - DNA, 201 bp, Homo sapiens
gctgtgaggaaggatgataggagcagattctgtataagcagatgcacaaccacccacagctgcactttggcacccagggcagacaaataaaaagggggcargatttttttaggggagattcctggcagatagagattttcttcagaatgtacagatttatttttggggggtggttaggggcgacagttgttttaagcagag

SEQ ID NO: 301321 - DNA, 201 bp, Homo sapiens
taatcgaaagtggcttatgatttcagtttttggtatcaggtgatgttgcggaagtgaggttcactgtgaagcttcttttttttttttttttttaatcattktgttgtttctttgagtgtatgtgagcttataactcaagacactatgtgaaatgaccctgtgtttcctacattatagaaaagaggaaaatgaagcaagttc

SEQ ID NO: 301322 - DNA, 201 bp, Homo sapiens
aactggacattggaaaaaatttgttgtcctattctgaaggatgagtcttatataaagtgtttttaaaatactttattgaaactgccatgttcttttcaatwttggtagctcccctgcatttaatttagtcataagcgtctgtattaatgggtgtgttcaatatgaaggcatcctgtgaagacaataaattatattatactt

SEQ ID NO: 301323 - DNA, 201 bp, Homo sapiens
gaagtgaggttcactgtgaagcttcttttttttttttttttttaatcattttgttgtttctttgagtgtatgtgagcttataactcaagacactatgtgaratgaccctgtgtttcctacattatagaaaagaggaaaatgaagcaagttcaagaaaattagatttatgtggaaaataaattctgcatctagttattcatt

SEQ ID NO: 301324 - DNA, 201 bp, Homo sapiens
atcaataaaggtgccaatttaagatgctaactggacattggaaaaaatttgttgtcctattctgaaggatgagtcttatataaagtgtttttaaaatactytattgaaactgccatgttcttttcaattttggtagctcccctgcatttaatttagtcataagcgtctgtattaatgggtgtgttcaatatgaaggcatcc

SEQ ID NO: 301325 - DNA, 201 bp, Homo sapiens
aatgactatgggaatctgtttatttttgcttaggatcattggtaatgttttctggccaaagctgcttttttgtctgagctgtgtgtttatttttcattccygtctcttatttatattgtgaaaatgattaagaaaaataggtggtatggctcatggtctgatatcacgagtcaatgtgttgttttgaagccaactccacac

SEQ ID NO: 301326 - DNA, 201 bp, Homo sapiens
atagaaaagatgcttcgcttgtataagttatgcgacaaaaagataagcacttttaaatatttcttgataagttttttgtttccagggttttaaatggcaaygtgctgaatatttcactatttttcacttccttgtacatttataactgacagtaatagagtttttaatgctttgacaaaatttttaagaagtcacagaaca

SEQ ID NO: 301327 - DNA, 201 bp, Homo sapiens
tgaatttcacctcgattttaaaaacgtgacatttcaccaagtcatagaaaagatgcttcgcttgtataagttatgcgacaaaaagataagcacttttaaayatttcttgataagttttttgtttccagggttttaaatggcaacgtgctgaatatttcactatttttcacttccttgtacatttataactgacagtaatag

SEQ ID NO: 301328 - DNA, 201 bp, Homo sapiens
gaaactggaaaaaataatttcacaaatttctattttgctttataaaaattttatgattcataacacagggaaaatccagtaagctaaggcgttttttagtygtttatcttgctagtgagtctttgatgtgagttatttctttgcagtaaggtggcatggatgggtgatgaggctaagctgaaaagttaaatctcataatgg

SEQ ID NO: 301329 - DNA, 201 bp, Homo sapiens
ttactttaaaatggtgatgttatatgaatttcacctcgattttaaaaacgtgacatttcaccaagtcatagaaaagatgcttcgcttgtataagttatgcracaaaaagataagcacttttaaatatttcttgataagttttttgtttccagggttttaaatggcaacgtgctgaatatttcactatttttcacttccttg

SEQ ID NO: 301330 - DNA, 201 bp, Homo sapiens
agatttaaattggaagtgggaagagattgacttttttttttttttttttttttaaagacagagtcttgccctgtggtccaggctagagtgcagtggcacartcttggctcactgcaacctccgcctcccaggttccagcggttctcctgcctcagcctcccgagtagctgggattacatgcatgagccaccaggcccagct

SEQ ID NO: 301331 - DNA, 201 bp, Homo sapiens
gcggacgtggtggttgtatgacattgtgaatgtactaaatgcgcttaattgtttactttaaaatggtgatgttatatgaatttcacctcgattttaaaaaygtgacatttcaccaagtcatagaaaagatgcttcgcttgtataagttatgcgacaaaaagataagcacttttaaatatttcttgataagttttttgtttc

SEQ ID NO: 301332 - DNA, 201 bp, Homo sapiens
agatcggggctggggcgcggtagggaaatgaggaacaactgcttaatggatgtggagattccttctggggcgacagaaaatgttttgcaaccacgcggacrtggtggttgtatgacattgtgaatgtactaaatgcgcttaattgtttactttaaaatggtgatgttatatgaatttcacctcgattttaaaaacgtgaca

SEQ ID NO: 301333 - DNA, 201 bp, Homo sapiens
gagtccgtactttgagaaccactcttctacctaccaagacttccaaaaaattggtactctgggaagatgccctgtgccagtcctgtggcttcttaggcacstcttccagcatagactcctgcagagaacctggtacctgcaagtacctagtacctgcaagtacctgcaagtccagtgtgggaaatctcatgacaggcatca

SEQ ID NO: 301334 - DNA, 201 bp, Homo sapiens
cctctgttaatatgtgtgtgtcttctcacggggtgattcttgatcagagttactgaaacagcaaggcttgggaacaagaggcatgagagcaacactcaggrcctgttcagttttctgcacagttccaggtgctcttccagcattgctggctccgagagagtcaaatattcagagcttgcaagctggggaggaaaggggtta

SEQ ID NO: 301335 - DNA, 201 bp, Homo sapiens
gggttttccatactgggggccttggtccagtgggggcgggtcgtaccatgacccccttctcctgtgatcttgcctcactggcccaggtaaattggtggacrtccttgactcctccacctccaaaaggactttgaactttggcactgttgggagtttaggctacacctcaaccaggcagagattgggatctaacctactttt

SEQ ID NO: 301336 - DNA, 201 bp, Homo sapiens
ccactctgcgatcttccgttcccagccttcccacttgaaatcgtcttggaaatcccgggctttgccaatctgtggacccaccaccttttcaccccctttcyggtgccctcaggggactttgctgtagcctgaacctcatggtcccttcctgtaaacagccaaactgctttgtactccctgaggagacccccgccccggttg

SEQ ID NO: 301337 - DNA, 201 bp, Homo sapiens
agccatggtggctgtggttggcgggtacccagccaagggttttccatactgggggccttggtccagtgggggcgggtcgtaccatgacccccttctcctgygatcttgcctcactggcccaggtaaattggtggacgtccttgactcctccacctccaaaaggactttgaactttggcactgttgggagtttaggctacac

SEQ ID NO: 301338 - DNA, 201 bp, Homo sapiens
taatctcggcccactgcaacctccgcctcctgggttcaagcaattctcctgcctcagcctcctgagtagctgggactacaggcatgcgccaccacacctgrctaattttagtagttacagggtttctccatgttggtcaggctggtctcgagctcccgacctcaggtgatccgcctgccttggcctcccaaagtgctggga

SEQ ID NO: 301339 - DNA, 201 bp, Homo sapiens
tcttcagaacttgctctgcccttgagttttccagctttcctttaatgcactaaacctttaatattgtattctcctaaatgagacgtctcgcatttgagcargtaacactcggtaagactttgcttggtgggggaggaggttttaccttcctgtggcattctgaagctctccacatccacccatagtcatgattgtgttata

SEQ ID NO: 301340 - DNA, 201 bp, Homo sapiens
aacatgaaatatacaagggttcctttaaaacagagtgtacttctgaacatttactgaaggtggagggccctggacacctgatgttatcttatgtggcgttrtctgggtcagatttcattgcatttcctgaagaggtaacttggcagtcctgggagaggctggaccttggtgtccaggtggcaggttcataagacacctgtg

SEQ ID NO: 301341 - DNA, 201 bp, Homo sapiens
ttatgtgttgggctgccagtggtgatcagagatgacggtgagtagtccgttgagttagggctgtttgcctctgtcggtgtcatctgggtttgaactggacktgcagtcctggtgggctgctttcatttccaccctgggtctttgttctcaccactcacatcttacgcctctgttccaccgctgtgtaagaggcaactgtgc

SEQ ID NO: 301342 - DNA, 201 bp, Homo sapiens
ggggggttacagcaccctctggtggccatattgtcaggtgcatttttgttctagccaaataaaatgataacacaaatcgaatagtcgattggagttctttytcagaggacatcgttaattcacattttgtgtgtttcagcaggtatttaagccattctcgaatagtgacacttatgcagaggagagaatgattttatttaa

SEQ ID NO: 301343 - DNA, 201 bp, Homo sapiens
gccccccaagcggaactgggtttctcttgaaggtcctaacctcagctcacaccacctgctactacctttctgggtcttggattttgttgttacccaggcccggggtcatcccaaaggctcttgatagccctgtggctgtgcttgctaatacactgtcctcatcttttgtcagcgaagtaaatccaataatgtttccttctc

SEQ ID NO: 301344 - DNA, 201 bp, Homo sapiens
tggagaagaatgaagacttggtgcagtggctagggaggcaggcagggtgaggatgtggaagggtgcagagctgctcaaggtcagcttcctgagcctgcggygtggtcccttgctccacactcagaagggccctgtgtttgatttaatgctcttttcttgccatcttgaaattcttgatagtttttgaacaagggatccatg

SEQ ID NO: 301345 - DNA, 201 bp, Homo sapiens
tgcttgagcctgggaggtcaaagctgcagtgagccttaatcactccagtgcactccagccggggcaacagctagaccttgtctcaaaaaaaaaaaaaaaaagaaaaataagaaaaagaaaccagattaaacattcctaagtaattctttttgtgacttttgcctgtttattaactatcctggctacttaaaatgaattttt

SEQ ID NO: 301346 - DNA, 201 bp, Homo sapiens
ggaggcagaggtgggcagatctcttgagccccaggagtttgagaccaacttgggcaacatggggaaatctctaccaaaaaaatacaggaaaaaaaaaaaaatagctgggtatggtagcacacacctgtagtcccagctacttgggaggctaaggtgggaggattgcttgagcctgggaggtcaaagctgcagtgagcctta

SEQ ID NO: 301347 - DNA, 201 bp, Homo sapiens
ttgtcctgtaggtgaatcattgattcctgtctttgcataacctctcacttgatgataatttttttttaaaaaaatgactcttggaaacagaacacacagttgtagagggacctacagtacagcagaagctttgtggaaggatacaaaatgtgagggactgtagtcgaagagatttaaattggaagtgggaagagattgact

SEQ ID NO: 301348 - DNA, 201 bp, Homo sapiens
tctgtgtttatgttgtacttaggacagtatatgtgcccaaaaagaagactgtttttgtcccactacgagtttgatgttcaaaatcctaacaaatagttttrtgttgctaggataaaaaatgtatttgtatgtgtgtgtatttttattgcagttaatgttaacgaaagccactggtgatagtaccagcccatatgctcatgc

SEQ ID NO: 301349 - DNA, 201 bp, Homo sapiens
ccaataataaagaatagttcaataggaggttggtagtcttaattgtcttccttgtcaaatcctagtgaatttcacatcagatactgtgccctgtgaggctmtatcaccttagcacttggtaatacgttttttatgtagtaggtgctcaataaatgggttgagtttctataataatttgatttctgtagcatctgatttaac

SEQ ID NO: 301350 - DNA, 201 bp, Homo sapiens
cattgggttatggcccaaggctaggggaaactgatggggactcgttaatggtcagatggcgtggcgtgcaatttaacactgcacacttgagtgtccaagcmgaggatgctgtatatagaatagtaagtaccctgtctccagctgtggagaaatagacgccttagaacagattctggccttcctgtttctctgttcctgatc

SEQ ID NO: 301351 - DNA, 201 bp, Homo sapiens
ccatctccaagtgtcaggcaggtgagtgaagccatcttggatgctccagcccatcaccatccaactatagtcacataagaggccactgatgggcccagtcygtctccacactcctgagagttagtaagtggctgtcgtgttgggctctgaagttgtagactagtttgttagtgacgtataaccaaaagagagagtgtactt

SEQ ID NO: 301352 - DNA, 201 bp, Homo sapiens
tatggcccaaggctaggggaaactgatggggactcgttaatggtcagatggcgtggcgtgcaatttaacactgcacacttgagtgtccaagccgaggatgstgtatatagaatagtaagtaccctgtctccagctgtggagaaatagacgccttagaacagattctggccttcctgtttctctgttcctgatcgctccctt

SEQ ID NO: 301353 - DNA, 201 bp, Homo sapiens
tcctgccttttggaaaagcttgctttagggatccagctgccacctaaaggccctgaagtgagccacgtagagagaagttccagctttctagcccatctccragtgtcaggcaggtgagtgaagccatcttggatgctccagcccatcaccatccaactatagtcacataagaggccactgatgggcccagtccgtctccac

SEQ ID NO: 301354 - DNA, 201 bp, Homo sapiens
ggcagcttccacttcctgccttttggaaaagcttgctttagggatccagctgccacctaaaggccctgaagtgagccacgtagagagaagttccagctttmtagcccatctccaagtgtcaggcaggtgagtgaagccatcttggatgctccagcccatcaccatccaactatagtcacataagaggccactgatgggccc

SEQ ID NO: 301355 - DNA, 201 bp, Homo sapiens
tgagcttggggaaactgaggctgctgtgagctgtgattacaccactatactccagcctgggtgacagagcgagaccctgtctcaaagaaaaaaaaaaaaaattaatcccgaccttcctccaaaaaagaataaattaagtccagaaagtttggtgattcacttgctgttgccgcctttataaacataaaagtcagtaaggct

SEQ ID NO: 301356 - DNA, 201 bp, Homo sapiens
tatctccctgctgtaaatattaactgagtgcatttttgtggcttttgataactccacgtcttgaaagtgttggccagttgtcaaattttcatgaatttcasagaagtgggtaataggtggtttctctcacggtatttaaagcgaagtagtaaagaggaaaaagactgaaaaggtaacctgggtcaactcattttttagggc

SEQ ID NO: 301357 - DNA, 201 bp, Homo sapiens
tcacagttgaacactggaaactatcagcatacctctgggcttcttttatatggtcttcctcatgagttaaaatgccttaagcatagtatctgttccatagsaccttactgattatgcttttccacttgaataaaagagatattaagttgtaataaaactttaaatattttaatttagtttgaatatttaagttgaattaac

SEQ ID NO: 301358 - DNA, 201 bp, Homo sapiens
gccagaaagctttgacttccgtgatctagagcaagcttgtgcaaccacaagcaggtcacatgcagcccaagatggccttgaatgtgacccaacacaaattygtaagcattcttaaaacattatgagccttttgtgtgatttttttttttttaaactcatcagctgtcattggtgttagtgtattttatgtgtggcccaaga

SEQ ID NO: 301359 - DNA, 201 bp, Homo sapiens
gttcacgccattctcctgcctcagccttccgagtagctgggactacaggtgcccgccaccacacctggctaatttttttttgtatttttagtagggacggrgtattccctctcttgactgatgtttcagcagtatgtggacagattcttttttaaggtaaatgaccaggggcttgtaatatgagtgtcacttaggcaacag

SEQ ID NO: 301360 - DNA, 201 bp, Homo sapiens
atacatttaatgactcacacatgtcataactcatccatttccttgacattttcaagcgtgataataaatcctacttcttaggcttttttttttttttttttctctctctcatgttcttttcaaatgcatggctaggtagttacctcatgaaggaaaacaactgttttggtccagattttaaaaattgagttgaatagaaaa

SEQ ID NO: 301361 - DNA, 201 bp, Homo sapiens
ggtctgaacctcccctcctcaggtataagctcttggaggacagcctgctgcttaaggtacaggagaattcatctttgctggacatggtaacgtatgcatakagatctggcaacagaacttaagatatgtgggagaaataataggcaaaaactggaaagagcacaagtaagagaagagaaatccgcagaagtgagaagtaac

SEQ ID NO: 301362 - DNA, 201 bp, Homo sapiens
aaataggtgaacgtaaagtttagtggaatttgattatctgtcatggcctgtttgctgcaggaggtcaggtcagtcgttgttatataatttgctttgttttktgtcccattaagtaatactgaacgagagtagtgtcgcttgtgggatagtgacattactatcccacaagtgacactgctaagatactaacagatgcgtttt

SEQ ID NO: 301363 - DNA, 201 bp, Homo sapiens
ttttgtcttggttgaaacaatgcaaatcctgggttttggagatgctcacagccagctgtctgattacgtaaactgaaagtggcagagaggaagcttttgcrtggggaaaacatgaaatatacaagggttcctttaaaacagagtgtacttctgaacatttactgaaggtggagggccctggacacctgatgttatcttatg

SEQ ID NO: 301364 - DNA, 201 bp, Homo sapiens
catagagatctggcaacagaacttaagatatgtgggagaaataataggcaaaaactggaaagagcacaagtaagagaagagaaatccgcagaagtgagaartaacagaattgctggctgaggttggaggcatttaagtgtgtgggtgtttgtgggaggcatggtggtctcctgttccttgacctcattgggcaaatattac

SEQ ID NO: 301365 - DNA, 201 bp, Homo sapiens
gaagccaagatcaggagaccagtggattgtttctcccgaggcctctgttcttggcttgcaggtggccccttgctgtgccctcacatggcctttgccctgcrtacatccgaagccccagtgtctctctgtgtgtccaaatttcctcttcttagaaggatgccggtcatattggattagggcccacccgtgtgacctcatttt

SEQ ID NO: 301366 - DNA, 201 bp, Homo sapiens
gatctggcaacagaacttaagatatgtgggagaaataataggcaaaaactggaaagagcacaagtaagagaagagaaatccgcagaagtgagaagtaacasaattgctggctgaggttggaggcatttaagtgtgtgggtgtttgtgggaggcatggtggtctcctgttccttgacctcattgggcaaatattacagcacg

SEQ ID NO: 301367 - DNA, 201 bp, Homo sapiens
cctcagcctcccgagtagctgggactacaggcacatgcactgtgtctggctactttttatattttttagtagagatggggtttcaccatgttggtcaggcyggtctcgaactcctgacctcaagttatctgcctgcctcagcctcccaaagtgctgggattacagacgtgagccacttcgcctggccatgatcccgcacag

SEQ ID NO: 301368 - DNA, 201 bp, Homo sapiens
ttactgtcccccaaagccccagtgactgctctgtccacagggcttggtttctgtgctctggctctgcaatgcaatgcagaaggggctgggctcggaatggrgttgctggtcaggccatgtgcccaggggaaggacacaggactcaaggagtccacccctctctcccccccttttttttttggtcactgaaatattttcttt

SEQ ID NO: 301369 - DNA, 201 bp, Homo sapiens
tacatctcatgacatgttttgggtaaaccgtttttggaagcgtccatttgtgtagaagttaggtggttctgagtttaactttgtacacatttctaggcacraggaaattaaataactggctgagtgagagtgatctcgttgaatgctgaggcttgtttgggaattgggtttattttggtgaaatttgtaaatttagatcca

SEQ ID NO: 301370 - DNA, 201 bp, Homo sapiens
ctctgaggcgtgcactggctggtagcagtgggtatcaaccatggaagttcacggaagattaaaccgcaagttcccacgcaaggccaagtggctgccaggayttggaggcactgaccctgagtggtccttccacctcagcgtatactgtcactgctgcctctgtggcttcccctttccctccaagtagagatagatgtctcg

SEQ ID NO: 301371 - DNA, 201 bp, Homo sapiens
aaatctcatccattcttccagggcaccttactgtcccccaaagccccagtgactgctctgtccacagggcttggtttctgtgctctggctctgcaatgcamtgcagaaggggctgggctcggaatggggttgctggtcaggccatgtgcccaggggaaggacacaggactcaaggagtccacccctctctccccccctttt

SEQ ID NO: 301372 - DNA, 201 bp, Homo sapiens
gctcacaggtgctatcaatatatagctctggttcttcagaatataaataactatcacctgaccccaataccttatctatattgagattgttcattagatcyaaaacatcttgtgcatttcttgctttttagtcatgcacagaccttgtctttactttcaaagacagtttggtactgaaaattgctctggtaaattaacaca

SEQ ID NO: 301373 - DNA, 201 bp, Homo sapiens
ataaacatcagctaatgttaaaattttaatctctgctaatataagaggcatcgaagtacacgcgagttcagtttgcatatggtgaggagggagacggcctyatatcgtatgtgtgtatttgccgattctatattttgaggttgattcctgttgtcttttgttcagttgtctcattctgttttcttttggggctttgaatgc

SEQ ID NO: 301374 - DNA, 201 bp, Homo sapiens
gctggtgttggctctggaacagggtttcccaatgcaggcggcactggtaactatgtgccttgggtcattctttgttgtgggggctgtcctgtgccccatgsgatgttccctgcacccctggcctctgccttctagatgctggggggcactttccctggtgtaatattaaaaaaaactctccacgttgccacatttgggggg

SEQ ID NO: 301375 - DNA, 201 bp, Homo sapiens
gagtccacccctctctcccccccttttttttttggtcactgaaatattttctttccaattctactagtcctgctagagctgccataacaaaatacccaatkggtgacttcaacaacagaaattgattccacactgttcttttttttttttttctttttgagatggagtcttgctctgtctcccaggcaggaatgcagtggt

SEQ ID NO: 301376 - DNA, 201 bp, Homo sapiens
tttttttggtcactgaaatattttctttccaattctactagtcctgctagagctgccataacaaaatacccaattggtgacttcaacaacagaaattgatyccacactgttcttttttttttttttctttttgagatggagtcttgctctgtctcccaggcaggaatgcagtggtgtgatcttggctcactgcaacctctg

SEQ ID NO: 301377 - DNA, 201 bp, Homo sapiens
gtctttctagagaaaatgattgcatggcctaatagtcttccagttagtctgtgtggcaaggtagaagccaggagtggattcttagctcctgttgagtgctsctgtcctgaatcagagatcttctctcccgggccactttgtcatgagcaggattttgaaccaagaccttttcttcacctgtctcgggggccctcaccgtgg

SEQ ID NO: 301378 - DNA, 201 bp, Homo sapiens
aatgcagtggtgtgatcttggctcactgcaacctctgtttcccaggtttgagcagttctcctgcctcagcctcccgagtagctgggactacaggcacatgcactgtgtctggctactttttatattttttagtagagatggggtttcaccatgttggtcaggccggtctcgaactcctgacctcaagttatctgcctgcct

SEQ ID NO: 301379 - DNA, 201 bp, Homo sapiens
gcagagcccaggcgctggtccctgcagcacgttccagatgcttctggaagctctgggaagcggtgttttgtcttccagttgcagcagccccaacaaggcgyttcggggccaggcagcgacctcaactttggcttcacgggcacaaagggggacaggttggtgaggtatcctcgcattcggctggagaggagcacctcgtac

SEQ ID NO: 301380 - DNA, 201 bp, Homo sapiens
ctgcacgctccatcgaccaggcatatgatgactctgcagctttcgtggtttagagtggaatgaaaagtttaatcagtttggtttcttttactagtaatcamtagccagtgagtgctttctcctaaagaacaagctccttatattttgaattggatattttttctcctgaatttcatgtgactgccagtttgaggatatgat

SEQ ID NO: 301381 - DNA, 201 bp, Homo sapiens
ggctgctgcccctgggccccgatggccagggcggcccggccgcggcagagcccaggcgctggtccctgcagcacgttccagatgcttctggaagctctggraagcggtgttttgtcttccagttgcagcagccccaacaaggcgcttcggggccaggcagcgacctcaactttggcttcacgggcacaaagggggacaggt

SEQ ID NO: 301382 - DNA, 201 bp, Homo sapiens
gtgaggctgctgcccctgggccccgatggccagggcggcccggccgcggcagagcccaggcgctggtccctgcagcacgttccagatgcttctggaagctstgggaagcggtgttttgtcttccagttgcagcagccccaacaaggcgcttcggggccaggcagcgacctcaactttggcttcacgggcacaaagggggac

SEQ ID NO: 301383 - DNA, 201 bp, Homo sapiens
cagctgtgagagcgccctgctggggccactcctttctgatggaaaagcagcagctgggaaggtgctgtttcaggctcttgctgtttaaaaaaaaaaaaaaagagcgagtaggggaaaactcctctaagtccagaagctggcattggagggggagagcgcggtcatgtggttctggccaccctaccctctgtcacagtgtgg

SEQ ID NO: 301384 - DNA, 201 bp, Homo sapiens
gtggtaatattgctgacttcttactggaaaacagtcagctctaggtagcatttcttctgtgtggtatttaagttaaattattaccaaaaaaaaaaaaaaaagcccacatgcactcccttcttcaattttccttttgttttttgttgtttgtttgttttttggttgatgttttctttcctacctgacatatggaagacaatg

SEQ ID NO: 301385 - DNA, 201 bp, Homo sapiens
tgaacattttctggacagcatgagtgctttaaaaaattgtaactgtcttgctgccatgcaggcacccaggatgcagccaggtccttttgtgtaaggaaccrtaactgcagcgtgtcctccacttggcattgggactggcattaaaaatctgttttgcaaacaggagccagtcttttgattagcagggaggatgcctgcgag

SEQ ID NO: 301386 - DNA, 201 bp, Homo sapiens
gggtttcaccatgttggccagactggccttgaactcctgacctcaggtgatccacctgtcgtggactcccaaagtgctgggattacaggtgtgagccaccrtgcccagcccactttttgtcttatatactgtattttcattttaagtgtctttcagtattaaatctagaagttttccaagacttttcagtactaacccaag

SEQ ID NO: 301387 - DNA, 201 bp, Homo sapiens
gcagctaacatttatgtatgtatgtatgtatgtatgtatttagagacagattctctgtcacccaggtgcagtggtgcaatcttggctcactgcaacctccscctcctggattcaagtgattctcatgcctcagctccccgagtagctgggactacagatgcacaccaccacacccagctaatttttgtatttttagtagag

SEQ ID NO: 301388 - DNA, 201 bp, Homo sapiens
tcattttagttcagggagtctgtttcctagccattgatttcatgcacaattcctggcatgtctcatatctctaaggtgatgtcacccttgtatttttttttcagatgtaatcttttatgtgacagtgaggtgtcttacttgtgagtgaacagctagaacctcccaagtggtttttcttttggattttgtttactcagtgaa

SEQ ID NO: 301389 - DNA, 201 bp, Homo sapiens
gaggcagaggctgcggtgagccaagatcatgccattgcactccaacctggacaccaatagcgaaactccgtctcaaataataataataataataataatawcaacaataattgtcatttatcagcttcttcgagctcttaatatatatatcgccacctttcacaaaggcaaaatctgcattagaaacactgttgtctgatt

SEQ ID NO: 301390 - DNA, 201 bp, Homo sapiens
tttttctcctttgatgaatactcctgtaaatacatcgttgcctgcttgtctgagtctttctgtgggtttttagaagtggattacttgcagcaaagtctccwctacttaaggctctttgtatattttgcctaattgtgctctagaaatacatcaatttccagtcctccttctctcagaccacctgtccctcacattttcacc

SEQ ID NO: 301391 - DNA, 201 bp, Homo sapiens
ttgaaagacaatttttgggttttttttgttttttttaaaaaaactttatgtgttgatggtttactctggtctagtcgttcctactcctattctgaaagcargccttgaattcctgattgtgtacaggattgtgtacaaacaatcaggaattcatcattcatatgaagaagttctgtttttccctctagtgtcatgaatatt

SEQ ID NO: 301392 - DNA, 201 bp, Homo sapiens
taggatgacatttaaaaaaagtcattttgagttacagaataaaatcaaacaaaattcctttaatcaccagggctgggatggaaataaggcaaaatgttgaytcctttgaaagacaatttttgggttttttttgttttttttaaaaaaactttatgtgttgatggtttactctggtctagtcgttcctactcctattctgaa

SEQ ID NO: 301393 - DNA, 201 bp, Homo sapiens
aggataacagggaggaaaagtcgccgagcccagagtgtgtattcactgcctgtcctttggaggcagccgcttccacctcttttgactgattcttccaactygtatcctccagtctccaaaacatgattgtggtgcagctgcttgaattttcaaacttgatttccattttagaagttaaggatttgtttttttttccaacca

SEQ ID NO: 301394 - DNA, 201 bp, Homo sapiens
tacattttttaaaaaagcatttaaagaatttctcctgtagacattatcttaaacttttggtccctgccattgtatgtgtatcttgaatccaagggtaataygatacgcagtctggcaaaagcagtcattttaaatgattgagcaatatttagtgactttcaaagagcagagagcacaacttggctaccatagaagctccac

SEQ ID NO: 301395 - DNA, 201 bp, Homo sapiens
tctccccagtgttgggtttggagtagagcaagagtaacacagaggttgcagtcagtgtcttccagcgattttcattttgtttgatatgcggggaacctgaygctgatgaaagggaggaacccaggagctactgactgtgactacagtggatattcacaaaagaaggacctcagtacagttccaagtagtgagaggttgatg

SEQ ID NO: 301396 - DNA, 201 bp, Homo sapiens
tggagctacttaaccttatggtaggaggtggagcttgacgcaacccccttttccaccaacaagcatttctttctacctgtcattgaagtgaatcatcagtrtaagtagcgagctgggcgcattccttctcagttgtgttaaaacttgctggtattcccccggtatcagcagaggtgtgtacgggcactgctttaaaactgg

SEQ ID NO: 301397 - DNA, 201 bp, Homo sapiens
ttatgacaattcaaaaataatcaaacttcgtaagatattacctgtgaaaggaataagtatttaaaaatgtattttagatggccttttagaaatctagtccrtggacacaatctagcatcatgcagttgccttcaaaaagaatatcctaaagttcttgtttgttttctttttcctttcaaagtgttctgttgaaaataaccc

SEQ ID NO: 301398 - DNA, 201 bp, Homo sapiens
taaattacaagagcttatttagtgtggatgtttcatagctagaggtttttggggtttttttctccaggtaatcaaaattgttggttaaggcttttttattytcttactcaaacctcatgccctattaaccagatcgaggaagtgctgttgtggcttttcacctacactttttgttccttttgcagctttaatcgccttgac

SEQ ID NO: 301399 - DNA, 201 bp, Homo sapiens
tcccaccgggtccctcccgtgacacgtggggattattacagttcaaggtgagatttgcatggggacacagagctaaaccatatcagctaccatgcctagcyaattttttgtggagacgaggtttcaccatattgctcaggctggtctagaactcctgttctcaagtgatctgcccacctcagcctcccaaagtgctgggat

SEQ ID NO: 301400 - DNA, 201 bp, Homo sapiens
ctcgggcctagggtgtcatgctctttgtcccctgaatggggtcgcaagtactccagggccatcctccagggacatcttgctggcctctgtgatgctcaccygagccccagctggtcggtcagccctgaggctctcagccatggggtcaccctgccctcaccacagcctccctttgtggcactccagcagggccctcagccc

SEQ ID NO: 301401 - DNA, 201 bp, Homo sapiens
tctcataatactgatggaaatgtgaattatgggcagttgggaaattgaaaagcagatgggcaatgtatattaaaataaaaaactatcatacctttcttctmagcaacctttgtcctcggttatttgtcttttagaaataaaaaatgtgtgcaaagtcatatgtataaggatatttattgtaccattatagtggcaaaatac

SEQ ID NO: 301402 - DNA, 201 bp, Homo sapiens
aaaaattttcagaattgttagaatttaccaattcagtctgtggcagtcattagtagtcatttagtgagtaatttagttattttcttataaattagcttttrggttattgggttctgagcctcttaactgcattagagttattctgaggaagttggaccaccatttaccagcatttgtgccccctttgtatgccattttgtg

SEQ ID NO: 301403 - DNA, 201 bp, Homo sapiens
taaggaattagtcacagttgaacactggaaactatcagcatacctctgggcttcttttatatggtcttcctcatgagttaaaatgccttaagcatagtatstgttccataggaccttactgattatgcttttccacttgaataaaagagatattaagttgtaataaaactttaaatattttaatttagtttgaatatttaa

SEQ ID NO: 301404 - DNA, 201 bp, Homo sapiens
tttttgctaacttcttactacggtaattatctgcttttataaaatccagaaacgatgttatacacattagcacgcattattaggtgcccaaatgccaaggmtaaggacacagcaatgctaaggacacagtgtgcctccggcctgcttgcaccctcggttgaaattatattagcaagagaagctcctgcattctgcagtatg

SEQ ID NO: 301405 - DNA, 201 bp, Homo sapiens
ctacggtaattatctgcttttataaaatccagaaacgatgttatacacattagcacgcattattaggtgcccaaatgccaaggctaaggacacagcaatgmtaaggacacagtgtgcctccggcctgcttgcaccctcggttgaaattatattagcaagagaagctcctgcattctgcagtatggcatttttctccagcta

SEQ ID NO: 301406 - DNA, 201 bp, Homo sapiens
aggctgaggcaggagaatagcttgaacctgggaggcagaggctgcggtgagccaagatcatgccattgcactccaacctggacaccaatagcgaaactccrtctcaaataataataataataataataataacaacaataattgtcatttatcagcttcttcgagctcttaatatatatatcgccacctttcacaaaggca

SEQ ID NO: 301407 - DNA, 201 bp, Homo sapiens
agcccaggaggtcgaggctgcagtaagccatgatcttgccactgcactccagcctgggtgacagagcgagaccctgtctcaaaaaaaaaagaaaaaaaaawttatgaagtactggttgggttaacgtttcttcttctaaccatgagggaagtaggtgggctgttctggtgactcagtgtcctcccagactcactcatgaga

SEQ ID NO: 301408 - DNA, 201 bp, Homo sapiens
aaaaattaaaataaaaataaacataggtctttggccaagtgtagtggctcccgcctgtaatcccagcagtttgggaggcagaggcaggaagatcgcctgargctaggagtttgagaccaacctgggcaacatagtaacctcgtctctacaaaaaatttttaaaaattagccaggcatggtggtgtgtgtctgtagtcccag

SEQ ID NO: 301409 - DNA, 201 bp, Homo sapiens
acttgctctcttttttagttagacacagctcggtgttgcctccactttgacatcacgttcatagttcctgtgcttggccagaactgttttcagttgcaagsacatgggtgagactggtcaaggaattgactttcagggttccaagggaataattagttcagaagtctgtccccatacttgttttccagtacaatctgtgtc

SEQ ID NO: 301410 - DNA, 201 bp, Homo sapiens
accctgtttccagagaaggtcacattctgaaatactgggggaacatagttccccatcttataagatagagaatgggtcaagacgagcagctccattctttstttgtgtttaggccagtgccaagttcaagatcttgcctcagggctttcctggtaccactgggaatgtgtatcagcagcagctgtgtcactgaatgggtgt

SEQ ID NO: 301411 - DNA, 201 bp, Homo sapiens
tcctgcctccctccctcccttccttccttctttcttttaaaaatatttttcttttttttcccttccttcctccctcccttccccccttctccttccccttyctccctttcccccttcctccctccttctctccctccctccctccttccctccctcagggtcttgttctgtcatctaggctggagtacagtggcatgatca

SEQ ID NO: 301412 - DNA, 201 bp, Homo sapiens
gttaatatgttcatgcttttagttaatcgaaagtggcttatgatttcagtttttggtatcaggtgatgttgcggaagtgaggttcactgtgaagcttcttytttttttttttttttaatcattttgttgtttctttgagtgtatgtgagcttataactcaagacactatgtgaaatgaccctgtgtttcctacattataga

SEQ ID NO: 301413 - DNA, 201 bp, Homo sapiens
tcatcttccccccacctctggaaatcccagcgtttgaacgctggggggaactgcaagtctagtttacagggtttctcagctgagatgccaggaacacttcrcgagtgagcatgccaccacatttgagtgcatatagaaagttagctgtttgctacaactggggacacttcctattagagccgcatctgctggggtggaggg

SEQ ID NO: 301414 - DNA, 201 bp, Homo sapiens
tcataagaacagtctagaaaatataatttacttcattcaatgatagtgaattttgagagcctccatagtttactacagatcagatgaattgagtgcttacrtgagtacctacttggtgccaggcaatgttcttggcaccggtgatccaatggtgagcaaattcaagtctctgttctcatgggcttacattctggaagtgat

SEQ ID NO: 301415 - DNA, 201 bp, Homo sapiens
gtcactccacttggtgacatgtataaggcacatggaatagggccagagctgggcagaccgtgtatgccacaatagttcgttgtaggttacaaagaaccagygcagagtgggtgaggcataggctatttgattaataatttggctgcattgacaagatacggaaaaggcgaggttgggactttccgtgaattttctcctcaa

SEQ ID NO: 301416 - DNA, 201 bp, Homo sapiens
tatgtgcatccttgtctcttttcactatagcctggtgatcatggtggcagttttcattttgggacactggtgaggttagaatagcttcaggcttccctcaktgaatagtattgtgaaggcagtggtggtaacattgtgttggagctggtgtgagggttgaatccactctgtagcctctgtccctagatcatggcgctgctt

SEQ ID NO: 301417 - DNA, 201 bp, Homo sapiens
agctttggggttttttctctaattaatagatctaggatgttttctgaggtgtgtcatgtttttaaaactctgtggtatttctgtttctttctttctttcattttttttttttttttgttgttgttgttgagacagagtctcactgtgtcacccaggctggagtgcagcgatgccatctcagctcactgcaacctctgcctc

SEQ ID NO: 301418 - DNA, 201 bp, Homo sapiens
tttctttttttttttggaattgcctgctcatgtatttccatctccttaaaggcaagggctggccgccttatttggctgatactagcctccatggcatcagsctgtccagtggaagtcctgaaacagtacacgatgaatggataaatgaatgaatgaatgaatgaaatgaatgagggaagaaatgaatattgtgcttccaga

SEQ ID NO: 301419 - DNA, 201 bp, Homo sapiens
ggcagcctttggaaggaaaatcagcagagggcagggaccggggaagaaggagtaagaagggaaacccttttcttaggttcttataaatcagaagagcaatraagaaaaaatttaaatctaaaaaatacatgattaggatttaaatccagtatgcttcactacatataaacctttgacttaatattttctgtagtagatgaa

SEQ ID NO: 301420 - DNA, 201 bp, Homo sapiens
aattaggagaatgcacttataagtttctatgccaactgtttccactgctcccctgtttacatggtcccagggtttatacagggctctctgtagccccacartgaatcttgccccagtgagcgggctctcacctcccttctatagatgaggttggagctcagaagaacgtagagaaacttgtgcatagttattatgccagat

SEQ ID NO: 301421 - DNA, 201 bp, Homo sapiens
tttcagttattcgtgatgttaaatgactcgtcttctcttacttgcctggcatgtggaactgagtaaattctgtcaaaagaactcactgaaggaatgtgtarcagctgggaattggatgtcttttcagatttgggagagcctgtgttttgactgtgatggaattcttatggtttaatatgcttaaatattactgtttaacat

SEQ ID NO: 301422 - DNA, 201 bp, Homo sapiens
ttaactcatacttaggagatgaatgctggctttgaagaccatagcgtgcattttcaaaccagatggagaggccacttttctctgcagatttcagttattcrtgatgttaaatgactcgtcttctcttacttgcctggcatgtggaactgagtaaattctgtcaaaagaactcactgaaggaatgtgtaacagctgggaatt

SEQ ID NO: 301423 - DNA, 201 bp, Homo sapiens
tcagacaaatcgattaggagatcaccaaacccaaacagagaatgtgagttaactcatacttaggagatgaatgctggctttgaagaccatagcgtgcattytcaaaccagatggagaggccacttttctctgcagatttcagttattcgtgatgttaaatgactcgtcttctcttacttgcctggcatgtggaactgagta

SEQ ID NO: 301424 - DNA, 201 bp, Homo sapiens
aaaataaaaaactatcatacctttcttctaagcaacctttgtcctcggttatttgtcttttagaaataaaaaatgtgtgcaaagtcatatgtataaggatrtttattgtaccattatagtggcaaaatactgaaaatatgaaaacccatcagttgaaaaacggccaatttatggactgtttgtaccatgtaatattatgag

SEQ ID NO: 301425 - DNA, 201 bp, Homo sapiens
aagactctggaaatgagaattttgtttcctatctcctgtgctgtaacaaaagcagcttaaaaattgcagtgtatagacctcaccttttatcatttttttttcagatttttaaatattaatattaagggtctttatctcagatgtttgttgtttaccaggtcatcagtatctggacgctggcagggtccttagcaatggagg

SEQ ID NO: 301426 - DNA, 201 bp, Homo sapiens
agttcatgacaatattttgtttaagaaaattgtcaaaacaaagttcaaatgcaatggatggaaagtgatttttaacatgtagggtaactagagatttgagrtcagacaaatcgattaggagatcaccaaacccaaacagagaatgtgagttaactcatacttaggagatgaatgctggctttgaagaccatagcgtgcatt

SEQ ID NO: 301427 - DNA, 201 bp, Homo sapiens
agtggcaaaatactgaaaatatgaaaacccatcagttgaaaaacggccaatttatggactgtttgtaccatgtaatattatgagagaactagagctgtatsagagttggctgtggaggaatttctatgagaacttgatgaatgagaagcaatgtgtagaaaaatgtataatatccagttctaaaagacgcattcctcctgt

SEQ ID NO: 301428 - DNA, 201 bp, Homo sapiens
tggtccctccccagtgctacctggccagctctcagccttgggaggccacctgcccgtgtttgacctgggttaatgaccgccagttcctttcccttaatacractcatctgctctcctgcatgctcgctccttgggtgagagctgccctctgcaacctcataacggaaaatggcttgacttctgccacctcctcctccttcc

SEQ ID NO: 301429 - DNA, 201 bp, Homo sapiens
tgatgtttataaggaacctcaggacactattagttaggaaggagattgtcccatgcaattcagccttgcaagagcttcctggttgatctagggacaaggtrtctatcactcagccctccaggtcttttcttcctaaagcaggctttggagcaaagcctgaccggtctttgcctatgactgagtttcccagggctgctgtac

SEQ ID NO: 301430 - DNA, 201 bp, Homo sapiens
ttattcaccttgaagaacagaagatttgtagtttaaggaaattcaccatattcttaaaagttgcagaaagagaagagttcttagcctaggcctgcaccaasatccagttcttttgaatctgatttaataggcagatgatgaaggacttattcccaataataaagaatagttcaataggaggttggtagtcttaattgtctt

SEQ ID NO: 301431 - DNA, 201 bp, Homo sapiens
aagctaacgcgagttaggagggatttaagaccatgtgaggaaattcaagcctatgttgttatcaccaaaccttgcctgtgttatgtaaagatttttgcctrtgtcatgttatcttcgttgtgttcaatttattcctccccctccaagtgtcctagtttctcctctactgtagctggttttgaacaaaatagagaaacttgg

SEQ ID NO: 301432 - DNA, 201 bp, Homo sapiens
ttcttttgtcagtttcttcttgcactttcattggcattacccaccttcttttgatttgtcgctttagtttttaccgttcacatcagatcagtattcacacrtctgaggtacattttcatgcccttgatcatggggtaggggatgtactgagtgactttggttgtagatctgatagctcctttttgtgatcattttgtcaaa

SEQ ID NO: 301433 - DNA, 201 bp, Homo sapiens
aataggcaaatcgttaaaaataaataaataaaaacttgttcaacttgtttaggtacattttcttatagtgtattgtggttcttatttttttaaccttccarctagtgtgtaaattggaaacattgtagcttaatttgatagttttagacataatcaaagatgatggaaatcttgttcttaaatttagtctattcagcaact

SEQ ID NO: 301434 - DNA, 201 bp, Homo sapiens
tggaggattcaagctggtccttagccactccttgaaccagaacctcttttactttcttatgtagttcttctcttcctgtttttatatcctaaaactagtcyagcgaccagcccatcgtagtagaagcgttggtgttcttcctaaaaggaattgtaaacatctcttggagagtgggttagccaccataaattgttttgggac

SEQ ID NO: 301435 - DNA, 201 bp, Homo sapiens
tcagttaatatgttcatgcttttagttaatcgaaagtggcttatgatttcagtttttggtatcaggtgatgttgcggaagtgaggttcactgtgaagcttyttttttttttttttttttaatcattttgttgtttctttgagtgtatgtgagcttataactcaagacactatgtgaaatgaccctgtgtttcctacattat

SEQ ID NO: 301436 - DNA, 201 bp, Homo sapiens
ctgcagacatttgtggcatctgtgtgttaagaacatcccaaatcttgtcttctggctgttttgaaatgtatagtaacttcttattaactgtcgtgctgagsacatggactactgtgctgttgaacactagaacttactccttcatctgaccgtattttcgtacccatttaccaaccctgagagctttacttttgcagtaat

SEQ ID NO: 301437 - DNA, 201 bp, Homo sapiens
cgctaggactgaaggtatgatgcctgaagcccagaaacgcataatgggctgtgacaatgctgtttcacttgagctcatcggatgctttcgaggattcaatycatatctccctgttctccctgcattttgacacaggccgtgcttgcatgacagttgggttagtgtattcccctctccaccagagacttgggagggtagggg

SEQ ID NO: 301438 - DNA, 201 bp, Homo sapiens
aaatcttgtcttctggctgttttgaaatgtatagtaacttcttattaactgtcgtgctgaggacatggactactgtgctgttgaacactagaacttactcyttcatctgaccgtattttcgtacccatttaccaaccctgagagctttacttttgcagtaatagagaatattctttttctctcttgagtatgaaataatta

SEQ ID NO: 301439 - DNA, 201 bp, Homo sapiens
tgtgacaatgctgtttcacttgagctcatcggatgctttcgaggattcaatccatatctccctgttctccctgcattttgacacaggccgtgcttgcatgrcagttgggttagtgtattcccctctccaccagagacttgggagggtaggggagtgtgccttagtcattctcgagactcctgtgcctggcagtgcctagca

SEQ ID NO: 301440 - DNA, 201 bp, Homo sapiens
tcacagccagtttatcctcaggcttctttaagctgaccagttaaggtttctgcagaggttctgtgtttgagggaggagaggaagtccttggggaggagggkagcgttctatgggagacagtgctcttgggagcattctttcaatctgatacccatgcaagggtgatgacaaggtatggccttcagtgactcagagcctcct

SEQ ID NO: 301441 - DNA, 201 bp, Homo sapiens
atataaaagagcttctctcctaaaataactgaaatgaaaggattaattttctctcagtttcctactgcaagaagtaagtaaaagtggaattccaattctakccatggcaagaccggtctatcctgttatgtcttgtgtgccaataccacttttctccaggtaactaaagtatctccctgctgtaaatattaactgagtgca

SEQ ID NO: 301442 - DNA, 201 bp, Homo sapiens
aaagacttagaacagtgctgtcatatagtaaggattccataaacattagctgctcggtttgtgtgtgtgtgtgtgtgtgtgtgtgtgtgtgtgtgtgttttgttgttgttgttgttttaaacgggatcatgctggaaatgatagattgcaacagagctttggggttttttctctaattaatagatctaggatgttttctga

SEQ ID NO: 301443 - DNA, 201 bp, Homo sapiens
ttcacagtttcacatggctggggaggactcacgatcacgggtgaaggtgaatgaggagcaaagtcccatcttacatggtggcaggcaacagagtgtatgcrggggaactcccctttataaccatcagatcacatgagatgtaattcactatcatgagaacggcatgggaaaaacctgcatctgtgattcagttacctccca

SEQ ID NO: 301444 - DNA, 201 bp, Homo sapiens
ggagagaattctcatgaacatgtgtttgcgaaaaattggctgtgaaaggtttttcacttctgtcggattcccttgcctcaccagaaaggtgttttttttttctattcgtaccattcacgtgactctccagatggaaacaatgtggtcattgcctgtcagagccttgaaagcaagctgactccagcctaaaattcatgaata

SEQ ID NO: 301445 - DNA, 201 bp, Homo sapiens
attcacagcccagtgccccagctgggagagcgcgttcatcaactgtcacgggtggtgaggaaccaacggtaatgatccactttatcagacatcaatagcargaggccgtgaggcagttttaatatttcgtgtagtggtgaatatacgctgtttttaaaaataagattagctcctttgtgctacagagctgcacacgtttct

SEQ ID NO: 301446 - DNA, 201 bp, Homo sapiens
aggagagattatatttttttctggctaaccagaaaagtttgtttttcctgtgaaatttttttttttgaaggcaataggtgtttaagatgttttttttttttctttcagggattcacagaactacttcctattgatttgattaaaatttttgatgaaaatgagctggaggtttgtattataaacattattttatgtaaagtg

SEQ ID NO: 301447 - DNA, 201 bp, Homo sapiens
atgatgaagcgcagtccccaaagtgcctggccacccctccctccctggatcactgctgcctgggcttgattgattgattgattgattgattgattgattttgagagagattctcactgtcacccaggctggagtacagtggtgcgatctcggctcactgcagcctctgcctcccgggttcaagcaattctcctgcctcagc

SEQ ID NO: 301448 - DNA, 201 bp, Homo sapiens
gtctccacactcctgagagttagtaagtggctgtcgtgttgggctctgaagttgtagactagtttgttagtgacgtataaccaaaagagagagtgtacttmacatttagtcctgggaggttcgaactttgcctccgcctgtacgtgagctccctggagtgtgggatgaaggagtgcttggcccagttgttttcccggaagc

SEQ ID NO: 301449 - DNA, 201 bp, Homo sapiens
aatgatgaagcgcagtccccaaagtgcctggccacccctccctccctggatcactgctgcctgggcttgattgattgattgattgattgattgattgattttgagagagattctcactgtcacccaggctggagtacagtggtgcgatctcggctcactgcagcctctgcctcccgggttcaagcaattctcctgcctcag

SEQ ID NO: 301450 - DNA, 201 bp, Homo sapiens
ctgaatgatgaagcgcagtccccaaagtgcctggccacccctccctccctggatcactgctgcctgggcttgattgattgattgattgattgattgattgattttgagagagattctcactgtcacccaggctggagtacagtggtgcgatctcggctcactgcagcctctgcctcccgggttcaagcaattctcctgcct

SEQ ID NO: 301451 - DNA, 201 bp, Homo sapiens
gctgaatgatgaagcgcagtccccaaagtgcctggccacccctccctccctggatcactgctgcctgggcttgattgattgattgattgattgattgattgattttgagagagattctcactgtcacccaggctggagtacagtggtgcgatctcggctcactgcagcctctgcctcccgggttcaagcaattctcctgcc

SEQ ID NO: 301452 - DNA, 201 bp, Homo sapiens
atttatttatttatttatttatttatttattttgagatggagtctcgctctgttgcccaggctggagtgcaatggcatgatctcggctcagtgcaacctcwgccccctgggttcaagcgattctcctgcccaagcctcctgagtagctgggattacaggcgtgagccaccactcccagctaatttttgtatttttagtaga

SEQ ID NO: 301453 - DNA, 201 bp, Homo sapiens
cccccgaggccgtgccctgcaggatttgtgagcacccatcagtgggcgtttgcccagcagtgctccgtttccaagaatggagtctgacaagcagataagccttgctccacccaagtccagcatattccatatgagccaagctgtttctcagcagcttcccaggcagcgcaaagcatttatggagggtcagggagatgtgtg

SEQ ID NO: 301454 - DNA, 201 bp, Homo sapiens
gctggccacaccaggctagattccagttgagcttaaataaaacaaatagaaaggtcctccgtggtattagccatattgtaggtgctccgtagacacatgcrgctagtggctgcccacaggacgctgcagatgtggacgtccccgtcatcacaggacgacattctgtgggcagcgctgtatttgtttacaaacacaattctt

SEQ ID NO: 301455 - DNA, 201 bp, Homo sapiens
aggtcaggcacagagaagttaaataatttgctcacagaaatttcctgtgttgcagctgagatttaaatccaagcaatgtgtttctaagcctgggctcttamctgtaacactgtcctcttccccccaccaggagggtgtgtgtgtgtgtgtgtgtgtgtgtgtgtttctgaatctgaccagttgaggcaggctttcatgtca

SEQ ID NO: 301456 - DNA, 201 bp, Homo sapiens
ctttgtatttctgtgtcagttctttatttctttagccgaatcggtggctttttcagtgtagtatatgattcttttaaaagtcagttggtattttcctgctrtataatctctatacctgtaattacactgaaaccggttcccgtatttctggctatttttgatgctgcagatggtttttcttccggttatgtccccatcgaa

SEQ ID NO: 301457 - DNA, 201 bp, Homo sapiens; identical to SEQ ID NO: 62969

SEQ ID NO: 301458 - DNA, 201 bp, Homo sapiens
cactcccccatccccactggtatctttatgtactcaggtgactattaccatattctgcttggactgtttttatacattgcagataatttgaagatatggayttaggtaggtttttagatttataataattaagtgatgtttttctatcaagtgatgaaagtttcaacagatatttgttaaaatttaatttagccaaaggaa

SEQ ID NO: 301459 - DNA, 201 bp, Homo sapiens
cgctgccccacacactctccagtgggtgggggtgggggtggcagcggctgatcaaaggttctcacctgcaagtgataatagcctgggtctctttggcaccracctgccttcttcacctttctgctcagacaccccttggcacccctacataaaggaaagagctgtctggatggcctagtaactgtaggataggtaaagtta

SEQ ID NO: 301460 - DNA, 201 bp, Homo sapiens
aaatagaaaggcagaaatccctgtcgaggccagacagcaaggatggagaggggcagggggtgaaatgaaacgcaccaggaggagtaaagacaaggccttcygatgtcagccaagagcaggtgtggattaggcagtcctaagtttgagtcctggttctgctattcattggccaattgtattctccctccctctacgatgagg

SEQ ID NO: 301461 - DNA, 201 bp, Homo sapiens
tacctctgcccccatgccctggggttcacacccagaaatgctgacttcattggtcgggggctggcaggcctggacattggcggtttgcttagaagctgccygggtggttctcatagcagccagggtcaagcaccacggcctgttcttacctggctccccaggccccctttaatctccctctgcagcagattggcacacatc

SEQ ID NO: 301462 - DNA, 201 bp, Homo sapiens
tgttctattacaggaaatgcttagctctttattgcagttatataatagccggcaatcatgatagctgaggggcataaaaatgagagcaacagagtttatgrtattctttataactgtggattctgtatgtgcgtgtgtgtgcacgtgtgttctgcatgcatctccatggcacattatctggaggtaacatgatcatcaggc

SEQ ID NO: 301463 - DNA, 201 bp, Homo sapiens
atccttgtttttcagtgtttctccatccacactgcatttcttagactgcttctcagggatcttcttgtgatcaaatgtggactgtctaaatacagtcactmtatgcggggcaggtctctaaacccaaaaactgccaagctgtgttcaccttcaaagaaacacactcctatcagcagacttgggtgcacatagcctggggtg

SEQ ID NO: 301464 - DNA, 201 bp, Homo sapiens
acttgggaggagaggataatttggccacaataggattccttattatctgtctcttccctcccaacccctcccccgacccccgccccatacaggagaccctyagatacatttctgtcagtaccctcagttacatattttgggagacgtaatacttaatgaaccaaaactctgttttgctggcagggaaaaaaattgggctga

SEQ ID NO: 301465 - DNA, 201 bp, Homo sapiens
aagctaagcggtgtagctttataacaagtggattcagccagctgggactggacgactgagagtttgcagcccctgctggaccctgtgtaactgtccagttygcctagctattggtttggcccagtggttttcaattttggctgcacatcagaatcacctgggggaggtttaaaaccctacctctgcccccatgccctgggg

SEQ ID NO: 301466 - DNA, 201 bp, Homo sapiens
tggttgggttaacgtttcttcttctaaccatgagggaagtaggtgggctgttctggtgactcagtgtcctcccagactcactcatgagaggaagtattcayggactgtggtgatcttgtcttggaatttttttctttgcctcctggcctcacagccgttccttttcttttacacatccatgaaagggagactctaagatct

SEQ ID NO: 301467 - DNA, 201 bp, Homo sapiens
gtctctgtgggtgtttttttttaaggctgtgtgctttataaactggagatagaaggagccagtttattataaaaaggataaaatataattaaacaattaaragtatgtctttatagccgggtgtggtggctcacatctgtagtcccagctacttgggaggctgaggcaggagaatcgcttgaacctgggaggcggaggctg

SEQ ID NO: 301468 - DNA, 201 bp, Homo sapiens
agtaaaagaagcagcttccttttgtaacctcacgtgagaggttattcctaaggcatgggctcctcctatacctttagattcccctaggagccgtggtatakctgtggtcggcttctggtttctgagcttttccccacttagagctctttcacaggcacagatattacatgcatcgcctatgcattcaagccctcctgggac

SEQ ID NO: 301469 - DNA, 201 bp, Homo sapiens
gttacggtcttgcttactgctttgggaatggatttgttgaaactacatgtgactagtttagggacccagtaggaggttttactataagtgtaaattaacaygtgcctttgggggaccttaaaagtttttgtcattgggccatgagatctgagtgcagctggtagaacctccttgttttctttggtatgagaactcctgggc

SEQ ID NO: 301470 - DNA, 201 bp, Homo sapiens
ggtcaaggaattgactttcagggttccaagggaataattagttcagaagtctgtccccatacttgttttccagtacaatctgtgtctctgtgggtgttttyttttaaggctgtgtgctttataaactggagatagaaggagccagtttattataaaaaggataaaatataattaaacaattaaaagtatgtctttatagcc

SEQ ID NO: 301471 - DNA, 201 bp, Homo sapiens
tccaccatccagagtaggtgccttccactgtgcatcactaaggacaggatttaactgcaagctcattacaactaaagcagtttgtttgtttatagtttaawgaggaaggtttggtttaggtggagcaggaaacattgcattagtaacatatttcttgagcattctgcacagaattacattagaatgtaattaaagaagtca

SEQ ID NO: 301472 - DNA, 201 bp, Homo sapiens
ctaaaatatctggaagtaaaagaagcagcttccttttgtaacctcacgtgagaggttattcctaaggcatgggctcctcctatacctttagattcccctakgagccgtggtatagctgtggtcggcttctggtttctgagcttttccccacttagagctctttcacaggcacagatattacatgcatcgcctatgcattca

SEQ ID NO: 301473 - DNA, 201 bp, Homo sapiens
caaagccgaggattacaggattataggcatgagccagcaagcccagtctagaacattctttatccttcctgttttcctcagatactttcactctttttttwaactttatttattttttatagagacagggtctcactatgttgcccaggctggtctctaactcctgggctcaagtgatcctcccaccttggcctcccaaag

SEQ ID NO: 301474 - DNA, 201 bp, Homo sapiens
gtatcctcagcctaatagcaagaaaacgacaactgctaaaatatctggaagtaaaagaagcagcttccttttgtaacctcacgtgagaggttattcctaargcatgggctcctcctatacctttagattcccctaggagccgtggtatagctgtggtcggcttctggtttctgagcttttccccacttagagctctttcac

SEQ ID NO: 301475 - DNA, 201 bp, Homo sapiens
ctctatcccctggcacaagtgatcctcctgtctcagcctcccaagtagctaggaccacaggcacacaccaccatgcctagctaatttctttttttttttttgtagtcatggcgtcttgctatgctgcttaggctggtcttgaacagcctcaagccctcctcctgcctcagcctcccaaagccgaggattacaggattatag

SEQ ID NO: 301476 - DNA, 201 bp, Homo sapiens
aagcacaggaagaagttaggttcagaggaaatttgtatcctcagcctaatagcaagaaaacgacaactgctaaaatatctggaagtaaaagaagcagcttycttttgtaacctcacgtgagaggttattcctaaggcatgggctcctcctatacctttagattcccctaggagccgtggtatagctgtggtcggcttctgg

SEQ ID NO: 301477 - DNA, 201 bp, Homo sapiens
tcttcaaatttcccacagatgggaatgtccctgtcggcagggctcattctgcacatctgtccgatgggaatgtccctgtcggcagggctcattctgcacatctgtccgctgctccccctggtcggcttcatgcttttacttccccagacactggagtctattggagcctgcatagggccacgctgagccggggagaattgg

SEQ ID NO: 301478 - DNA, 201 bp, Homo sapiens
gtcttcaaatttcccacagatgggaatgtccctgtcggcagggctcattctgcacatctgtccgatgggaatgtccctgtcggcagggctcattctgcacatctgtccgctgctccccctggtcggcttcatgcttttacttccccagacactggagtctattggagcctgcatagggccacgctgagccggggagaattg

SEQ ID NO: 301479 - DNA, 201 bp, Homo sapiens
tgaatgagccctgtaacttgtttgggtatcatatgcatatttttattgagtcgctttgacacttggaagagatttattaccatgaaaatataaatttaggkgaacagaaatgtgtaattttccctttaaatagttatggtatgttacttaaaacgttatgaattaaacaacaaattagccataatcttccatgctatctta

SEQ ID NO: 301480 - DNA, 201 bp, Homo sapiens
gtgtcttcaaatttcccacagatgggaatgtccctgtcggcagggctcattctgcacatctgtccgatgggaatgtccctgtcggcagggctcattctgcacatctgtccgctgctccccctggtcggcttcatgcttttacttccccagacactggagtctattggagcctgcatagggccacgctgagccggggagaat

SEQ ID NO: 301481 - DNA, 201 bp, Homo sapiens
cagtgtcttcaaatttcccacagatgggaatgtccctgtcggcagggctcattctgcacatctgtccgatgggaatgtccctgtcggcagggctcattctgcacatctgtccgctgctccccctggtcggcttcatgcttttacttccccagacactggagtctattggagcctgcatagggccacgctgagccggggaga

SEQ ID NO: 301482 - DNA, 201 bp, Homo sapiens
cctgagagttagtaagtggctgtcgtgttgggctctgaagttgtagactagtttgttagtgacgtataaccaaaagagagagtgtacttaacatttagtcstgggaggttcgaactttgcctccgcctgtacgtgagctccctggagtgtgggatgaaggagtgcttggcccagttgttttcccggaagctggaggagggc

SEQ ID NO: 301483 - DNA, 201 bp, Homo sapiens
gcagtgtcttcaaatttcccacagatgggaatgtccctgtcggcagggctcattctgcacatctgtccgatgggaatgtccctgtcggcagggctcattctgcacatctgtccgctgctccccctggtcggcttcatgcttttacttccccagacactggagtctattggagcctgcatagggccacgctgagccggggag

SEQ ID NO: 301484 - DNA, 201 bp, Homo sapiens
cagcagtgtcttcaaatttcccacagatgggaatgtccctgtcggcagggctcattctgcacatctgtccgatgggaatgtccctgtcggcagggctcattctgcacatctgtccgctgctccccctggtcggcttcatgcttttacttccccagacactggagtctattggagcctgcatagggccacgctgagccgggg

SEQ ID NO: 301485 - DNA, 201 bp, Homo sapiens
tcagcagtgtcttcaaatttcccacagatgggaatgtccctgtcggcagggctcattctgcacatctgtccgatgggaatgtccctgtcggcagggctcattctgcacatctgtccgctgctccccctggtcggcttcatgcttttacttccccagacactggagtctattggagcctgcatagggccacgctgagccggg

SEQ ID NO: 301486 - DNA, 201 bp, Homo sapiens
ccactgctgtggccagcctcttattcagaggagtttcctacctggttagacacttaaccacctccagacggaccccttctaatccacgtcccacattatakctcaaaagtatggattttacagatcttatcctctcctgttctgccaaaaccccatacggtcctccattaccaatcaggtgaatcgacttgcatttcccag

SEQ ID NO: 301487 - DNA, 201 bp, Homo sapiens
ccacaggatggggagttatctggaccaaaatgccaatagtgctgaggctgagaaacgtatttttttttttttttgcctaaaagaaaattgcttgctccagrtgactccagacaaaccaaaataaaaataaaaagtaaaaactaaaatgacaacatgaaatgaatttttaagagccaaatgagacctttagagacaatctca

SEQ ID NO: 301488 - DNA, 201 bp, Homo sapiens; identical to SEQ ID NO: 62905

SEQ ID NO: 301489 - DNA, 201 bp, Homo sapiens; identical to SEQ ID NO: 62906

SEQ ID NO: 301490 - DNA, 201 bp, Homo sapiens; identical to SEQ ID NO: 62907

SEQ ID NO: 301491 - DNA, 201 bp, Homo sapiens; identical to SEQ ID NO: 62908

SEQ ID NO: 301492 - DNA, 201 bp, Homo sapiens
tagacacagtcttaattcgtgggtaactccaaaagcatcagctctgtgttccaagggtttggaaatcttgccggttactcccttcccaccaggattcctcygagatctgcatctgactatagcaaaggtttcatggaccatttgaaaatgttctttctctgtaaattacaagagcttatttagtgtggatgtttcatagct

SEQ ID NO: 301493 - DNA, 201 bp, Homo sapiens
tgaagtgagttaatagggagaaaagcacttggcttgaggcctagtgtggaataagtaatagtattagagatagacacagtcttaattcgtgggtaactccraaagcatcagctctgtgttccaagggtttggaaatcttgccggttactcccttcccaccaggattcctccgagatctgcatctgactatagcaaaggttt

SEQ ID NO: 301494 - DNA, 201 bp, Homo sapiens
ccacttttctccaggtaactaaagtatctccctgctgtaaatattaactgagtgcatttttgtggcttttgataactccacgtcttgaaagtgttggccasttgtcaaattttcatgaatttcagagaagtgggtaataggtggtttctctcacggtatttaaagcgaagtagtaaagaggaaaaagactgaaaaggtaac

SEQ ID NO: 301495 - DNA, 201 bp, Homo sapiens
ctcctagattgctcatgcccactggtgatcctgtaggctttgtcatactgtttgatttcctatgtttaaactgtcctttctccctgttctctacctctcamagccttcccatcaccctgtattgtattgaactccacatccaaaaccattttgatttccaagtcagagtccgtctgttccctgtaccccaagtctcacaga

SEQ ID NO: 301496 - DNA, 201 bp, Homo sapiens
acagtaaatgttgaaaggtgttaacactgataccatctcttgagtaattgagcccttgctgtatgccgggcccactgatccgatccacttggcactcataygtgcagtttccccatgtcacagaagcacagaggccatccatttgtctgaaaaccctcactattgccagggcgatttgcagcccccgcccccacctgaagc

SEQ ID NO: 301497 - DNA, 201 bp, Homo sapiens
ttcctactgcaagaagtaagtaaaagtggaattccaattctagccatggcaagaccggtctatcctgttatgtcttgtgtgccaataccacttttctccasgtaactaaagtatctccctgctgtaaatattaactgagtgcatttttgtggcttttgataactccacgtcttgaaagtgttggccagttgtcaaattttc

SEQ ID NO: 301498 - DNA, 201 bp, Homo sapiens
agtcatttaagctgcatagggtatggacagactcaggttcagagtccctctaagctccgtggttttccctcttcactctcttgcatgttctctgctgctcmtagattgctcatgcccactggtgatcctgtaggctttgtcatactgtttgatttcctatgtttaaactgtcctttctccctgttctctacctctcaaagc

SEQ ID NO: 301499 - DNA, 201 bp, Homo sapiens
atgttcttccctatgcagtggtgtcagtaggattttttgttggtgtgagatctgggatctgtttgtaagccgtctgagagctgggactttgcattgatcamctttttgttgcacatgctctgtgatgtaattggcactgcatgatttgacaagaatgtgttttatgctctaaatcaggagtgagcaaactttctgtaaaag

SEQ ID NO: 301500 - DNA, 201 bp, Homo sapiens
taatggaatagaatctaccaagaataatgcagactggataaaaagaatttcactgattttgattatttagcacattaaaggggacccctggccagaagtakatgtattgcttgggagaggagggcatagtacccaggtggtacttcagggattctgattttcagtcagggttgagaaaaactgatttaagaagttaatgct

SEQ ID NO: 301501 - DNA, 201 bp, Homo sapiens
aaggacattagattttccttagagtgacattagagtttctataattggactataccctttagtgcctcaaatcaagggtttcacattttctttttttttttggaattgcctgctcatgtatttccatctccttaaaggcaagggctggccgccttatttggctgatactagcctccatggcatcagcctgtccagtggaag

SEQ ID NO: 301502 - DNA, 201 bp, Homo sapiens
caaagccaggatgcaaacctaggagatctgccttttgacctgtgtgatatcagtcatttaagctgcatagggtatggacagactcaggttcagagtccctmtaagctccgtggttttccctcttcactctcttgcatgttctctgctgctcctagattgctcatgcccactggtgatcctgtaggctttgtcatactgttt

SEQ ID NO: 301503 - DNA, 201 bp, Homo sapiens
aactcttaatggaatagaatctaccaagaataatgcagactggataaaaagaatttcactgattttgattatttagcacattaaaggggacccctggccasaagtagatgtattgcttgggagaggagggcatagtacccaggtggtacttcagggattctgattttcagtcagggttgagaaaaactgatttaagaagtt

SEQ ID NO: 301504 - DNA, 201 bp, Homo sapiens
ctgtggtcagcagatttttaactttatcctagtttattgatatttctgtcagtgaacaggtttaactcttaatggaatagaatctaccaagaataatgcasactggataaaaagaatttcactgattttgattatttagcacattaaaggggacccctggccagaagtagatgtattgcttgggagaggagggcatagtac

SEQ ID NO: 301505 - DNA, 201 bp, Homo sapiens
gtcagcagtgtcttcaaatttcccacagatgggaatgtccctgtcggcagggctcattctgcacatctgtccgatgggaatgtccctgtcggcagggctcattctgcacatctgtccgctgctccccctggtcggcttcatgcttttacttccccagacactggagtctattggagcctgcatagggccacgctgagccgg

SEQ ID NO: 301506 - DNA, 201 bp, Homo sapiens
acccttgtgctcaacacaagtctgtggtcagcagatttttaactttatcctagtttattgatatttctgtcagtgaacaggtttaactcttaatggaatakaatctaccaagaataatgcagactggataaaaagaatttcactgattttgattatttagcacattaaaggggacccctggccagaagtagatgtattgct

SEQ ID NO: 301507 - DNA, 201 bp, Homo sapiens
tagatgggcctagtcagcagtgtcttcaaatttcccacagatgggaatgtccctgtcggcagggctcattctgcacatctgtccgatgggaatgtccctgtcggcagggctcattctgcacatctgtccgctgctccccctggtcggcttcatgcttttacttccccagacactggagtctattggagcctgcatagggcc

SEQ ID NO: 301508 - DNA, 201 bp, Homo sapiens
tttcaaatgcatggctaggtagttacctcatgaaggaaaacaactgttttggtccagattttaaaaattgagttgaatagaaaaggtggggtggaaccagmaatactgaaatgtaataatgtatattaagctccaaccaaacaatccagcacttcttcaaatccaggaggtcttctggctaggagttacattgcagaacta

SEQ ID NO: 301509 - DNA, 201 bp, Homo sapiens
tttgagtgattctcctgcctcagcctcttgagtagctgggactacaggcgcgtgccacaatgcccagctattttttgtatttttagtagagacggggtttyaccatgttggccaggctggtctcaaactcctggcctcaggtgatccatccgcctcgggctcccaaagtgctggcattacaggcatgagctaccgcacctg

SEQ ID NO: 301510 - DNA, 201 bp, Homo sapiens
cttagtccttttaattaactcctaatgaactaatatagttttgtggtcaccagcttctagctagtacaggcacagttgtgggttggtaggagaatgagcastaaagccatgagctaacacaccaagtaatctgttgtgttcacaaatgtccaaaagaataacagagattaaagaaaggtaaatacagccacctggcaaaaa

SEQ ID NO: 301511 - DNA, 201 bp, Homo sapiens
acatagatgggcctagtcagcagtgtcttcaaatttcccacagatgggaatgtccctgtcggcagggctcattctgcacatctgtccgatgggaatgtccctgtcggcagggctcattctgcacatctgtccgctgctccccctggtcggcttcatgcttttacttccccagacactggagtctattggagcctgcatagg

SEQ ID NO: 301512 - DNA, 201 bp, Homo sapiens
ttcttcaaatccaggaggtcttctggctaggagttacattgcagaactaacatggactcttaaactttgtaaggaattagtcacagttgaacactggaaaytatcagcatacctctgggcttcttttatatggtcttcctcatgagttaaaatgccttaagcatagtatctgttccataggaccttactgattatgctttt

SEQ ID NO: 301513 - DNA, 201 bp, Homo sapiens
ttttttatttttattttttgagatggagtcttgttcactggcccaggctggagtgcagaggcatgatcctggctcaccgcaacctccatctcctgggtttragtgattctcctgcctcagcctcttgagtagctgggactacaggcgcgtgccacaatgcccagctattttttgtatttttagtagagacggggttttacc

SEQ ID NO: 301514 - DNA, 201 bp, Homo sapiens
cacatagatgggcctagtcagcagtgtcttcaaatttcccacagatgggaatgtccctgtcggcagggctcattctgcacatctgtccgatgggaatgtccctgtcggcagggctcattctgcacatctgtccgctgctccccctggtcggcttcatgcttttacttccccagacactggagtctattggagcctgcatag

SEQ ID NO: 301515 - DNA, 201 bp, Homo sapiens
agatgaggggggtgaagtaaaagaataaaaactattcaattccatttgttttctctttcaagctcatacgttactcatttcatttttatattaaaatatakatgaggaaggaagggcacatggcaagatttggcaagcataatccatgaggggatatggagttggggatggcagcatagcatactaggatttttgaggagg

SEQ ID NO: 301516 - DNA, 201 bp, Homo sapiens
aaagagatgagaacaaaaccagaagaatcacagtgatagtgtctgagcagaagggagtgcattgagtcctcagaggagaaagtgacttggctggaggctcrgggaatctttcccaggatgagctgcacctcggaggtggggtagcatttgagcgttcaaaggctggggtcatttcagatgagtgaggaccagcccagagtc

SEQ ID NO: 301517 - DNA, 201 bp, Homo sapiens
ttcatttttatattaaaatatagatgaggaaggaagggcacatggcaagatttggcaagcataatccatgaggggatatggagttggggatggcagcatakcatactaggatttttgaggagggattcggggagcctgttcatgttttccttacaactctggtacatgaagtacaggttctgcatcatgatggaagactgc

SEQ ID NO: 301518 - DNA, 201 bp, Homo sapiens
agatttgataacagatggaaaaactaattgaaaagttaattaaaatgatctcatctatctaatatcctgtgattattgcgtttgtccccaaattattttttaatttgaagggactaaataatttcaaaataatgttactgcttagctaagacattaaccctgaaacaaataacacaaaataatttcattcttatttaaagc

SEQ ID NO: 301519 - DNA, 201 bp, Homo sapiens
tcggtgatgtggatgtgaatgactggagacagcattctatttacaagaacggctactgcccaaaccaccccgtcattcagtggttctggaaggtaactccrgggcccagccccagccggtgtcctccacctgaggcaggattgagggctgtgtggcgccctccattgtggtctgacttcaggactgatgctggctttgggg

SEQ ID NO: 301520 - DNA, 201 bp, Homo sapiens
cgtcactcaaacactgctagtccttattaaatcttactgaaaattgctcagcatcataaagccaagtagatttgcccccaagaaagagctctctgctttctgttaataaaagacccttgtttattccttcatttttattattattattcattatattgctttcaatagaggagaatctgtatttaggtagttatcaactta

SEQ ID NO: 301521 - DNA, 201 bp, Homo sapiens
ccgtcactcaaacactgctagtccttattaaatcttactgaaaattgctcagcatcataaagccaagtagatttgcccccaagaaagagctctctgctttctgttaataaaagacccttgtttattccttcatttttattattattattcattatattgctttcaatagaggagaatctgtatttaggtagttatcaactt

SEQ ID NO: 301522 - DNA, 201 bp, Homo sapiens
ggactggacagcttttgaagaatccagaaatacttccttccaaaactttctttacatagaatagatttgaactaatgttctgattttttttttttttttttaacattttcagatagcaaaattactcagtgggaagacccaagactgcagaacccagctattactggtccggtcagtattttcaaattctgcctcttcagt

SEQ ID NO: 301523 - DNA, 201 bp, Homo sapiens
gggtgtctccagagggtctcctcagcctgcatctggcccctgcataaatgggcgggtgggagtgggtgggcacaggctggtagctgtctttggtattggtkctgggactgccttttctcctgggaagctctagtttagacagttcaccgtgctggatggaaaggtattgctctgtgctgttaagattttgttaattgatcc

SEQ ID NO: 301524 - DNA, 201 bp, Homo sapiens
gggactggacagcttttgaagaatccagaaatacttccttccaaaactttctttacatagaatagatttgaactaatgttctgattttttttttttttttttaacattttcagatagcaaaattactcagtgggaagacccaagactgcagaacccagctattactggtccggtcagtattttcaaattctgcctcttcag

SEQ ID NO: 301525 - DNA, 201 bp, Homo sapiens
cattgaagtgaatcatcagtataagtagcgagctgggcgcattccttctcagttgtgttaaaacttgctggtattcccccggtatcagcagaggtgtgtaygggcactgctttaaaactgggaaggaggaagacgaggccagggagccggagggtcaccaaggtagatttccagcagcgctagtccagctgaacactttcc

SEQ ID NO: 301526 - DNA, 201 bp, Homo sapiens
cttttaggtagactctaaagcaaacaaaaatcatctcgttcagcccatgcatcttccacgtgaggacgctgaagccctgtgaggacaatgagctccttaargtcacccagctcattagtgcagagcaaagccaggtccgtgtgtcctgacctctgaaatgataggaactcacactcaccaagcactctgttcattccgggg

SEQ ID NO: 301527 - DNA, 201 bp, Homo sapiens
tgtgctactcatggacgccgaaaagcgtatccggttactgcagtttgtcacagggacatcgcgagtacctatgaatggatttgccgaactttatggtgagyaggataccattggattcagttgtcctcctgggaatttccagccaggcatgaactctggcccaagaaccctgccgccaggcctctgcagaaggctaagttt

SEQ ID NO: 301528 - DNA, 201 bp, Homo sapiens
ctggcttagttctgtttccatttcattctggtacctttgcataaatatcttccatttgtccacaggaaacctcccctgatggagagttgcataataggaayggcaaaccttagactaaatgctaagtcgaagacccagttgtgccttagcgtatgtctgccattcttaggcctctgggcagatgaggtgatttgtcatcac

SEQ ID NO: 301529 - DNA, 201 bp, Homo sapiens
ctgtagaacgacgtctcattgaacttgaagtggtttatgttgagtgaggaaaaatgtcagaaggcaacagggttgtagcaaaaggtagtttagtgattgtstagttcagcttcttggtgttgacatagttgagtaacagccattttaaaaacaaaggaatatctcgccctttgttgtgtcgagagaaacaggggaaagact

SEQ ID NO: 301530 - DNA, 201 bp, Homo sapiens
cctgccctttttctttgtggcataattcattgcaggttctcttctatacagatacatggaaaacacattttcttaagctgagtttttatttattttatacmcagccacctcatgacagcttttaccctgttacagagcaaagtgggcactgcccagatcgaacttttaatatcagggatgctcccaggcccctagcagtgg

SEQ ID NO: 301531 - DNA, 201 bp, Homo sapiens
cacctccttttccttttcacgggttctcctgcttgacttctcttatttttacatttgtcctgtttttaaagaggacgttttacagacttgatctagaaccmttgtcttggagtttcaggcggtacccaagagaaggctgccttttgctgcagtgacaggttccaagaagcccgagggctcagagctgaatgatgaagcgca

SEQ ID NO: 301532 - DNA, 201 bp, Homo sapiens
attcttaactcaacttcagcctcagtggaacaaaatgttgagtctttttggaagtctagctgttaagtgattctaagacatttgtaccaggcagaagtttytctctgttgggcacgttacgttttcttttttagtgtatatgtgtgcttcaaatgcataactctgggatcttccaaggagatcccctggtgcaggggtgag

SEQ ID NO: 301533 - DNA, 201 bp, Homo sapiens
tgggctaatgggaagttgaatatgggatggaaagtctgtcttgtatcatgactccattgagctgccctataaaggagcagaggagggagaaaaggtctatrttattgagtaatacggcaaatactcttttggaatatgtggatatcaactaagatttagaattgcaacggagaaccacggtgtcagtgaccagcagggcaa

SEQ ID NO: 301534 - DNA, 201 bp, Homo sapiens
ggaattcctacgcttggagcaagtcatttcaataaatctcattcatatttacctgctgcttccttttaaatggaagaagagaatgtttttcaagtacactygaaaaatagcatatgtgaattagaaacttcctctgtaaactagcagagtagaaataagaggccaggattcagcaccaggtaggctggattccttcttagg

SEQ ID NO: 301535 - DNA, 201 bp, Homo sapiens
tgcgtggagaagccgcatgagagacccaggtgtgagtgctcgggtcagaggggctcaggatctcctgggtgcaggtggcaggaccaaggaacccctggagrtggcctctgccagggcatagagttcatcacaacatggaacctccatccctcctgggtaccaccctaacacttactttggaaaaccctctcccctggcttg

SEQ ID NO: 301536 - DNA, 201 bp, Homo sapiens
atacccaaattagtaaatgttaaaataaccatgactggtaaaaacattttgcaattttttttttttttactttttatataattaaatgaaattctccattkggtagttgatctctcagacaaattaagtcttgccagactgtctgagaagactagtgaatcagaccctaaaaacttgtagcatttgaaaaataacaactgt

SEQ ID NO: 301537 - DNA, 201 bp, Homo sapiens
aaattttttcaattatctaaaaggaattcctacgcttggagcaagtcatttcaataaatctcattcatatttacctgctgcttccttttaaatggaagaaragaatgtttttcaagtacacttgaaaaatagcatatgtgaattagaaacttcctctgtaaactagcagagtagaaataagaggccaggattcagcaccag

SEQ ID NO: 301538 - DNA, 201 bp, Homo sapiens
ggaaaagctcctaagcacaacagtgctgctcacctgggcatctagttggcagagtcctatcccagtgttcgcacccccagtttcctgggtcttaagttcasattatcaagtgctcctcctgcaaaaaaaaaaaaaatggtgattcttgtggcccttagttgaccccgcacctgggatatgcttatatttggtgtggggcag

SEQ ID NO: 301539 - DNA, 201 bp, Homo sapiens
atcaaattttttcaattatctaaaaggaattcctacgcttggagcaagtcatttcaataaatctcattcatatttacctgctgcttccttttaaatggaaraagagaatgtttttcaagtacacttgaaaaatagcatatgtgaattagaaacttcctctgtaaactagcagagtagaaataagaggccaggattcagcac

SEQ ID NO: 301540 - DNA, 201 bp, Homo sapiens
ctgtattccatttgaggaaaggaacggttggagtaggaggtagtgtaaagataacatagcaaataagcattttaccagaaccctctgaagtctcatcagastgtgccatcatcagaatccctcccttctcatctacaccgtttaaagccagcatccagtcagaagcccagagctggtaccgccttgctttcctgccagttg

SEQ ID NO: 301541 - DNA, 201 bp, Homo sapiens
agcatccagtcagaagcccagagctggtaccgccttgctttcctgccagttgctgacatatggcacacagtgtcagttaagggcacaggctgatgggcagyttggccacatacctctctggcttcctatctgtaaaatgggcacaatcattgtacctgcctctgaaggttgttgcgagaactagacgcagccttggcacag

SEQ ID NO: 301542 - DNA, 201 bp, Homo sapiens
ctgcctcagccccccaaagtattgggattacaggcatgagccactgctcctggccaccctttacttttcaaataattttcttcttctttttttttttttttgttttttactaacctagatatccaaaaactctggagaacctactctccctagtgtgccccaccccccgtacctttcatgtgagtccattgcactctctct

SEQ ID NO: 301543 - DNA, 201 bp, Homo sapiens
attcggttgactttatacttcatgctctgcccctcactgcctccctgacacttttctctaatttcagcttcttttcacgctacggccccccccgccccccmcccccctttaaatcaccagccttttaccaatagggctgattgtctttcacggtagcctacatgtgattccaaggtcaggctggccttgtgtgtagcattc

SEQ ID NO: 301544 - DNA, 201 bp, Homo sapiens
tatttgtgtttcctgcttttgaggttcttagtccttttaattaactcctaatgaactaatatagttttgtggtcaccagcttctagctagtacaggcacasttgtgggttggtaggagaatgagcagtaaagccatgagctaacacaccaagtaatctgttgtgttcacaaatgtccaaaagaataacagagattaaagaa

SEQ ID NO: 301545 - DNA, 201 bp, Homo sapiens
tattgatgtagcttttttcctttttgtgctctaaaacttgccaatctgttcttcattagactgtgagctcattaagagcaagggcacatttttctccactstgtaaaatctccatccataatgcttagtacagaacagtatttttggtacatactgagtagctaccaaaggatggtggttataagtacttaatattgttgt

SEQ ID NO: 301546 - DNA, 201 bp, Homo sapiens
ctgatatgaatgtcatgggtaacaactgtgagattccagatcgttgtatttattgatgtagcttttttcctttttgtgctctaaaacttgccaatctgttyttcattagactgtgagctcattaagagcaagggcacatttttctccactctgtaaaatctccatccataatgcttagtacagaacagtatttttggtaca

SEQ ID NO: 301547 - DNA, 201 bp, Homo sapiens
gggaatggatgctgtctcttccacactctgatatgaatgtcatgggtaacaactgtgagattccagatcgttgtatttattgatgtagcttttttcctttktgtgctctaaaacttgccaatctgttcttcattagactgtgagctcattaagagcaagggcacatttttctccactctgtaaaatctccatccataatgc

SEQ ID NO: 301548 - DNA, 201 bp, Homo sapiens
gaagtaaaagaagcagcttccttttgtaacctcacgtgagaggttattcctaaggcatgggctcctcctatacctttagattcccctaggagccgtggtayagctgtggtcggcttctggtttctgagcttttccccacttagagctctttcacaggcacagatattacatgcatcgcctatgcattcaagccctcctggg

SEQ ID NO: 301549 - DNA, 201 bp, Homo sapiens
cacccagctggaaaggactttttgtgcggtgagaggaggatcctcagaatacggagatctggggtccgcagacccattgtgggatgcacattgatttagtyagatcttgagtgaagagatactgtgttagctgactgcgtgataaacgttagcctgagaaattagtttgttattttgataggcatttgagtcatttattga

SEQ ID NO: 301550 - DNA, 201 bp, Homo sapiens
gccgggcgtggtggtgagcacctgtagtcccagctactcgggaggctgaggcaggagaatggcgtgaacccgggaggcagaggttgtggtgagctgagatygcaccactgctctccaccctgggcgacagagcgagactccatctcaaaaaaaaaaaaagaatttccttattgtttcacctgtgttgtattttgctataac

SEQ ID NO: 301551 - DNA, 201 bp, Homo sapiens
agccctgtaacttgtttgggtatcatatgcatatttttattgagtcgctttgacacttggaagagatttattaccatgaaaatataaatttaggtgaacasaaatgtgtaattttccctttaaatagttatggtatgttacttaaaacgttatgaattaaacaacaaattagccataatcttccatgctatcttaccagct

SEQ ID NO: 301552 - DNA, 201 bp, Homo sapiens
gctgtggttttacttagcttaatcctttattaattgcctcttgttcaaactccctaagagcagattatccttctctttcagcttctgctccattgctgttsaacttttttttggtcgtgacatcagaaaaataaccaagtgtgagtctgataatagcaagtaaggctattttatttctatccaatttaccccaaatttgag

SEQ ID NO: 301553 - DNA, 201 bp, Homo sapiens
gggggagggacgaatgtgaacgcatatgcagagcaacacagtcatgagaccattctattacttcctaaatttcttaaagcttttctgtcttttctgagctkctcaagtgagcaggggcatgagttcctgtgttgtgcctggggacagggaaggctttgggacctactgtggtcttaagtctgagcagtgctaatagcctcg

SEQ ID NO: 301554 - DNA, 201 bp, Homo sapiens
acggtgtcacgatcagcccccgacagccggtctcaaaagtggaatttgaagagtggtcattgcttctcatgaaagtgtcgccgtaactcatgaaagtgtcrcctgtaacgaatcctagagggatgcatttctgtaccacggagggctcgagccgagacaccgagatctgggggcgtgacccctaacctagtagcttaggga

SEQ ID NO: 301555 - DNA, 201 bp, Homo sapiens
tctactgcagtgttctcccacgagctcttgctgagcgcctgctgtggctgggcattgtgttccttgtgtggggtcctccaggagcccaggcacaggagggygatggcccagaaagccctgggagggcggggtgtgcgtttcgtggctgaaggtggcaagaatccaccccacagagcaggctctgcagactgctcaccaggg

SEQ ID NO: 301556 - DNA, 201 bp, Homo sapiens
tgctcactcactgtcgtgtacttcccacaagcactttgcctggtgcatggtgggtacttgtagttgttgatgtggaaatctaggtgttagcatgatgcccrgacaagcctctcacctctttggccctctgcaaaactgttgactctgacccagaagaaagcccattcctccccaatgccaaacagtcaagtcacttccaca

SEQ ID NO: 301557 - DNA, 201 bp, Homo sapiens
actggtgtctccagccctgtctacctccttcctctgctgcctttgacacaaatagctcactccccccagagacacctgcaaggcacagtgcctttcactcygggctctcacccctccccactggtctccagtcccctggaagtgcatgctcctctgctggccctgtggatgcaggtgtcaccctgccagctgtcctgcacc

SEQ ID NO: 301558 - DNA, 201 bp, Homo sapiens
gcttaatgtaaatgatcaagtcctttaaaaatctccttttgtgccccctccccactgcccccctttcccggcctcctccccaccccactgtgttgtgcttkatgcctgagaatccttacagacaggcggacactgttctcctgcacggggaccttgtgatggggcagggaggggtcttttcagctgctgcccctctggtct

SEQ ID NO: 301559 - DNA, 201 bp, Homo sapiens
ggagtccatagggcccttcagtggctaggcaaggctcagagaaggacttcaggcaccagaggcaagagaccttgtggcttaatgtaaatgatcaagtcctktaaaaatctccttttgtgccccctccccactgcccccctttcccggcctcctccccaccccactgtgttgtgctttatgcctgagaatccttacagacag

SEQ ID NO: 301560 - DNA, 201 bp, Homo sapiens
tttcattcttatttaaagcatatagatcatggaagaatttcaaggtaccttgaaagttagaagtcaaaccctctacctggcggtatctataggcttagagrcttctaaaagatttggccaattcaaaatagtgtccttaagaaaacactacagaaatcatcagtgagaaaaaagcatcagaaatactttttaagagcctgg

SEQ ID NO: 301561 - DNA, 201 bp, Homo sapiens
ccaaattattttttaatttgaagggactaaataatttcaaaataatgttactgcttagctaagacattaaccctgaaacaaataacacaaaataatttcawtcttatttaaagcatatagatcatggaagaatttcaaggtaccttgaaagttagaagtcaaaccctctacctggcggtatctataggcttagagacttct

SEQ ID NO: 301562 - DNA, 201 bp, Homo sapiens
tatagtgaactagattactaaagagtgatttccctggattgcttgaaccagggctcagtgaaaatgttgctgtttgctttttttgtggtcaggattttttkattaaatgagaagcctacaaatatgcaagctagaaggtgttgtattttgggattaagccagactgtagcaggatgttagtaatttgagttgcataaacta

SEQ ID NO: 301563 - DNA, 201 bp, Homo sapiens
gcagaataccttccccctgcttttatttttctgaatagaagaatttcgaataaaatttgttactttaatctgccaaaaaacaagtcagtgccccaacgtgmtgatgttggaattgcatttaaaaagctgcttgcaagtatagcctgtgacaatactttaaaaataatcagttctcggaaaggggaggatattgcaaaggac

SEQ ID NO: 301564 - DNA, 201 bp, Homo sapiens
aagaaaagaccataggcagtgtaaattgtctatagattgctcctaagctatataaagatgatgtattttttgctctggaattacagagcaaaacactgacrtgctcattttctggaagagtggttgtttgttttgtttcgggttttttatataaacatgtcttaaaactataaaagagggaagttcatgttcttcatttct

SEQ ID NO: 301565 - DNA, 201 bp, Homo sapiens
gggccacactcatctaacaggtgagcttaagtttccattgatggcagacctatcagatgtttcctcccattctcactacttgtattctgtcattttgctcktatcctcccaaaatcatgctaagattttttttttttttttaagacagagtctcactctgtcccaggttggagtgcagtgatgccatctcggctcactgca

SEQ ID NO: 301566 - DNA, 201 bp, Homo sapiens
ggccgagttctggcacgatgatttgtggtccagtgtttggtgcgcaaaacaccatttctgcaaatgtcttctgtaggtcctcaaagtcaaagaactttgtstgtttgggaaatccaagcagaataccttccccctgcttttatttttctgaatagaagaatttcgaataaaatttgttactttaatctgccaaaaaacaag

SEQ ID NO: 301567 - DNA, 201 bp, Homo sapiens
tggccaggctggtcttgaactcttgacctcatgatccacctgccttggcctcccaaagtgcttagattacaggcgtgagccactgtgtccagcccacattwtttttcagtatgaaaatcttaagatatttttagtttgtaatttatttttcacaggggtctaaccatgtctcattaaatgacagcttgtttttatcatagt

SEQ ID NO: 301568 - DNA, 201 bp, Homo sapiens
attcttatagagttgcccaaagatggaatggacaccttccagagtggaggggagggagtaggattggacagtagtcctcaactgggagcacttcttccccstgaccccacacctgcctcccagggacgtttgacagttttggattgcacaaaactgaggggtgagagttgctgctatatctagtgagcagaagccagagat

SEQ ID NO: 301569 - DNA, 201 bp, Homo sapiens
attacagtgacgcagggaattaattaccatctgaatattaatttgaaagtgcctataaaagccgtatttgacaagtataggtggctctatattatagaaaygggaataacattatttttatttttattttttttgaagacagtgtcttgctctgtcgcccaggctagagtgcagtggtgcagtcttggctcactgcaacct

SEQ ID NO: 301570 - DNA, 201 bp, Homo sapiens
ctagaacattcttatagagttgcccaaagatggaatggacaccttccagagtggaggggagggagtaggattggacagtagtcctcaactgggagcacttyttccccctgaccccacacctgcctcccagggacgtttgacagttttggattgcacaaaactgaggggtgagagttgctgctatatctagtgagcagaagc

SEQ ID NO: 301571 - DNA, 201 bp, Homo sapiens
gtgccgtgggtgtgggtgggtggggatgcctgccctgcgtgctgtgggtataggtggggatgcctgccctgtgtgctgtgggtatgggtgggtggggatgyctgccctgtgtgctgtgggtatgggtgggtggggatgcctgccctgtgtgctgtgggtatgggtgggtggggatgcctgccctgcgtgctgtggtggttg

SEQ ID NO: 301572 - DNA, 201 bp, Homo sapiens
ttactagaacattcttatagagttgcccaaagatggaatggacaccttccagagtggaggggagggagtaggattggacagtagtcctcaactgggagcayttcttccccctgaccccacacctgcctcccagggacgtttgacagttttggattgcacaaaactgaggggtgagagttgctgctatatctagtgagcaga

SEQ ID NO: 301573 - DNA, 201 bp, Homo sapiens
ggggatgcctgccctgcatgctgtgggtatgggtgggtggggatgcctgccctgcgtgccgtgggtgtgggtgggtggggatgcctgccctgcgtgctgtrggtataggtggggatgcctgccctgtgtgctgtgggtatgggtgggtggggatgcctgccctgtgtgctgtgggtatgggtgggtggggatgcctgccct

SEQ ID NO: 301574 - DNA, 201 bp, Homo sapiens
agttaaagaaaaatgaacaccagattactagaacattcttatagagttgcccaaagatggaatggacaccttccagagtggaggggagggagtaggattgsacagtagtcctcaactgggagcacttcttccccctgaccccacacctgcctcccagggacgtttgacagttttggattgcacaaaactgaggggtgagag

SEQ ID NO: 301575 - DNA, 201 bp, Homo sapiens
atgcctgccctgcgtgccgtgggtgtgggtgggtggggatgcctgccctgcatgctgtgggtatgggtgggtggggatgcctgccctgcgtgccgtgggtrtgggtgggtggggatgcctgccctgcgtgctgtgggtataggtggggatgcctgccctgtgtgctgtgggtatgggtgggtggggatgcctgccctgtgt

SEQ ID NO: 301576 - DNA, 201 bp, Homo sapiens
ctgccttgcttgctgtggtgtgggtgggtggggatgcctgccctgcatgctgtggggatgcctgccctgcgtgctgtgggtataggtggggatgcctgccytgcgtgctgtggatatgggtgggtggggatgcctgccttgcatgctgtgggtgtaggtggggatgcctgccttgcgtgctgtggatatgggtgggtgggg

SEQ ID NO: 301577 - DNA, 201 bp, Homo sapiens
tggatatgggtgggtggggatgtctgccttgcttgctgtggtgtgggtgggtggggatgcctgccctgcatgctgtggggatgcctgccctgcgtgctgtrggtataggtggggatgcctgccttgcgtgctgtggatatgggtgggtggggatgcctgccttgcatgctgtgggtgtaggtggggatgcctgccttgcgt

SEQ ID NO: 301578 - DNA, 201 bp, Homo sapiens
cgtgctgtggatatgggtgggtggggatgtctgccttgcttgctgtggtgtgggtgggtggggatgcctgccctgcatgctgtggggatgcctgccctgcrtgctgtgggtataggtggggatgcctgccttgcgtgctgtggatatgggtgggtggggatgcctgccttgcatgctgtgggtgtaggtggggatgcctgc

SEQ ID NO: 301579 - DNA, 201 bp, Homo sapiens
ttcctcccctgcagctttaacctcccaggctcatatgatcctcccattccggcctcccaagtaattgggactacaggtacgcatgccactatgcccagctrattttttttttgtatttttagtaaagatggggttttgccatcttgcttctgctggtcgtgaactcctgggctcaagcaatcctcctgccttagcctccca

SEQ ID NO: 301580 - DNA, 201 bp, Homo sapiens
cagacatggggttactatctataacaaaaaacttacaaattgttaagaaaaccacagaggaaaaatggacaaagaatgttaatatagaatacacagataayaaatgcagacagctagctggcaaacctatgaaaaatagttcatttttgctagggaaatgcagattaaacaatgagacgttactttaaacccatcagattg

SEQ ID NO: 301581 - DNA, 201 bp, Homo sapiens
aaccggcgccattttatattttaaccatgacaagtagctgtatatcatggaactttggaaaacagagattgttccatttatttttcacagatgaaaaccaragtgctgtgtggggatcaggaagagggaaatcaaccaaatgccttattttagagattttttttttttttctgggaaattggaaacagcgcttgtttatag

SEQ ID NO: 301582 - DNA, 201 bp, Homo sapiens
agaaataataggcaaaaactggaaagagcacaagtaagagaagagaaatccgcagaagtgagaagtaacagaattgctggctgaggttggaggcatttaartgtgtgggtgtttgtgggaggcatggtggtctcctgttccttgacctcattgggcaaatattacagcacgaacatacaggtaggaatcaattgcatcccc

SEQ ID NO: 301583 - DNA, 201 bp, Homo sapiens
ccccttggttctagccacgctagactgtctgggttgtctgtatatgttctgatgtttgttttcctctgtgctgttcttctggcctcagaatcctagtgtcyttgtgcctccttctgcatatgtctggactttgcttagctgatgagatccagttcagataccaccttctgtacaatggcttccttaattcctttaatttct

SEQ ID NO: 301584 - DNA, 201 bp, Homo sapiens
ccccaccttcttacctacttgtatcttagatcttatatatattgatattcacttttggtggactaaggttgtctttgttgcaaacctggactctcttgtawtcttgctcagtgtgtgtatgttaatgttagataaagaagattaggctggtgcattggctcacgcctgtaatcccagcactttgggaggccaaggcgggca

SEQ ID NO: 301585 - DNA, 201 bp, Homo sapiens
cctgggcgacagagtgagaccctgtctccaaaaaaaaaaaaaaaaaaaagactaatgaatagaatttattttcttcaatgatgtagtgtctgtggaatttrtagacattgacatttgaattttcattatatttagttttattaaatcagaatgttatgattgtttatttcattattgaacatcagtttccttaatttaagg

SEQ ID NO: 301586 - DNA, 201 bp, Homo sapiens
ccacattctaacctagttacagtcagtggctggcattatgtcctttgagatgtggcagctagttgtgctatggttgcagtcaccactactttctgttgtcwtaggggtctttctacttgtttacatataattatccacttcataacaaacctttaaggctaacctttggcgtggatgccatatttctttcactttagtgtg

SEQ ID NO: 301587 - DNA, 201 bp, Homo sapiens
agggtcagaatcaggaccggagccccagatgcgctggtgtcactgatgtccccgtgccgggcatgagcccttctgtgcaaggagctccaatgtctcccggmcagtgatgatgtgaaaacatttagaaccgacctacacaataaggcagattttcattctgtacccaaaacaggaacacagatttaatgcagagcaaaaggg

SEQ ID NO: 301588 - DNA, 201 bp, Homo sapiens
tcagaagctcagaaagcttattctgttgctgacagtccttgcaagggtcagaatcaggaccggagccccagatgcgctggtgtcactgatgtccccgtgcygggcatgagcccttctgtgcaaggagctccaatgtctcccggccagtgatgatgtgaaaacatttagaaccgacctacacaataaggcagattttcattc

SEQ ID NO: 301589 - DNA, 201 bp, Homo sapiens
aggggaccctttctgtggcagctcagtgttcagcattcctgtaagttagcatgctctgtgtatagcagatatcactagtaatagcatttagtaagtgatgktcacacatgctgctgtcatgaacactatctcatgttgtgtaacactttcatttttccaagaactttataatcagccgacttgaaactcacagtcgtcccc

SEQ ID NO: 301590 - DNA, 201 bp, Homo sapiens
gaaggtaagcttccttgcaacttccctggtccggtgggtagagttttcttgtcccctttccagatgttaggttttaaacaatgactgttctttctccatcrtgtagaccaaaggccaagttctgtgtccccatgggagattaaaacccaagcccctatgtctaggtccagtgcccactgatttctctaattgtgagtcttt

SEQ ID NO: 301591 - DNA, 201 bp, Homo sapiens
caaagggtatctgcccggtgtggggactcgggctcaagccacaggcagtggggagctcccaggggatttcccagaggggagggatggggtcgaaatcgttmtttagagagatccttttggcagagctgtagaagatgtcttgaactggggttggggggtgagacaattcccagtgacgcccagagaacagttcagggaaaa

SEQ ID NO: 301592 - DNA, 201 bp, Homo sapiens
acttgaatcttctagattctatgctttttcgaaactgttatattgtgactgtgctgtttttactggaactatagttacttgatactgtcactgacataggratcatcaggagagattatatttttttctggctaaccagaaaagtttgtttttcctgtgaaatttttttttttgaaggcaataggtgtttaagatgttttt

SEQ ID NO: 301593 - DNA, 201 bp, Homo sapiens
cttttaaaaaaatatattgggttcagggtcaatatgcatcacaaactgctaacaggatttctttcttcatttaaaagttcacctagctagcaagaagcaarggttgatttttgttgttcgtggtcttttttgattcttgccagttcccaagatctatgattatgattcagtgatactatgacttacacggttgacttggga

SEQ ID NO: 301594 - DNA, 201 bp, Homo sapiens
tctaaggcatataataacatgtaggtttgactcccctactagtctgaagataatgttacagatttgcaagcaagccaagagtaagagacgggcagctcgtyggaaaatatagtaatggagttctttttttttatgtctttttacttattaccatggaacccctggctgtcctgccagtgttctcatttactatagcactgc

SEQ ID NO: 301595 - DNA, 201 bp, Homo sapiens
attttgctcaggccagacatagtggctcacatctgtaatcccagcacgttggaggccaaggctggtggatcacttgaggtcaggagtttgagaccagcccrgccaacatggtgaaaccctgtctctacaaaataattaaataaataaatgaaaaaaaaatcagctgggtgtggtggtggacatctgtaatcccagctactc

SEQ ID NO: 301596 - DNA, 201 bp, Homo sapiens
aagaaatagtggaaacaaataactgtttcactcttgagtgttagcatggaagagattctggttgaaatcctagtcctgccactttctggttacagaaactyacattacttttcttttgatgtttcaaggagataggagttaaagaaaaatgaacaccagattactagaacattcttatagagttgcccaaagatggaatgg

SEQ ID NO: 301597 - DNA, 201 bp, Homo sapiens; identical to SEQ ID NO: 62909

SEQ ID NO: 301598 - DNA, 201 bp, Homo sapiens
agccgaatcggtggctttttcagtgtagtatatgattcttttaaaagtcagttggtattttcctgctatataatctctatacctgtaattacactgaaacyggttcccgtatttctggctatttttgatgctgcagatggtttttcttccggttatgtccccatcgaattgtctagctagagttaactcagagtttaactt

SEQ ID NO: 301599 - DNA, 201 bp, Homo sapiens
taaacctggaggcagaggttgcagtgagccaagatcatgccactgcactctagcctgggcgacagagtgagaccctgtctccaaaaaaaaaaaaaaaaaaaagactaatgaatagaatttattttcttcaatgatgtagtgtctgtggaatttgtagacattgacatttgaattttcattatatttagttttattaaatca

SEQ ID NO: 301600 - DNA, 201 bp, Homo sapiens
tgtaactttcttcaaattaagccatcctgacccgtggtagagattagccactaagaaatagtggaaacaaataactgtttcactcttgagtgttagcatgraagagattctggttgaaatcctagtcctgccactttctggttacagaaacttacattacttttcttttgatgtttcaaggagataggagttaaagaaaaa

SEQ ID NO: 301601 - DNA, 201 bp, Homo sapiens
ttacatgaaaatgcccctgcagatgtgattaaatgaagggtcccggtatggggggttgtcctggatgagctgagtgggccctaaacgcagtcacaagtgtscttttaagcccctgctgtgcctgttctcttggtaaatatctctgtgtgctggaacatttgaccagagagagatttcggtgatcatatccatatttgactg

SEQ ID NO: 301602 - DNA, 201 bp, Homo sapiens
ctgagagccagatagtggtacccagcagtgagcatccaagcccttatctcccaaataggagactttgtaggctgaaaactggcccacagatttattaggtsctgacccctggaacttgtcaatgttgccttacatgaaaatgcccctgcagatgtgattaaatgaagggtcccggtatggggggttgtcctggatgagctg

SEQ ID NO: 301603 - DNA, 201 bp, Homo sapiens
agccttgcaagagcttcctggttgatctagggacaaggtgtctatcactcagccctccaggtcttttcttcctaaagcaggctttggagcaaagcctgacyggtctttgcctatgactgagtttcccagggctgctgtaccaaactactaccagttcaacttaaaacagcagacatttatcctctcacagttttggaggcc

SEQ ID NO: 301604 - DNA, 201 bp, Homo sapiens
atcctgagagccagatagtggtacccagcagtgagcatccaagcccttatctcccaaataggagactttgtaggctgaaaactggcccacagatttattakgtcctgacccctggaacttgtcaatgttgccttacatgaaaatgcccctgcagatgtgattaaatgaagggtcccggtatggggggttgtcctggatgag

SEQ ID NO: 301605 - DNA, 201 bp, Homo sapiens
aacagagtcagtcgtggacaaagaggaaaggacttttttcctcccctgcagctttaacctcccaggctcatatgatcctcccattccggcctcccaagtawttgggactacaggtacgcatgccactatgcccagctaattttttttttgtatttttagtaaagatggggttttgccatcttgcttctgctggtcgtgaac

SEQ ID NO: 301606 - DNA, 201 bp, Homo sapiens
tgagagcaactgaagcaagagaagctcttagtaattaggggaaggaagcctccacttgacaccgcatcaccaccaagtatttattgagtgtctttggtgtscaaggcaggagaatatcttctatggattctacatatttcagggttaccagagttataaaatcccttgaaatctatatgcacaaattgtaaatacgtatgc

SEQ ID NO: 301607 - DNA, 201 bp, Homo sapiens
tcgtgtttgatcctgagagccagatagtggtacccagcagtgagcatccaagcccttatctcccaaataggagactttgtaggctgaaaactggcccacasatttattaggtcctgacccctggaacttgtcaatgttgccttacatgaaaatgcccctgcagatgtgattaaatgaagggtcccggtatggggggttgtc

SEQ ID NO: 301608 - DNA, 201 bp, Homo sapiens
ctggagcctgggaagtcaagtctgcagtgagcaaagatctgtgcctctgcaccccaagctggacaacagagcaagaccctgtctccagaaaaaaaaaaaaaggctttcaacagagtcagtcgtggacaaagaggaaaggacttttttcctcccctgcagctttaacctcccaggctcatatgatcctcccattccggcctc

SEQ ID NO: 301609 - DNA, 201 bp, Homo sapiens
agattgtgatatatccacgcactggaatattgatttaaaaagggacgaagtactgatacctgctacaatgcggatgaacctgaaagataccatgctaagtraaagaagccagatacaaaggtcacatatgataaggttctatttatatgaacgatcttggtaaatctgtagagaaagaacacagatttgtggtttggtttc

SEQ ID NO: 301610 - DNA, 201 bp, Homo sapiens
ctctcacattaaactgtgtaacccacatacttgacttagggttaaaatgaatcactgtctactctccttaacatcaggacctcagggaacttgaatgccawtcttcccactcccatttgccacgtcattgttgggtggaattttaaaactaccttgctttaaactttcctaatagtcaaatagtcattaatatgttttatc

SEQ ID NO: 301611 - DNA, 201 bp, Homo sapiens
atctagttggcagagtcctatcccagtgttcgcacccccagtttcctgggtcttaagttcagattatcaagtgctcctcctgcaaaaaaaaaaaaaatggkgattcttgtggcccttagttgaccccgcacctgggatatgcttatatttggtgtggggcagagaactgagtgttcttgaaccacttccacccaaccagag

SEQ ID NO: 301612 - DNA, 201 bp, Homo sapiens
atgccggaggggacttaaaggaaacagtgagaagtattagaaaactgtagttgaccaggtatggtggcttatgcttataatcccagcactttgggagactsaggctggaggatcgcttgaacccaggagttcaagaccagcctggacaacatagctagaccccatctctacaaaaaataaaaaattagctggatgtggtag

SEQ ID NO: 301613 - DNA, 201 bp, Homo sapiens
actttgggaggcgaaaggattgcttgaggccaggagtttgagaccagcccgggcaacatagcttgatcccgtttcttaaaaaatggaagtgatatccaggyggggaaaccttcctgctgtagtggagcctcttgagatggcacacgtattttgctcacaggtgctatcaatatatagctctggttcttcagaatataaata

SEQ ID NO: 301614 - DNA, 201 bp, Homo sapiens
acgaatcctcctggccttagtgtgattattttattttatttattttattttattttattttattttattttattttattttattttattttattttattttattttatttatttgacagagtcttgctctgtcacccaggctggagcgcagtggcgcagtcttggctcgctgcaacctgcacctcccagattcaagcaatt

SEQ ID NO: 301615 - DNA, 201 bp, Homo sapiens
attatttttgtttaacttctaccctctttcctatttacagcctattttgtttattttaacttccgctgttaagacttctaaggccaggcatggtggctcaygcctgtaatcccagcactttgggaggccaaggcgggcggatcatgaggtcaggagatcaaggccatcctggctaacatggtgaaaccccgtctctactaa

SEQ ID NO: 301616 - DNA, 201 bp, Homo sapiens
ctaaaacgaatcctcctggccttagtgtgattattttattttatttattttattttattttattttattttattttattttattttattttattttattttattttattttatttatttgacagagtcttgctctgtcacccaggctggagcgcagtggcgcagtcttggctcgctgcaacctgcacctcccagattcaag

SEQ ID NO: 301617 - DNA, 201 bp, Homo sapiens
tctaaaacgaatcctcctggccttagtgtgattattttattttatttattttattttattttattttattttattttattttattttattttattttattttattttattttatttatttgacagagtcttgctctgtcacccaggctggagcgcagtggcgcagtcttggctcgctgcaacctgcacctcccagattcaa

SEQ ID NO: 301618 - DNA, 201 bp, Homo sapiens
atctaaaacgaatcctcctggccttagtgtgattattttattttatttattttattttattttattttattttattttattttattttattttattttattttattttattttatttatttgacagagtcttgctctgtcacccaggctggagcgcagtggcgcagtcttggctcgctgcaacctgcacctcccagattca

SEQ ID NO: 301619 - DNA, 201 bp, Homo sapiens
tatctaaaacgaatcctcctggccttagtgtgattattttattttatttattttattttattttattttattttattttattttattttattttattttattttattttattttatttatttgacagagtcttgctctgtcacccaggctggagcgcagtggcgcagtcttggctcgctgcaacctgcacctcccagattc

SEQ ID NO: 301620 - DNA, 201 bp, Homo sapiens
aagggcatttgtcatcactccagccctgggctctaaggggacgtgggttcccccacatctcccacctggtaccagtctcctgggggctcatttggaaggcmgcctcagtacattcttcctggttgctctagccaagaattgcccaattgatttgttgttactgagtcccatgagaaagcccactatgtacaatgtatccaa

SEQ ID NO: 301621 - DNA, 201 bp, Homo sapiens
atgagaactgtgtgaggtaggctgtgatttacagatgaggaatgaaagctcaaagaggttacgtgacctgcataaggacacaaaacaagttaagttatggrgccagctattttgaatagaaaggcctagtttttaacatgctgaatatcctccccttctgacaaatgccttgaaaggtcttactatctagattatttaaga

SEQ ID NO: 301622 - DNA, 201 bp, Homo sapiens
tttatctaaaacgaatcctcctggccttagtgtgattattttattttatttattttattttattttattttattttattttattttattttattttattttattttattttattttatttatttgacagagtcttgctctgtcacccaggctggagcgcagtggcgcagtcttggctcgctgcaacctgcacctcccagat

SEQ ID NO: 301623 - DNA, 201 bp, Homo sapiens
agtttaagatgctgtcacttttaagatgcgccatgagagcaaagtgctaagccttgtgcacatactatgtcatttagttctcatgagaactgtgtgaggtrggctgtgatttacagatgaggaatgaaagctcaaagaggttacgtgacctgcataaggacacaaaacaagttaagttatggagccagctattttgaatag

SEQ ID NO: 301624 - DNA, 201 bp, Homo sapiens
atagaaaactgtattcccagatggaaatgctttccgtattctatgcatttttattcaaaggcagatgcatttgtaaacctctttggatggttgttctgccyttgtcagttacttcatagcaaatgtcaactgtaaaccaagagagagaatgagccaggatggagaacttttttttgtttaattgtgtcatgttgggtgctt

SEQ ID NO: 301625 - DNA, 201 bp, Homo sapiens
ccattttttcctcccgaggattcaaagcccggcacctccggggtgggtggggagaggaaagcttaattgatctcttttattaataaagcgactgaataagycacgcctcccaggcggtcggtttcactggaaagggctttgtttttaccttcactctctcttccgtgtctcccactccccccttttgaaacaatcctgcta

SEQ ID NO: 301626 - DNA, 201 bp, Homo sapiens
tgatttttcttaccatgcaactctttcatgtactcctgaattgtacccaagaaagaatctgtacattgtattatcttgagcaaaatgagattaatcaaagrcaaatatgcatatctttgtatttctgtgtcagttctttatttctttagccgaatcggtggctttttcagtgtagtatatgattcttttaaaagtcagttg

SEQ ID NO: 301627 - DNA, 201 bp, Homo sapiens
tctgtgctgttaagattttgttaattgatcccgtctcacaaagtaatctcactaggagttataatcattttcaaataattttttcttttgtcagtttcttyttgcactttcattggcattacccaccttcttttgatttgtcgctttagtttttaccgttcacatcagatcagtattcacacatctgaggtacattttcat

SEQ ID NO: 301628 - DNA, 201 bp, Homo sapiens
aggatgcaacagatacatatgcacacgcatacagagaaggatacgtatgcacacgcgcacagagaaggatacatatgcacacgcacacagagaaggatacrtatgcacacgggaacagagaaggatgcacaagaacatacattccctagttgacggagtcgcagattagaaacaacagaaaagcgtccattaaacaacagt

SEQ ID NO: 301629 - DNA, 201 bp, Homo sapiens
tgggcgggtgggagtgggtgggcacaggctggtagctgtctttggtattggtgctgggactgccttttctcctgggaagctctagtttagacagttcaccrtgctggatggaaaggtattgctctgtgctgttaagattttgttaattgatcccgtctcacaaagtaatctcactaggagttataatcattttcaaataat

SEQ ID NO: 301630 - DNA, 201 bp, Homo sapiens
gcattcaagccctcctgggacagccctgatctccagcatctgtcccagtgcctccatacatcatcaacacatccttgtttttcagtgtttctccatccacrctgcatttcttagactgcttctcagggatcttcttgtgatcaaatgtggactgtctaaatacagtcactctatgcggggcaggtctctaaacccaaaaac

SEQ ID NO: 301631 - DNA, 201 bp, Homo sapiens
tcttagtgtaaattatagaaatatccctataaaagaaaaaataatttttttctgtatatgttttaagggaacctgaatttctttgggttgtaatgcatgawacagatagtattctgggaatacctgatgttcagcttatccctggaaccctggttatcttagtaaaatatgcagcaacaatatagaagacaatcctgaatt

SEQ ID NO: 301632 - DNA, 201 bp, Homo sapiens
taaaatcaaggagacttacatttacagtagatgaatctatgataatatgccctaccgttttgggtaatttaaatttatgctagttcactctgtctacatgmatgtcatatcttagtgtaaattatagaaatatccctataaaagaaaaaataatttttttctgtatatgttttaagggaacctgaatttctttgggttgta

SEQ ID NO: 301633 - DNA, 201 bp, Homo sapiens
agccctaaagactacaatactatcccttagtccacctaaatgatcctgaggctttggggcaattaaaaaatccttactcttaaaaaatgtcaggcagtaartcttgaagccagctgctggtgctacacaacatacccttgtcttgtgaggaatcccttttgaaaaggtaacttacctcgtcacttcattattgctcattgc

SEQ ID NO: 301634 - DNA, 201 bp, Homo sapiens
tagtaaactgctaagtttactgtatacgctgtgtacaaattagctcagattcaagatttttgctctaacaactgaacgctcagttgcatctttaaactttktgttgcgtgagaggggctgaggggcaggtgggaggaagtcagcctgcaggtgggaggtttctgtctcaggattgctgatacccctgcatgctgctgggtt

SEQ ID NO: 301635 - DNA, 201 bp, Homo sapiens
caccacatccagctaatttttttttttttattatagtagagatggggttttgctgtgttggccaggctggtctcaaacgcctggcctcaagtgatccgccyaccttggcctcccaaagtgctgggattacaggcatgatccaccatgcctggccgattatacttttttaatgtgttagttaagatgagagagtccaaagtg

SEQ ID NO: 301636 - DNA, 201 bp, Homo sapiens
cagtgacaagagtgccagatgagtcatgaatgttttcacaagtaaatttgatagtaaactgctaagtttactgtatacgctgtgtacaaattagctcagaytcaagatttttgctctaacaactgaacgctcagttgcatctttaaactttttgttgcgtgagaggggctgaggggcaggtgggaggaagtcagcctgcag

SEQ ID NO: 301637 - DNA, 201 bp, Homo sapiens
aatgaataaatgaccagtgatggttcagtgacaagagtgccagatgagtcatgaatgttttcacaagtaaatttgatagtaaactgctaagtttactgtayacgctgtgtacaaattagctcagattcaagatttttgctctaacaactgaacgctcagttgcatctttaaactttttgttgcgtgagaggggctgagggg

SEQ ID NO: 301638 - DNA, 201 bp, Homo sapiens
gtcaatctgcatattactttaactagatcacttgtaaaaataaatgaataaatgaccagtgatggttcagtgacaagagtgccagatgagtcatgaatgtkttcacaagtaaatttgatagtaaactgctaagtttactgtatacgctgtgtacaaattagctcagattcaagatttttgctctaacaactgaacgctcag

SEQ ID NO: 301639 - DNA, 201 bp, Homo sapiens
aatttaagtgtttctactgcagtaccacaaagtcaatctgcatattactttaactagatcacttgtaaaaataaatgaataaatgaccagtgatggttcastgacaagagtgccagatgagtcatgaatgttttcacaagtaaatttgatagtaaactgctaagtttactgtatacgctgtgtacaaattagctcagattc

SEQ ID NO: 301640 - DNA, 201 bp, Homo sapiens
ttatcatgttcagtgttcgacattttattctgagaatttaagtgtttctactgcagtaccacaaagtcaatctgcatattactttaactagatcacttgtraaaataaatgaataaatgaccagtgatggttcagtgacaagagtgccagatgagtcatgaatgttttcacaagtaaatttgatagtaaactgctaagttt

SEQ ID NO: 301641 - DNA, 201 bp, Homo sapiens
aagtgctgggattacaggcacgagccaatgcacctggccacacctgtgatttattttatttcatttgagatttcagactttgtcgcttgttctttctgtaraagttttttcatagaagtatgttgtttcaaaagcaaccttcaaatagtagacttagcttggatgagaatctaaaagtctttgagtccaacaaccaagcag

SEQ ID NO: 301642 - DNA, 201 bp, Homo sapiens
tttgttccagttagtaaatatcacgacaaggtatcatcgtcatcccatgttctcagtatagattcagcttcatttcttacaccacacacccagaggcatawatggaagtacacagacaaaaggaaaggcctgagtttaaatgtagttatcatgttcagtgttcgacattttattctgagaatttaagtgtttctactgcag

SEQ ID NO: 301643 - DNA, 201 bp, Homo sapiens
cccacctgctcaggaggctgaggcagagaatcagggggcggaggttgcagtgagccaaggtcatgccactgcactccagcctgagtgacagagtgagactstgtctcaacaacaacaacaacaacaacaaagagcagagtggtattatttcctcactggaacattaaatggttcctactaccaaagagttcctgttctaat

SEQ ID NO: 301644 - DNA, 201 bp, Homo sapiens
ggttcatatttgttccagttagtaaatatcacgacaaggtatcatcgtcatcccatgttctcagtatagattcagcttcatttcttacaccacacacccasaggcataaatggaagtacacagacaaaaggaaaggcctgagtttaaatgtagttatcatgttcagtgttcgacattttattctgagaatttaagtgtttc

SEQ ID NO: 301645 - DNA, 201 bp, Homo sapiens
aatggtacaggaaatgattgtaatccaggactaaatatacagtttgcagtctttttattctaattgctttctgatgaatatatatatatatatatatattyttttttttttttttttttcttgagatggagtcttgctcttgtcgcccagactggagtgcaatggcatgatctcagctcacttcaacccctgcctcccggg

SEQ ID NO: 301646 - DNA, 201 bp, Homo sapiens
gcattacaggtagatactgcaaacttgcttcaaaaaaactaaaaagttcaaataactaatggttcatatttgttccagttagtaaatatcacgacaaggtrtcatcgtcatcccatgttctcagtatagattcagcttcatttcttacaccacacacccagaggcataaatggaagtacacagacaaaaggaaaggcctga

SEQ ID NO: 301647 - DNA, 201 bp, Homo sapiens
acaaaccaaaataaaaataaaaagtaaaaactaaaatgacaacatgaaatgaatttttaagagccaaatgagacctttagagacaatctcatcactgcctrcctggtttccgtcaaatacagatttatgctccagaaagtacctaatttattaaaataagctgatttctaaaagcttgttagatggtcagtaatctcaaac

SEQ ID NO: 301648 - DNA, 201 bp, Homo sapiens
tgttttgaaccttgaatgttcactatgcgacgttctttgcattacaggtagatactgcaaacttgcttcaaaaaaactaaaaagttcaaataactaatggktcatatttgttccagttagtaaatatcacgacaaggtatcatcgtcatcccatgttctcagtatagattcagcttcatttcttacaccacacacccagag

SEQ ID NO: 301649 - DNA, 201 bp, Homo sapiens
ccagatgactccagacaaaccaaaataaaaataaaaagtaaaaactaaaatgacaacatgaaatgaatttttaagagccaaatgagacctttagagacaatctcatcactgcctacctggtttccgtcaaatacagatttatgctccagaaagtacctaatttattaaaataagctgatttctaaaagcttgttagatggt

SEQ ID NO: 301650 - DNA, 201 bp, Homo sapiens
gagcatcctgtaatgcaccggacagccccacaggatggggagttatctggaccaaaatgccaatagtgctgaggctgagaaacgtatttttttttttttttgcctaaaagaaaattgcttgctccagatgactccagacaaaccaaaataaaaataaaaagtaaaaactaaaatgacaacatgaaatgaatttttaagagc

SEQ ID NO: 301651 - DNA, 201 bp, Homo sapiens
tcaaccaggggcagttttgtgcctcgagagacattggacaatgtctgggatggtttggttatcacaccagggggcatctagtgatgagagatcagggatgstgccgagcatcctgtaatgcaccggacagccccacaggatggggagttatctggaccaaaatgccaatagtgctgaggctgagaaacgtatttttttttt

SEQ ID NO: 301652 - DNA, 201 bp, Homo sapiens
gtatctgtagttacagttgacatgatcttgtatatagaaaatcctaaggcgcgcgcgcgcgcgcacacacacacacacacacacacacacacacacacaaatcttgaactaataattgagtttacaagcttgtacatacaagaacattgaagcatccagaaatgaaattaataaaacaattccatgatacagtagtatcaa

SEQ ID NO: 301653 - DNA, 201 bp, Homo sapiens
aaagtatctgtagttacagttgacatgatcttgtatatagaaaatcctaaggcgcgcgcgcgcgcgcacacacacacacacacacacacacacacacacacaaatcttgaactaataattgagtttacaagcttgtacatacaagaacattgaagcatccagaaatgaaattaataaaacaattccatgatacagtagtat

SEQ ID NO: 301654 - DNA, 201 bp, Homo sapiens
cagcactgttcacaatagtggaaaggtagaaacagcccagttatccatcagtgggtgaatagattaacaaatggatgaatagattaaaaaacagattgtgrtatatccacgcactggaatattgatttaaaaagggacgaagtactgatacctgctacaatgcggatgaacctgaaagataccatgctaagtgaaagaagc

SEQ ID NO: 301655 - DNA, 201 bp, Homo sapiens
acagaactttaaacagaagaaaccccctctgccttgggctgcaacttgttgtccctggcagggtttgggctgtggggtcatgggatctgtttgtttgaccrttgtatgcaaaaatgattttaaaattggcctccctaatctgttggagacattagttaaaaaaaaaatgagagtaaagaggaaaatattttgctattgggt

SEQ ID NO: 301656 - DNA, 201 bp, Homo sapiens
cagattgtgatatatccacgcactggaatattgatttaaaaagggacgaagtactgatacctgctacaatgcggatgaacctgaaagataccatgctaagygaaagaagccagatacaaaggtcacatatgataaggttctatttatatgaacgatcttggtaaatctgtagagaaagaacacagatttgtggtttggttt

SEQ ID NO: 301657 - DNA, 201 bp, Homo sapiens
cgttgttgcagggaggattctgagatgcgtcttctacaatagaaaaagatgtgctgggcttgctgtgaaaaagcagaggaagttagaggtgggatattagyggtgaagttggtagaacctcagctgcttctagggaagagggaaggtaaagtcagcaggtattagggaccaggggaagcctgtaacttataaggtatggta

SEQ ID NO: 301658 - DNA, 201 bp, Homo sapiens
gagtgcagtggtgcagtctcagctcactgccacctctgcctcccaggttcaagtgattctcctgcctcagcctcccaagtagccgggattataggcatgtsccaccacatccagctaatttttttttttttattatagtagagatggggttttgctgtgttggccaggctggtctcaaacgcctggcctcaagtgatccgc

SEQ ID NO: 301659 - DNA, 201 bp, Homo sapiens
acttttatgggtgttgcattccatgtgaacaacaggagacatttaattgcttgaaaagttcattgatctaattcttgtaataaatcattgttcacatttcstggaaccatggtacctagggtggatacatccaaatcccagttgcctctgcttacccggcataggacttgtgtgaacttactaaatccaagagacagctga

SEQ ID NO: 301660 - DNA, 201 bp, Homo sapiens
gagcagtatttatctatagaacagatatcaaagattgggtaaatcatggcttaaaactctcagaaaagcattctaggttcttgcacatctttgcaaggctrctgaatggctcatttttatttcccaccctgcattcagagtggtgtttaaatggctcaccgcagcaaaaaggattaggtattacccttgtgctcaacacaa

SEQ ID NO: 301661 - DNA, 201 bp, Homo sapiens
ctgttccgggagtttccctgcttcaggccagtggatctgaatgtttggccgagttctggcacgatgatttgtggtccagtgtttggtgcgcaaaacaccayttctgcaaatgtcttctgtaggtcctcaaagtcaaagaactttgtctgtttgggaaatccaagcagaataccttccccctgcttttatttttctgaatag

SEQ ID NO: 301662 - DNA, 201 bp, Homo sapiens
ctgttgatttttttcatctccctgaactgatctattaaaggaaatagattgataaatatcattttgactaaaaatatctatcgctgttggtgaagtgatgrtttttttttacatacaatttttaagagctgtctttaagaggcttatgcatgtgcagatgcatgaacacacatgtacagtcttccttcctagaacatgctt

SEQ ID NO: 301663 - DNA, 201 bp, Homo sapiens
tgcttgcaacattgctgaatgaaacccatttttactttccagttgcgcctgtttacccagatacttgttattgactaatttactgatttaaaatcataatstgttagaacaacgttttgttgctgctgctagtgtgggaaatcctcaaggtaacaactggaaattccacaagctactccccttcttaagcgaattcagatg

SEQ ID NO: 301664 - DNA, 201 bp, Homo sapiens
tttggggcagggacatttgtgccttcagttgcagactatttaacaaacttggcttctgctaccaggtgctaatggtcaccattacccccaccccaacataktgatgaccagaaatgccctacacatttcaaaacagccctaagtgagaaccactctaagagctctttctattttgaagtaagggaatggcctgccaagaga

SEQ ID NO: 301665 - DNA, 201 bp, Homo sapiens
gttattggccctagctcttcggtcttggaccaacaataaacatacaccattaattcccatttctagtgatggacattaagtgtgtccatttgatagaccascagccttatattcaagaacaagccctgctcaaggggatttgggctgtcattttatgccttgcccattgtgtggtatcagttcagtccagcaggtctagag

SEQ ID NO: 301666 - DNA, 201 bp, Homo sapiens
atttagtagctagaacagatgataatgtttttccctttccctgtgatcaccttggcagcaaccctttacgtttgagactacggggtcttagaaccaagttstgtaagaatttggactctgcaactgtatggggttcatttcacagtagatttgaagctgttggaaatctattgctgttttccagacacttgtaagtgtttt

SEQ ID NO: 301667 - DNA, 201 bp, Homo sapiens
gttattcctaaggcatgggctcctcctatacctttagattcccctaggagccgtggtatagctgtggtcggcttctggtttctgagcttttccccacttakagctctttcacaggcacagatattacatgcatcgcctatgcattcaagccctcctgggacagccctgatctccagcatctgtcccagtgcctccatacat

SEQ ID NO: 301668 - DNA, 201 bp, Homo sapiens
gagatagaagacgtctcctaagtcccagagtatgaacccttgagaaatgttgtgaaattgtgacactgtcatcaaggtagcattttaacttgggctctcamccatcagaaacatactttctagaagcttcagatgggcccaatgcctgagcccaatggaatcagtcacaaagacttccatgtttgacaatacaaaactgtg

SEQ ID NO: 301669 - DNA, 201 bp, Homo sapiens
tatgaaaatcttaagatatttttagtttgtaatttatttttcacaggggtctaaccatgtctcattaaatgacagcttgtttttatcatagttgagctgtkgaatgagccctgtaacttgtttgggtatcatatgcatatttttattgagtcgctttgacacttggaagagatttattaccatgaaaatataaatttaggt

SEQ ID NO: 301670 - DNA, 201 bp, Homo sapiens
ggagaatggcgtgaacgcaggaggtggagcttgcagggagccgagatggcaccactgcactccagcctgggcgacagagcgagactccatctcaaaaaaaraaaagaaaagaaaagaaagtgttctcctaagtgctgctcaccctttttcccaaacaggacctaaccctgcgagggagggtgaattaggccatttgtttac

SEQ ID NO: 301671 - DNA, 201 bp, Homo sapiens
tgttagtgggaactcagtattagcaagaagagaaataagggactatgctagcaaaatgaataatctgtctttattatactgtcacaggtggttatcaagayacagtttttgtgagacaaaaagctttgtggggctggagttgcttttgatggtggtggcagagggagagttatacgaatagaagtaacttctggtagtgtc

SEQ ID NO: 301672 - DNA, 201 bp, Homo sapiens
atggtggctcacgcctgtaatcccagcactttgggaggccaaggcgggcggatcatgaggtcaggagatcaaggccatcctggctaacatggtgaaacccygtctctactaaaaatagagaaaattagccaggcgtggtggcgggtgcctgtagtcccagctactcaggaggctgaggcaggagaatggcgagaacctggg

SEQ ID NO: 301673 - DNA, 201 bp, Homo sapiens
ctcctcaggtataagctcttggaggacagcctgctgcttaaggtacaggagaattcatctttgctggacatggtaacgtatgcatagagatctggcaacasaacttaagatatgtgggagaaataataggcaaaaactggaaagagcacaagtaagagaagagaaatccgcagaagtgagaagtaacagaattgctggctg

SEQ ID NO: 301674 - DNA, 201 bp, Homo sapiens
tgtaacctcaaactcctgagctcaagcagtcctcctgcctcagcctccccagtagctgggagtacaggcacactaccatgcccagctaatttttaaaaatytttatagaggtgttgtcttgctgtgttgcccaggtgggtctcaaactcctgacctcaagtgaccctcccgccttggcctctcaaagtgctggaattacag

SEQ ID NO: 301675 - DNA, 201 bp, Homo sapiens
cccagcccaagaggacagaacactgctgcccgcctcatcaccccagcccaagaggacagaacactgctgcccgcctcatcaccccagcccaaggggacagracactgctgcccgcctcatcaccccagcccaagaggacagaacactgctgcccacctcatcaccccagcccaaggggacagaacactgctgctcctgggg

SEQ ID NO: 301676 - DNA, 201 bp, Homo sapiens
cgataaagagaactctgagatctgtattaacagagtgagatttctggcaggtgtctgcctgttgcaccttcctcttgacttgtcagctctgtctccccttyccctggagccctcagtaacccacctttgcccagccacaaaatctcttcgtccctgggaaaggcagtggggcagagagagctattttaaaacattaagttt

SEQ ID NO: 301677 - DNA, 201 bp, Homo sapiens
tcatcaccccagcccaagaggacagaacactgctgcccgcctcatcaccccagcccaagaggacagaacactgctgcccgcctcatcaccccagcccaagrggacaggacactgctgcccgcctcatcaccccagcccaagaggacagaacactgctgcccacctcatcaccccagcccaaggggacagaacactgctgct

SEQ ID NO: 301678 - DNA, 201 bp, Homo sapiens; identical to SEQ ID NO: 62926

SEQ ID NO: 301679 - DNA, 201 bp, Homo sapiens; identical to SEQ ID NO: 62927

SEQ ID NO: 301680 - DNA, 201 bp, Homo sapiens; identical to SEQ ID NO: 62928

SEQ ID NO: 301681 - DNA, 201 bp, Homo sapiens; identical to SEQ ID NO: 62930

SEQ ID NO: 301682 - DNA, 201 bp, Homo sapiens
ttgtgttctggaatcgcttatcagcctggactccttcagcagcagctgccacagtgtctttgtagtcacactacacacctatatactccatgacatggagygtatagaatgtttcccgtcttcctcgtcagtgctgccaggagaagcttcccctctcctaacctctggatagtggctggctctgctttattcaggcattgc

SEQ ID NO: 301683 - DNA, 201 bp, Homo sapiens
atgactctttccaggcctttgatgtttttccttctggtgatagaagcagtttaaggtttcatacctatgaagcatctgtttcataaatacattccctcccsctccagtttggtttgtacgctagtctcaaataatcgactaaatgcttctcttagctttttttaatcaaaaaaatgtttaagcaaatatgtagactgtatt

SEQ ID NO: 301684 - DNA, 201 bp, Homo sapiens
gactccaatggggaacagttcagctctttgattgtaagtagtggccttgtttgaaagaaaagctgagcaatgttttattgttttttgttgcttaaggagartctcttacgtaaatagtgaccaagggtcttccagctcccagctaactctgacattttccaaagttcctccttccctaggagaagcaggactgtactaaaa

SEQ ID NO: 301685 - DNA, 201 bp, Homo sapiens
aggagaatctcttacgtaaatagtgaccaagggtcttccagctcccagctaactctgacattttccaaagttcctccttccctaggagaagcaggactgtrctaaaattagcccaagcaggtgagaatctttcttgatttggaaggcagctttgctcacccttataccactaacactttcttggtttataaagaactcaaa

SEQ ID NO: 301686 - DNA, 201 bp, Homo sapiens
catgcctgactaatcttttgtatttttagtagagatgggctttcaccatattggccagcctggtcttgaactcctgacctcaggtgatccacctgcctcaracttccaaagagctgggattacaggcgtgaaccacgatgcctggccgtatttcataattctatctttccatagaaagaattggctggggcacgtataact

SEQ ID NO: 301687 - DNA, 201 bp, Homo sapiens
aggagcagtaggtgcccccactccggctttccacccccaccggcctgaggctagcgcaactccggcttactggaaggtggaagaaggtaactacctgctakatgcctgggcttttccttactcctgatcagttctgcagttactccagcactctgcccaaacatttcctcatttcacttgactagagcagcacccccgagg

SEQ ID NO: 301688 - DNA, 201 bp, Homo sapiens
tgacctcatgatccacctgccttggcctcccaaagtgcttagattacaggcgtgagccactgtgtccagcccacattatttttcagtatgaaaatcttaaratatttttagtttgtaatttatttttcacaggggtctaaccatgtctcattaaatgacagcttgtttttatcatagttgagctgttgaatgagccctgta

SEQ ID NO: 301689 - DNA, 201 bp, Homo sapiens
ttactagacctgttcatcgtgactaaactgagtttctcatccttccacttccttcttgtccttttattggaaatatatctcaaagaggaaaagcaagtttwaaagccaaagttctttaaaaaaaaaaaaaaaggataactggctaccccatactttcatacattgaccatacttcactgaagaattctttatcataaccat

SEQ ID NO: 301690 - DNA, 201 bp, Homo sapiens
acctgttcatcgtgactaaactgagtttctcatccttccacttccttcttgtccttttattggaaatatatctcaaagaggaaaagcaagtttaaaagccmaagttctttaaaaaaaaaaaaaaaggataactggctaccccatactttcatacattgaccatacttcactgaagaattctttatcataaccatgtagaaa

SEQ ID NO: 301691 - DNA, 201 bp, Homo sapiens
ggctgacttgagaggttatctcctgatgttattaggatttttaaagtagggtaaaggaggtaaatgcagtgtcacgattttgagattctgttaaaatgagmtagaaagcagctgaaaaaaattcatgttggatcaggtgtactttcctccagatgacagctttgaatttgtcccttttgtagtctttggtcaaattgctgg

SEQ ID NO: 301692 - DNA, 201 bp, Homo sapiens
ttcttcagaccccggctgacttgagaggttatctcctgatgttattaggatttttaaagtagggtaaaggaggtaaatgcagtgtcacgattttgagattstgttaaaatgagctagaaagcagctgaaaaaaattcatgttggatcaggtgtactttcctccagatgacagctttgaatttgtcccttttgtagtctttg

SEQ ID NO: 301693 - DNA, 201 bp, Homo sapiens
ccgtggttttccctcttcactctcttgcatgttctctgctgctcctagattgctcatgcccactggtgatcctgtaggctttgtcatactgtttgatttcmtatgtttaaactgtcctttctccctgttctctacctctcaaagccttcccatcaccctgtattgtattgaactccacatccaaaaccattttgatttcca

SEQ ID NO: 301694 - DNA, 201 bp, Homo sapiens
tcaatgaacgtgaactttgattttaatgccctacctgttactgcttggcattgagttggcagtactgacaaatgatatgaacgtgtagaattggccaatgmacatggctagtgtttgttgagtgtgccaggtgcccttgagaactttatagaaaccaactcagttgattggtttgatcctcacaacagccctgtaagttat

SEQ ID NO: 301695 - DNA, 201 bp, Homo sapiens
agagaactctgagatctgtattaacagagtgagatttctggcaggtgtctgcctgttgcaccttcctcttgacttgtcagctctgtctccccttcccctgkagccctcagtaacccacctttgcccagccacaaaatctcttcgtccctgggaaaggcagtggggcagagagagctattttaaaacattaagttttcctaa

SEQ ID NO: 301696 - DNA, 201 bp, Homo sapiens
ctccactcagctctgctccagggaacaggatcagattggaacctggatgaatgccaagaagaatcttgtagttatctataagatcatcttctaattcaggmtagagaatttcaatgaacgtgaactttgattttaatgccctacctgttactgcttggcattgagttggcagtactgacaaatgatatgaacgtgtagaat

SEQ ID NO: 301697 - DNA, 201 bp, Homo sapiens
tccctctcatgagtgcagaattcaaaatcatggagtttggagggacttcagagacactgattcactcccagtattttccaggtgaaaaagcctgggcccasagagggaggggacttgcccagcaataagcaggtcattggtggtgctggatctgaccctggctctccagcatcattgtgagcctgtgatgtggtcaagggt

SEQ ID NO: 301698 - DNA, 201 bp, Homo sapiens
ttactgccccattttatagatgaggacactgaggccaagagagataaggaacttgcccttagccacttggctctgtaagtaacaaagccaggatgcaaacmtaggagatctgccttttgacctgtgtgatatcagtcatttaagctgcatagggtatggacagactcaggttcagagtccctctaagctccgtggttttcc

SEQ ID NO: 301699 - DNA, 201 bp, Homo sapiens
gagcagctaacccctgatgcttctgtaagcactttgggacgccctttgctatagtagggtattgtcttagttatccctgacttgcctggtgttactttacrtcccttaatcctttcatgaagactggcaaacacattcagtcctgccaaccttgaaagtaggccatgtttgaaagaacattggcacaaacgagttgcgaac

SEQ ID NO: 301700 - DNA, 201 bp, Homo sapiens
aacctgggaggcagaggttgcagtgagctgagatcccgccactgcactccaccttgggtgatagagtaagactctgtctcaaaaaaaagaaaaaaaaaaaagaaatggggtgttgctatgttgcccaggctagagtgcagtagctttccacaggcttgatcgtagcgcactgcagccttgagctcctggactcaagtgatc

SEQ ID NO: 301701 - DNA, 201 bp, Homo sapiens
cttgaacctgggaggcagaggttgcagtgagctgagatcccgccactgcactccaccttgggtgatagagtaagactctgtctcaaaaaaaagaaaaaaaraaaagaaatggggtgttgctatgttgcccaggctagagtgcagtagctttccacaggcttgatcgtagcgcactgcagccttgagctcctggactcaagt

SEQ ID NO: 301702 - DNA, 201 bp, Homo sapiens
gctccagtgtcttttcgccaaagaagcctttcctgatctctcagccataaatgttcctctccccagttgctttttccctctccctctactcagttgctttrtttaactgtcatattgtctttggagcacttgccaccatcagaaattatcttgcattatgtatttatagtctgtcttccgcctactagatggtgggttgct

SEQ ID NO: 301703 - DNA, 201 bp, Homo sapiens
aatcaagcctggatggtgtcgttaacggtgaagttaaaatttttcttttgctttccttaatatttccgtgtttttttctttttctttttttttttttttttaacaaaagtctggtttctaaaccaaaatatttaatgcttcaaaaggaaaaaaatgtaagtcagtccaaagaaatgattcattttgcagaggtaattacta

SEQ ID NO: 301704 - DNA, 201 bp, Homo sapiens
catagcttcatgaactgaacctcagcagaaggttgatcggtgctgcttcctggggtgatctctgtgcaggagatagtctttcaattctcttaggctgatgwtgtgagattttaatacaaaaaacaaagtttccctcaaagattaaatcttgtatattcttctgtttactccacccatatgtgtctcgagtcacaggcatat

SEQ ID NO: 301705 - DNA, 201 bp, Homo sapiens
aaatcaagcctggatggtgtcgttaacggtgaagttaaaatttttcttttgctttccttaatatttccgtgtttttttctttttctttttttttttttttttaacaaaagtctggtttctaaaccaaaatatttaatgcttcaaaaggaaaaaaatgtaagtcagtccaaagaaatgattcattttgcagaggtaattact

SEQ ID NO: 301706 - DNA, 201 bp, Homo sapiens
aaaatcaagcctggatggtgtcgttaacggtgaagttaaaatttttcttttgctttccttaatatttccgtgtttttttctttttctttttttttttttttttaacaaaagtctggtttctaaaccaaaatatttaatgcttcaaaaggaaaaaaatgtaagtcagtccaaagaaatgattcattttgcagaggtaattac

SEQ ID NO: 301707 - DNA, 201 bp, Homo sapiens
ccgtacccggcaggtttgtttttcttatgacaaaatcaagcctggatggtgtcgttaacggtgaagttaaaatttttcttttgctttccttaatatttccrtgtttttttctttttctttttttttttttttttaacaaaagtctggtttctaaaccaaaatatttaatgcttcaaaaggaaaaaaatgtaagtcagtcca

SEQ ID NO: 301708 - DNA, 201 bp, Homo sapiens
tggggccactgcatctgataatttggttacacaccttgtcatgtgcttcctaaaagaatgacgatggttgcttatctgtgtttaagcttgtcattttgagraaacaaagataagacatttttgctgtgtctctaaaatgcatgtgtaaactatttttatagagtaatgcttcagagaggagtaaaatttcctgcaacaggt

SEQ ID NO: 301709 - DNA, 201 bp, Homo sapiens
ctttaccctagctgattgacagtatccagtgatagtgataataagggtaattactactctagccaattttatcaaacctatggatgtttaaggaattgggktttttttttttctcctttgatgaatactcctgtaaatacatcgttgcctgcttgtctgagtctttctgtgggtttttagaagtggattacttgcagcaaa

SEQ ID NO: 301710 - DNA, 201 bp, Homo sapiens
ctctgctttattcaggcattgctttcattttttagaacagctgctccagtatgcttagtgtgaatgacagcccagcagaaagaatggacttgacactggasactgcaccactccacatttctttgtcccctcaagatgacttaactagctcccttcccttttccttcatgcaatagcctcagaagttcggctggcattgcc

SEQ ID NO: 301711 - DNA, 201 bp, Homo sapiens
ttgggttcatgcacccccagtcagtataactgtggacctcatacccactttggcacaggcttggagtatggatttattacaggtctgtttctttttgtttytctcccatttatggtcctggacagaaggtaagcttccttgcaacttccctggtccggtgggtagagttttcttgtcccctttccagatgttaggttttaa

SEQ ID NO: 301712 - DNA, 201 bp, Homo sapiens
tttctcatttacattgaaagcaggttaatcttttctttcatgctctgatacatagcagtgtcaaagacctgaaactaaacccagtgtttaccgtgttttargtttcttcattagaccattttacaagatgatgttgggaaagcagataaccctgaatgacatggaatctgtggtaagtaaatgcacgtcacacactggcca

SEQ ID NO: 301713 - DNA, 201 bp, Homo sapiens
tatcattttgactaaaaatatctatcgctgttggtgaagtgatggtttttttttacatacaatttttaagagctgtctttaagaggcttatgcatgtgcasatgcatgaacacacatgtacagtcttccttcctagaacatgcttcctcttagttttgggggatatctggcagtcctttcttccatgctgaggacaaaggt

SEQ ID NO: 301714 - DNA, 201 bp, Homo sapiens
tttttcttcttgacgggctgtaacacaactttgctggaccatcagaaacaaccagcaggagctgcaggtgttaattttcatctcattgtagcagcaccttyttgtcatgccaagacgccacactccaattacaaccatttctctcttccagcaaagttacagaaattccaagaggccttggggcatgaaccagcacctctt

SEQ ID NO: 301715 - DNA, 201 bp, Homo sapiens
catcctcctctccttgccgtgttgtgactggttcttcgttcgttttgtgctctcctgtcttgttgctttcctcgcctgtcatttcccatgtgcatttccgygaagctgccctccgggactgcagccagaggcaggccaggcctgctgctccactcccctcccctcgttcattaccatccttggcttcattcacatgggaga

SEQ ID NO: 301716 - DNA, 201 bp, Homo sapiens
ccctccttctcctgctgcccgcctcctggttcgtatgcctctgctgcgttcgggtgcgagaactgccgtcatcctcctctccttgccgtgttgtgactggktcttcgttcgttttgtgctctcctgtcttgttgctttcctcgcctgtcatttcccatgtgcatttccgtgaagctgccctccgggactgcagccagaggc

SEQ ID NO: 301717 - DNA, 201 bp, Homo sapiens
tgttgtcatggcgacatttgtcttgtgaggctcagcatggcaggctccggtttttctaccattccctctgctttgcccccacgctgttattcaggctggaytaatcctcaaagtcagtttcagactggtcagcagggatttggatgggccactgaaagtggatttcaaaggtaaagttgcctgcttggaataattctcatc

SEQ ID NO: 301718 - DNA, 201 bp, Homo sapiens
atcctcacaacagccctgtaagttatggttactgccccattttatagatgaggacactgaggccaagagagataaggaacttgcccttagccacttggctstgtaagtaacaaagccaggatgcaaacctaggagatctgccttttgacctgtgtgatatcagtcatttaagctgcatagggtatggacagactcaggttc

SEQ ID NO: 301719 - DNA, 201 bp, Homo sapiens
cttggttgcctgctggatgtggagccaggaccaaagccggcgactggggctattgcaatggatttccttccaaagggaggtcctccttctccctccctttycacggtcgagggagtagctctgtagctgggtttgccctccttctcctgctgcccgcctcctggttcgtatgcctctgctgcgttcgggtgcgagaactgc

SEQ ID NO: 301720 - DNA, 201 bp, Homo sapiens
agaggtatttcccatccttcagactaaatctccacggctatgaaattaattagaccatagaactcattgtaatggttgccctctgaaaaatgaaatagacrtgttctttattgctagatgtcaaagattgctagagaatctttgagaaaagaagctgatgccactagaggatttaatgacaactgagggtaaaaattgttg

SEQ ID NO: 301721 - DNA, 201 bp, Homo sapiens
acgtgaactttgattttaatgccctacctgttactgcttggcattgagttggcagtactgacaaatgatatgaacgtgtagaattggccaatgaacatggmtagtgtttgttgagtgtgccaggtgcccttgagaactttatagaaaccaactcagttgattggtttgatcctcacaacagccctgtaagttatggttact

SEQ ID NO: 301722 - DNA, 201 bp, Homo sapiens
aaatggcttttggaatccaccctgcctacagtatcccatattttcatcaggtttcagaaattactccactacttgaatcttctagattctatgctttttcraaactgttatattgtgactgtgctgtttttactggaactatagttacttgatactgtcactgacataggaatcatcaggagagattatatttttttctgg

SEQ ID NO: 301723 - DNA, 201 bp, Homo sapiens
gcaccctcaaagccatcctgggaggctccactcagctctgctccagggaacaggatcagattggaacctggatgaatgccaagaagaatcttgtagttatmtataagatcatcttctaattcaggctagagaatttcaatgaacgtgaactttgattttaatgccctacctgttactgcttggcattgagttggcagtact

SEQ ID NO: 301724 - DNA, 201 bp, Homo sapiens
tgaatgcacctaggctgaaagcaactactctctttcaagatgaaagtactgagtatccagattttcttctgaatgcttttaccctggaacgggggcagcaktgtggctattgtggctaatagcactgtttgcagcagtgtgtttaagatggctttccaccaggagcaccctcaaagccatcctgggaggctccactcagct

SEQ ID NO: 301725 - DNA, 201 bp, Homo sapiens
gacgacttcctgggccaggtggacgtgccccttagtcaccttccggtaaggacagtctcatgtttgatgcttcgtgctgggggcgggggtttctaattgtktgtagtcagtgtattttcagagtggcatttcttcaccacggtgaagaaggctgaaatgaagcacgtgtgctgtggccttagtcctttctggaaagtggtc

SEQ ID NO: 301726 - DNA, 201 bp, Homo sapiens
tattaaatctaaaatattttcttacagtgatccgtatgtgaaactttcattgtacgtagcggatgagaatagagaacttgctttggtccagacaaaaacamttaaaaaggtaggtgtcgatctttaaccaaatgtcatttaagtcataatttaatccaattatgcacagtcatgtgctgcttaacacctttttggtcaagg

SEQ ID NO: 301727 - DNA, 201 bp, Homo sapiens
ccgccttgctttcctgccagttgctgacatatggcacacagtgtcagttaagggcacaggctgatgggcagcttggccacatacctctctggcttcctatstgtaaaatgggcacaatcattgtacctgcctctgaaggttgttgcgagaactagacgcagccttggcacagagcccacagagagtgagcactgtgtaaag

SEQ ID NO: 301728 - DNA, 201 bp, Homo sapiens
ccagagctggtaccgccttgctttcctgccagttgctgacatatggcacacagtgtcagttaagggcacaggctgatgggcagcttggccacatacctctstggcttcctatctgtaaaatgggcacaatcattgtacctgcctctgaaggttgttgcgagaactagacgcagccttggcacagagcccacagagagtgag

SEQ ID NO: 301729 - DNA, 201 bp, Homo sapiens
  misc_feature (1)...(201): n = A,T,C or G
atatggataagacctaaaccaaattttctagctaaattttgtaaagtctgaacaaaatctgtgtgcgttttaatctttcttgtaatcttttcagactctgnctttaaaattatatatatttttagcttctaagtaaacattattggcactggttttgataggaactttactccaagtgtattgacttagtagatatgttaa

SEQ ID NO: 301730 - DNA, 201 bp, Homo sapiens
tcctgggtcttaagttcagattatcaagtgctcctcctgcaaaaaaaaaaaaaatggtgattcttgtggcccttagttgaccccgcacctgggatatgctyatatttggtgtggggcagagaactgagtgttcttgaaccacttccacccaaccagagggaggtggggacatcaggtacacctcatcccctgatgtcacag

SEQ ID NO: 301731 - DNA, 201 bp, Homo sapiens
cttgtttttgttttctttggccaagacagaaaacattctgccacacacattacttcatgactctggttatatattgagagcagcattaaaaaaaaaaaaaagtccaatttagtccattaggccattcttgcattggtataaagaaacacctgagactaggtaatttataaagaaaagaagtttaattggttcttggctctg

SEQ ID NO: 301732 - DNA, 201 bp, Homo sapiens
tgtcctcatgtgtcttcacttgccctgggagactgtcgtcttgagagagcaagccatatgggaccctgaggcctggcctcagtttccctcccccccactgycccacggggccacgcctcatcagtggcatggaccttttagtcagcgagccctcagccggatgctcccgtgctggccactcctgtcatccctgctctgtcc

SEQ ID NO: 301733 - DNA, 201 bp, Homo sapiens
gccaccagcacgaggaaatacatagtgtgtccccttgtcattttataaaaatgtagactggtgctgcctgctgtgaaaatgccaatcaggttgcttccttyatagtaatgagtggattcttttgtccatttctgagtggaggattcctttccataacgtggtgtatttgcagtgtttctctcagaggaggagtgcctttct

SEQ ID NO: 301734 - DNA, 201 bp, Homo sapiens
gggtggggatgcctgccctgtgtgctgtgggtatgggtgggtggggatgcctgccctgtgtgctgtgggtatgggtgggtggggatgcctgccctgcgtgstgtggtggttggcttttgctgaagacgattttaagtgtcctttgaagtcacaacccttctaaccaattttcttccattatgtgtgcagtcataagtctcg

SEQ ID NO: 301735 - DNA, 201 bp, Homo sapiens
ctgattcttccaacttgtatcctccagtctccaaaacatgattgtggtgcagctgcttgaattttcaaacttgatttccattttagaagttaaggatttgkttttttttccaaccacataccctgtcgctaccacatcaaatacaggtctctcatactgttggtcagctccgttttccgtgttgacctctgatactctgta

SEQ ID NO: 301736 - DNA, 201 bp, Homo sapiens
taaaggcaagggctggccgccttatttggctgatactagcctccatggcatcagcctgtccagtggaagtcctgaaacagtacacgatgaatggataaatraatgaatgaatgaatgaaatgaatgagggaagaaatgaatattgtgcttccagaacgaggagagaagggacgatgatgtggcaaattggcccagcatctt

SEQ ID NO: 301737 - DNA, 201 bp, Homo sapiens
gagggatttaagtaaaacctttcaggtttaaggtcaatggaaagcgaaggaacattctagaaggacattagattttccttagagtgacattagagtttctrtaattggactataccctttagtgcctcaaatcaagggtttcacattttctttttttttttggaattgcctgctcatgtatttccatctccttaaaggcaa

SEQ ID NO: 301738 - DNA, 201 bp, Homo sapiens
gggttataggtgcatgccatcacaatggctaattttttttttttttttttttcctagtagagacgggtttcaccatgttggccaggctggtcttgaactcytgacctcatgatccacctgccttggcctcccaaagtgcttagattacaggcgtgagccactgtgtccagcccacattatttttcagtatgaaaatcttaa

SEQ ID NO: 301739 - DNA, 201 bp, Homo sapiens
gtggaactgtggtggtgttgggctctgttggggtttggttgtgatctagcagaactgtggcagttttgggctctgttggatttggttggttgtgatctagyggaactgtggcagtgttggcctttgttggaatttggttggttgtgatctagctgaactgtgatggtgttgagctctgttggggtttggttgtgatctagt

SEQ ID NO: 301740 - DNA, 201 bp, Homo sapiens
agcatatcacctggagaaaagacctacgttcattatttaatgaaggtaaaaagtaaagaattgagtctgcatcctaagaaattagaaaaagatcaactaaktaaacaaaaaaatataaaaactaggagggaggaattaggagatgataagatttaaaagttatgtaaatccaatagctggttatttgaaatgaccaataaa

SEQ ID NO: 301741 - DNA, 201 bp, Homo sapiens
tcctagtagagacgggtttcaccatgttggccaggctggtcttgaactcttgacctcatgatccacctgccttggcctcccaaagtgcttagattacaggygtgagccactgtgtccagcccacattatttttcagtatgaaaatcttaagatatttttagtttgtaatttatttttcacaggggtctaaccatgtctcat

SEQ ID NO: 301742 - DNA, 201 bp, Homo sapiens
tagtgttggcctttgttgggatttggttggttgtgatctagtggaactgtggtggtgttgggctctgttggggtttggttgtgatctagcggaactgtggyggtgttgggctctgttggggtttggttgtgatctagcagaactgtggtggtgttgggctctgttggggtttggttgactgtgatctagcagaacagtggc

SEQ ID NO: 301743 - DNA, 201 bp, Homo sapiens
cagaactgtggtagtgttggcctttgttgggatttggttggttgtgatctagtggaactgtggtggtgttgggctctgttggggtttggttgtgatctagyggaactgtggtggtgttgggctctgttggggtttggttgtgatctagcagaactgtggtggtgttgggctctgttggggtttggttgactgtgatctagc

SEQ ID NO: 301744 - DNA, 201 bp, Homo sapiens
cggaactgtggcagtgttgggctctggatttggttggttgtgatctagcagaactgtggtagtgttggcctttgttgggatttggttggttgtgatctagyggaactgtggtggtgttgggctctgttggggtttggttgtgatctagcggaactgtggtggtgttgggctctgttggggtttggttgtgatctagcagaa

SEQ ID NO: 301745 - DNA, 201 bp, Homo sapiens
tagtggaactgtggcagtgttgggctctggatttggttggttgtgatctagcggaactgtggcagtgttgggctctggatttggttggttgtgatctagcrgaactgtggtagtgttggcctttgttgggatttggttggttgtgatctagtggaactgtggtggtgttgggctctgttggggtttggttgtgatctagcg

SEQ ID NO: 301746 - DNA, 201 bp, Homo sapiens; identical to SEQ ID NO: 62904

SEQ ID NO: 301747 - DNA, 201 bp, Homo sapiens
ctggatcaggagccttggtatcactgggaatgtgttaggaatgcagattcttgggttctaccccggattgaattcagatttgggagcggggcccagttatstgtgttttaatcaccccctcccccaggtgaatctgatatgctaaagcctgagcctcactcccctggaaagtgacgcctgattcatctgccagcccatggg

SEQ ID NO: 301748 - DNA, 201 bp, Homo sapiens
catgcatctccatggcacattatctggaggtaacatgatcatcaggccttgagctcttttataagcaatagattgtggctggaaattgaaaatttagtttstgtagctagaaaatactcttttcaaatgccatctagaacagtagttctctgagtgtggttcctggatcaggagccttggtatcactgggaatgtgttagg

SEQ ID NO: 301749 - DNA, 201 bp, Homo sapiens
gaggggcataaaaatgagagcaacagagtttatggtattctttataactgtggattctgtatgtgcgtgtgtgtgcacgtgtgttctgcatgcatctccayggcacattatctggaggtaacatgatcatcaggccttgagctcttttataagcaatagattgtggctggaaattgaaaatttagtttctgtagctagaaa

SEQ ID NO: 301750 - DNA, 201 bp, Homo sapiens
tctgcattcagagctttcttattctttggcgcggaggccttccgttgggtcccactgcctgctgtcttatctccttctaatgaatatgatcatgatttttstgtatttagacaactccacgatgaggaggatgatggcggcagctaacatttatgtatgtatgtatgtatgtatgtatttagagacagattctctgtcacc

SEQ ID NO: 301751 - DNA, 201 bp, Homo sapiens
ggatgagtagtcagtcctttctgatttttgccacctctgcattcagagctttcttattctttggcgcggaggccttccgttgggtcccactgcctgctgtmttatctccttctaatgaatatgatcatgatttttctgtatttagacaactccacgatgaggaggatgatggcggcagctaacatttatgtatgtatgtat

SEQ ID NO: 301752 - DNA, 201 bp, Homo sapiens
tatattaaaatatagatgaggaaggaagggcacatggcaagatttggcaagcataatccatgaggggatatggagttggggatggcagcatagcatactakgatttttgaggagggattcggggagcctgttcatgttttccttacaactctggtacatgaagtacaggttctgcatcatgatggaagactgcctgggttc

SEQ ID NO: 301753 - DNA, 201 bp, Homo sapiens
tgatgatctctatgtagatgcctatataaatagctatatagatatcatcagagctgtgtatatatgtgttagagatagatgcacatacagttgccccctgkctcccaggggtctctgtgacccaaggttgggaccctcaagtgactagttatggatggcaaggggggctgcaaggccagagttggtcctggctagagattt

SEQ ID NO: 301754 - DNA, 201 bp, Homo sapiens
tagcctcatgtggtagtttaatgatactctctcttactcagggaatgtgccttttaagctgtggtctgtggtcaatgtgtgtgcacatctctgagagtccyggctgtgttgtgtttgtgatggctcccatatgtggtttgcctttgtatctgattgtaaattaaccttgacatgtaggtcacctgaccgtgtatggagaga

SEQ ID NO: 301755 - DNA, 201 bp, Homo sapiens
ttctctagaattgtccatgtccaagtcccctggaatgtctttgtatatccccagagctgtgcatgctccagtttgaagagctctgctttaaaagatatcakgggtgggggagatgaggggggtgaagtaaaagaataaaaactattcaattccatttgttttctctttcaagctcatacgttactcatttcatttttatat

SEQ ID NO: 301756 - DNA, 201 bp, Homo sapiens
attctgttccttcattattttgtcctccagtggcttttatacccagcaaagtggaccatggtgtatgattcaagaagggtgaggagtatgtctttctttgkaaaggcagggatggagggttgtgatttagaaagggtaagcaggaaaggagagccacagaaggcaagcactgttctcatgccagatcggtttcaaggaaga

SEQ ID NO: 301757 - DNA, 201 bp, Homo sapiens
ggtgatcatatccatatttgactgtttcctattccataatttgtcgctgtctccgagtcttttcccgggagccccctattacaagtgcacctttctgtgtktattcttccctgttgtgcttcgatgatcccttttttctattcttcagtggctttttctccagtaaaatagcagtttaaattcttgaagggaaacaattaa

SEQ ID NO: 301758 - DNA, 201 bp, Homo sapiens
gtgagaaaagaatttctgcaatgtctcctacaaattagagtgagaaaatgtatctttatgcagctttgaacaaaggattattattgctggactgtggaccmaaattttagtcaagttttttttttttaatgaaaagaaactgttcatttatgcagacatacaactttgtgtcctatagagacttgtcatctgctcttaaag

SEQ ID NO: 301759 - DNA, 201 bp, Homo sapiens
ctagcggaactgtggctgtgttgggctctgttggggtttggttgtgatctagcggaactgtggcggtgttgggctctgttggggtttggttgtgatctagyggaactgtggcggtgttgggctctgttggggtttggttgtgatctagcggaactgtggcggtgttgggctctgttggggtttggttgactgtgatctagc

SEQ ID NO: 301760 - DNA, 201 bp, Homo sapiens
ctgctgggttgcagccttggagtatatggcctatgagacatggcatgtctgatttgatggaaaaagcagcggagaaccagtgaaccaagctattccgtgtrttgactttttaatacgtttactacaagaatctgccttttaaagtacttttaaataaggttataaacataagtgtgttttggacacagcctgcagcaagca

SEQ ID NO: 301761 - DNA, 201 bp, Homo sapiens
gaggtgggggaggtgtgggcacctgtatacatttgtgttgaaaaaggtacccaggctattctgaggtccttttctgcccccagcctggtttctgggcctcyctggagtctctctttctggcatttgtgttctggaatcgcttatcagcctggactccttcatcagcagctgccacagtgtctttgcagtcacactacacac

SEQ ID NO: 301762 - DNA, 201 bp, Homo sapiens
ccatggagagtggaagcctgggagggctttgccaaagtccagttgcctgctcactttcctaagggccagagcaatgggggaggtgggggaggtgtgggcayctgtatacatttgtgttgaaaaaggtacccaggctattctgaggtccttttctgcccccagcctggtttctgggcctccctggagtctctctttctggca

SEQ ID NO: 301763 - DNA, 201 bp, Homo sapiens
gatgctgtctcttccacactctgatatgaatgtcatgggtaacaactgtgagattccagatcgttgtatttattgatgtagcttttttcctttttgtgctmtaaaacttgccaatctgttcttcattagactgtgagctcattaagagcaagggcacatttttctccactctgtaaaatctccatccataatgcttagtac

SEQ ID NO: 301764 - DNA, 201 bp, Homo sapiens
ttataaggtatggtaactatcagagcagtttgtgggattggctagcagctgtgtggccagtagctggaagaaccagtggtctggacatgtcctagttttgrgaaatctgtcggcaaggagagcgctaggactgaaggtatgatgcctgaagcccagaaacgcataatgggctgtgacaatgctgtttcacttgagctcatc

SEQ ID NO: 301765 - DNA, 201 bp, Homo sapiens
tatttatttatttatttatttatttatttatttatttatttttgcctacttcagtttggtcggtaaactatcaattgtattttcagtatgtatatatatakagagagagatttttaaaattttattattattttttgagacagagtctcactctgatgcctaggctggagtgcagtggtgtgatcttggttcactgcaacc

SEQ ID NO: 301766 - DNA, 201 bp, Homo sapiens
ggctagcagctgtgtggccagtagctggaagaaccagtggtctggacatgtcctagttttgagaaatctgtcggcaaggagagcgctaggactgaaggtaygatgcctgaagcccagaaacgcataatgggctgtgacaatgctgtttcacttgagctcatcggatgctttcgaggattcaatccatatctccctgttctc

SEQ ID NO: 301767 - DNA, 201 bp, Homo sapiens
tgcaaggacatgggtgagactggtcaaggaattgactttcagggttccaagggaataattagttcagaagtctgtccccatacttgttttccagtacaatstgtgtctctgtgggtgtttttttttaaggctgtgtgctttataaactggagatagaaggagccagtttattataaaaaggataaaatataattaaacaat

SEQ ID NO: 301768 - DNA, 201 bp, Homo sapiens
ggatgaattccctgagtagttcctgccgttagaacttgctctcttttttagttagacacagctcggtgttgcctccactttgacatcacgttcatagttcstgtgcttggccagaactgttttcagttgcaaggacatgggtgagactggtcaaggaattgactttcagggttccaagggaataattagttcagaagtctg

SEQ ID NO: 301769 - DNA, 201 bp, Homo sapiens
gcagcgtccctctctgcaatgcaaaagggataccgtgtgcctctgcatgtcagctctagtcctggcatcccaggagcatacggtgacagtggaagtgaagygcaagccgagtcctgggaaccaatgtctgccagaattaattaaaagtaagcatctttttttccctggttagttaatccaggatgaattccctgagtagtt

SEQ ID NO: 301770 - DNA, 201 bp, Homo sapiens
atgctgctgggttgcagccttggagtatatggcctatgagacatggcatgtctgatttgatggaaaaagcagcggagaaccagtgaaccaagctattccgygtattgactttttaatacgtttactacaagaatctgccttttaaagtacttttaaataaggttataaacataagtgtgttttggacacagcctgcagcaa

SEQ ID NO: 301771 - DNA, 201 bp, Homo sapiens
cccttccctccgacaatttcgcctgtgagaatcaagtcagattttgcagtgagaactgagctgagtgtagaataagttcccgaggtacttctggcaccgtwgttactcccccaccgagaagcccagaatgttcccaggtgtgttcaaagattgtacaggaagggcttaggacggtgcttggctcatataaacactcagtgg

SEQ ID NO: 301772 - DNA, 201 bp, Homo sapiens
gttcacaaatgtccaaaagaataacagagattaaagaaaggtaaatacagccacctggcaaaaatatttacccttttaaaaatgatggaagttatatatakaagaaatgtttttggtaaaaatatttgaaagtttgttttataatcataagtagcttgggctattttgactagaggggtgtgtgtgtgtatgtgtgtgtgt

SEQ ID NO: 301773 - DNA, 201 bp, Homo sapiens
tgcatattactttaactagatcacttgtaaaaataaatgaataaatgaccagtgatggttcagtgacaagagtgccagatgagtcatgaatgttttcacamgtaaatttgatagtaaactgctaagtttactgtatacgctgtgtacaaattagctcagattcaagatttttgctctaacaactgaacgctcagttgcatc

SEQ ID NO: 301774 - DNA, 201 bp, Homo sapiens
tttgaacttgattacctctgtgaaaaccctgtttccagagaaggtcacattctgaaatactgggggaacatagttccccatcttataagatagagaatggrtcaagacgagcagctccattctttgtttgtgtttaggccagtgccaagttcaagatcttgcctcagggctttcctggtaccactgggaatgtgtatcagc

SEQ ID NO: 301775 - DNA, 201 bp, Homo sapiens
gggttggtaggagaatgagcagtaaagccatgagctaacacaccaagtaatctgttgtgttcacaaatgtccaaaagaataacagagattaaagaaaggtraatacagccacctggcaaaaatatttacccttttaaaaatgatggaagttatatatagaagaaatgtttttggtaaaaatatttgaaagtttgttttata

SEQ ID NO: 301776 - DNA, 201 bp, Homo sapiens
acatgaagtgaagagagagaaaacatctgctgaaagccggattctctgtttttttcctgctttttaaatgtaatctgtctttgtttatgcatgccctagamacatgcataagtaaccctgagtagtctcttagtttaagaaaacctactataaaatttcttgttgtaaaataaaattctaaaaggaataagttgtggacat

SEQ ID NO: 301777 - DNA, 201 bp, Homo sapiens
tgtattggatttaaccaggctgagatccctgagatccaaatataataatgtgtcctttttggatgaatcagacacaagcaaaaatctccagtgtgtgtccmgctttagaggtgtagtaatggattccacagttcacgctggtgggccagccaagacttttaatgctgatgtgggcttcattctttctataaactccctttc

SEQ ID NO: 301778 - DNA, 201 bp, Homo sapiens
cagaaaaatttgatagcaggctgtggagaaggctcatgttacttcttatgtcaaggtgtaaacaaaaaagagagcacaaaatacatccatcagaccacatraagtgaagagagagaaaacatctgctgaaagccggattctctgtttttttcctgctttttaaatgtaatctgtctttgtttatgcatgccctagaaacat

SEQ ID NO: 301779 - DNA, 201 bp, Homo sapiens
gcttgagcccaggagatccaggctgcagagattgtgccactgcagcctgggtggcagagcgagaccctatctcaaaaaaaaaaaaaaaaaagaacagaaarggaacaaacaacagacacaagattccatggaaaagggagtggtctaagtattcagactgtaggaattcagagagtggagaggctggttattatgggggtg

SEQ ID NO: 301780 - DNA, 201 bp, Homo sapiens
caactttcagaaaaatttgatagcaggctgtggagaaggctcatgttacttcttatgtcaaggtgtaaacaaaaaagagagcacaaaatacatccatcagmccacatgaagtgaagagagagaaaacatctgctgaaagccggattctctgtttttttcctgctttttaaatgtaatctgtctttgtttatgcatgcccta

SEQ ID NO: 301781 - DNA, 201 bp, Homo sapiens
cggtttaggcgaattaagatttacatacttgaaaagggacaaacaagactggacgtggtgactcatacctgtaattccaacactgtgggaggtggaggcasgaggatcccttgaggccaggagtttgcaaccagcctgggcaacatgggaaaacccctgtctctacaaaaattaaaaaaaaattagccatgtgtggcagca

SEQ ID NO: 301782 - DNA, 201 bp, Homo sapiens
ggaaaagacacactagcgtaagacatggacagtggccctgagtgacgtgcagccggtttaggcgaattaagatttacatacttgaaaagggacaaacaagwctggacgtggtgactcatacctgtaattccaacactgtgggaggtggaggcaggaggatcccttgaggccaggagtttgcaaccagcctgggcaacatgg

SEQ ID NO: 301783 - DNA, 201 bp, Homo sapiens
accataattatataactttttatttgcccagaatgaacaactgcagggtaacatttatacaaaaggaatttagtgtgcttagagtgctgataatacttgaraaactaggagagctgttttaaagcacttctttttcttttttttttttttgtttttttctgggctgttagaatttgacattgttcaactttaactttgtcc

SEQ ID NO: 301784 - DNA, 201 bp, Homo sapiens
aactcagagtttaacttggtcctactattatctgtgctacttgctcaaaactgatgttatgggaatgctggttgagttttggtgattgttattggccctakctcttcggtcttggaccaacaataaacatacaccattaattcccatttctagtgatggacattaagtgtgtccatttgatagaccagcagccttatattc

SEQ ID NO: 301785 - DNA, 201 bp, Homo sapiens
aagcaaccaagaaatgttaattgaaggcccgttttgtacaaggttgcatggaaaagacacactagcgtaagacatggacagtggccctgagtgacgtgcasccggtttaggcgaattaagatttacatacttgaaaagggacaaacaagactggacgtggtgactcatacctgtaattccaacactgtgggaggtggaggc

SEQ ID NO: 301786 - DNA, 201 bp, Homo sapiens
tcatctatggttgccagtagagattttcccagaaggccaaggatatatggggacatttgactgttctttgaccataattatataactttttatttgcccaraatgaacaactgcagggtaacatttatacaaaaggaatttagtgtgcttagagtgctgataatacttgagaaactaggagagctgttttaaagcacttct

SEQ ID NO: 301787 - DNA, 201 bp, Homo sapiens
aatactttattgaaactgccatgttcttttcaattttggtagctcccctgcatttaatttagtcataagcgtctgtattaatgggtgtgttcaatatgaargcatcctgtgaagacaataaattatattatacttatctagtctgcactctttatcatgttgataaaatggcccttaccagtaaaaaaactgtttcagaat

SEQ ID NO: 301788 - DNA, 201 bp, Homo sapiens
tgggagaatgccatggaaagatgaaggcagagatcaggtgatgcttctacaaggcagggaactccaaagattgctagcaagcctccagaaagcaggggagmccatggaatctccctcagccttcagaaggaaccaccctgcccatatcttgatcttggacttccagcctccagaacttttaaaccatcaatttccattgtt

SEQ ID NO: 301789 - DNA, 201 bp, Homo sapiens
cgaactcctgggctcaagcagtcctcccgccttggcctcccaaagtgctgagattacaagtgtgagccactgcatctggccttacactgcatttctttttyttttttttctttttttttttttttttttttttgagacggagtctcactctgttgcccagcctggagttcagtggcacaatctcggctcactgcaacctct

SEQ ID NO: 301790 - DNA, 201 bp, Homo sapiens
gctcagaaacagacatgcacactgggagaatgccatggaaagatgaaggcagagatcaggtgatgcttctacaaggcagggaactccaaagattgctagcragcctccagaaagcaggggagaccatggaatctccctcagccttcagaaggaaccaccctgcccatatcttgatcttggacttccagcctccagaacttt

SEQ ID NO: 301791 - DNA, 201 bp, Homo sapiens
ccacgtatgccacaatgccgtgagtgccgtcatcttgtaaattgcttagagtcatcttgtcttccagcatacctggcacgtgggtccacctggaattacasatgagatgatgagatgcacttgtcttttcaataattaattatttctgctttgtaagtttttcctgagaagttagacattttcaagatgaacaatactcag

SEQ ID NO: 301792 - DNA, 201 bp, Homo sapiens
gtcctattttagtctttcctgtcaacagtcttactagacctgttcatcgtgactaaactgagtttctcatccttccacttccttcttgtccttttattggraatatatctcaaagaggaaaagcaagtttaaaagccaaagttctttaaaaaaaaaaaaaaaggataactggctaccccatactttcatacattgaccata

SEQ ID NO: 301793 - DNA, 201 bp, Homo sapiens
aaaaaaaaaaaaaaggataactggctaccccatactttcatacattgaccatacttcactgaagaattctttatcataaccatgtagaaacttgtgttgtyccaaaagcttaggctctttttaaagggactttgttttcaccatcagcttcattcagtcattaaaaaaataatgcactaagttcctgttacctgctgggac

SEQ ID NO: 301794 - DNA, 201 bp, Homo sapiens
ttcacgcatcattccccagaaggagaaaggcttgaaatatctcaacatttccgcccacacctcctcagcccctgccaggagacagagcaggcaagggaacrggcatcataggctgggggccacatgttgaaatctgctccttggggaatttgtcatttaagacagtcgaacttgcatacacagtgatgactgtttaagctt

SEQ ID NO: 301795 - DNA, 201 bp, Homo sapiens
  misc_feature (1)...(201): n = A,T,C or G
tgggccaggtggacgtgccccttagtcaccttccggtaaggacagtctcatgtttgatgcttcgtgctgggggcgggggtttctaattgtttgtagtcagngtattttcagagtggcatttcttcaccacggtgaagaaggctgaaatgaagcacgtgtgctgtggccttagtcctttctggaaagtggtcctttcaaggg

SEQ ID NO: 301796 - DNA, 201 bp, Homo sapiens
acaagagtcgtttctgaggtctcctgtgtaaaggcaaattgtaaggactttgaggacctaggaccatgccctgctcctgtaaggaaagaaccaggtttccycttgcattaggatttcatcattgccaggcttggaaactgaggcagactaaattgctttctgagcaattaaacatcagctacttccaggccagccattcct

SEQ ID NO: 301797 - DNA, 201 bp, Homo sapiens
gaattatctagctccaaatgttaatgatgctgactttgagataccctagtcagaagtaacatttattggccaggggcagtggctcatacctgtaatctcakcactttgggaagccgaggtgggaggatcacttaagcccaggactttgagaccacctggacaagaccctgtctctacaaaaaaaaaaaaaaaaaattagcc

SEQ ID NO: 301798 - DNA, 201 bp, Homo sapiens
aagaaggtaacctatcatagtgtgtgttaagaagtcaagcaaccaagaaatgttaattgaaggcccgttttgtacaaggttgcatggaaaagacacactakcgtaagacatggacagtggccctgagtgacgtgcagccggtttaggcgaattaagatttacatacttgaaaagggacaaacaagactggacgtggtgact

SEQ ID NO: 301799 - DNA, 201 bp, Homo sapiens
acacaaggatatcaactctataagtcagttaatatgttcatgcttttagttaatcgaaagtggcttatgatttcagtttttggtatcaggtgatgttgcgraagtgaggttcactgtgaagcttcttttttttttttttttttaatcattttgttgtttctttgagtgtatgtgagcttataactcaagacactatgtgaa

SEQ ID NO: 301800 - DNA, 201 bp, Homo sapiens
tttaggctcagaaacagacatgcacactgggagaatgccatggaaagatgaaggcagagatcaggtgatgcttctacaaggcagggaactccaaagattgmtagcaagcctccagaaagcaggggagaccatggaatctccctcagccttcagaaggaaccaccctgcccatatcttgatcttggacttccagcctccaga

SEQ ID NO: 301801 - DNA, 201 bp, Homo sapiens
aatgctcgctgtatccccaagtggcagtacttaatataattgtcattgctctttaatattatctcattccacgtcagctgcacaaaaatttgaggttaatyacaatgaatgttttctcaatccttgttattgagagctgtttaatagtttattttgtatgtgaagattcatatctagattgaggcttatacaacttcattt

SEQ ID NO: 301802 - DNA, 201 bp, Homo sapiens
ccgtccctgcctttattccctgtggcccctgtgtgcaggagccttccctcccctttctatcagtccctcatgtacaggccttcagccccctcactctgccstgttcctacctccatcattgtgccatttatgtttgcatgtctgtcttctctgtcatatctatctcaaactaggttgaaaattttttgaagatggagattt

SEQ ID NO: 301803 - DNA, 201 bp, Homo sapiens
ctcaagcctgaggtcctggcctttaatagtcagggaggtctgtgtggaggcagggtgtgagccccctccaaggaaagctgcagtgtgaaaagaggcccagkatgagcgttggggagtatccacatacaacttgatattcctaaagtctcagttctttatgggaaagcccatgcactcttccacacttggaattctttgcaa

SEQ ID NO: 301804 - DNA, 201 bp, Homo sapiens
aggtgaatcgacttgcatttcccagcgtgtccccacacccacaaacactccatgacactgggcccgtccctgcctttattccctgtggcccctgtgtgcasgagccttccctcccctttctatcagtccctcatgtacaggccttcagccccctcactctgccctgttcctacctccatcattgtgccatttatgtttgca

SEQ ID NO: 301805 - DNA, 201 bp, Homo sapiens
aggcataggctatttgattaataatttggctgcattgacaagatacggaaaaggcgaggttgggactttccgtgaattttctcctcaaggtgcttaatcaktgaggttgggatggccggagggggccctcatttgcttgcctggtgctcaagcctgaggtcctggcctttaatagtcagggaggtctgtgtggaggcaggg

SEQ ID NO: 301806 - DNA, 201 bp, Homo sapiens
aagtatggattttacagatcttatcctctcctgttctgccaaaaccccatacggtcctccattaccaatcaggtgaatcgacttgcatttcccagcgtgtscccacacccacaaacactccatgacactgggcccgtccctgcctttattccctgtggcccctgtgtgcaggagccttccctcccctttctatcagtccct

SEQ ID NO: 301807 - DNA, 201 bp, Homo sapiens
ggaatagggccagagctgggcagaccgtgtatgccacaatagttcgttgtaggttacaaagaaccagcgcagagtgggtgaggcataggctatttgattartaatttggctgcattgacaagatacggaaaaggcgaggttgggactttccgtgaattttctcctcaaggtgcttaatcagtgaggttgggatggccggag

SEQ ID NO: 301808 - DNA, 201 bp, Homo sapiens
attcagaggagtttcctacctggttagacacttaaccacctccagacggaccccttctaatccacgtcccacattatagctcaaaagtatggattttacasatcttatcctctcctgttctgccaaaaccccatacggtcctccattaccaatcaggtgaatcgacttgcatttcccagcgtgtccccacacccacaaaca

SEQ ID NO: 301809 - DNA, 201 bp, Homo sapiens
ggtggatgatcttttataaaacagcacagttttgttttcttctgccatggtatctcctaacattttccagtgtgtctacttgcagttaatatggaagttgyggctgacactaggttagtggttaaaagaaaacaagaaaaccaacctttagaaatctttagaaacatcattatcatagaaagctataaactcttatgtata

SEQ ID NO: 301810 - DNA, 201 bp, Homo sapiens
accccatgggtcctgccaggtgaggggcacaatggagaagagaaaaaaaaaaatgctctgctgaaaacataagcaacaaataaaatagaggatagtaatcstaggataatccccgaggcagcagagaaaggcaggctctggcttgcatgtcaggagctctcttcctgggggcaggagggagggtggtatagtcccagatga

SEQ ID NO: 301811 - DNA, 201 bp, Homo sapiens
ttctttaaattatttgtttattgataggggccacccactccaggtgagtggtttctctgtgtgtatggcagaggaatgctctgtgtctggaaaaaaaagtmacttagcttgaaatattatgaaagctgaagagtacaaatgtcagagagaaaggggtattgggggggaagagaatgagaagacaagacacagtcagggccc

SEQ ID NO: 301812 - DNA, 201 bp, Homo sapiens
tgacactttttaaaccaaacattttattaaattctcattcaagttaatagcaaaaaaatattactactggtttcatgtttaggtctcatttgcagtttttwaaacaacctaacggagtatagtaaatacataaagtactcgatttaatgtgcattttctttttcgttttttttttttttttttgggtggggaggggggtgg

SEQ ID NO: 301813 - DNA, 201 bp, Homo sapiens
ggcctttcactgactccccactgccctcagagagcaccccaactctccagcaccccatgtgggctctgcactgccggccccttctctggcctgtctacccrccctggcaaacggctggcaagtccccagccttgttcctctgcttagtgtgcccttttctcccccaattcctacgcctgatttgcactgcggactctgctt

SEQ ID NO: 301814 - DNA, 201 bp, Homo sapiens
ggacttattcccaataataaagaatagttcaataggaggttggtagtcttaattgtcttccttgtcaaatcctagtgaatttcacatcagatactgtgccstgtgaggctctatcaccttagcacttggtaatacgttttttatgtagtaggtgctcaataaatgggttgagtttctataataatttgatttctgtagcat

SEQ ID NO: 301815 - DNA, 201 bp, Homo sapiens
tgatgaaggacttattcccaataataaagaatagttcaataggaggttggtagtcttaattgtcttccttgtcaaatcctagtgaatttcacatcagatastgtgccctgtgaggctctatcaccttagcacttggtaatacgttttttatgtagtaggtgctcaataaatgggttgagtttctataataatttgatttct

SEQ ID NO: 301816 - DNA, 201 bp, Homo sapiens
tgaatctgatttaataggcagatgatgaaggacttattcccaataataaagaatagttcaataggaggttggtagtcttaattgtcttccttgtcaaatcmtagtgaatttcacatcagatactgtgccctgtgaggctctatcaccttagcacttggtaatacgttttttatgtagtaggtgctcaataaatgggttgag

SEQ ID NO: 301817 - DNA, 201 bp, Homo sapiens
  misc_feature (1)...(201): n = A,T,C or G
atgagaaggtattggagagccatatttgtagtctcagccacttttatgggtgttgcattccatgtgaacaacaggagacatttaattgcttgaaaagttcnttgatctaattcttgtaataaatcattgttcacatttcctggaaccatggtacctagggtggatacatccaaatcccagttgcctctgcttacccggcat

SEQ ID NO: 301818 - DNA, 201 bp, Homo sapiens
ccagcccagagtcaaggccttgtggaagaagatgggcggaagcaggaaccactcagggtctcaaggagctggctaaagtgaccccgacaagagtgatcacratataaacctggaattgcacatttaagagtccaagtgcacatagatgggcctagtcagcagtgtcttcaaatttcccacagatgggaatgtccctgtcgg

SEQ ID NO: 301819 - DNA, 201 bp, Homo sapiens
  misc_feature (1)...(201): n = A,T,C or G
ggtaaggacagtctcatgtttgatgcttcgtgctgggggcgggggtttctaattgtttgtagtcagtgtattttcagagtggcatttcttcaccacggtgnagaaggctgaaatgaagcacgtgtgctgtggccttagtcctttctggaaagtggtcctttcaaggggatggaggagaagctggctgtaagagtagtcaag

SEQ ID NO: 301820 - DNA, 201 bp, Homo sapiens
  misc_feature (1)...(201): n = A,T,C or G
tcacctcccagaggcctttctggccccactctgctgcgccatctctcttagcacagctgccctcctcatgccactctccccctgatctcgcctcctcgctngtgcaatactgtagaaggcccttggttactccttcatggtttctcatttacattgaaagcaggttaatcttttctttcatgctctgatacatagcagtgt

SEQ ID NO: 301821 - DNA, 201 bp, Homo sapiens
acatttttatattaaccccctcttcctttcctttagtactcagtatttatttaattaaatggtactcaacttcaaactccactgttccatggaatgctgcsgtttccctttgaagcttttgagctagcagcccatttccggttcttcatacagtcagcgcatctgagacctgagcatgtgataaagcgtgttgctagacat

SEQ ID NO: 301822 - DNA, 201 bp, Homo sapiens
attatgaacatggagcagaagattctagggccccgtgtgtaatggcacaatttgtcaagaggcctgagacctggagttggcatggattccctctcctcctracccacctacctgctacattcagttggccaccctgttcttttgagtccacctttggatgagtagtcagtcctttctgatttttgccacctctgcattcag

SEQ ID NO: 301823 - DNA, 201 bp, Homo sapiens
tgtctaaaaattcatatgatatttgataacttgaatctattaattatttagcgataaagagaactctgagatctgtattaacagagtgagatttctggcasgtgtctgcctgttgcaccttcctcttgacttgtcagctctgtctccccttcccctggagccctcagtaacccacctttgcccagccacaaaatctcttcg

SEQ ID NO: 301824 - DNA, 201 bp, Homo sapiens
tgggggcacagaggagaccctcccctctgctctgctgtcgtggatggaggagaagcactccctgttgcggagaaagcagtgagcactagtgatgatggagktggttcaatattgtcctcttttctcctgcagcttagtcatccagtggagatttgtgaacagggtccagaagcagatgaacgccttcttggaggtaagcca

SEQ ID NO: 301825 - DNA, 201 bp, Homo sapiens
ttcctttctacaggtgggcttgaagtgagcctgccactcgctcaccttgaatcacggaggtttcagaggccgttggccttcagggcaatggcagaagcacrtgttctctgctgttttctgagtctatcttgactgcgttcccagtggcccagaattccccaagggtcactcgacacaccctcgtctacagtaaatatttgt

SEQ ID NO: 301826 - DNA, 201 bp, Homo sapiens
tgttcccatctgccgagtgtggggcctcgagggccagaacctcagaatgtagaagctgagttagtttgtggaagggtgaagggctgacctctactgttggmaatgccaaaatctctgatctggctttaaataagcaaaacagccccgccagacatagagtcatccacaaaacctcatgacctctgttattgcccatcctgt

SEQ ID NO: 301827 - DNA, 201 bp, Homo sapiens
caataagcttttggagggccaggaagttgtgttcccatctgccgagtgtggggcctcgagggccagaacctcagaatgtagaagctgagttagtttgtggmagggtgaagggctgacctctactgttggaaatgccaaaatctctgatctggctttaaataagcaaaacagccccgccagacatagagtcatccacaaaac

SEQ ID NO: 301828 - DNA, 201 bp, Homo sapiens
gtgctgctgggtcccagggtagagctctgctggcaccttcaaggccctgatttacacctaagggcacacaactgggatctgaaaactgggatgcacagtasagactgcagatttacagggcggggctgtctctcatctgactattgattcttttgggggctgtagtttgtatcatagttatttttgttcctgtttttttcc

SEQ ID NO: 301829 - DNA, 201 bp, Homo sapiens
ggagtagaattattcaccttgaagaacagaagatttgtagtttaaggaaattcaccatattcttaaaagttgcagaaagagaagagttcttagcctaggcstgcaccaagatccagttcttttgaatctgatttaataggcagatgatgaaggacttattcccaataataaagaatagttcaataggaggttggtagtctt

SEQ ID NO: 301830 - DNA, 201 bp, Homo sapiens
agagtaagggtggtcaggttgccagactacccctcaaacgaggacatggtgctgctgggtcccagggtagagctctgctggcaccttcaaggccctgattkacacctaagggcacacaactgggatctgaaaactgggatgcacagtacagactgcagatttacagggcggggctgtctctcatctgactattgattcttt

SEQ ID NO: 301831 - DNA, 201 bp, Homo sapiens
ccgcctgtacgtgagctccctggagtgtgggatgaaggagtgcttggcccagttgttttcccggaagctggaggagggcagccatgcacaggttgtgtagmccaaacagttcagggatgcacttggcttagacagctgataaacagctgcagtgcccccaagggagttgaaagagtgggtattttgttgtcaggagtagaa

SEQ ID NO: 301832 - DNA, 201 bp, Homo sapiens
gagtgcatatagaaagttagctgtttgctacaactggggacacttcctattagagccgcatctgctggggtggagggctgcatgggttggagagtagggtktgacttcttccagcaagaggaaagagaagtagcatagtgcccatcgcaggcagagagcacatgtttgacttgctcttggaatttctgtagagtaagggtg

SEQ ID NO: 301833 - DNA, 201 bp, Homo sapiens
ggccactgatgggcccagtccgtctccacactcctgagagttagtaagtggctgtcgtgttgggctctgaagttgtagactagtttgttagtgacgtatamccaaaagagagagtgtacttaacatttagtcctgggaggttcgaactttgcctccgcctgtacgtgagctccctggagtgtgggatgaaggagtgcttgg

SEQ ID NO: 301834 - DNA, 201 bp, Homo sapiens
ttcaggcttccctcagtgaatagtattgtgaaggcagtggtggtaacattgtgttggagctggtgtgagggttgaatccactctgtagcctctgtccctakatcatggcgctgctttgattgggccctaattttctcctctagacaaaaggaattgaactaagacttccagcattccctccaggcttaacattttttcatt

SEQ ID NO: 301835 - DNA, 201 bp, Homo sapiens
cttcttttttaaaggccaaaccaagatcactttttggtaatggctacctttcctctgaatgtatttctcaaaaagttctttctggtttttattaaacccamacagttgttataatttaaaagttacccttttagagtgagattagctagaaaagaaattaaggattattttaagtaactcagcaagtaaccttttccaaga

SEQ ID NO: 301836 - DNA, 201 bp, Homo sapiens
agttctagggaggctgctcgtccctcctctccttttgcttattgcattctgcccagattataaaactgaagtatctgtcttaagacgccagcagctttttyttcatcaaatccagacacatcgaatcccccacaaccaagaattacccagccacaaaatgtcagtagtgccccggtaaaagaaagctggttttagacttag

SEQ ID NO: 301837 - DNA, 201 bp, Homo sapiens
tttgtcacccagaattttaaaatttggaaatttcattcattcagtccagatagagaattgatcaattggcaattttattatttttcgctcatgaaaaactmtagggttacaagaatatgctcctgaagttaacatagttacttttaaaatgtctcaattctaatggttaggtattagtcctctgagttccggttgcccctt

SEQ ID NO: 301838 - DNA, 201 bp, Homo sapiens
aagcatcctctcctactgccagacttctgggagacccacccctggtcttcccaggtgtctcttcagtgaccttgttggtcgttgagggctgtggaaagttytagggaggctgctcgtccctcctctccttttgcttattgcattctgcccagattataaaactgaagtatctgtcttaagacgccagcagctttttcttca

SEQ ID NO: 301839 - DNA, 201 bp, Homo sapiens
gccctatccttcttgacgttggacatataaatacttagggagcttggtttatagagctttcagtttcacaaacagatgggacagctgaggtgaggcctgcmtagcagaagaagccttactcctgatagcaggcactaagcaaggcattgggtgacagattgcttatgcacaggctgggagggacaggaactgtgtcatgga

SEQ ID NO: 301840 - DNA, 201 bp, Homo sapiens
accctgagagctttacttttgcagtaatagagaatattctttttctctcttgagtatgaaataattatttttgaataatcactgcacgtgaagccctatcyttcttgacgttggacatataaatacttagggagcttggtttatagagctttcagtttcacaaacagatgggacagctgaggtgaggcctgcctagcagaa

SEQ ID NO: 301841 - DNA, 201 bp, Homo sapiens
ttttcgtacccatttaccaaccctgagagctttacttttgcagtaatagagaatattctttttctctcttgagtatgaaataattatttttgaataatcastgcacgtgaagccctatccttcttgacgttggacatataaatacttagggagcttggtttatagagctttcagtttcacaaacagatgggacagctgagg

SEQ ID NO: 301842 - DNA, 201 bp, Homo sapiens
tgattatgcttttccacttgaataaaagagatattaagttgtaataaaactttaaatattttaatttagtttgaatatttaagttgaattaacctcttacyacagtaattatcttttttgctaacttcttactacggtaattatctgcttttataaaatccagaaacgatgttatacacattagcacgcattattaggtgc

SEQ ID NO: 301843 - DNA, 201 bp, Homo sapiens
tcctctaaattttggcattaaattatgagtgcaaatcattttgctgataaagcttatatgttattgttgaatattagcacattggatactagaatgaaatrttagataactaaatgcattgtcctgagtacactttacaaatatgtatacatatatgtgggtgtgtatacgggtgtgtgcatcttatacatgtatacctgt

SEQ ID NO: 301844 - DNA, 201 bp, Homo sapiens
ttcagggatgttttgaaaagttggataggcagtgcacaaggttgacaccgatatgtttgtaaacagaaactgtacatggcttgcagcatagctcatgtttstgtagcacttcacaatttgaagaatgctttgtttatttcacttaatatgtatggctgtcccattgtggaggcattatctcacttgaccctcccatgtgaa

SEQ ID NO: 301845 - DNA, 201 bp, Homo sapiens
caaggaaatacataatgtgttcccttgtcattttataaaaatgtagactggtgctgcctgctgtgaaaatgccagtcaggttgcttccttcatagtaatcrgtggattcttttgtccatttctgagtggaggattagccctctgtttgccccacaaagggccaccagcacgaggaaatacatagtgtgtccccttgtcatt

SEQ ID NO: 301846 - DNA, 201 bp, Homo sapiens
acagcctcctgtcggccgccccctttcctgctttgctgttctccagtgccctgttctctagtgcctaccctgttctccagtgccctgttctccagtgcccscctagctgtgagccccttatggactatttctgaaatgcagccctgaaaatgtccttcttctacttggccatcttgtgaccttcagcataaatgaaaactg

SEQ ID NO: 301847 - DNA, 201 bp, Homo sapiens
tctcacccacttttccttcatcaccccaaatctatattgtgttcacatggttcctctttctagaggtgggagatgtccttttatggctcagaggtccacaraataaacttgcattcaagcaaggttgtaaaatacctatgcattaagagcagtccagttgaatatttgcaaagcatatataaaagagcttctctcctaaaa

SEQ ID NO: 301848 - DNA, 201 bp, Homo sapiens
atctggggtcttctgcaaatgaactgcccatagtctggccaataattcacactgttgtattgctgtctttcattctctcttaagtagagcgttctgaacayatctgaacaattttttgacacgctgttactctcctagccacaggttattttatgacctagtcattctttacataaataaacatttatcaacagtgctgtc

SEQ ID NO: 301849 - DNA, 201 bp, Homo sapiens
ttgccttgtgactcataacgttttcatcttgggtatttttctttcttggtctttgtaaaaattctaagcatcatagagcatatcacctggagaaaagaccyacgttcattatttaatgaaggtaaaaagtaaagaattgagtctgcatcctaagaaattagaaaaagatcaactaagtaaacaaaaaaatataaaaactag

SEQ ID NO: 301850 - DNA, 201 bp, Homo sapiens
ttgccttgtgactcataacgttttcatcttgggtatttttctttcttggtctttgtaaaaattctaagcatcatagagcatatcacctggagaaaagaccracgttcattatttaatgaaggtaaaaagtaaagaattgagtctgcatcctaagaaattagaaaaagatcaactaagtaaacaaaaaaatataaaaactag

SEQ ID NO: 301851 - DNA, 201 bp, Homo sapiens
ctgttgatctctccaagccttagtgggatcatctgtagagcagggataataacagcgcctatctgttactgttagggttactgcaaagattaaaataggtrgtgctcttaaaagacttagaacagtgctgtcatatagtaaggattccataaacattagctgctcggtttgtgtgtgtgtgtgtgtgtgtgtgtgtgtgtg

SEQ ID NO: 301852 - DNA, 201 bp, Homo sapiens
gtgctttctcctaaagaacaagctccttatattttgaattggatattttttctcctgaatttcatgtgactgccagtttgaggatatgattagtaaatgtmtaggggacttttctttggatttcacttatgaattgtgattttgaaaagtgagcgtctgagtattactctagaattgtattgtcttttattgctttgtgtt

SEQ ID NO: 301853 - DNA, 201 bp, Homo sapiens
gagcatattaattgtgagtatttaacattcttctttggtttattctgagaccccgtttgcctgccctttggcatcattggcagtttttggtggtctactgrtcttcctgtttgtgcctctcgtttgcccctttttcactggaatgtgccaggttgaagcaatatgtagggcccggtgggatgggccaggaggtggcctttc

SEQ ID NO: 301854 - DNA, 201 bp, Homo sapiens
catatgatgactctgcagctttcgtggtttagagtggaatgaaaagtttaatcagtttggtttcttttactagtaatcactagccagtgagtgctttctcmtaaagaacaagctccttatattttgaattggatattttttctcctgaatttcatgtgactgccagtttgaggatatgattagtaaatgtctaggggactt

SEQ ID NO: 301855 - DNA, 201 bp, Homo sapiens
tctagtctgttcttgttttgctgtgctgatatcctcttagattttacgagcatattaattgtgagtatttaacattcttctttggtttattctgagacccygtttgcctgccctttggcatcattggcagtttttggtggtctactggtcttcctgtttgtgcctctcgtttgcccctttttcactggaatgtgccaggtt

SEQ ID NO: 301856 - DNA, 201 bp, Homo sapiens
agagagacagctgcacgctccatcgaccaggcatatgatgactctgcagctttcgtggtttagagtggaatgaaaagtttaatcagtttggtttcttttastagtaatcactagccagtgagtgctttctcctaaagaacaagctccttatattttgaattggatattttttctcctgaatttcatgtgactgccagtttg

SEQ ID NO: 301857 - DNA, 201 bp, Homo sapiens
tccagctgtggagaaatagacgccttagaacagattctggccttcctgtttctctgttcctgatcgctccctttcagtgaaatggagtacagagagacagstgcacgctccatcgaccaggcatatgatgactctgcagctttcgtggtttagagtggaatgaaaagtttaatcagtttggtttcttttactagtaatcac

SEQ ID NO: 301858 - DNA, 201 bp, Homo sapiens
agtgtccaagccgaggatgctgtatatagaatagtaagtaccctgtctccagctgtggagaaatagacgccttagaacagattctggccttcctgtttctstgttcctgatcgctccctttcagtgaaatggagtacagagagacagctgcacgctccatcgaccaggcatatgatgactctgcagctttcgtggtttaga

SEQ ID NO: 301859 - DNA, 201 bp, Homo sapiens
gaaatgtgaattatgggcagttgggaaattgaaaagcagatgggcaatgtatattaaaataaaaaactatcatacctttcttctaagcaacctttgtcctyggttatttgtcttttagaaataaaaaatgtgtgcaaagtcatatgtataaggatatttattgtaccattatagtggcaaaatactgaaaatatgaaaacc

SEQ ID NO: 301860 - DNA, 201 bp, Homo sapiens
gtagtgtcgcttgtgggatagtgacattactatcccacaagtgacactgctaagatactaacagatgcgtttttaaagcacattgggttatggcccaaggmtaggggaaactgatggggactcgttaatggtcagatggcgtggcgtgcaatttaacactgcacacttgagtgtccaagccgaggatgctgtatatagaat

SEQ ID NO: 301861 - DNA, 201 bp, Homo sapiens
tttgctgcaggaggtcaggtcagtcgttgttatataatttgctttgttttttgtcccattaagtaatactgaacgagagtagtgtcgcttgtgggatagtsacattactatcccacaagtgacactgctaagatactaacagatgcgtttttaaagcacattgggttatggcccaaggctaggggaaactgatggggactc

SEQ ID NO: 301862 - DNA, 201 bp, Homo sapiens
tcttaatagttaaaataggtgaacgtaaagtttagtggaatttgattatctgtcatggcctgtttgctgcaggaggtcaggtcagtcgttgttatataatktgctttgttttttgtcccattaagtaatactgaacgagagtagtgtcgcttgtgggatagtgacattactatcccacaagtgacactgctaagatactaa

SEQ ID NO: 301863 - DNA, 201 bp, Homo sapiens
caactttggcttcacgggcacaaagggggacaggttggtgaggtatcctcgcattcggctggagaggagcacctcgtaccccacgcagccccgaagcgagmgagggagccccacggaagatcggggagccctggaggcatcgcctcgagctggcaggatggctcctgaaatccgcaggacgaactccgcggagaggactcc

SEQ ID NO: 301864 - DNA, 201 bp, Homo sapiens
ctctgggaagcggtgttttgtcttccagttgcagcagccccaacaaggcgcttcggggccaggcagcgacctcaactttggcttcacgggcacaaaggggsacaggttggtgaggtatcctcgcattcggctggagaggagcacctcgtaccccacgcagccccgaagcgagcgagggagccccacggaagatcggggagc

SEQ ID NO: 301865 - DNA, 201 bp, Homo sapiens
ttgtgtctcttgaatacacgaagttcctcctatagtcattggctctgctgcctctgatgaggcacttccgtgttccccacatttgaatttgctcccgattygagagaggcaggcatccgcggcagcagcttccaacccagacaggcttaagccgcgcgagggtgcccgggtgggtggctgcgcagggccctacctgggcgg

SEQ ID NO: 301866 - DNA, 201 bp, Homo sapiens
aaagtagttaagttctgacttcatagaacagaatctaaacttttgttcatactgcttttgtgttcttgggccatctgaaaaccttttctgtgtaaatattsctgcaatatgcggtcttacagaggtcttatcacgcatatttccctttgcttccttatgtatcgtattttttcaagaagaagacattcaactttagagaca

SEQ ID NO: 301867 - DNA, 201 bp, Homo sapiens
gtcatttgcttgatgctattggcaaatgtgaagcagttaccagcataaaagcttggaggttactccgaatgtatataaacaacagtggctaggctcacaastgggagagagtctaaaaataggtaggcgatcccttatctcgttgcattgaaaattgtgtttatatgaagtgatattattagaaatgatgtgtgagaaaag

SEQ ID NO: 301868 - DNA, 201 bp, Homo sapiens
aaaatgtatctttatgcagctttgaacaaaggattattattgctggactgtggaccaaaattttagtcaagttttttttttttaatgaaaagaaactgttmatttatgcagacatacaactttgtgtcctatagagacttgtcatctgctcttaaagttagcaccctatttttcctctggatgtccactgagaaacccact

SEQ ID NO: 301869 - DNA, 201 bp, Homo sapiens
atatttaaaatatctcagtgatcatatagcctcagaaagcacagttttctgagctgggtgtcatgttgagtggtgttagagtgccgtgctgcgtgctcagrtgctatgctgtgaggaaggatgataggagcagattctgtataagcagatgcacaaccacccacagctgcactttggcacccagggcagacaaataaaaag

SEQ ID NO: 301870 - DNA, 201 bp, Homo sapiens
tggagcctcgtgcccaaccagcaaggactctggggcatcggccagtggcagtaagccagtgtggtgggctggacaatatgcctgcactgcaggagacggtstcacgatcagcccccgacagccggtctcaaaagtggaatttgaagagtggtcattgcttctcatgaaagtgtcgccgtaactcatgaaagtgtcacctgt

SEQ ID NO: 301871 - DNA, 201 bp, Homo sapiens
gggaccacactcatcagcagagagcacaccaccagcttttgtcagtggctatacgagtgcagggaggtaatttggaattacaggagttgtactgcgatcarcagaagattgcaaatttgggattcttagaccagaggagcaaaaggaactgaagtttgttatatcacatgctgagctaagaggccagtaggtagatttaaa

SEQ ID NO: 301872 - DNA, 201 bp, Homo sapiens
caagtggtattatttctcataatactgatggaaatgtgaattatgggcagttgggaaattgaaaagcagatgggcaatgtatattaaaataaaaaactatyatacctttcttctaagcaacctttgtcctcggttatttgtcttttagaaataaaaaatgtgtgcaaagtcatatgtataaggatatttattgtaccatta

SEQ ID NO: 301873 - DNA, 201 bp, Homo sapiens
acccaaatgtgcaggattagggggattatttgaacttgcttgctttctttttaaaatgtccattagacattttttgcatgcttcaaaatcaaaaggcggcrcagtgaaaacattttaattatttatgtatttaacctgtatcatcttgtttctaacctcttttcttcagggtggtgcagtcaaaaattacacagatattgc

SEQ ID NO: 301874 - DNA, 201 bp, Homo sapiens
tttttgctagggaaatgcagattaaacaatgagacgttactttaaacccatcagattggtaaaaatagagaaaaataacactttttgatagcaaggctgtratagaagtggcaagtggtattatttctcataatactgatggaaatgtgaattatgggcagttgggaaattgaaaagcagatgggcaatgtatattaaaat

SEQ ID NO: 301875 - DNA, 201 bp, Homo sapiens
cccagtggttttcaattttggctgcacatcagaatcacctgggggaggtttaaaaccctacctctgcccccatgccctggggttcacacccagaaatgctracttcattggtcgggggctggcaggcctggacattggcggtttgcttagaagctgcccgggtggttctcatagcagccagggtcaagcaccacggcctgt

SEQ ID NO: 301876 - DNA, 201 bp, Homo sapiens
actttatctgccccgctggaggtgagacggctacctcatctaactggactcactctgtcctgtgactcccattctttcttctctcttaactctgccttcartttcgcagccacctcctctctctgatcagtcgttgtgttggtagtgaagggtgttcttgtgcagcctttctacctgcttctctgtctcgcccagttaaca

SEQ ID NO: 301877 - DNA, 201 bp, Homo sapiens
cgctggtccctgcagcacgttccagatgcttctggaagctctgggaagcggtgttttgtcttccagttgcagcagccccaacaaggcgcttcggggccagrcagcgacctcaactttggcttcacgggcacaaagggggacaggttggtgaggtatcctcgcattcggctggagaggagcacctcgtaccccacgcagccc

SEQ ID NO: 301878 - DNA, 201 bp, Homo sapiens
cagtactgttgaggttggtactggcataaccagttctttatctggagagggggttgggggaacagcacagacctctatctaatatcataatcagtaataartcccggaatcttcaaacacttaaatgtaaacaagcaattcaacttttacaagaaaatataagaacctattttgtataatcttggagtgagggagaatggt

SEQ ID NO: 301879 - DNA, 201 bp, Homo sapiens
ggaggctgccccgggcctgcgcatccagcaccgcgcctccagcgccgacgtgcgccaggtgaggctgctgcccctgggccccgatggccagggcggcccgsccgcggcagagcccaggcgctggtccctgcagcacgttccagatgcttctggaagctctgggaagcggtgttttgtcttccagttgcagcagccccaaca

SEQ ID NO: 301880 - DNA, 201 bp, Homo sapiens
ccaagacaaatatggaaaagaaaaccggtgagggcagatttggcttacaagtaatgacaacatgctaagaataagaagtcttcgtgatcaaagcaatgtgktattgatccagaattacataaatagttcagtggaacagactagagaatctaggactgtgtctcattaagagagtgaatgtataacaagatgatagttcag

SEQ ID NO: 301881 - DNA, 201 bp, Homo sapiens
atggatgaatggagaggaagactgaaggataagtagacaagtattttttaacctggttatttttggagaaaaaaataattcacttttggcttacatttggkctttttttttcttgttataaaatctgatcctcagtatagctctctataaaatgttaagatttcaatatttatataaacaatgaacacattcaactttccc

SEQ ID NO: 301882 - DNA, 201 bp, Homo sapiens
tattccgtgtggcggaaggtgggaaaataccgtgtgtgctgttaaacatgccaggtccctgcactggttagacagagtctcagtgctgtgctccgttgggraagaagtgccctgcgaatgtgatgtggtttagatttatagcagcgtggcttgcagtgtgtttgctgccttagtcagctgtgagagcgccctgctggggcc

SEQ ID NO: 301883 - DNA, 201 bp, Homo sapiens
atttccaaagtggtgggttttctctttaattgaataaaataatcctgaagtctttatagaagaataaatacgtactacctgagaggagccaagacaaatayggaaaagaaaaccggtgagggcagatttggcttacaagtaatgacaacatgctaagaataagaagtcttcgtgatcaaagcaatgtggtattgatccaga

SEQ ID NO: 301884 - DNA, 201 bp, Homo sapiens
cccaggccatctgcagtgtggttactatgcaaagaatgctggtgttgctgtttttttttttttctttgttggctattaacccagcggagacaatatgtggmtatggtagtacttggaagttctagcattacacagactagcttccatttctctcatagaggtcatttttggcatttaaaacacatacttttagaaaacaga

SEQ ID NO: 301885 - DNA, 201 bp, Homo sapiens
cttattacaaaattaataagtaaatttcttgtgattccggttagaatttccaaagtggtgggttttctctttaattgaataaaataatcctgaagtctttrtagaagaataaatacgtactacctgagaggagccaagacaaatatggaaaagaaaaccggtgagggcagatttggcttacaagtaatgacaacatgctaa

SEQ ID NO: 301886 - DNA, 201 bp, Homo sapiens
agtgcagtggtgcagtcgtagctcactgtaacctcaaacccttgggctcaagcaggactccaggatagctaggactacaggcatgagccaccatgcctggscagatttcattttagaaatggaatttttgaagcacattttgctttcttaactatctaaaacgtgtacatcaagtagctgtgaaccaggtgttccaactat

SEQ ID NO: 301887 - DNA, 201 bp, Homo sapiens
tagaaacctatctgaaaaagtttagtagccattcctaatatagtacaatctgagaaagcgaactaggaataaaaataaattacttaaacataaaggccatrtatgtgtacacaaacacacacacaccacagcaaatatttcctaaaagacaaaacactaaagccattcaattaaaattaggaatgagagaagaatcttaca

SEQ ID NO: 301888 - DNA, 201 bp, Homo sapiens
gaaccttagaaagtacctttaaagaaacaaagatatgcctgaggcatataacagatacaaactaacattttatatatagattgatgtatatataatatgtktatgaagatcgacacatacataactgaaataattatgatttcattttattgtttttaattttttttagagagagggtctccctctgtcacccaggttgga

SEQ ID NO: 301889 - DNA, 201 bp, Homo sapiens
tcatattgaaggagaggaatatatgaataagtcagtagaggctagaaacctatctgaaaaagtttagtagccattcctaatatagtacaatctgagaaagygaactaggaataaaaataaattacttaaacataaaggccatatatgtgtacacaaacacacacacaccacagcaaatatttcctaaaagacaaaacacta

SEQ ID NO: 301890 - DNA, 201 bp, Homo sapiens
attttttgtgctccaaacttgggctactacatacagcatctgctttccattatgctcagagctgaaatatggcactgatactttcatacttggtgaaatcmtatgtacagcctccaccagatgtatttgaaattaccctgtggaggactgaaaagctaataggagctgatagatgctgttggcctttagttaactctgaaa

SEQ ID NO: 301891 - DNA, 201 bp, Homo sapiens
agtcctttcttccatgctgaggacaaaggtatccttgccatctccttgtgagatgtacatttaagtagactgatagaaagatgaacagatggatgaatggrgaggaagactgaaggataagtagacaagtattttttaacctggttatttttggagaaaaaaataattcacttttggcttacatttggtctttttttttct

SEQ ID NO: 301892 - DNA, 201 bp, Homo sapiens
ggggatatctggcagtcctttcttccatgctgaggacaaaggtatccttgccatctccttgtgagatgtacatttaagtagactgatagaaagatgaacasatggatgaatggagaggaagactgaaggataagtagacaagtattttttaacctggttatttttggagaaaaaaataattcacttttggcttacatttgg

SEQ ID NO: 301893 - DNA, 201 bp, Homo sapiens
gaagtgatggtttttttttacatacaatttttaagagctgtctttaagaggcttatgcatgtgcagatgcatgaacacacatgtacagtcttccttcctakaacatgcttcctcttagttttgggggatatctggcagtcctttcttccatgctgaggacaaaggtatccttgccatctccttgtgagatgtacatttaag

SEQ ID NO: 301894 - DNA, 201 bp, Homo sapiens
caaattagctcagattcaagatttttgctctaacaactgaacgctcagttgcatctttaaactttttgttgcgtgagaggggctgaggggcaggtgggagraagtcagcctgcaggtgggaggtttctgtctcaggattgctgatacccctgcatgctgctgggttgcagccttggagtatatggcctatgagacatggca

SEQ ID NO: 301895 - DNA, 201 bp, Homo sapiens
tgacttatgttctaaattctctacaattcccttccatttgtcttaagaaactctaaacctttttttttttggaaatcactacttaatgattttgaggatgraaccccagacagttggtaatagtggatggttttccttttctgtagttgagtggctttctaattcttttgatggcacacaaaaagaaattaaccttagatc

SEQ ID NO: 301896 - DNA, 201 bp, Homo sapiens
agtgaaagtgatattcttaaaatatcttgtttgtttctttttaaaactctgaagctccagggtgccacgggaggggcctgcccagggcttctgcgtgagamctactccatgagccatcagaaacctgactgctcttctcaggtcacgttgggaggatgtgactatttcaccttttgtgagcaaagacctcgcatccttcta

SEQ ID NO: 301897 - DNA, 201 bp, Homo sapiens
aacgcccagagaggaccgagtgcccctagttactcgtgtgcccagagggtaacttgcagtggcgtgcttcacctccatacttcaaactgactagctgttcrcagccaactatagtcagagagatggaccacaaagaaaacaaaaggagaggcgtgaaggtatattctttattcatgtggcagtagaacccaagttgcgtgt

SEQ ID NO: 301898 - DNA, 201 bp, Homo sapiens
aggaccgagtgcccctagttactcgtgtgcccagagggtaacttgcagtggcgtgcttcacctccatacttcaaactgactagctgttcacagccaactayagtcagagagatggaccacaaagaaaacaaaaggagaggcgtgaaggtatattctttattcatgtggcagtagaacccaagttgcgtgttctgaatgcac

SEQ ID NO: 301899 - DNA, 201 bp, Homo sapiens
gtctaggtatttgaggttttactgaatatatagtatttaaagattaatgaaatagtcacacttatttatccaatttcctgctttggtaggaacttcacaaygaacttcacacaatcaaatgaacactgatttctttaaaaatgaacaaatactccacttgtactcatagcttcatgaactgaacctcagcagaaggttgat

SEQ ID NO: 301900 - DNA, 201 bp, Homo sapiens
ggaatttagaaaatcacttttttttcaagtttcttactcatttggccacaggtgacagcctgcagtagaaaaaccctcctctagaaatgccattctgcaaygagctgaccagaggaatgtcccttttttccttcctgacagagccgcctgtatttaccttgtcacagactgatgctgtgggtcctatcgtaccttttcagc

SEQ ID NO: 301901 - DNA, 201 bp, Homo sapiens
ccttcctagaacatgcttcctcttagttttgggggatatctggcagtcctttcttccatgctgaggacaaaggtatccttgccatctccttgtgagatgtrcatttaagtagactgatagaaagatgaacagatggatgaatggagaggaagactgaaggataagtagacaagtattttttaacctggttatttttggaga

SEQ ID NO: 301902 - DNA, 201 bp, Homo sapiens
tgcactctgttgatttttttcatctccctgaactgatctattaaaggaaatagattgataaatatcattttgactaaaaatatctatcgctgttggtgaartgatggtttttttttacatacaatttttaagagctgtctttaagaggcttatgcatgtgcagatgcatgaacacacatgtacagtcttccttcctagaac

SEQ ID NO: 301903 - DNA, 201 bp, Homo sapiens
aatttaaaataatttattaacaaatagactcttgggtgcatcaaaacacgaatgcactataatcaatagttattttccagtaacaccagggtgattaactrttagaaactcatcactatcatcagttgttacacaatcatattgaaggagaggaatatatgaataagtcagtagaggctagaaacctatctgaaaaagttt

SEQ ID NO: 301904 - DNA, 201 bp, Homo sapiens
tcatttcccatgtgcatttccgtgaagctgccctccgggactgcagccagaggcaggccaggcctgctgctccactcccctcccctcgttcattaccatcsttggcttcattcacatgggagaaaagtatgaaccccattatttaggattgaattcactgtggagttgtgggtggggaaagtgctgaatttttgaaaacgc

SEQ ID NO: 301905 - DNA, 201 bp, Homo sapiens
aagtaaatgaaaatcactctcatcactttccttcacattatgttaactggtgacaggtcatgacgcatgggaattgcttatgtttctgagctttagtcttrtaaaaataagtttagatagtccatcatgttcttcacattagacactcattacataaaaggttttatatgtattgtagatctttctgaaggtcatctatgt

SEQ ID NO: 301906 - DNA, 201 bp, Homo sapiens
atgcccagctaattttgtatctttagtagagacggggtttctccatgttggtcacactggcttgaaaaaatagaaaatttgagtgttatttttactcttcyaggacatactaaaacatggaaaggttcccagttcattttataaaaccatcaaaattttaatttaaaaatctgatgaattaaaaaaataaaaataaagatc

SEQ ID NO: 301907 - DNA, 201 bp, Homo sapiens
atatcatggaactttggaaaacagagattgttccatttatttttcacagatgaaaaccagagtgctgtgtggggatcaggaagagggaaatcaaccaaatrccttattttagagattttttttttttttctgggaaattggaaacagcgcttgtttatagccaatgcagcgtccttgaaactctcctacttacagttctgg

SEQ ID NO: 301908 - DNA, 201 bp, Homo sapiens
aggaagtgaaatttaaagtgcttgaaaaagatacaaggatatctggaagttccaaccggcgccattttatattttaaccatgacaagtagctgtatatcayggaactttggaaaacagagattgttccatttatttttcacagatgaaaaccagagtgctgtgtggggatcaggaagagggaaatcaaccaaatgccttat

SEQ ID NO: 301909 - DNA, 201 bp, Homo sapiens
ttgtcatcttgatcctgaatacaagggccgattgaagccccagaaatcatggggaagtactcgtttacataaagtggtcatgtagataatctaaaatatgmccgttagtgtattaagatcataactgcctaaagcttcctgtgccaggagtggtcttagctctcaaagaagtcatagtctggccaggcgtgatgactcatc

SEQ ID NO: 301910 - DNA, 201 bp, Homo sapiens
catacggttgtttgccaagaatggaatcagatagaatattttcaccaggaagtgaaatttaaagtgcttgaaaaagatacaaggatatctggaagttccarccggcgccattttatattttaaccatgacaagtagctgtatatcatggaactttggaaaacagagattgttccatttatttttcacagatgaaaaccaga

SEQ ID NO: 301911 - DNA, 201 bp, Homo sapiens
agttatatatagaagaaatgtttttggtaaaaatatttgaaagtttgttttataatcataagtagcttgggctattttgactagaggggtgtgtgtgtgtrtgtgtgtgtgtgtgtgtgtggttggcagggagagaaggagggaggcaggcagctggtagggactgtggagtgtgtcagttgggagagggaaatgagatga

SEQ ID NO: 301912 - DNA, 201 bp, Homo sapiens
gaagttatatatagaagaaatgtttttggtaaaaatatttgaaagtttgttttataatcataagtagcttgggctattttgactagaggggtgtgtgtgtrtatgtgtgtgtgtgtgtgtgtggttggcagggagagaaggagggaggcaggcagctggtagggactgtggagtgtgtcagttgggagagggaaatgagat

SEQ ID NO: 301913 - DNA, 201 bp, Homo sapiens
cttctagctagtacaggcacagttgtgggttggtaggagaatgagcagtaaagccatgagctaacacaccaagtaatctgttgtgttcacaaatgtccaaragaataacagagattaaagaaaggtaaatacagccacctggcaaaaatatttacccttttaaaaatgatggaagttatatatagaagaaatgtttttggt

SEQ ID NO: 301914 - DNA, 201 bp, Homo sapiens
ttctcaaatgaataccattcaaattaatagcatgattttaatgtgacaggtgatgctattttattaaaactctatcatctgtgctcaggaagtcatggctrctagggtaagttttcctttcctaaccaattatgtgccagttggtggtaacataacaccgttttcctttgtttcctttattcaaacttctcttgtactatg

SEQ ID NO: 301915 - DNA, 201 bp, Homo sapiens
atgagcaaataataggtgtgaaagaacatggaacacttcagtgaatcaaatggagaggattaagcattaccccaataatgattggtcaggacgactgtccytgtggagtgtgtcccagaagggttgagcaatggagcaaacccagaaaatctcattctcaactctccctgacagatgacctcgtctgcgctgtcttttgct

SEQ ID NO: 301916 - DNA, 201 bp, Homo sapiens
ggaattcttgagaaaacacttcatacattttaaaatatatactatttttttgatggctccacaggtgtagacatgtccccacactcatcaagaggtgtacrttaaacatgaacagctttttaatgtgttgattagacctcaataaagtgatttaaaagagaaaccatctttggtggcagtgtcccagaaactaaaacaaaa

SEQ ID NO: 301917 - DNA, 201 bp, Homo sapiens
atgctccagtgatctgtactttgaaaacacattgagtccctttaaccaggaagaactcttctgggcgaccgtccacatgttcctttcccttcctaatgacstgaagtctgaactctacagagcctctgtaccttctctttaaaggcagctctgctcaccaggaattggctataattctttccaactctctcatcattttaa

SEQ ID NO: 301918 - DNA, 201 bp, Homo sapiens
tagccacactgggcctgcatctgtgcaaggctgcatggctagaggtgtgtgctgggcacacccattaggtgggactgcgcctttctggccactagggaccrtacacctcctgttgttttcatgggggctggtttcccttgctgacacgtggccatgaggtccctcgaggtacaggccggcatttggacttgtcctctgcac

SEQ ID NO: 301919 - DNA, 201 bp, Homo sapiens
catctgcttgtgctctctgtcgtgtttgtgttgttttggtgccatcctttaacatcacaaatgtcagagttagagaagccaaagagcaaatgtttgaggtyctaagcttgactgtgtcttagagacagctgtgggcttctccacgccctgggtccagatgctgataagtgggaatggatgctgtctcttccacactctgat

SEQ ID NO: 301920 - DNA, 201 bp, Homo sapiens
ttttgtgctctaaaacttgccaatctgttcttcattagactgtgagctcattaagagcaagggcacatttttctccactctgtaaaatctccatccataaygcttagtacagaacagtatttttggtacatactgagtagctaccaaaggatggtggttataagtacttaatattgttgtgtgtttatccaacagagaaaa

SEQ ID NO: 301921 - DNA, 201 bp, Homo sapiens
tttgtgctctaaaacttgccaatctgttcttcattagactgtgagctcattaagagcaagggcacatttttctccactctgtaaaatctccatccataatrcttagtacagaacagtatttttggtacatactgagtagctaccaaaggatggtggttataagtacttaatattgttgtgtgtttatccaacagagaaaat

SEQ ID NO: 301922 - DNA, 201 bp, Homo sapiens
gtaatattcaaagacgattaaatgcacgatttccttttctcataaaaaaagaagcagacggaacttgtattctgaaagcaaatatggaaatcacattaaamatcagaaaatcctcaccaccgccccccacccccatgtgcatttcatttctctttggtctgagttcaagggagagagaatatgaatgtgctgctagctcag

SEQ ID NO: 301923 - DNA, 201 bp, Homo sapiens
ataggagacctggcctgaggaggcttcttcctggtaacctgggttgtcactgggaccacatcttcccataagaataatgcttcaggttgtatgggagaagygtctgacagcagtaacttcagcacaccctgagaatggcccttatggcagacacaccggacagcagtcactgaagaaatgagggttgccacatggaggttg

SEQ ID NO: 301924 - DNA, 201 bp, Homo sapiens
tattatgtcctatttgtgtttcctgcttttgaggttcttagtccttttaattaactcctaatgaactaatatagttttgtggtcaccagcttctagctagyacaggcacagttgtgggttggtaggagaatgagcagtaaagccatgagctaacacaccaagtaatctgttgtgttcacaaatgtccaaaagaataacaga

SEQ ID NO: 301925 - DNA, 201 bp, Homo sapiens
tgcagggaggtcctgactgctcagagcttaaattctgcattcctttattttaagtgtttggccaactgcagaggaaggtaccttgaaagatactccctctyctccctcactgctgggtcccctgtcataggagacctggcctgaggaggcttcttcctggtaacctgggttgtcactgggaccacatcttcccataagaat

SEQ ID NO: 301926 - DNA, 201 bp, Homo sapiens
taagtttaagttcatttaagttctctgaagtggtgattctgatgctatatagatgaaggttggtttgttgaagagctgactctggtatttcatccaacatytgcatttttctttagctaaggatgccttgagaaacattctagtctcttaggcctgaatttgttattagcttaatagctttcctctggttgaatttaaatg

SEQ ID NO: 301927 - DNA, 201 bp, Homo sapiens
cctgcagcctatcagatttcccttgagaactggggattattggcttattccttgctacctccaatcccaaattaagcagagtgacatgtaagaagctgggkacatcagcctaaagcgtttatcaggtatgtccttcccaactggatcttttctactccctggcccgaattttgttttagggaatggggcctattttaattg

SEQ ID NO: 301928 - DNA, 201 bp, Homo sapiens
tcacattgcttttctgtcctccctacattaaagttagcactgatgcctttatgtttaaggaaagcctcctgcagaggggctctgcccatgtaagttcattrgaaggcaggtgtacagcctctgtcacctgaagacctcttaactgtctattccttctctggtctatcgaggtgtattgggggggttacagcaccctctggt

SEQ ID NO: 301929 - DNA, 201 bp, Homo sapiens
gaatttgctcccgattcgagagaggcaggcatccgcggcagcagcttccaacccagacaggcttaagccgcgcgagggtgcccgggtgggtggctgcgcavggccctacctgggcgggagcggctgcagagccctgtccacgcggtgcctccccagcacggcacctcccactccaggctgttggttacctggccgggagct

SEQ ID NO: 301930 - DNA, 201 bp, Homo sapiens
aataacgaacgtgtaaatcagaattcaggtgtgttgaagtggggccttgcacacatcctggtcagcccagggtgatttcctctctggccagtggttttggsttttttcttcacatgaactcgtctgttgtaactaatggtcactgagtgacttcagaggtagtgatagctcatagtgaagcccgtgacccacagcggtggg

SEQ ID NO: 301931 - DNA, 201 bp, Homo sapiens
ccagatacttgttattgactaatttactgatttaaaatcataatctgttagaacaacgttttgttgctgctgctagtgtgggaaatcctcaaggtaacaastggaaattccacaagctactccccttcttaagcgaattcagatgtgctgacacagctgcgctatcgcttctaaacaaaggcctaggcaggattttccctg

SEQ ID NO: 301932 - DNA, 201 bp, Homo sapiens
ccgtgggacattgtgtcttcaagggcattcttggcatttggggcagggacatttgtgccttcagttgcagactatttaacaaacttggcttctgctaccasgtgctaatggtcaccattacccccaccccaacatagtgatgaccagaaatgccctacacatttcaaaacagccctaagtgagaaccactctaagagctct

SEQ ID NO: 301933 - DNA, 201 bp, Homo sapiens
gtgggtatgggtgggtggggatgcctgccctgtgtgctgtgggtatgggtgggtggggatgcctgccctgcgtgctgtggtggttggcttttgctgaagamgattttaagtgtcctttgaagtcacaacccttctaaccaattttcttccattatgtgtgcagtcataagtctcgagttaagggatttttgcgattgaaaa

SEQ ID NO: 301934 - DNA, 201 bp, Homo sapiens
ctcccaggttcaagtgattctcctgcctcaacctcctgagtagctgggactataggcccgtaccaccacgcctggctaatttttgtatttttagtagagaygaggtttcaccatgttggccaggctggtctcactctcctgacctcgtgatctgcccgccttggcctcccaaagttctgggattacaggttcttaaggtct

SEQ ID NO: 301935 - DNA, 201 bp, Homo sapiens
attctagttagggaggaaaattttggtaactgaaacacttgagtgcatatatatgtgtataatataaaattacttctggaatctaaatacaacagaattargtaagatttcctcaaccttttatatttaatatttagaatagctatatgtcgaaatgactgaaatatgtgaattagcagagatttctgcttattgagcatt

SEQ ID NO: 301936 - DNA, 201 bp, Homo sapiens
tggagtgcagtggcacaatctcggttcgctgcagcctccacctcccaggctcaagcagtcctcccacctcaacctctgtggtggctgtgactacaggtgcrtgccaccacacgcagctacattttttttgtatttttttgtagagatggggtttcgccatgttgcccaggctggtcttgaacccccgggctcaagcgatct

SEQ ID NO: 301937 - DNA, 201 bp, Homo sapiens
aattgtcattcccatttcattcatgagcaggctgaagttaagagtggttaagtaccagctgaaagggaggaggagcctgagagcaatctgggcacccgttytccccctcttcttatttatgaatgaatgaatgagacagggtctcactctgtccgggtctcactctgtcgcccatcctggagtgcagtggcacaatctcgg

SEQ ID NO: 301938 - DNA, 201 bp, Homo sapiens
gtttggaatggtgctgggtactagtattaatacatgattttctctggtctttgcaaaaactgcctgagttaggaattgtcattcccatttcattcatgagyaggctgaagttaagagtggttaagtaccagctgaaagggaggaggagcctgagagcaatctgggcacccgttttccccctcttcttatttatgaatgaat

SEQ ID NO: 301939 - DNA, 201 bp, Homo sapiens
caataaatgtagactcctagtgattctgactagcaggtctggggtggggccaggtacccagatttgcacgggaagtcagggaccactgctgctgactgctyttttcctgggtgcttggcacactctgtcacaatcatgttttcatttctctatgttccatttcaactggatagggacagtgtcttttgtttctggaacctg

SEQ ID NO: 301940 - DNA, 201 bp, Homo sapiens
gccatgccagactttttaatgttcggaaccccagctccagcctatcactggagctctgcctgtgatctttccacctcatgcctcccggttctatgtgtgcsttcagactccatctggcagtggtatctggatggaccagtgcatagaaatcacatgagacactcaataaatgtagactcctagtgattctgactagcaggt

SEQ ID NO: 301941 - DNA, 201 bp, Homo sapiens
taggccttcagcgccgcaagggccagcaccgagtcctgcacatcctgctctagtcccacatcggcccaggggcgttgagctgaggacagctccctaccccstttctgtgcttggccgactccagcgcccgttcttctgcccctccttggctctgcctccccaccccttggctgaatctctcctcctttcgtgcttgttctc

SEQ ID NO: 301942 - DNA, 201 bp, Homo sapiens
tccacctaggtatagaattctatctctaagacacagacagaccatgttcctgcctgggcaaacacttcggtgactgtgcattgccctgggtgaacgggggyacagaggtctttgtgacgccctgcaacgcatccctctccgagccgcggtgcgctcttcctcctctgtgccttgccggtgcccagaaccacccccttctcc

SEQ ID NO: 301943 - DNA, 201 bp, Homo sapiens
tttattctgataaaaatgagcaaataataggtgtgaaagaacatggaacacttcagtgaatcaaatggagaggattaagcattaccccaataatgattggwcaggacgactgtccctgtggagtgtgtcccagaagggttgagcaatggagcaaacccagaaaatctcattctcaactctccctgacagatgacctcgtct

SEQ ID NO: 301944 - DNA, 201 bp, Homo sapiens
tctcttattattgcatatgtagtcaagccatcatgttcttgaagtgagacttcaaccactagtggggccgtataattcaggatcttttgtttgtccttacrtagtttcttggcctggaatgtcaaaatatcagaaactgttctttctctggaatcatctgtctccgtgatggcctcgccatctgtacagtcatccaagcta

SEQ ID NO: 301945 - DNA, 201 bp, Homo sapiens
caatctttttgcaagctgtcccagtgccatattgaccatcttccttttacagcaaaaagttattgcttcctttggttaaggttgggacacccctctggagrcacacttgaaaaatgaagacctttctcgttgttcttctgttatccaagtatcttggaagaacacctctatagcaggtagacaaggcagggtgtcattgca

SEQ ID NO: 301946 - DNA, 201 bp, Homo sapiens
tttcttccacggtggtgtactggctctctggagtgtgatttcatcttctcttattattgcatatgtagtcaagccatcatgttcttgaagtgagacttcamccactagtggggccgtataattcaggatcttttgtttgtccttacatagtttcttggcctggaatgtcaaaatatcagaaactgttctttctctggaatc

SEQ ID NO: 301947 - DNA, 201 bp, Homo sapiens
actaggcgttcatggtaggaaagtagagaaacatgtggaagaaatactgcgtttcaagtttgggagtggctggtagaaaaatcaaactaggctagtcttayagctttatcgcagttttgttttttttcctagtaggaaaatgatagtattggttgtatattaaaacactctctctgacactgacttgaatcacgtgcgagt

SEQ ID NO: 301948 - DNA, 201 bp, Homo sapiens
tcttaaatggtaaataaaacctttcctacatgctataggtagttatctaaatcagggcctaacaagcttttttatttattttcctgtaaaaagccagataytaagtagttgaggctttgcaggactgatggtctctgacatagcactaaagcagccttgggcaatacataaacaaaggggcatgtgtgtgagctgatggtc

SEQ ID NO: 301949 - DNA, 201 bp, Homo sapiens
gccagaaggtgctgtgtagggagaggtgtgcattaggatgctggagcgtggctgccggcgtccccaccccaggaggaagggactcgtttctctgaaccttkttaatggttctccccattgtagacaggactggctctccaccccatcctcagtgggtgcagctttggggaggccgtgaggctggtgatcttggggcctcct

SEQ ID NO: 301950 - DNA, 201 bp, Homo sapiens
caagaacaagccctgctcaaggggatttgggctgtcattttatgccttgcccattgtgtggtatcagttcagtccagcaggtctagagggcgtgctcctakaatcctttgaaccgtgggacattgtgtcttcaagggcattcttggcatttggggcagggacatttgtgccttcagttgcagactatttaacaaacttggc

SEQ ID NO: 301951 - DNA, 201 bp, Homo sapiens
gggaagctctagtttagacagttcaccgtgctggatggaaaggtattgctctgtgctgttaagattttgttaattgatcccgtctcacaaagtaatctcaytaggagttataatcattttcaaataattttttcttttgtcagtttcttcttgcactttcattggcattacccaccttcttttgatttgtcgctttagttt

SEQ ID NO: 301952 - DNA, 201 bp, Homo sapiens
ttaacaaaaattgaactaccaaccaagccttcaggaacacagccagaaggtgctgtgtagggagaggtgtgcattaggatgctggagcgtggctgccggcrtccccaccccaggaggaagggactcgtttctctgaaccttgttaatggttctccccattgtagacaggactggctctccaccccatcctcagtgggtgca

SEQ ID NO: 301953 - DNA, 201 bp, Homo sapiens
aaacttgccaatctgttcttcattagactgtgagctcattaagagcaagggcacatttttctccactctgtaaaatctccatccataatgcttagtacagmacagtatttttggtacatactgagtagctaccaaaggatggtggttataagtacttaatattgttgtgtgtttatccaacagagaaaatgtaaagttaga

SEQ ID NO: 301954 - DNA, 201 bp, Homo sapiens
tgttttccttacaactctggtacatgaagtacaggttctgcatcatgatggaagactgcctgggttcatgtttgggccactacctactagctctatgactytgggcaagtttctttcttcttttttttttttgaaatggaattttgctcttgtcacccaggctggagtgcaatggtgcaatctcagctcactgtaacctct

SEQ ID NO: 301955 - DNA, 201 bp, Homo sapiens
gaactgacttctcctcttcctcccccattgaggagcagcaccttactctgtgcagagtctgtctgtgatctgcaggctctttgcagagctacatttctctytggaggccttgctgagcagcctccgctgtctagggcattgctgagaatcacaacatcaacactaatggcccttgggccaaaaagtgtttgtcttaaaatc

SEQ ID NO: 301956 - DNA, 201 bp, Homo sapiens
tttgaggagggattcggggagcctgttcatgttttccttacaactctggtacatgaagtacaggttctgcatcatgatggaagactgcctgggttcatgtktgggccactacctactagctctatgactttgggcaagtttctttcttcttttttttttttgaaatggaattttgctcttgtcacccaggctggagtgcaa

SEQ ID NO: 301957 - DNA, 201 bp, Homo sapiens
actcaagacactatgtgaaatgaccctgtgtttcctacattatagaaaagaggaaaatgaagcaagttcaagaaaattagatttatgtggaaaataaattstgcatctagttattcattatcaggtatgagattacaggcatgagccactgtgcctggtgacctcatttgaactcgattacctctgtgaagaccctgtttc

SEQ ID NO: 301958 - DNA, 201 bp, Homo sapiens
cactgttctcatgccagatcggtttcaaggaagaggacatatggaaggatctagaaaatgatttctctagaattgtccatgtccaagtcccctggaatgtstttgtatatccccagagctgtgcatgctccagtttgaagagctctgctttaaaagatatcaggggtgggggagatgaggggggtgaagtaaaagaataaa

SEQ ID NO: 301959 - DNA, 201 bp, Homo sapiens
taagcaggaaaggagagccacagaaggcaagcactgttctcatgccagatcggtttcaaggaagaggacatatggaaggatctagaaaatgatttctctakaattgtccatgtccaagtcccctggaatgtctttgtatatccccagagctgtgcatgctccagtttgaagagctctgctttaaaagatatcaggggtggg

SEQ ID NO: 301960 - DNA, 201 bp, Homo sapiens
gattctgttccttcattattttgtcctccagtggcttttatacccagcaaagtggaccatggtgtatgattcaagaagggtgaggagtatgtctttctttkgaaaggcagggatggagggttgtgatttagaaagggtaagcaggaaaggagagccacagaaggcaagcactgttctcatgccagatcggtttcaaggaag

SEQ ID NO: 301961 - DNA, 201 bp, Homo sapiens
tttaaaaaatactatttatgttccttataggtaaacccatctaatcacagactcctatttgaagtatttgacgaaaatagactggtaagtggatgcctgtrtttgaattttgcttcatttttttattaactggattttcagagcagcgtctttaaaactctgtgtttatgttgtacttaggacagtatatgtgcccaaaaa

SEQ ID NO: 301962 - DNA, 201 bp, Homo sapiens
tgtttttcttatgacaaaatcaagcctggatggtgtcgttaacggtgaagttaaaatttttcttttgctttccttaatatttccgtgtttttttctttttytttttttttttttttttaacaaaagtctggtttctaaaccaaaatatttaatgcttcaaaaggaaaaaaatgtaagtcagtccaaagaaatgattcattt

SEQ ID NO: 301963 - DNA, 201 bp, Homo sapiens
gcatccatgagccctctgctctttgcccatagggagcaaagacacaatctttttgcaagctgtcccagtgccatattgaccatcttccttttacagcaaaragttattgcttcctttggttaaggttgggacacccctctggaggcacacttgaaaaatgaagacctttctcgttgttcttctgttatccaagtatcttgg

SEQ ID NO: 301964 - DNA, 201 bp, Homo sapiens
atattctagtatatgattgtaccataatttatttaattgcttcccaattattggactggaagtttgcttctaattttttcttattatatatgatgctgtartgagtaccttttaccagtaaatatttacctgcctctctgattacttctttgggattaatccttagaaataaatttgatgaatcaaagggcatcaaccctt

SEQ ID NO: 301965 - DNA, 201 bp, Homo sapiens
tgtaatctaacccattaatctcttatttttgctggaaaattgtacatatttaagagtagtggctcattgccagtattggtgatgagtgatatattttaaastatgcttcatacctttcagtaaatcttgggctgaaagatatgtacgttttgttttcaaaatttttcagtagtcatctatttaggtcaattttctgggcaa

SEQ ID NO: 301966 - DNA, 201 bp, Homo sapiens
gggaaaaggcataagaaaatatgctggcaataaagacaagtcacagattgtcattttctttggtgactgaagggatatttcagtaatttataggtgaaatyttcctttttgtgacttccactgaacaacatttttactaccaaaagataagggaacaaaattttttaacaaactatttaagcttaaatatttaaacatttt

SEQ ID NO: 301967 - DNA, 201 bp, Homo sapiens
tgagctgagtgtagaataagttcccgaggtacttctggcaccgttgttactcccccaccgagaagcccagaatgttcccaggtgtgttcaaagattgtacrggaagggcttaggacggtgcttggctcatataaacactcagtggcaaagaggttgatgcttaagtacacaggaagtgtttaccagtacacataattgtat

SEQ ID NO: 301968 - DNA, 201 bp, Homo sapiens
ttataagatagagaatgggtcaagacgagcagctccattctttgtttgtgtttaggccagtgccaagttcaagatcttgcctcagggctttcctggtaccmctgggaatgtgtatcagcagcagctgtgtcactgaatgggtgtcacctggggggctgcctgttcagacattagaagctgccacatcccctgttaactcca

SEQ ID NO: 301969 - DNA, 201 bp, Homo sapiens
ttgtccttttcggccgtctcggccccagtccagtacttaggatccaagatcattttcagctccttccagccaagtctcactttattaaaggagctttgttyggagcagattggataaccgagccgcgactccacttgaacatctgagcagttggcccgcgtgggaaacagcaatggcagagaaagatgcttccctttggat

SEQ ID NO: 301970 - DNA, 201 bp, Homo sapiens
tttagcggggggaaaagagatgagaacaaaaccagaagaatcacagtgatagtgtctgagcagaagggagtgcattgagtcctcagaggagaaagtgactyggctggaggctcagggaatctttcccaggatgagctgcacctcggaggtggggtagcatttgagcgttcaaaggctggggtcatttcagatgagtgagga

SEQ ID NO: 301971 - DNA, 201 bp, Homo sapiens
gtggtatttgagcttctttagagtcttgctactcccaccagctgtactggcatcaccagggagcttgttagaaatgcagattctcgaggcgcggctcacamctacccaatcagactacattttaaccagatcccaggcaatccctgtgcacgtgaagtgctagaacactgctctgcggtaaaacgactttgctaaccatgg

SEQ ID NO: 301972 - DNA, 201 bp, Homo sapiens
aaaaaaattgttgcaaatgtcagtgaaatcttttaaaaaactgttgtactttagaagtgcctcaagtgactaatggaggcttaggactctgagtggtgtcrcaaggaaccttatgcacagggacactgacattagcctgtactgtcacccaggctggagtgcagtggtgtgatcttggctcactgaaagccccacctccca

SEQ ID NO: 301973 - DNA, 201 bp, Homo sapiens
gagccccagagcaaggagaagggcatgcagggcatgctgtgatgacctcttactcacagccgaagaaccaacctcataatcgtccctttaactttattccrcagcatggatgggaagttgttgactcaaatgactcggcttctcagcaccaagaggaacttcctcctcctcctctgcctcccgggtgggaagaaaaagtgg

SEQ ID NO: 301974 - DNA, 201 bp, Homo sapiens
caggtttgtttttcttatgacaaaatcaagcctggatggtgtcgttaacggtgaagttaaaatttttcttttgctttccttaatatttccgtgtttttttytttttctttttttttttttttttaacaaaagtctggtttctaaaccaaaatatttaatgcttcaaaaggaaaaaaatgtaagtcagtccaaagaaatgat

SEQ ID NO: 301975 - DNA, 201 bp, Homo sapiens
taagcctgcaaatgtgatgggtaatagctagaactagaaaagtactttagaatatggaaggtaaatacatgaattaatttaggtaagagtgacaaaacagkggaagtccctgacttagaacttattgtccgcttggacagctggtgtacgtgatcctggggtcacagtggctccctgtgcaggaagaacactatttcccag

SEQ ID NO: 301976 - DNA, 201 bp, Homo sapiens
aaagagtgactgtggctgctgtgtagcaggcacacaatggtcatggtccatatgctggcttagttattttttaaagcaactaaagttaagtaatgtatacktaacttacatatttatgtggtccaaaaaacgttggtcatctgttttaatgcagagagtgtttaccctaagcctgcaaatgtgatgggtaatagctagaac

SEQ ID NO: 301977 - DNA, 201 bp, Homo sapiens
agaatagcttgaaccctgaaggcagagattgcagtgagccgagatcgcaccactgcactccagactgggtgacagagtgagactctgtcacaataataacrggctggggcagtggctcatacccgtaatcccagcactttgggaggccgaggctggaggatcacctgaggtcaggagtttgagaccagcctggccaacatg

SEQ ID NO: 301978 - DNA, 201 bp, Homo sapiens
cagttcttatccccagagtcagccagtgttaccagtttcttgtgtccatgcagtttgctttatgcatttacgtaagcaaatattcgtacacacacacacascctttctatcttatggaaagttatttcagtggcacatgtaagtatctcagcatctcttgattgtcattctttttggattttttttttaaatttcatactt

SEQ ID NO: 301979 - DNA, 201 bp, Homo sapiens
tgaattagaaacttcctctgtaaactagcagagtagaaataagaggccaggattcagcaccaggtaggctggattccttcttaggtggctcaagctggctmtggggctggtctcatcatatctaaagaactgcccagcttttacgcattttgaatgtggtggaaccagctgcatctttttatatgagagcggcaaatagtc

SEQ ID NO: 301980 - DNA, 201 bp, Homo sapiens
aggcggtgaccatcagggtgacaggcagcatggactgttgccacctgtgctgcaggcagcttcagtgcctggatggtgggacagctggtcctgcactcagyacgagtctcaggcagtggtctggccgcgcctcccttgggctgcttcttcctccaccgtcctccacttttgctttgtgtctgcgtcaagtcagtaacgttg

SEQ ID NO: 301981 - DNA, 201 bp, Homo sapiens
tttcctcatctcttctaccttgtagtcgtcagtagagggcatgcagtgcaacagaagtggatttcaggactgagactagggtgaggcaagagaggcatcaraatgcaaaagtgaagtagacacctgccgtcagcactgggcagccctgctcctggggccttacttgactcatcctggtgggttttccaaatggcagaggtg

SEQ ID NO: 301982 - DNA, 201 bp, Homo sapiens
acatttgccacttttaactgttgataagtgaaactgagatttccccccaccccatggatacagtgaacatttgtcagcagctggtaatggctagtataaaratgtattcagttttcccttcccttcctctccctccagccttccagccacccccttcccaaacatttatgctcatttagagaaaagcaaccccagttctct

SEQ ID NO: 301983 - DNA, 201 bp, Homo sapiens
ccgtcattcagtggttctggaaggtaactccggggcccagccccagccggtgtcctccacctgaggcaggattgagggctgtgtggcgccctccattgtgrtctgacttcaggactgatgctggctttggggtctgttagagcttggactgctgggggagggaagaggcaaactgagccagcagccccgtggtggctcctc

SEQ ID NO: 301984 - DNA, 201 bp, Homo sapiens
tatcataacttccctggtgttgttttgttgcaagggcagcattgtggggctgtggtttgaattgcttttttgtgtctcttgaatacacgaagttcctcctrtagtcattggctctgctgcctctgatgaggcacttccgtgttccccacatttgaatttgctcccgattcgagagaggcaggcatccgcggcagcagcttc

SEQ ID NO: 301985 - DNA, 201 bp, Homo sapiens
ggactccacccctgctgtgtagatggccccaacatcattttgctgagtggagtgccactgcaaggcatggcatggaggagcctgactgcataggtggcggyaccttgagggccttacagacctggcagttgaaggtatgggctagaagacagatgattccaaattacggctaagaaataggtaggctgtaaggcttgattg

SEQ ID NO: 301986 - DNA, 201 bp, Homo sapiens
tcaattggttattgcatccctgatattttgaaactgttatgagtagaaaacattctggtttatgaacaatctgcttttcactatgaaatagatgggaattktaattattcctgcgctttgtcttagagaagttacatgcatgcatcaagtgttgtgtgatcttgtgcagttcttcttagattgagtttttggctcctcgtg

SEQ ID NO: 301987 - DNA, 201 bp, Homo sapiens
ctgcaagtccagtgtgggaaatctcatgacaggcatcaacattccgtgacggttgacagccacctatggggtggctgatgccttttctgtgtcttcagggytttaggggaaggagagtctaaatgagtggttctaggttgtgggaagagcctggctttgatgttcagacacctggcctcaggctgcatcgcccatacttcc

SEQ ID NO: 301988 - DNA, 201 bp, Homo sapiens
agatgaaagtgagagcccagaactagtataaaaatacggataccaccatagcatggtaattaaaggggtgattgtgaagatgaggtagctgtgcctggatrtgtgtgtgtgtgtgtgtgtgtgtgtgtgtgtgttggctggagaaggcttaccagtggtgctggacatgtcgggtagagtgttaatagtaacttaattgac

SEQ ID NO: 301989 - DNA, 201 bp, Homo sapiens
ggcctctgccttctagatgctggggggcactttccctggtgtaatattaaaaaaaactctccacgttgccacatttggggggcagaatcaccccctccccraattgagaagctatgttattggaacacagtgtcctgtattttgtctagcctctgctgcttagagctgcctgagcttggagaagatacttgttctctttcc

SEQ ID NO: 301990 - DNA, 201 bp, Homo sapiens
cctcagaatcatttttctccctgaaaaatgggattaaaagtattaatagtagtgcccatctcacagagtcattgcgaggattaaagagaggatgcatagaygtattgaatcagtgctgggttctggtagatgttcagctagccctagagattattagccatttgatgtgctgatcctcaggaaggtgggcgggagagacct

SEQ ID NO: 301991 - DNA, 201 bp, Homo sapiens
tgccatgttgtttcccagaaaagatataataattattccttccagtagtagagtattaaatgtctgcctctctttagaaagtattaccttttttcaatctktgacaatttgttagataaaaacttcagtttcaatattattgcatgtattcatggatatttttcttctcacacattctagattttttctatattgtttata

SEQ ID NO: 301992 - DNA, 201 bp, Homo sapiens
tttctgtgattctcataagtatctttgaaagggggccatttagtttatttctgcatttctcccttatctgccgaaatgcccgcaggctctgggacaagctrtaaagctctccgtgttatgctgtgttgcaaacccagtgccagtaatgatgcagtgctatttaaagataagaaagcaagctcacagagggagagcgcagca

SEQ ID NO: 301993 - DNA, 201 bp, Homo sapiens
ctgcaaagaaaaacctactgtccttcctaattaggaagaaacggagcgtgttagagtctctactcagagatcctggcaaggagtggaactattacatggcrgactcttttcactctcaagttgaaagcttgttatgctgaatacatagactagaaataaggtacctcggttcttacctggccacattaattggcactctcg

SEQ ID NO: 301994 - DNA, 201 bp, Homo sapiens
cagagttctgctgctgaattaaacctttgtgtcggccttggccactcttatggctctgctggaggtaaagccagtggagtggccttgtggcatttgctccragttgttgctcatttttctgagattatcagaggccttagagggaagcattgaggatttcattatgctccgataactatcacgttgtcaataatatggttc

SEQ ID NO: 301995 - DNA, 201 bp, Homo sapiens
gcctcgtgcccaaccagcaaggactctggggcatcggccagtggcagtaagccagtgtggtgggctggacaatatgcctgcactgcaggagacggtgtcaygatcagcccccgacagccggtctcaaaagtggaatttgaagagtggtcattgcttctcatgaaagtgtcgccgtaactcatgaaagtgtcacctgtaacg

SEQ ID NO: 301996 - DNA, 201 bp, Homo sapiens
acttcagtgtaaggaagaattgcttatgctcgaattgatttgttctgtatcccaatactggactgagtagaaatcaattactttaatattggatgagagartgattgattgaagatcaggtttttaacctctttttttgttctccttctcacagggagagtcccgtattctcagagtaaaagttgtttctggaattgatct

SEQ ID NO: 301997 - DNA, 201 bp, Homo sapiens
aggaatttagagcaagttaaatagctgcatatggatctcatctcccatatccagtccatcagcgagttgttcacacacctcccaaacctttctcatttctrtgcattctgccgatctcttctctcactcacacccaagtccaagctcccatcttccccactagacccccgacccgtctctacatccaatatggcttcttat

SEQ ID NO: 301998 - DNA, 201 bp, Homo sapiens
ggccatttaacaatacagattaaacttgtgttattctgttagaaaactgagagattgttttctgtagtctttgactgcatgcatagtctagggctggactkgggaggagaggataatttggccacaataggattccttattatctgtctcttccctcccaacccctcccccgacccccgccccatacaggagaccctcaga

SEQ ID NO: 301999 - DNA, 201 bp, Homo sapiens
tttctaatgacacaccatccccaaattgttcaacattgcatcctctgttttactttccgattcctccttagcagttttctcttcaattttctccatcactrtggttacacctctagggaggggagagaagcggctgcagctcagaccccctctggtggcctgggctccattgccatctctccctgcctcctcccctcagct

SEQ ID NO: 302000 - DNA, 201 bp, Homo sapiens
ctgccgcaccactcagccttcttccttcaggcttcagctccagtgtcttttcgccaaagaagcctttcctgatctctcagccataaatgttcctctccccrgttgctttttccctctccctctactcagttgctttatttaactgtcatattgtctttggagcacttgccaccatcagaaattatcttgcattatgtattt

SEQ ID NO: 302001 - DNA, 201 bp, Homo sapiens
agtaaaattcagcccatgaatatagtcattagaagttgaattttaatgaaattgggcgctttgatcaatgggaaggttgaaagttatgtgggaatcatctrtatagtttatagctgtgactatgtaggccagctcctaagtgccccctgcaatgtgtcactctctctggttttctttccagggaggtaccctgtagaataa

SEQ ID NO: 302002 - DNA, 201 bp, Homo sapiens
cccttctccatggactccacccctgctgtgtagatggccccaacatcattttgctgagtggagtgccactgcaaggcatggcatggaggagcctgactgcrtaggtggcggcaccttgagggccttacagacctggcagttgaaggtatgggctagaagacagatgattccaaattacggctaagaaataggtaggctgta

SEQ ID NO: 302003 - DNA, 201 bp, Homo sapiens
gtttacgagtgcctccttagctgttcatgctacgtttctaccatcgctccataattcatcaaggtttactcaatggaaagctgtagagcagtacacgtcartgaaacagttcaagtcatttgcctttccacaaaattcagtctgtgaaaactgcagaatacctatcttttgaagaggctttatcaggctgacacatacatt

SEQ ID NO: 302004 - DNA, 201 bp, Homo sapiens
cacaggggactcatttcatgcttttagaagacttgagccactacatgccctgggaactgtgttgcttccccactggccatcactcttgcttttgtaagggwtgtcacattgagccattaagtgtcatctctggaactcatgactctgttattccacatattaggttttctttgtagctttgtgtcaactccaagccaggta

SEQ ID NO: 302005 - DNA, 201 bp, Homo sapiens
ccaggggtgaggtgcctgcctgggcagccctgtcctcacctggggttgactgaccagagaacccttgcgattctctctctgggtttctgtctgcattcctktcgggataggtgagactggggtgacggctgctcgcggcttggtcaccttcttctctgcttacctgttcatgctctcttgcttttctctgatagcaaaccc

SEQ ID NO: 302006 - DNA, 201 bp, Homo sapiens
tccagcacctatgaaaaaatgtgtggtttctcattccaactaaaagttcaactaataaaagtttgctttttagccagtgggattttttttttctcattctytttggaggtgccatgttcttcatggaatcatatttctatgtcccttaaattttctgaaaaagtatattaaaaagaagccttcaaatagatgtaaagtttc

SEQ ID NO: 302007 - DNA, 201 bp, Homo sapiens
gggagcacaagtgctggaggagggtgtggcagggaggcctattccctaacgtgttaggctggctcccctcaccgggagctcgggacccatggagagatttygaaaccgttgtccccactccctctttgtgccacattcactggcaccctccattctggtttccctagtaacatcactgctgggactctcttccccttcccc

SEQ ID NO: 302008 - DNA, 201 bp, Homo sapiens
agtaaacattattggcactggttttgataggaactttactccaagtgtattgacttagtagatatgttaaaaaggttattgcttagtttgtggaaataatmcaagctgagactttaactgatatttgtattttcatttaggttccactgttttctcttttgaatgaaaagtataatcctattaaatctaaaatattttctt

SEQ ID NO: 302009 - DNA, 201 bp, Homo sapiens
aatgcatgctggagaccaggggcttgggagggatgtaccaaggagggatgttccatcctcagcagctcagagcacgtgtatacgggttgagtatccctagyttaaagattcaaaatccaaaatgatccaaagtctgaaaccttgtaagcactgacatgacactcaagcaataaatgcttattggagcatttcagattctca

SEQ ID NO: 302010 - DNA, 201 bp, Homo sapiens
cctggatgaatcatccagcctaaggcccatgcctggacattctgggtcctcagtgccttgcctttattttacctgatataatccttcaaacgaaaatgctygtacttatttttgatcacttaatatacttggccatttaacaatacagattaaacttgtgttattctgttagaaaactgagagattgttttctgtagtctt

SEQ ID NO: 302011 - DNA, 201 bp, Homo sapiens
taagaatttggactctgcaactgtatggggttcatttcacagtagatttgaagctgttggaaatctattgctgttttccagacacttgtaagtgttttctrtataaatagatctaattaactttgtctagagaaaataattatctgggtgtaccttactttattaaactgatcagaaaacaaatgcaaggtattaaataat

SEQ ID NO: 302012 - DNA, 201 bp, Homo sapiens
gtggggacctgcttcctggtctgcagatggccgtcaccttgttatatccttacatgatgagagagagagaaagcaagctctgttgtgccttttataagagyactaatttcattcacaagggcgccatcctcatgacctgatcacctcgtaaaggctccaccttccaataccgccatcttggggattaggatttcaacacat

SEQ ID NO: 302013 - DNA, 201 bp, Homo sapiens
tctatgacacatccatgtgctttcagttgatcagttgcctcccaagtgtcctttccagagattgagtaactgcaaaaatatccttaaggtttccagagctraggtttccggagctgagttttccaggggcggggccagggggagtggggagttatgggagggaaggggcctgggagagggggaagtggatcaccagaacgg

SEQ ID NO: 302014 - DNA, 201 bp, Homo sapiens
agaattcatacagctttaggattcagttctgacatgatctatgacacatccatgtgctttcagttgatcagttgcctcccaagtgtcctttccagagattsagtaactgcaaaaatatccttaaggtttccagagctaaggtttccggagctgagttttccaggggcggggccagggggagtggggagttatgggagggaa

SEQ ID NO: 302015 - DNA, 201 bp, Homo sapiens
ggatcaattgaagtcagcagttcgagaccagcctgaccaacgtggtgaaaccctgcctctactaaaaatacaaaaattagctgggcatggtggcgcttgcstataatcccagctactcaggaggctaaggcaggagaatcacttgaacatgggaggcggaggttgcagtgagccaagattgtgccactgtactccagcctg

SEQ ID NO: 302016 - DNA, 201 bp, Homo sapiens
agcattttaatcaaattcagcgttctgtactacactcctaattttccacaaactgattagtgctattcactgtggctgtatgaaagtaacctgtatggccrggtgcagtggctcacactggtaatcccagcactttgggaggctgaagcgggtggatcaattgaagtcagcagttcgagaccagcctgaccaacgtggtga

SEQ ID NO: 302017 - DNA, 201 bp, Homo sapiens
ttatgccagatttagcagctggaacaggactggaacctaaatcttttttctttagataatatgttctttgcattaatgagtttgtgggttttttgggaggygagaaatatgtgtaaataagaagtaaaaatcctaaattgcaagttgattttttttcttaatatagtaatacgtataatgcagcaaacatatcatttcccc

SEQ ID NO: 302018 - DNA, 201 bp, Homo sapiens
gccctttgatttatggcaaataaacgcacagtggtgtcactttctggcagactaagccagggccctccccatgagataaaaggagagggatagcacagtcytttcagtctttgttgtatatattctaaaaatacacgagccaccattactgggttggtgcaagtcttggcaaatctgtgatggtcagtgtcaaagtggtta

SEQ ID NO: 302019 - DNA, 201 bp, Homo sapiens
tcctggcggggccacgtcttctgtgctttgtaggcagctatggctggatggtgcttgctgtttctgtgtgtaaatgttgggatttttaaaagcccttcccygcttaatgcgttgtggttgagcagcacatttaaatgcctgaagtgtaagatgaagtctcttggatgtagagggcagtggtggtttttatttttcctggtt

SEQ ID NO: 302020 - DNA, 201 bp, Homo sapiens
gtctgcattcctttcgggataggtgagactggggtgacggctgctcgcggcttggtcaccttcttctctgcttacctgttcatgctctcttgcttttctckgatagcaaaccccgtctcctgtcatcctccctcctggcggaccagagctatactggcccataaaggagtgctggccacaccaggctagattccagttgag

SEQ ID NO: 302021 - DNA, 201 bp, Homo sapiens
ggaatggaataaccatggagttacggtaactctacatttaagcatttgagaagctgctggcctgtttttcatctgcaccatttgcattcccaccagcatcragtgggagctccagtctctccatatcctccccagcagtcggttacccttttctgttgcctctgtagcactttctaaacataaaattagcttatttctttg

SEQ ID NO: 302022 - DNA, 201 bp, Homo sapiens
cccgggcatccgtctgcctggcgcacgcaccaaacgggttccagtctggggaagttggcatctgctgttgttacttttggtcagaacgcccttcgcctgcrtcctcacggggctgactccctttagccttgaaggggaccgttgctccgagaggcctgaacactccagctgcagctttctccccagtcattattgagatca

SEQ ID NO: 302023 - DNA, 201 bp, Homo sapiens
ccgcatgatgccatgagcaaagccttccatctgcacttggcatattgcagggtctgtagttgctggaatgcctatgtccctggttacgagccttgatatamttgtgctaaggcattttggtggagtggaccgtgtcctgctgttgatcaaacatttctgtgtggagagactttgtttttcccttggggagtatttattttt

SEQ ID NO: 302024 - DNA, 201 bp, Homo sapiens
tggttcctggcacctggtttctgctctcttgtgggtcgccacagtggccctgagttcctcgtttgcattcagtgcttcgtttcaacaggctaggctccctsctttcttctcatttggaattggtcagaggtcttgaaatcagacagctcttgcattgactgtgggtcttagcacctttcagtgtgatctgcaaagaaaaac

SEQ ID NO: 302025 - DNA, 201 bp, Homo sapiens
tgatggccagcctggaggaaggggtacttttttctcattgtcatggaggtcccattggctcttcaagcatctctcccaagcatctaggagaggtgcttatktctcattctcacaaaggctctttgtggaccagcacaggaggcctgcctagggcttggatgaaaaatgagcatagagagaagaggttaagggaagcaagct

SEQ ID NO: 302026 - DNA, 201 bp, Homo sapiens
caatatgcctgcactgcaggagacggtgtcacgatcagcccccgacagccggtctcaaaagtggaatttgaagagtggtcattgcttctcatgaaagtgtygccgtaactcatgaaagtgtcacctgtaacgaatcctagagggatgcatttctgtaccacggagggctcgagccgagacaccgagatctgggggcgtgac

SEQ ID NO: 302027 - DNA, 201 bp, Homo sapiens
tgaaaaatgagcatagagagaagaggttaagggaagcaagctcaagagtgggctcagagaaaagaatctgggggagtcaatgagatggcaggcaaggaacrgtctccatttgatgctgatgtttgtgcagaatgactactttataccgtacagaaggagcacactctcttcttgtggtaggtcccagaaacttctacttgg

SEQ ID NO: 302028 - DNA, 201 bp, Homo sapiens
ctctccccagttgctttttccctctccctctactcagttgctttatttaactgtcatattgtctttggagcacttgccaccatcagaaattatcttgcatyatgtatttatagtctgtcttccgcctactagatggtgggttgcttgaggcaggaactctgtcttgtttacatctctatctccagataacgtgtctggcac

SEQ ID NO: 302029 - DNA, 201 bp, Homo sapiens
agccagctgggactggacgactgagagtttgcagcccctgctggaccctgtgtaactgtccagttcgcctagctattggtttggcccagtggttttcaatkttggctgcacatcagaatcacctgggggaggtttaaaaccctacctctgcccccatgccctggggttcacacccagaaatgctgacttcattggtcgggg

SEQ ID NO: 302030 - DNA, 201 bp, Homo sapiens
aatctgggggagtcaatgagatggcaggcaaggaacagtctccatttgatgctgatgtttgtgcagaatgactactttataccgtacagaaggagcacackctcttcttgtggtaggtcccagaaacttctacttgggggtacatgaggcccagctgggattgggcacagaaggtcatggctctgcacctgaccctcacct

SEQ ID NO: 302031 - DNA, 201 bp, Homo sapiens
ttcaagaaattctacatgaactattacccaccgtgcacttgtaatttctgtgggagtagtggagctttgagggggacaagatcgttttgtgagataatttyagttgaattcagtgctgatgaacatcatctgtatatcacctatttttgtattttgttggccttgcaacctgcgtgtagctttggagtgttgtggtagctg

SEQ ID NO: 302032 - DNA, 201 bp, Homo sapiens
tgctcagcattgtacagaggaaaatcaaactggcaacagtcagccccagaacactcagctcaggttaagatattgagctacagtggtttacatgagtcatrtgttgagtgaggcagcctccagtagaattcaagaaattctacatgaactattacccaccgtgcacttgtaatttctgtgggagtagtggagctttgaggg

SEQ ID NO: 302033 - DNA, 201 bp, Homo sapiens
gtgggtgaatcatctgaggtcaggaggtcgagaccagcctgaccaatatggtgaaaccccatctctactaaaaatacaaaaaattagccaagtgtggtggkgggggcttgtagtcccagctactcaggaggctgagacaggagaatcactggaacctgggaggcagaggttgcagtgaactgagatcatgccactgcactc

SEQ ID NO: 302034 - DNA, 201 bp, Homo sapiens
ggaggctcacacctgtaatcccagtactttgggaggccgaggtgggtgaatcatctgaggtcaggaggtcgagaccagcctgaccaatatggtgaaacccyatctctactaaaaatacaaaaaattagccaagtgtggtggggggggcttgtagtcccagctactcaggaggctgagacaggagaatcactggaacctggg

SEQ ID NO: 302035 - DNA, 201 bp, Homo sapiens
atgatatcaaaaatatttcaacatgtaatcagtattcacacaaagattaatcaagtatttaacagtcttttcttttgatccggggtcttggaagtttgacytaccacctctcaatttagccagccacatctccagtacttggcagctgtttgtggctacctcatggacagggcaggtcccgccacccgggcatccgtctgc

SEQ ID NO: 302036 - DNA, 201 bp, Homo sapiens
tgagagtcaaatcggatatttgctcattgggattaccctgtattcaaggggaagaacatgagctttggctgggcacggtggctaatgcttataatcccagyactttgagaggctgaagcaggcggatcacctgaggtcaggagttcaagaccagcctggccaacatggtgaaaccccgtctctactaaaaatgcaaaactt

SEQ ID NO: 302037 - DNA, 201 bp, Homo sapiens
tcacctccagtctttggaatagtcagagcgatgtgttcatggtagaaatgaaatcacatcaggtcctcagtggcccatcacatttagaactaaagcttacycttgcctcatgcctctgagcccttatatgatctcgagtcaccaccccactgccagcctctccactctcttctctgtgcctcatgcagcccaggaaatata

SEQ ID NO: 302038 - DNA, 201 bp, Homo sapiens
catactttattcaataataatcactaacatttattgagtgcttcctatgtgcctgacaccattctaagcatttgaagaagagtgtattaacctgcatgagraaggctattaaaacctatgtaattaattaattaatggatggatgtgtggatgaatgaatggcagggtcttacactgtcacccaagctggagtgcagtggt

SEQ ID NO: 302039 - DNA, 201 bp, Homo sapiens
aatcagctctgtgagactgaggccacaccctgcagttagaaattttacttggcaatgacagctgtaattttgtcatttgtctgtggctggggctggctccyaaaacccggtgtggatagtgacatctagtggatctctagtagatcagttccgtggactgtcaggtaccaagtgaagaaacacattcagcggtgccacatt

SEQ ID NO: 302040 - DNA, 201 bp, Homo sapiens
tgcttaactttaaaaaatacttcctgtgtaccatttgtgggactgtaactcacaacttaaaaaatattaccttgatacatagctccagaaatacacatggktcattttaccaagaatcaccagtgcttttgctctgttaccccggctggagtttggtggcacgatcatagctccttgcaccctcaaccccctgggctccca

SEQ ID NO: 302041 - DNA, 201 bp, Homo sapiens
gcctcctcgatggctccttcttggtctccctctggctactcctctgcttctccgcctccaagtgctgctccaagtgccttctgtgctctgtctccatccakcccaaaccttccaacactctctgtaagtggaatctcaccttgaggctgccagcccagcctcctcacctctgtgctccatctttagagagtcacctctctg

SEQ ID NO: 302042 - DNA, 201 bp, Homo sapiens
gctcaaggctattgaatgctctgtttcctgtctgtaagtagcttagagaattaaaggacagtgatgtggatgaaaatagaaattgtacagtagtgctaatragacataatgcactcagtatgtttggcacataaagggctcaggcctccctgctgtggggaatttctcctctgagcccagtccttccctcattattctagg

SEQ ID NO: 302043 - DNA, 201 bp, Homo sapiens
tacacagtgattcttggaaaaagtcatgagtaatgaatggaacttttctctcccaggttgatcttgtgttttgagacataaagagtcaaaggttggtgccyaggatgctcattcttattgtttttggtagtttgattgttgaaggcttttgacacgacattgaagtgaatatttggggcattttgctcctctgggcttttc

SEQ ID NO: 302044 - DNA, 201 bp, Homo sapiens
tcttcctccgcctgcggtgcctttgagagcattgactccactaagcccgatttctgtgtggcatgttgtctgttcctccccggcctcctcgatggctcctycttggtctccctctggctactcctctgcttctccgcctccaagtgctgctccaagtgccttctgtgctctgtctccatccagcccaaaccttccaacact

SEQ ID NO: 302045 - DNA, 201 bp, Homo sapiens
tatgtgggaatcatctatatagtttatagctgtgactatgtaggccagctcctaagtgccccctgcaatgtgtcactctctctggttttctttccagggargtaccctgtagaataacagtctaatttacctctcagacatctgctgtctttcagaccttatgctagttttgtgcatatcttcatgattcctctaataatg

SEQ ID NO: 302046 - DNA, 201 bp, Homo sapiens
gccttgacgtcagccagattggactgcccaaatagaaaggcagaaatccctgtcgaggccagacagcaaggatggagaggggcagggggtgaaatgaaacrcaccaggaggagtaaagacaaggccttctgatgtcagccaagagcaggtgtggattaggcagtcctaagtttgagtcctggttctgctattcattggcca

SEQ ID NO: 302047 - DNA, 201 bp, Homo sapiens
acccatgaaacctctctggctgccttgacgtcagccagattggactgcccaaatagaaaggcagaaatccctgtcgaggccagacagcaaggatggagagrggcagggggtgaaatgaaacgcaccaggaggagtaaagacaaggccttctgatgtcagccaagagcaggtgtggattaggcagtcctaagtttgagtcct

SEQ ID NO: 302048 - DNA, 201 bp, Homo sapiens
gccctggtgtgttctctctgttcctagccgcagaaattgctggtgaatgtcaccaagctaagcggtgtagctttataacaagtggattcagccagctgggrctggacgactgagagtttgcagcccctgctggaccctgtgtaactgtccagttcgcctagctattggtttggcccagtggttttcaattttggctgcaca

SEQ ID NO: 302049 - DNA, 201 bp, Homo sapiens
ttcatcagcaccaggcgtgcacggcgttagtcatggtccttgctctcaaggcactgtacttgtagcagcagtatggtgcaaatgtgcagctgaacagtggrcacaggttcctggttagcatttagtgccacaggaatgacagggaggtcttaattgtgatcggaccgtgggagctggattaccccagactgtagctcactt

SEQ ID NO: 302050 - DNA, 201 bp, Homo sapiens
accctctggtggccatattgtcaggtgcatttttgttctagccaaataaaatgataacacaaatcgaatagtcgattggagttctttttcagaggacatcrttaattcacattttgtgtgtttcagcaggtatttaagccattctcgaatagtgacacttatgcagaggagagaatgattttatttaagtaatttctactt

SEQ ID NO: 302051 - DNA, 201 bp, Homo sapiens
agattctccctgataggccttcagcgccgcaagggccagcaccgagtcctgcacatcctgctctagtcccacatcggcccaggggcgttgagctgaggacrgctccctaccccctttctgtgcttggccgactccagcgcccgttcttctgcccctccttggctctgcctccccaccccttggctgaatctctcctccttt

SEQ ID NO: 302052 - DNA, 201 bp, Homo sapiens
tcctttctcaggccagtgctgctgatctgtctgtgtgacccgggtgcacagtccttggctctgtgcctggccctgtgcaggtctctgtggtggcacttagmacatggcgctaagattctccctgataggccttcagcgccgcaagggccagcaccgagtcctgcacatcctgctctagtcccacatcggcccaggggcgtt

SEQ ID NO: 302053 - DNA, 201 bp, Homo sapiens
gggtctcaaactcctgacctcaagtgaccctcccgccttggcctctcaaagtgctggaattacaggtgcaaaccactgtgtccagccagacaggtcacttytctgtaccattccctgatgttgtgagattagtgagagtccctactgtggaaccttgttcacgttgccctgactcctgatgcatggatatttgctgttacc

SEQ ID NO: 302054 - DNA, 201 bp, Homo sapiens
gactgctttctttctctctctcactctccccctgtctccctccctcttcctctctgtccctgtccctctctcctgcctccctcattcactctgtcgtcctstctctctcctcctcctccttccttccttgcttcatttcccccctcatctctttcttcctcaccctttttaaaaagagacaggagtcttgctctgttgcac

SEQ ID NO: 302055 - DNA, 201 bp, Homo sapiens
aacatgttcttttccccatgtttcttgtacgtactgtgtattagaagttggactaaaggcttgatcaaatttgaggcaggaatgggtgaggctacgtgcgrctggagggacacaatgactggttctgtcataatcagtgattgaaattgatccctgggtaaatgtgggggcagtctcatccctccactatcaaaaattaac

SEQ ID NO: 302056 - DNA, 201 bp, Homo sapiens
ggcacagaaggtcatggctctgcacctgaccctcaccttaggggtcaggagagagccaaggacacgagtgatgggttagggaggactcaggcaccatggartactgtggccatccttccatagaggagaggtacaggtggcaaggcaggcaccaggcagccgccgacagggtcaggaaccaaggcaggtccaggaaacaga

SEQ ID NO: 302057 - DNA, 201 bp, Homo sapiens
ggaggggcaggctgcaggtagtattggaaaaggcaacatttgattcattaaaaggcattgttcagaaagaatcaatcaggaaagggtgggcagacaggaayagaagttctcgctctggttcgtgggtttcatccgggaccagcagtccagtctttcagccttcaggctgtttttggctcgaaggtggggtttcaccgggga

SEQ ID NO: 302058 - DNA, 201 bp, Homo sapiens
ggttccagtgagccgaaattgcgccattgcactccagcctgggcaacaagagcaaaattctgtctaaaataaaataaaataaaataaaatataaaagtctrgtgagccctggagtggtgtttgccttgctacctccaacttgccctttttaagagacttaaaatttgtggtaacttttcacatgatgtgtatttagatact

SEQ ID NO: 302059 - DNA, 201 bp, Homo sapiens
cagtagaaatttagtaatgtgggaaactgataactaaaagtattccaggttctaattattttgtcagctcagttttaggaagcagtcctagggattccccwggaagaaagtttggctggatagagggcagtgattgtgaattttctagatcttttgtggactgcttctgttgttaaaaaagcagcagtctctcagcacacg

SEQ ID NO: 302060 - DNA, 201 bp, Homo sapiens
ctcctgggccattgctattcactgaccccttctcctcctcgtgttctagtaaaattcagcccatgaatatagtcattagaagttgaattttaatgaaattrggcgctttgatcaatgggaaggttgaaagttatgtgggaatcatctatatagtttatagctgtgactatgtaggccagctcctaagtgccccctgcaatg

SEQ ID NO: 302061 - DNA, 201 bp, Homo sapiens
gaatctttgaatcgccgagtcttagccccacgttttatacagcacagaaatacagcacagaaagtttaggtgatttcccttgggttccatagtgtgttagkcaccaggttcctttaactctctcagtactctttcctttaaactatggaagagctcaaatgattaaatcaataaaagaatgacaacttatagagctcattt

SEQ ID NO: 302062 - DNA, 201 bp, Homo sapiens
ctccacaggctcccctgggaggggtgcccccacctcacccgccacctcacttctcagcccctcttcccatccaagggctccctgggctgcccccaccctastcatgatctcgctcctctactctctcgtagtactttatttttaccttgctcctggctcacattacatgcttatcttgtatttatagatggttctatatat

SEQ ID NO: 302063 - DNA, 201 bp, Homo sapiens
aaccattaaagaaaaaaataagataccagcaataatgataatcagtcatgcatatgtaatcgtgtgtagttcatacttcagattcatatacagctgagcaygatcttgaatgttacaggaagcaagcttgaaagtcaagttacagtagaactttgctaattcatgcctgactaatttgcccacccagtagttcctactgaa

SEQ ID NO: 302064 - DNA, 201 bp, Homo sapiens
aagcaatagattgtggctggaaattgaaaatttagtttctgtagctagaaaatactcttttcaaatgccatctagaacagtagttctctgagtgtggttcstggatcaggagccttggtatcactgggaatgtgttaggaatgcagattcttgggttctaccccggattgaattcagatttgggagcggggcccagttatc

SEQ ID NO: 302065 - DNA, 201 bp, Homo sapiens
agcagtcagccattttttattctttattggggaactgcattatagtggaaaaggtaaaattataagctaatgagaccagaggtctgtatgtatgaaaaccrtcctcatcgcttcacagttgtctttgaaccagtttccctgggattgttcgaaatgtagcaaacgtggctcacggttaccctgacggggccagagcaatag

SEQ ID NO: 302066 - DNA, 201 bp, Homo sapiens
gttgcccaaattgagtttgagtgtttttagtaggcagggtaaattagcggtatggatgggtataacattctacatttagttttgctactgtatatgagctyatgaaatggacttcccttccctaataatatagaaaaaagaaaaacctaaggaaatatagagaacacattcaatttgggaaattcccgtctgtatcagtca

SEQ ID NO: 302067 - DNA, 201 bp, Homo sapiens
tttaaaataaccccttcaggtgcatctaatgcagcctaaatttggggccagctcatgggttgtaaactgtactgccctatacaatagtagcacagttctargctcaagggactcaagggggtccagtaagtacagttcaccagagaaataacaaaagcatttgcagagggagaccagagcatcacctttgttagggcaaag

SEQ ID NO: 302068 - DNA, 201 bp, Homo sapiens
tatttttaaaagtcaggttggcaaaggtctctctgagtttcacaaaatatccgcgtgagtggtgcatagtttgtgctggcttatttccatttgttcgttgwgtttatggtaaccagtagcattttctaatttggttaaaatgctgtcattagctggtaaatgcagtcctgtcacctcagaggaggaccaagaaggagctct

SEQ ID NO: 302069 - DNA, 201 bp, Homo sapiens
ataaaatgtttaataaacatattttaaattaaaaggtaaggttgtatctagttatttatacagctatttttaaaagtcaggttggcaaaggtctctctgartttcacaaaatatccgcgtgagtggtgcatagtttgtgctggcttatttccatttgttcgttgtgtttatggtaaccagtagcattttctaatttggtta

SEQ ID NO: 302070 - DNA, 201 bp, Homo sapiens
ttcttccaggcgcagatgtcagccctctgcagatctgctgcatcagagtttatggcctgggtcttaggaatttgcaatttaaaataaccccttcaggtgcrtctaatgcagcctaaatttggggccagctcatgggttgtaaactgtactgccctatacaatagtagcacagttctaagctcaagggactcaagggggtcc

SEQ ID NO: 302071 - DNA, 201 bp, Homo sapiens
acaaaataactataaaatgtttaataaacatattttaaattaaaaggtaaggttgtatctagttatttatacagctatttttaaaagtcaggttggcaaargtctctctgagtttcacaaaatatccgcgtgagtggtgcatagtttgtgctggcttatttccatttgttcgttgtgtttatggtaaccagtagcattttc

SEQ ID NO: 302072 - DNA, 201 bp, Homo sapiens
tccatgaatttttttccatgccttctcataatgtggttttggtttagctgcggttcttccaggcgcagatgtcagccctctgcagatctgctgcatcagartttatggcctgggtcttaggaatttgcaatttaaaataaccccttcaggtgcatctaatgcagcctaaatttggggccagctcatgggttgtaaactgta

SEQ ID NO: 302073 - DNA, 201 bp, Homo sapiens
ttggagaaggatggaatggctgagggcaggaaaacttaacaagcaggaagtctgcaccctggctgcacatgagaatcccctatgggcattgaaagtagggrgagcattgaaggtagggggagcattgaaggtagggagcagtcaggtcccatttcctaagcggctctgcaggcctctaagcttgtcagtcatctttttggt

SEQ ID NO: 302074 - DNA, 201 bp, Homo sapiens
cgcttcttccagacagcacgctcagaattgcgtttcttacttccagtcttcttgccctgtaagcattttctgtgagtcaccaaatcaaccacaaaatcatwtaattttatggaagtggaaaatcagacttattaaaatactgtgtttttgttttaaagctcagaggtatagagatccatgaatttttttccatgccttctc

SEQ ID NO: 302075 - DNA, 201 bp, Homo sapiens
ggaggcatttcaattggagaaggatggaatggctgagggcaggaaaacttaacaagcaggaagtctgcaccctggctgcacatgagaatcccctatgggcrttgaaagtagggggagcattgaaggtagggggagcattgaaggtagggagcagtcaggtcccatttcctaagcggctctgcaggcctctaagcttgtcag

SEQ ID NO: 302076 - DNA, 201 bp, Homo sapiens
gattatttttcccttgctaagaggttagcaaaatcagtacagtgtgtctctttgacaggccctagaaagcactctacgtttgttaactttaaatttgggtyggaaattgatgttattggaggagcaaggcgtgtttaggcctgatgatttttggatagcttgaccaaacccggtacagccaactttcccccaaaactactg

SEQ ID NO: 302077 - DNA, 201 bp, Homo sapiens
aagatgaagtgttgcttctagtgacagttttgctgttgggcagcatttgtagggtaaaggtgtttttgcttttggaatccattgggagatttaaaaaaaawatatatatatatacacacacacacacacatacacacatataaagtaaaaagcaggaagtctatgtgtgtgccaggggatcccaaactcttggcctccagc

SEQ ID NO: 302078 - DNA, 201 bp, Homo sapiens
ttgctgggagagatctcctttaatgtttttttgtgtttttaaaatatgaacgtaggccctggcagagacaaggcagaaaccacttttgagtttttagggcygtgcattcttaaacaactctgagtgacccttccatcattacaatttatcaactaaattagaaaacgtgctttcacagatttctagtacttgggcaaattt

SEQ ID NO: 302079 - DNA, 201 bp, Homo sapiens
ggctgggggtgggggctgcggctagggacatggggcctcagtgcccacgttttctgtcctctgtcccctgtgagggtatgtgcgctctcataccagccgcmgggcactttggctcgcttgtgttgctgggagagatctcctttaatgtttttttgtgtttttaaaatatgaacgtaggccctggcagagacaaggcagaaa

SEQ ID NO: 302080 - DNA, 201 bp, Homo sapiens
ttggtggcaagaatagatgcagggggacaagttatgaactgagactgggacctcatgggtcttcctgcccaagaccgagatggctgggggtgggggctgcrgctagggacatggggcctcagtgcccacgttttctgtcctctgtcccctgtgagggtatgtgcgctctcataccagccgcagggcactttggctcgcttg

SEQ ID NO: 302081 - DNA, 201 bp, Homo sapiens
tggggacccccagccagcaacaccccacctgggtctcactctaccatgctggggtgccctagctcacctgtgttatagcttgtacctgtgttcagtggttyccgagttcttgcatggcacccaagaagaatgaggatatgctggacattgagggtgaggagggcagagtagaattttactgagcaatggaatagctctcgg

SEQ ID NO: 302082 - DNA, 201 bp, Homo sapiens
atttagaataggtatattttgctaagtaagatcttaaagtttttcctttaaacttaggatagctgttcaaatttcaaactcttcttttttcagtaagctgragacatttaaccttttgtcataggcttaaagcagtcattaaacagggtcatttcaatgcaactttttaaacctaactcccctccctttttctctttaatt

SEQ ID NO: 302083 - DNA, 201 bp, Homo sapiens
gcaatgtgtttggaacccaatgtaatgtcattagattctgcctaaatcttgtgaagaggggatttccatttgataggtaagaaaattgagaagttatcatyagcccgagatcaaacaagggtatagggagtggtgggacctattaagttcagatttatgtgacttctgatgctatgctcagtgatagatctcttcttgagg

SEQ ID NO: 302084 - DNA, 201 bp, Homo sapiens
gaatggccgactccttgtggtttgagcctgggctccctctccatctgtcttttctccctgagccctcctgactgcagccatgccagactttttaatgttckgaaccccagctccagcctatcactggagctctgcctgtgatctttccacctcatgcctcccggttctatgtgtgccttcagactccatctggcagtggta

SEQ ID NO: 302085 - DNA, 201 bp, Homo sapiens
gtagcaggcactgttgttctttttgcagataaagaaactgaggcaagaaaggtttagtaagttgtagagctaggtattgaaccagggcctaacctcttaayagaagttagttagaggctgttacttgagtgctcacaggttggctggcaatgtgtttggaacccaatgtaatgtcattagattctgcctaaatcttgtgaa

SEQ ID NO: 302086 - DNA, 201 bp, Homo sapiens
cagtccagtacttaggatccaagatcattttcagctccttccagccaagtctcactttattaaaggagctttgttcggagcagattggataaccgagccgygactccacttgaacatctgagcagttggcccgcgtgggaaacagcaatggcagagaaagatgcttccctttggatcataccttgaggacaaaaaagggca

SEQ ID NO: 302087 - DNA, 201 bp, Homo sapiens
cccaccttatgccctgcctttccatgaagcctgtcaagaaaattccaagaaagaaaatttgatattcctatatcaaagcgtgtgtctttcctctcctaatmcctcttagctgccacagtaggtgcaatgtcattttagcttttgcagatgcattacctggtggtttcctagtatttctttcacttgcctcgattgctagat

SEQ ID NO: 302088 - DNA, 201 bp, Homo sapiens
tgcttaattaacttggatgttctaagtttctagagtcacagacttttagagctggaatattgctttttgaacttcagtgtaaggaagaattgcttatgctygaattgatttgttctgtatcccaatactggactgagtagaaatcaattactttaatattggatgagagagtgattgattgaagatcaggtttttaacctc

SEQ ID NO: 302089 - DNA, 201 bp, Homo sapiens
atttgttatatttatgcaaacttgtggcacttggacatttatctagatggttttttgtgtatgattgtgttcttggtacagctggaaaagctaactttaartggcaggagtaattgatcttaatgacttactttgaattaaacttgtgcttaattaacttggatgttctaagtttctagagtcacagacttttagagctgg

SEQ ID NO: 302090 - DNA, 201 bp, Homo sapiens
acccaggctggagtgcagtggtgtgatcttggctcactgaaagccccacctcccaggttcagcaattctcctgcctcagcctcctgagtagctgggattayaggcacatgccaccatgtctggctaaattttgtatttttagtagagacagggtttcaccatgttggccaggctggtctcgaactcctgtcctcgtgatcc

SEQ ID NO: 302091 - DNA, 201 bp, Homo sapiens
tgaatttcatattactactttcttgcgccgtcagccattgtgttcttggggactccatcctgagccttttttttttttttgagaccgagtctcaaaaacartgaaggcaggtgactggtgaggagagttccagccactggattctccctcagtcccctgtgctgtggcccttggtgacccctagatttcagtgcccctgcc

SEQ ID NO: 302092 - DNA, 201 bp, Homo sapiens
cccaaagtgctgggattacaggtgtgagccaccgtgcccagcccactttttgtcttatatactgtattttcattttaagtgtctttcagtattaaatctaraagttttccaagacttttcagtactaacccaagatagtgattcaggtttttacttaaatgcctacaaaaacagtatcctgaaaatgtcataagttgtaac

SEQ ID NO: 302093 - DNA, 201 bp, Homo sapiens
aggcttcatggctgagcatggcacccttagcacccctcacctgttacccaacggagatttgtgggtcggaggcatttcaattggagaaggatggaatggctgagggcaggaaaacttaacaagcaggaagtctgcaccctggctgcacatgagaatcccctatgggcattgaaagtagggggagcattgaaggtaggggga

SEQ ID NO: 302094 - DNA, 201 bp, Homo sapiens
gtttttacttaaatgcctacaaaaacagtatcctgaaaatgtcataagttgtaacattttttcttgcacagaatacagcaaaaacaaggatttgtttttgkctttgtatgtttcacaaagaaacttaaagtaatttaaaatacatttaatgaaatggagctgtttgtggaattggtaggcacaccaggaatagtttaactt

SEQ ID NO: 302095 - DNA, 201 bp, Homo sapiens
aagtggaaatggatcattgtaaagtctacatcctcactgtcctcacattgagtaagctgaggaggaagaggaggggttggtcttgctgtcacaggtgacaraggtagaaaatccttgtataataagtgagctcatgcagctcaaacccatcttgttcaagggtcaactgtacttgaatggatttttttccctgtcataatt

SEQ ID NO: 302096 - DNA, 201 bp, Homo sapiens
agttctagagatgcaagtagtacataagacagatgtggcccctgcccttgtggagactgcagaccatggctctttttcatgaatggtagagacactcatargtcaaatacctacatattttcatgaatgtgccaaaggaggcaaacaggaagctgagacaggaaatcatggggaggcctacttgaagagaggtaaggaaac

SEQ ID NO: 302097 - DNA, 201 bp, Homo sapiens
tcattcagtccagatagagaattgatcaattggcaattttattatttttcgctcatgaaaaactctagggttacaagaatatgctcctgaagttaacatarttacttttaaaatgtctcaattctaatggttaggtattagtcctctgagttccggttgccccttaacttggatcttaatttacagtttacagaaaattgt

SEQ ID NO: 302098 - DNA, 201 bp, Homo sapiens
ctgctttttgcttctatgaacctctatgtagtacattcttgtacaggttttggatgaatatgttttcatttctcttgggtttatacctaggaatggaactkccagactgttttccaaagcagctcaccatttgacattcccccccagcagtgtctgagggttccagtgtatctgcatcctcaacaacacgtgttgtctgtc

SEQ ID NO: 302099 - DNA, 201 bp, Homo sapiens
aaaaaaaaaaaaaaaggaaaagaaataatcttctctcagtgagcatgttgaatgcataatgttctcactggagttctcctttggaatctcttgattattcygctgtggcttccttgggccaactaggatacagaggagaataaatgagtaactcagtgagacaggtggcctgatgtgagtgggcctgaaagttagcccctg

SEQ ID NO: 302100 - DNA, 201 bp, Homo sapiens
tctacaaaaaatacaaaagctagccaggcgtggtggcctctgtctgtagtcccagcttcttgagaggctgaggtgggaggatctcttgaacccgggaggcrgaggttgcagtgagctgagatcgtgccactgcactccagcctgggcgacagagtgaaactctgtctcaggaaaaaaaaaaaaaaaaggaaaagaaataat

SEQ ID NO: 302101 - DNA, 201 bp, Homo sapiens
tgagactctctggccctcattatctcagctgtggtgcttggcatgtcccagaaggtagccgtgctgtggacctcagtccccgagggagcgctgtgccacckccacccacgatggacctgccctgagagagaagcctttgttttaggctctttaagatgacatggggattttggtggtgtttttctagcctaatctagccct

SEQ ID NO: 302102 - DNA, 201 bp, Homo sapiens
ttggtcctggagtacttagactccctctctaagcctattcctcatcagtaaatttgaggataaaaatgtccagctcgtaggttcatagttaggtttaaatsaaagtgtccatggaagtacctgattcgtgaaccaggtatctgtaatatacaagtctttcccctagcaggttaattaggttaattgtgaacaaccattttt

SEQ ID NO: 302103 - DNA, 201 bp, Homo sapiens
ggcaggcgggaagcccaggagggcgtgataagtgctacaattcaggtgtgttcaggttgtcatgcaggtattgaagagggctacttttggatttatgcccrcagaagagtttcacagtttctgaatttttgccccaggatgggagcaggcacttgcattaacatttgaattaatcacccagagaagagtggaaaagttatt

SEQ ID NO: 302104 - DNA, 201 bp, Homo sapiens
catgcctggaatgccgcttgccacttgggttatttctgctatctgtcgctcccggtgccgcagtgctaacagtttggcagatgggacactttttcttggartttgtgtctttggtttgtgacttctggcagtgtcgggcctgttgttgccgcttgccctagccctcctggcccccctggtcaccatggcccatcggcttcg

SEQ ID NO: 302105 - DNA, 201 bp, Homo sapiens
atataatatgtttatgaagatcgacacatacataactgaaataattatgatttcattttattgtttttaattttttttagagagagggtctccctctgtcrcccaggttggagtgcagtggtgcagtcgtagctcactgtaacctcaaacccttgggctcaagcaggactccaggatagctaggactacaggcatgagcca

SEQ ID NO: 302106 - DNA, 201 bp, Homo sapiens
atctgtgcctctgcaccccaagctggacaacagagcaagaccctgtctccagaaaaaaaaaaaaaggctttcaacagagtcagtcgtggacaaagaggaarggacttttttcctcccctgcagctttaacctcccaggctcatatgatcctcccattccggcctcccaagtaattgggactacaggtacgcatgccactat

SEQ ID NO: 302107 - DNA, 201 bp, Homo sapiens
aagagagaaccttagaaagtacctttaaagaaacaaagatatgcctgaggcatataacagatacaaactaacattttatatatagattgatgtatatatartatgtttatgaagatcgacacatacataactgaaataattatgatttcattttattgtttttaattttttttagagagagggtctccctctgtcacccag

SEQ ID NO: 302108 - DNA, 201 bp, Homo sapiens
tgtaacaactgcagatggggtggccaaaacctcagacatttatttatttttttaatataatcttggatgttggaagtcgaagatcaaagtgttgacaggcrtgggttcttctgagacatccctccttggcttgcaattggtcaccttcttgcttcttcacatggtcctccttctgtgtgtgactgtgtccaaatttccttt

SEQ ID NO: 302109 - DNA, 201 bp, Homo sapiens
aggccccatctgggtagcagatggtccccagctaggcacaagccctgtgtagggacatccgtgctgcccaggatcctgggacactgcccaaatcaactgtyaggctgggagcctgtgtccagaactgtggatggcattcactttgggttgtggaagttggtttgtacctactcttaagtcttgccccttcaactccagctc

SEQ ID NO: 302110 - DNA, 201 bp, Homo sapiens
tatgaagctaacttgtttttgcctccaaaatagcttgcagaagatggtgcgtccggatcagccacaaacagtaacaaccatctaatcgagcctcagatccrccggcctcgtagcctcagctcgccaacagtaactttatctgccccgctggaggtgagacggctacctcatctaactggactcactctgtcctgtgactcc

SEQ ID NO: 302111 - DNA, 201 bp, Homo sapiens
tgcattttgacacaggccgtgcttgcatgacagttgggttagtgtattcccctctccaccagagacttgggagggtaggggagtgtgccttagtcattctygagactcctgtgcctggcagtgcctagcaacggcttaataaatacttgctaatgaacctaattattatgacattaagattttaatctaaatcttctaaat

SEQ ID NO: 302112 - DNA, 201 bp, Homo sapiens
catcttccccccacctctggaaatcccagcgtttgaacgctggggggaactgcaagtctagtttacagggtttctcagctgagatgccaggaacacttcgygagtgagcatgccaccacatttgagtgcatatagaaagttagctgtttgctacaactggggacacttcctattagagccgcatctgctggggtggagggc

SEQ ID NO: 302113 - DNA, 201 bp, Homo sapiens
atggaagactcctggaatgtgaagtatctcaaggatgtgtgtccattgcatgaatgtatgtttgatctatgcagctaattgacaaagatccaccatcctgyaccctccatgttttatttttgccctgccattgttctcttcgacattctataatcatcaaggttttcttgccctcacctaggtcttgactaaacatgttgg

SEQ ID NO: 302114 - DNA, 201 bp, Homo sapiens
tctttaccgtattatgaggacactgtgcttgccacatgggcagtcttgttttggggatacgtggttggatggacggttgggtggatggaagactcctggartgtgaagtatctcaaggatgtgtgtccattgcatgaatgtatgtttgatctatgcagctaattgacaaagatccaccatcctgtaccctccatgttttat

SEQ ID NO: 302115 - DNA, 201 bp, Homo sapiens
tccaccttgggtgatagagtaagactctgtctcaaaaaaaagaaaaaaaaaaaagaaatggggtgttgctatgttgcccaggctagagtgcagtagctttycacaggcttgatcgtagcgcactgcagccttgagctcctggactcaagtgatcctcctgcttcagcacctccccgagtaagtggtactataggtacttca

SEQ ID NO: 302116 - DNA, 201 bp, Homo sapiens
acacaccatgggtttttttttaatctgcttcaaattcctattaatttatcagtatcacacaatttaggacctaattattctcctattggatcaagtattttatttagttaaggagataaacttgattagctttcgagtcccttggccatcttatgcttcttggacaaggctcatggaagttgttatgggatgaattgtgtc

SEQ ID NO: 302117 - DNA, 201 bp, Homo sapiens
gaaccggtaagctaagctggtttacagttttctgattgcatgtgttggcagtgaggggccagttggaataggtccagctatgaaacccagctgcccagcawcactccacaggcctggtcttcctcttccattgtgcccttctcggggtgttgatatccatcgagttgtagaaacctgaaacttttctctggacacagcatc

SEQ ID NO: 302118 - DNA, 201 bp, Homo sapiens
acacttagggaaaaaggtcaaggaagaaaagtccatcaggcatttttgttttaatttttaaaattcctgtttaacaatacagggtctcttgcaacgtgtgrgctgcctcttgccaagagtgagtggcaaaagaaactaaccccggagcagttctacgtcacaagagaaaagggaacggaaccggtaagctaagctggttta

SEQ ID NO: 302119 - DNA, 201 bp, Homo sapiens
agagtattgcagaaatgtaagccttcattagctttgttcacctaagagaagagaaataaaacatcgaaggcttctctttggtgactctaaattaaaattcmctcccgcatgttttttcttgggcaacggtaatgtgctagcactctgctagaccaacgaataaatttacaggatggctgagcaataactgaaagtcaagta

SEQ ID NO: 302120 - DNA, 201 bp, Homo sapiens
gccccattccagctcattctttacctgaatgtcaagcgatctttctaaaaaccaactccaatcaggcgtacacccagttcacaagtttccagtagcttcamatttccagtaggacacagtttaagctgtttgtcgtgatctaaccaaccccatctggcctggtctcacctgccttccggcatcatctctctccatcctcct

SEQ ID NO: 302121 - DNA, 201 bp, Homo sapiens
agcaccccagcaatgaaggagccctctgggcacgcggcaggtgccatgcccaggctcttcatgtgcatcgtttcgtcagacctctcggcagctccccgtastgttattatcattctcatttcacgtgaggaaactgagagctaggaagatgaaataacttgtccagggttctgcagcttacaggtagccagccaaaatatg

SEQ ID NO: 302122 - DNA, 201 bp, Homo sapiens
ttttctataataaacaaccatcagttgtgcaatttagaataataataaaaggttaagaaataaaaagacttcctcccatctcagataatatctgatacagwcagcctttgtggaaactccccccttcgtagtgaagggtacagcgctacccgaactccatgccatctctatcatagctgtcaccacatggtataaattgtc

SEQ ID NO: 302123 - DNA, 201 bp, Homo sapiens; identical to SEQ ID NO: 62972

SEQ ID NO: 302124 - DNA, 201 bp, Homo sapiens
tgcaatcttgacccactgcaacctctacctcctgggttcaagcgattctgcctcagcctcccgagtagctgggattacaggtgcctgccactacacccggytaatattttgatttttagtagagatggggtttcaccatgttggccaggctggtcttgaattcctgacctcaggtgatccacccgccttggcctcccaaag

SEQ ID NO: 302125 - DNA, 201 bp, Homo sapiens
tgcctggcatttttttgcatttttagtagagatggggtttcatcatgttggccaggctggtcttgaactcctgacttcaggtaatccacctgtctcggccycccaaagtgctgggattacaggcatgagccaccacacctggccaacttcctcttcttcacagctgctaactagtgccagtgttggaagcaggcatttgag

SEQ ID NO: 302126 - DNA, 201 bp, Homo sapiens
atttaaacattaatgctggtcatttgttgtgtctaaaccacaaaagggagggggtataatgaggtgtgtctgacctcctgtcccatcatgaccggaaactygatttaaaggtttttctggagtcctcttggccaagaagggctctattcagtcagtgggtggcttagaactttatttttagtttatacttatctatagact

SEQ ID NO: 302127 - DNA, 201 bp, Homo sapiens
tgaagtcctatttttcagaacttcaaagatgttttcctttcttttgcatcaaccctaaattggtttagaataaaatataaatcaagccagctctgtgcatygcccattaggcagtgcttccttctgtcctctgggctttgagcagtctgggccttcctgcccggctggctgctaatgtgggctgccttaggaagccggacc

SEQ ID NO: 302128 - DNA, 201 bp, Homo sapiens
ttcacacacaaatctttcagaagtcaaagcccttcctctaatggctatacctgtggttcttaaagcctggtctgaggaccccagagattcctgggggggamctttctaggggcttttccaaccacacttgagaccacttgaggccacatcctcttatactccaatcaaaacaacatagcaacagactgaattcagaggcac

SEQ ID NO: 302129 - DNA, 201 bp, Homo sapiens
ttgagatggcccatgagctttcagccatagaaccatgctgccagcgtgtcaagggctcccttgttaccgcaggcaccaggcagtgctctgtctccctcttygcactgtgaatacagaagataaatcatcctcgcaagagcattctcttaaatcacagtcttcactcttccccttccttgatgttccggtttctgcatctga

SEQ ID NO: 302130 - DNA, 201 bp, Homo sapiens
ggcatgttaatgacagtgtcattagcagctgtagtatcgtttatgtcttccacagttctgagaaaaagtactgctctggcactgggtggccttcgttttcygaggctcatggtacgtctggctctgatgaaagccacacagggatcctgagacgtctggatacctcgttaggatcagctcgcacagaggttgtctgcaagc

SEQ ID NO: 302131 - DNA, 201 bp, Homo sapiens; identical to SEQ ID NO: 62971

SEQ ID NO: 302132 - DNA, 201 bp, Homo sapiens
cagttaccgacgagctctctataaccccttgaaaaaggatggtggttttagcggtaactacttcatggctgtaattgctgctgtcagaagcagcctaatgmattgccctgggatctgaagttctccagcaacaataaaatttggccagccaccagtaggtaacaggagctgtgtaccttatcagacacccctcctgggaat

SEQ ID NO: 302133 - DNA, 201 bp, Homo sapiens
ttagggaaaaaggtcaaggaagaaaagtccatcaggcatttttgttttaatttttaaaattcctgtttaacaatacagggtctcttgcaacgtgtgagctkcctcttgccaagagtgagtggcaaaagaaactaaccccggagcagttctacgtcacaagagaaaagggaacggaaccggtaagctaagctggtttacagt

SEQ ID NO: 302134 - DNA, 201 bp, Homo sapiens
taatttgaatattgggtgcaataaagcccaggctgtaaatacatctgcaggctgcttcattgggtacattataattttctctctggcgttatttgcacttygtcaaattagtacagaaattccttgatttggggacttacccaggatttaaatctgctgtttcaactcctgccagtagtatgagaaatctgaacatgacat

SEQ ID NO: 302135 - DNA, 201 bp, Homo sapiens
attatcaaagtcataatttgaatattgggtgcaataaagcccaggctgtaaatacatctgcaggctgcttcattgggtacattataattttctctctggcrttatttgcacttcgtcaaattagtacagaaattccttgatttggggacttacccaggatttaaatctgctgtttcaactcctgccagtagtatgagaaat

SEQ ID NO: 302136 - DNA, 201 bp, Homo sapiens
agcctactgtgtgccaagcattgtattgctgagaaccacaggtgatagaaacaggtcacagttaccgacgagctctctataaccccttgaaaaaggatggwggttttagcggtaactacttcatggctgtaattgctgctgtcagaagcagcctaatgaattgccctgggatctgaagttctccagcaacaataaaatttg

SEQ ID NO: 302137 - DNA, 201 bp, Homo sapiens
aactggctgtaacccaaatcagttaagaaatacttacgtaaatcatgaaaattcaatccaacaaactgttaggcagccattaaaaatgataaacggagtakttctgtggtgaagggcttgggtatgaatagatgcagattttgagtcttggctctcggttacttcctggctctgtgtctgagctcaggctgctattgcaaa

SEQ ID NO: 302138 - DNA, 201 bp, Homo sapiens
gtgagaatccgaggaaatgaacaaatgatccccctaaatgtgcgcataattttttttttcttggctcggggagtgggggcataagtggggctcgggggccyctgacccctatcggggactccaggcgaaggcccggggcctgggctgtagcagcccggcccgcgcgcccctgcgaaggcccctagtattttgcattgcagc

SEQ ID NO: 302139 - DNA, 201 bp, Homo sapiens
gggagggaaacatcaggaagctaggcaaggagagagtgggtagatgtcatttcagaaactatgttggctgagtattccttttcattgattttttttttttttttcttgagatggggttttgctcttgttgcccaggctagagtgcaatggtgcaatcttgacccactgcaacctctacctcctgggttcaagcgattctgc

SEQ ID NO: 302140 - DNA, 201 bp, Homo sapiens
atattatggcgtggcactgtgtcacgcacctgtagtctcagctacttgggaggctgaggaaggaaaatcgcttgagtccaggcattcaaggctgtagtgtrctttgatcatgcgtatgaatagccattgtgctccattctgggcaacacagtgagactcggtctcttaaaaaaattagggcagagggagaaggtggtgtct

SEQ ID NO: 302141 - DNA, 201 bp, Homo sapiens
accctcagtggttcttcattataacaccactttttacagtgctacatttatctctctctctctgtgtgtctgtgtgtgtgtgtgtgtgtgtgtgtgtgtgtatacaagtttctggggtacttgagaaaatttgttacacatatataatgcatagtaatcgagtcagggtatttagggtgtctgtcacccgaatacaataca

SEQ ID NO: 302142 - DNA, 201 bp, Homo sapiens
aaccctcagtggttcttcattataacaccactttttacagtgctacatttatctctctctctctgtgtgtctgtgtgtgtgtgtgtgtgtgtgtgtgtgtgtatacaagtttctggggtacttgagaaaatttgttacacatatataatgcatagtaatcgagtcagggtatttagggtgtctgtcacccgaatacaatac

SEQ ID NO: 302143 - DNA, 201 bp, Homo sapiens
caaccctcagtggttcttcattataacaccactttttacagtgctacatttatctctctctctctgtgtgtctgtgtgtgtgtgtgtgtgtgtgtgtgtgtgtatacaagtttctggggtacttgagaaaatttgttacacatatataatgcatagtaatcgagtcagggtatttagggtgtctgtcacccgaatacaata

SEQ ID NO: 302144 - DNA, 201 bp, Homo sapiens
gattatgaaatcactgtgaaaatgtgagggaagtggctgcaacttcttgagcacttacatgccagacactgggctctagtactttgcaaacaatcctcacyctccaataaggagctattaagaccctcacttaacagatgtgaaaactgaggcttaaagaatttaactaacttgttccaggtcacttgtctagtaagtgat

SEQ ID NO: 302145 - DNA, 201 bp, Homo sapiens
acaaccctcagtggttcttcattataacaccactttttacagtgctacatttatctctctctctctgtgtgtctgtgtgtgtgtgtgtgtgtgtgtgtgtgtgtatacaagtttctggggtacttgagaaaatttgttacacatatataatgcatagtaatcgagtcagggtatttagggtgtctgtcacccgaatacaat

SEQ ID NO: 302146 - DNA, 201 bp, Homo sapiens
aacccgaaggaggcacccagtaggtgaccataggaccaagagtggatttccttagggatgaaaaaatcgaggcccaccccgtagaacttctgaccaacaaratatatggcctgtgcaaatcacagcacacagagagaagggaactccaaggaatttgagtttattaaggcataattcaaagtaaagctgtgtagttatctc

SEQ ID NO: 302147 - DNA, 201 bp, Homo sapiens
cactgttttccatagtggttgtactagtttacattcctgagagtggaaaaggtttaaaacactcattgcagagaaatgggaagagagctgactggggaaaratggttccatggttcactgaaaccccagtgagatgagtaactttgagtttataaggacaaccctctccccaggtgggggattttctccagtagtgcttga

SEQ ID NO: 302148 - DNA, 201 bp, Homo sapiens
tttggggaggactggtcaggttccttgtagaatgtccctcagtctgggattgtttgatgtttctcctcacaattaaactgggattatgggctattaggaawaatctcatagagatgcagttcctttctagattcatgtgctcttccccatctctctccccaacactgagacacacacgcgcaaacgtacactcacacactc

SEQ ID NO: 302149 - DNA, 201 bp, Homo sapiens
tatagcaactgtggccaggaaggttagcaaaacccgaaggaggcacccagtaggtgaccataggaccaagagtggatttccttagggatgaaaaaatcgargcccaccccgtagaacttctgaccaacaaaatatatggcctgtgcaaatcacagcacacagagagaagggaactccaaggaatttgagtttattaaggca

SEQ ID NO: 302150 - DNA, 201 bp, Homo sapiens
ctaaccccggagcagttctacgtcacaagagaaaagggaacggaaccggtaagctaagctggtttacagttttctgattgcatgtgttggcagtgaggggscagttggaataggtccagctatgaaacccagctgcccagcaacactccacaggcctggtcttcctcttccattgtgcccttctcggggtgttgatatcca

SEQ ID NO: 302151 - DNA, 201 bp, Homo sapiens
ttaatccctgtaagctgggaatgtgaccttatttggaaatagggtggctgcaggtataattagtttagataagatcatattggagtagggtcagccctaaytccaaaatcactgctgtccttataagaagaagagaagcccagacagagaggagacagccatgtgaaaacggaagcagagattggtgatccgcagctacaa

SEQ ID NO: 302152 - DNA, 201 bp, Homo sapiens
catcactgctgtaacccctggcacctaacgtggtggctggcctagtaggcatccgaaaaatcaacttttgtgaatgttgaatgactgccgggtaagaggtrgaaacattatttaaactgcatttggcaatctcagctttcattcattttctgagagaacaaccctcagtggttcttcattataacaccactttttacagtg

SEQ ID NO: 302153 - DNA, 201 bp, Homo sapiens
aataaaagcgttggcgttgtggaatgttagctcatccaacttgacttccagctatggcctttctaatcactggtgtctctagtcagtctgatgacatttgytgtgagcctactgtgtgccaagcattgtattgctgagaaccacaggtgatagaaacaggtcacagttaccgacgagctctctataaccccttgaaaaagg

SEQ ID NO: 302154 - DNA, 201 bp, Homo sapiens
tttgggaggccaaggcgggtggatcactgcaggtcaggagttcgagaccagcctgaccagtatagcaaaatcctgtctctactaaaaatacaaaaactagytgggcgtggtagcacatgcctgtaatcccagctactaaggaggctgaggtaggagaattgcttgaacccaggaggtagaggtttcattgagctgagattg

SEQ ID NO: 302155 - DNA, 201 bp, Homo sapiens
acctgcaaaactcatgtcactacccacatgcactgccattgtaatcatggtctcaccctcagtttttccaatgctaaagtcatcagaagggccagcacatyccaataaagtcccctgaaatgctggtatttttgaaaacttcctgtaggcgggattttactaaagcccttgttgggaaagagactacattagccatttgtg

SEQ ID NO: 302156 - DNA, 201 bp, Homo sapiens
ctcatccggatccccctggtaatcttctgacatcatcatagtacatttgtcaaaactgtctctgtctttcatgacctttacagttttggggaggactggtyaggttccttgtagaatgtccctcagtctgggattgtttgatgtttctcctcacaattaaactgggattatgggctattaggaaaaatctcatagagatgc

SEQ ID NO: 302157 - DNA, 201 bp, Homo sapiens
tctgagctctttttagcccctgaagttttcgaaatgcaatattgaaagaatacgtaactaaataaaagcgttggcgttgtggaatgttagctcatccaacwtgacttccagctatggcctttctaatcactggtgtctctagtcagtctgatgacatttgctgtgagcctactgtgtgccaagcattgtattgctgagaac

SEQ ID NO: 302158 - DNA, 201 bp, Homo sapiens
cttcatgtgcatcgtttcgtcagacctctcggcagctccccgtactgttattatcattctcatttcacgtgaggaaactgagagctaggaagatgaaatawcttgtccagggttctgcagcttacaggtagccagccaaaatatgaacccacagttttggactccagagcccacattcttcactagctgagcttccattaa

SEQ ID NO: 302159 - DNA, 201 bp, Homo sapiens
taaagtcccctgaaatgctggtatttttgaaaacttcctgtaggcgggattttactaaagcccttgttgggaaagagactacattagccatttgtgtagaytgcacaagggaaccacatgatactctgtgagcagttgtatgtattcccagagtattctaagccaaccctaattctcaggtacagagccaggcagggcttg

SEQ ID NO: 302160 - DNA, 201 bp, Homo sapiens
aaagctcaattcatgagagtcccactgacttttagctcttctctaattcccactttccagtgtcagctactatagtgtactgcctgttgagtcacactaasgacagtgcttccaggagacaatagggtttttttctaagcccattccacttcctgcctgaaaggagacaggaagataaagccagcttcacagactgtaaat

SEQ ID NO: 302161 - DNA, 201 bp, Homo sapiens
gctccgttgacataggtgccatcgccttttggtgcctgctttccttattacaggtgtaagtttcccagaagacataaccagcctctgagagtgatcccagmcagtgtaactcatgagttccctttccagagccttgttcccagcctcatccaccagacttagcgtcattctcctcatcatcctataattgttggaatgagt

SEQ ID NO: 302162 - DNA, 201 bp, Homo sapiens
  misc_feature (1)...(201): n = A,T,C or G
agaggcaatggcttcgatagtgaaggtgcagtgaggacgattccggggggactgactgtcgaataactgggcatgggatctggcagaggagagtgggaacngatcctgctgcctggaacaacacatcggggcacctcttggcatgttaatgacagtgtcattagcagctgtagtatcgtttatgtcttccacagttctgag

SEQ ID NO: 302163 - DNA, 201 bp, Homo sapiens
gctaccaactcaagtgccatgtgtcaggtactatgctaagcacacacacagaaagtgaggtgataatgccattgctattgttagcttaaaacaatcatacaatctataaatttagaaaaggagactttatttcttctaaagggttacagccttcaaggtggccatcctacaggctgggaagcgagctcccagccaagagca

SEQ ID NO: 302164 - DNA, 201 bp, Homo sapiens
ttaacttatatatgttaggcctctcatattacttggtaaaaatctcccgattctgctaattgcatcaataaaggtttattgtttcccataaaatgctttartgagtttttattagccttagtttcatttatttaaaaaattttattgtattcataattctcaatcaaaatacctttaatgatcactagttgatatataatg

SEQ ID NO: 302165 - DNA, 201 bp, Homo sapiens
agctaccaactcaagtgccatgtgtcaggtactatgctaagcacacacacagaaagtgaggtgataatgccattgctattgttagcttaaaacaatcatacaatctataaatttagaaaaggagactttatttcttctaaagggttacagccttcaaggtggccatcctacaggctgggaagcgagctcccagccaagagc

SEQ ID NO: 302166 - DNA, 201 bp, Homo sapiens
tttattagccttagtttcatttatttaaaaaattttattgtattcataattctcaatcaaaatacctttaatgatcactagttgatatataatgttgaggrtggaaagactgggattaaaagatacttaatgatgtttttccctgagcagagtggccagatgaatgtttttgaacccctggaggagggttgcaaagaatcc

SEQ ID NO: 302167 - DNA, 201 bp, Homo sapiens
tagctaccaactcaagtgccatgtgtcaggtactatgctaagcacacacacagaaagtgaggtgataatgccattgctattgttagcttaaaacaatcatacaatctataaatttagaaaaggagactttatttcttctaaagggttacagccttcaaggtggccatcctacaggctgggaagcgagctcccagccaagag

SEQ ID NO: 302168 - DNA, 201 bp, Homo sapiens
atagctaccaactcaagtgccatgtgtcaggtactatgctaagcacacacacagaaagtgaggtgataatgccattgctattgttagcttaaaacaatcatacaatctataaatttagaaaaggagactttatttcttctaaagggttacagccttcaaggtggccatcctacaggctgggaagcgagctcccagccaaga

SEQ ID NO: 302169 - DNA, 201 bp, Homo sapiens
tggcctcctgggatctgctcagccccactaatactaattgaaattccacttatttttggatcccagatttctcctgaaaccttctctgatagcacacaccrtgggtttttttttaatctgcttcaaattcctattaatttatcagtatcacacaatttaggacctaattattctcctattggatcaagtattttatttagt

SEQ ID NO: 302170 - DNA, 201 bp, Homo sapiens
ctgccaattcaccaactttatttgtttttgtgtaaccatttagtttgagctgaaaagtttccattttgcattcttaaagacttctgagtttgtttctcttsccctttcctgttgctgctactgcagctgaaggaaataatatattcctgaagattatttatgttccagaatatactattcttaaagatgcactcatttatg

SEQ ID NO: 302171 - DNA, 201 bp, Homo sapiens
agggaaacatcaggaagctaggcaaggagagagtgggtagatgtcatttcagaaactatgttggctgagtattccttttcattgattttttttttttttttcttgagatggggttttgctcttgttgcccaggctagagtgcaatggtgcaatcttgacccactgcaacctctacctcctgggttcaagcgattctgcctc

SEQ ID NO: 302172 - DNA, 201 bp, Homo sapiens
gagggaaacatcaggaagctaggcaaggagagagtgggtagatgtcatttcagaaactatgttggctgagtattccttttcattgattttttttttttttttcttgagatggggttttgctcttgttgcccaggctagagtgcaatggtgcaatcttgacccactgcaacctctacctcctgggttcaagcgattctgcct

SEQ ID NO: 302173 - DNA, 201 bp, Homo sapiens
ggagggaaacatcaggaagctaggcaaggagagagtgggtagatgtcatttcagaaactatgttggctgagtattccttttcattgattttttttttttttttcttgagatggggttttgctcttgttgcccaggctagagtgcaatggtgcaatcttgacccactgcaacctctacctcctgggttcaagcgattctgcc

SEQ ID NO: 302174 - DNA, 201 bp, Homo sapiens
ttggtatattattgccacaaagaggctgttctgccagtcttatgatctctatttaaacattaatgctggtcatttgttgtgtctaaaccacaaaagggagrgggtataatgaggtgtgtctgacctcctgtcccatcatgaccggaaactcgatttaaaggtttttctggagtcctcttggccaagaagggctctattcag

SEQ ID NO: 302175 - DNA, 201 bp, Homo sapiens
ctggattattctgctgggtgacagtacacttagggaaaaaggtcaaggaagaaaagtccatcaggcatttttgttttaatttttaaaattcctgtttaacratacagggtctcttgcaacgtgtgagctgcctcttgccaagagtgagtggcaaaagaaactaaccccggagcagttctacgtcacaagagaaaagggaac

SEQ ID NO: 302176 - DNA, 201 bp, Homo sapiens
tttcttcttcccagtaaagtttccatccagactaaaataaaaacttggctctatattataaagattttggctctgtgcattttaggttcatgtattttctrtttccagttattaatggccatttacccatactgttggctcttgttgtataattaaagtttagaatgatcattaaaaatccaatgatattttagtttgaat

SEQ ID NO: 302177 - DNA, 201 bp, Homo sapiens
ttcacccccgaccccagacacctaaacttgatctttgtgctttttttgtgctttctcagtgagtttcatagacaaacacatgaatgtgtaacctttttttwaaaaaaaaaagtcaatggtagcacattaaacgcatctctatctcgcttttctcactctgcactatttcttagagaatgttccatgttggtttacacagct

SEQ ID NO: 302178 - DNA, 201 bp, Homo sapiens
tatcttcagtgttgtttatatattactttaaagtcactcttgatttttttaattataatacagaactttgttttcttttaaaaggacaacttattttatarttagcatagattgctttcctcgaaataaaaattgtcattccattctagcatcctctgccaattgcagtatgactcgaggtatgactgcagttgtcttaga

SEQ ID NO: 302179 - DNA, 201 bp, Homo sapiens
tcacccccgaccccagacacctaaacttgatctttgtgctttttttgtgctttctcagtgagtttcatagacaaacacatgaatgtgtaaccttttttttwaaaaaaaaagtcaatggtagcacattaaacgcatctctatctcgcttttctcactctgcactatttcttagagaatgttccatgttggtttacacagcta

SEQ ID NO: 302180 - DNA, 201 bp, Homo sapiens
aagcacgtctagaacgaacccaggggaaagtcgtcattcatggctcggtagagatcatgccatgccttctctctctgatacagcagtgttttgtagactcyagaaacgtttgttaaactgtaatagatgaaatgaaatgtattaatagagccaaactgttttgttttttttcgagacggagtctcgctctgtcacccaggc

SEQ ID NO: 302181 - DNA, 201 bp, Homo sapiens
tatagttagcatagattgctttcctcgaaataaaaattgtcattccattctagcatcctctgccaattgcagtatgactcgaggtatgactgcagttgtcytagaatcataggtctagtgagtgctttaggcttccacatttttgaaaagaatgcaagtatggtggacctttaaccacataaaagtaaaatattaaatgaa

SEQ ID NO: 302182 - DNA, 201 bp, Homo sapiens
tcttttctcccctcatccttcttttttttgaaataatgcatactttttttggtaaaataatagcattcaccttactgtgactcagttatttttagtacttkgtgaagtactaaatttggcgatttagtattgcatgatgttaaatagcattgagaaaaaaattatagatttgttatagtctccttcatgctaaaggctttc

SEQ ID NO: 302183 - DNA, 201 bp, Homo sapiens
aggtatgactgcagttgtcttagaatcataggtctagtgagtgctttaggcttccacatttttgaaaagaatgcaagtatggtggacctttaaccacatawaagtaaaatattaaatgaagcatgcttttaatagccatcctgtcatttttaaggtttcaatagtgtatgtttagaggcagtgaatttaaaagtgtttgta

SEQ ID NO: 302184 - DNA, 201 bp, Homo sapiens
aatttgtgatttttaaaaattttgtgtcatctgaaagatagttttttaaaatctcactaaaataaaatgttcatataacttctggctttactaaaccttasaatatccaatattgctcaactccatatgaatgacagcagttatgcatcaaattacagaacctcatgaaataagcacatatgtacacatacacgtgagtta

SEQ ID NO: 302185 - DNA, 201 bp, Homo sapiens
ttagaataatttttattctttttaaactgtctttctggttgtctcatgctactttgagtttaatataccctgggcttgatgcaagaccccgggccagggcyagagcacctggttctagttctaggtctacctttgactgttgtggtcattttaattaattcatgcatacatatttattgcattttcctgcactgagtcctg

SEQ ID NO: 302186 - DNA, 201 bp, Homo sapiens
tactagaaggcttctcaggaactcactcattttctggaaagctttcatattgctgcttgttggagaatgacatgttaacctgctgctcacctttttaggaygttgagggctgggtattaactgtcttgagtttggcagtattttgaagaaggacatcctaaattacggttggtgtgactcatgtgagttatcagatttgta

SEQ ID NO: 302187 - DNA, 201 bp, Homo sapiens
gcagaccgtctgtatcctgcatccgtggtgtcctctgagtgtgcatggcctctccagtgggcacgcccgcaataaacccggtgtccatagcctcagctgcrttaccctacagggtttgctgtcttgactctgtggagaggacttagtggggagaagtgctccttttccttctttctttcatagcttggtttttgcttctga

SEQ ID NO: 302188 - DNA, 201 bp, Homo sapiens
tgacaggattaagagattaaagtaaagacaggcataggaaatcacaagggtattgattggggaagtgataagtgtccatgaaatctttacaatttatgttkagagattgcagtaaagacaggcataagaaattacaaaagtattaatttagggaactaataaatgtccataaaatcttcacaatccacgttcttctgtcat

SEQ ID NO: 302189 - DNA, 201 bp, Homo sapiens
gtcagggctagagaagcggccagtggccaggaatacctgcagagaggggacacaggccggacagagagccatggtcagggagggatgagaagcccattccrcatgggctgcgaagcagagtgggtgctgagctggctctctgctccgcctggagccattttcatattttctgcgtgtgaaacccaatgcctcccatgcgca

SEQ ID NO: 302190 - DNA, 201 bp, Homo sapiens
tagtctccttcatgctaaaggctttcctcccatgtccggtggtttgttgctctccagtcaggttttagaacgaggtgctggaagacagacgacttgtcccrggtatgtggagtggcggtgcccgtccactgacagtggggaagaggccagcctttgtgctgccgcccactggcggaattattaatatttctagggcctttc

SEQ ID NO: 302191 - DNA, 201 bp, Homo sapiens
aaaggctttcctcccatgtccggtggtttgttgctctccagtcaggttttagaacgaggtgctggaagacagacgacttgtcccgggtatgtggagtggcrgtgcccgtccactgacagtggggaagaggccagcctttgtgctgccgcccactggcggaattattaatatttctagggcctttccgccagaatgggaatc

SEQ ID NO: 302192 - DNA, 201 bp, Homo sapiens
ctgcagttgtcttagaatcataggtctagtgagtgctttaggcttccacatttttgaaaagaatgcaagtatggtggacctttaaccacataaaagtaaawtattaaatgaagcatgcttttaatagccatcctgtcatttttaaggtttcaatagtgtatgtttagaggcagtgaatttaaaagtgtttgtatattaaag

SEQ ID NO: 302193 - DNA, 201 bp, Homo sapiens; identical to SEQ ID NO: 62993

SEQ ID NO: 302194 - DNA, 201 bp, Homo sapiens
tgtcatgtttggtggtggtgtttttgattttcccccaatctctaacttcctttactgtcatcttagcagagcttctggaaggaaaagagataaaaatgcayggtcaggtcatctcttaaaatgggaatccgggaaagcagtgtaaacggcagcatggtacccttcctctcattgttctttcaggatggatgctgggcagga

SEQ ID NO: 302195 - DNA, 201 bp, Homo sapiens
taagcattattaagtttctggtaaattgttctgtttgatgggctgtcaacaaatcatgtggaaataagagagaaaattgttgttttggatttttttagcawggagagttatgtaaaccaaaaacaaaattctgaggtccccaaaccatctgaacggacccctcctgtaggccaagggtgttccaaagttaacctgaaaaac

SEQ ID NO: 302196 - DNA, 201 bp, Homo sapiens; identical to SEQ ID NO: 62994

SEQ ID NO: 302197 - DNA, 201 bp, Homo sapiens
aaaaccccttatcctaactcagacattgctttctatagaataactctttgaaccagttgccaatcagaaaatttttcaatctacctatgacctggaaggcytgccttcccctgcttcaagatgtcctaaccaatgtgaatcttacgtgtatctgatatctcatgtctccctaaaatgtgtgaaactaggctctgccccagc

SEQ ID NO: 302198 - DNA, 201 bp, Homo sapiens
tctggatagggtggtgaggggagccccatctgctaaggtggcatttgagaggagacttgaggtgagagactgggaagtgaggtggggaccgaagcctgacrgactagccatgggcaaaccaggcaggagtttagccaaggtgaggacttgtagaggagttgggcagggatgtgaaataattagcttgatgttctgcatagg

SEQ ID NO: 302199 - DNA, 201 bp, Homo sapiens
ggcaggctgggttctggaggatgataaaccctccaagggaaggggaagtggccaggagccttccaagaggcagaggcgtggtgtaatgtgatggtaggtgyttcagaggggatgaccgcttcagggaggaggagggaatgggggtgtgggattggtcaggaggagcacaaggcacctaccccatcttctggttctgtggtt

SEQ ID NO: 302200 - DNA, 201 bp, Homo sapiens
ggtacgtttttctccccctggagtttagatggccatcataaaaactggttgataatcagtaagttatacaatatactttaaaggcattgtagctctcaacrtttctcagatatttattttgaaattcatggtggaagaatttgtgtaatgtattcttttctgtgtttccctatgtaatattggtaaaagcattattgggaa

SEQ ID NO: 302201 - DNA, 201 bp, Homo sapiens
tagtattctaatataaacctcaaagttttaatgaaatctgctaattcacccaaacagagttctcactttcaaatgtaatatattttaagacctagaagatrtctgtggctctgtggtagtacttcgtactgaaagcatacagctaaatgtttcttttatgttgaaactctaggacattatttattagcattaaaaaataaa

SEQ ID NO: 302202 - DNA, 201 bp, Homo sapiens
gccgtgaggagttagatttttcccccaagttccagtatcttgctctattctttatttcctgcccaaattctaccctagctttcactctgtgcaaagaaagragagcatcatctctcagaccaatggagaattcatattaagcacagcaaactttcataaattttgtttacttcatttgattttctcttgtagttgggaaaa

SEQ ID NO: 302203 - DNA, 201 bp, Homo sapiens
tccggaggctgaggctggaggatcccttgagcccgggaagtcgaagttgctgtgagctgtggccatgtcactatatactccagtctgggtgacaaagggakacccagtctcagaaaaaagaaaactgaggctaaaaaacggtaagtgatatgactgtaaaaccttcacacctgcttgtaaatacctctgatagatcatcag

SEQ ID NO: 302204 - DNA, 201 bp, Homo sapiens
gcaaaggttcctcagattgtcttgtggttgagccaacagtgttttacaaaagggtaatagataggatgctttaaactcttacaaagaagagaatgaccggktcaaataataggttgttaaaagcatggcattgtggtacccccagtacatgctcttcttctcactgtctttcttttattttctttttgttgagatggagtt

SEQ ID NO: 302205 - DNA, 201 bp, Homo sapiens
aattaacggaagctattatgtggtaagtaatgaagggaagtgacaagagcaagaggtgcccagctatgacagtgcagaagtgaacggtacttaataaaagkaatattttaattttttttttttttttttttttttttttagagataggatctccctgtgttgccctggctgatctcaaactcctgggctaaagcaaccctc

SEQ ID NO: 302206 - DNA, 201 bp, Homo sapiens
tttggaaattccaaagcaccagggccctacctcctttcttctgtctgcctcccctgccttcccagtgtgcatctgctgaattgaatcattaagagaaagaytaagatgagtggaaggtgagcctgttgttgctgacagttcactttccccagtgaaactgtcaggaagacaaagagatgttgaagttttagagtaagtggc

SEQ ID NO: 302207 - DNA, 201 bp, Homo sapiens
atgaggcacatccgtgtatgtacttaggcatttctgcatatctcagtaataagaatttgtgtaaacactacagaagaatgcttgttccttttaagcttgawttttatcaagcttaattaagaaaagcagtaaagtttcatttgttttgttatatttgttatatttgcttaaatgtagtcatccttactttttttttttttt

SEQ ID NO: 302208 - DNA, 201 bp, Homo sapiens
gtgaataatagttaaggttgttgcaaagactgaagatagatgatagatgtgaataaaatgacgcacacaaagtgctaagcaggttacctaaggctgctgcrtgttttcccctttctgcatctatggaaacaggctggagaggtccaggaacctggcccctggtccctggcaagcaaggggtggaaccaggattgcaacctc

SEQ ID NO: 302209 - DNA, 201 bp, Homo sapiens
gagccaccatgcccagctgtaagcagattgttttttaaaaaaagacagaaaaaagtgaaaactgttagtgttggaaatgcatgttacagatgagaaaaatktaaaaagccagcaaaaataggaaagtttctgacagcactcttagaattaacggaagctattatgtggtaagtaatgaagggaagtgacaagagcaagagg

SEQ ID NO: 302210 - DNA, 201 bp, Homo sapiens
gtctgtgcgctttattaaatgctcacagtgatgatgatgacgatgggggtggtgatggggattataagcaccactatttgaatctgtcacatggtttctgrttgagttcccagcacaactctaccttagcagaatgattaaggttcccatctcagctcatcactcaccaaactctgagaccttagttaaattgcatgatct

SEQ ID NO: 302211 - DNA, 201 bp, Homo sapiens
atgtgctttgtgtcatttgatttacacactaaccctattacataggtacagtattattaattacccattatataagtaaggaaactgaggtttgggcagaytaagcaactggcccagaacatcacagctagtgttaaaatgttaaatatgtcagtatattttttaaaagaaaaatcttgctctggattgatcagcgatgcg

SEQ ID NO: 302212 - DNA, 201 bp, Homo sapiens
ttcctttactgtcatcttagcagagcttctggaaggaaaagagataaaaatgcatggtcaggtcatctcttaaaatgggaatccgggaaagcagtgtaaayggcagcatggtacccttcctctcattgttctttcaggatggatgctgggcaggaaagcaggcggcccctctgttgtggtcatggaaagaaaaacaaaagt

SEQ ID NO: 302213 - DNA, 201 bp, Homo sapiens
atctcagttcaaaatgctgaactgtacatgccatccccttctccattgtcttacaggttttattaatgatgtgtttcagtgattgattttctgaatgcacrgctgtcactcactgcttactttttcagtagatgtggttatctggggtacccagggacacctgtattacataccaaactcctccccatcttctccatggct

SEQ ID NO: 302214 - DNA, 201 bp, Homo sapiens
tctgatatctcatgtctccctaaaatgtgtgaaactaggctctgccccagcctccttgggcacatgttcttaagatttcctgaaggctctgtcatgagccrttggtcactcatatttggctcacaataaacctcttcacattacagagtttgactcttcgttgacgttactgtttcctgagtatacagcaacaatttaaag

SEQ ID NO: 302215 - DNA, 201 bp, Homo sapiens
ttggcattgtagcttttgggtttctgagagatcattatgaatatcaggatttttctttgctagatataatagtaaaatcactttaaaagtttataacccarggaatgagtttaaaatttggtcaacaactgtttcttgtagttggttcctgggatgtaccaagtgtgcaaaaatgaatagatctagtccccacccttaagg

SEQ ID NO: 302216 - DNA, 201 bp, Homo sapiens
ttctccagacaagttgctcctgtctcctgggccgtgtgattcgaggcatgtaatcataatcctgagctgtcagcagggcagtgattggtttccagatttcmagtccatgaaacaggtagccagggttggggaaaagaatatttccgggaagttaggaggcctggttgagtcttggatcttcagtgactgatgctgtgacca

SEQ ID NO: 302217 - DNA, 201 bp, Homo sapiens
ctacaccatcacccctgtgcttgctcctctaatgcctaagcactgtcattcctttatcactagtagttgcctgttgggtttgctccatttgtcctcacagkttagctgccctggaaggaaactccaccctgctcagagacacactgaggctgagacccaagggaggcccctctctgattggacagcctcttgatagactgg

SEQ ID NO: 302218 - DNA, 201 bp, Homo sapiens
tgggtctggaggggctgtcggggagtctgtggaggccgcctttctaccaggcccccaggtgatgctcatgtgcccccggtgagtgacagggcagctcctgwgttctggaacaacagaacattctgagcactcagttctgaatctgctcttgggcccttttgttcatttttccggaggagtgatcaattaaaatttggaaag

SEQ ID NO: 302219 - DNA, 201 bp, Homo sapiens
gctgggttctggaggatgataaaccctccaagggaaggggaagtggccaggagccttccaagaggcagaggcgtggtgtaatgtgatggtaggtgcttcaraggggatgaccgcttcagggaggaggagggaatgggggtgtgggattggtcaggaggagcacaaggcacctaccccatcttctggttctgtggttcctgc

SEQ ID NO: 302220 - DNA, 201 bp, Homo sapiens
aagggaaggggaagtggccaggagccttccaagaggcagaggcgtggtgtaatgtgatggtaggtgcttcagaggggatgaccgcttcagggaggaggagrgaatgggggtgtgggattggtcaggaggagcacaaggcacctaccccatcttctggttctgtggttcctgcgcagaagaaaaaaatacttgaggggggct

SEQ ID NO: 302221 - DNA, 201 bp, Homo sapiens
aaggttcagcgttaggttaatttttgctgatgagaaattatgactcttggagagccccatggagggatttgggggcctgggatggcaaaggttcaggtcarctgggtcaggttaggcaatctttggaggggaatggagcgagctggtggctagaattcttgtaacatctgaattaaacagggatggaaggcctggtgggat

SEQ ID NO: 302222 - DNA, 201 bp, Homo sapiens
atcttatcttgttagattcctcaattcattattgaaatgaagtctttctatttcttgtcataatcaattctgtcaaatgagatccaaaatgaacccattayggtctgagttctgcactgcagcagagaaaagtagtttttaaaatttcctcaaatgaccaatttagttgctgaaatgcaaagacatgaactggttttcctt

SEQ ID NO: 302223 - DNA, 201 bp, Homo sapiens
cttgaaaatattaattagtcgttgctgtctctgtgagctcatgtttgattgatcttcatctgtgggaagcctggaggcctggcaggggttgctctcctccrgagatcatttacatttacttccaccaggtgttggggccactttcaaaggcttccttcaaggatctcaggttaacgttgaagcctttgttgagctcccagc

SEQ ID NO: 302224 - DNA, 201 bp, Homo sapiens
gataaacagtgatgtaccctgtatattaaagggcaaagctgaacactgaaggcaagtacccttaattatgtgcaaaacgttttcaatcaaatctattgtcrtacgcacaaatatcaaatttagaggttggcctttggaaaactcacagcacaacatttcagaaatcttcagcattcagcagagtctccctgaaatgttaca

SEQ ID NO: 302225 - DNA, 201 bp, Homo sapiens
tgactgttaagatccattttggtatccagctaaattttacagaattcctttcacatcacaatcttgttcctcatgtttcacagtgtttgtctttgctttcyctactgagacttgttttctaattttcagcctcttctctctggtccttcatcctagaatttgcatccggtgtttctaacttctgctcagaaaccgtgaaaa

SEQ ID NO: 302226 - DNA, 201 bp, Homo sapiens
gcagttgcagcaagcctattgtcttgcattattaatataaaattaagtataatatagctattatgaaacaaataaatgctatggaagcactgaggtggaakgatgaatttgaattaggaggatcaggaaagcatcagggaagagaggatttttgagtctaattgttttcaagggcaggatccaataaaggagtttaggttg

SEQ ID NO: 302227 - DNA, 201 bp, Homo sapiens
atctttaaaacttgccaaaactctagatggcaaaaatcagaatcaagtaccaatgctgtttatctttaatgatcaaaaccaaagactttttcattcttaargtggttaaatattatcagaattgattattaacagtatttacaactaagaagtttgaaaggacattctaattacttttgtattttttataaaatgctcatt

SEQ ID NO: 302228 - DNA, 201 bp, Homo sapiens
cttattctacaggaaattttaaagtgccaggatgctacctgtgagggggaagacatgaggctctgttatctgaatgaattgaattacaggttgcagctttkaactcttcaccttttaaactgtctactttttcattttttcccctctggaaattgatatcatacttatgcattctctttatactttctttcagttgtctca

SEQ ID NO: 302229 - DNA, 201 bp, Homo sapiens
catttagcatctcttccctgtcccctgtgtcagtttcaaaagaagaccaggaacttgcaatgcctttgattagaatattggagctgtggcttttcttccartctttgtccctgcactgccacatccacataaatgaaacacttaaagaggttatgtgtgtcttccaggaattaagtggatctctggaaagttgttttgtga

SEQ ID NO: 302230 - DNA, 201 bp, Homo sapiens
tccgtataggctgctaattatcagtataggccatgtataaatacagccacagttgcagcaccgttttgctaatttgtccatttttaaattacatttaaacraaagcaaattaagaacaaggaaatgtataggtgacacaaacgttgaccattaaaggtggacatgccactcatatacatctcagcaaaatctcacatagaa

SEQ ID NO: 302231 - DNA, 201 bp, Homo sapiens
caggctgttcttcttgtatgccacttccagacgagattttgatgaatattactgggtggtgggctcagcctggcatgtcctcatgtgattctgtgtgaccrgacacaggcctgtcattggtaaacccagggaggcctgtcaagctttgtgtttctatccctgtggtttgagatgctcagaggtatttgaggtatatgtcag

SEQ ID NO: 302232 - DNA, 201 bp, Homo sapiens
gcccagaggctgctcagccactctgcattccccagcgaggtggcactgagtccttccagagccaggaccgtgaaccttcctggaccctgagcccaaggtcrgagtggaacaggatcctgtgcagagccagccagccacggggtcagggagccagttgggtccagcccgcagatgggctgccactgtttgcactcagcacaa

SEQ ID NO: 302233 - DNA, 201 bp, Homo sapiens
acggctttgaatgtggcccagtacaaatccgtaaactttcttaaaacatgatgagattttcttgtgattttttttttttttaagctcatcagctctcattrgtgttcactgattctatgtgtggcccaagacaattcttcttccagtgtggcccagggaagctaaaagattggacccccaggtttagattaccgacatcat

SEQ ID NO: 302234 - DNA, 201 bp, Homo sapiens
taatttattcagtaagagacgttttttcccaaaaggttgaaactagtttaatttattcgataagagacagtttttcccaaagttgattttggctgttgttktttttttgggatgggttatggtatcagtatttttatttagaacaggtgactttaactaatttcgtaatttataatatgaaactatcaaatgtatagaaag

SEQ ID NO: 302235 - DNA, 201 bp, Homo sapiens
ccgggaatacactgaacagctcaccacccctggctcccggggagttcgatccgaacatcgacgtctatggaattaagtgccatgaaagtaagtttgattastgtggaccctttttgcatgtgaagtggtttgactttggccttgttatctaccagtaagcactaccccagttatgagggtgctgcccggcagcactcatcc

SEQ ID NO: 302236 - DNA, 201 bp, Homo sapiens
atttctgtctttggccagatacgtaaaatcattacattttattccatatattgaataaagatcataaatttcaaattctttattacttcaggaatttaacyagtccaatttttatgataagatagggacattttactctcatttgggtttcagtttaaacaaaaggtcttttcagtgaggtttcctactaggaatagcttt

SEQ ID NO: 302237 - DNA, 201 bp, Homo sapiens
aaaaagaaagctgcccatgctgcaaaaactgttaaacatggcgtgagtatctccattttgtttccttctctctttctctccctctctctctctctctctcyctctctctctctctctctctctctcctggctcctctgtgtgacctgtaactcagggatcactcctttctgccactgagctgctttctactgagccattca

SEQ ID NO: 302238 - DNA, 201 bp, Homo sapiens
aaagaaagctgcccatgctgcaaaaactgttaaacatggcgtgagtatctccattttgtttccttctctctttctctccctctctctctctctctctcccyctctctctctctctctctctctcctggctcctctgtgtgacctgtaactcagggatcactcctttctgccactgagctgctttctactgagccattcaaa

SEQ ID NO: 302239 - DNA, 201 bp, Homo sapiens
gtcatgaaactgtgacagttgttttttactaggctaaaagaaagtacttgttatttttgttatttgtaaagctaaagtatttttttgtgagtatacatgcrtctaaatatagatgaaaatatcctgttttcagctatgaaaaagaaattgagcttatggttgttttataaaccacacccctatactttacattaaaatatg

SEQ ID NO: 302240 - DNA, 201 bp, Homo sapiens
gagtatacatgcgtctaaatatagatgaaaatatcctgttttcagctatgaaaaagaaattgagcttatggttgttttataaaccacacccctatactttrcattaaaatatgaagtaaatttgtatctataccgggaagtgattttctgcacttcagtgtgatgatggaatataggtgtgctaaaacctaaagtgaaaaa

SEQ ID NO: 302241 - DNA, 201 bp, Homo sapiens
tttcatttttatattctttttttctgataagttgtttcattattgataagtgttaaattgcactgtgtcttgctcccctctataatgaaagctattcttcrcttgagatcacagcttagattttctttgaaattccccaagagcttaacacagggctttgaacacagtgggcatttaataaatccttgatgatgatgttca

SEQ ID NO: 302242 - DNA, 201 bp, Homo sapiens
ctgggtgcttctctccaggttaaacgctgtgtttaccgtgagccttggggacatgttcctggttttttttttttttttttttttttttttttttttttgaracagtctcgctctgttgcccaggctgggtccctggtgttttaatcatcgtgaaacagcagctgagatttagaagatgatctcatggcactctgtgaagtt

SEQ ID NO: 302243 - DNA, 201 bp, Homo sapiens
aaaaatgagaaaaacattacatgttaacatttttatgaaaaataactattttccaaaagcaaaaacatgaatgagacaagtagcattgttttacatttttrcaaatctccgtaatgtcttgacttaatgtgagatagttggaatgtcctgtctgattccgctgtcagtctgtgtggtgttatgccgctgaagtatgtgaag

SEQ ID NO: 302244 - DNA, 201 bp, Homo sapiens
aacacaaatcaatgggcctggctctgttccaataaaacgttattgacaaaagcagccagcggccagatttgcccataggatgtagtctggcaaactgtagrcaagggagttagtaattggtgagagagggatgaggagatgggtgggaagaaggggcccgagacttggagttgggaaaactggagctccaggagccaagtc

SEQ ID NO: 302245 - DNA, 201 bp, Homo sapiens
atccgcactttatttccactttgcattagggaatacaaaactgagccatgtttaagcaacgtagtgtcaatcaccccgtttagattccattttcccaggcrgaggagaaggtaaataaattggatccagtgagaagcctggatattaggatgtgcccatcattgtctctttcagcagaactccacacagaggacaggcaat

SEQ ID NO: 302246 - DNA, 201 bp, Homo sapiens
tttcaaaaatctagtgagcttcatgtagaggattgtgttttaataaaagtgatcattcaaaacacctgtttaactcatagctttcaattccaatcaaagcwctgttaatcctttgcttgggatgtcttgatttttctttttctttttccttaaaaaaaaaaaaaaaaagacaacacatccatgcatccattggattgatat

SEQ ID NO: 302247 - DNA, 201 bp, Homo sapiens
acttgccccttaaggattggtggattcttggtttgattcccccaagatgctaatgggggaatgcctggagttggaattgatgcccactccagcgctttgtrcccctccagtggaacgatgcaacactacacaacacacccagcacaacacactcagctcttaaggctgacacaggaacccggaaactccactcttgcacaa

SEQ ID NO: 302248 - DNA, 201 bp, Homo sapiens
gtggagatgggggtctcattatgttactcaggctggtctcaaactactgggctcgagtgatcctcaagcctcagcctcccaaagctctgggcttgtaggcrtgagccactgcgatggacccttcataaacgtttcaagcagcattgaaccagaacaaggagcagcgttttcagttgggaattcattgtgtatttttcatta

SEQ ID NO: 302249 - DNA, 201 bp, Homo sapiens
gtgctgcccggcagcactcatcctccaaactccaaagaaatggatttggggacaagagtatgttaaagctaaccgtgatctcagtgctgaaacataaggcratcggacctttgaattctgtgatgttgagggaatacagcaaaaccacgaactatactatacatgtacaacacacctgtacatatgcacatacacactggc

SEQ ID NO: 302250 - DNA, 201 bp, Homo sapiens
atgcccctagaggctcctatgttgggccaaaatgacaggctgccctcggaaggcagacctagaaggagctgcccctgcaggccttctgcagaccgcacacsctcagctgggcagcatgaccttccctggagggaatctgggcgtcccatctctgtggctacacttgctttccttagtgtctgagagtcttactgaactctt

SEQ ID NO: 302251 - DNA, 201 bp, Homo sapiens
tttaattttagtcaagtagccattaatcaaaagattgacttaatgattcttgtttaattgaaaaatctgctgaagtgaattaatttaggcttttgagtttrtggaccctggaaaggatgacctttgtgcttttattctcattcctactcacctttgatatcagaataactttatttggcttgtcaaaaaaagcatttcttt

SEQ ID NO: 302252 - DNA, 201 bp, Homo sapiens
ccttccttttccttcccttcctttccctttccttttctttcatgtgaagtatattgtaggaataatctctaaacatagcccatggcacagtaaggattacmgataatttaacctttcaaaaacattaaatgaaacaagactttacattgaagtactaatttgatgctatattaaattgtcacttcaagcttttttaaaaaa

SEQ ID NO: 302253 - DNA, 201 bp, Homo sapiens
tccagcctgggtgacagagcaagaccccatctttaaaaaaagaaaaagaaaaaaaaatgatcaggtatatgttaagtaaacatgaaatctatataacagamcaaaaattcactcttatgtcaatgtcagcgtgttaatgtagatctatttactgagacagactctgtagtggcagagagtggccttgttaagccaggaccc

SEQ ID NO: 302254 - DNA, 201 bp, Homo sapiens
acagatgtgagccactgcacccacccgaggtctgtattttctaaagataactgcattgtaatttatagaatgcatagaagggagataaggaaatcaggagrccatgaaatcccagtgagccaagcctccgtcacccaccatgtaaagcacggagcagcttgaaaagacattgagagaagtaaacccacaggttcagtggcc

SEQ ID NO: 302255 - DNA, 201 bp, Homo sapiens
aaaaagaaaaagaaaatgaatattgatgaagcagctgtagaaaattgacctcttgcctcaagacaaataaaagtacatttcccagacattttcagctgccygttttttcctgcctctgtaactgattctaatttgccctgcctgtccctctgaaacctcagaactttcaaattgctatttggtttgcagggtaggttgtaa

SEQ ID NO: 302256 - DNA, 201 bp, Homo sapiens
tagctcatccttattctcctcaattttcagaaacattttcaggcacaaaagaaaattatgtaagaaatgtagtgtggtatgtcttataaacaatatcctcrtgttctgaatacaatagctttgaaatattacttgctaaacaattatttctttagacaaaacttgagttgtctcttggcttttattcttttaacaacatgc

SEQ ID NO: 302257 - DNA, 201 bp, Homo sapiens
gtgtgtgtgaactgcttggtaggaaagctacaagagagactgggaaaggctaagggaggggcgactgaaagaggtaccaaaccatgagaagaaattacagkcaggagggacgctgcagtctggaaagatgaagctgtgattaaaaaccatgataaacacgtgctcaacagacttctttatcaaaccctgcagaagggaaca

SEQ ID NO: 302258 - DNA, 201 bp, Homo sapiens
gggaaaaagactacattctacacacaaagtaatgggctccaggcttcttgtgagtatttcagataggaatcattcagtttctaatgggtatttggccgatrtggtgcttattgtagccaggaacgttccgggcaaggaagcgctgggcgattccaggagagatataaagaaaatatttcaagatctgacacactttgaatt

SEQ ID NO: 302259 - DNA, 201 bp, Homo sapiens
gtatttttaagtcataaaacagcaagccagtggggaaaataaactgaaagatggtttgccacaggcctgaaactgtgagtggggaagttggcatactaaaytgtaatacagacagatgtgaggtaatgcatttaagggggggaaaaagactacattctacacacaaagtaatgggctccaggcttcttgtgagtatttcag

SEQ ID NO: 302260 - DNA, 201 bp, Homo sapiens
gagaagagagggggtgaggggcagcttggggagtgaggaggggaggaaggacagtgggaccagggctagtcccccacctccgacaccctagctcctgaagrgttccaccagacccacccttgtgctcctcgaagaaaaatctgctaaggaagaagaaaaagataggttagtgtttttaatgtgacagacaaatgaatcttt

SEQ ID NO: 302261 - DNA, 201 bp, Homo sapiens
ttacctaaaattccttcccttatagaaatacttgtgaattatgttttcagttccatagatgctgatttttatgaagatttttgcaagcacggcaaaagggsttttattcttttttgcaagtttattttcatttgggtgagcttggaattacaagtaaatcaggaacacaagcagttctaacataaaacaataattactacg

SEQ ID NO: 302262 - DNA, 201 bp, Homo sapiens
gctccccctgcctggcccgttccttccccacctcttgttctttgaggaatggctgcagtgtgtggccaggatttaaagaggtcacatagtccaagcgtgcytgtgacaaaggagacagacagacatccgtctggccccctgtgtctcctggatctttctgcgggttgtacctggttctaggaagcacacctgtgcttttgg

SEQ ID NO: 302263 - DNA, 201 bp, Homo sapiens
tgacaaaggagacagacagacatccgtctggccccctgtgtctcctggatctttctgcgggttgtacctggttctaggaagcacacctgtgcttttggtargcagtgaactctgaacccttctttggctacctgtggaactcagtggtggcagatgcaagtctgattgactctctctgagctttattccacgctgtgactg

SEQ ID NO: 302264 - DNA, 201 bp, Homo sapiens
aggtaatttttcttgatctttatttgaaactccaagaagattaacatgcgtagcgatttctcaccaaggccagagatttaaatatatagttagagaacaaraagaacacatttcacataaacatctcctctaaccctgtgttctaaaattacagtggccagattcctggcagttaacctttaggcatgcttgtgctataaa

SEQ ID NO: 302265 - DNA, 201 bp, Homo sapiens; identical to SEQ ID NO: 63004

SEQ ID NO: 302266 - DNA, 201 bp, Homo sapiens; identical to SEQ ID NO: 63005

SEQ ID NO: 302267 - DNA, 201 bp, Homo sapiens
ttctaaagtgttaagaccttcagtgtatactaaacttgaagtggggcagcaggaattctgcctttatctctagaatatcaagtctatcctctgaaactttyacttgtagatttctcacttttgactttaaactgcctgagggcaggagcagtgtttgtgtttgctggctgcctgtcacccgttgagcacaatgctgggctc

SEQ ID NO: 302268 - DNA, 201 bp, Homo sapiens; identical to SEQ ID NO: 63007

SEQ ID NO: 302269 - DNA, 201 bp, Homo sapiens
aggagggagctgatgctgttaaacctaaatagaccacacatttgaaagtgaggcctcttgttcactgtggaggataataccaggtttgcttttcccctacygtgactcctgaattagaatccctcattattgacatctgatgccctttcttctttgtgtttgtaacagagaattctaattttaaaataattaattttaaga

SEQ ID NO: 302270 - DNA, 201 bp, Homo sapiens
aagtgggtaaatggtcccgacttgtcttgtttgtgtgaccacctttttgctacacctgaaaaaagtaggtattggtctgtggagaccactctgattaaagyagagcatggttaagtagtaacctatgcagttgacccctactggtgaatttaaacttcttaaaaagtttttaagataaatgaaaaggataatgaaatgaaa

SEQ ID NO: 302271 - DNA, 201 bp, Homo sapiens
ttccaatcaaagcactgttaatcctttgcttgggatgtcttgatttttctttttctttttccttaaaaaaaaaaaaaaaaagacaacacatccatgcatcyattggattgatatttgattcttcttggtaaaccgccagttttaattaagtttgcacattgatatctggctggaaattggatgaaattcagcatagtaatt

SEQ ID NO: 302272 - DNA, 201 bp, Homo sapiens
gcaaataagttcacatagggattttagttaggaaagcttgcggcattttgtattgtgaaaaaaatgtactctaattttaaagaaatttcaggatattccgygaattgtgcacactctatgttcttgacaatttgtattcttgagtatattacccacttttttccccactcatttttaagtcaatttgaacctaagaaaagt

SEQ ID NO: 302273 - DNA, 201 bp, Homo sapiens
ttgatttagttgaaggtatgggctagggcttctggtggccttgagaatataccttccaattttgctgtcatggcactgttagccaaccacatgctcagggyggtgctaacaaaaacactgtctgaagaagactttaacaagtgctaatattaagattttaaccaagtaagaatcactactaagattcttacacgggcataa

SEQ ID NO: 302274 - DNA, 201 bp, Homo sapiens
aggcagaggttgcagtgagccaagaccatgccgctgcactccagcctgggtgacagagtaagagtctgtctcaaaaaaaaaaaaaatttgtgtgcagtttktcagttatttcatgactattagtggttattcaacacaaattaagcactgtatcagttacagggctcagttaaataatacagaatctacaggagctgattt

SEQ ID NO: 302275 - DNA, 201 bp, Homo sapiens
gcactccagcctgggtgacagagtaagagtctgtctcaaaaaaaaaaaaaatttgtgtgcagtttgtcagttatttcatgactattagtggttattcaacrcaaattaagcactgtatcagttacagggctcagttaaataatacagaatctacaggagctgatttagatagcaaggcattaaatgtactagtgagtatta

SEQ ID NO: 302276 - DNA, 201 bp, Homo sapiens
ccagctactcaggaggctaaggcaggtgaattgcttgaacctgggaggcggaggttgcagtgagccgagaccatgccattacagtccagcctgggtgatakagtgagactctgtctgtctttctgtctgtctctctctctgtctctctgtctccctccctccccctctctacacacacacacacacacacacacacacaca

SEQ ID NO: 302277 - DNA, 201 bp, Homo sapiens
tcccagctactcaggaggctaaggcaggtgaattgcttgaacctgggaggcggaggttgcagtgagccgagaccatgccattacagtccagcctgggtgayagagtgagactctgtctgtctttctgtctgtctctctctctgtctctctgtctccctccctccccctctctacacacacacacacacacacacacacaca

SEQ ID NO: 302278 - DNA, 201 bp, Homo sapiens; identical to SEQ ID NO: 62990

SEQ ID NO: 302279 - DNA, 201 bp, Homo sapiens
aacctaggtctggtggctgttacgttttatgtttttgaaagcctaattccatgactctaatttatcattgcattacatttctaacaagcccacagtagtasaggaaaaagttctgagggagaattaggaagggagaaactttacctttgttgacgacatcatttataagtagacttttttttttttcttttttgagacagg

SEQ ID NO: 302280 - DNA, 201 bp, Homo sapiens; identical to SEQ ID NO: 62991

SEQ ID NO: 302281 - DNA, 201 bp, Homo sapiens
tcatcataaatgacaggttttttttctgctttcaaaatctagaattttcatatttgtaacacctggaggtaagggtcatggtgttaattataaagagagcrgagagagtaggcatctgtaggaaacatcttgggtttttttaattatttgctggattcatttattcaacagttgtatatgaaatggtttttacacatgagg

SEQ ID NO: 302282 - DNA, 201 bp, Homo sapiens; identical to SEQ ID NO: 62992

SEQ ID NO: 302283 - DNA, 201 bp, Homo sapiens
tttctgccctcaagcaaatggcatggctttgggctacgttctgatgatcacaagtatctctgaattgctttctgtttcaggaatgtgtatcctctctagtmttcattggccaaattgatctcttaaagacattgtggtctggcaaagttgcttcttgctcattaagcttgggagtatgttttaaatagttacattcaattg

SEQ ID NO: 302284 - DNA, 201 bp, Homo sapiens
cagtgaggggttgagcagcaaaaccaaaatcggtgtgtcccctggggcagggactgtgtcttgtgggcctcaaaaataactgcctcggagcagaccccacycagtacatgtctgtatgtcagttgggagcacaaaacaggtgtaacattaaaatttcttaacagagttttgaatgaaaataatcattatcatcttcagtat

SEQ ID NO: 302285 - DNA, 201 bp, Homo sapiens
aacaattacacatgaatatcagatagtgaaaatcagattaaaaatgtttaggtaatccctcattctcccaataagacacttagtagaaaaaagtaagaaaraattatgcctttatgatggtctttgttctaagtatgttctggttgctaccaatacacatcaaaaatatgaactttggtgtataaatagtcgtagtttccc

SEQ ID NO: 302286 - DNA, 201 bp, Homo sapiens
aagtatgttctggttgctaccaatacacatcaaaaatatgaactttggtgtataaatagtcgtagtttccccattttacaaacaaattggacacaactttsaagtattctgaaggagaggtcgtaggtattgcacctaatgtgggtaattctgtgtcagccaggcagcctactactgtgttcctgcacatgattctaaccc

SEQ ID NO: 302287 - DNA, 201 bp, Homo sapiens
aagattgggatttagatatcaaaatgctgagtaccccatgcagtcatctgatttatattccgaacttgcatagtttttgcaggctcctggaatgcagcctyccaccaggccatgggaaagactcagcgggaccacgcaggatggctataatgtcatctctgtccatgtggcactcacttcaagactccagagtccagctag

SEQ ID NO: 302288 - DNA, 201 bp, Homo sapiens
agttccaggtacagctctactgtttaatagcttgggccttttctaatctcactaagcctcaatttccttatctgtgtaatgggcatgataatagcacctcyacccccttgggttgtaaagatcagataagatactgtgtgtggagtgcctcacgtgggtcttggcacatgtgcacctagcatgagccataaggttagtgcc

SEQ ID NO: 302289 - DNA, 201 bp, Homo sapiens
tggaatgcagcctcccaccaggccatgggaaagactcagcgggaccacgcaggatggctataatgtcatctctgtccatgtggcactcacttcaagactcyagagtccagctagaaaggactctggagtccattgtgtaggtgacattggtgtaagcacaggcctttatcagaagtctgaatctaccttttcttcttgtga

SEQ ID NO: 302290 - DNA, 201 bp, Homo sapiens
atggctttcattgctgaaaaatacaccccacaaagatttgtaaatacaagtggaagaactgtatcactggccatttttactaaatcatacgaaattattaygctccttttctcaacacatctcgccagttatacaaaggtttttagttgactttcagatgataaaattttattctgaaacttattggaagtttattgtgtt

SEQ ID NO: 302291 - DNA, 201 bp, Homo sapiens
cagccttttagtataatgtacatagagaagctctgctgtcttctccccgaggagcacaccgcccttgtggaagacccttgcgacccttgccttagagctgyggtctgcccctgagttagacgcttccttcgtgagcactttggtttttctctccatcattactatgaaaataacaagtgatcaagaatttaaacagtacgg

SEQ ID NO: 302292 - DNA, 201 bp, Homo sapiens
tttgaaaagaatgcaagtatggtggacctttaaccacataaaagtaaaatattaaatgaagcatgcttttaatagccatcctgtcatttttaaggtttcartagtgtatgtttagaggcagtgaatttaaaagtgtttgtatattaaagcttaataatccttaagcattattaagtttctggtaaattgttctgtttgatg

SEQ ID NO: 302293 - DNA, 201 bp, Homo sapiens
cttgacaggggagacattttacagcctagtaaaggtcagtaagtatttggtgacattagagatgatttatgctttatgtcatagttgtgtatgctccctcstaaatggtttctctatagattaaaaaaaatgtatgcttcctaaaacactttacacctctgctatggagagggagagagagaaagagagaagaattggacc

SEQ ID NO: 302294 - DNA, 201 bp, Homo sapiens
atagtgctttgggaggctgaggtgggaggatcacttgaggtcaggagtttgagaccagctgggctgatctcagaacccatctctacaaaattttttttttwaaaaaaaacctatctgagtgtggttgcacgtacctgtagtcccagctacttgggacattgaggtgggaggatcacttgagcccatgagttcaaggctgca

SEQ ID NO: 302295 - DNA, 201 bp, Homo sapiens
attgaattttcttttctgtgtagagatggtgaacacagatgtgattggtaagcagtacaaatgtggtcattttctgtaaataagaccctaatggctggagkttttcactttgtatgaacaccataggcgtatgtattttacatctaaggaagcaatcttttgattggatgtttttttcctttttctttctctcctatgcag

SEQ ID NO: 302296 - DNA, 201 bp, Homo sapiens
tgtccccatcctgatgaggtgtccatcacccacagggagaactaggtgtttccactcctcctccttggtgctggagccttttgaaaattgcttaatgaaakaggcaggtaatcccaggtctcatattcaggagcgtgatgagcttctcctcatctccacagcagacagactagaggaaagagacttaagatgtaatcagag

SEQ ID NO: 302297 - DNA, 201 bp, Homo sapiens
cacaattatttaaaatattgtataaaattacctttaggctatgtgtataaggtgtatatgaaatagataaatttcgtgtttagacttgggtcccatccccragatatctcattatctttgcaaatattctgaaatctgaaaaaatctgaaatacgactggctgcaggcatttcaaataaaggatgctcaacatatactgac

SEQ ID NO: 302298 - DNA, 201 bp, Homo sapiens
gtttagttttggggatgcttgttagagatccagctggggatggtgattagcaggagtttagaattcagtggagagattagggctagaaatgttttaaaaastgagagccattgcactgcagatggtggggcaggctgggttctggaggatgataaaccctccaagggaaggggaagtggccaggagccttccaagaggcag

SEQ ID NO: 302299 - DNA, 201 bp, Homo sapiens
tccttcagcgtacctgccttctatcctactggaagcataaatctttgacatggtttttattgctagcaacaaggaaagtcaacatgcaaaaatagttaacsaagagaaagttcaggtttttcaaaattgtgtccaaagctgtccctttcattcactggaacttgatcttaccctttgtcctttggaaacacatctttgctt

SEQ ID NO: 302300 - DNA, 201 bp, Homo sapiens
tttaggaaaaggcacattcagagaaatatatgtaataggatttcatatttttaaaacgcaaagcatttctcttgttgcttttgtcatcacacataccaacyaagctgcgcaccttggcttgttaaggcttgaaagtcacaggttggttagagggaaaaaagtaaagtgatgaagacagacatcatagagccagtttttcat

SEQ ID NO: 302301 - DNA, 201 bp, Homo sapiens
ctgttactgtgcactgccaggctgaccccttttctcaggcagattgatcatgaaattaaaaatggtttacctgagttaattatattattaggctgggcacrgtggcgcacacctataatcccagcactttgggacgccaagatcggtggatctcttgagcccaggagttccagaccagcctgggcaacatagggagacccc

SEQ ID NO: 302302 - DNA, 201 bp, Homo sapiens
acaaacgcaggttgtatactgtggcttttactctctgataaccaaattagccttctaaacaactattctcagcagaagtaagggtggtcttgatttttgtkttttttttgccatccatactagtctgcttcctgtcttttcagagagcaaggctgtttgtaagaaaaatgtgtgaactgaaaaccaccactaccacctatt

SEQ ID NO: 302303 - DNA, 201 bp, Homo sapiens
ctagggcttctggtggccttgagaatataccttccaattttgctgtcatggcactgttagccaaccacatgctcagggtggtgctaacaaaaacactgtcwgaagaagactttaacaagtgctaatattaagattttaaccaagtaagaatcactactaagattcttacacgggcataatacttttaatcttacagaagaa

SEQ ID NO: 302304 - DNA, 201 bp, Homo sapiens
tggcactgttagccaaccacatgctcagggtggtgctaacaaaaacactgtctgaagaagactttaacaagtgctaatattaagattttaaccaagtaagmatcactactaagattcttacacgggcataatacttttaatcttacagaagaactgtaataaatattctaaggcaccatgatttttggactttgtccttca

SEQ ID NO: 302305 - DNA, 201 bp, Homo sapiens
tcctacatacttaaaaacaaaagccaaaaatatgtcaatgaatttctttccatcaaacatacaataacaatagaaaagtgggtttttttccctcccccttyaaaaattgatccctgttcactaggagaataatttccgtttaagatacttattttgaaaattacttagatgggatccagaaaaagtaaagggaaaaagaat

SEQ ID NO: 302306 - DNA, 201 bp, Homo sapiens
tctgtctcaaaaaaaaaaaaaatttgtgtgcagtttgtcagttatttcatgactattagtggttattcaacacaaattaagcactgtatcagttacagggytcagttaaataatacagaatctacaggagctgatttagatagcaaggcattaaatgtactagtgagtattaatagtggctcagtctctgcaaatgctgaa

SEQ ID NO: 302307 - DNA, 201 bp, Homo sapiens
tattagtgctttctggctctaaaaactggtattttatgggaaatcagagggttaattcttgaaagtatgatactgatgtcctagaatgtgctttctgcccycaagcaaatggcatggctttgggctacgttctgatgatcacaagtatctctgaattgctttctgtttcaggaatgtgtatcctctctagtattcattggc

SEQ ID NO: 302308 - DNA, 201 bp, Homo sapiens
atgaaaataatcattatcatcttcagtatagtatagtacacagcaccgtgtgaagtattttgacatactcttacctgtaaccctcaaaacaaccttcaagktaggaattaggctctttttctggaaaatgaagctaaactgtggagtgatttggtaacttgcccaagatctcacagctcgtaaatggaggcgccaggacac

SEQ ID NO: 302309 - DNA, 201 bp, Homo sapiens
gatcatcagaaatgcttaggagccgctcagcacttaaagctaccagacaagtagcagtgtattccttcctgtgaggcaataagtgcttgctggcctcaccraaaaacactggcacatgttagagatatcacatctacttaaatattcagccaactgcataccaggcactgttctagatgctggaagtgatgggatgaacaa

SEQ ID NO: 302310 - DNA, 201 bp, Homo sapiens
taggctggagtgcagtggtacaatcatggctcgctgcagcctcgaactcctcagctcaagtgatcctccaacctcagccttccttatagctagaactacargcacgcaccaccacatccggctaattttttaatgctatgtagacacagagccttactatgctgcccaggctggtcccaaactcctggcctcaagtgatct

SEQ ID NO: 302311 - DNA, 201 bp, Homo sapiens
actgtgtgtggagtgcctcacgtgggtcttggcacatgtgcacctagcatgagccataaggttagtgccaagtgtggcagtgagttagggtaaagctgagycaagcctgaggagctctccccggcttcctccctctccctgccacatgtcagctccccctctgctctctcccctgcccccactcttgagtcataccataat

SEQ ID NO: 302312 - DNA, 201 bp, Homo sapiens
aggttagtgccaagtgtggcagtgagttagggtaaagctgagccaagcctgaggagctctccccggcttcctccctctccctgccacatgtcagctccccytctgctctctcccctgcccccactcttgagtcataccataatcagggacattttggcgctctgcactagccctctccgccccgtttgaccctgtttctat

SEQ ID NO: 302313 - DNA, 201 bp, Homo sapiens
aagaccctaatggctggagtttttcactttgtatgaacaccataggcgtatgtattttacatctaaggaagcaatcttttgattggatgtttttttccttyttctttctctcctatgcagtacatagtggaatgtcatgggatcacccttcttccccagttcttgggcatgtaccggcttaatgttgatggagttgaaata

SEQ ID NO: 302314 - DNA, 201 bp, Homo sapiens
tagtggaatgtcatgggatcacccttcttccccagttcttgggcatgtaccggcttaatgttgatggagttgaaatatatgtgatagttacaagaaatgtrttcagccaccgtttgtctgtgtataggaaatacgacttaaaggtgagactgattttatgaatttttgtaaagtaactcaagcttactcttctacattgta

SEQ ID NO: 302315 - DNA, 201 bp, Homo sapiens
ttatgtcatctttggagccccagcatgggcagctttgatgcccaatggccgggcagcaaggcagtgcagacccacacctgcaatttgggggtgactggcayggcataaacaggaacaagaagtccggcataaacaggaacaagaagtcgctcccaggatgccctggggccccaggctccagccactctgtgtggggcgggg

SEQ ID NO: 302316 - DNA, 201 bp, Homo sapiens
cagttttttggcagttgcagcaagcctattgtcttgcattattaatataaaattaagtataatatagctattatgaaacaaataaatgctatggaagcacygaggtggaaggatgaatttgaattaggaggatcaggaaagcatcagggaagagaggatttttgagtctaattgttttcaagggcaggatccaataaagga

SEQ ID NO: 302317 - DNA, 201 bp, Homo sapiens
cattatttggtactttttttttctttttacttagcatattttaagatacaacctttgcaggaaagaagagagaaaactgtatatttaaacagagtgaattktgtgttaactctgaaaggacagagactggaaggaagataagtcagggcttgaatattccaggaaggctttgaggaggaaggaaataaagtctgaacagcc

SEQ ID NO: 302318 - DNA, 201 bp, Homo sapiens
tgctaatgctttcagacttcttccttccttgtgtctgcagtgtcacccactagttattttattagctcctggaggacagggagcatgttttcttctcctgstcttggccccttgcactgtgccgggtgcaacttggcgcttaggtggaaaagagatggccgtttgacacgtgttttggctcaggggtttttctcaagttca

SEQ ID NO: 302319 - DNA, 201 bp, Homo sapiens
tatgtagctgtccaccccgttcctggtcttgccgctgagggagcatgcccctcccttggaggtgagctaagtcaggatgttcgggttaaccatgagcctgygtgtgctaatgctttcagacttcttccttccttgtgtctgcagtgtcacccactagttattttattagctcctggaggacagggagcatgttttcttctc

SEQ ID NO: 302320 - DNA, 201 bp, Homo sapiens
cccaaggagttgatggactaatgaggaaggcagatagaaccatgaactctgggtgttcctgccattctcttgcagcgatacaggggaacttttgtacctgrtgggatgggagagggatatgaatggccataaaggaaatagaggaaaaaagtagggctgatatcgtttgctgaagaatgaatctacataagtatttttcct

SEQ ID NO: 302321 - DNA, 201 bp, Homo sapiens
tttgagagatcacttagggcaatctatgctgttcctaggaatatgtgtgtgatgctgggtggtttggtgggagagactgtgagagttaaatactcacagtstgcattttatcttgatgaaaactgttagcctcaaatgattcagaagaatttttagaggtttccaggtttaaaatgtagtgagaactgcctggattaaatc

SEQ ID NO: 302322 - DNA, 201 bp, Homo sapiens
attgaagaataataatgaagttgtcccatggaagaaatattcttcagattacttttcctcttctttgatactgtaataaccagagggccatttaatgtcasctaataaaggagtcacagagtaactactaagcagacttaaggaattaactctccccacaccgtccttaattgagttttttggttgtctgaatattttctg

SEQ ID NO: 302323 - DNA, 201 bp, Homo sapiens
tataccgcgagtggcacctaagtgagagtatatattgaagcgagaagtccagcttgttcacaatatcacagtaaaattgagctcaaataggttctcttgtktatagagtgctctgtatttcatggtggactacatagggcagatattccttcttccattttatagttatgaaaactgaggcagcctgggcaacatggcaaa

SEQ ID NO: 302324 - DNA, 201 bp, Homo sapiens
aaaagccaaaaatatgtcaatgaatttctttccatcaaacatacaataacaatagaaaagtgggtttttttccctcccccttcaaaaattgatccctgttsactaggagaataatttccgtttaagatacttattttgaaaattacttagatgggatccagaaaaagtaaagggaaaaagaataaagagtaaaaatgagta

SEQ ID NO: 302325 - DNA, 201 bp, Homo sapiens
tgtgtagatctcatgactctctgatggtgtttaagatgggatgcctctgccatcaaatcccaggagagcctgtttttctccacctcggtcctttcactttyttatctgcttccctgcctcctcctctggtcccacaagcctttcacaaaatagttaacatatttgctttaagacagagcttgaaaacacacgcacacgcgc

SEQ ID NO: 302326 - DNA, 201 bp, Homo sapiens
tcctgttgtgacagctaatgcttatattcttacattctccctagactgtctttacataagaaattactagagtcctcaaataaagaatatcatggggattyttaaatttgacagtaaaagaccttgcacacaggcaaagcccttgcatggtgaggtggcagcaatgaaagcacaatgtgtcatgtatcccagcaggtttgt

SEQ ID NO: 302327 - DNA, 201 bp, Homo sapiens
tgaattgtctgatgagacttagaatttgattctcctaccctgtatcttgctaccaaaaatggcacatgggcacacatacacacttttaataggcaacttaragcccatgaaataatgagagtaataataatagtagttacgaagccttgcatttcctattctgctttggccagagagcaataaagcctcatttaaaaagca

SEQ ID NO: 302328 - DNA, 201 bp, Homo sapiens
cacatgggcacacatacacacttttaataggcaacttaaagcccatgaaataatgagagtaataataatagtagttacgaagccttgcatttcctattctkctttggccagagagcaataaagcctcatttaaaaagcagctttccatctttctttgaaaaaactttgtagtagaagtaaacaattctgtttgtttcagtg

SEQ ID NO: 302329 - DNA, 201 bp, Homo sapiens
tgaggagaacgatggggaggaggagggcgagagcgatggcacccacccggtgggaacccccccagatagccccgggaatacactgaacagctcaccacccmtggctcccggggagttcgatccgaacatcgacgtctatggaattaagtgccatgaaagtaagtttgattagtgtggaccctttttgcatgtgaagtggtt

SEQ ID NO: 302330 - DNA, 201 bp, Homo sapiens
cacacaggcaaagcccttgcatggtgaggtggcagcaatgaaagcacaatgtgtcatgtatcccagcaggtttgtacaaagccacagccagtggctttccytatcttttttttttttttttttttttttttttttttttttttttattacatattagcttttggttaaacaaatgcaggtctattttcagtatttctttca

SEQ ID NO: 302331 - DNA, 201 bp, Homo sapiens
ggtgttatgccgctgaagtatgtgaagaaaatctgaactcacacaataatgaagtttggaaagttgttaaagcatgttttaacaacttttttggataattrtagatattcttctttgatactacaccaaagcttgacaagaggtaatttctcaaagcttagttacattatgaaatctgaaatcatatcaatgaactttttg

SEQ ID NO: 302332 - DNA, 201 bp, Homo sapiens
ctactaatacccactgttgccactgtttgacttatgctaaactgctagcagttcttcccaccattgtttttgcattatttatacaaatatcaagacgctgraaaaggcaaataatttctcagtattattataaaaatagttttggctttgtatagttttggtcttgggaccccagggttctgaaccatgcttagagaaatg

SEQ ID NO: 302333 - DNA, 201 bp, Homo sapiens
aatggatctagcttttcctctctcacaggaatattgtgaaaataaatatgaaataatgagttggatttttccaggccttagaatcattccaaggatcaggygttttgtatagaattgcatgaactcttttgatttcctccttatcagataaggcttttaatacacttgatttatgtatttttatattcatagtgatatgaa

SEQ ID NO: 302334 - DNA, 201 bp, Homo sapiens
cgagatcaccctggccagaatggcaaaaccctgtctctactaaaaataaaaaaattagctgggcatggtggcacatgcctataatcccagctactcaggargcagaggcacgagaatcacttgagtccaggagatcaaggctgcagtgagccaagatcgcaccactgtactccagcctgggcaacacagtgagaacctgtc

SEQ ID NO: 302335 - DNA, 201 bp, Homo sapiens; identical to SEQ ID NO: 63003

SEQ ID NO: 302336 - DNA, 201 bp, Homo sapiens
atggtggcacatgcctataatcccagctactcaggaagcagaggcacgagaatcacttgagtccaggagatcaaggctgcagtgagccaagatcgcaccaytgtactccagcctgggcaacacagtgagaacctgtctcaaaaaataaaaataaaaaaccctgtacattgtcctggtactggtacatagtattattaaacc

SEQ ID NO: 302337 - DNA, 201 bp, Homo sapiens
cagctctcagaagactgaggcaggaggactgcttgagcctgggagttcaagactgcagttggccatgatcatgcccctgcactccagcctgagcaaccctwtcttttaaaaaaaaaatcctgataataagtgtaaaataatgatgataaaccactgttagttatcaattttagggtagatcatatagaatggttggtctag

SEQ ID NO: 302338 - DNA, 201 bp, Homo sapiens
gtggcacttgttgtctggcttcagcatttcttctgtgctgcttggtattttactacatgtgaaggtcttgcaccatcgactacagtggaaaactccttacrgtcagggatcttgttttgtactgactttccatttccaagtgatggtcctggaactcctttcccctttatgtcacactcagccagcaaacaccctccatcc

SEQ ID NO: 302339 - DNA, 201 bp, Homo sapiens
ctccatctttccctacatttctagtctgtcatcatcaagccccatagatttcagcacttcagcatgccggagtctctctgcttctttcgtttctgctgcckcctccgccctctgctgagctgctctcctctgtctggtgcaattctacagcagccgcttcccggtgctcctgggcctgctgttcatccctttcatgccacg

SEQ ID NO: 302340 - DNA, 201 bp, Homo sapiens
tgagaagcccattccgcatgggctgcgaagcagagtgggtgctgagctggctctctgctccgcctggagccattttcatattttctgcgtgtgaaacccartgcctcccatgcgcatgtttttattattgccttgtgtttcagggctctacagtggctagagaagctagtgacaaagaaaaggtaagtaccttgctgtatg

SEQ ID NO: 302341 - DNA, 201 bp, Homo sapiens
agactcattgtataaatatcagccctgttgggttttaggagctttttaaaccatctatttaaatcttcaatcaaggcaaaaacctgcatactctaccttakggaagtcagacatgaaggtgtctcatgttacatgatctggtttaaagcaaacgcatgccagtttagcagccctctcatttaggcaccaaacacaagaaag

SEQ ID NO: 302342 - DNA, 201 bp, Homo sapiens
aagtcagacatgaaggtgtctcatgttacatgatctggtttaaagcaaacgcatgccagtttagcagccctctcatttaggcaccaaacacaagaaagcayctgctgtcatccgctgggaatccccggtcccaggcccctgtattctgtattgggatggcccatgaagactgacctgcccacaccagccagtttgggaggg

SEQ ID NO: 302343 - DNA, 201 bp, Homo sapiens
gagctcagagagtgggtaggagctagagctacaaatctgggagctgtcacttccagatgagatttaaagtccggtggtgaaccaggtaggcttgagaggcygtggcctgaggtggctcgagccagaccacttggacatgtagaagcaggctagagcaggaacagccagccagtaaaaggtaggggaaaaaaaaaaacccag

SEQ ID NO: 302344 - DNA, 201 bp, Homo sapiens
tatcaatcacagtattagatgttggggcagatataaagcaaaataaaatatggccctagagccaaagtgtacattaaatgctgaacactgctcttggcccygttgggaactggaagaggcttcctcaagctcagggagtttagaatctaactggcgaatcatttaggactctattttgaaagtcagttttgaaagtgacat

SEQ ID NO: 302345 - DNA, 201 bp, Homo sapiens
tgctcaggtgatccgcccaccttggcctcccaaagtgttgggattacaggcatgagccactgcacccagccaaatcaaagccttttgtctgtagtccttayggtgcttgaatccttttgtggccataaagacgtgttatgagtatattcagtggtatgtgcctaggaaaagaaaaagaaaatgactgaagactgggtaaag

SEQ ID NO: 302346 - DNA, 201 bp, Homo sapiens
gttattacaggcaccatgcccagctaatttttgtatttttagtagagacggggttttgccatattggctaggccggtctcaaactcctgctcaggtgatcygcccaccttggcctcccaaagtgttgggattacaggcatgagccactgcacccagccaaatcaaagccttttgtctgtagtccttatggtgcttgaatcc

SEQ ID NO: 302347 - DNA, 201 bp, Homo sapiens
ttcatctcatgttattgttattacaggcaccatgcccagctaatttttgtatttttagtagagacggggttttgccatattggctaggccggtctcaaacycctgctcaggtgatccgcccaccttggcctcccaaagtgttgggattacaggcatgagccactgcacccagccaaatcaaagccttttgtctgtagtcct

SEQ ID NO: 302348 - DNA, 201 bp, Homo sapiens
caaaaattgatccctgttcactaggagaataatttccgtttaagatacttattttgaaaattacttagatgggatccagaaaaagtaaagggaaaaagaakaaagagtaaaaatgagtagttctgttgtactcttcctgctctttccttttggttacgtatttagtttgaataggaatgctttaagacatacttaaataat

SEQ ID NO: 302349 - DNA, 201 bp, Homo sapiens
ttcactgcatccatgccaatacttgatattgtctgtccttcttcttatagccatcctagtaggtatgaaagagtagtatctcattgtggttttgattcacrtgttccaaaggactgatgatattgaggaggtatccatatacttattggccatttttgtatcttctggagaaatagctattcagatattttgcccattttt

SEQ ID NO: 302350 - DNA, 201 bp, Homo sapiens
tagaaacttaatatggagacagaagagattgttcaaagaaaggggagagtgtggcagagaagagtggagttaatttactatgatatacttaattttatatrgggtattttaatcaaaacccaatgctttctatatttattttcattataaattttattcattcattcttagcaagtacactcaaccaggatgatcaaacct

SEQ ID NO: 302351 - DNA, 201 bp, Homo sapiens
atcccctcttcctctagggtcattcagcactctgtcatcactaaattcagttttttggcagttgcagcaagcctattgtcttgcattattaatataaaatkaagtataatatagctattatgaaacaaataaatgctatggaagcactgaggtggaaggatgaatttgaattaggaggatcaggaaagcatcagggaagag

SEQ ID NO: 302352 - DNA, 201 bp, Homo sapiens
actagggaaaaaatagacacacagactagatccctactgtcctgtcttacattctaggaggcggagagaaaatgttaaaaatgaacaaagtaagttgtcargtcaggtgctaccaagtgctagggaaggagattagagtggtgggtgccatctggatagggtggtgaggggagccccatctgctaaggtggcatttgagag

SEQ ID NO: 302353 - DNA, 201 bp, Homo sapiens
aaaatgttcatataacttctggctttactaaaccttagaatatccaatattgctcaactccatatgaatgacagcagttatgcatcaaattacagaacctsatgaaataagcacatatgtacacatacacgtgagttaattcccacttcaaacaaacaaagcatttaactcttttggtaaacacattgttttggttttggt

SEQ ID NO: 302354 - DNA, 201 bp, Homo sapiens
taactcttaagacgggagaaaacaatgagcattgcagaaaaaagtcagcaggtgaggatgtgcccacagaaggacgtaatgtggggaaagaggcacttaaygctcctgtggtcccactgcagccagctagtgggactctttaagataacaggactgactatttctggcagttgatacaaggagtaaagtgtggggctgatc

SEQ ID NO: 302355 - DNA, 201 bp, Homo sapiens
tgccatctaactgagtactcaggcttctttccatttagataagacactcagaaaggaaaagcaatgcaattttaatttttacttaacatacaaagtagccttttttttttttttaagctgaaggaaatgaactccagagaacactgaagaaaattgaaggaaaaaagtagagctcttagaaagaaaggaaaggtcacgctt

SEQ ID NO: 302356 - DNA, 201 bp, Homo sapiens
tgggaacatagccagtgtggttttaaaatattatgtccctctgaggagggattacagatgattttttgctttctacttacacctttttataggtttcttasaaaaatattgcgcatgcagtcttcttacaattagggaaaaaacccaagacatgctctaaggtgagatgagtggggggaagaaatctgtatacagtcagcc

SEQ ID NO: 302357 - DNA, 201 bp, Homo sapiens
cagagtttaaggtctgttccacttggtctgctccacctggctttcataaacttgattgttcccactttgattttatgcccaaagataatctgcaatcttasagttcctagagttcttgttttatttgaaagaaatacccttttgcaaattagtgattgcaagaaaaaagtaagaccactaacaaagagcaataattgcttt

SEQ ID NO: 302358 - DNA, 201 bp, Homo sapiens
tgattaactatgagaaacatatttttaagaaggcttatttttgggaagttagagttgtgttgtttgaggtgtgctcctgaaagctgtttactcaaaccttyatgggtcaagttttgtgctgggagcagggtttcccttgtagtgaggagcttacacctggaaacatagcaaatgacgcaatgggagagccacctcactgtg

SEQ ID NO: 302359 - DNA, 201 bp, Homo sapiens
aaaaatgtaattaagaattaaactcttgttaatgtaggcattttcatcctgaaagtcatttttatcattctcagtctatctaataaattttagttgtcttmagaataactgaacactgccaagtcttgctatttaaagtcattggggattatgtagatttttttttttccttctctcaagttttctaataagctaaggaaa

SEQ ID NO: 302360 - DNA, 201 bp, Homo sapiens
atcaaggtgtgctattgcagaacgtgtgatccaccacaggggatgccagggtggtgaggtgagaatcctggaagatgaagatttgctcatgggccactttyctcttcaggcataggtagggcctgcgtaaacccctgcactgctgcaattgattctacctcaggtggttcagtcctgttgatttcatctagaaaggaagga

SEQ ID NO: 302361 - DNA, 201 bp, Homo sapiens
tcacttaacataatgtcctccaggtcacttcgtgttgtggcaaatggcagggtctcaggaagggtttctctttcatctgaggtcgacatttccttcatcctttttttttttttttaatctgacttattcttgcctacttgaattgcagattagtatagtgtcacatagcatgccgcatcatgagcatatcagaatatcaca

SEQ ID NO: 302362 - DNA, 201 bp, Homo sapiens
cttctgccacccccaccacggagcaccaaccatgtggtttgttctttgtgtactttgttagctaaactctcaagtgtcaagttgatggcactttttttttmggttcatggacactgttactgtccaataatttgtaagtcagcaatgctttgttttatcagtaaaataaaacactatattaggaatagcatgatcagaaca

SEQ ID NO: 302363 - DNA, 201 bp, Homo sapiens
cccactttaatcttttggatgaaagcaacacattcaaagccaaaggacttagagtgaaatcttaaggtgtttgctaccataattctaatttggtattcataaaaaattatgtaatatttcaagacttaacgtgctctgtttgaatacacacatcaaaactctgtggttgctttcttttttccacttgagaaactaaattaa

SEQ ID NO: 302364 - DNA, 201 bp, Homo sapiens
tgcttctttcgtttctgctgcctcctccgccctctgctgagctgctctcctctgtctggtgcaattctacagcagccgcttcccggtgctcctgggcctgytgttcatccctttcatgccacgcaccttgtctatttctgcactgttttcccattaacagtgtcccctcctctctaggactcgccttcttcctggaagccc

SEQ ID NO: 302365 - DNA, 201 bp, Homo sapiens
ctcccagagcatgagccagtgcacctggccttggggcttaatttttaagagagaacttagatcacaattatggacttgaaatttactgctgtaaaaataaytaactttaacagaaaattattagaatagtaaaaagcatttctctgaagttaaaattaataattctgtatcactttagaaccattactaaatttaaagagg

SEQ ID NO: 302366 - DNA, 201 bp, Homo sapiens
ggacaatttgtatcatagtctttgggtgtcctcaccattgtggcggggggagttttagttaattccttgcccctgtggtgtctctagatatactgtgctartatatttctccattttctggtgagtgcctgtgagttttttcaaccattcaagcagtcatcgggctaaaagtttcttttatattactttactcagcaaata

SEQ ID NO: 302367 - DNA, 201 bp, Homo sapiens
gcccaaaagaatgtgcatctaattccagatttttggattcatcagttgcctcctctttctcctcaccctggggcgacacacaccagacgttgcagaactgygtgggggctgcattgctgcattaccccatgtagatgtgtgcatatctctgtaagcccaggcttggagttctcttactttcccctagcttggctacattat

SEQ ID NO: 302368 - DNA, 201 bp, Homo sapiens
cttacctagagatgcattttgcatcatgctgatggtttttgggttgtgctaggagttgactgcacctttatttcttcctcactggaagacgacaataagcrgtctgaccacaggcctgaggcccaggaaaattactctgggctgcccggtgtggcgaggaacccagatggggtgccaggggaggctgggccctggaggctc

SEQ ID NO: 302369 - DNA, 201 bp, Homo sapiens
agtgactggcataaagtagatgtacaataagtatttgctgaatgtgtaactggatggctggaattaactttgagtaggagaaacagctggtctggtcttcyttttttttttttttttttttttgctcccaagtgtcttgtctcttgtctcttctctgatcaccacagcatggttcttaggagtcacagtgtctggtatata

SEQ ID NO: 302370 - DNA, 201 bp, Homo sapiens
gatcaaacctgcttcaacatgtaagttattatccaaaatgcagccttcctggagccccattggggatcattagtgcaaattccactgtgttctttggtccygggggactgttcaggaggaaggtgatgccagaattagccgatcgaattgcggcactcagtatctccaaagagcagattttccagagatagtattcactta

SEQ ID NO: 302371 - DNA, 201 bp, Homo sapiens
tgtaagttattatccaaaatgcagccttcctggagccccattggggatcattagtgcaaattccactgtgttctttggtcctgggggactgttcaggaggmaggtgatgccagaattagccgatcgaattgcggcactcagtatctccaaagagcagattttccagagatagtattcacttatacatccattacagaactg

SEQ ID NO: 302372 - DNA, 201 bp, Homo sapiens
catgcaagatgctggctttcttgaggatggcaaatctatgaatagagtctggataggctaagttatgcagcatgtgttgttatgtttgggcaggtttccayagtccaaggcacatcagctgagcagtagcaggtctagcttctggtcttgatgctaaaagtaatttcttgtgttattttagtaataagtcacttatttggc

SEQ ID NO: 302373 - DNA, 201 bp, Homo sapiens
tgtttcagtgagagaaaacacccatggatcagccaggttgacagcctagtcagcttgcatcctggtttgtttttttttgttttgttttgttttgttttgttttttgttttgttttgtcttgaagagtttttgctgaaggaagcattagagttctacttaatatgcatacaatagaaagtagtaattaaggaaaaggatata

SEQ ID NO: 302374 - DNA, 201 bp, Homo sapiens
agacagtttttcccaaagttgattttggctgttgttttttttttgggatgggttatggtatcagtatttttatttagaacaggtgactttaactaatttcrtaatttataatatgaaactatcaaatgtatagaaagaagaaaaggaatagccaatgaagaaagtgtatttttgcagtttgtgcatgttgattattagatt

SEQ ID NO: 302375 - DNA, 201 bp, Homo sapiens
gctggccctaattcatttttaataactaaccagacacactagtggtgttatacgtgagcattaatatttttttgtcatcgtcacccatttaaaaaaattgmgttttcaaaatgagttgcttcaacctagtgtggagaatcaaaattttaaaagatcaaaattttggtattttaaaagtcaattctgaccaattatagtgat

SEQ ID NO: 302376 - DNA, 201 bp, Homo sapiens
acaatgtgtcatgtatcccagcaggtttgtacaaagccacagccagtggctttccttatcttttttttttttttttttttttttttttttttttttttttwttacatattagcttttggttaaacaaatgcaggtctattttcagtatttctttcacattcttgatgagcagggaaaggcaatgtattagagtttatgtaa

SEQ ID NO: 302377 - DNA, 201 bp, Homo sapiens
cattccactccctgaaatagcaaacaagagcaggaggaggagtttgaaatgtcagttatcggggaacctgccccgatattcacataggttcttttctgttkttcctaagcatcagccggcttgagaaataaagggacagagtacaaaagagagaaattttaaagctgggcgtccaggggagacatcacacgttggtaggat

SEQ ID NO: 302378 - DNA, 201 bp, Homo sapiens
tagatgtggttatctggggtacccagggacacctgtattacataccaaactcctccccatcttctccatggctagccagatttaggtatgagatttagggyttctggccagcttggtatcatctagcaccttctggaagctttgccttcacagcttacttggggaactctagttttagaacatccttatcccaggatgaat

SEQ ID NO: 302379 - DNA, 201 bp, Homo sapiens
taaacctaaactaactcaagtcaacacatgcttatataaagggtacatctatactcttagttatgccttcttgtcaccttgggaagtgcctttttcttaastattccatttgaaaacagagctcaaaattgttgtttgaaagttgttcttttagactgatagcagttttgagttgaattttatagatttgcaaatctactt

SEQ ID NO: 302380 - DNA, 201 bp, Homo sapiens
gtaacaggctaaaggagagagtttttcaggaagttaaatgtcttttcagttattaagcagctctgcaagtaatccatttcagtaaaactgacgaatgatcrctaagcctcatatacaacacaataaaatgtgttgtagaaaaaataatatagaggctcatgggtacactattgaaaaaatagtttactaattaaaagcttc

SEQ ID NO: 302381 - DNA, 201 bp, Homo sapiens
tctctttgcatttggccttctttagtttaactacagcgtatctaggtatgctttgagtattcttacttatatattgctttgagtattctgcttttttttgtttttttttttgttgttgtttgttttttgtttaacagacatggttccactctgtcacccaggctggagtgcagtggtacaatcacagctcactgcagcctt

SEQ ID NO: 302382 - DNA, 201 bp, Homo sapiens
aatttcctctaagcaaatttagaatgtggcatttatataaaacaggccttttaggggggtgagggagtggccctcctttcctcagcagtagctgagagggraccttgctccgctgcctcttcctaactcactctcccgccattgtgcttttccctcactgctccccctgcctggcccgttccttccccacctcttgttctt

SEQ ID NO: 302383 - DNA, 201 bp, Homo sapiens
tgtaaattaaaacaacagttacacattgctgatgagaatgtaatttaatagtctttctgaacaatagttcgtgtatgtgtgtatgtgtgtgtatatatatrtgtgtgtgtgtgtgtgtgtgtgtgtatatatatatgtatatatatatgtatatatatatgtatatatatgtatatatatatatgtatatatatatatgtg

SEQ ID NO: 302384 - DNA, 201 bp, Homo sapiens
tagtctttctgaacaatagttcgtgtatgtgtgtatgtgtgtgtatatatatatgtgtgtgtgtgtgtgtgtgtgtgtatatatatatgtatatatatatrtatatatatatgtatatatatgtatatatatatatgtatatatatatatgtgtatatatatgtatatatatatgtatatatatatatgtatatatatatg

SEQ ID NO: 302385 - DNA, 201 bp, Homo sapiens
gtctttctgaacaatagttcgtgtatgtgtgtatgtgtgtgtatatatatatgtgtgtgtgtgtgtgtgtgtgtgtatatatatatgtatatatatatgtrtatatatatgtatatatatgtatatatatatatgtatatatatatatgtgtatatatatgtatatatatatgtatatatatatatgtatatatatatgta

SEQ ID NO: 302386 - DNA, 201 bp, Homo sapiens
tgtatatatatgtatatatatatgtatatatatatatgtatatatatatgtatatatatatatgtatatatatatacgtatatatatatatgtatatatayatatgtatatatatatatatgtatatatatggagagagagagagagccttaagtgggcatacccctgaccctagtaattcttcctctaggaatttattat

SEQ ID NO: 302387 - DNA, 201 bp, Homo sapiens
tggatcacctagattcttgcatcttctttcctgcctgcctttcaggaaaaaaaaaattcaggattcagtaagcgtttatttattttttatttttttgagayggagtctcactctgtcgcccaggctggagtgcagtggcgtgatctcagctcactgcagtctctgcctcccgggttcaagcagttctcctgcctcagcctc

SEQ ID NO: 302388 - DNA, 201 bp, Homo sapiens
aattacagtggccagattcctggcagttaacctttaggcatgcttgtgctataaaggtcattcattatttgtataacacttttaacctaaatactcttgtrtaatagtttcagttatcactactctgattttaaaatcattcagcttaagatttggcaactttgcagaagtttttgcctgtgccagagattaggtgttgac

SEQ ID NO: 302389 - DNA, 201 bp, Homo sapiens
ctggagtgcagtggcgtgatctcagctcactgcagtctctgcctcccgggttcaagcagttctcctgcctcagcctcccaagtagctgggattacaggcaygcgcttccacacccggctaattttttatattttagtagaaatggggtttgaccatgttgcccaggctggtctcgaattcctgagctcaggcaatccgccc

SEQ ID NO: 302390 - DNA, 201 bp, Homo sapiens
ccaaggcccagcccgcgctgtgagaggcctccttcaccatggagtataagagcatgaagtccagcgttggacaatcctgggctcaaatcccagccaggtcrcttactaagcatgtgacttctggtcttggttgttttttagagacagggtcttgctctgttgccaggttgaagtgcagtggcgtgatcacagctcactgca

SEQ ID NO: 302391 - DNA, 201 bp, Homo sapiens
ctcagcctcccgagtagctgggattacaggcgcctgccaccatgccctgcccccattagcatcttgggggaatcaaaccaagaatctaccaacccttaagrggcaagttcctatcgatctgctctacggagcattaatgtctcaatgaccccagaccttgctaccgtcctcctctcaactcctgtggcacatttaatgaaa

SEQ ID NO: 302392 - DNA, 201 bp, Homo sapiens
ctatttcttacagttctagaggttgaagtctgagatcaaggtgccagtatggtcaggttcttcctggtttgcagacagccagcttctcactgtagcctcaygtgtgttggcagggtcatggtgggtgggataggatcaaaagcactcttctgtcacttctaataagggcactgatcacataatgagggctctaagctcatg

SEQ ID NO: 302393 - DNA, 201 bp, Homo sapiens
ttactcctaagtgtttcatctcatgttattgttattacaggcaccatgcccagctaatttttgtatttttagtagagacggggttttgccatattggctasgccggtctcaaactcctgctcaggtgatccgcccaccttggcctcccaaagtgttgggattacaggcatgagccactgcacccagccaaatcaaagcctt

SEQ ID NO: 302394 - DNA, 201 bp, Homo sapiens
tttgccatattggctaggccggtctcaaactcctgctcaggtgatccgcccaccttggcctcccaaagtgttgggattacaggcatgagccactgcacccmgccaaatcaaagccttttgtctgtagtccttatggtgcttgaatccttttgtggccataaagacgtgttatgagtatattcagtggtatgtgcctaggaa

SEQ ID NO: 302395 - DNA, 201 bp, Homo sapiens
aaaaattcatcaggtgtactctctccacccagaagagactagtagtttaggcttaccaggtctttcttcccacttctttctctgcattgttatttattcayatttctttctataatggtttattgccaaaggcagtcaatagtatgttgaattagctatttctataatattttagactgatatatgtgtgtgtatatataa

SEQ ID NO: 302396 - DNA, 201 bp, Homo sapiens
cagtttccttcttccaagtcgggaaatgtcagagaaacactgtgttgttcaaggatgacagccaggaactagtcaggcttcagcacctcctgccattgacsctcttctctgagcattatgtagagtggatgtgagggctcattcatggactgtgtcaggagaattgtactacattgatcatttaagggaaccattctgctt

SEQ ID NO: 302397 - DNA, 201 bp, Homo sapiens
gacttaggatcactgtgaaaaactgtgacttaagatcacagtgaaaaacggcaaatgcaaatactgttaaagccttgactcggtggtatgagcagaactcrtaagagttgagtcagagagcagtccaggtgtcttcagctcagatagctgcccttgctagagaggctgctggttgaacagtaatttatcagcttgatccaa

SEQ ID NO: 302398 - DNA, 201 bp, Homo sapiens
tattactgtgccaccgtgaggagatggctgtcacgtgagttctgcacggtattggcatgttcccttatacgagggtggctttacacatttgagcatggcaragtttaagtggcccctctttcaaccaaaaatgaaaacttttcatacatgatttttagcagaatgtatacaaacgaccatcaaaatggaaaaaaaaaacaa

SEQ ID NO: 302399 - DNA, 201 bp, Homo sapiens
cagcttcttacctagagatgcattttgcatcatgctgatggtttttgggttgtgctaggagttgactgcacctttatttcttcctcactggaagacgacartaagcggtctgaccacaggcctgaggcccaggaaaattactctgggctgcccggtgtggcgaggaacccagatggggtgccaggggaggctgggccctgg

SEQ ID NO: 302400 - DNA, 201 bp, Homo sapiens
aatgctggtttttaattaaaacgacccaatcagtaatgtctttgagattgcctaaatttacattttgctctcaagtatttttaagtcataaaacagcaagscagtggggaaaataaactgaaagatggtttgccacaggcctgaaactgtgagtggggaagttggcatactaaattgtaatacagacagatgtgaggtaat

SEQ ID NO: 302401 - DNA, 201 bp, Homo sapiens
aatatttccgggaagttaggaggcctggttgagtcttggatcttcagtgactgatgctgtgaccatgagatactcactcacccctggtgggtctcagtttmctcatccataacatgaggagagggacacagtgctctctccggccccccagctgtcaggtctctaaatctattactgtgccaccgtgaggagatggctgtc

SEQ ID NO: 302402 - DNA, 201 bp, Homo sapiens
gatctcaaggaagattgtagctcaaagatttgtcacagcaaggactcaattagtaaggaattagatgagaagggatattctgagggaaaaagaggcagatstgaggtccagcaggtggtttctgagaagctggaaaggaagaaaagcaggggacctaaataaagactgaaaaatcttcacactttgaaatcttatgttctt

SEQ ID NO: 302403 - DNA, 201 bp, Homo sapiens
agaagtcaggagtttgagaccagcctgggcaacaaagcaagacctcgtttctactaaaaaaaaatttttttaactaattagttggtgtatgcctgtggtcycagtactcaggaggctgaggtggaacttaagcccaggagttcaaggctgcattgagctttgattgcaacactgcactccagcttgggcaacagagtaaaa

SEQ ID NO: 302404 - DNA, 201 bp, Homo sapiens
cactgtcattcctttatcactagtagttgcctgttgggtttgctccatttgtcctcacagtttagctgccctggaaggaaactccaccctgctcagagacrcactgaggctgagacccaagggaggcccctctctgattggacagcctcttgatagactgggggaagctccctcacagcccatcagggtcagcaggcattt

SEQ ID NO: 302405 - DNA, 201 bp, Homo sapiens
tagttgctgtttttctgtaacagcagccctgttctattcctatgccatgctgggtattttcatccacatagctttgcacgtaacacaggtgagtctttttytgcacacaaacacacacacagatcggtgtatgaggagtgacaagcacttttgccttctgccctgtgttttgtcaattctgatcacggccctgaagaatca

SEQ ID NO: 302406 - DNA, 201 bp, Homo sapiens
tcccagtattttgccaccacaaataatgttgctgtcagcatctccctgtatgaaactctttcttatttaggatgatttccttagaagagattctctttttkgggaatttacttggtcaaagggtatgaatattttaaggctcttggtacatgttgccaagttgctttcaaaaagggttataccagattataaccctagcag

SEQ ID NO: 302407 - DNA, 201 bp, Homo sapiens
tattttagtaataagtcacttatttggcttcagtttattaatctttttgtcatctttaggtcctttaagctcttaaactatggaatctgtatcttagatcrttatggatgggatcaacagatgaggatataacggtttgaaaagagccatactgacaaaggtgcttagttccagagagaccaacctaggtgtcaaatcatg

SEQ ID NO: 302408 - DNA, 201 bp, Homo sapiens
ccaagtccacaggcttttactacattaggccttggagtacatttcctgtagaatcaaagggccaacttacaaatgaatgtttggaacacaacccattcatraattaggttctgcctgcacccagatggaaagttaaatgctttggcatcagaagaactgttgggaaacagatattgtttctgaaattatgataaatccata

SEQ ID NO: 302409 - DNA, 201 bp, Homo sapiens
aaatcatggggccattttcactcttctgtgggttttaaaatatacacttccattccagacctaaagcttgtttgacgtttgctcttccttgctaccctacrtagacatacattgcctccatctttaaaatgctctgtagtacttgtttattgctattaatgtataattggcctaaaacaacaagtgtttatttgctgggga

SEQ ID NO: 302410 - DNA, 201 bp, Homo sapiens
gtgtgcaccaccatgcccagctaattttttttttttttttggtagagattggggtctcactatgttacccaggctggtctcaaactcctggcctcaagccrtcctcccagagcatgagccagtgcacctggccttggggcttaatttttaagagagaacttagatcacaattatggacttgaaatttactgctgtaaaaat

SEQ ID NO: 302411 - DNA, 201 bp, Homo sapiens
accttccagaagaacaaacccagggctcagtgcttgtcaggcttgtgcttatggtcttgtttgctgattgcccactggccaaagccaccctcgcggccagyaccagagtcactgtgggaaggggctgcataaggatgtgaacacctaggagtgtgattcatcggggaccgttaatatgcagtcgtccacatatttacacgc

SEQ ID NO: 302412 - DNA, 201 bp, Homo sapiens
gctagcagagctgcctgttaatttctgctgtcagacatgtcagtagcctgtgtgagtgtgcatgttttgtatcttcgtagaggctacttaggactctcagraatctttatcttgctgatttgctgcttttcaagttggtcagactcttgctgcagcatttttgtcaaagggcaccctttgtgcactgcagtgctggactgt

SEQ ID NO: 302413 - DNA, 201 bp, Homo sapiens
ctcatttccaggtggaaattaacaggctagcagagctgcctgttaatttctgctgtcagacatgtcagtagcctgtgtgagtgtgcatgttttgtatcttygtagaggctacttaggactctcaggaatctttatcttgctgatttgctgcttttcaagttggtcagactcttgctgcagcatttttgtcaaagggcaccc

SEQ ID NO: 302414 - DNA, 201 bp, Homo sapiens
ggaattgatgatcaagatttccaggtgagttgcgtttgtaacatttgcttccagtaggaaatgggttttgccatgacttttgctgtgtcaattgggatctrtatttttgtcaataaaagtattatataatagtaattttcattttgtgtaagaagtttttaatgttcatgctgaagtaaagtgttctcttgattggggacc

SEQ ID NO: 302415 - DNA, 201 bp, Homo sapiens
atagctcactgcagcctcaaactgctgggctcaagtgatcctccgacctcagcgtccagagtagctaggactacaggtgtgcaccaccatgcccagctaattttttttttttttttggtagagattggggtctcactatgttacccaggctggtctcaaactcctggcctcaagccgtcctcccagagcatgagccagtgc

SEQ ID NO: 302416 - DNA, 201 bp, Homo sapiens
aatagtaaaaagcatttctctgaagttaaaattaataattctgtatcactttagaaccattactaaatttaaagaggccacctgaaaatgaactaggtgcttttttttttttttaaaggaattaacagcagatagcttcagtgtcttaagaaaatctcctctgccttaagaaaagctgaacaccagtgtgttcctccttct

SEQ ID NO: 302417 - DNA, 201 bp, Homo sapiens
acttttccttgttgttaaagacaaattcaaagaacaattctagaatatccattgttaataacagtaccacagtaccatgtaacatacatatgtaaacctckgtgtgtgtgtgtgtgtgtgtgtgtgcgtgcgcgcgtgtgtgctcgcgcatgtgtgtaaccagtgcttctagattcagaactttttccaattcattagggc

SEQ ID NO: 302418 - DNA, 201 bp, Homo sapiens
atactccagtctgggtgacaaagggatacccagtctcagaaaaaagaaaactgaggctaaaaaacggtaagtgatatgactgtaaaaccttcacacctgcwtgtaaatacctctgatagatcatcagagctgggtcacctgggaagtccctaagggagtggcccacaaggcaggccacttgggattctggaatagcctaga

SEQ ID NO: 302419 - DNA, 201 bp, Homo sapiens
cagccctgtgggttttgctcaggggaatggcaatgtcatgacatctgtattttcttttcttttcttttttctttttctttctttcttttcttttcttttctttttttttttttatagacagagtttcactctgttgcccaggctggagtacagtggcacaatcttggctcactgcagcctcccaactcctgggctcaatcg

SEQ ID NO: 302420 - DNA, 201 bp, Homo sapiens
ttgcactccagcctgggcaacagagcgaggctttgtctcaaaaaaaaaaaaaaagaaaaaagaaaaagaaaatgaatattgatgaagcagctgtagaaaaytgacctcttgcctcaagacaaataaaagtacatttcccagacattttcagctgcccgttttttcctgcctctgtaactgattctaatttgccctgcctgt

SEQ ID NO: 302421 - DNA, 201 bp, Homo sapiens
gtcattctgacgggaaagcaggttccatgatcacagcagtgccatgtgtgctgctgctggccacctaaccctccggagacccacagcgcagagtcatgtgwggagggcctccgatgccagctgattttaactcgttaccttcctcctagggttgcgaagaaaaggagaggggaaagctgctttaaggcagcctccagaggt

SEQ ID NO: 302422 - DNA, 201 bp, Homo sapiens
agttttgctatgttgcccaggctggtcttgaactcttgggctcaagcagttctcccatcttggcctcccaaagtgctaaggttacaggtgtgagcctccayaccctgcctggattttgaagccacagtttctttgtttatacagtcgggataataataacacctaatatggattctaaagattaaataggaaattgcatgt

SEQ ID NO: 302423 - DNA, 201 bp, Homo sapiens
gcgaggaatcctcgtttgacccttcccacttgtatgacctcaaggggacacttttggagctcctgttttttcacctcatacagaaatcctactgccttgckgatggggttttgccagagatacaagagttgtctggacaaatgctttgtaaatgtctgttcccatattatacatcctgtgaaattggagtgtatcctagcc

SEQ ID NO: 302424 - DNA, 201 bp, Homo sapiens
caaaatatatcatccagtcctaagtgtctcttcaactgttctaatctttttttttttaatttcaacaattatcttttttattctagaagttttccagaagrtttttcaaaatctgaccgttcattcctgatagtttcttgatttatgctcatctctgaaattgcatcctttgtttctttacacgttttgtacgtaactatt

SEQ ID NO: 302425 - DNA, 201 bp, Homo sapiens
ggaacatgcccctagaggctcctatgttgggccaaaatgacaggctgccctcggaaggcagacctagaaggagctgcccctgcaggccttctgcagaccgyacacgctcagctgggcagcatgaccttccctggagggaatctgggcgtcccatctctgtggctacacttgctttccttagtgtctgagagtcttactgaa

SEQ ID NO: 302426 - DNA, 201 bp, Homo sapiens
cctgacaggctctgtctagcacctccaacaccttggcttggatcccagctcctcacatgctccctgggcacacctgctctccggtgcacctgcccaaatgwtcagctcccccccagccccaggcataggctactcaggccccagctccccattgtgtgtggggtacaggggccattctggaaccttcctgcctttatacca

SEQ ID NO: 302427 - DNA, 201 bp, Homo sapiens
atcaccaattcaggggagaatgttcaagttaggggttggaaaactatgacttgcctgaattccaaatcctacttgagggacttttttttcttttcttttcttttttttttgagaaagagtcttcctctgttgctcagtctggagcgcagtggcgcaatcttggctcatggcaacctctgccccactggctcaagcagtcct

SEQ ID NO: 302428 - DNA, 201 bp, Homo sapiens
tcgggagactgaggcaggagaatcgcttggcttgaacctaggaggcagaggttgcagtgagccaagaccatgccgctgcactccagcctgggtgacagagyaagagtctgtctcaaaaaaaaaaaaaatttgtgtgcagtttgtcagttatttcatgactattagtggttattcaacacaaattaagcactgtatcagtta

SEQ ID NO: 302429 - DNA, 201 bp, Homo sapiens
gtaggcttgagaggccgtggcctgaggtggctcgagccagaccacttggacatgtagaagcaggctagagcaggaacagccagccagtaaaaggtaggggaaaaaaaaaaacccagtagatttccaaaaagaagaaactctccatctagtttaggaagtaatctttttgtttggaaatagaccatttctagaaagtataga

SEQ ID NO: 302430 - DNA, 201 bp, Homo sapiens
taggcttgagaggccgtggcctgaggtggctcgagccagaccacttggacatgtagaagcaggctagagcaggaacagccagccagtaaaaggtaggggaaaaaaaaaaacccagtagatttccaaaaagaagaaactctccatctagtttaggaagtaatctttttgtttggaaatagaccatttctagaaagtatagaa

SEQ ID NO: 302431 - DNA, 201 bp, Homo sapiens
aggccgtggcctgaggtggctcgagccagaccacttggacatgtagaagcaggctagagcaggaacagccagccagtaaaaggtaggggaaaaaaaaaaacccagtagatttccaaaaagaagaaactctccatctagtttaggaagtaatctttttgtttggaaatagaccatttctagaaagtatagaagttggttcat

SEQ ID NO: 302432 - DNA, 201 bp, Homo sapiens
ctaagtgagagtatatattgaagcgagaagtccagcttgttcacaatatcacagtaaaattgagctcaaataggttctcttgtgtatagagtgctctgtatttcatggtggactacatagggcagatattccttcttccattttatagttatgaaaactgaggcagcctgggcaacatggcaaaaccccatctctacaaaa

SEQ ID NO: 302433 - DNA, 201 bp, Homo sapiens
ctgcctcctcctctggtcccacaagcctttcacaaaatagttaacatatttgctttaagacagagcttgaaaacacacgcacacgcgcgtgcacacacacwcacacacacacacagtatttagagactagatactgaattgtctgatgagacttagaatttgattctcctaccctgtatcttgctaccaaaaatggcacat

SEQ ID NO: 302434 - DNA, 201 bp, Homo sapiens
ctcctctggtcccacaagcctttcacaaaatagttaacatatttgctttaagacagagcttgaaaacacacgcacacgcgcgtgcacacacacacacacayacacacagtatttagagactagatactgaattgtctgatgagacttagaatttgattctcctaccctgtatcttgctaccaaaaatggcacatgggcaca

SEQ ID NO: 302435 - DNA, 201 bp, Homo sapiens
tttgaaaaaactttgtagtagaagtaaacaattctgtttgtttcagtgagagaaaacacccatggatcagccaggttgacagcctagtcagcttgcatcctggtttgtttttttttgttttgttttgttttgttttgttttttgttttgttttgtcttgaagagtttttgctgaaggaagcattagagttctacttaatat

SEQ ID NO: 302436 - DNA, 201 bp, Homo sapiens
ttgaaaaaactttgtagtagaagtaaacaattctgtttgtttcagtgagagaaaacacccatggatcagccaggttgacagcctagtcagcttgcatcctggtttgtttttttttgttttgttttgttttgttttgttttttgttttgttttgtcttgaagagtttttgctgaaggaagcattagagttctacttaatatg

SEQ ID NO: 302437 - DNA, 201 bp, Homo sapiens
aagccaaagcatggtggcacttctgcagccttccagggatggatctgtgaggggagtcagtgggacaggaggtgggactgcaagaaggaagaatgccattkctgtcttccagaggtgatgggaacctgagcttgggcaggggtaacagacattgttggataaccaggtatagatgtggtagaagctgtgttgtctaagtgg

SEQ ID NO: 302438 - DNA, 201 bp, Homo sapiens
attttcagtgcagagctgacctgaataaccctgtcagcagaaatgcaaatcaacctcaaagtttcaaaagagggaatccaacagtaagtgagacagtgagragccaaagcatggtggcacttctgcagccttccagggatggatctgtgaggggagtcagtgggacaggaggtgggactgcaagaaggaagaatgccattt

SEQ ID NO: 302439 - DNA, 201 bp, Homo sapiens
aggcctcccatattcaattttcataaacatagaaagttgacttttgttataatcaagcatagagcattttagagcattttgctgagcgggttgtgcagtgygttagagagtggggaaaaacttgctgcaaattggtgataagaggtatggggtaactgcaagccagtgccaaagaaagaggttatgtttacagcagcatgc

SEQ ID NO: 302440 - DNA, 201 bp, Homo sapiens
ttacattgcatttagaataaaatccaaaccttttctgacctgcaggatcttactggcctgggccccactttcctccttgccctcatcccataacaccctcytcatgattcctatgttccagctgccctgcgctttttctgttcctaaaggcaagctcagagcagccacagttcttcagtctttatttttctcttcgtcggg

SEQ ID NO: 302441 - DNA, 201 bp, Homo sapiens
ttcctccttcatttgaatgttgttttagacgtcattatgaagcacctattatatgttaggtggtccattgagagctagagatgcaatgatatagaagacayggccctgccctcaaggggctcagagtacaaaaactgacacatatacaaactgctatagttcagtgtgcaaagtatgataagggaggggtgtgtgcatatg

SEQ ID NO: 302442 - DNA, 201 bp, Homo sapiens
cctgggcacagtgattaagagctctggagtccttgttcggttggctatgtgaccttgaacaagttattttgcctctcagttccttgattataaaaggaggyaataatggtacctactttggaagtttgttatatggattaaatcaattcatacttgtaagatgcctaaatagttgctggcacatggtaagttcttaatgtg

SEQ ID NO: 302443 - DNA, 201 bp, Homo sapiens
cccaatctttatttttaaacttagttcctgtaagggaagtaaagagcacacagatgagttcaatatataaatcacgtccattaatccaacaaatatttacvtgaaaaatttaaaagctttctttctcagataacattttctttacagaaggaagttgtcctggacatgtgaccaaagggtctgtgggatgaggttgtggag

SEQ ID NO: 302444 - DNA, 201 bp, Homo sapiens
attcatttctttgagttcttttattttcttagtcttaagagctgttcttcttggatggacagagtattagctgttaacatgggagaaaactacttgaaaamcagtttttcccttcatagaaagaaaatcattgttaatgttcagagcatgtagggagagaaccagtacataatttatttaagaaaaatgttgtagggagtt

SEQ ID NO: 302445 - DNA, 201 bp, Homo sapiens
ggatacaagtgatcttccttcatcagcctcctaagtagctgggactacaggtgcacaccaccacgcccagctaacttttgttatttttttatttgttagasacgaattctgttgcctaggctggtctcaaagtcctgggctcaagcagtcctcctgcctcagcctcccaaattgctgggattacatatatgagctgctgtg

SEQ ID NO: 302446 - DNA, 201 bp, Homo sapiens
cagtttggatggtgatatattaaaagaaccagatccctgtttctcaaaatttaaggtgtttatcaatcggggacttttaaaaaaaaaaaaaaagtctgctmaattaggctctgctgctgggtaggtggctcatgcatgtaatcctagtcatgcattgggaggctgaggcaggaggattgcttgaggccaagattttgagac

SEQ ID NO: 302447 - DNA, 201 bp, Homo sapiens
atgcagaaccatcattaaatttttaagcaggtaattatggtgaagtagcttgacatctgatcttgataatgaggctagaatttaatcgagttttctgtttkcatcagttccatgctttctaatttagctgactgacccattggagtttcattgcagttttttgttgttgttgctgtttttccttaatgcctcgagtaggag

SEQ ID NO: 302448 - DNA, 201 bp, Homo sapiens
aggtatgctttgagtattcttacttatatattgctttgagtattctgcttttttttgtttttttttttgttgttgtttgttttttgtttaacagacatggwtccactctgtcacccaggctggagtgcagtggtacaatcacagctcactgcagccttgaaatcctggatacaagtgatcttccttcatcagcctcctaag

SEQ ID NO: 302449 - DNA, 201 bp, Homo sapiens
taaaagtaataaagttcaaatgcagtttggatggtgatatattaaaagaaccagatccctgtttctcaaaatttaaggtgtttatcaatcggggacttttwaaaaaaaaaaaaaagtctgctaaattaggctctgctgctgggtaggtggctcatgcatgtaatcctagtcatgcattgggaggctgaggcaggaggattg

SEQ ID NO: 302450 - DNA, 201 bp, Homo sapiens
gggtcttgctttgttgcgcaggctggtcttgaactcctggcctcaagcaatcctcccacctcagcctcccaaagtgctgtgattacaggcatgagccactstgcttagcctgtaagcatctacttcaaacaaacaaaacgatacaagtgtttgcttttctcttctaacattttcctccagtctttcattaaggaatgttta

SEQ ID NO: 302451 - DNA, 201 bp, Homo sapiens
agttataaaaataccgtggaaggattccacttgggattggtctggccttggtcatttgtggccgtcccttggactaagcagttataaaaacatggcagcgyttgcctgttggcgttggggaaagaacagtccccagagaggggaaagggcctgccaggcagtttcaggcaggtctctgtccgagtaatagagctggatggt

SEQ ID NO: 302452 - DNA, 201 bp, Homo sapiens
tctggggagctaatgtctgatgcacagatacacacatttttatctcttgcccctgatgcccctgggaacttcagacccacctgtccacggcctacctgacrttgacacttagatgtcccaagagcgcatgaagtttaacaagctcaaaactgaactcttctcttaagatgcattgtgccagtcgttggacccaccagcttc

SEQ ID NO: 302453 - DNA, 201 bp, Homo sapiens
tgctgccgaaaaagagtgtgctttctgggaactcgtctgaattccagtttgccttaaaaaatcttgtaattgtgtatgttttactgtaaccacttacgttsctaccttatatttatgaattgctacatttgttttagagtttcttgctaattggaaatattttgaaactacttaagtgtttcatagtgtatgacttgtaaa

SEQ ID NO: 302454 - DNA, 201 bp, Homo sapiens
cctccccatcacaccggcccctctccaggttacctcatccactcctctggggagctaatgtctgatgcacagatacacacatttttatctcttgcccctgmtgcccctgggaacttcagacccacctgtccacggcctacctgacattgacacttagatgtcccaagagcgcatgaagtttaacaagctcaaaactgaact

SEQ ID NO: 302455 - DNA, 201 bp, Homo sapiens
ggcagctcatgcctataatcctaccactttggggaggctgaggcaggagaatcgcttgaggccagaagttcaagaccagcctagagaacatagtgagaccytgtctctacagtgttttttgtttgtttgttttaattagctgggtgtagtggcacacacctgtagtcccagccactcaaggggctgaggtgggaggatccc

SEQ ID NO: 302456 - DNA, 201 bp, Homo sapiens
ctgccttctcaaaagcatcatgatcatcccatagcatgtttgaacccccttttcccttcactcccattgggtgaccctgtgctttttcacttcctgcctcratggcagttttcccctttctcatcctcttctccaggcttggaaacattcccgttcttgaagactgcttctccgccttcctccccatcacaccggcccctc

SEQ ID NO: 302457 - DNA, 201 bp, Homo sapiens
ttcaatctggctgacatttcccagtccctgccttctcaaaagcatcatgatcatcccatagcatgtttgaacccccttttcccttcactcccattgggtgrccctgtgctttttcacttcctgcctcgatggcagttttcccctttctcatcctcttctccaggcttggaaacattcccgttcttgaagactgcttctccg

SEQ ID NO: 302458 - DNA, 201 bp, Homo sapiens
tgatacatacccaccattatattaatagtatgatacagaatagtgtcactgccccccaaatctgtcgtgcttcacctctgcctccctccctcccccaaatstgctgcacttctcatactcacctcactgtttctgttgctcacctatgactctctccaccccatcgtagtcttctgttactatatagatctctaaaagatg

SEQ ID NO: 302459 - DNA, 201 bp, Homo sapiens
ctgtgtgtctttgaaggaatctccaaagtaaatggggtcagagagtggctgtgggggactgatgtatagcaagcaaggaaagagtgttcatcagtaactcttaagacgggagaaaacaatgagcattgcagaaaaaagtcagcaggtgaggatgtgcccacagaaggacgtaatgtggggaaagaggcacttaacgctcct

SEQ ID NO: 302460 - DNA, 201 bp, Homo sapiens
aaggtcagtaagtatttggtgacattagagatgatttatgctttatgtcatagttgtgtatgctccctcctaaatggtttctctatagattaaaaaaaatstatgcttcctaaaacactttacacctctgctatggagagggagagagagaaagagagaagaattggaccttggacaggaatacataagtgcatccttctt

SEQ ID NO: 302461 - DNA, 201 bp, Homo sapiens
aatttgtgcagttaacgcaattatcccatggtcctgaggcaacatacatcttcctcagctgacaggattaagagattaaagtaaagacaggcataggaaakcacaagggtattgattggggaagtgataagtgtccatgaaatctttacaatttatgttgagagattgcagtaaagacaggcataagaaattacaaaagta

SEQ ID NO: 302462 - DNA, 201 bp, Homo sapiens
ctctgatacagcagtgttttgtagactctagaaacgtttgttaaactgtaatagatgaaatgaaatgtattaatagagccaaactgttttgttttttttcragacggagtctcgctctgtcacccaggctggagtgcagtggtgcaatctcagctcactgcaagctccgcctcctgggttcatgccattctcctgcctcag

SEQ ID NO: 302463 - DNA, 201 bp, Homo sapiens
gttgcaaaactgtttaaattttctcaaagttagtagccaaagcgactaatttagaaatgcataatttatgtacatatgtgttgctgtaaatagatgtgacwgtttacatgcatgtctatactttataaataggaggggaagtgaacagttcgagcatgtgaaagatgcaggcgatggacccagggagtgttctttcattgc

SEQ ID NO: 302464 - DNA, 201 bp, Homo sapiens
tggcacaccagtacggatctgctacttagagagaggctttgtgggaagattgtctttttatgtcattaaaccaaaaaaaaaaaaagaaaaagaaaatgackaaagccacagaatgagtgtcatacatttgtatttcccatgaaggcggaagcagtataatttatttttaatcttctaacagttctttttattacaagaaac

SEQ ID NO: 302465 - DNA, 201 bp, Homo sapiens
gatgaatccttttttcctctgtcccaattgtgtgtctctgttccaaacacattttaaatactcggtcctgacagtgtctttagctaatccttgaagaaatraaagtggaattgaatctttttagtttctagagccttgccttcagtttgggaattattttatcagtaataacaaacttccacaacacaattgactttgccg

SEQ ID NO: 302466 - DNA, 201 bp, Homo sapiens
taatcccatacatggctcaagcacttagctgtttcgttgaaatggaggcagggtgtaaaacatcctttcatttaaaaatattctcaatagctgataacagygtctttagttttgaaatttatgcagaaccatcattaaatttttaagcaggtaattatggtgaagtagcttgacatctgatcttgataatgaggctagaat

SEQ ID NO: 302467 - DNA, 201 bp, Homo sapiens
gccatgctgggtattttcatccacatagctttgcacgtaacacaggtgagtctttttctgcacacaaacacacacacagatcggtgtatgaggagtgacargcacttttgccttctgccctgtgttttgtcaattctgatcacggccctgaagaatcaaccctggtctctcctctcattgactcacatgatgcaaaactgt

SEQ ID NO: 302468 - DNA, 201 bp, Homo sapiens
cccaccatacccctcaagcattggagaagacaactgggtacttacaatgcagtatttttcaaataggcttctgaaaccccaggcccacaggtcattctgaygggaaagcaggttccatgatcacagcagtgccatgtgtgctgctgctggccacctaaccctccggagacccacagcgcagagtcatgtgtggagggcctc

SEQ ID NO: 302469 - DNA, 201 bp, Homo sapiens
tgaaaaaactttgtagtagaagtaaacaattctgtttgtttcagtgagagaaaacacccatggatcagccaggttgacagcctagtcagcttgcatcctggtttgtttttttttgttttgttttgttttgttttgttttttgttttgttttgtcttgaagagtttttgctgaaggaagcattagagttctacttaatatgc

SEQ ID NO: 302470 - DNA, 201 bp, Homo sapiens
ccttactcattatgatgcaaaaaagaaagctgcccatgctgcaaaaactgttaaacatggcgtgagtatctccattttgtttccttctctctttctctccctctctctctctctctctccctctctctctctctctctctctctcctggctcctctgtgtgacctgtaactcagggatcactcctttctgccactgagctg

SEQ ID NO: 302471 - DNA, 201 bp, Homo sapiens
gaaaaaactttgtagtagaagtaaacaattctgtttgtttcagtgagagaaaacacccatggatcagccaggttgacagcctagtcagcttgcatcctggtttgtttttttttgttttgttttgttttgttttgttttttgttttgttttgtcttgaagagtttttgctgaaggaagcattagagttctacttaatatgca

SEQ ID NO: 302472 - DNA, 201 bp, Homo sapiens
aaaaaactttgtagtagaagtaaacaattctgtttgtttcagtgagagaaaacacccatggatcagccaggttgacagcctagtcagcttgcatcctggtttgtttttttttgttttgttttgttttgttttgttttttgttttgttttgtcttgaagagtttttgctgaaggaagcattagagttctacttaatatgcat

SEQ ID NO: 302473 - DNA, 201 bp, Homo sapiens
gtagaagtaaacaattctgtttgtttcagtgagagaaaacacccatggatcagccaggttgacagcctagtcagcttgcatcctggtttgtttttttttgttttgttttgttttgttttgttttttgttttgttttgtcttgaagagtttttgctgaaggaagcattagagttctacttaatatgcatacaatagaaagta

SEQ ID NO: 302474 - DNA, 201 bp, Homo sapiens
agtaaacaattctgtttgtttcagtgagagaaaacacccatggatcagccaggttgacagcctagtcagcttgcatcctggtttgtttttttttgttttgttttgttttgttttgttttttgttttgttttgtcttgaagagtttttgctgaaggaagcattagagttctacttaatatgcatacaatagaaagtagtaat

SEQ ID NO: 302475 - DNA, 201 bp, Homo sapiens
gtaaacaattctgtttgtttcagtgagagaaaacacccatggatcagccaggttgacagcctagtcagcttgcatcctggtttgtttttttttgttttgttttgttttgttttgttttttgttttgttttgtcttgaagagtttttgctgaaggaagcattagagttctacttaatatgcatacaatagaaagtagtaatt

SEQ ID NO: 302476 - DNA, 201 bp, Homo sapiens
aaataaagcacttttgatgactcacaagatgaatccttttttcctctgtcccaattgtgtgtctctgttccaaacacattttaaatactcggtcctgacastgtctttagctaatccttgaagaaataaaagtggaattgaatctttttagtttctagagccttgccttcagtttgggaattattttatcagtaataacaa

SEQ ID NO: 302477 - DNA, 201 bp, Homo sapiens
taaacaattctgtttgtttcagtgagagaaaacacccatggatcagccaggttgacagcctagtcagcttgcatcctggtttgtttttttttgttttgttttgttttgttttgttttttgttttgttttgtcttgaagagtttttgctgaaggaagcattagagttctacttaatatgcatacaatagaaagtagtaatta

SEQ ID NO: 302478 - DNA, 201 bp, Homo sapiens
aacaattctgtttgtttcagtgagagaaaacacccatggatcagccaggttgacagcctagtcagcttgcatcctggtttgtttttttttgttttgttttgttttgttttgttttttgttttgttttgtcttgaagagtttttgctgaaggaagcattagagttctacttaatatgcatacaatagaaagtagtaattaag

SEQ ID NO: 302479 - DNA, 201 bp, Homo sapiens
ttctgtttgtttcagtgagagaaaacacccatggatcagccaggttgacagcctagtcagcttgcatcctggtttgtttttttttgttttgttttgttttgttttgttttttgttttgttttgtcttgaagagtttttgctgaaggaagcattagagttctacttaatatgcatacaatagaaagtagtaattaaggaaaa

SEQ ID NO: 302480 - DNA, 201 bp, Homo sapiens
ttgtttcagtgagagaaaacacccatggatcagccaggttgacagcctagtcagcttgcatcctggtttgtttttttttgttttgttttgttttgttttgttttttgttttgttttgtcttgaagagtttttgctgaaggaagcattagagttctacttaatatgcatacaatagaaagtagtaattaaggaaaaggatat

SEQ ID NO: 302481 - DNA, 201 bp, Homo sapiens
tgggtttcttgccccaaggtcccctcccctgcctgtaccctttgctcctggctccaaggagcaccccaaagttccagcctatcctgaatgatgaagataaktatattttttccctctccttactggtagctgggacaaagttgggatttttttccatgaaggtatttttactgtgggtaagtgggtaaaataaaaagagca

SEQ ID NO: 302482 - DNA, 201 bp, Homo sapiens
cttttgctcaaaaaaattgaacatttattgctgattcttaatgtgtaacagttattactgtggtatttgcaaattgctgattttttaattttcattattcyttctacatagttgaaattgtactgtaaggaagagtttcctcttcttccatagaacgtgaaatcatagattcttattctatggctactgtattagtctgct

SEQ ID NO: 302483 - DNA, 201 bp, Homo sapiens
ataatagcacctctacccccttgggttgtaaagatcagataagatactgtgtgtggagtgcctcacgtgggtcttggcacatgtgcacctagcatgagccrtaaggttagtgccaagtgtggcagtgagttagggtaaagctgagccaagcctgaggagctctccccggcttcctccctctccctgccacatgtcagctcc

SEQ ID NO: 302484 - DNA, 201 bp, Homo sapiens
actgtggtatttgcaaattgctgattttttaattttcattattccttctacatagttgaaattgtactgtaaggaagagtttcctcttcttccatagaacrtgaaatcatagattcttattctatggctactgtattagtctgcttagacccaccaccaaaatgccatcagttggacggcttaaataacagatacttatta

SEQ ID NO: 302485 - DNA, 201 bp, Homo sapiens
gatgcacgggcctttcaagataattcccaacccactctcgacatctcctgtcttcccccatgctcatgctgccatgaaatagctccccctccaggcccccygccacttccgccagcctttatacccaacaggggctccacacaaggggtgcttcctgtttcatctcaatatgtcataatttgtagggaattgtcttcatta

SEQ ID NO: 302486 - DNA, 201 bp, Homo sapiens
cctttgatatcagaataactttatttggcttgtcaaaaaaagcatttcttttctagatattggaaggtagctcagatttcagaagaaaatgttaattaaartatacttggatctttgatttttgtcttatctgcagatagacatcaacttttgagaaatggtcttagaaaatgaatattagctgggcgtgttggctcatgc

SEQ ID NO: 302487 - DNA, 201 bp, Homo sapiens
gtagaattttaacatgactacattcttttgtatgaagttgacagtgggccagccggcaaggatgtccgtaagagtctgattgagcttgcagataccaagtkgacagatgggagagtttgtgtctatgttataaattaaagtaagattctaagcaaaagtttaaatatttctgatgacattttaattttagtcaagtagcca

SEQ ID NO: 302488 - DNA, 201 bp, Homo sapiens
gtcagtttcaaaagaagaccaggaacttgcaatgcctttgattagaatattggagctgtggcttttcttccaatctttgtccctgcactgccacatccacmtaaatgaaacacttaaagaggttatgtgtgtcttccaggaattaagtggatctctggaaagttgttttgtgattcatttgaatttgtgggaatgtctccc

SEQ ID NO: 302489 - DNA, 201 bp, Homo sapiens
caaaaaaaggttattttcttggacttcgttgagttacaaaacaatgcagtgggaattagaatttaggcagctactaaactcagcttttcttagctgttgckttcattcatttgtgtacacttcatggcacaccagtacggatctgctacttagagagaggctttgtgggaagattgtctttttatgtcattaaaccaaaaa

SEQ ID NO: 302490 - DNA, 201 bp, Homo sapiens
caattgcaagtggcagaaatttaccttcctctagcttaggggattgattggtttctgtctctggaaaggatgttggattaggctggcctcaagatcccccrggtccagagattcaaatgatgtcatctgcacgtggctcttatctgtcttatcccgtcttttctgtgcatcaatggtgatgcttaactttacgtggctgaa

SEQ ID NO: 302491 - DNA, 201 bp, Homo sapiens
ttaggtatgagatttagggcttctggccagcttggtatcatctagcaccttctggaagctttgccttcacagcttacttggggaactctagttttagaacrtccttatcccaggatgaatggaaagaaagataccagggaagtattaaattattttagcatattaaatatctgactaaaaagtaaaatgtttatttgaagt

SEQ ID NO: 302492 - DNA, 201 bp, Homo sapiens
tgtcataaaatatgacagtattaaaaaaggaataaattttactttttacgtattagcttgagggaaaattgccaacagctaggtcttgccagccctaacarttataacttaacgcttctccagttttgcgcggcttacttacagcactgtttcacaagtatgttgaggtatattctctttccacattcatacataaacaga

SEQ ID NO: 302493 - DNA, 201 bp, Homo sapiens
aagtactaaatttggcgatttagtattgcatgatgttaaatagcattgagaaaaaaattatagatttgttatagtctccttcatgctaaaggctttcctcycatgtccggtggtttgttgctctccagtcaggttttagaacgaggtgctggaagacagacgacttgtcccgggtatgtggagtggcggtgcccgtccact

SEQ ID NO: 302494 - DNA, 201 bp, Homo sapiens
aatagcattcaccttactgtgactcagttatttttagtactttgtgaagtactaaatttggcgatttagtattgcatgatgttaaatagcattgagaaaaraattatagatttgttatagtctccttcatgctaaaggctttcctcccatgtccggtggtttgttgctctccagtcaggttttagaacgaggtgctggaag

SEQ ID NO: 302495 - DNA, 201 bp, Homo sapiens
cttactcattatgatgcaaaaaagaaagctgcccatgctgcaaaaactgttaaacatggcgtgagtatctccattttgtttccttctctctttctctccctctctctctctctctctccctctctctctctctctctctctctcctggctcctctgtgtgacctgtaactcagggatcactcctttctgccactgagctgc

SEQ ID NO: 302496 - DNA, 201 bp, Homo sapiens; identical to SEQ ID NO: 62996

SEQ ID NO: 302497 - DNA, 201 bp, Homo sapiens; identical to SEQ ID NO: 62997

SEQ ID NO: 302498 - DNA, 201 bp, Homo sapiens
attataaaaatagttttggctttgtatagttttggtcttgggaccccagggttctgaaccatgcttagagaaatgctagtctaagtgaaggaaatggtctrggcttgtctcctaacctctgaagtccccacacactggatccacttcccaaatacacccttgtcctgtcctgtcttaaagtcttcgcccaagcaagccatt

SEQ ID NO: 302499 - DNA, 201 bp, Homo sapiens; identical to SEQ ID NO: 62999

SEQ ID NO: 302500 - DNA, 201 bp, Homo sapiens; identical to SEQ ID NO: 63000

SEQ ID NO: 302501 - DNA, 201 bp, Homo sapiens; identical to SEQ ID NO: 63001

SEQ ID NO: 302502 - DNA, 201 bp, Homo sapiens
aatcttgctctggattgatcagcgatgcgcttttcctagatccataagccatacttgagaacatgattagcatataacgacgtttgtatataacacactgkgtggcaggcaccattttaggcctttttacatgtgtgaactcatgcaaccctcacaaccctatgtttgcaaatccccctttaaagatgggaaaccaagtca

SEQ ID NO: 302503 - DNA, 201 bp, Homo sapiens
gcacttttccctctaaagcacaagtcagtgctggttaacatagcctgggtcacttaatgctttcctatctccaccagtcaccacaaaccatgtcatgaggyccagtgaggcccccttacacattgtgggactagcacaggggcagcttgggatactaggtcataggggacagtggagagacatagaacagtgtccaagggg

SEQ ID NO: 302504 - DNA, 201 bp, Homo sapiens
aaaactgaagcatgattgtctgcttaagacacttcccaagtatacaggattaatatttcttttctcacagtgagttgtattttttctactacagaaatctyttgagtgcaaaatcaaagttgcataatattactcaccgttaatgttgcttgatgggagttttcactgctctagccatatgttaagctattttatccccca

SEQ ID NO: 302505 - DNA, 201 bp, Homo sapiens
tcatactttaaaggtgtgtttcaggatgaatgctgcctgggaggcctgttctgtgactatagccgcagtcctgtgtctaccattaccactgcccccttaarccctgatcaccctgaggtctgggatttcatgcataattatccagtcaaagtatttgtttgtacctaccacatgtcaggctctgtgctagccgttttaggg

SEQ ID NO: 302506 - DNA, 201 bp, Homo sapiens
tcacatagctaataattggagttgcggagctacaacccaggcagcctggatctagtgtgttcacataaccatgggcttcagtttgtctcctacgtggaaasctgagccatgcctagtcgacctggggtcgggcatcactccgtatgacagtgaagggctcattttatccgaacgggaagcaggacagccaggctgcggggg

SEQ ID NO: 302507 - DNA, 201 bp, Homo sapiens
ggtctctttctggcctgcagatgaccaccttctgcccctgtcctcacatggtgggcctgggctggggatgggggcattgagctctttggtgtctgtacttraaaggacattaattccatcagatcagggcccaccctgatgaactcatttagccttaaatacctcctaagggccccatctccaaacaaagtcacactcgag

SEQ ID NO: 302508 - DNA, 201 bp, Homo sapiens
catatgtttccactttctttgcagtaatacctgtatgcattatttacaattccaaattgaagccatccattcctttactgtcatgcaccttgaaatctgtktacagtcatccctcagtatctgtgagggattggtttcaggaccactccccataccaaaatcctgaagatgctcaagtccctgatacaaaatggcatgatg

SEQ ID NO: 302509 - DNA, 201 bp, Homo sapiens
gacacagaattgaagtaccaacttcttgatgacaactttgagtttagcatcctttgactttacaaaaatcacgatttgaaatgttttctctgggttagttmttgtaacctaacatagggatttgacatatccccagtgttacataaaataagtgtgggatcaaaataagtctattgacacctcccaggggctttaacagta

SEQ ID NO: 302510 - DNA, 201 bp, Homo sapiens
gccatcccgtaggtcctattttgtaggtcttgtatgcagttcagctgtcatatcccagtttgtggaggaagaccaaaccgtcacctttgacattaccacayagagttgtcataaaatatgacagtattaaaaaaggaataaattttactttttacgtattagcttgagggaaaattgccaacagctaggtcttgccagccc

SEQ ID NO: 302511 - DNA, 201 bp, Homo sapiens
aaaccagagatctagaggagttagcaaactccttgagtgttcagcctttgacatttcttagattatcaccatagatatctgcgcaccagaatcttctgttmcgactggaacgaagccatcccgtaggtcctattttgtaggtcttgtatgcagttcagctgtcatatcccagtttgtggaggaagaccaaaccgtcacctt

SEQ ID NO: 302512 - DNA, 201 bp, Homo sapiens
agaagcagggcttctttctcagaccttaaaggtggcaccagtaacatctaccttctggaccagagacattttataaaagggagatttgggtgaaggactcsaaacagagggttaggggatctgagtcccagccctgggggcacagggctgcattaatggggtttgagtataggtcatctgactttgtcctcgtttgtaaaa

SEQ ID NO: 302513 - DNA, 201 bp, Homo sapiens
tgtgcaaagtatgataagggaggggtgtgtgcatatgtataatttaatttatctggttgtgtgggaacacaaagagggaaacaattctgaatgattagggtgaacctcaaatcactcccatgtgaggatcattatgaaatttttttttgagacaggatcttgctctgttgctcaggctggtgtgcagtggtgaaattatat

SEQ ID NO: 302514 - DNA, 201 bp, Homo sapiens
tccatcagatcagggcccaccctgatgaactcatttagccttaaatacctcctaagggccccatctccaaacaaagtcacactcgaggttagggttgcatygtaggaatttgggggagacaaaaacattgagcccatgacagttacagtctgttattatcactatttacaaaaaggttattaaaaaatatttggaagaggg

SEQ ID NO: 302515 - DNA, 201 bp, Homo sapiens
tgtgtggcctgttgtgctgctttctgggcagggtgcatgacttggctcctgatcgcgagaagctgtcattttagttcctacctactctcttgtccctgttkccatgttcctgtccattagtatttagtcttgtaagaagaataagagaattgatgtgtcaaaccttgcctgagtctgctggcttaattgggtggatgatga

SEQ ID NO: 302516 - DNA, 201 bp, Homo sapiens
ccatagggtcacaataagaagatcccttttaacatacagccttcttcctgaaacccatttgaaagaaaacagctgccctgcaattggcatttgtgtaactrtattggcaataatcattgttgacactttgataatgggctacaaaaagccgccttgtcgattctcaggcactgtgaattgcaccagcaattaagtgactgt

SEQ ID NO: 302517 - DNA, 201 bp, Homo sapiens; identical to SEQ ID NO: 63008

SEQ ID NO: 302518 - DNA, 201 bp, Homo sapiens
tcaaatttgatgccatattggtttttacatgctttaagccatttttgccttggtagaaatagcaagtgcttctccagtaatatgtggtttttagtcttttsctagcagaggaacccagaaagaagcttctacatgttaatcattaaattaataaaattttgtgaagtactgaatttgtagtgtagtactgcccaatgttaa

SEQ ID NO: 302519 - DNA, 201 bp, Homo sapiens
aacccagaaagaagcttctacatgttaatcattaaattaataaaattttgtgaagtactgaatttgtagtgtagtactgcccaatgttaaacatagtgaaraaaactagagttgtttgtcttcaggtcctgagtgcttagattttaaatgacttgcgcattttgatagctctggagtatcattagctggtatctctaggca

SEQ ID NO: 302520 - DNA, 201 bp, Homo sapiens
gtttttgagtttgttaccctttgtggctcattctgaagttttgctgataatcatatatttgctaatgtctaaaaacagaacggttgggtcactgctgtaargcagataaatacagcagttctagaacctgctgacttggtggattcacatctacaagggaaagcagttttcgttgtaaaaatccccatttcatgtataaga

SEQ ID NO: 302521 - DNA, 201 bp, Homo sapiens
aagctcctactgttcctgggggtacctcccttccaatatacagctcatgacgctcacattggactgaggagggcattcgtcagacaagctgtgtaaaggcmgccttttagtataatgtacatagagaagctctgctgtcttctccccgaggagcacaccgcccttgtggaagacccttgcgacccttgccttagagctgtg

SEQ ID NO: 302522 - DNA, 201 bp, Homo sapiens
cagcaaagactgggttgtctttggttggaataggaaatatatttcctctagagtgttaaaaagggtaagagaaaactagtgaaactgatttagctaatttwgtcaacaagttaggaaaatgacatttcctaaagttctgatggggttagctctacctcctcagtggaaatagtaaaccacctggaattttacttttagtat

SEQ ID NO: 302523 - DNA, 201 bp, Homo sapiens
tagtatatgtcattatttgtattttaaatttatcttcagtgttgtttatatattactttaaagtcactcttgatttttttaattataatacagaactttgwtttcttttaaaaggacaacttattttatagttagcatagattgctttcctcgaaataaaaattgtcattccattctagcatcctctgccaattgcagtat

SEQ ID NO: 302524 - DNA, 201 bp, Homo sapiens
tgaattatgttttcagttccatagatgctgatttttatgaagatttttgcaagcacggcaaaaggggttttattcttttttgcaagtttattttcatttgrgtgagcttggaattacaagtaaatcaggaacacaagcagttctaacataaaacaataattactacgtattttttatgtggagcattcagctctgagtgtc

SEQ ID NO: 302525 - DNA, 201 bp, Homo sapiens
acagagctgggtcttgcccccacattatgttctagccacggctggaggaggagagggaggacaggaatcctggatgtgtggtgcttcgtggaaagcacacrtggaaagcaccttgttgacctggacaggactgcattactcaccagatgtggacacagtgcctttacttttacttatttacaacagcgtaacaatcgcctc

SEQ ID NO: 302526 - DNA, 201 bp, Homo sapiens
tcttgtaagaaagtgagtctaagaaagcagtcaggttcattcctctgaaaaacatgaaatgtgttacaaaaagccttatgatatggagtctgtctgacccycaccccactgctcttgcgaatgcttccagagattggggctcactggcgccccccggtggtattcaagccttctcctattttattgtttgggtaagacccc

SEQ ID NO: 302527 - DNA, 201 bp, Homo sapiens
ataccagcctgggcaacatggtgaaaccctgtctctactaaaaataccaaaaaaataggcatggtggtgcgcacctgtagtcccagctactcgggagactraggcaggagaatcgcttggcttgaacctaggaggcagaggttgcagtgagccaagaccatgccgctgcactccagcctgggtgacagagtaagagtctgt

SEQ ID NO: 302528 - DNA, 201 bp, Homo sapiens
atgcaattttaatttttacttaacatacaaagtagccttttttttttttttaagctgaaggaaatgaactccagagaacactgaagaaaattgaaggaaaraagtagagctcttagaaagaaaggaaaggtcacgcttataaactgtagccatctagataaactgttatttccactttatgtggatgtattttattgtgac

SEQ ID NO: 302529 - DNA, 201 bp, Homo sapiens
tgtactgtcgtgtcagctgtttttgttgttgttgttgttgttgttgtttttctttttcttttctttttggcttcagaaatggcctcagctacgcaaaaatraagaaggatctgaaagatcagtcttgttgtaaagaagacagcaggtgacatggtagatgaccgcacattgttcattcccaaggtcatgggtagtgccagg

SEQ ID NO: 302530 - DNA, 201 bp, Homo sapiens
tgtcattgtttttctcatttgttttaggccaaagaactgccaactctgaaagataatgatttcattaatgagggccaaaagatttatattgatgacaacarcaagaaggtcttcctggaaaaactaaaaaaggatgttgaggtaagaacagtcagtggagaggccagactcattgtataaatatcagccctgttgggtttt

SEQ ID NO: 302531 - DNA, 201 bp, Homo sapiens
cagccctgtgcctaaatgcactgggttatttgtacctcagaaatgtctttggcctagtacaaaagttctcggctacaaaagagtgatcactgaggaccctrattatttttgtgcccaggcctggttggattctatccatctcagaaacagcacggctgctctcataacgaggccatgaccatacctttcctcctagacaga

SEQ ID NO: 302532 - DNA, 201 bp, Homo sapiens
gtatttagggttgcctgtaatatttaagcttctttactgatgtgtgtgctggtaggaacatataatttttgtacattatatttactgagatgttgcctttyttattttacaaatactttggaattccaatgtgttttttgcttccgtgaggattaatttggaaaggtttttaatgacattccactgatttcagattttgct

SEQ ID NO: 302533 - DNA, 201 bp, Homo sapiens
tttctcattcttttctcctttatcttcactctgatttttcttttgtcattcaacgcttactcccttccccatacctcagtcctccaggtgacacctgggckcttttctgcctgaacagcatttcccaccaacggccacagcagtcggtcagtgtcctcttgagcacctcctgaagctgcagtgtcatttgctgtttgccct

SEQ ID NO: 302534 - DNA, 201 bp, Homo sapiens
gggaagttacactgcttcacaccacaaggccgtgggaaatcttggaggttctgtgcctttctgtcacctctactttttgcagctgtgattgcactgtcccrcacatgtgactacaagcatcactggcaaggtaagcaaagtactcaggctatggaagcttgcatatttcactcattttattcctagcacctagcacagagg

SEQ ID NO: 302535 - DNA, 201 bp, Homo sapiens
tcttcctgtatgaatatcatatggactctaccctatgcttgttttcacatcattgaatttaacctagaaagctagtagggatgggaaaatctgactactcytgtttctacaatttggaaaatccccccttctttagtaactccacagtttaacaagtctgagccttgactatttgggtaaatattacagaacagaaaggta

SEQ ID NO: 302536 - DNA, 201 bp, Homo sapiens
acaatggaatataaggaacaattatgggatgtcatcagaatggatgccataggacctacagctccctttctctttattgtgattatactttaaatatgacrttgtcttttatgtgtatgttcctatattttcaatgtatctttttccttcagtaaacctgatattcaaataaaatggtaaatgtgtgcttttttaaatatt

SEQ ID NO: 302537 - DNA, 201 bp, Homo sapiens
aagataattatattgccactaataatcaagatgctaaatgagtattacaactggctaatatcattttttatatacaagggtatgtgtatatttggaattgrtatgagaaactcatttgtacccatttgagtgatattgcacaacaaacacagatacctacagactccgttttcattttctcgtgttctttatgataatgat

SEQ ID NO: 302538 - DNA, 201 bp, Homo sapiens
aaacatttctgttttttgttttgttttggtcagtccattgcataagtgacaagtttgggtgcttgtggcacgtatgtatgaagcgggagggggatgagaaytgcctgtccttcagtaggctgtaaaagtaatttacatgtaagtaaaaagggaaaatagaatagatgccaaagtcatttattcagtccttagttttcttat

SEQ ID NO: 302539 - DNA, 201 bp, Homo sapiens
atgtggctctaccggaacccctacgtggaggcggagtatttccccaccaagccgatgtttgtgcgtggagaaagatcgtctttcctccctccccatgaccsggcttcccgcgggcacctgtgcgttttccaccccgagacggcctttgtagggacccactgcccactccgctgctgtgcgctgggttccgcctcctagggc

SEQ ID NO: 302540 - DNA, 201 bp, Homo sapiens
gatgaatctttttctgccccttcttcacaatggaatataaggaacaattatgggatgtcatcagaatggatgccataggacctacagctccctttctcttkattgtgattatactttaaatatgacattgtcttttatgtgtatgttcctatattttcaatgtatctttttccttcagtaaacctgatattcaaataaaat

SEQ ID NO: 302541 - DNA, 201 bp, Homo sapiens
gcagtgctccaggcgcctggctgccaggctacgggagaaaagtcctccgctcggccgcacccgttagaggcgctctccactgctgtcctcttcagctcaakatggtggcctgccgggcgattggcatcctcagccgcttttctgccttcaggatcctccgctcccgaggtgaggcctggccgagggcatcccagacctccg

SEQ ID NO: 302542 - DNA, 201 bp, Homo sapiens
ttgtttcgcaaattaattttgaaatgtcttttcttacaggttatatatgccgcaattttacagggtcttctgctttgctgagtaagtttaatttctttttratgtgtatgcttacattgctttttggatttatgttgcaataaatatgtttacaaataaatctttcttttctttttagccagaacccatattaactatgga

SEQ ID NO: 302543 - DNA, 201 bp, Homo sapiens
tgggaaaaggaacaaggtcaacatattccccgacacaaaaccccctaggtgatccgtcaatgtctgggtgagtgacatctactgtctgagcagttgtgggrgacagagtgggctgggcccaggtgtcactcattagctttgatgtggcctctaatcatctcccaggcctacctgacacattgttaaatgcttttcccctgc

SEQ ID NO: 302544 - DNA, 201 bp, Homo sapiens
gttctaagcagttcctgagaccaaagagttacagaagccctcgtggaagaaagttttctaaacacagagcccttatcactggcgatttcaaaaatgatttyatgagtcaggtgcggtagcaaccacttatggtcttagctgcttaggaggctgaggtgggaggatcgcttgagcccagaagtgtgaggccagcctgggcaa

SEQ ID NO: 302545 - DNA, 201 bp, Homo sapiens
tttgaaaagttctaataagactccttttacctccaggcttgtttataaatattctggggcaaatgaccagactttgatatgattttcccctgggttgtctycaggatggacggtggtattgactgtcccactgagtcaaggtgggagtggggagtatctaggatgtggcagggttctcccagccatcccagaccttgaagg

SEQ ID NO: 302546 - DNA, 201 bp, Homo sapiens
attttgggtcttctaaaaaattaacattaaacagaacatttataaagtctaacaagacactgatgtacctggcagtagctacctatatccagaggaaaatrcatgtagcttctatgaggccagctgagcaactctcagtgtataaaattacagaatatactagttatccttggtcaaaagtacaaaatccatatcctaagt

SEQ ID NO: 302547 - DNA, 201 bp, Homo sapiens
ccaggagaatcgggatccattctgtcgcatctttgtggctccacagcaccttgccccgcaacaagagctgtcttaaaaacagcaccttaccccgcaacaarcgctgtcttgtatgggattaatcagccttgcagatcactgcccctccctgctccgttccctcaaaaccatttttgtgcttactaccccaatcaagtaggg

SEQ ID NO: 302548 - DNA, 201 bp, Homo sapiens
ggaaatgggcagtaactgcagggggaaggcagggccgggatcaggactcttcagacttttatttcctgactggcattacagagagaagccatgaactgatycctccacagtgtctggggctttacagactatctccatcttacctctgaattaataaagggggaatattattccccttcctcaccacctgcctctctcacc

SEQ ID NO: 302549 - DNA, 201 bp, Homo sapiens
agatttccttttcaggactttagtatgatttttgaacattacaatcagaatggttaagaatgaaactttatccctcatttcaactctaatttggataacartgctgtaaacttgggcttcttttatgaagagattctttaaaaatttttcttagttatttactatgggaatatggcaaattattccagaactatagggaac

SEQ ID NO: 302550 - DNA, 201 bp, Homo sapiens
ttgcttttcccttttaatggttgctctggggttttacagtatacatttttaacccatcacagtctattttctttctttctttttttttttttttttgagayggagtcttgctctgttgcccaggctggagtgcaatggtgtgatcttgactcactgcaatctctgcctcccaggttcaatcaattctcttgcctcagcctc

SEQ ID NO: 302551 - DNA, 201 bp, Homo sapiens
aagccccgaacttctgggctcaagcaatctttccacgtcagcctctcgagtagctgggactacagtcatgcaccaccatgcccagctaattaaaaaaaaarttctttttgtagagacaaggtcttaccatgttgcccacgctggtctcaaacccctgggctcacgtgatcctcccacctcagcctcccaaagcactggaat

SEQ ID NO: 302552 - DNA, 201 bp, Homo sapiens
gagacaggaggatcgtttgaacctgggaggcagaggttgcaatgagctgagatcgcaccattgtactccaccctgggcggcaagagtgaaactccatcttaaaaaaaaaaaaaaaaaaattgccagtctgatgcatctcattttaatttgcattgccccagttattagggaaattgaacatctttttattattattattat

SEQ ID NO: 302553 - DNA, 201 bp, Homo sapiens
acgcctataatcccaacactttgggaggctgaggcggatggaacacgaggtcaggagttcaagaccagcctggccaagatggtgaaaccccatctctactaaaaaaaaaaaaaaaaaattagccaggcgtggtggtgggcgcctgtaatcccagctactcaggaggctgaggcagagaattgcttgaacccaggagacaag

SEQ ID NO: 302554 - DNA, 201 bp, Homo sapiens
cactccattggcctctattgcctgatgatttgaagtggaacagtttcatcctgaaaccactccctcccaccccacccccagttcttggaaaaattgccttycacaaaacctgtccctggcgtcaaaaaggttggggactgctggactaggagcaataggctatcccatatagcctagatgtgtagcaggctctgccatctg

SEQ ID NO: 302555 - DNA, 201 bp, Homo sapiens
taaatatctaaaagcattttattttacagaattgacagcgtatgccatgactattccatttgtcaggcaacaggtttacaaaaaagtggaagaaaaagtgygaaagcagactaaaggcctttatcctgcacctctgaaaataattgatgtgagtcttacccaatattcccacttttctcatatttccttcctttatataga

SEQ ID NO: 302556 - DNA, 201 bp, Homo sapiens
tcttctaaaaaattaacattaaacagaacatttataaagtctaacaagacactgatgtacctggcagtagctacctatatccagaggaaaatgcatgtagyttctatgaggccagctgagcaactctcagtgtataaaattacagaatatactagttatccttggtcaaaagtacaaaatccatatcctaagtgtgttcac

SEQ ID NO: 302557 - DNA, 201 bp, Homo sapiens
gcagattttttccatgccaataaatgtttgtagacctatttgtttatagcctacatatgattcaaactctgaggatgaccctgagtttctcctttgagaaracctatttttaaaggaaggggtgcttgtagtgggccaaagctgcctgaatagaaagctactgacttgctgggagaatgatatttcttactctcttctaac

SEQ ID NO: 302558 - DNA, 201 bp, Homo sapiens
aagtctccctcaaaatgggagtaatagaataactacctcacagagttggtgaaaaacacaggtgtgctctggcccatggacattcaataaacgttagtttccttttcttcccatctaactaggaatgtgttttttctagattgaatgacaaagtgaagaagaaagctctaacatcatttgaaagggattccatcttcagca

SEQ ID NO: 302559 - DNA, 201 bp, Homo sapiens
ggcgtgtgctgtcaggcccggctaatttttgtattttctgtagaggcaaggttccattatgttgcccaggctggtctcgaactcctgaactcaagtgatcygcccaccttggcctcccaaagtgcagggattacagggatgagccaccatgcctggcctatatgtcttatttgtatttcatttttttcttaacattatgca

SEQ ID NO: 302560 - DNA, 201 bp, Homo sapiens
agataatgacgagtagaattactatgttatacagtatgcagttcttggttttaacaaaaccaaagaacccccccaaaagtaggacaaagtatacttccgtsaaccatgcatgaactaattttttgtacatcctaactgatactttaaaatttttggccaggtgtggtggcttacgcctgtaatcccagcactttgggattc

SEQ ID NO: 302561 - DNA, 201 bp, Homo sapiens
cgggcatggtggcacacacctgtagtcccagctatttgggaggctgaagcaggagaatcactggaacctgggaggcagaggttgcagtgagccgagatcaygccactgcactccagtctgggtgacagagcgagactccatctccaaaaaaaaaaaaagactttttgttatcaaacgttaagtttttatgtgtgctcatgc

SEQ ID NO: 302562 - DNA, 201 bp, Homo sapiens
ggtggttgactaccgcttgcttctagaatcaaggagaagctgacctaaatcaacctgctcttccacggaatcagtattctgagactgaacgccacctgacrgatggatgactagctgcagtaaagtcagagcagaagccagggtgctagagtcatctgggcagtgtctggcttcctaactagataagtgggtcgggtcaat

SEQ ID NO: 302563 - DNA, 201 bp, Homo sapiens
cagttgttcgaattaactctcccaattcaaaggtatctcatttaatttgcagtttttttctgctaaccgcattatgaatctagtcctgaatgggaaagatstatcccatatttccccaaatctaccaatctggcagtaatcttacatgaatttacagttttgacagttatgttaaactttgacagattgccaagggagcca

SEQ ID NO: 302564 - DNA, 201 bp, Homo sapiens
tgagatgtcatctctgggaactcacacttcttcctcattaaaaaacataaaacctcattgtaattgttaaaatcttgtccttcttttagcttacaacctamgtattggaaagtctgtttgcctctttcatgtgtattgccataagccagcctttttccatattacgctgcctaatagctcttcagagtctatgtttaatga

SEQ ID NO: 302565 - DNA, 201 bp, Homo sapiens
gaagcaggagaatcactggaacctgggaggcagaggttgcagtgagccgagatcatgccactgcactccagtctgggtgacagagcgagactccatctccaaaaaaaaaaaaagactttttgttatcaaacgttaagtttttatgtgtgctcatgcacactgcatatgttataaaggtcaaatctaaattctaaaggaaga

SEQ ID NO: 302566 - DNA, 201 bp, Homo sapiens
aataatcatctgacctaacaactgaaatggaaaaaatatggcagtagtcatatggcctagaatacattgtacagatttggggtttttgttgttgttattawtgtaaattacagctttgttatatataaaaggtactacagaaattgtttcgcaaattaattttgaaatgtcttttcttacaggttatatatgccgcaattt

SEQ ID NO: 302567 - DNA, 201 bp, Homo sapiens
ttaggtacccctgaagttttgctgggggccttaccaggagcaggaggcacacaaaggctgcccaaaatggtgagtctaacatcccctttgtgaagctataygccctctttagatctgttttcttgtataaaatgcataatatgggcattcattgtagaattaaaaaaccaaataaaatatgagtgtacaggatcagtgaca

SEQ ID NO: 302568 - DNA, 201 bp, Homo sapiens
tcaagcagtattcctatatcacagccacctttctttctagtgttttcctagcagagaaggaatgctctcaggttcctcacccgcattctccgatctgttgrcttttggttccccttgccaggtgattggcatgcactacttctctcccgtggacaagatgcagctgctggagattatcacgaccgagaaaacttccaaaga

SEQ ID NO: 302569 - DNA, 201 bp, Homo sapiens
acagtattaggtacccctgaagttttgctgggggccttaccaggagcaggaggcacacaaaggctgcccaaaatggtgagtctaacatcccctttgtgaasctatatgccctctttagatctgttttcttgtataaaatgcataatatgggcattcattgtagaattaaaaaaccaaataaaatatgagtgtacaggatca

SEQ ID NO: 302570 - DNA, 201 bp, Homo sapiens
attatcacgaccgagaaaacttccaaagacaccagtgcttcagctgtagcagttggtctcaagcaggggaaggtcatcattgtggttaaggtaaggggctstataacagagctgcagagtttttgaaaagttctaataagactccttttacctccaggcttgtttataaatattctggggcaaatgaccagactttgatat

SEQ ID NO: 302571 - DNA, 201 bp, Homo sapiens
aaaatcagcattattgagatattacttacataatagtaaatgtattaattttgtgtgtgtgtgtgtgtgtgtgtgtgtgtgcgcgcgcgcacatgttgggktctcactctgttgctcagactggaatatggtggtgtgaatatagcttgttgcaacctcaactttttgggctcaaatgatcttcccacttgtgccccccga

SEQ ID NO: 302572 - DNA, 201 bp, Homo sapiens
taatttctcactagaatatagaaatacaaagatttttggacatggaccttgtatcttgtggtttagctaaattcatttactagttctagtagccttttttwttaatagattcctgaggattttctacatagataattatgttgtctgtaagtaaagacagtttgacttctttctttccaatatagatgtcatttgtttctt

SEQ ID NO: 302573 - DNA, 201 bp, Homo sapiens
taggtctttaaatttctctcagcagtgtttggtacttttcagtgaatagatcttgaacacattttgttaaatttatgcctaggtatttcatacttgcaggytgttttacttttttaactttaatttctcactagaatatagaaatacaaagatttttggacatggaccttgtatcttgtggtttagctaaattcatttact

SEQ ID NO: 302574 - DNA, 201 bp, Homo sapiens
caactctcagtgtataaaattacagaatatactagttatccttggtcaaaagtacaaaatccatatcctaagtgtgttcacaaaatagcaaatgaaacaarctgaaattaaaggacattgagtggaacatcattgcacctgatcatttttatttacttatttatttttgagacggagtctccctctgctgtccaggctgga

SEQ ID NO: 302575 - DNA, 201 bp, Homo sapiens
ggaaggggtgcttgtagtgggccaaagctgcctgaatagaaagctactgacttgctgggagaatgatatttcttactctcttctaacagtatatttctgcyggataagtatatttcttataatcaaaatagcatttgatggtggtacgtacatccagtgcttcaaatttaaacccttacctgtatatatttccctttggca

SEQ ID NO: 302576 - DNA, 201 bp, Homo sapiens
tattcagctgatgtggaaagagaactgagctatcaaatatcagagtaaataattaaacaacccaaaaggaaagtaacagtggagcctttattcacttactktgatagtttacacaaaaggctaaaaaccaaagaaagtgccagctcctttttccccccagtaccgttttccccatggaatggtacactggttgaggatctg

SEQ ID NO: 302577 - DNA, 201 bp, Homo sapiens
aatgcctgtgcggtaatcaggcagcacgggagcagcatgaggagtgctgacccccacagcacctgcactcccccaaagcttcagcccctccccaccccacyccctgggatggaaagttcctacagaagcagtgcccagtctgggtaaacagcactggggctaactgggtctggcagaaggatccacgctgagtgtgtgcgg

SEQ ID NO: 302578 - DNA, 201 bp, Homo sapiens
ataacctagactgtgaagttctaccttttctcattcccctttacttttcagaaatttggagagcttgtaatgaccaaagaatcaaaggccttgatgggacyctaccatggtcaggtcctgtgcaagaagaataaatttggagctccacagaaggatgttaagtaagttaaactctacgtaggaagcccttgtgaattttac

SEQ ID NO: 302579 - DNA, 201 bp, Homo sapiens
gatcctcctgcttcgcccagctaatttttgtatttttagtagagatggggtttcaccatgttggccaggctggtctcaaactcctgacctcaaatgatccyccgcctcggcctcccaaagtgctgggattacaggcgtgagccaccacgcctggccaggccagggttctgagaacaaatagtaacactccctccctgagaa

SEQ ID NO: 302580 - DNA, 201 bp, Homo sapiens
attttaagtcaccttaagttttacagtgactttcaaatgactttgaagtgaccctgggaaaggtagagtgtttcagactcagtcccagcagcagggccagkgagctcatgttctcttccttggcaggatggacctggcttctatactaccaggtgtcttgcgcccatgatgtctgaagtcatccgaatcctccaggttggt

SEQ ID NO: 302581 - DNA, 201 bp, Homo sapiens
taaagtgagagggagaaagcaaaactataaattaatgaattagacttctttcaccacagttctgttgggaagactatgtaactgttagctcaatgaggggkttctctgaaaccttagcacgcatcagaatcaccaggagggattattaaaacaaatctgggccccacccatggagtttctgattcagtagggctgggctag

SEQ ID NO: 302582 - DNA, 201 bp, Homo sapiens
caggggtgtcagcccccagaagggaggcggctcgaccgctcagaggctctgtgagggcccgggaggcctggctgggctgtgtggttgagggtaggggaccrggggctgggcggctagaggactcgcccaccttgcagtctccccaggtgcatgggtagcaatagagggagtaggtgtccggcgatggggagccactgccac

SEQ ID NO: 302583 - DNA, 201 bp, Homo sapiens
gccctccaagtatctaggacagcttttctcacctgcttgccttttgtcattcatttaaaagtaaggccaaaaagacaaaatagggtgaccaaccatcttgrtttgcccgggagcaagggatacaggaccctcagtgccacaaattgggaaatccccagccatccaggatgagttggtcatctttggcacaactttctgagt

SEQ ID NO: 302584 - DNA, 201 bp, Homo sapiens
caaaaaatatccttttcaaggatcccaaatgggcattatttttcaggttcaggatataaagcccacctgtatcctagaattaggcattgaaggataggccytaagaaaggatgctccaaaataccagtttggctacagagcagagtcagtgactgtttagaacaggtttggttccacctccagatcagggaatggcaggaa

SEQ ID NO: 302585 - DNA, 201 bp, Homo sapiens
tcacaatatatgtttttgttgaatgaataacagattatgttggaaaagattacaatgtggttggtgaaacacctgctacagatgcagcagttagaggacaraacattaaataataaaataaaaatgcaggcaaggaaaggaaggatcactgtagacagaatccgaagatgaggttttgtggaaaagactggagtcatgatg

SEQ ID NO: 302586 - DNA, 201 bp, Homo sapiens
gcattgattgtgttgtcattttatgttcttttgggtcatgaaagcaactttattagagggattcttttgaaatgctctttgtaaccatgcaatcttaccaktatatcctagtgatattaataatagctaaccttgagaccctggtcattttactagtgttctcatttaatcccccagaacaatactgtaaaatgggtattg

SEQ ID NO: 302587 - DNA, 201 bp, Homo sapiens; identical to SEQ ID NO: 63036

SEQ ID NO: 302588 - DNA, 201 bp, Homo sapiens
ccaagtgcacataaacatacgtacagaaaaattgaggaataagtttcacgaatcagtaactgtcctgtgtgcattgtgctcagtattttctgtgtattcckctttttatatatgtaatgcttattggcacccactaaatttctgaccattgatgaatcttttgcccatgtttgaaaatcactggtttattagataaaacat

SEQ ID NO: 302589 - DNA, 201 bp, Homo sapiens
aattcaggaattcagaagaggccagagctttataatagaccaacagagacaagaattctcaggtcagggtcttttttgtttgttttttgtttttttttgasacagagtctcacactgttgcccaggctggagtgcagtggcataatctcgtctccacctcccgggttcaagcgatcctcctgcttcgcccagctaattttt

SEQ ID NO: 302590 - DNA, 201 bp, Homo sapiens
aaggccctcgcacgtgctccttggtctctgcccagcatctaggtgagaaccaggccacgtctggtgaaggccctcccctgctccagccttctctggcaagktcccagagagccgctggaaggacagattctccttggccccttcaccctcccagatctttattatcatttgtgagcagctgactgttgctgatgtcaaaga

SEQ ID NO: 302591 - DNA, 201 bp, Homo sapiens; identical to SEQ ID NO: 63040

SEQ ID NO: 302592 - DNA, 201 bp, Homo sapiens; identical to SEQ ID NO: 63039

SEQ ID NO: 302593 - DNA, 201 bp, Homo sapiens
ttgtacccactaaaagacgaagacagaagagatgtatgtaccagctttacctgtgtacttttctagcaacttggtgatgttgcagatttaagtgatttgtstttgtttttaagttttaaacgatcatcgaagaatggttgctcttttataaagttgaatatctcttatccaaaatgtttgggactagaaacatttcagatt

SEQ ID NO: 302594 - DNA, 201 bp, Homo sapiens; identical to SEQ ID NO: 63041

SEQ ID NO: 302595 - DNA, 201 bp, Homo sapiens; identical to SEQ ID NO: 63042

SEQ ID NO: 302596 - DNA, 201 bp, Homo sapiens
tcttttttctttccagttttgcagcaagaatgcaggttgcagtagacataatgcattccttttgtgtgtgttacatactacattctactcagaagtggaarccaaatgaaacagttaaagaccgcgttttctacctagagcatattgtttctcctctattcattgtgatttcccttctttgacttcttggtttatgacttt

SEQ ID NO: 302597 - DNA, 201 bp, Homo sapiens
atttagctgggcacagtggcatgcacctgtaatcccaggtactcgggaggctgaggcaggagaatcgcttgaaactgggaggcagaggttgcagtgagccragatcacactgctgcactccagcctaggttacagagtgagactccatctcaaaaaaaaaaaaaaaaaaaaaataggtcaaatgtcttaagggagagattg

SEQ ID NO: 302598 - DNA, 201 bp, Homo sapiens
tgtgggtgccgccacactggtggatgaagttggtgtggatgtagcgaaacatgtggcggaagatctgggcaaagtctttggggagcggtttggaggtggaracccagaactgctgacacagatggtgtccaagggcttcctaggtgagtagcctcaaggaaacataactagcaccattagttacaaagttctaagcagttc

SEQ ID NO: 302599 - DNA, 201 bp, Homo sapiens
aactcctgacctcaaatgatcctccgcctcggcctcccaaagtgctgggattacaggcgtgagccaccacgcctggccaggccagggttctgagaacaaayagtaacactccctccctgagaacaaatagtaacactcccttttcttgcctgttttaggtcgtaaatctgggaagggcttttacatctatcaggagggtgt

SEQ ID NO: 302600 - DNA, 201 bp, Homo sapiens
tatttaggtctttaaatttctctcagcagtgtttggtacttttcagtgaatagatcttgaacacattttgttaaatttatgcctaggtatttcatacttgyaggttgttttacttttttaactttaatttctcactagaatatagaaatacaaagatttttggacatggaccttgtatcttgtggtttagctaaattcatt

SEQ ID NO: 302601 - DNA, 201 bp, Homo sapiens
cctcctgcttcgcccagctaatttttgtatttttagtagagatggggtttcaccatgttggccaggctggtctcaaactcctgacctcaaatgatcctccrcctcggcctcccaaagtgctgggattacaggcgtgagccaccacgcctggccaggccagggttctgagaacaaatagtaacactccctccctgagaacaa

SEQ ID NO: 302602 - DNA, 201 bp, Homo sapiens
gactgaaatgattaagatcagtttaccgaaagtcatttcatccttgccttgcaggcatctggctattcttggtgcagggctgatgggagcaggcatcgccyaagtctccgtggataaggggctaaagactatacttaaagatgccaccctcactgcgctagaccgaggacagcaacaagtgttcaaagggtaagcctgctc

SEQ ID NO: 302603 - DNA, 201 bp, Homo sapiens
taaatgccagcctaaggaatttcagtttattctgtgagcacattcctgctttataaataatctttagacccttatccatctcaagttgctactaagttacrttttctaacattctaattttctttcatttgttcaaaggttgccatttcatgccaatacagaatagcaacaaaagacagaaaaacagtattaggtacccct

SEQ ID NO: 302604 - DNA, 201 bp, Homo sapiens
agcagactaaaggcctttatcctgcacctctgaaaataattgatgtgagtcttacccaatattcccacttttctcatatttccttcctttatatagatcastcctccttattgccattctggaccatgtatgttgagtactaaatttcttaattctgctattaaagtatttaccaaaaataagggaagggcatagcaagct

SEQ ID NO: 302605 - DNA, 201 bp, Homo sapiens
acctctgaaaataattgatgtgagtcttacccaatattcccacttttctcatatttccttcctttatatagatcactcctccttattgccattctggaccrtgtatgttgagtactaaatttcttaattctgctattaaagtatttaccaaaaataagggaagggcatagcaagctgtaaggactcatataaagtgatata

SEQ ID NO: 302606 - DNA, 201 bp, Homo sapiens
ctcaactcttgcagtttcagtaatgtcagtgtgaacgtatagtattttgaatttcagcgggaagttctgcaacttactggaagacacactttaaaaatacrctaatacctctaccttaagcaataaaatgttagatcgttctgagaacgatttgtaatctgatgattcccagtcagcctgtattagctagtgtttttcctt

SEQ ID NO: 302607 - DNA, 201 bp, Homo sapiens; identical to SEQ ID NO: 63045

SEQ ID NO: 302608 - DNA, 201 bp, Homo sapiens
tccgggctttaccatgctgtctggccacctgtgaggagaatgtataagctcaccatacacagtatacagttgaggcccacagagaagtgactttctgtctyggcaaaacagcaaaatcagcattacaacctgggtgttctaggacccggtgctgcatatggggatgttaaaactcacccaggtggcctttctcatccatgt

SEQ ID NO: 302609 - DNA, 201 bp, Homo sapiens; identical to SEQ ID NO: 63046

SEQ ID NO: 302610 - DNA, 201 bp, Homo sapiens
cccctaggtgatccgtcaatgtctgggtgagtgacatctactgtctgagcagttgtgggggacagagtgggctgggcccaggtgtcactcattagctttgmtgtggcctctaatcatctcccaggcctacctgacacattgttaaatgcttttcccctgcaggtgattccagatcactgtatctttgccagtaacacatct

SEQ ID NO: 302611 - DNA, 201 bp, Homo sapiens
gaagcaagctctgcatccgggctttaccatgctgtctggccacctgtgaggagaatgtataagctcaccatacacagtatacagttgaggcccacagagargtgactttctgtcttggcaaaacagcaaaatcagcattacaacctgggtgttctaggacccggtgctgcatatggggatgttaaaactcacccaggtggc

SEQ ID NO: 302612 - DNA, 201 bp, Homo sapiens
tcagaaatttggagagcttgtaatgaccaaagaatcaaaggccttgatgggactctaccatggtcaggtcctgtgcaagaagaataaatttggagctccamagaaggatgttaagtaagttaaactctacgtaggaagcccttgtgaattttactgtgtgcaaagttcacagaggctttgaagatctacagagctagatct

SEQ ID NO: 302613 - DNA, 201 bp, Homo sapiens
gtagtctccaggtcaggataaggtgaccttatgatgggccataactagaggaaggcagaatgggaaaaggaacaaggtcaacatattccccgacacaaaascccctaggtgatccgtcaatgtctgggtgagtgacatctactgtctgagcagttgtgggggacagagtgggctgggcccaggtgtcactcattagctttg

SEQ ID NO: 302614 - DNA, 201 bp, Homo sapiens
atgagggtgcgttcaccttattcatgtaggagctctgtcacccaaacatacagataacctcacagagtatagccagatgctttgagattttttggttagcygaaagccaaaaacaaacctcttcaggtctaaggctgcaaaggaaatagggaagacagttcgtccagatgcttgttctgtggaaatgctgctttggcccag

SEQ ID NO: 302615 - DNA, 201 bp, Homo sapiens
ctcctaagtctgaagtgtaagtccgtttgagtggctaatgcctggaaattgactttctctgacagcccaaagcttcccagcccctcttccatttttttttkttttaatactttaagtcctgggatacatgtgcaggtttgttacataggtatacacgtgccatggtgctgtcttccattttctttgtgaccaccatacctg

SEQ ID NO: 302616 - DNA, 201 bp, Homo sapiens
gcaaaatcattcttaaccttctatttgaagatttgtcatcaaatattgatgcatgataggataagtgtatagtgaataagtattgaaccaaataaattatmgttttatctttttctctgttctctacttttatggataatgcagcatgttagccgcttgcaagacccttcaagaagtaacacagctatcacaagaagcaca

SEQ ID NO: 302617 - DNA, 201 bp, Homo sapiens; identical to SEQ ID NO: 63052

SEQ ID NO: 302618 - DNA, 201 bp, Homo sapiens
aaagttgtcacccatgaaccaggacccacaggtggagcctctgaggtgccatgggttaggcttgtacacgactcacctgtgtgcggggccaggccccaccyccctcaaccacggtggagcagagggggaagggaaaggcatctcacagacacagacatctacaccctcactctggggcagctttaggccaaaagccaacag

SEQ ID NO: 302619 - DNA, 201 bp, Homo sapiens; identical to SEQ ID NO: 63035

SEQ ID NO: 302620 - DNA, 201 bp, Homo sapiens; identical to SEQ ID NO: 63037

SEQ ID NO: 302621 - DNA, 201 bp, Homo sapiens
aagagacaaagaagaacagggccgtggggtattttggctacttcctcatgcagcttgtgcctttagggtctgtttaagcccagtcttacatataccacttscatttgataatggagtgctaccgtgtacaccccactttatggcttagtaggttagacaacatctgtttcatgatcagcagctcaggtcaccagtaacttg

SEQ ID NO: 302622 - DNA, 201 bp, Homo sapiens
ttaaaggccctatccccaattacagtcacattctgagatactggaggataggacttcaacatatgaatgaggtaggggggacacaattcagcccataacamcttgccaacagtttttcatctgtgttccctgtaagttccttaccacccaggcaaaccgtttgccacggcctatgaatcagagtagacccttagctcaggc

SEQ ID NO: 302623 - DNA, 201 bp, Homo sapiens
agtctccctctgctgtccaggctggagtacagtggtgcgatctcggcccactgcaacctccacctcccaggttccagtgattctctcgcctcagcctcccragtagccaggactacaggaatgcagcaccacgcccagctaatttttgtatttttagtagagacgcggtttcaccatgttgaccagcctggtctcgaactc

SEQ ID NO: 302624 - DNA, 201 bp, Homo sapiens
ttttcttcttcctgctttcttttggattaataattttttattggccgggcacagtggctcacgcctgtaatcccagcacttcgggaggccgaggtggacaratcacgaggtcaggagatggagaccgtcctggctaacatggtgaaaccccatctctactaaaaatacaaaaaattagcctggcctggtggcacatctgta

SEQ ID NO: 302625 - DNA, 201 bp, Homo sapiens
cttttttcttcttcctgctttcttttggattaataattttttattggccgggcacagtggctcacgcctgtaatcccagcacttcgggaggccgaggtggrcaaatcacgaggtcaggagatggagaccgtcctggctaacatggtgaaaccccatctctactaaaaatacaaaaaattagcctggcctggtggcacatct

SEQ ID NO: 302626 - DNA, 201 bp, Homo sapiens
tccctggcatctcttttgtgtttccaaattttttcttctcataaggataccagtcagattagattagggtacaccctaatggcctcattttaacttaatcrcttctttaaaggccctatccccaattacagtcacattctgagatactggaggataggacttcaacatatgaatgaggtaggggggacacaattcagccca

SEQ ID NO: 302627 - DNA, 201 bp, Homo sapiens
tgggctcctgagaacgcagcagctcaggctctggagaactgccctgccccagctcaaagggatcgaagggctccaggactggttcctgccattcagaagargaggaggaggagggggcgcaggaggaggggggagcagctgaataggcctggcctggcgaggctgggcctggggaatacgcagggccagaggtagccacag

SEQ ID NO: 302628 - DNA, 201 bp, Homo sapiens
tcctcctgcttcgcccagctaatttttgtatttttagtagagatggggtttcaccatgttggccaggctggtctcaaactcctgacctcaaatgatcctcygcctcggcctcccaaagtgctgggattacaggcgtgagccaccacgcctggccaggccagggttctgagaacaaatagtaacactccctccctgagaaca

SEQ ID NO: 302629 - DNA, 201 bp, Homo sapiens
aatctcgtctccacctcccgggttcaagcgatcctcctgcttcgcccagctaatttttgtatttttagtagagatggggtttcaccatgttggccaggctrgtctcaaactcctgacctcaaatgatcctccgcctcggcctcccaaagtgctgggattacaggcgtgagccaccacgcctggccaggccagggttctgag

SEQ ID NO: 302630 - DNA, 201 bp, Homo sapiens
taggccaaatggtccaggctcggtggctcacacctgtaatcctagcactttgggaggccgaggtgggcagatcatttgaggtcaggaattcaagaccagcytggccaacatggtgaaaccccatctctactaaaaatagaaaatttagctgggcacagtggcatgcacctgtaatcccaggtactcgggaggctgaggcag

SEQ ID NO: 302631 - DNA, 201 bp, Homo sapiens
aggactatagattatggacaaaaggcagagttctacccttctggggctctagcatcacctggtccaagttatgccagatggacaagcatttttatcccccmgagatgaaatctgcaatagtgcagaagcaagctctgcatccgggctttaccatgctgtctggccacctgtgaggagaatgtataagctcaccatacacag

SEQ ID NO: 302632 - DNA, 201 bp, Homo sapiens
gattggcatcctcagccgcttttctgccttcaggatcctccgctcccgaggtgaggcctggccgagggcatcccagacctccgggcagaactcctgccggkactggggtggccccggagccgcgtctccctttcgctgccgcctgccccagcccggagacgcagccctctgtggggatactgccctgggacccggtttccc

SEQ ID NO: 302633 - DNA, 201 bp, Homo sapiens
tccctgctgttaatccaatcccatgtgattcactttttttttttcagacggggtcttgccgagtctggtccttgagctactgggctcaagtgatcctctcrcctcagtctcctaagtagctggggttgattcacttttatatcttcagtttctcttcattatcgtcctgttttcctctaccttctgtaacatacagcatga

SEQ ID NO: 302634 - DNA, 201 bp, Homo sapiens
ttatatttattgaaaatcagcattattgagatattacttacataatagtaaatgtattaattttgtgtgtgtgtgtgtgtgtgtgtgtgtgtgcgcgcgcrcacatgttgggttctcactctgttgctcagactggaatatggtggtgtgaatatagcttgttgcaacctcaactttttgggctcaaatgatcttcccact

SEQ ID NO: 302635 - DNA, 201 bp, Homo sapiens
agcctctcgagtagctgggactacagtcatgcaccaccatgcccagctaattaaaaaaaaaattctttttgtagagacaaggtcttaccatgttgcccacrctggtctcaaacccctgggctcacgtgatcctcccacctcagcctcccaaagcactggaattacaggcatgagccactgtgcccagctgtcattcttttc

SEQ ID NO: 302636 - DNA, 201 bp, Homo sapiens
tactgtctgagcagttgtgggggacagagtgggctgggcccaggtgtcactcattagctttgatgtggcctctaatcatctcccaggcctacctgacacaytgttaaatgcttttcccctgcaggtgattccagatcactgtatctttgccagtaacacatctgctctcccaatcagtgaaatcgctgctgtcagcaaaag

SEQ ID NO: 302637 - DNA, 201 bp, Homo sapiens
ggggtttcactatcttggccaggctggtctcaaactcctgtcttcaagtgatctgcctgccttggcctcccaaagtgctggattacaggtgtgagccaccrcacctggccggttttcaattgataatattttcctgtggtgtcagaaccttaaaagagtatgcatttattttgtatactccccatttttgctattgttgtt

SEQ ID NO: 302638 - DNA, 201 bp, Homo sapiens
caccccccagcatgtcttctatgctgtttctgcacctctctgaggcagggaccatccagaacagggcccgcttggttcaactggtgctgcatctgtttccrcagcacacagacctctccagtagccatcgaggtcattctggcaggaaaggagagggatcctcctcgctgggcacttacccagacttggggatcacagggc

SEQ ID NO: 302639 - DNA, 201 bp, Homo sapiens
gcctaatagctcttcagagtctatgtttaatgatgcaacttgtagctctgtggttctcagcgtggacaattttgcctcccagggggacatttgacaatgcytgggaacatttttggttgtcacaactagggagggagggatgctactggcatctgtgggtggaggccagggatgctgctaaccatcctataatgcacagat

SEQ ID NO: 302640 - DNA, 201 bp, Homo sapiens
aggttcctcacccgcattctccgatctgttggcttttggttccccttgccaggtgattggcatgcactacttctctcccgtggacaagatgcagctgctgsagattatcacgaccgagaaaacttccaaagacaccagtgcttcagctgtagcagttggtctcaagcaggggaaggtcatcattgtggttaaggtaagggg

SEQ ID NO: 302641 - DNA, 201 bp, Homo sapiens
ctggtttaagagtgatttagtttacgtaaattgggcatttggaggcattctatggtagaaagaatgtgtacttgggagttaacatgtctttgaatgctagyaccctcccttatcaagctatttgaccacaggtccctctaagactaaacaacttgaaagtctccctcaaaatgggagtaatagaataactacctcacagag

SEQ ID NO: 302642 - DNA, 201 bp, Homo sapiens
ttttttccttatgatgacccttgagtcatagaaaacttttcattttagaaaatgttaagcatgaacacaaaaagactagataacagtgttataaacactcrtgtacccaaggcccagctttaacattcatcacttagcatgtttaaggtagtgcttaggttgaaatttatattgtgtgtatcagaataaagagcagttctt

SEQ ID NO: 302643 - DNA, 201 bp, Homo sapiens
taagcaaatataaaccatgtggtctcagacacacgttggctgcttcccctgtcataggtagagaattaccagaactcctcttttgttttgccattctagtrttcatgttatttactcctcttggcaaatttaactggtttaagagtgatttagtttacgtaaattgggcatttggaggcattctatggtagaaagaatgtg

SEQ ID NO: 302644 - DNA, 201 bp, Homo sapiens
tcaaaaaataaataaaaaaaaaaaaagattacaactacagaataacataaaattatatatttgcgataagcaaatataaaccatgtggtctcagacacackttggctgcttcccctgtcataggtagagaattaccagaactcctcttttgttttgccattctagtgttcatgttatttactcctcttggcaaatttaact

SEQ ID NO: 302645 - DNA, 201 bp, Homo sapiens
caaaaattaggcatggtggcacacgcttgtaatctcagctactcaggaggctgtggcacgaaaatcccttgaacctgggaggcagaggttgcagtgagccragatcacaccactgcactccagcctgggtgacagagtgagactgtcttaaaaaaaaaaagtatatacacacacacacacacacacacacacacacacaca

SEQ ID NO: 302646 - DNA, 201 bp, Homo sapiens
tagagtgcagtggtgtgatctcagctcactgcaaccttctcctcccaggttcaagcgattctcctgcctcagcctccccagtagctggaattacaggcgtrcaccactgcacccagctaattttttatattttttagtagagatggagtttcgccatgttggccaggctggtcttgaactcccgacctcaggtaatcctcc

SEQ ID NO: 302647 - DNA, 201 bp, Homo sapiens
gccactattctgacttgtgtgttcattaccctcttatatttattgaaaatcagcattattgagatattacttacataatagtaaatgtattaattttgtgkgtgtgtgtgtgtgtgtgtgtgtgtgcgcgcgcgcacatgttgggttctcactctgttgctcagactggaatatggtggtgtgaatatagcttgttgcaac

SEQ ID NO: 302648 - DNA, 201 bp, Homo sapiens
cttcattactggccttttactttgcttttcccttttaatggttgctctggggttttacagtatacatttttaacccatcacagtctattttctttctttctttttttttttttttttgagacggagtcttgctctgttgcccaggctggagtgcaatggtgtgatcttgactcactgcaatctctgcctcccaggttcaat

SEQ ID NO: 302649 - DNA, 201 bp, Homo sapiens
cttctactgactaattagaggtcatgttagtactaagggacaccctaagagatctgccacatttgagacatactcttccttacctctgttgtatagtagcracctaatatccccttggtaatcaggattaatcaccccagccagtacagtacccgccctctgctgcctgttgattccaaggcatgaggagcccaaagtggc

SEQ ID NO: 302650 - DNA, 201 bp, Homo sapiens
taaaaatacgaaaattagccaggcgtggtggtacatgcctgcattcccagctactcaggaggctgaggcaggagaatcacttgaacccgggaggcagaggytgcagtgagccgagattgtaccattgcactccagcctgggcgacagagtgaaactccatctcaaaaaaataaataaataaataaaagatttccccttcct

SEQ ID NO: 302651 - DNA, 201 bp, Homo sapiens
gccatgactattccatttgtcaggcaacaggtttacaaaaaagtggaagaaaaagtgcgaaagcagactaaaggcctttatcctgcacctctgaaaataawtgatgtgagtcttacccaatattcccacttttctcatatttccttcctttatatagatcactcctccttattgccattctggaccatgtatgttgagtac

SEQ ID NO: 302652 - DNA, 201 bp, Homo sapiens
aaaaacagttaacctcttgaatatcacaggaagcacagagagaagctcaaactcttaagaaatgagtcattattctaaggaaggaagttttataaaatagytaatactaaatcattttcaacatcaccctgatttttattttgctttataattagaacattaggagtacagaattcagtcaagtcattatttttggttctt

SEQ ID NO: 302653 - DNA, 201 bp, Homo sapiens
gcggatcacctgaggtcaggtgtttgagaccagcctggccaacatggcgagaccctatctctactaaaaatacaaaaattagccaggcatggtggcgtgcrcctgtaatcccagctacttgggaggctgaggtgggagactatcttgagcccaggaagcacgttgcaccactgcactccagccctccagccttggtgatgg

SEQ ID NO: 302654 - DNA, 201 bp, Homo sapiens
atttgttcaagagttggtccaatggatattcctagaagttgacgtccatatggcaggaatgaaacttgtttttctctaacgtgttgaatgtgtttttagtyatttaagaaaattaccttaattcttctgaaaagttgaaaactttaattacagatgttgtacaaagctgataactgtcattcagctttttaatcaagaagc

SEQ ID NO: 302655 - DNA, 201 bp, Homo sapiens
  misc_feature (1)...(201): n = A,T,C or G
tgaaaaataaatggactcctgacttttaatattgacctagacttactttcttttgcagtaaaattatttgtaatatgtctgacgttacgtattttcctctntctctcttacttcgtagtactaagagcctagcttgattctgatcttaagtaaacttatctttacatttgtgtctttgggggagccaggttggattgcctc

SEQ ID NO: 302656 - DNA, 201 bp, Homo sapiens
ggtgagtaaaacaaactttatgttgtttaaagagtgataggagaatcactttgaatttcaattaatagaagttactttacaaaagcctttaaaatctattsagttacatttgacctaaaatgtgattttacagcttgggtaatgtgttatttaatatgtaaaagaattctaatataaatcaaatgacatacactatattag

SEQ ID NO: 302657 - DNA, 201 bp, Homo sapiens; identical to SEQ ID NO: 63075

SEQ ID NO: 302658 - DNA, 201 bp, Homo sapiens; identical to SEQ ID NO: 63078

SEQ ID NO: 302659 - DNA, 201 bp, Homo sapiens
ttttgtaatttttaaagcatatttctgtggagaagatatataaggcttgtggttccatagagttaaaaaaattcatttttttaataggaaaagatacagtyaccaaagataatggcatccgtccttcctcactggagcagatggccaaactaaaacctgcattcatcaagccctacggcacagtgacagctgcaaattctt

SEQ ID NO: 302660 - DNA, 201 bp, Homo sapiens
agtcctgcctctcaccatgatgaaaccctctcaccatgatgaaaccctagcttgaacatcatgtcccatgatgaaaccctagcttgaaaatcccctcgaasttggaaatcctgagtgggcaccaattacttactgcacggtcacttcactttcattttcaagggttctgtcgtgatccattgcagcatgtctcacacgggg

SEQ ID NO: 302661 - DNA, 201 bp, Homo sapiens
tctattcatgggcacaactagaatatatgtattatttcaatcatttgttgatactgatatttcaaactaaaatttaacatacccaggacttcttttttttwaattttttttaatagtcttaagggagactttgctttatctctttgattgaatatttgtctctctttttcactgcaaactttggtttctactaacattaat

SEQ ID NO: 302662 - DNA, 201 bp, Homo sapiens
cttgaaccctggaggtggaggttgcagtgagctgagattgcgccattgcacttcagcctgggcaacaagagcgaacctccgtcttaaaaaaaaaaaaaaaacagcagggggaaagaggaactctgctctctttttccaattcttatttatgtatttacacagggtcttgctctgctgcccagactggagtgcagtggtgtg

SEQ ID NO: 302663 - DNA, 201 bp, Homo sapiens
agtggctcacgtctgtaatcccagcactttgggaggctgaggcgggcggatcacctgaggtcaggtgtttgagaccagcctggccaacatggcgagacccyatctctactaaaaatacaaaaattagccaggcatggtggcgtgcacctgtaatcccagctacttgggaggctgaggtgggagactatcttgagcccagga

SEQ ID NO: 302664 - DNA, 201 bp, Homo sapiens
gcttgagcaacatatgagcaacataactagacacctatccccaacgcctcctcaccccctacctcccagtcctatctctacaaaaaaaagaaaaaaaaaaaggtgttttaattagccaggcatggtggtgcatgcccctagtcctagctacttgggaggctggggcgggaggattgcttaagcctaggagtttgaggctgc

SEQ ID NO: 302665 - DNA, 201 bp, Homo sapiens
gtttcctctgtctaattgtataatcattatttccattttccctttgttttacagaaaccatactttagaatcttctcttaataatggttttatgattgctmaatgtactgatcctttctcagtcctctgtctctgtactttatagcacttgacactgtaagctataatcacctctcttctgttgacttcttagtaatatgc

SEQ ID NO: 302666 - DNA, 201 bp, Homo sapiens
agcaagactccatctcaaaaaaaaaaaaaaaaaaaagcaaggtgcacagtattgtgtatagtgtgcaatgacttatgaaagatacacatgtgtgtgtgtgtatgtgtgtatacacacacaacaaaggttcatttttaaacagatggtttgggacctacaaatatattttcttacagaagtaatgctatatgttggccaggc

SEQ ID NO: 302667 - DNA, 201 bp, Homo sapiens
aatgggaggctgttttctgggatttgaacctgctggagtcatggaggttccataaacctcgttggtcagtttatttatcctcttgctgtccgtcctggagrtgaatggcatacaaatgctcttgagacctgctatggaaccaaaagttaactttaaatttgcaatttgtgaaatgcttctctattgatgaatatcttcttc

SEQ ID NO: 302668 - DNA, 201 bp, Homo sapiens
gagcaagactccatctcaaaaaaaaaaaaaaaaaaaagcaaggtgcacagtattgtgtatagtgtgcaatgacttatgaaagatacacatgtgtgtgtgtgtatgtgtgtatacacacacaacaaaggttcatttttaaacagatggtttgggacctacaaatatattttcttacagaagtaatgctatatgttggccagg

SEQ ID NO: 302669 - DNA, 201 bp, Homo sapiens; identical to SEQ ID NO: 63071

SEQ ID NO: 302670 - DNA, 201 bp, Homo sapiens
atcccagcactttgggaggccaaggcgatggatcacctgaggtcaggagttcgacaccagcctggccaacatggcaaaaccccatgtctactaaaaatacraaaaattagccgggtgtggtggcacgtgcctgtaatcccagctactcgggaggctgaggcaggagaatcgactgaacctgggaggcaaagattgcagtga

SEQ ID NO: 302671 - DNA, 201 bp, Homo sapiens
ctgggaggtcaaggctgcagtgagccgtgatcatgctactacctatactccagcctgggtgacagagcaagactccatctcaaaaaaaaaaaaaaaaaaargcaaggtgcacagtattgtgtatagtgtgcaatgacttatgaaagatacacatgtgtgtgtgtgtatgtgtgtatacacacacaacaaaggttcattttt

SEQ ID NO: 302672 - DNA, 201 bp, Homo sapiens
tatttcaaactaaaatttaacatacccaggacttctttttttttaattttttttaatagtcttaagggagactttgctttatctctttgattgaatatttstctctctttttcactgcaaactttggtttctactaacattaattaacattaatttataggtttcttatctattttattctattccaaattattttttatt

SEQ ID NO: 302673 - DNA, 201 bp, Homo sapiens
attgcttgaacctgggaagtggaggttgcagttagccgagatcgtgccacagcactccagccttggcgacagagcaaggcatcatctcaaaaaaaaaaaaattaagtccccttttttttccaaaaccagttctcactttgtttcgggtagctaggtattcttagtctctaagattcctttataatcctgttttcctctttc

SEQ ID NO: 302674 - DNA, 201 bp, Homo sapiens
gtttctgagttctccaccagtgagaccatgggccactctgcagaccgactggccgctgcctttgctgtttctcggctggaacaggatgaatatgcactgcrctctcacagtctagccaagaaggcacaggatgaaggactcctttctgatgtggtacccttcaaagtaccaggtgaaatgaaatgcttcatgacacttatt

SEQ ID NO: 302675 - DNA, 201 bp, Homo sapiens
ttatacttgttcttatctgtgtcctaaagatgtgttctctataaaatacaaaccaacgtgcctaattaattatggaaaaataattcagaatctaaacaccmctgaaaacttataaaaaatgtttagatacataaatatggtggtcagcgttaataaagtggagaaatattggagaactgtttacctcattttttattcatc

SEQ ID NO: 302676 - DNA, 201 bp, Homo sapiens
aaattatacttgttcttatctgtgtcctaaagatgtgttctctataaaatacaaaccaacgtgcctaattaattatggaaaaataattcagaatctaaacmccactgaaaacttataaaaaatgtttagatacataaatatggtggtcagcgttaataaagtggagaaatattggagaactgtttacctcattttttattc

SEQ ID NO: 302677 - DNA, 201 bp, Homo sapiens
acttttaaaatcactctttcattcatttcttctttgagaaggtgccaaatgcttgtcaaattaaagaaaagatacagtctctgtccttttaaattcaaggytaacctttttcaaggagcgcagtgttttgtgtgatgatctctggcactgccttgatgtgtgaaatgtttctttgctttggatttctacttccaggggttt

SEQ ID NO: 302678 - DNA, 201 bp, Homo sapiens
cccagctacttgggaggctgaggtgggagactatcttgagcccaggaagcacgttgcaccactgcactccagccctccagccttggtgatggagtgagacwctctctctcaaaaaaaaaaaaaaaaaaaaaaaggattgtaaatgataaataatttatggcttaggcattttcaaattgacacatgacttttccccaaata

SEQ ID NO: 302679 - DNA, 201 bp, Homo sapiens
tttaaaaatcttcccactgcatcaaaatgggccctcagattttgtaagtttattattatttttttatttttagagattggatttggatttataaacatctygcacagatactgaatggtattgctttttgtaaacagtttattttgtcttccagccataagacctctgagctgttcctcccagctacgagctgccccaggt

SEQ ID NO: 302680 - DNA, 201 bp, Homo sapiens
ccataactgtagtatatccattgtcttcttcccagtttattgggggagggggctcaggaaaaacctctgtctcctctgtggcacctttacccagtaacggyggggctgagggaggaggaggtggtaaggtaggtgatggttcctcttcgcttctctttttaggctcttctgtgtagagcagggccaaagcagccctaacta

SEQ ID NO: 302681 - DNA, 201 bp, Homo sapiens; identical to SEQ ID NO: 63083

SEQ ID NO: 302682 - DNA, 201 bp, Homo sapiens
ctgactacaaactttcccaagatcacagtgattgattggcagagccaggatcccactccaaagcctgtacttttctccttgttctctgctgtccctgtackaggtggattcatcaccattcattgctctaattggactttgttttctttacagggccatgctatgatagtggaagcttatccaaaataatagatccagaag

SEQ ID NO: 302683 - DNA, 201 bp, Homo sapiens
tctttgcagaccaacatatgctactccaaaagttctagaaaaggcaggattgaccatgaatgatattgatgcttttgaatttcatgaagctttctcggtawgtaatttgaaagacacatatgaagggactatagtcataaaaaatgtcatccatatttgtgggagagagcaaggcatggtttatgatgtgagtagagcagg

SEQ ID NO: 302684 - DNA, 201 bp, Homo sapiens
gggaaaccgggtcccagggcagtatccccacagagggctgcgtctccgggctggggcaggcggcagcgaaagggagacgcggctccggggccaccccagtmccggcaggagttctgcccggaggtctgggatgccctcggccaggcctcacctcgggagcggaggatcctgaaggcagaaaagcggctgaggatgccaatc

SEQ ID NO: 302685 - DNA, 201 bp, Homo sapiens
ggtaattaacgtttatttctccccttccaggaacgtcttgcatggatgatcaaagatcagctcctggtcaacataaataagctagtttaagatacgttccsctacactcccttgtacctactccttgccctctgcctcagggttatagaacagctgccttcagctattctcccccagggctctgcagaaccttctgacctt

SEQ ID NO: 302686 - DNA, 201 bp, Homo sapiens
ctccttgccctctgcctcagggttatagaacagctgccttcagctattctcccccagggctctgcagaaccttctgaccttttagaaggcctgcatctttmcctatagtttctcccaccactccgactgatctcctacatataataatgaatattttttaaatgtgccttgtagagttagtttaattactttataatatgc

SEQ ID NO: 302687 - DNA, 201 bp, Homo sapiens
cagaccgactggccgctgcctttgctgtttctcggctggaacaggatgaatatgcactgcgctctcacagtctagccaagaaggcacaggatgaaggactyctttctgatgtggtacccttcaaagtaccaggtgaaatgaaatgcttcatgacacttattagggagttctgaattgctcctaaaactcaaaaacatcccg

SEQ ID NO: 302688 - DNA, 201 bp, Homo sapiens
gcgcctataatcccagctactcaggaggctgaggcaggagaatcgattgaacccgggaggcagaggttgcggtgagccgacatcgtgccactgcactccakcctgggcaacagagtgagactctgtctcaaaaaaaaaaaaaaaaaagagtaaataaatgagaaagaatgaacaagtcttccttacagaagaattttgatt

SEQ ID NO: 302689 - DNA, 201 bp, Homo sapiens
acttgctgcgagatctacaaatgaatgctaaaattaggtgaaatgctaagaagaaacagaatatttgcatagtctcagagaatctcccccaaaatatttaycaattactatgatgatttcgacatacgtccgcaaagtctgtgttattcctgccactggaaggtggaacttaattctcccctcagaatgtgggctagactt

SEQ ID NO: 302690 - DNA, 201 bp, Homo sapiens
acataattttcagccaaagagtttcttaggccctattgcctgtattaataatgttaatatacagtcctaaaaggctcctggtgttcatgaacctgactttrttgaaaggttcagcatatttccctgttctccagcttaaagacatcttcctccttttcccttagtgccctgagagctattcaaatttcaatagaagtgtgt

SEQ ID NO: 302691 - DNA, 201 bp, Homo sapiens
taagaaaggaaaaaatagtaactttatagtggagtaaactggcagacatcacttgacccaaatcatcactttaacatcactggtagtaagtcatgttgatrtcatgtgccccctgatacgaagctaagagaaatacagtttacctctgtgatattcttcccctaaatccataaccccagtcttcaaaagtgtcaaggtcat

SEQ ID NO: 302692 - DNA, 201 bp, Homo sapiens
aaagatattcatgaagtataacctgtgccctgtaggtgttggcttgattgcttctggccagtgtgatgtgatcgtggcaggtggtgttgagttgatgtccratgtccctattcgtcactcaaggaaaatgagaaaactgatgcttgatctcaataaggccaaatctatgggccagcgactgtctttaatctctaaattccg

SEQ ID NO: 302693 - DNA, 201 bp, Homo sapiens
aagtgtgtgggaccagaatggtcctagaccagctccagaattccctagatccaaattgctcttctccttggccttttgtgcttcttttctgtccccgagtraaggttagtctatccaaaagctgataatggactttgataacaaggtttaaactgttcattctattctgtttagattgttttaatgtttatattttgaata

SEQ ID NO: 302694 - DNA, 201 bp, Homo sapiens
gaatggcactgggtgcctcgctggatcagaaacgcagcggacaccctgccagatccgaggggtggaagtcaacagcgggtctgcgacggtggcgaacagcrggtctgtgacagtggcgaacagcagtggtggaaggtgagcaaaagctcagctcgagccagaacaaacatggaccagaagagtgtgcagttgcaagattta

SEQ ID NO: 302695 - DNA, 201 bp, Homo sapiens
ctctaacgtgttgaatgtgtttttagtcatttaagaaaattaccttaattcttctgaaaagttgaaaactttaattacagatgttgtacaaagctgataaytgtcattcagctttttaatcaagaagcttaaattggaatggtatgttattttctgtaaaagatattcatgaagtataacctgtgccctgtaggtgttggc

SEQ ID NO: 302696 - DNA, 201 bp, Homo sapiens
ggatccaggatatataaataattcctacaaatcaataagagtaaagaccactcggctgggcacggcggctcacgcctgtaatcccagcactttgggaggcygaggcaggcagatcatgaggtcaggagttcaagaccagcctgaccaacatggtgaaaccccgtctctactaaaaatacaaaaattagccaggcatggtgg

SEQ ID NO: 302697 - DNA, 201 bp, Homo sapiens
tacctgattgccttgttgatcttgcgtcactgggaaggctaagagctccccttctttttttttttttttctttttttttgagacagagtctcgtgctgtcrcccaggctggagtgcagtggcacagtctcggctcactgcaagctctgcctcccaggttcatgccattctcctgcctcagcctcttgagtagctgggacta

SEQ ID NO: 302698 - DNA, 201 bp, Homo sapiens
cctctttagagatcctctgcttgtcttggacttgattgattaatggtagacaaatagattttaacttttccaaataacacagaacaatcctaggtgttagmataacaccggttaacagtgtacctgctccttggatatctcctttcccagctccctgcggtttctgagttctccaccagtgagaccatgggccactctgca

SEQ ID NO: 302699 - DNA, 201 bp, Homo sapiens
tatatattaaccatattttcaatgtttgccaatctgaaaaccacaaaatgataccttgctttgatttaaaaaacaacaacaacaacaacaaaaaggctggrcgcagtggctcatgcctgtaatcccagcactttgggaggcagaggcgggcggatcacctgaggtcaggagttcaagaccagcctggccaacatggtgaaa

SEQ ID NO: 302700 - DNA, 201 bp, Homo sapiens
ttgcctcctttggagaagtttaataactggggtggatctctgtccctgggacacccatttggagccactggctgcaggttggtcatggctgctgccaacarattacggaaagaaggaggccagtatggcttagtggctgcgtgtgcagctggagggcaggtacgttacagtggtgtcataggaccctccagagagtcattt

SEQ ID NO: 302701 - DNA, 201 bp, Homo sapiens
agatgatttcccaattgtcttttaagactttagtttaaaatttgataatatgataattataaaacactttccttctagtgaataggtaaggtttatatttyatttgtttttgtaatttttaaagcatatttctgtggagaagatatataaggcttgtggttccatagagttaaaaaaattcatttttttaataggaaaaga

SEQ ID NO: 302702 - DNA, 201 bp, Homo sapiens
aactgctttacactgaccccaatattattttcctgtaagcatcatggaacaaatctaccactgtttgttttgtgttttttttttaacttatcaacatgtadcttcatatccttccatgcttttctgactcctcaattaaacatctttattgattctgctgctgcttgtaagatgtgatttctcttctcttaccaccttggg

SEQ ID NO: 302703 - DNA, 201 bp, Homo sapiens
aggtccagacagtaaatagttcaggatttgcaggatcactttggtctctgttatatattgtttcttttgttttgttttgtttacaacttttttttttttttgagacagttttgctcttgttgtccaggctggagtgcagtggcgcgatcttggctcactgcagcctcctcccgggttcaagtgattctcctgcctcaggct

SEQ ID NO: 302704 - DNA, 201 bp, Homo sapiens
cttgagcagcaaatcttgaaggaagagtaaaagccaactcaggaaggattttaaaaggcatttcaggccgggtgcggtggctcacgcctgtaatcccagcrctttgggaggttgaggcaggcagatcacctgaggtcaggagttcgagaccagcctgagcaacatggagaaaccccgtctctactaaaaatacaaaattag

SEQ ID NO: 302705 - DNA, 201 bp, Homo sapiens
agcgttccagctgaagttcgggacagtagtgtcacctgcgccctaatttatcatcacaagttaacgaagtctgggggtgtgggggtgtgtgtgtgtgtgtgggtgtgtgtgggcgtgtgtgggcgtcggccttaatgtaaccctggtctgcgtagaagtgtgtgttgtttcgcctgcttcccctgtacccaggtcggcggc

SEQ ID NO: 302706 - DNA, 201 bp, Homo sapiens
ctactaaaaatacaaaattagccagatgtggtggcacatgcctgttaatcccggctactcgggaggctgaggcaagagaattgcttgaaccctggaggcgyggaggttgcggtgagccaagatcgcaccattgcactccagcctgcacaagagcgaaactcccatctcaaaaaaaaaaaaaaaaaaaaaaaaaaaaggcat

SEQ ID NO: 302707 - DNA, 201 bp, Homo sapiens
gggacagtcagagagtcttcttggaagaggtaacacttgagcagcaaatcttgaaggaagagtaaaagccaactcaggaaggattttaaaaggcatttcargccgggtgcggtggctcacgcctgtaatcccagcactttgggaggttgaggcaggcagatcacctgaggtcaggagttcgagaccagcctgagcaacatg

SEQ ID NO: 302708 - DNA, 201 bp, Homo sapiens
ggcgccatgggtttgcccgatttctgctgtaaagaataagactaggtcaggtgacctttcggggcttgagtgtgggaggaacggagacaatcctccatccsgctccgttatccagataatcctgcgctctcgggggttttccgatctggatgattatctatctggtcgttcacacctcagctcacttaagcggtgaagaaa

SEQ ID NO: 302709 - DNA, 201 bp, Homo sapiens
tagcgttccagctgaagttcgggacagtagtgtcacctgcgccctaatttatcatcacaagttaacgaagtctgggggtgtgggggtgtgtgtgtgtgtgtgggtgtgtgtgggcgtgtgtgggcgtcggccttaatgtaaccctggtctgcgtagaagtgtgtgttgtttcgcctgcttcccctgtacccaggtcggcgg

SEQ ID NO: 302710 - DNA, 201 bp, Homo sapiens
tttttgtttagtcctcacattccccaaattattatcatttgcattttctagatgaagtttgggaagctcagaatatatacattttctagtctgtgacagasctagcattcagacataagtctgagtctcactactcgccagactgacagctctgcaggacaggaaacaaggggcatcgaagttaagactgaaatgagtata

SEQ ID NO: 302711 - DNA, 201 bp, Homo sapiens
ggggacagtcagagagtcttcttggaagaggtaacacttgagcagcaaatcttgaaggaagagtaaaagccaactcaggaaggattttaaaaggcatttcrggccgggtgcggtggctcacgcctgtaatcccagcactttgggaggttgaggcaggcagatcacctgaggtcaggagttcgagaccagcctgagcaacat

SEQ ID NO: 302712 - DNA, 201 bp, Homo sapiens
tgtgcctggccgatttgttcaactttaaaccatacctaaagttgttaaactttcacaaaccattcctataagaaagcgtagaggaacatgaataacgaggytcttattcgattattttctcttccagggtcagattttggcaaattttaaagccatggattctgattggtttgcagaaaactacatgggtagaaaaaccaa

SEQ ID NO: 302713 - DNA, 201 bp, Homo sapiens; identical to SEQ ID NO: 63072

SEQ ID NO: 302714 - DNA, 201 bp, Homo sapiens
gtttctctggccagagtcctttgaatatccctaggctggtgatcctaaagcttgggcttctccatctctttccaatccacatgtttggaacatgttttgtwtttttcttttcggaagctataggacctccttcttttagtctctaaagacccaagagaagttaaaccttaaagcttttgtattatctatttctgtgtagcc

SEQ ID NO: 302715 - DNA, 201 bp, Homo sapiens
aacctcgtctctaccaaaaatacaaaaattagccaggtatgatggtacgcacctgtggtcccagttactcaggagggaggtgagaggattgcttgagcccrggatgttgaggctgtagtgcgctgtattcacgccactgcactttagcctaggtgacagagttgccttgtctcaaaaagcaaataaagaaattaaaataaa

SEQ ID NO: 302716 - DNA, 201 bp, Homo sapiens
ttggactcaaaaattcacattttaaattctgatctataactacaaaattgtcatcccaaaaggccttagcattttacatgtcttctagtgtatggaagtgmctatttagttagatgcattcttactagaattatatattaaccatattttcaatgtttgccaatctgaaaaccacaaaatgataccttgctttgatttaaa

SEQ ID NO: 302717 - DNA, 201 bp, Homo sapiens; identical to SEQ ID NO: 63076

SEQ ID NO: 302718 - DNA, 201 bp, Homo sapiens
tctgacattagatgaaaaataaatggactcctgacttttaatattgacctagacttactttcttttgcagtaaaattatttgtaatatgtctgacgttacrtattttcctctatctctcttacttcgtagtactaagagcctagcttgattctgatcttaagtaaacttatctttacatttgtgtctttgggggagccagg

SEQ ID NO: 302719 - DNA, 201 bp, Homo sapiens
gattctgattggtttgcagaaaactacatgggtagaaaaaccaaggtgagtttctaattttaaaaaatgcgtgaattttcaaagcacgttaataattggawcttagttacctgttcttaagaatatgaagggaaagcttctctttcttttgaagaattttgtctttcattaaagatatttatttcttagtgtaaaagtaga

SEQ ID NO: 302720 - DNA, 201 bp, Homo sapiens
tggccatgggttataagccgaagtcatttttgagggtaaagtaaatgttcaaacaaatcatctctgatttctttattttattaccaaagctcacctctctrtttttttacctagggattttatgtatgtgtctcaggatccaaaagatcaactattacttgggtaggtagcagtttgtatccttggactataatcacaagt

SEQ ID NO: 302721 - DNA, 201 bp, Homo sapiens
ggaagtagatgtttttgctaaaatatgctctttatatggattgctttattttaatacagaatttttaattacaattttataaaaatacaaaaatgagaaaattataggggcttctgcttcttaggaaatgaggtgcatgtgaaaagatttttatcactataataaaaatagacttttctaaactggccattcaccgtatca

SEQ ID NO: 302722 - DNA, 201 bp, Homo sapiens
aattggaagtagatgtttttgctaaaatatgctctttatatggattgctttattttaatacagaatttttaattacaattttataaaaatacaaaaatgagaaaattataggggcttctgcttcttaggaaatgaggtgcatgtgaaaagatttttatcactataataaaaatagacttttctaaactggccattcaccgt

SEQ ID NO: 302723 - DNA, 201 bp, Homo sapiens
gggtgaagcccgtcgggagcgacccggatttccagccagagctgagcggcgcgggctccagactcgccgtggtcaagttcaccatgagagggtgaggccargctcgagctctgtgggtccccgtctgtccttccttgctttcctttcactctttgttggccctggtttcctagccgtctgctgccccggagtgtccggcag

SEQ ID NO: 302724 - DNA, 201 bp, Homo sapiens
tttttgtgttgcagcatgaaaagcttgccattgccatcttaattggaagtagatgtttttgctaaaatatgctctttatatggattgctttattttaatayagaatttttaattacaattttataaaaatacaaaaatgagaaaattataggggcttctgcttcttaggaaatgaggtgcatgtgaaaagatttttatcac

SEQ ID NO: 302725 - DNA, 201 bp, Homo sapiens
atactaaaactgaagatatttgtgctttattctttatacctggtatagtagtgatgtgtttgtaaaatcttatttacttttcttgaatatggagtttttamgtgtggtggtcatgatcttagtaaaaatgactttttatttatttatttttttttgagatggagtctcgctgtgttgcccgggctgacttgaactcttggg

SEQ ID NO: 302726 - DNA, 201 bp, Homo sapiens
gtaagttttgctggaagtttattctacaactttatactaaaactgaagatatttgtgctttattctttatacctggtatagtagtgatgtgtttgtaaaawcttatttacttttcttgaatatggagtttttaagtgtggtggtcatgatcttagtaaaaatgactttttatttatttatttttttttgagatggagtctc

SEQ ID NO: 302727 - DNA, 201 bp, Homo sapiens
gatttcaccatctgttggccaggctgttcttgaactcctgaccccaagtgatccacccaccttggcctcccagagtgctaagattataggcatgagcaccrcacctggcttgttttggaacgaagcaagatgtaaatgaatgagtaaataatgtgagattattaggtactgaaagtatgaaagaaagagaacttagttatt

SEQ ID NO: 302728 - DNA, 201 bp, Homo sapiens
ctcagcatcagcttcccagagaacccagcctgcaccatgacaccatttttaacaattgacaatcaggagctgtcattgtacttttgcaacttttccctcgktttttttttttttccgtataaaaagttggaaaaaaagaaacaaagattaaactgatttttactgatttttaataaaagagagacatcagacttatcaacc

SEQ ID NO: 302729 - DNA, 201 bp, Homo sapiens; identical to SEQ ID NO: 63115

SEQ ID NO: 302730 - DNA, 201 bp, Homo sapiens
atttctcattgcaggttttcagaatatgtcagtttccagttatgtcaactatgcaatgtaataatgccagtttgtcccagacagtttttataacaaaatamtttaatgcacccctttaaatatgttttgtgggctgggcgtgtggtggctcacgcctgtaatcccagcactttgggaggctgaggcgggtggatcacctga

SEQ ID NO: 302731 - DNA, 201 bp, Homo sapiens
tgtttaattgacgagtgctttagaattacaatctttagtgttattttacttaattttccttttctaacaggtgtgggccatgtttgaggattgccccagcrttcagttctatgagtaataaatatccacaggctgttttcttggaagtcgatgtacatcagtgtcaggtaagggaaaggaatcttttttctttttaattta

SEQ ID NO: 302732 - DNA, 201 bp, Homo sapiens
ttgtgcagacttaggatttctcttcttgtaaaataaagaattttccttttttgcccccccccattttttctttttctgttaagctttttctgagggggaayaggggaatggagactagggttctgatttttttttttttttttcgattgattggaagaaataaccaaggccttatttagaagatagcattttcttatttgt

SEQ ID NO: 302733 - DNA, 201 bp, Homo sapiens
accccgacccggcctccaaatataatgtttatactttttttttttttttttttttgagacagggtcttgctctgctgcctgggctggagtacaatggcgcmatttcagcttactgcagccttgatttcctgagctcaagccatcctcccagctcagcctcccaattagctgggactaaaggcacatgccactgcacccagc

SEQ ID NO: 302734 - DNA, 201 bp, Homo sapiens; identical to SEQ ID NO: 63107

SEQ ID NO: 302735 - DNA, 201 bp, Homo sapiens
gaaactgcagagtataaatagttagaatgcagcatttttaatttgagagctattcaagaaggaagcaaaatttggaagtagcacttcatggtattagattkgcttatacaaataggtaaatcttgtatactaagagatatatatagtttttaagttctctggttacaaagttactgcactggcagatcaaagaatgaattt

SEQ ID NO: 302736 - DNA, 201 bp, Homo sapiens
aatttggtaagaagagcattgattcagaattttatgatttttttttttttttttttgagacagggttttgttctgtcacccatgctgcagtgcagaggcayagttatggcttactgcaacctcaaactcctgggctcaagtgatcctccagcctcagcctcacgagtagctgagactacaggcgtgtgccaccacactcgg

SEQ ID NO: 302737 - DNA, 201 bp, Homo sapiens
cttctctaaactttcaaccttgtttttaaaaattgctatttaaaaaaaaaaaaaaaactgtgtgaaaccaaaaatagcctgcatgtgttttatttttaatyccttgtggctgggattggaggggaggtcacagtttgcttcaacagtgaaaatacattgcatgccagaaaagatccaaggataaaaattaataccaaggtt

SEQ ID NO: 302738 - DNA, 201 bp, Homo sapiens
tttaagagtaagttatttcaaataacaacataaagacttaagaatctaaaggatagtgtgtggaaactgcagagtataaatagttagaatgcagcattttwaatttgagagctattcaagaaggaagcaaaatttggaagtagcacttcatggtattagatttgcttatacaaataggtaaatcttgtatactaagagata

SEQ ID NO: 302739 - DNA, 201 bp, Homo sapiens
tttcagggctagtctctgcataacctgtgtattgcctctaaatcgtcaagtgatgtggatagatacttgacaaataaaccatcgtagagctatgtgctaaratgttagtttaaattttattttgagaattttgtttgatttgttagaaagcaggttgcttgccagtttatagctcataagaccttacattcctatgcatag

SEQ ID NO: 302740 - DNA, 201 bp, Homo sapiens
aataaaatttccaatgatagtctgtcccattgtaattgtaactcttaataccctttcaacattctctataaagaatttaattgctgggcgcggtggctcayacctgtaatcccagcactttgggaggctgaggcaggaggattgcctgagctcagaagttcgagaccaccctgggcaacacagtgaaaccctgtctctact

SEQ ID NO: 302741 - DNA, 201 bp, Homo sapiens
gtttgtgctagtttaatatattgattacatttcagttgaggggtgttggttttcttttcctcgttggaatgttagccccaaagtccttttgatgattgatkggggcatgtcctctgcttttgcccaagtgagctcaaaaccagttgaaggacttatggactgaatattaggttgggttaacatattaatatagaagatcaa

SEQ ID NO: 302742 - DNA, 201 bp, Homo sapiens
cagcccccagaactgtgagaaataaatgtttgtttaagccaccaactccatggtactctgttagagtagcctgaaccaagacaaaacccttaacatactcytttaaaaaattaaaataaaatttaaaatgcagtttttattacagaggctgaggtgttagaaatatttttctaaatatctgggcttcttaatagaaactct

SEQ ID NO: 302743 - DNA, 201 bp, Homo sapiens
aaatttttttttcactttttgacagttatgtaaaatgacttacaggttttagttatggccattaactccttttactgtcactcacttcctatagttttatytttttaaatgtatgccctcttttctggcactgtatttaaaaaaaaaaaaaagtctaattactgattttgttttagaatcaaatttgactttgttatcaca

SEQ ID NO: 302744 - DNA, 201 bp, Homo sapiens
cttcagagctgtaagaaccctattctcttgagtttgggattagagtccatttcagggctagtctctgcataacctgtgtattgcctctaaatcgtcaagtratgtggatagatacttgacaaataaaccatcgtagagctatgtgctaaaatgttagtttaaattttattttgagaattttgtttgatttgttagaaagca

SEQ ID NO: 302745 - DNA, 201 bp, Homo sapiens
ggttcttgtggtcaagttactcagtctggcagggaggcagggagacaggcagacccactactgtgaggagtgatgtacctggtgctttccaccagttgccrtggggctgatcctcctactgaccttgtaatactaatgttctgaattttgatgggaaatattgtttttaacattgtgtgaaaagccacttccttattgtac

SEQ ID NO: 302746 - DNA, 201 bp, Homo sapiens
cacctacagttcagttccctaataatgtcatgcttattattttttgatacactattatgggtcaagtataaaaagtattggtgtaactaaaggaaatagcstagttattttcttaggcagataaaccacaacatgattctgaaatcataaatccaaaccccatctttccatgctgtaaccccagagccaccatgtttttca

SEQ ID NO: 302747 - DNA, 201 bp, Homo sapiens
gctgacttgatctgtttttaactttctcatctcttctgctcttcacctacagttcagttccctaataatgtcatgcttattattttttgatacactattawgggtcaagtataaaaagtattggtgtaactaaaggaaatagcctagttattttcttaggcagataaaccacaacatgattctgaaatcataaatccaaac

SEQ ID NO: 302748 - DNA, 201 bp, Homo sapiens
tttctctgttggtatcctggtgctgccaacacccaggagtgatttctacttctatgtctaaagagacaatagaagacagtgtttgcaggaactcaaagagrataatggtatgacaagagctgtggcctttggtggagacacagacaacctgtggcaacacagcaggaagggagctaagggaattactaactggatctcatt

SEQ ID NO: 302749 - DNA, 201 bp, Homo sapiens
gagcagggtgaggaaagtccagggcacactcttcttggggaggcccctgttctagggggtggtatcaaggcataggaatttctgctcccatgggggactcytttaacaggcaatctttgtactagagcttcctcttgggttagtagagactttgtcagatctgctttttcccttcctcggcccaatcctgcttcctccctt

SEQ ID NO: 302750 - DNA, 201 bp, Homo sapiens
tcaagaaggaagcaaaatttggaagtagcacttcatggtattagatttgcttatacaaataggtaaatcttgtatactaagagatatatatagtttttaakttctctggttacaaagttactgcactggcagatcaaagaatgaattttaaaaaaagttacctcaagttaaagttaatatcttttttttttttttttttga

SEQ ID NO: 302751 - DNA, 201 bp, Homo sapiens
acatagtgagtatatatacacacatatatatacacacatacatacatatatacacacatatatacatatatacatacacatatatacatatatatatatayatacacacacacatatatatatatgaaacaactatgggttgatcacatgtctgtgccttccattttagcccgtacccctggacatggagctatcacaaaa

SEQ ID NO: 302752 - DNA, 201 bp, Homo sapiens
agggtcacctgggctttccagctgagatcacactaatcttgaggcagcctctgatgaatgactgagcagggtgaggaaagtccagggcacactcttcttgsggaggcccctgttctagggggtggtatcaaggcataggaatttctgctcccatgggggactcttttaacaggcaatctttgtactagagcttcctcttgg

SEQ ID NO: 302753 - DNA, 201 bp, Homo sapiens
ttcattctttttcttttgggtttcagtcttctccttgttttgtaggagttctttacgtattagaagtataagtcctttgtttgatatgttttgcaaatacyttttcctagtctcttaaagacattttttgatgaataaaaggttttaatcttccagtttatcaaatatagtccagtctgtcaaaccttttttttttttagt

SEQ ID NO: 302754 - DNA, 201 bp, Homo sapiens
acacatagtgagtatatatacacacatatatatacacacatacatacatatatacacacatatatacatatatacatacacatatatacatatatatatayatatacacacacacatatatatatatgaaacaactatgggttgatcacatgtctgtgccttccattttagcccgtacccctggacatggagctatcacaa

SEQ ID NO: 302755 - DNA, 201 bp, Homo sapiens
agcttcttcagggtcacctgggctttccagctgagatcacactaatcttgaggcagcctctgatgaatgactgagcagggtgaggaaagtccagggcacaytcttcttggggaggcccctgttctagggggtggtatcaaggcataggaatttctgctcccatgggggactcttttaacaggcaatctttgtactagagct

SEQ ID NO: 302756 - DNA, 201 bp, Homo sapiens
cagtgtgaatgattttttttttttttttttttttttttgagatggagtcttgctctgtcatccaggctggagtgcagtggcatgatctcagctcactgcarcctctgcctcccaggttcaagcaattctcctgcctcagcctcctgaggagctgggattacaggtatgcgccaccacacatggctaatttttgtattttta

SEQ ID NO: 302757 - DNA, 201 bp, Homo sapiens
atttgacttttattggatttcttcagtatctggccctcagatgtactcagatattcagatatctgctacttaagaatggactgaatgatgagcgtgtgtatgtgttacgtgtgtgtttgctcaagggcatgcctgagagagggctttgaataaagtgaagcttctgttaagagttttatcagctggacatagtggctcatc

SEQ ID NO: 302758 - DNA, 201 bp, Homo sapiens
acatgaagcaccacccagattccccttcaagaaagaaccacttcctagctgcaaggagagtggtttgctcacactcttgctgttagcttcttcagggtcayctgggctttccagctgagatcacactaatcttgaggcagcctctgatgaatgactgagcagggtgaggaaagtccagggcacactcttcttggggaggcc

SEQ ID NO: 302759 - DNA, 201 bp, Homo sapiens
ctttgtcccattctttgggttgtctttttcttgatggtgtcctttgatgcatgagttttaaattttgatgaagtccaatttatctatacttttgttgcctrtgcttttggtgtcatattcaagaaatcattgcaagattcaatgtcatgaagatttctccctatgttttcatctaagagttttatagttttagctcttaag

SEQ ID NO: 302760 - DNA, 201 bp, Homo sapiens
tcccagagaacccagcctgcaccatgacaccatttttaacaattgacaatcaggagctgtcattgtacttttgcaacttttccctcggtttttttttttttccgtataaaaagttggaaaaaaagaaacaaagattaaactgatttttactgatttttaataaaagagagacatcagacttatcaacccatgcaatgcatg

SEQ ID NO: 302761 - DNA, 201 bp, Homo sapiens
taagcctcctcacaaatgagggtttcacagcccccctcaccaaaccagcaagactagcaagggaaaattagaatagataatgaaggaggagctgataagtmctagtggtagccctggtcaccaactgcagcaacagggctgtagatcgtctactaacctccctcttctaggtttcccataaggaagagagggtgaccagaa

SEQ ID NO: 302762 - DNA, 201 bp, Homo sapiens
aagcttttatatttttgtccctcaatgatatattgtttttctcccttaccatagcagtgggagagataataaaataataaataaatattgattgaagtgasaaaactggggaaacattgctgcgaaggaaggttttttctatcagtgtggtgtcacttaagcataagcataactgcagacattgattggtaaggaactgtt

SEQ ID NO: 302763 - DNA, 201 bp, Homo sapiens
gaagcaaggagacaagtgagatgtcgtcattgttgttgtaaccaaaaatgtatggttatcactgcaaaagaatcataaatgagacccacaggataaaatcrggaatttcaccattttagaggcatatatatatatattttttgagatggagtcttgccctgtcacccaggctggagtacaatggcaccatctcagctcact

SEQ ID NO: 302764 - DNA, 201 bp, Homo sapiens
cacctcacttttagttcacttattctaattctggcccgtcgaagcttttatatttttgtccctcaatgatatattgtttttctcccttaccatagcagtgrgagagataataaaataataaataaatattgattgaagtgagaaaactggggaaacattgctgcgaaggaaggttttttctatcagtgtggtgtcacttaa

SEQ ID NO: 302765 - DNA, 201 bp, Homo sapiens
tcatctttttggtcaaaacctaaagacaggtgcacgatactttctgaatgactgcacagaaagcgccccatatgtaattaagtctgttaataaatattccyaaacgttattttgtcttgtgtgtagacctgccccgaatacagtacaggagcatcttcaaagtacttccagtgggtgccctggacagcagctaagaacccc

SEQ ID NO: 302766 - DNA, 201 bp, Homo sapiens
acagccatcacctttgccatatattattggttaaagtaagtcacgggttttatctgtactcaaggagaaaggattatacaagagtgtgacttatcggggtmacttaagatgggccagccacaaatattaatttggcagcaatgtgccatgtaaatcaggtgggaaatacagggaagcaaggagacaagtgagatgtcgtca

SEQ ID NO: 302767 - DNA, 201 bp, Homo sapiens
attcctagcaagtttaccctgccccacccttccatctcgttagtctccaccgcttcctattcaaattattgtttgcgtcggtcactagaccgtgaacttcytaaaggagggatagtgtcttcatctttttggtcaaaacctaaagacaggtgcacgatactttctgaatgactgcacagaaagcgccccatatgtaattaa

SEQ ID NO: 302768 - DNA, 201 bp, Homo sapiens
accacatgggccttactaaaggctctctcgcaacatggcagcatactccttcaaagctagcaaggagaatctctctactgagcacaagaaaggagtcacayagatatagatacagccatggatatggacatggacatagatatggaaatggatgtagatgataacctaaattagggagtgacagccatcacctttgccata

SEQ ID NO: 302769 - DNA, 201 bp, Homo sapiens
agagagggctttgaataaagtgaagcttctgttaagagttttatcagctggacatagtggctcatctctgtaatcccagcatttttggaggccgaggtggrtggatcacttgaggtcaggagtttgagaccagcctgaccaatatggtgaaaccccattcctactaaaaatgcaaaaattagccaggtgtggtgacatgca

SEQ ID NO: 302770 - DNA, 201 bp, Homo sapiens
caggaatatcagaaagaatatcactttagagattttcctcagtgaaaaactatgattttaataaaatttccaatgatagtctgtcccattgtaattgtaamtcttaataccctttcaacattctctataaagaatttaattgctgggcgcggtggctcacacctgtaatcccagcactttgggaggctgaggcaggaggat

SEQ ID NO: 302771 - DNA, 201 bp, Homo sapiens
aaaaaaatgaggcacatagtattgttttaggagctgattcccaatactattttttcttttaatattctaggaaatagaatggatacaggaatatcagaaakaatatcactttagagattttcctcagtgaaaaactatgattttaataaaatttccaatgatagtctgtcccattgtaattgtaactcttaataccctttc

SEQ ID NO: 302772 - DNA, 201 bp, Homo sapiens
agagcaagaccccatatcaaaaagaaagaaaaataaaaaagattaacaccaactaataataaaatagagcaattacaacaatatactgtggttaaaagttracatggatatggtctctcccatgcttgctctttctctcactgtctcaaaatatcttattgtactgcaccataggcagttgaaactgcagaaagtgaaagc

SEQ ID NO: 302773 - DNA, 201 bp, Homo sapiens
atagcaaaggtgtaagaccttttttgtttgagagtatttgtgcttgttttataacagccatttattcatttgattttttttaactttaaattaccatatgrtagcagttctcaagctttttgatctcaggacctctttatattattaaatactattgaaggccaaaaagaacttttgtttatgtgggctatatttatctga

SEQ ID NO: 302774 - DNA, 201 bp, Homo sapiens
tcatcaaataatgatgaacaggcaagttttctgaagtatttttgtatatctttatgtgtgtgcatataattttcttttgaaaagacacaattataaggttwgtaaagaattaatagggtacatgggacctttgttaatccagattaattccttctgtacattactggaacgacttctaatgggcaacagttccctagcgtc

SEQ ID NO: 302775 - DNA, 201 bp, Homo sapiens
tctcagcatcagcttcccagagaacccagcctgcaccatgacaccatttttaacaattgacaatcaggagctgtcattgtacttttgcaacttttccctcrgtttttttttttttccgtataaaaagttggaaaaaaagaaacaaagattaaactgatttttactgatttttaataaaagagagacatcagacttatcaac

SEQ ID NO: 302776 - DNA, 201 bp, Homo sapiens
gatggcattgttccacttcgttatgttaagtttcagaatgttaacagtgtaactgtaagtagtatttcgttcatatgtatttaataggtttgtgagtaacmatactattttcagtatcctaggtaagtctaagtgattctttaaagtggtatttattcactcagtttgaaatgagtaaaatgtttaatgggataaattttc

SEQ ID NO: 302777 - DNA, 201 bp, Homo sapiens
agcatactccttcaaagctagcaaggagaatctctctactgagcacaagaaaggagtcacatagatatagatacagccatggatatggacatggacatagrtatggaaatggatgtagatgataacctaaattagggagtgacagccatcacctttgccatatattattggttaaagtaagtcacgggttttatctgtact

SEQ ID NO: 302778 - DNA, 201 bp, Homo sapiens
ggtaaagggagtatagtatatttgaggtttttaaacattttattttattctaccattgtataggtcagggccctaaatatgtaaaaatttttatcaacctrccccgatctatggattttgaagaggcagaaagaagtgaaccaactcaagctctggaactgacagaggatgatattaaagaagatggcattgttccacttc

SEQ ID NO: 302779 - DNA, 201 bp, Homo sapiens
taaacgttattttgtcttgtgtgtagacctgccccgaatacagtacaggagcatcttcaaagtacttccagtgggtgccctggacagcagctaagaacccyggggtaaaacgagtttcctctctactgttacaaatcagaaacctcctccgtaaaagcctcagatctgggaaacgcggatgcatatgccaacttttgagtc

SEQ ID NO: 302780 - DNA, 201 bp, Homo sapiens
actgaggctccagatattcctgtttgtgccctattaatagtatcatttttttatatcgatacatgtaaatatgattgtgcagacttaggatttctcttctkgtaaaataaagaattttccttttttgcccccccccattttttctttttctgttaagctttttctgagggggaataggggaatggagactagggttctgat

SEQ ID NO: 302781 - DNA, 201 bp, Homo sapiens
ctggctgatttttgtgtttagtacaggatttcaccatctgttggccaggctgttcttgaactcctgaccccaagtgatccacccaccttggcctcccagastgctaagattataggcatgagcaccgcacctggcttgttttggaacgaagcaagatgtaaatgaatgagtaaataatgtgagattattaggtactgaaag

SEQ ID NO: 302782 - DNA, 201 bp, Homo sapiens
ggagtgcagtggcgcaatcatggctccctgcagccttgacctccccagctcaaggaatcctcccacctcggcctcccgagtagctgggaccacatgtgcgygccatgacgcccggctacttttttgtatttttggtagagacgggagtttcaccacacttgtaattgcaaaattgccctgaaatgatttttccattctctt

SEQ ID NO: 302783 - DNA, 201 bp, Homo sapiens
gaatctgattccaaactcctgtcagctcattcagttccttgtggctgtctgattaggggccctggcttcttactggctctgaactggaagtggccatcagktcctagcagccacccacagttccttaccacatgggccttactaaaggctctctcgcaacatggcagcatactccttcaaagctagcaaggagaatctctc

SEQ ID NO: 302784 - DNA, 201 bp, Homo sapiens
tagtagttctcagatgttatctaatcaagtgactctccacttgctgatttttcatattacgttggttttgttcgatgaattaggttggttttttttttctkgcctgttattttcattctgcttcagtagtttatgtactcaaggtgtgtacaagagccctttaaaatgaaactcttatcttcacagctgcttattactgtg

SEQ ID NO: 302785 - DNA, 201 bp, Homo sapiens
cctgagggcttttctgaagacactttttctttttccttttttttttttttttgagacagggtctggctctgttgcccaggctggagtgcagtggcgcaatyatggctccctgcagccttgacctccccagctcaaggaatcctcccacctcggcctcccgagtagctgggaccacatgtgcgcgccatgacgcccggctac

SEQ ID NO: 302786 - DNA, 201 bp, Homo sapiens
tggatgtcagccaaactgcaattctcatctggaggctcaactagggaagaatctgattccaaactcctgtcagctcattcagttccttgtggctgtctgaytaggggccctggcttcttactggctctgaactggaagtggccatcaggtcctagcagccacccacagttccttaccacatgggccttactaaaggctctc

SEQ ID NO: 302787 - DNA, 201 bp, Homo sapiens
cagtatcctcctaaatggatctcactgccttccatcctccttgatgctacctgagggcttttctgaagacactttttctttttccttttttttttttttttgagacagggtctggctctgttgcccaggctggagtgcagtggcgcaatcatggctccctgcagccttgacctccccagctcaaggaatcctcccacctcg

SEQ ID NO: 302788 - DNA, 201 bp, Homo sapiens
gaagacttttgactaataaatagtgtagcacttttcctaaccacatggtattcaggtttttaaaattgctttacaacaaattatcacagtcttagtgtctyagtggcttaaagcaacacatatgtattgcctcacattccatgggcaaggaggtcaggaacaggttagctgagtcctgtgctcatgctctcacaaggctac

SEQ ID NO: 302789 - DNA, 201 bp, Homo sapiens
caaggctcacagacaaggaagctgaggttctgagaggttagtagtttgtgcatggccataaaatttaagtagcaaggccggtcatggtggctcatgcctgyaatccaagcactttgggaggtcgaggcgggcgggtcaccttaggtcaggagtttgagaccagcctggctaacatggtgaaaccccgtctctactaaaaat

SEQ ID NO: 302790 - DNA, 201 bp, Homo sapiens
aaaacaactttgtcaccagcattgaaatgtaaaacatgaatatatgcaataaatagaaagttaaatttggaagaaatacaagggacgtgaagtaggtgaartgggaaaatgtggtatcagggcttagctgtttctgctccgtgagcggctcctttaacaggcagtctatgccctggagctctcttgtgggttgatagagac

SEQ ID NO: 302791 - DNA, 201 bp, Homo sapiens
aagctcgaacagaggatcctattgatgcagtccatgtaggcaggttcctagggctgagagcagagggaagaaaggtagagagtagatctggagggacacayagtgtctctatcagagctaacttttacaatgcctcttttcatcttgcttctcaagaatctataatctatcttgctttcataagccctgttcctcccttca

SEQ ID NO: 302792 - DNA, 201 bp, Homo sapiens
attgtacagaaaccactaacatacatttgacttttattggatttcttcagtatctggccctcagatgtactcagatattcagatatctgctacttaagaayggactgaatgatgagcgtgtgtatgtgttacgtgtgtgtttgctcaagggcatgcctgagagagggctttgaataaagtgaagcttctgttaagagtttt

SEQ ID NO: 302793 - DNA, 201 bp, Homo sapiens
actgcttcccactgagatgcaagaggtagggaattccctaaacactggaaagtatgttggatgctggaaagctaaaaagaatgacaaatgtcccccaagayagataagctatagtatagtgcaggatgagaaatgccaaataaggagcaaggaagaaaagagatgaattatttctaggttggggtaaggaaggataatcac

SEQ ID NO: 302794 - DNA, 201 bp, Homo sapiens
ggagtgcacggccgccatcttggttgtgggaagtctcgtctaggctgtcctctctccagttgggaggaccaagatggagcgaaggatgaagtagcaagtgyacgtctttcttgggagcaggatgttgcgcaagtttacacttctgaccccatcacactgcttcccactgagatgcaagaggtagggaattccctaaacact

SEQ ID NO: 302795 - DNA, 201 bp, Homo sapiens
gagagaggtctgtccccacccacccaaaaaaaagcaatggtgttgctaaagagaaaataaagacaatgacagcaaggattgagcagtgagtagaaaagttyaactgtaaagtaggggactagattcatcacacaactatgctctgggtgggaagggtggttctttttaaaccaaaggatccttattggtattaggagagtg

SEQ ID NO: 302796 - DNA, 201 bp, Homo sapiens
aaaacccttaacatactcttttaaaaaattaaaataaaatttaaaatgcagtttttattacagaggctgaggtgttagaaatatttttctaaatatctggkcttcttaatagaaactctaagcagtttaatgacatcagatataaatttaagaataaaaaactattttacatatttggcaaacacccgaactgactctgag

SEQ ID NO: 302797 - DNA, 201 bp, Homo sapiens; identical to SEQ ID NO: 63106

SEQ ID NO: 302798 - DNA, 201 bp, Homo sapiens
atttccctggtgttaaacaattcttaaatttttatatcaggcagagtcacaaaaggaaaaagcacattcaaaatgggtaatcgaggataatttggtaaggrgggtattaacaaacgtgtagatagagtttaggaaaatcaaaaaagcaatggtgggccgggcatagtggctcacgcctgtaatcccagcattttgggaagc

SEQ ID NO: 302799 - DNA, 201 bp, Homo sapiens
tgtctaaagcaaaaaacaaaacaaaacaaaaaaaacagagagtcaaaagccagcagtatcagtgtttgttctattttatgtttaattgacgagtgctttaraattacaatctttagtgttattttacttaattttccttttctaacaggtgtgggccatgtttgaggattgccccagcattcagttctatgagtaataaat

SEQ ID NO: 302800 - DNA, 201 bp, Homo sapiens
ctatctaaaaatagtatgtcaaatatgttttactcatatagcatcattttttaaattaacttctctaaactttcaaccttgtttttaaaaattgctatttwaaaaaaaaaaaaaaactgtgtgaaaccaaaaatagcctgcatgtgttttatttttaattccttgtggctgggattggaggggaggtcacagtttgcttca

SEQ ID NO: 302801 - DNA, 201 bp, Homo sapiens
gtaattaataataccaattgtgattaagcctgccgattagtaaacatagcacatgtataaattgcttaaagttttaccctgcaggaaaaaagaaaaaaaaattctttaactgtggctttagaaagcatattatccacttaccagttgtgtatattgacacaagttgttgctcaagataagacacttatcttgaagggaagg

SEQ ID NO: 302802 - DNA, 201 bp, Homo sapiens
atttgcttatacaaataggtaaatcttgtatactaagagatatatatagtttttaagttctctggttacaaagttactgcactggcagatcaaagaatgawttttaaaaaaagttacctcaagttaaagttaatatcttttttttttttttttttgaggcggagtccctctgtcacccaggctggagtgcagtggcacgat

SEQ ID NO: 302803 - DNA, 201 bp, Homo sapiens
gacttaagaatctaaaggatagtgtgtggaaactgcagagtataaatagttagaatgcagcatttttaatttgagagctattcaagaaggaagcaaaattkggaagtagcacttcatggtattagatttgcttatacaaataggtaaatcttgtatactaagagatatatatagtttttaagttctctggttacaaagtta

SEQ ID NO: 302804 - DNA, 201 bp, Homo sapiens
cattctgacagtgtttcatattcctcttcccttatgtggccttccagattcagtcagtcaagtaaatgtagaatggaagtttggaggttacttcagagctrtaagaaccctattctcttgagtttgggattagagtccatttcagggctagtctctgcataacctgtgtattgcctctaaatcgtcaagtgatgtggatag

SEQ ID NO: 302805 - DNA, 201 bp, Homo sapiens
aaatgcaaatgaaaggactactgtaaaagttttatgaactgttttaaaagtgttttctttaaaattgcctaaagagaatcagagatttaaattttttaaayatttttatacctaatccaaatatgttgcctaaaatcttgcaattttttttcagatggatttaatgccttttattaacaaagctggttgtgaatgtcttaa

SEQ ID NO: 302806 - DNA, 201 bp, Homo sapiens
gactttacaggtaaatgttgccaaatccgtataaagatcaggtaatctactgttactgtaactacttaagatcttaagtaaaaagaaaacttttaaatttrtttttgaactgtgacattgatctgataatttgacaaagtatgcaccaaaaaagaaagctgcagaccagtttcaattatgaatattgatgtaaaattttta

SEQ ID NO: 302807 - DNA, 201 bp, Homo sapiens
aagtcttaggaacacagcagtcttgttgcctagctacaggcatacttctttacacatccgctgtggtatgagtgttttggcctcagataggaaataggaaraaatgaagttttaagaaataaaaatttagtttttgtgcaaatgttatggataaaatatgaaaagctgttatttttaaatgtccctttttttctgtcaggt

SEQ ID NO: 302808 - DNA, 201 bp, Homo sapiens
tggccggcttctccagctcaggagatttctcacctgctccttttcaattctttgacaaactggttttgggggtggcccgcccctattccttccagcctgtsggagtctccgcagccacccttgcctgagcctgaccccttctttctgcagagccagctgtcatttgcatctccagagctccaaaagcttaatttaccgaac

SEQ ID NO: 302809 - DNA, 201 bp, Homo sapiens
gttttatctttttaaatgtatgccctcttttctggcactgtatttaaaaaaaaaaaaaagtctaattactgattttgttttagaatcaaatttgactttgktatcacatgtattctaggttttaagagtaagttatttcaaataacaacataaagacttaagaatctaaaggatagtgtgtggaaactgcagagtataaat

SEQ ID NO: 302810 - DNA, 201 bp, Homo sapiens
tgtattgatttgtgtgtgtctgtgtatagtgtgagtgtagtggtaaagggagtatagtatatttgaggtttttaaacattttattttattctaccattgtrtaggtcagggccctaaatatgtaaaaatttttatcaacctgccccgatctatggattttgaagaggcagaaagaagtgaaccaactcaagctctggaact

SEQ ID NO: 302811 - DNA, 201 bp, Homo sapiens
aactttactattacaaacatgttacattgaacttccttatactacatgttattgtgaaatagagtaagtgttgttaaaatggaatagactttcaaaagggyaattattgggtcttggcttgtgttcatctaaaatgaatagatatgacccaatcagtggcctttgaaaaacagtgtagtgatatatattcccatttataaa

SEQ ID NO: 302812 - DNA, 201 bp, Homo sapiens
cctgctcttgtttcttgttcccattttgtggcttacgtctctccttcccagatgatcacttcttcctttcatttctatagcttttagtttctttgactttygttttttgaccatacatacccaccttctttgttcttgtatgtgggctgccaggtgcactaagaaaaattgctgaactcttgggtgggacccactgcagaa

SEQ ID NO: 302813 - DNA, 201 bp, Homo sapiens
ggcccccacgctcttggtaacggcgcctacttttgggcccgacctgcaggcttgcagccgcagcgatctgacagctagcaccgcccccggctagagcgggyttgtgacctttgacccctgacccctgacctccacggtgcaggcacatcccgccctgtggtttcccatggagaagcttgaaagcccccttacctgtcacag

SEQ ID NO: 302814 - DNA, 201 bp, Homo sapiens
ttcaaatattccccaaggtcgcttccagctctgagccacatgctgggatgtccatctttttcctgaatcctagttactgtctttttttttttttttctttyccaagttggagtcttgctctgttgcccaggctggagtgcacgatcttggtgaccttggcttaactacaaccttccgggttcaagtgattctccttcctca

SEQ ID NO: 302815 - DNA, 201 bp, Homo sapiens
tctgactgtgatgaacaggtaattgagggctgaagataagcttgtggagattatcactatttatgcctgctcttgtttcttgttcccattttgtggcttaygtctctccttcccagatgatcacttcttcctttcatttctatagcttttagtttctttgacttttgttttttgaccatacatacccaccttctttgttct

SEQ ID NO: 302816 - DNA, 201 bp, Homo sapiens
cgtggtggtgggcgcctggagtaccactctggccgacagagtgagactctgtctaaagcaaaaaacaaaacaaaacaaaaaaaacagagagtcaaaagccrgcagtatcagtgtttgttctattttatgtttaattgacgagtgctttagaattacaatctttagtgttattttacttaattttccttttctaacaggtgt

SEQ ID NO: 302817 - DNA, 201 bp, Homo sapiens
tccaacattaatattcttcatttatctcttgatgcacatagtacttattcctttgaagataggaagatgttatgttgatgtcattattacagatgtcattrtggctgcattagttaagaagagtagcacattattaattgcttcaggtttgtattaatcaccttctgatataaaattaatacgatgttgttaataggtcac

SEQ ID NO: 302818 - DNA, 201 bp, Homo sapiens
tgaaaacccagtgaaacaaatttcgtatttgtaaaggattggacatcagatttatattgtctatgtgactcttctataacaattagttgcagtatgcaagyattacataattcaaattgtaaatagtgaaaaatgaacgtttataggtaactataacgtttcacttaatgggaaatcttactattataaatgtgcataatt

SEQ ID NO: 302819 - DNA, 201 bp, Homo sapiens
aattctacagaagttttagtgttgaaagagtccctttctgaaacccaagtgtcattagatagtttagttcatttgtatatgggcacattaactggtctgtgatgatcttaacactccttaaatagaccatctcagattaatcacatctgaaattaaggataagattaatatgcagggttttggtttacagttttgtacact

SEQ ID NO: 302820 - DNA, 201 bp, Homo sapiens
aaattctacagaagttttagtgttgaaagagtccctttctgaaacccaagtgtcattagatagtttagttcatttgtatatgggcacattaactggtctgtgatgatcttaacactccttaaatagaccatctcagattaatcacatctgaaattaaggataagattaatatgcagggttttggtttacagttttgtacac

SEQ ID NO: 302821 - DNA, 201 bp, Homo sapiens
atatgttttactcatatagcatcattttttaaattaacttctctaaactttcaaccttgtttttaaaaattgctatttaaaaaaaaaaaaaaaactgtgtgaaaccaaaaatagcctgcatgtgttttatttttaattccttgtggctgggattggaggggaggtcacagtttgcttcaacagtgaaaatacattgcatgc

SEQ ID NO: 302822 - DNA, 201 bp, Homo sapiens
aatatgttttactcatatagcatcattttttaaattaacttctctaaactttcaaccttgtttttaaaaattgctatttaaaaaaaaaaaaaaaactgtgtgaaaccaaaaatagcctgcatgtgttttatttttaattccttgtggctgggattggaggggaggtcacagtttgcttcaacagtgaaaatacattgcatg

SEQ ID NO: 302823 - DNA, 201 bp, Homo sapiens
ctagaagatcacttaaacccaggagttcaggaccagctggcaaacatagtaagactccatctctatttaaaaaaaaaaaaaaattacccatgcaagacggkgggtgcacctgtagtcccagctacttgggaggctgaggtgggaagatcacttgagcccaggagttcaagaccagcctgataaacatagtaagattccatc

SEQ ID NO: 302824 - DNA, 201 bp, Homo sapiens
attagaagaatgctaaagtatgtgttcatttaagaatgtttttgagagtttcacagaatatacatagtagtagtatgaagaattataattggctgggtgtkgtggctcactcctgtaatcccagcattttgggaggccaagatgggcagattgctcgagcccatgattttgagactagcctgggcaacatggtgaaacccc

SEQ ID NO: 302825 - DNA, 201 bp, Homo sapiens
tagatatagatacagccatggatatggacatggacatagatatggaaatggatgtagatgataacctaaattagggagtgacagccatcacctttgccatrtattattggttaaagtaagtcacgggttttatctgtactcaaggagaaaggattatacaagagtgtgacttatcggggtaacttaagatgggccagccac

SEQ ID NO: 302826 - DNA, 201 bp, Homo sapiens
gcgcccggctgggtttatttctttatacattgtagaaagctagcggtttactgtattctttttctcaaacagcataactcaaaatccttctaacatacacwttttatatattggactaagcagataagttttcagtcagaaggtttagagtagaaaagtaactttttttttttcttcattttaaatgtctggactaggtga

SEQ ID NO: 302827 - DNA, 201 bp, Homo sapiens
ctgctcttctggggtttccagtaaaaaggaactccttcattagatccctgtaatctccctgtgacaaagtatagtagagatagtatcatagtttcatttcyctggtcacataattatctcaaaggaattgacacattgacagtattaaggatgctgctgcatgagtttagcctcgactgcaggtgacttttacttttaaaa

SEQ ID NO: 302828 - DNA, 201 bp, Homo sapiens
aaattttgtatacctgttcattttttgatggacattccagttgtgtcttcctttggctgttgtggataatgctgctaggggacattgctatgcggggatcyctgcttacttgcttgcttttcttttttcttatttgttagagacagggtcttgctctgttgcccaggctggagtgcagttttgagacgatggctcactgca

SEQ ID NO: 302829 - DNA, 201 bp, Homo sapiens
catttactaaatttaaaaggataagtgatgtcatatatataaaacacctaaaaggaatgttagaattctataaatgtgtcttctcatttttagcaattttktgatgtctgtattcttaataataggggaatacctgtagtacattaagtatctaggccacagtagaaaagggaagataggatttcaataaggaacctcacc

SEQ ID NO: 302830 - DNA, 201 bp, Homo sapiens; identical to SEQ ID NO: 63100

SEQ ID NO: 302831 - DNA, 201 bp, Homo sapiens
  misc_feature (1)...(201): n = A,T,C or G
taaagacaggtgcacgatactttctgaatgactgcacagaaagcgccccatatgtaattaagtctgttaataaatattcctaaacgttattttgtcttgtntgtagacctgccccgaatacagtacaggagcatcttcaaagtacttccagtgggtgccctggacagcagctaagaaccccggggtaaaacgagtttcctc

SEQ ID NO: 302832 - DNA, 201 bp, Homo sapiens
actatgggttgatcacatgtctgtgccttccattttagcccgtacccctggacatggagctatcacaaaagtgtatactccaaaggacaggaacatgtaayaatcatgtttaacttctgaggctatggcacagtgcctgccatacgggaggtcctgaagaatttgttgtggttgtcagtgagctgattccaatcttaattc

SEQ ID NO: 302833 - DNA, 201 bp, Homo sapiens
acacacacatatatatatatgaaacaactatgggttgatcacatgtctgtgccttccattttagcccgtacccctggacatggagctatcacaaaagtgtrtactccaaaggacaggaacatgtaataatcatgtttaacttctgaggctatggcacagtgcctgccatacgggaggtcctgaagaatttgttgtggttgt

SEQ ID NO: 302834 - DNA, 201 bp, Homo sapiens; identical to SEQ ID NO: 63102

SEQ ID NO: 302835 - DNA, 201 bp, Homo sapiens
taacaaaaggaaaaaataggtaaattgaatttcattgaaatttaaaacacttgtgcatcaaatgacaccataaagaaagtgaaaagacaacccgtagaatrgaatatctgaaagtaatttactctataagggattgatacccagaatatataaagaactcctacaacccaacagcaaaaacaaacaacctgattcaaaaat

SEQ ID NO: 302836 - DNA, 201 bp, Homo sapiens; identical to SEQ ID NO: 63103

SEQ ID NO: 302837 - DNA, 201 bp, Homo sapiens
ggtactagaagtgagttttcttagggtgggaaaaacatttctaggattgtgtgattgggatttcagtggaaagctttcaggtctctcatgaatgatgttgwcccagctatgttatattttagaccagacatgtactgatgacctttatgagttttgctggtatagatactgccatttagaatagaatcaatgtaaaatacg

SEQ ID NO: 302838 - DNA, 201 bp, Homo sapiens; identical to SEQ ID NO: 63104

SEQ ID NO: 302839 - DNA, 201 bp, Homo sapiens
ctcttaaaacctgaatttcttactcttatccacattcttttatatgaaactgcctttttatcatcttgctaccttgtgagctttctaacatggtgtctttkgaccaaaggggagttcttttaaggtactagaagtgagttttcttagggtgggaaaaacatttctaggattgtgtgattgggatttcagtggaaagctttc

SEQ ID NO: 302840 - DNA, 201 bp, Homo sapiens
agctttgtgttttgtgtttcccaagtaatacaatgatcaataatgctctcagtgtttatcagcacaaaatttacttgtgatagagataatgccagttccccttctagtggctcttaaaacctgaatttcttactcttatccacattcttttatatgaaactgcctttttatcatcttgctaccttgtgagctttctaacat

SEQ ID NO: 302841 - DNA, 201 bp, Homo sapiens
gtgagacagaattaggatttctaagagatggctccaaggaagatacagttttaacttctcttaaggcagttcttcctgtaatagtaaaccaaatacctggrctatgttatttaatacctagaagaagtgtcatcactgatgagtctttttttttttttttttttttttttgagacggagtcttgctctgtcgcctaggccg

SEQ ID NO: 302842 - DNA, 201 bp, Homo sapiens
ggcagagatgtggttcgagattctccccggactctccgtcatgggcgtgtgcttgttgattccaggactggctactgcgtacatccacaggttcactaacsggggcaaggtaagccggcttcggcccgggggccgactccacgggctgatttccgaaaagggtggtgggcagggagaccgtcagcctgcgaaccctctctc

SEQ ID NO: 302843 - DNA, 201 bp, Homo sapiens; identical to SEQ ID NO: 63138

SEQ ID NO: 302844 - DNA, 201 bp, Homo sapiens; identical to SEQ ID NO: 63140

SEQ ID NO: 302845 - DNA, 201 bp, Homo sapiens; identical to SEQ ID NO: 63141

SEQ ID NO: 302846 - DNA, 201 bp, Homo sapiens; identical to SEQ ID NO: 63142

SEQ ID NO: 302847 - DNA, 201 bp, Homo sapiens
catgataatagatatctacttatctggagccatatttctcaaagtatggtccaagaataaccatcagaatcacctagcatgtgagacagaattaggatttytaagagatggctccaaggaagatacagttttaacttctcttaaggcagttcttcctgtaatagtaaaccaaatacctgggctatgttatttaatacctag

SEQ ID NO: 302848 - DNA, 201 bp, Homo sapiens
ttactttttgattttgttattgttcttcacgtgtgatctacagctgttgtttcttagtgtcccaaaagacaacaactagatatttcttttttttttttttwaaaaaaaaaggaaaaaaaattcatgttggttaaaatagtgtaaaaagtcacaggtaccaacttaatcctaaagtttagtggtctgattttatttaggaga

SEQ ID NO: 302849 - DNA, 201 bp, Homo sapiens
tctggctgcgctcaaagatggcttgtgcatcgcgctctttctctgtgtccagctcatagacagctgtcgctcccatatcctctggtcccacgggtttcgcsgaacgggtggatttataaaccacgccgagactctcgggctcattttcctcttcctcttcgctgctcaagtcgccgtaagccgccttctgtttaccactgt

SEQ ID NO: 302850 - DNA, 201 bp, Homo sapiens
aactccgtctcaaaaaaaaataaataaataaagaaattttcctgcttcagcctcccgagtagccgggaccacgcctggctttttttttttttttgtagagrcggggtttcatcatgttggcgaggctggtctcgaacttctgacctcggttgatccacccgccttgatctcccaaagtgctgggattacaggcgtgagccg

SEQ ID NO: 302851 - DNA, 201 bp, Homo sapiens
tgaacccaggaggcggaggttgcgatgagccgagatcgcgccactgcactccagcctgggcaacaagagcgaaactccgtctcaaaaaaaaataaataaakaaagaaattttcctgcttcagcctcccgagtagccgggaccacgcctggctttttttttttttttgtagaggcggggtttcatcatgttggcgaggctgg

SEQ ID NO: 302852 - DNA, 201 bp, Homo sapiens
gcgggcggccgcggggcttgctgggaagagaggcgaagccaggtcacctttcaaggacccagaagtagggttttggcctaggtaacggggcagagatgtgrttcgagattctccccggactctccgtcatgggcgtgtgcttgttgattccaggactggctactgcgtacatccacaggttcactaacgggggcaaggtaa

SEQ ID NO: 302853 - DNA, 201 bp, Homo sapiens
gtttttccaaggaagtatcctaatgtactcttctttctttctttttttttgttttgaggcggagttttgctcttgttgctcgggctggagtgcagtggcgyaatctcagctcactgcaacctccacccccggggttcagccagttctcctgcctcagcctcccgaatagctgggattacaggcatgtgcactacacccagt

SEQ ID NO: 302854 - DNA, 201 bp, Homo sapiens
ttccaaggaagtatcctaatgtactcttctttctttctttttttttgttttgaggcggagttttgctcttgttgctcgggctggagtgcagtggcgcaatytcagctcactgcaacctccacccccggggttcagccagttctcctgcctcagcctcccgaatagctgggattacaggcatgtgcactacacccagttaat

SEQ ID NO: 302855 - DNA, 201 bp, Homo sapiens
tccccactttctcttgcaagcctttaggaatttactgcgagatcttgtttttttacatcaggattcattttcccctcttcctagtccttcacatcatctcwagagtacaggatataaatttatttactttttgattttgttattgttcttcacgtgtgatctacagctgttgtttcttagtgtcccaaaagacaacaacta

SEQ ID NO: 302856 - DNA, 201 bp, Homo sapiens
gctcttttctcaaactactcccacccctataatttatgccaaagtgttctgaaaagaaacacaggcaaaatggttatcctagggctaaaaatcctgattawacctaccttgaagcttttaatccaggaccctacttcaccacccgcctgctctgtcactttctctacaaaggaaggacacgaagtaagacttccaaaagaa

SEQ ID NO: 302857 - DNA, 201 bp, Homo sapiens
catccacaggttcactaacgggggcaaggtaagccggcttcggcccgggggccgactccacgggctgatttccgaaaagggtggtgggcagggagaccgtyagcctgcgaaccctctctccgaggtcggccctctacttgcttccggttgcctagaagccgaggcttgcgaaacgaagcccgatagaaactacatcctgct

SEQ ID NO: 302858 - DNA, 201 bp, Homo sapiens
agctgaggcgggaggattgcttgaagccaggagtttgagatgggcttgggcaacataggagatcctatttgaaattaaaagaaacgaaacaggcagggcayggtggcctgtaatctcagcactttaggaagcccaggcgggtggatcacatgaggtcaggagttcgagaccagctcaggaggctgaggcaggagaattgct

SEQ ID NO: 302859 - DNA, 201 bp, Homo sapiens
ttctttgtactactaatttgcatttttatttaaacgatgattccatttctctggaatgtcccttttaaaaattgtagtatctatcaattgggtcactcacktttataaactgcaacaataattgtctcttatttgaaggaaaaaagggttgctcattttgggtatcactggagtctgatggaaagagataggcgcatctct

SEQ ID NO: 302860 - DNA, 201 bp, Homo sapiens; identical to SEQ ID NO: 63143

SEQ ID NO: 302861 - DNA, 201 bp, Homo sapiens
tccaatgtattgttgcagttagagaaatgtgggatgtggaagcactctttttaataacaatgccatttaatgacactggaaataaaagtacatggcatatmtttgatgggaacagacttgtcacattctcctttttaaactgtttttcagggtttggagaacattgattaaggaagcattttcctgattgatgaaaaaaat

SEQ ID NO: 302862 - DNA, 201 bp, Homo sapiens
aaccccgtctctactaaaaataaaaaattagctaggtgtggtggtgcatgcctgtaatcccggctactcgggaggctaaggcaggagaattgcttgagccsggtgggtggaggttgcagtgagtcgagatggcatcactgtactccagcctgggcaacagagtgagactctgcctcaaaaaaaaaaaaaaaaaaaaaaaaa

SEQ ID NO: 302863 - DNA, 201 bp, Homo sapiens
cttacgaaccccctgctcccctgagtgggaacatctaggcttccccttcccagcagcagggtggcaggcagcaccacccaggacaggaccctccatttgtrgccggcagccctcaccgggcaaggcgtgactgctttttgaggcccacgaagctgccctgcggtccttgctgcagggagcagccctgggcagcctcacaaa

SEQ ID NO: 302864 - DNA, 201 bp, Homo sapiens
ggtgggtggaggttgcagtgagtcgagatggcatcactgtactccagcctgggcaacagagtgagactctgcctcaaaaaaaaaaaaaaaaaaaaaaaaarggaagaaaggagaagaaaaagaaaaaagaaagaaattggccaggctggttttgaactcctgggctcaaatgatcttcctgcatcagcctcccaaaattct

SEQ ID NO: 302865 - DNA, 201 bp, Homo sapiens
gggaccgccccggccatcctgcccctgcagccctgagccccagccctctgcagctcccacggccctcaggctccctggggccctcaccagccagtgcagascccgcgtggacctgagatgtctgcagtgtggccccaccagccccaggccctgtcccctgtcctccgtcgtggtgctttccagcctctcggggagtgggca

SEQ ID NO: 302866 - DNA, 201 bp, Homo sapiens
tggggcaggggaaggagttgttctcagctgagcaaacagtccagcaagggtgtctctgtgtgcacatgtgtgcatgtgtgtatgcatgtgtgtgggtgcatgtgtgtgtgtgtggtgggcttgaggaggggtatgggaattggttgtcgggtgtgagaggggctggggtgtggactggggggtggctggggctgcatttgg

SEQ ID NO: 302867 - DNA, 201 bp, Homo sapiens
actgagggcccagccagggctcagcatccccttacccacccctgcccctgcgccctgccccaccgggaccccctaggctgggtgcttccgcttgtctcccwggccagttcccagctgacacccccattcccacttggttgtgtggccctcccatagtctcaagctgggtttgctcaggctcttgggctgtgccgtacagac

SEQ ID NO: 302868 - DNA, 201 bp, Homo sapiens
gtcccgcagcccggccagccgcaaccagaggattctctacaccgtgctggagtgccagcccctcttcgactccagtgacatgaccatcgctgagtgggttygccttgcccagaccatcaaggtagtggggctggggaatgctgggtggggctgtggtgtgtgggtggggctgaggtgtgtgggtggggctgtggtgtgtgg

SEQ ID NO: 302869 - DNA, 201 bp, Homo sapiens
ccgcagcccggccagccgcaaccagaggattctctacaccgtgctggagtgccagcccctcttcgactccagtgacatgaccatcgctgagtgggtttgcsttgcccagaccatcaaggtagtggggctggggaatgctgggtggggctgtggtgtgtgggtggggctgaggtgtgtgggtggggctgtggtgtgtgggtg

SEQ ID NO: 302870 - DNA, 201 bp, Homo sapiens
gtcatccacggcaccgacaccatggcctttgctgcctcgatgctgtccttcatgctggagaacctgcagaagactgtcatcctcactggggcccaggtaaycccaggggcccggggctcctaggaacaggggcttcctgaggccacagggcaagtcagcgctgtgggcggccgctgcgggaccccgggcttcctgctcagc

SEQ ID NO: 302871 - DNA, 201 bp, Homo sapiens
ggggcaggggaaggagttgttctcagctgagcaaacagtccagcaagggtgtctctgtgtgcacatgtgtgcatgtgtgtatgcatgtgtgtgggtgcatrtgtgtgtgtgtggtgggcttgaggaggggtatgggaattggttgtcgggtgtgagaggggctggggtgtggactggggggtggctggggctgcatttggg

SEQ ID NO: 302872 - DNA, 201 bp, Homo sapiens
tgaccccagcatccacctggactctgcctgcagtgcttgtgcccgggacgggcctggctgccatcctgaggacactgcccatgttccatgacgaggagcaygcccgagcccgcggcctctctgaggacaccctggtgctaccgtgagtgtgggctcctcccagtcccggacagggcatggctgctgaggggcaccgatcct

SEQ ID NO: 302873 - DNA, 201 bp, Homo sapiens
  misc_feature (1)...(201): n = A,T,C or G
cagactatgcagctggcatggtagtgccgggagatcagggcctagcggggaaggggacagcctgagggcctggcagaggtgggctctgacccacccctcangggctgggggccgtggtgagtcgcccttcctgcccacacgccccctcctcacaggccatggcgggagccggcgtcatctcaggcttcgacatgacatcgg

SEQ ID NO: 302874 - DNA, 201 bp, Homo sapiens
cactgcagggcaacacgctgggcggtggggtctcctggctcctcagtctgagcggcagccaggtaatggcgtgggacacgggcctgagtggcagctggggrctgtgcaccctcttggtcaccctgggatgcaccaggcaggcacgagcccctgtagccatcactcgagcccaaacagttaggcacacccgggttctggggc

SEQ ID NO: 302875 - DNA, 201 bp, Homo sapiens
agaggcagtcaccatgctgctgcagagaggtgtggacgtgaacacccgggacacggatggcttcagcccgctgctgctggccgtgcggggcaggtaatggrgctagggctgcacagagctgccttggacaggtgggcgcagagaggctgtgggctcctgcactcaaacagcctcccggggctgggctgggagaggtggagg

SEQ ID NO: 302876 - DNA, 201 bp, Homo sapiens
aagcccgacctgctgcaggagctgcgggtggccaccgagcgcggcctggtcatcgtcaactgtacccactgcctccagggggctgtgaccacagactatgmagctggcatggtagtgccgggagatcagggcctagcggggaaggggacagcctgagggcctggcagaggtgggctctgacccacccctcacgggctgggg

SEQ ID NO: 302877 - DNA, 201 bp, Homo sapiens
gggtcacttggcccatccttccgggggcagctgtgcgtgtgagctgggcagggtggggtgcatggaggtgacttggccaagtggtcctttcccagctgccmctcccccttcctgccaccctgcctttgcccaggctggtccctcctccagacaccctctgcccatctccttacctcctgcgccttcattctggagcttgaa

SEQ ID NO: 302878 - DNA, 201 bp, Homo sapiens
cttggagcttgttctcagagactggtgccctgccaggcctcacctgagacgcagggccactccagtggcctgcccggaagtcactccctggcctaccgtckctccgtctggggtgtgctcctgctgagggagcccctgcttcctggactctacccggcccctgcctgttccaggtccacggccagcatggccagtcctgac

SEQ ID NO: 302879 - DNA, 201 bp, Homo sapiens
gcctgcccggaagtcactccctggcctaccgtctctccgtctggggtgtgctcctgctgagggagcccctgcttcctggactctacccggcccctgcctgytccaggtccacggccagcatggccagtcctgaccccacgccagcacccctccctgaggcagcgggagcatcccctccctcctgggagatgcatcctgcct

SEQ ID NO: 302880 - DNA, 201 bp, Homo sapiens
cctgcagaagactgtcatcctcactggggcccaggtaatcccaggggcccggggctcctaggaacaggggcttcctgaggccacagggcaagtcagcgctrtgggcggccgctgcgggaccccgggcttcctgctcagcccagcagctcctgaggtggctgctgcagggcccgtgctggggctcgcaaatgctcaggtcct

SEQ ID NO: 302881 - DNA, 201 bp, Homo sapiens
tagagatgcgtatggaggttttgcgttagagatgcgtatggaggttctacgttagagatgcgtatggaggttctccgttagagatgcgtatggaggttatrccttagagatacgtatggaggttctacgttagagatacgtatggaggttctgcgttagagatacgtatggaggttctgcgttagagatgcgtatggaggt

SEQ ID NO: 302882 - DNA, 201 bp, Homo sapiens
tgaccccacgccagcacccctccctgaggcagcgggagcatcccctccctcctgggagatgcatcctgcctgccctggccccctgctgtttcaaggcagcyccaaacctgccctgtgtctcatcctgactgactgaggtggggtccagccccggggaggctccagggcttggcagcactggccttcctttgggggcatttg

SEQ ID NO: 302883 - DNA, 201 bp, Homo sapiens
gcagagagaggcaggctcccacagggaggcaccgactcaagcctgtgcgctgtctcctgtcctgggctcacaccccgtcccttcttcctgctgttccctcytgtcctgggctcacaccctgtcccttcttcctgctgctccctggagcaccttctagggagtgtgaggcccagaacacatcagtgtgtctactgtgtgtgc

SEQ ID NO: 302884 - DNA, 201 bp, Homo sapiens
ctgaaggaactgaccagacttgagcactgagggcccagccagggctcagcatccccttacccacccctgcccctgcgccctgccccaccgggaccccctaggctgggtgcttccgcttgtctcccaggccagttcccagctgacacccccattcccacttggttgtgtggccctcccatagtctcaagctgggtttgctca

SEQ ID NO: 302885 - DNA, 201 bp, Homo sapiens
attccagggactccgccagcaccgggtgctaagcccgggcaggccacgaggctcaagacacaccggcctcaggcccagggccgtggggcagctcctgggcrcagcactaaggctggtctgggtgggaggctgccctggccccagccccccacccctgagtgtttcccacgtgcgtgtgggtgtgggaacctgatgccgggc

SEQ ID NO: 302886 - DNA, 201 bp, Homo sapiens
gcactaaggctggtctgggtgggaggctgccctggccccagccccccacccctgagtgtttcccacgtgcgtgtgggtgtgggaacctgatgccgggctgycgggccggttctggcacccagtgttgagaaacctcaggccttgcccagggtgtggctgctggggcccctggggaggggcacaggttggcagtgtgcaccc

SEQ ID NO: 302887 - DNA, 201 bp, Homo sapiens
cacaggccatggcgggagccggcgtcatctcaggcttcgacatgacatcggaggccgccctggccaagctatcgtatgtgctgggccagccagggctgagsctggatgtcaggaaggaggtgcgggcgctctcgggctgtgggcaaccctcggtgtgcacaagcatgtcagttggctcccaggggcatgtctggggcgatg

SEQ ID NO: 302888 - DNA, 201 bp, Homo sapiens
ctgagtgtttcccacgtgcgtgtgggtgtgggaacctgatgccgggctgtcgggccggttctggcacccagtgttgagaaacctcaggccttgcccagggygtggctgctggggcccctggggaggggcacaggttggcagtgtgcaccctcagcctctctgagccagctgggggtagcaatgccggcctgggcccgggtg

SEQ ID NO: 302889 - DNA, 201 bp, Homo sapiens
accctcagcctctctgagccagctgggggtagcaatgccggcctgggcccgggtgccagctgccagcaccctgtcgagggcttgtcctgggctttttaccyactgtctgggaagtgaggggctgggctggtccgggagtcatgggcgggcttggtgctcctgtccacagtcggctcggcgccaaggggtggggggatgcgt

SEQ ID NO: 302890 - DNA, 201 bp, Homo sapiens
aggctggaggaggccctgctggccctgtcctttccatgtgtctcaggagaccacactgtcacccccaggcaaatcctgcacccttacccttctgtgctgarccctggccccggcccactctgctggggcccttggagcagaggagggtggagaaggggatatggctgtggggtcaggccaggcctgtcactcaccagccat

SEQ ID NO: 302891 - DNA, 201 bp, Homo sapiens
gaggaggccctgctggccctgtcctttccatgtgtctcaggagaccacactgtcacccccaggcaaatcctgcacccttacccttctgtgctgaaccctgrccccggcccactctgctggggcccttggagcagaggagggtggagaaggggatatggctgtggggtcaggccaggcctgtcactcaccagccatgggtcc

SEQ ID NO: 302892 - DNA, 201 bp, Homo sapiens
gctttatactgagcagctggccccagggaatgagtggtgtggccaggtctccatttaagggacagaactgagatgcagaggctgcaggaaggtggcagagytgctgggggtgggaccagcccgtctgtgcacttgctgtgtgctaggccctccaggtcggggagctggggaaggggacctgggctggaccctgagggagtc

SEQ ID NO: 302893 - DNA, 201 bp, Homo sapiens
cctgctcagcccagcagctcctgaggtggctgctgcagggcccgtgctggggctcgcaaatgctcaggtcctgcccgggtgccagcaccacctgccccgcrggaggggggtcatctcctgctggtggccctgggagctgtgaggccctggagcacccagagccaggcccacctcggccctgggggtgccaggcatcccttc

SEQ ID NO: 302894 - DNA, 201 bp, Homo sapiens
tccatggaggccctcttaggaggtctgcggggagcagtccggggaggtggctcagccaccccactctgcttgcctggcgccgtctcccttgtccctccagrgtctccccagggcccactgcacacacctgttagcggtggagcagtgcctcccgccccagaactcgagaaggagggacagggctccagctggttctcctct

SEQ ID NO: 302895 - DNA, 201 bp, Homo sapiens
agcagtcgccttccaccagagcctgaacctctgagggtgccccgtgcctggtcccaccttccctccccaccctcctcccacacccccagccaggctgcttyggcaagtgtgatgagggcgccccgtctagggatcctgtatatcaggagccagctggcccaggtggccttgcccccagcatagaggtccttccatttctca

SEQ ID NO: 302896 - DNA, 201 bp, Homo sapiens
gaccttcccgagccctgggggagcagaacatcccgtggacctctctaggggatcaagggcacagttatgagcaccgcaggacccacgaacgttcacatgcrtgttgtcctcactctgatgttggcctgtgccgggacatccttatccctgttatacctgtggggaaactgaggcttacaggctaggggctcacccacagcc

SEQ ID NO: 302897 - DNA, 201 bp, Homo sapiens
gccagaggggaacagagcgggtcagggcatttagagcaggaggaggtgcagagcgggagcctgctgttccgcctcctgctgtttctgtcccgcagcccggmcagccgcaaccagaggattctctacaccgtgctggagtgccagcccctcttcgactccagtgacatgaccatcgctgagtgggtttgccttgcccagacc

SEQ ID NO: 302898 - DNA, 201 bp, Homo sapiens
gagatgcgtatggaggttttgcgttagagatgcgtatggaggttctacgttagagatgcgtatggaggttctccgttagagatgcgtatggaggttatacsttagagatacgtatggaggttctacgttagagatacgtatggaggttctgcgttagagatacgtatggaggttctgcgttagagatgcgtatggaggttt

SEQ ID NO: 302899 - DNA, 201 bp, Homo sapiens
gcatggtctgcagccacagctgttggtgggtgggttgaggccctgggtgcaggctggcatcgtctgcagggacagctgttgttggcggccttggagacagscttactgcccagctcctctgagtgccccgttcccccaaggcacccatctccaggctgcctgctgcagtccaagcccgcctgtccttctctttcccacacc

SEQ ID NO: 302900 - DNA, 201 bp, Homo sapiens
tcaaatccgcgcctggatggggggtgcgggctgaggtcgctctcctccggttccggccaccggcgtccccacgcatggagccccgacctggacagaggagrttgcggtgggttctcgccgtcgcggtgctcccgggagcgccctgcgaccctggggccaggccccctgtgctgccgctgcgcccctgagggccagcgtcct

SEQ ID NO: 302901 - DNA, 201 bp, Homo sapiens
cgggagggccccagggcattggcctgccgctcctgctctggacacagaaggcttaggaggctgccctggagaaggcttaggaggctgcgaggacccctcamctgcgacacccaggagggtgtccccgtcccctggggtcctggtcaggcagcagtggttggcacgatactggggctacctggcatctgcggggacgcacgt

SEQ ID NO: 302902 - DNA, 201 bp, Homo sapiens
tctgctggctcctgagtgaggtgcagcggggctgggctggcgagggcagaaggtcagcatgctcattctcacacaggcatccgggtgtcattgggttgctscgggaagccggggcctccctgtccacccaggagctggaggaagcagggacggagctgtgcaggtgagtgcagctagagcacctgctcttccagggatgtg

SEQ ID NO: 302903 - DNA, 201 bp, Homo sapiens
gaccctttcccccatgctgcaacctcccccacacctgcttgcgaggggctggcctgcctgagcatgcgcccctcctgcagaggcactacgagcagtaccayggctttgtggtcatccacggcaccgacaccatggcctttgctgcctcgatgctgtccttcatgctggagaacctgcagaagactgtcatcctcactgggg

SEQ ID NO: 302904 - DNA, 201 bp, Homo sapiens
tcccacacccgcctggggctcctgggctgggcctgggggtttacctggagagatgagccagacatcccaggcttctgggcttcccaggcctcagctactcygtggcctctcccccaggtgcccatccatgccctgtggagcgacggccgtgagaacctgctgggggcactgctcatggctggccagtatgtgatcccagag

SEQ ID NO: 302905 - DNA, 201 bp, Homo sapiens
tgttgttggcggccttggagacaggcttactgcccagctcctctgagtgccccgttcccccaaggcacccatctccaggctgcctgctgcagtccaagccygcctgtccttctctttcccacacccgcctggggctcctgggctgggcctgggggtttacctggagagatgagccagacatcccaggcttctgggcttccc

SEQ ID NO: 302906 - DNA, 201 bp, Homo sapiens
cctcagttaaagggcatctcacgctgccatcatgtggggctgactgatgctgtgggctctggtgggggtggaagactcactgctgggggctccgctccccmctctctcatccccagcaccccacatctccccccttcagctccaccatgccaggaaagtcctttttatcgcatgcaagctgctctagcggaagcggccgga

SEQ ID NO: 302907 - DNA, 201 bp, Homo sapiens
gttagagatgcgtatggaggttctgcgttagagatgcgtatggaggttttgcgttagagatgcgtatggaggttctacgttagagatgcgtatggaggttytccgttagagatgcgtatggaggttataccttagagatacgtatggaggttctacgttagagatacgtatggaggttctgcgttagagatacgtatggag

SEQ ID NO: 302908 - DNA, 201 bp, Homo sapiens
tcacccttgagactgtgttgcccattgctcggccatcggtctctcgctggccaacgagtgcctcctcccacagccccgtgcacgctgcggagcctggcacrggccggactgcgcggaagcccgggaggatttgcctgcgggagaggaggcagggcgagggggctgagccgcgaaggctcagggctctgaaaacaagggagg

SEQ ID NO: 302909 - DNA, 201 bp, Homo sapiens
tgtcgccaggaaatcctctcctgctctccactcttcctcgagggtggggttcagacacagctggccccagacccttgggttgccagcctctggggctggayggaggcttttggggcccctggagaccctgagctggtagggccagggagtggggctggccttgggaggggacccagcccgctctggcccgagggatgaagc

SEQ ID NO: 302910 - DNA, 201 bp, Homo sapiens
gctccctgaggccgcctgcctggccctgctgtgcctgagtggggtatggggaggccactgcctcatacctattcccaggctccctaaatggggtgatgggrggatctgtggtgctttgcaggggtgggggcacggccagcgattatggcacagtctttaggtcaccctgtacaatgggctgtgtggcctccggcctcgggc

SEQ ID NO: 302911 - DNA, 201 bp, Homo sapiens
cccccacagactccactgtccgggtgccctgcccccactcctacccaagggcagtcggccggattgattcagtgtcccctgcgcctggctgaggaggtcaycacggggtgtgatcagcgtttgggtgtgcagtggggccggtcagctcatgtaaggctgtcctctgaaatgggctgtccccttggaatgggttggggagac

SEQ ID NO: 302912 - DNA, 201 bp, Homo sapiens
gcgcctggctgaggaggtcaccacggggtgtgatcagcgtttgggtgtgcagtggggccggtcagctcatgtaaggctgtcctctgaaatgggctgtcccyttggaatgggttggggagactgccctgggaggagctattctgctagcaccaactaatgccctcccctgggtgctgggtgcggggctgccacagagttgac

SEQ ID NO: 302913 - DNA, 201 bp, Homo sapiens
tgaactcctgggctcaaatgatcttcctgcatcagcctcccaaaattctgggattacaggtgtgagccataaaaaccactgcaaaagcacatatggagtgwtttgcttgagagaagaggacaccaagagagtttagtcttgtctttggctgatttcgcctgtggtgcccacacatgcccccagcagggacagcagggccca

SEQ ID NO: 302914 - DNA, 201 bp, Homo sapiens
ggctagggctgtggggtcttgggccggccggtccctgtccctgtgcacaggacatgagctctgctggctcctgagtgaggtgcagcggggctgggctggcsagggcagaaggtcagcatgctcattctcacacaggcatccgggtgtcattgggttgctgcgggaagccggggcctccctgtccacccaggagctggagga

SEQ ID NO: 302915 - DNA, 201 bp, Homo sapiens
aggcccgctgacctcagtgtgcaccaacctggctgatgggaagaggtgtctaccctggaccatgtcatggggcaggggaaggagttgttctcagctgagcraacagtccagcaagggtgtctctgtgtgcacatgtgtgcatgtgtgtatgcatgtgtgtgggtgcatgtgtgtgtgtgtggtgggcttgaggaggggtat

SEQ ID NO: 302916 - DNA, 201 bp, Homo sapiens
atggggcaggggaaggagttgttctcagctgagcaaacagtccagcaagggtgtctctgtgtgcacatgtgtgcatgtgtgtatgcatgtgtgtgggtgcrtgtgtgtgtgtgtggtgggcttgaggaggggtatgggaattggttgtcgggtgtgagaggggctggggtgtggactggggggtggctggggctgcatttg

SEQ ID NO: 302917 - DNA, 201 bp, Homo sapiens
ccaagcaggccccagccaatctcctgcccaggcaggagctccccctgccgccctcacagacctcacctcttcctacacgtttccaaggccgcgccccgccscgcaccccgccaggccccgccccgcaccccgccaggccccgccccgcaccccgccaggccccgccccgcaccccgccaggccccgccccacccgccaggc

SEQ ID NO: 302918 - DNA, 201 bp, Homo sapiens
ggccagaatgctgaggctcagactagggcctttgtctctgctgacacctcgctgctgtcacgactttgtggtccctgtgccactgactgcaggacgcgcasctgagtctccttggacctgcccaggtggcccccaagcaggatgtgtccaacacaccttgcttccctctgcctggccccaggccccactctggcccctgct

SEQ ID NO: 302919 - DNA, 201 bp, Homo sapiens
gccagaatgctgaggctcagactagggcctttgtctctgctgacacctcgctgctgtcacgactttgtggtccctgtgccactgactgcaggacgcgcagstgagtctccttggacctgcccaggtggcccccaagcaggatgtgtccaacacaccttgcttccctctgcctggccccaggccccactctggcccctgctt

SEQ ID NO: 302920 - DNA, 201 bp, Homo sapiens
aggccccactctggcccctgctttctcagtaaggacatccccactccgtggctgctctggccaaagacaggagagtcaccctttctcttcggcgcgtaccyctcaagctccagcttgtgctcccagcactcccaccttgcacttccccatccccagctcctccccaccctgcccaaagccctcctgaacccattcttgtct

SEQ ID NO: 302921 - DNA, 201 bp, Homo sapiens
gcatagaggtccttccatttctcagctctgggcccagctccctgatgtcccccacagctgggggtgagctgggagttgccctcgtggtggctgaccaccayagccgccacaggcgagcctcctgcaagcatcctctcctgcctggggatggctggtcccagcccccctcttcgagctggtgtgggaagaagactgctggga

SEQ ID NO: 302922 - DNA, 201 bp, Homo sapiens
cagacatcccaggcttctgggcttcccaggcctcagctactccgtggcctctcccccaggtgcccatccatgccctgtggagcgacggccgtgagaacctkctgggggcactgctcatggctggccagtatgtgatcccagaggtacctgcctggtgcacgtggaggcggggcaggtggggtgggggcaggagcccagaca

SEQ ID NO: 302923 - DNA, 201 bp, Homo sapiens
aggagtttcagggagtctttctgtcctctggttccggcgggcagcccagccatccttgtggggctgactcgagcgatcctgtgtcctgaggcttccccctkggggggccaagcccgccccctggccctggctgtaggagcagccttggagcttgttctcagagactggtgccctgccaggcctcacctgagacgcagggcc

SEQ ID NO: 302924 - DNA, 201 bp, Homo sapiens
gggtggaggcagcgtctttggatctcaagacaaggcctgtgtgtgggagtccgggctcggtggctgacttgcttgttgccccagggcccctcagcaggacrggacagaggaaactgcctggttctacaggtgagaaacggaggcagagagaggcaggctcccacagggaggcaccgactcaagcctgtgcgctgtctcctg

SEQ ID NO: 302925 - DNA, 201 bp, Homo sapiens
cctcctgcaagcatcctctcctgcctggggatggctggtcccagcccccctcttcgagctggtgtgggaagaagactgctgggagtggcccatcctgaccyacgtccttgcctctgtggggagctccaggtggaaggggggccgggccccgtacctgggatgctgagaacttgctatgtgcggagcccttggcgtaggggc

SEQ ID NO: 302926 - DNA, 201 bp, Homo sapiens
gtgtgggctcctcccagtcccggacagggcatggctgctgaggggcaccgatcctgaggctgggcactgctggccaggcccacgtgagccatttgctcacycctgtctctaacatcccctcagcttacagggctttaggactgaccagcagtcgccttccaccagagcctgaacctctgagggtgccccgtgcctggtccc

SEQ ID NO: 302927 - DNA, 201 bp, Homo sapiens
gacgcacgtgttcacacccgaggtggcctcagagccctgcttcctctgcccctgtgtggacctggttgaccagagaccagcgattgcgtctggactgagtyctgcctgggtggggtcagggcctgggacaggcaccgagctctgtggtactccagcacagtgctgccagcctgggctgggcacaggaaggatggtagcttg

SEQ ID NO: 302928 - DNA, 201 bp, Homo sapiens
ggtgggatcccgggatgatgtcacatgggcctaggcagaggatggggggatgggcccttgtctgaggctagggctgtggggtcttgggccggccggtcccygtccctgtgcacaggacatgagctctgctggctcctgagtgaggtgcagcggggctgggctggcgagggcagaaggtcagcatgctcattctcacacagg

SEQ ID NO: 302929 - DNA, 201 bp, Homo sapiens
ccacactgtggccggtgcagacccctctggaggcccactctgcgcccagcccaggagacaaagcctagtggggctcgtccacgagggactcaggtccccargaacgtggctgtccaggctgccgggagcctcctctgcacttctccttctgcctgtgaatggaacaaagtcattcacagcttggcaaacgcccctgtgtga

SEQ ID NO: 302930 - DNA, 201 bp, Homo sapiens
gcccccgagtggggacaggacctggggactctgtgtggggcctcgtccgacgcccctgacgctaccccttcaggcttggagtgtggccaactgcagtttcrttgagctcaacatgtagttcttgagtggtccgagctgcaggggcaggtggactctgtaaccccaccacacacccgtctcgcttggcccccgcgtgctcgc

SEQ ID NO: 302931 - DNA, 201 bp, Homo sapiens
gagactgccctgggaggagctattctgctagcaccaactaatgccctcccctgggtgctgggtgcggggctgccacagagttgaccccaccccttgcagamctcagctgccctaagaaggagtactggacaaatggaggtggtgggatcccgggatgatgtcacatgggcctaggcagaggatggggggatgggcccttgt

SEQ ID NO: 302932 - DNA, 201 bp, Homo sapiens
agcccccctcttcgagctggtgtgggaagaagactgctgggagtggcccatcctgacctacgtccttgcctctgtggggagctccaggtggaaggggggcygggccccgtacctgggatgctgagaacttgctatgtgcggagcccttggcgtaggggccccagctctgccagaggggaacagagcgggtcagggcattta

SEQ ID NO: 302933 - DNA, 201 bp, Homo sapiens
gtcccccacagctgggggtgagctgggagttgccctcgtggtggctgaccaccacagccgccacaggcgagcctcctgcaagcatcctctcctgcctgggsatggctggtcccagcccccctcttcgagctggtgtgggaagaagactgctgggagtggcccatcctgacctacgtccttgcctctgtggggagctccagg

SEQ ID NO: 302934 - DNA, 201 bp, Homo sapiens
ggtcagggcatttagagcaggaggaggtgcagagcgggagcctgctgttccgcctcctgctgtttctgtcccgcagcccggccagccgcaaccagaggatyctctacaccgtgctggagtgccagcccctcttcgactccagtgacatgaccatcgctgagtgggtttgccttgcccagaccatcaaggtagtggggctgg

SEQ ID NO: 302935 - DNA, 201 bp, Homo sapiens
ccacagccagaatcgctgccccccaccccatgccttgtgcctggtgacttggcgctgcctcctgtgcccagcctgggctgcccgaggccaggacgactccragggacccaaaaaggagagtcggaggcaggagacctgggccgggtgcaggtggtggctggggtgggggtgctgtgagtggtggggtctgtgcgcctgtaa

SEQ ID NO: 302936 - DNA, 201 bp, Homo sapiens
gcactgtcactgccagacgctggtatttttgtctactatggcccccaccctggctggtacactcagaaggacgggctgcgtcccctgtgcctagagaggcwtctggcacagagccagccttcaacatatattgcatgaaagattccgtccaaggacgctgtagatgtaggtggacgcagacaaaagcaaagcaggacagtg

SEQ ID NO: 302937 - DNA, 201 bp, Homo sapiens
agagtccctaagggccctccagaggagggggcagccccttcctcaccaggccacttcccccagcccctgcacaccatgggtgggtggagccttccctgccrggtccccacctggcctgctcctggcctccccaggtggcgagtgagttcttcccaggagggtggcagggtgaggaggagctggtgagggcctggcaggtgc

SEQ ID NO: 302938 - DNA, 201 bp, Homo sapiens
agtccctaagggccctccagaggagggggcagccccttcctcaccaggccacttcccccagcccctgcacaccatgggtgggtggagccttccctgccggrtccccacctggcctgctcctggcctccccaggtggcgagtgagttcttcccaggagggtggcagggtgaggaggagctggtgagggcctggcaggtgctc

SEQ ID NO: 302939 - DNA, 201 bp, Homo sapiens
agcttccctagcccaggcagctgtgaggaccagctcagaagagaagtcctgaaacagacacttacagatgaggaatattgacatgattgtgcaaatggacmtgaaactggattttcagggggctgtgatgggctggattgtctcccttagattctaatgttgaagtcccccacaccccagtgtcttagaatgcaactgtat

SEQ ID NO: 302940 - DNA, 201 bp, Homo sapiens
gggcttggcagcactggccttcctttgggggcatttgacacctcacccggggctgggtggggctgcctgcccaggaccaaagcagctgttcctgtctgggygggtggggtggaggcgccccctcacccacactgggcttctgtccaggcctgggccatggcgggctggtgggtcaagcccacaaggtcactggacgcctgg

SEQ ID NO: 302941 - DNA, 201 bp, Homo sapiens
tgggtgaaaccaggctccaggctgcccgatggcccccagtgactcctgccccaggaccaggtcgctgctgggtcagctgtttggggctggctttgtaagakcgtccaggccacctgggggacaggcacgtgggcagatggacaggtgcccagcaggccccaacaactcctcctctgcccccacccccaggctggcatacag

SEQ ID NO: 302942 - DNA, 201 bp, Homo sapiens
cagctcctgggcgcagcactaaggctggtctgggtgggaggctgccctggccccagccccccacccctgagtgtttcccacgtgcgtgtgggtgtgggaamctgatgccgggctgtcgggccggttctggcacccagtgttgagaaacctcaggccttgcccagggtgtggctgctggggcccctggggaggggcacaggt

SEQ ID NO: 302943 - DNA, 201 bp, Homo sapiens
agatcttatgttgtggatatttacattagaggtacgtatggaagttctacgttagagatacgtatggaggttctgcgttagagatgcatatggaggttctrcgttagagatacgtatggaggttctgcgttagagatgcgtatggaggttctgcgttagagatgcgtatggaggttctgcgttagagatgcgtatggaggt

SEQ ID NO: 302944 - DNA, 201 bp, Homo sapiens
ccagtgttgagaaacctcaggccttgcccagggtgtggctgctggggcccctggggaggggcacaggttggcagtgtgcaccctcagcctctctgagccasctgggggtagcaatgccggcctgggcccgggtgccagctgccagcaccctgtcgagggcttgtcctgggctttttacctactgtctgggaagtgaggggc

SEQ ID NO: 302945 - DNA, 201 bp, Homo sapiens
ggttgtgtggccctcccatagtctcaagctgggtttgctcaggctcttgggctgtgccgtacagacggggtgcctgggcttgtctctctgccctgccttcrcactctacctgggtgtccttctcaggagccctcatgttttcaggaagtgctgcctggtgtctaacctgaaggcgtcctgctgcagtataagccattcctt

SEQ ID NO: 302946 - DNA, 201 bp, Homo sapiens
aggcgggaggtcagtgcggggtgggtgtgggccctctttgtctctgtgtagccccctctcagccataactctttgccagtggcagcggtgccccctccttycctgtgctgatgccttatctgcttgtccggctgagacacacgccctcagttaaagggcatctcacgctgccatcatgtggggctgactgatgctgtgggc

SEQ ID NO: 302947 - DNA, 201 bp, Homo sapiens
ggggcatctggacaaatgcctggtgcaggtgagaaggggtgggactacctccggcatccctgggctgagcccacctggtctccccggttgctcctgcacayggcagtgcccacctgcttccctcagctcctgaggggctgggcagagcctgttgctcacgccaccccactcagtgctgctccgggttgtgaaagctgcagg

SEQ ID NO: 302948 - DNA, 201 bp, Homo sapiens
caaggaagaggttccaggcagggctggagggttcagattctgcagcccttgaagcttttggagggccctcattgagaaaagtaatacaagttacaaaatcrtagttaggtgtgaaagccggtgtttgtttattttttatttatttttatttttttgagatggagtctcactctgtcgcccagactggagtgcagtggcgcg

SEQ ID NO: 302949 - DNA, 201 bp, Homo sapiens
ggccctcactgcagggcaacacgctgggcggtggggtctcctggctcctcagtctgagcggcagccaggtaatggcgtgggacacgggcctgagtggcagstgggggctgtgcaccctcttggtcaccctgggatgcaccaggcaggcacgagcccctgtagccatcactcgagcccaaacagttaggcacacccgggttc

SEQ ID NO: 302950 - DNA, 201 bp, Homo sapiens
ctcctggggccgtccaggtgcgaaatgaggaatcaccacgggctccaaggcaggaagccatggcttccaaacgcgggtcagccgcctgccctctgaggggkcccaggggcagccatagcccttcctcccagcctctgactgtcataagaccggagccccatcccaccagctctggtcctgcccctcagtgagggaggaggc

SEQ ID NO: 302951 - DNA, 201 bp, Homo sapiens
tggggatggctggtcccagcccccctcttcgagctggtgtgggaagaagactgctgggagtggcccatcctgacctacgtccttgcctctgtggggagctycaggtggaaggggggccgggccccgtacctgggatgctgagaacttgctatgtgcggagcccttggcgtaggggccccagctctgccagaggggaacaga

SEQ ID NO: 302952 - DNA, 201 bp, Homo sapiens
gacttcctatgtcaaactgggaaccccacctgcttgccggcctgtcccaaagtccctcctgagcccggctccttgcaggcacagcagggagggcagagatytggggccaggcagctgagagaagctccctgcccggtgaccacacgggtcccagcagtcgagagtgtcagtggagtgatgcccatggcttcttggttactg

SEQ ID NO: 302953 - DNA, 201 bp, Homo sapiens
gaaagccggtgtttgtttattttttatttatttttatttttttgagatggagtctcactctgtcgcccagactggagtgcagtggcgcgatctcagctcaytgcaagctctgcctcccgggttcacaccattctcctgcctcagcctcccgagtagctgggactacaggcgcccgccaccgtgcccggctgaaagctggtg

SEQ ID NO: 302954 - DNA, 201 bp, Homo sapiens
cccagcactttgggaggctgaggtgggtggatcacttgagatcgggagttcaagaccagccatggacaacatggtgaaaccctgtctctactaaaaatacaaaaaaaaaattagccagatgtggtggcagatgcctgtggtcccagctactggggaggctgaggcatgagaatcgcttgaacccaggaggtggaggttgca

SEQ ID NO: 302955 - DNA, 201 bp, Homo sapiens
cccctgcaggcagaaccaccccccgccccatcagcttttcttctcccttctcccccatcacaacacgctcccatgttaccggagctgcctcccctagtagrgggcctcctgcccgctccagtcccaattctcacctgcttcccttacgaaccccctgctcccctgagtgggaacatctaggcttccccttcccagcagcag

SEQ ID NO: 302956 - DNA, 201 bp, Homo sapiens
tagagatgcgtatggaggttctgcgttagagatgcgtatggaggttttgcgttagagatgcgtatggaggttctacgttagagatgcgtatggaggttctscgttagagatgcgtatggaggttataccttagagatacgtatggaggttctacgttagagatacgtatggaggttctgcgttagagatacgtatggaggt

SEQ ID NO: 302957 - DNA, 201 bp, Homo sapiens; identical to SEQ ID NO: 63154

SEQ ID NO: 302958 - DNA, 201 bp, Homo sapiens; identical to SEQ ID NO: 63155

SEQ ID NO: 302959 - DNA, 201 bp, Homo sapiens; identical to SEQ ID NO: 63156

SEQ ID NO: 302960 - DNA, 201 bp, Homo sapiens; identical to SEQ ID NO: 63157

SEQ ID NO: 302961 - DNA, 201 bp, Homo sapiens; identical to SEQ ID NO: 63158

SEQ ID NO: 302962 - DNA, 201 bp, Homo sapiens; identical to SEQ ID NO: 63159

SEQ ID NO: 302963 - DNA, 201 bp, Homo sapiens; identical to SEQ ID NO: 63160

SEQ ID NO: 302964 - DNA, 201 bp, Homo sapiens; identical to SEQ ID NO: 63161

SEQ ID NO: 302965 - DNA, 201 bp, Homo sapiens; identical to SEQ ID NO: 63162

SEQ ID NO: 302966 - DNA, 201 bp, Homo sapiens; identical to SEQ ID NO: 63163

SEQ ID NO: 302967 - DNA, 201 bp, Homo sapiens
ccagactaagaagaaaaagaagggctgagtgtcaggcgacccgcagctaagctgaggggggaaagtgggcttaggaccgcctgcccagggcaaccctgaaycaagctttagccgccgaggcctcgtgtcccaaaggccagtcatccctcctctgtgttgccatgggtattcaaggcctggccaaactaattgctgatgtgg

SEQ ID NO: 302968 - DNA, 201 bp, Homo sapiens; identical to SEQ ID NO: 63165

SEQ ID NO: 302969 - DNA, 201 bp, Homo sapiens; identical to SEQ ID NO: 63166

SEQ ID NO: 302970 - DNA, 201 bp, Homo sapiens; identical to SEQ ID NO: 63167

SEQ ID NO: 302971 - DNA, 201 bp, Homo sapiens; identical to SEQ ID NO: 63168

SEQ ID NO: 302972 - DNA, 201 bp, Homo sapiens; identical to SEQ ID NO: 63169

SEQ ID NO: 302973 - DNA, 201 bp, Homo sapiens
agggctttctctctcccatcctccttggaggctaaaatccctcctgccctcccctcctccctcccttcttgcaagctaagatcctccaagggctttctctstcccatcctccttggaggctaaaatccctcctaccctcccctcctccttcccttcttgcaagctaagatccctgcctccctccttgcaggctaagatcta

SEQ ID NO: 302974 - DNA, 201 bp, Homo sapiens
  misc_feature (1)...(201): n = A,T,C or G
cagttgagctcatgtaattaccatatgttaatttgggggtgatatgttttaggttgatattaactaatatgttttcctatgcagtgagaaatgttttgctnctttcctttcagaacagaacaatccatatgcatgtatactccaaggcaaccccttgacttttctgggaaatttactttcttgggaataacctaagttatt

SEQ ID NO: 302975 - DNA, 201 bp, Homo sapiens
cctgcccgagcgtacccccccggggggttccggggaagggggcgggggtccggatccccggatccccggaaggcgacttgcggggaccccggccggcctckcacgccggcgatcgatcccttttccggctgcccaggatcgggggagagaggcgggatccgggtgccgcggtgcccgagcctcccggggaaagcctccgcg

SEQ ID NO: 302976 - DNA, 201 bp, Homo sapiens
tggggaaagttcccaggccggggaaaaggtggccgcacgctggcttttctcaaggcagccggccctcttggcgtcgtgcttgatttcatgggtgtttaatwcgtgctttgtgggcgctggctccccctccccaccccaccctcaccctcttttctggcttcacttttcagataatgctgtccctggcgttttggtgaccga

SEQ ID NO: 302977 - DNA, 201 bp, Homo sapiens
ggggaaagttcccaggccggggaaaaggtggccgcacgctggcttttctcaaggcagccggccctcttggcgtcgtgcttgatttcatgggtgtttaattygtgctttgtgggcgctggctccccctccccaccccaccctcaccctcttttctggcttcacttttcagataatgctgtccctggcgttttggtgaccgac

SEQ ID NO: 302978 - DNA, 201 bp, Homo sapiens
tcagatttatagtcagttaacggaggcttaagtgatgtaaagttttatttctctctcacatagaaattagttagaggtagtagtttagggctcttagaggscccaggctgtcatattctacctgcttacacatggctttcaggatctaggtcacctcacagtccatgatggctgctggggctccatcccccttgtctgagt

SEQ ID NO: 302979 - DNA, 201 bp, Homo sapiens
atcagatttatagtcagttaacggaggcttaagtgatgtaaagttttatttctctctcacatagaaattagttagaggtagtagtttagggctcttagagsccccaggctgtcatattctacctgcttacacatggctttcaggatctaggtcacctcacagtccatgatggctgctggggctccatcccccttgtctgag

SEQ ID NO: 302980 - DNA, 201 bp, Homo sapiens
cttttctgccagtcatgtttcttaaaggaaatcggtagaatttataaatgtcatgttttccaaatactgttcttcttttaattacctaagaaaatcttttwaaaaatttttataaagatagtaatgcatattcattatataaaacatagacaagaaaagaataacaagtaaatcattaactggagataaccattgatcact

SEQ ID NO: 302981 - DNA, 201 bp, Homo sapiens
ctggttttcacgtgtctcctgaagccacccctaaggagaaggcttcgatgtcatcttctggtcagagccgagcacagtggtcctcttcagagacagatccrtgcagcaggatggcacctctgttgtcctcccagactagcagtaggtacacgtgggcttcgcaggctgttttctgccctggaatgctgctgttttttagac

SEQ ID NO: 302982 - DNA, 201 bp, Homo sapiens
ggccttctctaggggaaaaacatgtagtttatgcaacttttcttttccctttctgctctggatttgaccttttgttccttcaggtgattgaaaaaattcgraaagtcacctgtttcctcagaattgctttaagacaagactaagtgaaccaacaagaatgaagtcagctttttggaaatacctcccaagaggccttgctct

SEQ ID NO: 302983 - DNA, 201 bp, Homo sapiens
acaggtgcgagtcccaccccagaggggccttgagaggctgcaagtgtcctgggtgggctgcctgcttcaggaggacttattattggggaaaaatacccccmctacttattactaagggccgaatgctttatgttcacacaacaactccatgttgtgtgactttggacatgttccttaactttctttatcttggtcttctca

SEQ ID NO: 302984 - DNA, 201 bp, Homo sapiens
tgcccttttataatggcaccaaccccacccatgagggtggagtcctaatggcctaatcagctctctgagatcccatctgttaatactgttacaatggcaaytaaatttcaacatgagttttggaggggacagacattcaaaccatggcaggtggcaagaagtatcaaactactagatccttgggattgtgctttgtactgg

SEQ ID NO: 302985 - DNA, 201 bp, Homo sapiens
tgatacatggaaaaatgtacctgaaatgtgagtcctgcttttgtgactcaccctttcctttacataagcattgatttacatctgttgttttttaagatagkgtgtatgttgaaaagttcagaacaagatcaagtggagacataaaatggtaagatgtgaaaagttgttcttgccagattaaatggttccacctgaagaaaa

SEQ ID NO: 302986 - DNA, 201 bp, Homo sapiens
ccctgggctgcatcatccttccacattgtctctctaaagtacctgaagccagtagttctcaaactttggagagggttttgagtcacctcgagagctgataagaacagaggcccagattgaagttgaatagtgctgggcctttgtttttaccaagttccctggatggttctgctacctcctagcctgtgagaactactcctt

SEQ ID NO: 302987 - DNA, 201 bp, Homo sapiens
attgtggcagaagggtatcttaaaaaccatttgtttctttaaaaaaactcaaacattagcactttattcttataaacttgttttctgtctttttttccccrtaagagaaatgtttaaaaacattctttaaacaattctattttgtcattatcttttttttggacaaatatcagtgtcttctgtttattacgttgctgctgg

SEQ ID NO: 302988 - DNA, 201 bp, Homo sapiens
ccatgttagccaggatggtcttgatctcctgacctcgtgatccgcccacctcagcctcccaaagtgctgggattacaggcctctgcgcctggccttgcatkgacaattaatttgtttatggaaagccagttatccaatgatggtgaacaaatgcaacttgactgtataatacttattttggttttggaccaaagtcaccat

SEQ ID NO: 302989 - DNA, 201 bp, Homo sapiens
taattatcaataattatgaattgtcaaaattatgtcatgaaacctctttttttcttttttttgagggggagtcttgctctgtcacccaggctggattgcartggtgtgatcctggttcactgcaacctttgcctctgaggttcaagtgattcttctgcctcagcctgggattacaagcatgcgccaccatgcctggctaat

SEQ ID NO: 302990 - DNA, 201 bp, Homo sapiens
tcaggcctttttatggggctgcctctctctctggaggaggaagggagcagatattgatggagcaccaactgtggccactgtctgatggccatctgatgggrttggggctccgaaggaaaatgggggatgtgtccctcttgtggttgatgtctttttgtctcctgtgcttgaaacagatgccagcaatacagagagaagccg

SEQ ID NO: 302991 - DNA, 201 bp, Homo sapiens
aaaaatacaaaaaattagccaggcgtggtggtgggcgtctgtagtcccagctactcgggaggctgaggcaggagaccgcgccactgcactccagcctgggygacagagcgagactctgtctcaaaaaaaaaaaaaaaaaaaaaaaaaagaaaacaggaagtagggaggggcaaggaggcatctggtgcagtgatctgacta

SEQ ID NO: 302992 - DNA, 201 bp, Homo sapiens
cctcttttctggcttcacttttcagataatgctgtccctggcgttttggtgaccgacctttccccttcctggcatttccataggggctgaggcagagcagytgaaggggcattcccatttcacagatggggaactgagggagagaagtgaaatagcggagcacccagcccgtgccatgggagctgagccagcgggcacgtc

SEQ ID NO: 302993 - DNA, 201 bp, Homo sapiens
ccttggctccccaaagtgttgggattacaggcatgaaccactgcacccagccatgtttttattttatctgagagaaaactgaggttcagaacttaactgtrtacttctggaatcttcacagagaaataaaaaaaaagaaaaataatttactatagattcattaactactacgtggcggagccagggctgatgtctccactg

SEQ ID NO: 302994 - DNA, 201 bp, Homo sapiens
ttcatggctcttactggccactgggcaagactcagatagcaccaaccaaccagtcacagttgtgatgtaggatgtgactgtgaatgacatccctgctgccygcttcagagaaagggctgccacttgccagagaaggaatggtgataatgagggacagccagtccctaagtggagatccctgaaagtggtgaatatcttaga

SEQ ID NO: 302995 - DNA, 201 bp, Homo sapiens
gctgaggcatgagcatcacttgagccctggaggtggaggttgcttgagtcctggaggcggagtgagccaagattgcgccactgcacttcagcttgggctgyagggtgagattctgtctcaaaaaaataaataaataaataaataaaataaaaaaacaattgaggtggatgtctccctaggggtaccccaggaagccacagg

SEQ ID NO: 302996 - DNA, 201 bp, Homo sapiens
ggtcagaggcaagaggagggtgcctctgagcttcaacccctcccaggaacaatgagctcaaattggaagagtccagtggaatcggggggatggtgtgagcrcccctgttcagtctttgacaattgcatacagaaaagcagctggtatgggtttgggtgtcaatgaaagggccaaagactggtggccagctggtttggggga

SEQ ID NO: 302997 - DNA, 201 bp, Homo sapiens
tgagaaacattcaccatatctcaataagctctcctcagccagttggtccttttgtggttgaaaaaagtgccatatctttggttgggcatccaataaaatayggtatttaggggctacctgtatggaaaatccatatccttaaaggttagctcaccaggaggatgttgagaaatggcacagggggctgggcgcggtggctca

SEQ ID NO: 302998 - DNA, 201 bp, Homo sapiens
tctttatgcaggactgttatttcaaaggatggtgtcccctccccaaccataagaacgatccaaacctgttttctggggcccagagtttgctgaggataggmctgggctgaagctttcattgctggtctgtggggtagaggtaagcctcccctgtgaagctggtaggttacatgctttggcaacatgaattgttatttctgg

SEQ ID NO: 302999 - DNA, 201 bp, Homo sapiens
aaagcccatgtctactaaaaatataaaaattagccaggtgtggtggtgggcgcctgtaatcccagctactagggaggctgggcaggagaactgctggaacscaggaggcggaggttgcagtgagctgagattgcaccactgcattccagcctgggtgacaggcaagactctgtctccaaaaaaaaaaaaaaaaaaaggcac

SEQ ID NO: 303000 - DNA, 201 bp, Homo sapiens
ctacaaaggacctgaactcatccttttatggctgcatagtattccatggtgaatgtgtgccacatttttcttagtccagtctatcattgatgggcatttcrgttggttccaagtctttgctattgtgaatagtgctgcaataaacatacatgtgcatgtgtctttatagcagcatgatttataatcctttgggtatatacc

SEQ ID NO: 303001 - DNA, 201 bp, Homo sapiens
ctggtcctgcccgcctggtcctgtggccagcactctccactgtgagtcattcaggcccagtccttgtcctggtggtgcatctgcctcatgatgtcaagcaytgtgggaaaggcacccagcctgccccactccaaaggatgagtatggggaggtggtggtgcttctcaaacccaaggctgtttgtcataccacattccgaag

SEQ ID NO: 303002 - DNA, 201 bp, Homo sapiens
agcttcttatggctcttatgttctgcaggacggatgaactaggtacccaggacaggtctgtttgtgcacaaggctgtctccttctccccctccttggtttytctactgaggctttgttgtgcttggctcagggtgatgttagcaaatgcactctccaccctgctgtgccacattaaggaaacgcatgttgtattggcttct

SEQ ID NO: 303003 - DNA, 201 bp, Homo sapiens
gaactcctgacctcaagggatctgcccgcctcagcctcctgaagtgttgggatcacaggcgtgagcccctgtgcctggccagattaggttctgattttggrgggggaaatggatcagtcagtggctggataaaacagttttattgtttcttgttaaaaataagagtaatacatgcttatggcaaaaaatatagaaaagaag

SEQ ID NO: 303004 - DNA, 201 bp, Homo sapiens
tttatgtcttcttttgtactaagtctttgatatctagtctgtattgtgtgcttgtagcacatctgaatgcaaactggtcacctctcaggggcttggcagcygcatgtggctagagggctgctgtatcagcacaggtttagacaattatgttgtggttgttttggagttcagatttctgtctccttgaatcttgaatatata

SEQ ID NO: 303005 - DNA, 201 bp, Homo sapiens
tgacagcatgccctgatgacctctccctccctctgccttggccgttctggttattttgaactcctcttgtgttctcacagatgctattcaggtttttgacrtcaccgctgtgaacatcagtgccacaagcctgaccctgatctggaaagtcagcgataacgagtcgtcatctaactatacctacaagatacatgtggcggg

SEQ ID NO: 303006 - DNA, 201 bp, Homo sapiens
ccacccccattattaaatcctcaactgctttatttctgatttgcattttccatggctgaatgaatctgctgacttccgttttctttttctgtttcagatcytgtgcgcaggtggcagtgagtacccttttcctctctattcttgtgttgttcgctactgccccctaatggacacacagcaacattaacagcaatgtgaaat

SEQ ID NO: 303007 - DNA, 201 bp, Homo sapiens
tgtctgatggccatctgatggggttggggctccgaaggaaaatgggggatgtgtccctcttgtggttgatgtctttttgtctcctgtgcttgaaacagatrccagcaatacagagagaagccgggcagggagccccaccgcccctgtgcatgatgagtccctcgtgggacctgtggacccatcctccggccagcagtccca

SEQ ID NO: 303008 - DNA, 201 bp, Homo sapiens
acagcaaggaccaagtacaatgttcccctgatatttaatttgctaaaacatgtaagaagaagaaagttcttacattgttaggtcccaaagagagtgccacyaagcaaccttgccaaaaccaccttgctggagcttcttattatctttttttagcgaatggcaataaagtcattttgtcaagctaaccaagtaccataatga

SEQ ID NO: 303009 - DNA, 201 bp, Homo sapiens
ggctcatcatacacagtggagatctttgcacaagtaggggatgggatcaagtcactggaacctggccggaagtcattctgtacaggtgagtgtagccccarctgcctcttggactcctccctgagtggtgctgaccttgcaggtcagtcctcccaagtctgtagtttgtctggttttgtgtgatgtgcagtgatggacatt

SEQ ID NO: 303010 - DNA, 201 bp, Homo sapiens
agcattaactgctgaccttgccatctgtgagcaggtgttgaatgagctcagttccctcccagcccttctttttccctggtgggtcattggctcctgagtargatagatgcatgcaatagaagagctgttaatagcatttactctttcttaatccttattaatcccattcatatttcagtgtctgaaacttggcaggatgtc

SEQ ID NO: 303011 - DNA, 201 bp, Homo sapiens
ttatttcaacatgtaatttctgtgaagtattaatgagttattttatgtcttcttttgtactaagtctttgatatctagtctgtattgtgtgcttgtagcayatctgaatgcaaactggtcacctctcaggggcttggcagccgcatgtggctagagggctgctgtatcagcacaggtttagacaattatgttgtggttgtt

SEQ ID NO: 303012 - DNA, 201 bp, Homo sapiens
tttgtttgctcaaattgcctttataaaatagattgatactctataataagcaaatgttgtgaatttggaattttcaaattgaggcttactaataatgttawctattttatccgagtttatttgggtttcttataaaatgtaatttctcaagaagattttgctgccctaaaaaaaaaaaaaagaaaaagaaaaagacaaaaa

SEQ ID NO: 303013 - DNA, 201 bp, Homo sapiens
atgtgagttcattattgataggcagctgtggcaggaagggaaggatctgaatgcagaattggaggatgagggacttctgttgcatctgaaatcagtgttgrggaaatgacttcacttctgtgaatctctgctgcctcatctttaaagggggataataaactctccttcttgagcatattgtgagggtttgatgagcaagca

SEQ ID NO: 303014 - DNA, 201 bp, Homo sapiens
agctggaaagaaaccaaatgggcatgtagaggtctggggcttgatggcagtgtggcctaggatggcttgtgaggctcacttctgaagccctgcacaaggamtttcttggccagtgtctgcctttcagttccccatgctgtgctccaaccagcccaggaaccagccctgctcagagtgaccatgcacactcgtcctcctgtg

SEQ ID NO: 303015 - DNA, 201 bp, Homo sapiens
ttattgccagcttaacttgtttttatgacatcttcaggaagaaaacctctgctgtctatttaatggagatgaattgttaaacttttaccatttgcaactayacgtctctatgagtcagacttttattgatcgtgtacaactaaatgaaacccggaaatgaaggaaatgtaacaagcgattttatgtattttttgtttgctc

SEQ ID NO: 303016 - DNA, 201 bp, Homo sapiens
ggtatgaactcacacaaacaggttacattaaatggctatataacgcaaggggttgttgcgctccaaaccctttgcgtcatactgtcctggatgtctacctyggactactcctgactgaagcacagccactttccttagaaattggcttgtttttcctgaaagttagaaaactgttaacagaaactaggaattcaagtcagg

SEQ ID NO: 303017 - DNA, 201 bp, Homo sapiens
ctactctaggggcaaagggagctggatggggactgtgtcctaggtcaagggacagctgctgctctgctctaaatcaattttcatgctgaaagcagggcctrttgtaggcagatctgatttttaaagagaaaataagtctggatttttatgagaaattttaagagttggcaagaattgtaaattaaaaaaagaaaaaacaat

SEQ ID NO: 303018 - DNA, 201 bp, Homo sapiens
ttgccatgcacccagggtgcagggagacctgtcttgcaggtgttcaaacaacttttgtcagcctcagtgtcagggacttttgttgcgtagagcagtcaccraatcctatggtgagaagagaaatcgttggagatgggggtgcaggggtggaagctcttatttcagaagacctgttgtgaggtaagactcagaccctcagct

SEQ ID NO: 303019 - DNA, 201 bp, Homo sapiens
ttcagctagcagcagacttctcagcagaaacttacaggccaggagagagtgggatgatatattcaccatgctgagggaaaacaacctgccaaccaagattrctatacccagcagaactggccatcaaaaatgaaggcaagataaaagactttaccagagaaacaaaagctgagggagttcatcaccactagacatgtctta

SEQ ID NO: 303020 - DNA, 201 bp, Homo sapiens
ctggtcaagacagagccctgtggactatggaagggattgaagccattctgtggatcctataggcttcttttctaagcgaatgattagtgtttattcagtarccctatgtcaggtggtttctgtatgaatgagaggtttgcctttccagctgcggcggggctttgggcaagttgctgtctctgtgctccttcgtttgctcat

SEQ ID NO: 303021 - DNA, 201 bp, Homo sapiens
aaaatacctcacagggttgcagtgaagatgtaaggatgatgatgatgacaacagcagctcaaatagatcatttaacttaattctcgccaaagcaaggcagrtacaaagatcatcctgttggcagatacagacagggagggacagagaggttaattaagcaagctacctgcccgcagttacatggccagaagcagtggcact

SEQ ID NO: 303022 - DNA, 201 bp, Homo sapiens
agtttccacatttttaaatgggtggagaaaacaaaatctacaaagaataatgtttcatgacacatgaaaattatgtaaaatatacatttaacgcttgtaartaaagttctgttggaactcagctacagtcgttagtttacatatcatcgatggctggtttcgcagtacaagggcacagtttaaagcctgccaggcctaaaa

SEQ ID NO: 303023 - DNA, 201 bp, Homo sapiens
tgcagcttggaactcttgggctgaagtgattcttcttccttagcctccccagtagctaggactatagtgccaccatgcctggctaatttaaattttttttktgtgtgtgtgtgtggtggagatgggttctcactgtgttgctcaggctggtcttgaactcttgggcttaagcgatcttcccatcttggcctcccagagtgc

SEQ ID NO: 303024 - DNA, 201 bp, Homo sapiens
taccatgtctccttttccagcctcattccctgagatgtagccggagttccagttcagccaacctgcccgttgttttctctcctggaactgggtgtttgagyctcctgcatggagtgttcttccttcccagctaaagtcctggtcatcccatttccatctgaaaggcccccttgttcatgaagcctctcatggtccttcccc

SEQ ID NO: 303025 - DNA, 201 bp, Homo sapiens
gtagcaagcatgcagacattctcatgacatcctggcagatatcaagaccaaagaacatcccatgttccctcttgaaggcttgtaataactgccataaattrtcttgtgggaatggagtggccctggcctaagctgtgctgtaccggactctcctggtgacagttttagtggctgcatatgtttgcagaagaaggaagcgtg

SEQ ID NO: 303026 - DNA, 201 bp, Homo sapiens
aatgctgtgtacacgcttggtcactcttccctttcttgagatgacatgtccccttcttggagacccaagatgattgacaacaataacattcctttacaacrttttcttctcatctagagcactgggaggctgccttttaacagagatatcacagagtagcaagcatgcagacattctcatgacatcctggcagatatcaag

SEQ ID NO: 303027 - DNA, 201 bp, Homo sapiens
gctttggttctcctgtgtgccaggaacagcagtaaactttatgtcctaagattagtatggttggaaatgcatgtggcagtggttcccaaacactggtgtgyagatggaacacagcccgtgaagttttcagcggtccttgttaaaaagagataaaggaaagagataaaggataaagtgctgagattctcgtgaagctaaatg

SEQ ID NO: 303028 - DNA, 201 bp, Homo sapiens
  misc_feature (1)...(201): n = A,T,C or G
tgtaaagtttaatttttagtcattacaactcctggttagtactcaggctctgcttgatttcccctgcctttttgatgttgttaggcagcctttctgtctgnatctaaatcattttctgggcttttagatccagacaagtgagagtcaccctctgagacagttccatttcacctcctggccagaccacggtgttcccgacac

SEQ ID NO: 303029 - DNA, 201 bp, Homo sapiens
tgatacaaagaagagaaagagagggatcagtttttccaagtgtgcatttcatttcagtgtaaatattttgtgaggtggggcatccctgtctcctggagaartatatttttaatctaattgtttactttctttgcatagcccctagtccaattcctgacccttcagtagcaactgttgccacaggggaaaatggcataacgc

SEQ ID NO: 303030 - DNA, 201 bp, Homo sapiens
gctctccagttttataggtgaggaagctgagctcaagtggttttcctgtggcccacctgggtgtcatagcagagtgagccctggaacccaggcctgcctcrtcctgacttctgtgatctcgggcgatcacatagatcgcagtgttcgctcttgcatcatgtgtgtttgacaacttttctgggtgcccctggccctagggta

SEQ ID NO: 303031 - DNA, 201 bp, Homo sapiens
tccagagcctgagcccttgaccacaggagctcacgcctcctctcatttcctgtgaatgattgtgtgcaatgtaagcacagagcttctgcactctcatgatmaagtgctctctccatggccagaaacagcagtttctgaggggctcatgttgtaggtgatgatacaaagaagacagagagagggatcaggtgtcctaagtgt

SEQ ID NO: 303032 - DNA, 201 bp, Homo sapiens; identical to SEQ ID NO: 63170

SEQ ID NO: 303033 - DNA, 201 bp, Homo sapiens
gagatgaggcaattctcatccctccctcttgcttctttctgttcatcagcttcattctcagagcagctccctctgcacacttaaggagcccagctgctccygtttcacaccctgcagctgccccaccagccagctgccccaccaaccagggtctggtccagggaaacgtgtcttgagtggggtctgattagcaaagtctgc

SEQ ID NO: 303034 - DNA, 201 bp, Homo sapiens
tacttaataaaacaaaaagacgcatgactgacctgatttagaactctttgcatgagagacatgtgctgtgaagaatcatcttaccgtttcggagctggacrgtgccttagaatcatctaggccgatgtctttaccttcaggcccctgcagccctcaggaggggttttgctctatctgcagcactacctgtgcttttctgta

SEQ ID NO: 303035 - DNA, 201 bp, Homo sapiens
gtcagaggtcaaggccagtggtctatcagaacccagttcctgcaggagccagtgccggtactaggtagactcagatgactgaatggtcctcgggatctgarggccagtgggggagatgaggcctggcctcccggaagtgctcagtaaacatttgttaatcatttcctgcctagggaagctctgtggtatgctcaggagaat

SEQ ID NO: 303036 - DNA, 201 bp, Homo sapiens
ggagatgaggcctggcctcccggaagtgctcagtaaacatttgttaatcatttcctgcctagggaagctctgtggtatgctcaggagaatcttgcttctcrtgggggaatgggtggttgtcatttgggtggcctgactgccagcctgcttgctggctctctgggagttggggtggtggcatcaacctgcagaggcggggca

SEQ ID NO: 303037 - DNA, 201 bp, Homo sapiens
acttcaaagaaagtgctgccctcccagtggtgatgaagaccttccgctggccccagcctctgggatctggcctttacttgggtattcatgtggccctgggrgttggctttgctgaagttgggcagagcaggtgggttctggaatgtgcaggggcaaccagagtgtccatctgtttgggtgaagccagctgtttaggtctga

SEQ ID NO: 303038 - DNA, 201 bp, Homo sapiens
tggggtttgggagttgggcgggggaatgacctgtttgaaaataattttgggtgctaatttctgggacccatgttcattttctgtctctctctttcgttttyctatcaggaccagtatgttttcctcaatcagtgtgttttggatattgtcagatcccagaaagactcaaaagtagatcttatctaccagaacacaactgca

SEQ ID NO: 303039 - DNA, 201 bp, Homo sapiens
aggataaaaagcaggcatcttgctggagggtctctgttgctcagtagaaattattttgtaatgttttttgaaaaccacaaacatggacatattatggactrgataccacatttgcatcaggatttttttttcaaccagtacagtacataacaaagaaatctctaccctgcagaccctctgggggtgtgagagcgctccttg

SEQ ID NO: 303040 - DNA, 201 bp, Homo sapiens
ccttgctgtaggtaatacttgctttgaagtactggtgtggatggcctatgccctggcagtcttactaggtgggactggctgtcctctcattctcatgggawtggcctcatgctggtagctgacttcctccccgtgagaccgtaggtctaaactaacaaggtttacacatgtgacaaacatccaggttgccagggctcaaaa

SEQ ID NO: 303041 - DNA, 201 bp, Homo sapiens
aacacctggcctcaagtgatcctcctgctttagcctcctgagtagctgggaccacaggcttacaccaccatacctggcaaattttttttttttttttttttggagaggcagagtcttgctccgttgtccaggctggagtgcagtggtgtagtcatggctcgctgcagcctctgtctcctgggcttaagccattctcctgcc

SEQ ID NO: 303042 - DNA, 201 bp, Homo sapiens
gatgggtggggaccatctgtgctctcctggaaaggaaattgtggtttctttcttttcttttttctttcttcttcttttttttttttttttttttttttagyttatgggaaagggagacttgtgtctcaattgagtctttgtggcgttgtattacagagagtcacagaaaatgttctatgtaaatgactatgtgctctgatt

SEQ ID NO: 303043 - DNA, 201 bp, Homo sapiens
tggcagtttctgaggggctcatgttgtaggtgatgatacaaagaagagaaagagagggatcagtttttccaagtgtgcatttcatttcagtgtaaatattktgtgaggtggggcatccctgtctcctggagaaatatatttttaatctaattgtttactttctttgcatagcccctagtccaattcctgacccttcagtag

SEQ ID NO: 303044 - DNA, 201 bp, Homo sapiens
aggaggaaatgaaggctcagagaattgagtaacttgcttgaagtccaaagctgaggagtggagccagaattcaaactcgagtttgtctggcttccgaatcstgctatttcctcagcacagtggccgtcctccaaggctgtcacatgttccttccctggtgattcacggcacctggctacctccttttagactcactttgtg

SEQ ID NO: 303045 - DNA, 201 bp, Homo sapiens
ggatgggtgctattttccaaggaaagcccctcctggtggggggccataggaaacagctggtgcaaaggcctggaagactcactggcatctttctggaatarcaaggatcagcttggtgggaagtggaatgagctgggggtggagtggggtggggtggattttggagtctgagcttgagatacctgcttggagatgctgagc

SEQ ID NO: 303046 - DNA, 201 bp, Homo sapiens
tctattaaggaacatttcaaactttgacagattcagaaggaatgatatgatgagcgccatgttcccttcacccatagtgttctgcatttggccagtcctakttcctctgcgcccccagctgggcgatgttaatgtgctcccagctgtcacatcaggccactgatagacgccacagtgtgggatgctactttcaaatgatat

SEQ ID NO: 303047 - DNA, 201 bp, Homo sapiens
tcatttgcttgtgccgagccgccaagtgccccctcctgctggcgacaggtccggatgtgggccagttctcagcccagggaaaatgaacagtgtcttctccrtggtgcccagaacagtctgagtcagtggaatgtgctggccagtcaggcagaagggaacttccacttcttttttaaaaccttggtggaaactgtgctggca

SEQ ID NO: 303048 - DNA, 201 bp, Homo sapiens
accttgtttgtttaaagaccattaaagaacgtcttcaatttattctggattgagttttcctcaaaccaaaccacccctcagttcaccccccagagctgttsaggcccttcctgggggcttgtggctgtggctgcctcagatcagagcagaccctgggctgcatcatccttccacattgtctctctaaagtacctgaagcca

SEQ ID NO: 303049 - DNA, 201 bp, Homo sapiens
ttctgggttccttccggctgtccaaatcaaatttaattttcacacccagaccttgtccctgctctcatccttcagcccaccctcctgttccccattcagcyagaccccctgccagtcagttcaagtgctaggcatggggtatcgagtctcaggccggtccacagacattccagcacctggtggtaagaggtgagtgctgcg

SEQ ID NO: 303050 - DNA, 201 bp, Homo sapiens
ccggtccacagacattccagcacctggtggtaagaggtgagtgctgcgtggacccactgaggaaggctctggctgtgctgggggaggggagtttatgctcrtcctcatagaaggataagcaggaattaagtgggcaaaggagggagtgaggaagctctcactttctaggtagtaggaccagcatgaaccaaggtaggggat

SEQ ID NO: 303051 - DNA, 201 bp, Homo sapiens
ctgccaggctgggttgggagatgaatgtgtatgcatgtgtgaatggattcatttctgatgataaaaatactttatgcttatttatgtgaaacttggaaaayagaggaaaagtataaaattgaaactaaaagtcatccataatccttctaagtagctttatcatttaatgttttagtatatttccttcctgttttttttttt

SEQ ID NO: 303052 - DNA, 201 bp, Homo sapiens
attcatttctgatgataaaaatactttatgcttatttatgtgaaacttggaaaatagaggaaaagtataaaattgaaactaaaagtcatccataatccttytaagtagctttatcatttaatgttttagtatatttccttcctgtttttttttttttccttaattctgggtgtatgcaaaggattttgtaaccctttacat

SEQ ID NO: 303053 - DNA, 201 bp, Homo sapiens
tgcccagggagggttagatacctgggaggatagagcagaggccctccttctccccgacccctcgcctctgcaggctggtggggaggggggcaggggagtcsagttaccctctctccacgctttcttcttgtgtatgtgtgcgtgtacgtgcgtgtgtgtgttgtgtgtgtgtgtcttgggggatggagaacccctctcagg

SEQ ID NO: 303054 - DNA, 201 bp, Homo sapiens
gttgtatttttaaaatagagccgatcccagtttctgatctccgtgttgccctcacgggtgtgaggaaggctgctctctcctggagcaatggcaatggcacygcctcctgccgggttcttcttgaaagcattggaagccatgaggagttgactcaagactcaagacttcaggtcaatatctcgggcctgaagccaggggttc

SEQ ID NO: 303055 - DNA, 201 bp, Homo sapiens
aaactgtgttcttgaaaaaattatcacgcccattttagagatgaggcacagagaggtggagggacttgcccagatccaggtatgtggctctcctgtaatckcgcttctattgctttgtgatcagcagcaacttagtagctttcaaagcttcaattttcttgtgtgccaaatggggctaataaataccttagaggattgtga

SEQ ID NO: 303056 - DNA, 201 bp, Homo sapiens
tcttttaaaacccgctcccagcactgaaccccagtcattcttaatgaaggtgactgcatatatcttgttccattaatgcatgttgtatttttaaaatagarccgatcccagtttctgatctccgtgttgccctcacgggtgtgaggaaggctgctctctcctggagcaatggcaatggcactgcctcctgccgggttcttc

SEQ ID NO: 303057 - DNA, 201 bp, Homo sapiens
acagagtctgaagttcaggaaatacagcaagagccttcctcagggatgaaacatgtgatcttatggtctgactagcctcaagccagctgagctcattgccrtgcaacttggtagttaatgattgctagtaagaagtttaaaaggatcatcccctcaaagaatgtcagagttggaaaagaccttagggacattaggctagga

SEQ ID NO: 303058 - DNA, 201 bp, Homo sapiens
agatgtgtgccacctctcctgggtaattttaaaattttttttttgtagagatgggggtctcactatgttgccacagctggcctccaagtcctgggctcaarcgatcctcccgtcttggcctcccaaagtgctaagattataggtgcaagccacctctcctggcttgcttctttcccgtaaattgaggtgtgttattccact

SEQ ID NO: 303059 - DNA, 201 bp, Homo sapiens
tttttgtatttttactacaggcagggtttcaccatattggtcgggctggtctcgaactcctgacctcaagtgatccacctgccttgcccttccaaagtgcwgggattacaggcgtgagccactgtgcctggtcttatatttcttttctatttttctaccctgatcaaccttttcttttctatctctctcactgtttctacg

SEQ ID NO: 303060 - DNA, 201 bp, Homo sapiens
agtctacgaagaggggtgcctcaggcccatggtaaattttatgtaagtgttggttgtatataagatgatgaagtccgggcgcggtggctcatgcctgtaaatcctagcactttgggaggccgaggcaggcagatcacctgaggtcaggagttcgagaccagcctggccaacatggagaaaccccgtctctactaaaaatac

SEQ ID NO: 303061 - DNA, 201 bp, Homo sapiens
ttgcagtgagccaagatcacgccattgcactccagcctgggcggcaagagcaagactccgtccctaaaataaataaataaataaataaataaataaataawtaaataaataaaataaaataaataaaaaaagaggttaaggtttatacgcaggccatttctaatagatgttatggaagccccaggttttggggcatcaggg

SEQ ID NO: 303062 - DNA, 201 bp, Homo sapiens
tactaaaaatacaaaaattagccgggcgtgttggcatgtgcctgtaatcccagctactggggaggctgaggcaggagaatcgcttgaacccaggaggcggwggttgcagtgagccaagatcacgccattgcactccagcctgggcggcaagagcaagactccgtccctaaaataaataaataaataaataaataaataaat

SEQ ID NO: 303063 - DNA, 201 bp, Homo sapiens
aaccaattagttacaaagtagggtctagaaatcagatttcctgaatcatattttagtgttttgtgaataatagtactctgaccccctcttgccaaattatrccctgggttttgttgttttgggaagattgtttactgtcatttctagagtatgaatgagtctttctaattgcatattttttctttccctttctatcatgaa

SEQ ID NO: 303064 - DNA, 201 bp, Homo sapiens
ccaccatgcccggctaatttttttgtagtttttagtacaaatggggtttcaccatgttggctaggctggtctcgagctcctgacctcaggtgatctgcctkccttggcctcccaaagtggtgggattacaggtgtgagccactgtcccaggccagatggaccattttaaagattaggtaactgagctctaggggtcaagag

SEQ ID NO: 303065 - DNA, 201 bp, Homo sapiens
cgcaatctctgctcactgcaagctccgcctcccgggttcacgccattctcctgcctcagcctcccgagtagctgggactacaggtgcctgccaccacgccyggctaattttttgtattttttttttttttagtagagatgggttttcaccatgttagccaggttggtctcgatctcctgacgtcgtgatccgcccacctcg

SEQ ID NO: 303066 - DNA, 201 bp, Homo sapiens
ggggacctagttatgagtcctgtttcttttttttttctttttttattttgagactgagtctcgctttgtctcccaggctggagtgcagtggcgcaatctckgctcactgcaagctccgcctcccgggttcacgccattctcctgcctcagcctcccgagtagctgggactacaggtgcctgccaccacgcccggctaattt

SEQ ID NO: 303067 - DNA, 201 bp, Homo sapiens
gtgttcccctttactgtgaccagtggcttcataggggacctagttatgagtcctgtttcttttttttttctttttttattttgagactgagtctcgctttrtctcccaggctggagtgcagtggcgcaatctctgctcactgcaagctccgcctcccgggttcacgccattctcctgcctcagcctcccgagtagctggga

SEQ ID NO: 303068 - DNA, 201 bp, Homo sapiens
atgagcttggtcatttaaaaaaatttattttttcctagttaggtaacagtggtataacaacattaaaagaaatgtagaaactagagaaaggaaaaaaaaaagccctttatcccccccatcacaaaactattataatttcaaaatagttacaagtacaatgtattccaagtggcttcttatttaagataattatattcacag

SEQ ID NO: 303069 - DNA, 201 bp, Homo sapiens
ccccatatcacttcttattatctcataatattcttaccttttgcagtgacagccccaaagtgtgtgtgtgtgtgtgtgtgtgtgtgtgtgtgtgtgtgtgtgtttggggtggggatcataataatcctgcaggtggggtttagctctggtgaaaagagcacagatcctttgatttgggtttgaatcccagcacttcctctt

SEQ ID NO: 303070 - DNA, 201 bp, Homo sapiens
agaaacaaaagtgtaggctgggtgcagtggctcacgcctgtaatcttagcactttgggaagccgaggtggggagatcacttgagcccagaagttcaagatyggcttgggcaacatagtgagactccgtctctattaaaaaaaaaaaaacaagtctaacatcaggtagacttcagggctgtgaaagaagtgacatagggtaa

SEQ ID NO: 303071 - DNA, 201 bp, Homo sapiens
gtttgtgtttgctaaacatatctttagctgcgtaagagaaagaaggaaaatagtaaagatgaacagtactgttttctacttgaagttctagttggcccccmctcccttccatgtaggaaccttagcttgctttccacaccctcccaccactggactcacaaaggcccctgatgagtgcctccggtaagacagggggaaatt

SEQ ID NO: 303072 - DNA, 201 bp, Homo sapiens
tgaaggaggctcctctagtgaaagaaaaaggcatccagtgttaatagtatttcttcccagttgcatggggcttgcatattagagataaaggaaacatcttwgctactactgagccataagtggtctcacctttcttgaaacataaggccgtcttggtttgttgttctgttttgtgcttttcacagaggcatggacactgaa

SEQ ID NO: 303073 - DNA, 201 bp, Homo sapiens
actccaaacagaggatgtcggtatagacaatccctaggatcttgtcccctttatgactgatcacacagttccactgcttgcccttgaggctttggtgtccrcgcatgcctattcagtctgacccacaagaggccaggccagctctgttccaggtgctgaaaatcccattaaaactccactcactagcctgttccctggggg

SEQ ID NO: 303074 - DNA, 201 bp, Homo sapiens
ggtctgtaaaatcccaaacccaggtagataaaaccaagaagtgacagggctggaagggatcttaggaattagttcataaagaacttcaggctcagagaagrcatgtgagttgcctaaggtcacacagcaaatctgaagcaaatcagggctagaaacccatagacgatggtcatgagcactggttttgagtcatccatttga

SEQ ID NO: 303075 - DNA, 201 bp, Homo sapiens
tgactgatcacacagttccactgcttgcccttgaggctttggtgtccacgcatgcctattcagtctgacccacaagaggccaggccagctctgttccaggygctgaaaatcccattaaaactccactcactagcctgttccctgggggtgctgaatcagcatttaatggggaaggccacgagctaggctctggtgggtagg

SEQ ID NO: 303076 - DNA, 201 bp, Homo sapiens
gactgatcacacagttccactgcttgcccttgaggctttggtgtccacgcatgcctattcagtctgacccacaagaggccaggccagctctgttccaggtsctgaaaatcccattaaaactccactcactagcctgttccctgggggtgctgaatcagcatttaatggggaaggccacgagctaggctctggtgggtagga

SEQ ID NO: 303077 - DNA, 201 bp, Homo sapiens
cttggtgactgttcagtggtaggcaaatgtcagaacccagtatgcaaatgtggaagtggacagatttgagtcagttatctcagctggtgttatgaaatacrgaaatttttggcgttggtggtggagggcgttggcataggaggcgtgaatgctctttgtttcttgctgttatgggagtatctcttgattgccccatcatct

SEQ ID NO: 303078 - DNA, 201 bp, Homo sapiens
atttttctctagatagcaatttacactctcattatagtgtgtgagaatgcctgtttctttacagcttcatccacaatgaacattataataatgaacacccygcccccctccttttgtaacttgaataggcaaatgaaaaagaagcaaactgtgctaggcctttcttggattgctgtaaagaaacaccacctgagactgttt

SEQ ID NO: 303079 - DNA, 201 bp, Homo sapiens
tgtaatcgtagctacttgggaggtggagacaggagaatttcttgaaccgggtgggggaagttgcagtgggctgagattgtgccactgcactccagcctggrcaacagagtgagactctgtgtcaaaaaaaaaaaaaaaaaaaggttccattcaagatgtcaagccccacgggactgagggtaacatgagggtaacagacag

SEQ ID NO: 303080 - DNA, 201 bp, Homo sapiens
tggtgctcattgaattgagccacagccccaaggtcatgttttcaaggttggcatttgggaggccttgtcagaaggtcttataccatattccagtcacccaragtgctgcccgccatgcctgttcgttcagcaggatttccctgagcacctgctctgtgccaagccctatgctaagcaccaagggagtaaatatggagggca

SEQ ID NO: 303081 - DNA, 201 bp, Homo sapiens
gcagcaagctgactccaactgtgggttcgcagaggaatacgaagtatgttgctgtaaatactgtttttaattgtgtcaggttccaacccaagctgggatcygaggggagttggtggatgggtggcaggtagctgaaagaacactcgagggactgtaggcagttgggacatggctttattctctctcctacagagtcagcag

SEQ ID NO: 303082 - DNA, 201 bp, Homo sapiens
tgttctttttcttttgttttacagagctgagtttggtgaaacttcaggaggttttagctagtggcgatccaaagacattaaatattgctttgtgggtacgwctccaccttgcgtcttacttggtgactgttcagtggtaggcaaatgtcagaacccagtatgcaaatgtggaagtggacagatttgagtcagttatctcag

SEQ ID NO: 303083 - DNA, 201 bp, Homo sapiens
ttttgttttacagagctgagtttggtgaaacttcaggaggttttagctagtggcgatccaaagacattaaatattgctttgtgggtacgtctccaccttgygtcttacttggtgactgttcagtggtaggcaaatgtcagaacccagtatgcaaatgtggaagtggacagatttgagtcagttatctcagctggtgttatg

SEQ ID NO: 303084 - DNA, 201 bp, Homo sapiens
gtggccccgtttccttctagaagttgagttccctgggcttgtgagaacccttgtacatctgcctccattaaactcacatttggagatctcgtaaatgaacscagtgcagtccgggggcagagtgaaggctcagactgcagccggacatggctcagttaccctaggtgggttagcagctgagcaggtactggtctcaaaacc

SEQ ID NO: 303085 - DNA, 201 bp, Homo sapiens
ggccccatatcacttcttattatctcataatattcttaccttttgcagtgacagccccaaagtgtgtgtgtgtgtgtgtgtgtgtgtgtgtgtgtgtgtgtgtgtttggggtggggatcataataatcctgcaggtggggtttagctctggtgaaaagagcacagatcctttgatttgggtttgaatcccagcacttcctc

SEQ ID NO: 303086 - DNA, 201 bp, Homo sapiens
cctggccccatatcacttcttattatctcataatattcttaccttttgcagtgacagccccaaagtgtgtgtgtgtgtgtgtgtgtgtgtgtgtgtgtgtgtgtgtgtttggggtggggatcataataatcctgcaggtggggtttagctctggtgaaaagagcacagatcctttgatttgggtttgaatcccagcacttc

SEQ ID NO: 303087 - DNA, 201 bp, Homo sapiens
tacctggccccatatcacttcttattatctcataatattcttaccttttgcagtgacagccccaaagtgtgtgtgtgtgtgtgtgtgtgtgtgtgtgtgtgtgtgtgtgtttggggtggggatcataataatcctgcaggtggggtttagctctggtgaaaagagcacagatcctttgatttgggtttgaatcccagcact

SEQ ID NO: 303088 - DNA, 201 bp, Homo sapiens
gctgtgtgaccctgctatctgcacagggacttgagcctctcagaatctgttactgcatctggaaaatggaaatctggaaatgtcactgcatctgtagcaayaaccaggccattttgttactaggtttaagtgagggaaggcatgtaaggcactcagtccagatcatggcacttagtaggcctgagcacatttgctcccacc

SEQ ID NO: 303089 - DNA, 201 bp, Homo sapiens
taagattataggtgcaagccacctctcctggcttgcttctttcccgtaaattgaggtgtgttattccactgcttaaaagcctacatggcttcatatcgctsttagtataaacccaaacagtggtctgcaagactctgaaccttagatcaggatgatcagacccctccctcccctccaccctccgacctcatcctggctacc

SEQ ID NO: 303090 - DNA, 201 bp, Homo sapiens
taaaaagtcatggagaaggttttctgtgtgcagctaagagaggaggtggcagacatttatttatttatttatttatttatttatttatttatttatttatwgagacgaagtctcactctgttgcctgggctggagtgctgtggcacgatctcggctcactgcaacctccatctcccgggttcaagcgattctcctgcctca

SEQ ID NO: 303091 - DNA, 201 bp, Homo sapiens
ggagcaggctgaggtcacccagcaaggtattagagaagacaagatgggaacctgggtcaccggcctgggcctcatattttcaaagtgctatttttttttttcccgtgttttcactttgatcttacttttaatgatagggacgtatcactgtgtcttctcaaaatggtgggtgtgaatggaatttttcaaagttgaatcaat

SEQ ID NO: 303092 - DNA, 201 bp, Homo sapiens
tgaaaggctaaataaagagaactttttattttttccatgttaatacatggatgatattaaccatgatgtttaatagctacagaatactgcatgaaatggakgtactataattcatttagcctttttcgtatttagagatttaagcagtagccaatttttcaccattacaagtggtgcaaggaccaatatcttcatgaatac

SEQ ID NO: 303093 - DNA, 201 bp, Homo sapiens
tcaggattaatttccagatatctttctggtattagacacataccacttgcctaataacgttccaaaaggaattcattgtttacattgctattagaacataygagattgcctgtttcattatgtccgtcccagcactgggtattatcattaaaaaaaaaagattttaaatttatttattgagttatttacttgagacagagt

SEQ ID NO: 303094 - DNA, 201 bp, Homo sapiens
caatttttgcttttgttgctgtgctttttgtgtggtatccaagcaaccattgtaaatactatgtcaagaagctcttccccaatgtgtttttttttttttttaaacaaattttacagtgtacagctttaggtctaatgtttaaggcttgaatctattcagagtttatttttgtgtctggtgtaagatagaggtccagtttta

SEQ ID NO: 303095 - DNA, 201 bp, Homo sapiens
cgtctcagcctcccaaagtgctgggattacagggtgaaccactgcgcggcccattaggtgctcagtaatttgttgaatgaattgaagacatgggacttgarttaggcttttattattattattattttttgagacggagtctcactctgtcacccagtctgggagtgcagtggcgtgatcttggcgcactgcaacctccgc

SEQ ID NO: 303096 - DNA, 201 bp, Homo sapiens
tccagtgtgccacacgctttcttgccactaggtccttgcatgtgatggagtaactcttgtacctctgtctccctaaatagacggggttctccaaggacatygtgccacagggcctggtaacccagtaggtgctcagtaatttatttatttatttattttttttgagacagagtctagctctgtcgcccaggctggagtaga

SEQ ID NO: 303097 - DNA, 201 bp, Homo sapiens
tgtcctcatctgtatgatggggataacaagaatacctactttataggattgctgtggaggattaaatggatctgcatgacaaatgcttagcatgaaaaaawccctcaacagatattggctgctattttattatcttattgtgctgagacactggcataatttacaattcaaaaattaaatttttttaatcttatactgtag

SEQ ID NO: 303098 - DNA, 201 bp, Homo sapiens
tcggcctcccaaagtgctgagattacaggcgtgagccactgtgccaggccccattttttgttttttggttaactccctgttcattaaaaaaaaaaaatctrtatctatagatagatagatatagatataatctttgttatcaatttgtataagctctttggaaattagtccttcgattgtcatttgtattgcaaacacatt

SEQ ID NO: 303099 - DNA, 201 bp, Homo sapiens
gtttcttaagtctgggggacaggcactgagcagaggccgtggtggggaacaggagcctgtcttcatggctcttactggccactgggcaagactcagatagyaccaaccaaccagtcacagttgtgatgtaggatgtgactgtgaatgacatccctgctgcccgcttcagagaaagggctgccacttgccagagaaggaatg

SEQ ID NO: 303100 - DNA, 201 bp, Homo sapiens
tgtgtgtttcccttctaatataatgccactgatgatattataattaataggtaacattatgcatgacaggcactgtgtgctaagggttttaatgcattatytcatttggccatttcagaaataccaagaggtaggtgctgttcttgtttatttgtttgttttttttttttgatagggagtcccactctgtcacccaggctg

SEQ ID NO: 303101 - DNA, 201 bp, Homo sapiens
ttttgtaattttagtagagacggtgtttctccatgttggccaggctggtctcgaactcctgacctcaagtgatctgcctgcctcagtgtcccgaagtgctrggattacaggcatgagccactttgcctggcccttcccctccatttttaaaaggttgcattgtgtcatgcacttgtgttaaaatatgtcacccttccagat

SEQ ID NO: 303102 - DNA, 201 bp, Homo sapiens
tctaaactaacaaggtttacacatgtgacaaacatccaggttgccagggctcaaaagagggttcacatcgactcccttctcattcactgagtcctttttcrggagctttggccgagtttgtgctgcgtctgggcatctaggtgtcgagttcttccctagtgttttcagcctcggcttcctcctctgtaaaatgggagtaac

SEQ ID NO: 303103 - DNA, 201 bp, Homo sapiens
taaataaataaataaataaataaataaaataaaataaataaaaaaagaggttaaggtttatacgcaggccatttctaatagatgttatggaagccccaggktttggggcatcagggttggaaaggaagccaaaaatgggtgtgtccaaaggacagatgcattgagaatgggttgtaaaatttcagccattgtgtagattaa

SEQ ID NO: 303104 - DNA, 201 bp, Homo sapiens
agatgttttgagtttatcctccaataggcaatgaagttgacaaggttttatgaaggaataaccaagtccctggagtcctgtggctgttgccacagtaatgygtcctgctgtaaacaggacaggtgtgtcctgttgagaatgtgagcgggctcttccagcctcctggtccctcctgactctgccacgcccctcacctcactg

SEQ ID NO: 303105 - DNA, 201 bp, Homo sapiens
ggatgtgcacacaacctatcaagaatacttcactttgtgaggcccaaaaacagctcctagcacagtgtagagcagacttggtcagaacttcaatccttgayttttttttttttttaacccgaatttcatgaggtttttctgagacatccactggactgtcatataccgtgtgctgggctctcattttatccttacaattat

SEQ ID NO: 303106 - DNA, 201 bp, Homo sapiens
gactcaatatagggtgggatagggcggtgggtaaaagccgttacaattttgtccaaatggtatgggctgatttacttattagggaggtacaaatggcttcrtgttataaagtgtcaagatccttatttggataaggcaaccagagtgtagacgagagagtaagagtaagaaaacaaggagaaaaatgagtgtcttaaggat

SEQ ID NO: 303107 - DNA, 201 bp, Homo sapiens
ctttcctttcagaacagaacaatccatatgcatgtatactccaaggcaaccccttgacttttctgggaaatttactttcttgggaataacctaagttattkctgaataaaatgaatcttaagagcatggctctacatcaggaactctttcctttctttccacttccaggtgacttgctcatagattttacagaacaaactg

SEQ ID NO: 303108 - DNA, 201 bp, Homo sapiens
aaaagtgaaaaggaatagccgaaattggtattaatagcattttacttaacttagtatattaaaagtattatttcaacatgtaatttctgtgaagtattaatgagttattttatgtcttcttttgtactaagtctttgatatctagtctgtattgtgtgcttgtagcacatctgaatgcaaactggtcacctctcaggggct

SEQ ID NO: 303109 - DNA, 201 bp, Homo sapiens
tctttctggtattagacacataccacttgcctaataacgttccaaaaggaattcattgtttacattgctattagaacatatgagattgcctgtttcattaygtccgtcccagcactgggtattatcattaaaaaaaaaagattttaaatttatttattgagttatttacttgagacagagttttgcttgtctcccaggctg

SEQ ID NO: 303110 - DNA, 201 bp, Homo sapiens
aaaaagtgaaaaggaatagccgaaattggtattaatagcattttacttaacttagtatattaaaagtattatttcaacatgtaatttctgtgaagtattaatgagttattttatgtcttcttttgtactaagtctttgatatctagtctgtattgtgtgcttgtagcacatctgaatgcaaactggtcacctctcaggggc

SEQ ID NO: 303111 - DNA, 201 bp, Homo sapiens
caccttggctcctcaaagtgttgggattacaggcgtgagccaccgtgcccagccaatattttaaatttaatgtttacatttgcacacatgccaattgggcwtcatggtggctgcctcacaccactttttgtccgtgtgtgagactcacatagaggctgttttctgtgatccttttttaaaaaataattacatttttttaat

SEQ ID NO: 303112 - DNA, 201 bp, Homo sapiens
aaaaaagtgaaaaggaatagccgaaattggtattaatagcattttacttaacttagtatattaaaagtattatttcaacatgtaatttctgtgaagtattaatgagttattttatgtcttcttttgtactaagtctttgatatctagtctgtattgtgtgcttgtagcacatctgaatgcaaactggtcacctctcagggg

SEQ ID NO: 303113 - DNA, 201 bp, Homo sapiens
tggtaggaaacaaaggctcctcccagtggcttctctgtaaggagaatccacttaaaattaaaaaaaaaattaattttggagtagatagtacgtaaacatgrcacaattttttttgttttttggacaaggtgtttgcagtgaaagcatttcccttttttgtcccctacctgcccatttcctctccctggaggtgacgtttgt

SEQ ID NO: 303114 - DNA, 201 bp, Homo sapiens
gccaatattttaaatttaatgtttacatttgcacacatgccaattgggcttcatggtggctgcctcacaccactttttgtccgtgtgtgagactcacatakaggctgttttctgtgatccttttttaaaaaataattacatttttttaatgctcagggaaaatgtcaaataattgtttatgttttgtactgaaatctgcac

SEQ ID NO: 303115 - DNA, 201 bp, Homo sapiens
gatacacaaatatatgtgtgagtatacatatatttaatacatatatatttaatatttaatacacacacacacacacacacatatatatatatatatatatwtttttttttttttttttttttttgagacagtcttaccctgtcacccaggctggagtgcagtggcatgatcttggctcactgcaacctccatctcctgggt

SEQ ID NO: 303116 - DNA, 201 bp, Homo sapiens
ataggttatcaagatccaggggagagaagaacttacttaaagtcacaaaaccaattagttacaaagtagggtctagaaatcagatttcctgaatcatattktagtgttttgtgaataatagtactctgaccccctcttgccaaattataccctgggttttgttgttttgggaagattgtttactgtcatttctagagtatg

SEQ ID NO: 303117 - DNA, 201 bp, Homo sapiens
ttttaaacatatacatatagatacacaaatatatgtgtgagtatacatatatttaatacatatatatttaatatttaatacacacacacacacacacacayatatatatatatatatatttttttttttttttttttttttttgagacagtcttaccctgtcacccaggctggagtgcagtggcatgatcttggctcactg

SEQ ID NO: 303118 - DNA, 201 bp, Homo sapiens
cctctgctcatgcttcgttgagcaaaacttagtcacattgcaacatctagctccatgggagctgggaaatgtggtctttgtttccaacaggtatgcacacacagggctaaaaatctgggtgggtatgatgaagggaaaatgggggaatggattttgggggtcaagactggtctctctctgctgtccctccctgaacagagg

SEQ ID NO: 303119 - DNA, 201 bp, Homo sapiens
aaaaaaaaaaaaaaaaaaaaaaaaaaaaaagcaagctcatacctccagcctgggttttgagagcctgtctgaaaaaaacaaaacaaaaccctcaagtaaayaacctaatgtagcacgttaaggaactagaaaaataagaacaaactaatcttcaaattagtaaaaggaacaaaataataaaggtcaaagctgaaataaatg

SEQ ID NO: 303120 - DNA, 201 bp, Homo sapiens
ttataccctgggttttgttgttttgggaagattgtttactgtcatttctagagtatgaatgagtctttctaattgcatattttttctttccctttctatcrtgaagacctaaaaagtgagtaatctctttattttttttaataacttgtacttttctattgaatatggacttcactgaatgtaaaaaatcctgataagttt

SEQ ID NO: 303121 - DNA, 201 bp, Homo sapiens
aaaactctgtgattggaaagtcacttctggaaactagacatatagagcagacctcactcttacatttctttttgaagtgcaataattttttttttttttttaacaatatagggcccagtcctgtgtttgacattaaagctgtttccatcagtccaaccaatgtgatcttaacttggaaaagtaatgacacagctgcttctg

SEQ ID NO: 303122 - DNA, 201 bp, Homo sapiens
taaaactctgtgattggaaagtcacttctggaaactagacatatagagcagacctcactcttacatttctttttgaagtgcaataattttttttttttttttaacaatatagggcccagtcctgtgtttgacattaaagctgtttccatcagtccaaccaatgtgatcttaacttggaaaagtaatgacacagctgcttct

SEQ ID NO: 303123 - DNA, 201 bp, Homo sapiens
ataaaactctgtgattggaaagtcacttctggaaactagacatatagagcagacctcactcttacatttctttttgaagtgcaataattttttttttttttttaacaatatagggcccagtcctgtgtttgacattaaagctgtttccatcagtccaaccaatgtgatcttaacttggaaaagtaatgacacagctgcttc

SEQ ID NO: 303124 - DNA, 201 bp, Homo sapiens
gagctcttagatgaggatattgatgtccagagaagacagggagcaggctgaggtcacccagcaaggtattagagaagacaagatgggaacctgggtcacckgcctgggcctcatattttcaaagtgctatttttttttttcccgtgttttcactttgatcttacttttaatgatagggacgtatcactgtgtcttctcaaa

SEQ ID NO: 303125 - DNA, 201 bp, Homo sapiens
cccagaagaagcatcttcaaaatccacattcagcagttcattttgataatggatatttcagggaatcagtgcatttttgagctggaccagactttcaagayagctgaaacccctcagagctcttagatgaggatattgatgtccagagaagacagggagcaggctgaggtcacccagcaaggtattagagaagacaagatg

SEQ ID NO: 303126 - DNA, 201 bp, Homo sapiens
aaaaataaactttcacatcatgttacccctggatacatttttgtggccatgcatctgcacgaatattcaatccctgctacaggcaagacactgagtgggaygttgcagggctaccaaggtgaggaggtcccaacccctgtcctcaaggagttgatgtaacacctacccaggattaatttcatttctctcagaggtcattaa

SEQ ID NO: 303127 - DNA, 201 bp, Homo sapiens
aatagaactggtaagcaaataggcttttctgttaaaccatcatgtttcttaaaggaaatcagtataattaataaacataatgtttccaaatattgtttttsttttaattatctaagaaaaaactttaaaaattttcataacactaatgcttatttattatatgaaatacagacaagtaagtagaaaaaacttacatggaaa

SEQ ID NO: 303128 - DNA, 201 bp, Homo sapiens
tgagattacaggcatgaggcactgcacctggcccaaatcttctcagttctaaatggctgtgataaaaactacattgacaatttttttttttttttttttttggagatggagtctcgctctggtgcccaggctgaagtgcaatggcgcaatcttggctcactgcaagctccgcctcctgggttcacgccattctcctgcctc

SEQ ID NO: 303129 - DNA, 201 bp, Homo sapiens
atcctcttggaaaaccccacgcttatcaggaaaaggagatggaagtgaaaaaataaaaatatatataaaaaaaggaaaacctagtgttagcaccccttatscagcaggccccccacctggacccccacctgtattcacattcctcccacacttacagtcagtggcttcattaatctctaaggttccatgttctgctcccca

SEQ ID NO: 303130 - DNA, 201 bp, Homo sapiens
ctcatagagcttttttcttcttttttgtatatccaggatttctttagcggtcttttgtaattatagtaaaagcactgaggttagatttatgggttttttttgaggaggatagactgaatccctttcccgcctcaaggctatagtgggtcggcacagtttgtgtttgctaaacatatctttagctgcgtaagagaaagaagg

SEQ ID NO: 303131 - DNA, 201 bp, Homo sapiens
gtatatgggaataagtggggtgctggatcttgtgggcaggctatgggatctgggaaaggggttagcacctgggcctggagggacctggaatctaggggggscatacatctaagctaaatgtggctgtggcttgcaaactcagaggcctttcgggcagcctggtgaaatgataaatgggcagttgctgtttattctcagtcc

SEQ ID NO: 303132 - DNA, 201 bp, Homo sapiens
ggtgctctcattttatttttagagctatattttagctctaacgtgattgttgggtgaacacttgcagaatgaaatatgactgacacctaccagctgtctayacattcctggttatatcttaggaaggcagtgtgtgctagcaccttgggaagagaatgttgagttcaaatcctagttttgccccttgcaccaataccttga

SEQ ID NO: 303133 - DNA, 201 bp, Homo sapiens
tttcctgaatcatattttagtgttttgtgaataatagtactctgaccccctcttgccaaattataccctgggttttgttgttttgggaagattgtttactrtcatttctagagtatgaatgagtctttctaattgcatattttttctttccctttctatcatgaagacctaaaaagtgagtaatctctttattttttttaa

SEQ ID NO: 303134 - DNA, 201 bp, Homo sapiens
tttcttcaacttcacaccttagtttctttacttgtaaattgggttgatagtgggctgctgtcagaattaaggacatcgttttgtcaaggattttgcatacrggaagtcatggtgacagctgttgttactgttgtcctgaggagtggggacaggagaggaggaaaacaggctggtccaggtgtctttccttaaaggaggctc

SEQ ID NO: 303135 - DNA, 201 bp, Homo sapiens
ccagcttggccaacatggtgaaacaccatctgtactaaaaataccaaaaaaattagccaggtgtggtggcatgcacctgtaatcccagctacttgggaggytgaggcaggagaatcgcttgagcctgagaggtggaggctgcagtgagccgagatcactccattgcactccagcctgggcaacaagagtgaaactccatct

SEQ ID NO: 303136 - DNA, 201 bp, Homo sapiens
gcccattcagagaagctctgaaccctgcaaaagctcccacgtggaggccagtgagctggttataatccagagactgtcagtttttcctagtacatatttgracctgagcctttgtttctgcaaagagtctggtactgactcacacagtgtcagcagcccccttccatcccctggcacacccctccctcattcctactgagc

SEQ ID NO: 303137 - DNA, 201 bp, Homo sapiens
gggtatgcgtgctttcagttttgatacatactgccaaattaccttccagaaagtttttcttaaataccaatgcagagttgagtcaacagtgcaggagtgtrcagatgcctcaccaacttgccagttccggatctgatatgttttttggtttattgcattcatttatcagaaaagctttctcaaaaacaaagtatgaaataa

SEQ ID NO: 303138 - DNA, 201 bp, Homo sapiens
ggaaaattttagaagttttaggtgtaaatgcagctggtaagatccttatgacttagtttcttttttttcttcttttcttttctttctttctttcttttttyttttttttttttttttaagacagagtctcactctgttgcccaggctggagtgcagtggcgcgatctcagctcactgcaacctccgtctccccagttcaag

SEQ ID NO: 303139 - DNA, 201 bp, Homo sapiens
tggggaaaattttagaagttttaggtgtaaatgcagctggtaagatccttatgacttagtttcttttttttcttcttttcttttctttctttctttctttytttttttttttttttttttaagacagagtctcactctgttgcccaggctggagtgcagtggcgcgatctcagctcactgcaacctccgtctccccagttc

SEQ ID NO: 303140 - DNA, 201 bp, Homo sapiens
tgtaagtacatgtaggattttcatgtagaggagttggggaaaattttagaagttttaggtgtaaatgcagctggtaagatccttatgacttagtttctttyttttcttcttttcttttctttctttctttctttttttttttttttttttttttaagacagagtctcactctgttgcccaggctggagtgcagtggcgcga

SEQ ID NO: 303141 - DNA, 201 bp, Homo sapiens
tttgttcaaagccaaatgttgctacttctgaagacgagtgcaccttatgggtatagccagctataatgtttatcaaacatatactttttttttttttttttgagatggagtttttgctctgtcacccaggctggagtgcagtggcatgatctcagctcactgcaacctccacctcccaggttcaagtgatttctcctgcct

SEQ ID NO: 303142 - DNA, 201 bp, Homo sapiens
gtggatctcaaactttagcatccatcagcatcaccaggagggtggttctaccctcagagtttctaattcggaattgcgtttctgccagtttctgggtgatyctactgctgtggcaccagggtgcacacttggagtggtactgtccccaggatagtgggagcccttcaggcatcatttcttttattgttctttaattcatgg

SEQ ID NO: 303143 - DNA, 201 bp, Homo sapiens
tccctcttgcttctttctgttcatcagcttcattctcagagcagctccctctgcacacttaaggagcccagctgctcccgtttcacaccctgcagctgccycaccagccagctgccccaccaaccagggtctggtccagggaaacgtgtcttgagtggggtctgattagcaaagtctgcttcacagagctgtccctggaaa

SEQ ID NO: 303144 - DNA, 201 bp, Homo sapiens
cctgggaggcgggggttgcagtgagccgacatcgcgccactgcactccagcctgggccacagagcaagatttcatctcaaaaaaaaaaaaaaaaaaaaaaagaaaaagaaaaaaagaaatgcaggtaggtgcttctagctactgctgtgggatagcaaggtagttaccaaactgataagggtagcatcttacttactgctg

SEQ ID NO: 303145 - DNA, 201 bp, Homo sapiens
atttatttatttttattttttatttttttgaaacggagtttcactgtgtcacccagccacccaggctggagtgcaatggtacaatcttggctcactgcaamctccgcctcccgggttcaaaggattctcctgcctcagcctcctgagtagctgggattacaggcacccgccaccacacttggctaatttttgtatttttag

SEQ ID NO: 303146 - DNA, 201 bp, Homo sapiens
gcagaagcaaatatgagaatccagctgtttcttactaagcagacattaaagagatttgcaaatatctaaaataatgctatctctctcacttttttttttttgtattggaaacatcattttccatacaatgtcatttatgttaacaggtgacagatttatttatttttattttttatttttttgaaacggagtttcactgtg

SEQ ID NO: 303147 - DNA, 201 bp, Homo sapiens
gattccagggcatatgcacatggcctcccttcccctcaaaatttacaaaagcaaatccaattaaattgtgcaggcattctaggaagtcaagtttatgtgcyttttttctttttcaaggatgctttgaaaatagaggcagtgccatgaagcagcattggtatctgttgatgggtgtgtgcattggcataactctctgctgtt

SEQ ID NO: 303148 - DNA, 201 bp, Homo sapiens
aagccattctcctgcctcaccctttgagcctccttaattttttatttatttattttttttttgtagagacagggtctcattatgttgtccagcctgatatkgctatttttttttttttaatggcgatgtagtaatcttgctttgttgcccaggctgttctggaactcctggcttcaggtgtgtgccactgtgcctggccca

SEQ ID NO: 303149 - DNA, 201 bp, Homo sapiens
ttatttggttagaaatatggcatcaggagcggccacttgctgttaggagtaattgataacagttacattaataggattccagggcatatgcacatggcctyccttcccctcaaaatttacaaaagcaaatccaattaaattgtgcaggcattctaggaagtcaagtttatgtgccttttttctttttcaaggatgctttga

SEQ ID NO: 303150 - DNA, 201 bp, Homo sapiens; identical to SEQ ID NO: 63188

SEQ ID NO: 303151 - DNA, 201 bp, Homo sapiens
ggttttcacatatatgggcagtgtcccaacaggctgctggggggtggccgtttgtgatggcctcaccagtctttcccagagagggaagtgcacatttttargctacttttgctctgactgatacacttggctgcctaacaaaaagccagagaagaactaagatttttagcatcattcaaaatgcttgccattccttttgct

SEQ ID NO: 303152 - DNA, 201 bp, Homo sapiens
tgtaagggagagtggttgaggtcaagatctgggttctggttcttgtgcctcctctctggctgtgtgtccttcaacaagctgcttactgtctctgggcctcygtgccctctgcaactgggttgttggtctatttaaatacttggagaaaaaagctgggcatggtggctcatgcctgtaatcccagcactttgggaagccaag

SEQ ID NO: 303153 - DNA, 201 bp, Homo sapiens
ccagggaggttgagactgcaatgagctgtgattgcgccactgcactccagtttgggtgatgcagtgagatcccatctctaaataaaaaaaaaataaataawgcccctagcatggtgcctggcacatggtaggccctcaaaagatgaccctccaaagtggccaggactcaccatgcattcagggaatatggattcttttggt

SEQ ID NO: 303154 - DNA, 201 bp, Homo sapiens; identical to SEQ ID NO: 63176

SEQ ID NO: 303155 - DNA, 201 bp, Homo sapiens
gttctgggaagcctctgtggaagggaggttttgttaagtgaactcccctggtaaacggagtgattggcccccaattagcttgctgttcggattaactgtartacatcacactttcgaaagtgaagatatgcctattttttcccctctaggtctataaagtagatttttgccattagtaaaatttaaagtgattgggggcta

SEQ ID NO: 303156 - DNA, 201 bp, Homo sapiens; identical to SEQ ID NO: 63177

SEQ ID NO: 303157 - DNA, 201 bp, Homo sapiens
ttccccaatcctgcttcctggaggtagccaatgtttatagtttggtgtacatctttataagactctttatgtacatctgtaaacacacacacacacacacrcacacacagtactttgaaaaaattggatgctgttttttttttgagatggagtcttgctctgttgcccaggctggagtgcagtggtgccatctcagctcac

SEQ ID NO: 303158 - DNA, 201 bp, Homo sapiens
atgcaggagcctgtgctagcagttgaccattaacatgggaacgccacctcccagcgggcactgctgccgcatacttgcgaggttgctgaagcttgtagttyagagcaggaccatcccactagatgtgcaatgtgagcctcaggtataatttaaagttttctagaagccacactgaaaaaaaagtgaaaaggaatagccgaa

SEQ ID NO: 303159 - DNA, 201 bp, Homo sapiens
atacaatcatttcagtagatgcagaaaaaacatttgaccaaaaaatattgttaactgtgctttcttttctgaacttaagaacttgcttttccaaaaccttmccagaatccctgtatgaatcaacaaaatttagttcttaacacatttctccttctttaaaatggtgacattagctgggcatgatggtgtgtgcctttaatc

SEQ ID NO: 303160 - DNA, 201 bp, Homo sapiens
ttccctgcgggccttggccattcctgtcctggcctttactggcagtctctattctaaaatgtgggcatcccacatgaggtccagcttctcctgagatcccyggaggtgcagctgctgtgatggtgaccttgtttagcagatgctccctgcagtccaaactcccacccatcgtcctgccctttgatccatttcccatgaact

SEQ ID NO: 303161 - DNA, 201 bp, Homo sapiens
ccttccccaatcctgcttcctggaggtagccaatgtttatagtttggtgtacatctttataagactctttatgtacatctgtaaacacacacacacacacrcgcacacacagtactttgaaaaaattggatgctgttttttttttgagatggagtcttgctctgttgcccaggctggagtgcagtggtgccatctcagctc

SEQ ID NO: 303162 - DNA, 201 bp, Homo sapiens
gtttagagcaggaccatcccactagatgtgcaatgtgagcctcaggtataatttaaagttttctagaagccacactgaaaaaaaagtgaaaaggaatagcygaaattggtattaatagcattttacttaacttagtatattaaaagtattatttcaacatgtaatttctgtgaagtattaatgagttattttatgtcttct

SEQ ID NO: 303163 - DNA, 201 bp, Homo sapiens
cattcagagaagctctgaaccctgcaaaagctcccacgtggaggccagtgagctggttataatccagagactgtcagtttttcctagtacatatttggacytgagcctttgtttctgcaaagagtctggtactgactcacacagtgtcagcagcccccttccatcccctggcacacccctccctcattcctactgagcatt

SEQ ID NO: 303164 - DNA, 201 bp, Homo sapiens; identical to SEQ ID NO: 63180

SEQ ID NO: 303165 - DNA, 201 bp, Homo sapiens
taagtctgcagaactgaccccctggagagtcaccaccttggtcacagacagcagagggaggaatcaggaagtctctgctgtagttgcgggatccaggggtstatgttctgagctgtgatcctgggatcaggaagctgcagccaccgctgaggttttggttctagagccaggcagcgtgagctccagtcattgcatccacac

SEQ ID NO: 303166 - DNA, 201 bp, Homo sapiens
acatgctttccttgcactggcacattgtatgctcacaatagccctgtgatgtggttggaagtagccttattttatagataggaagccaaggctgagagagktgctagacaggtatcacagctggaaagtggcagaggtgagattaagcctctggtatttctcacctggagcctgcgcttgtaactctctttccagtgtgga

SEQ ID NO: 303167 - DNA, 201 bp, Homo sapiens
taagccattctcctgcctcaccctttgagcctccttaattttttatttatttattttttttttgtagagacagggtctcattatgttgtccagcctgatattgctatttttttttttttaatggcgatgtagtaatcttgctttgttgcccaggctgttctggaactcctggcttcaggtgtgtgccactgtgcctggccc

SEQ ID NO: 303168 - DNA, 201 bp, Homo sapiens
ggagaagaaatctctctgccatcactttcttatgattctccttctgtgtacctttcttagctggtcacccttctgcagatgtcctgaaatacacgtatgasgatttcaaaaagggagcctcagatacttatgtgacatacctcataagaacagaagaaaagggacgttctcagagcttgtctgaagttttgaaatatgaaa

SEQ ID NO: 303169 - DNA, 201 bp, Homo sapiens
gacacaggatgcatgatgtagtaatggtgactgttggctgaccacacgccaagcttcgtgtgacatgctttccttgcactggcacattgtatgctcacaayagccctgtgatgtggttggaagtagccttattttatagataggaagccaaggctgagagaggtgctagacaggtatcacagctggaaagtggcagaggtg

SEQ ID NO: 303170 - DNA, 201 bp, Homo sapiens
agctaaagatggattcagtgttttttttttctttttctttttttttttttgaggcggagtcttgctctgtttcccaggctggagtgcaatggtgcgatctyggctcactgcaacctctgccgcccagattcaagcaattttcctgcctcagcctcccaggtagctgggatgacaggagcccaccaccacgcttggctaatt

SEQ ID NO: 303171 - DNA, 201 bp, Homo sapiens
gctataggaattgagactaagttggagctgggtgatcagggaaggttttaaggaagagatctgggacaaatagctaaagatggattcagtgttttttttttctttttctttttttttttttgaggcggagtcttgctctgtttcccaggctggagtgcaatggtgcgatctcggctcactgcaacctctgccgcccagatt

SEQ ID NO: 303172 - DNA, 201 bp, Homo sapiens
agcattatttatttatttatttagttagttagttagttcttgagatggagtctcactctgtcacccacgctggagtgcagtggcatgatctcagctcactrcaacctctgcctcctgggttcaggtgattttcctgcctcagcctcctgagtagctgggattacaggggcccgctaccacgcccagctaatttttgtattt

SEQ ID NO: 303173 - DNA, 201 bp, Homo sapiens
aaattgaggtgtgttattccactgcttaaaagcctacatggcttcatatcgctgttagtataaacccaaacagtggtctgcaagactctgaaccttagatyaggatgatcagacccctccctcccctccaccctccgacctcatcctggctacccactccctgttcacagactacagtcacctggctctagtacaacagac

SEQ ID NO: 303174 - DNA, 201 bp, Homo sapiens
tgttttcttatatatattttacatgacaaaattatatttaaaacatattaaactttaaaaaaccatagtttataatttataagccatgtagcatatttctrtttttgagacaggatcttactctgtcacccaggctggagtgcagtggctcgatcatggctcactgcagccttgacctcctgggctcaagtaatcctcctg

SEQ ID NO: 303175 - DNA, 201 bp, Homo sapiens
tggtctgcaagactctgaaccttagatcaggatgatcagacccctccctcccctccaccctccgacctcatcctggctacccactccctgttcacagactrcagtcacctggctctagtacaacagacacttgaacctaccccgcccctctccctcagggcctggtactatcctcctcgctccttcttatcactcaggccc

SEQ ID NO: 303176 - DNA, 201 bp, Homo sapiens
ccctctccactgtgactgtttcctgggaaactagtcaggggctggttttataggaattatccagtcgtattattattattattattattattattattattattattattattgagactgagtctcgctgtgtcgcccaggctggagtgcggtggtgccatcttggctcactgcaacctccgcctcccaggttcaagcaat

SEQ ID NO: 303177 - DNA, 201 bp, Homo sapiens
cccctctccactgtgactgtttcctgggaaactagtcaggggctggttttataggaattatccagtcgtattattattattattattattattattattattattattattattgagactgagtctcgctgtgtcgcccaggctggagtgcggtggtgccatcttggctcactgcaacctccgcctcccaggttcaagcaa

SEQ ID NO: 303178 - DNA, 201 bp, Homo sapiens
aatgagaagacaattactgttgtgcatcaaccatggtgtaacatcacaggcttacgtccagcgacttcatatgtattctccatcactccaggaataggcartgagacttggggagatcccagagtcataaaagtcatcacaggtaagatgactggctcccagggatgatgacaaaccatttcttattatggtgtattctag

SEQ ID NO: 303179 - DNA, 201 bp, Homo sapiens
tcccctctccactgtgactgtttcctgggaaactagtcaggggctggttttataggaattatccagtcgtattattattattattattattattattattattattattattattgagactgagtctcgctgtgtcgcccaggctggagtgcggtggtgccatcttggctcactgcaacctccgcctcccaggttcaagca

SEQ ID NO: 303180 - DNA, 201 bp, Homo sapiens; identical to SEQ ID NO: 63189

SEQ ID NO: 303181 - DNA, 201 bp, Homo sapiens
tcagggacctctttttgctctttgttatcccacagggcttgtgtggctggcttcaccaacattaccttccaccctcaaaacaaggggctcattgatggggytgagagctatgtgtccttcagtcgctactcagatgctgtttccttgccccaggatccaggtagggagaagacaacagtcctggcactggttcagtggcat

SEQ ID NO: 303182 - DNA, 201 bp, Homo sapiens
ctaggagagattcctagaaatgagttcactgagaatatgagcttaagagaaagtgaggatttaaagccagatctgtctgccttcaaatccagcgctctttmtactgatgtgagttctcctgtcttttttacctatcagaattctagaactctcccagagaaaccaggcagatactgctccacaccggtgagctgcttctca

SEQ ID NO: 303183 - DNA, 201 bp, Homo sapiens
atgccactctgactctgtgaacttgtcactttataaagaggaaattcaagcttggaggggccttctggcatgacgtttattgaattgtggggcacaagatrcttccctgcttgttccattttcctttctcttgtttattctcctgccttatttatttattttttcttttgagacagagtcttgctctgttgcccaggctgg

SEQ ID NO: 303184 - DNA, 201 bp, Homo sapiens
cccactggctctgtttggttcctctgggctcacacacagggagctacgtatgtctctctcatttcctttggtatgttctctgggttaaatgtccccagctrtctgatctgttccctgcgggccttggccattcctgtcctggcctttactggcagtctctattctaaaatgtgggcatcccacatgaggtccagcttctcc

SEQ ID NO: 303185 - DNA, 201 bp, Homo sapiens
aatgttacgtgggttgtaaatgtaattgttaatattatttaaaaatttttgaaaagtgatttttagtggtggccttatcatatctacatattattactccmccattttgggatgtttaggtcgaatcctggttttttcttcttttgctgttgtaagtcatgtatattggcaattagcctaggagagattcctagaaatgag

SEQ ID NO: 303186 - DNA, 201 bp, Homo sapiens
aagtctctcaaattatgagctttattttaaatcctccaatctgttcggtgactatctataaataatttttgatggaacttgctgtcatttttcctgattgrcacattttgaccatgaccatctggaagtttttgctagctctgttttctgcaaggaatctatgttttattagtctcctgaagttggcttccttgtcatgtt

SEQ ID NO: 303187 - DNA, 201 bp, Homo sapiens
catggtttcttggatagtattacatagggtgaagctaattttatttcagtaaaaaatatgcaggtcaatttaaataaaaaaatagataatagtataaatgkcttgtggctacagtaaaaatgatgatggtacttgaatgtccaaattaatttaagtgatatatgtgttcatagataccatttcattttaacgtggttctgc

SEQ ID NO: 303188 - DNA, 201 bp, Homo sapiens
ctgatatttcgttgaaagtcattgtcttactcatccttgtataagataagtcacacaatgagtggtatcagggttgcagggtttccccctgtgaggacacratgggatgaaccgtgtgtgggatggtctgttaaagaaaaacaagaagccatgtgttggaaacaacctaagtattgagcggtggaggattgctgaaattgt

SEQ ID NO: 303189 - DNA, 201 bp, Homo sapiens
agggtttttctgtgtggctcaggctggacttgaattcctgagcccaagtcatccttccgcttcagccaattgagtagctgggattacaggtgcactgtccstcccagcaagttgggtctttaaataaagagtggggtttggtgagcagggtgggtgcactgttctaggaggtgggcaggacagaggtcagtggtggtccct

SEQ ID NO: 303190 - DNA, 201 bp, Homo sapiens
ggggtttcaccatgttgtccaggatggtctcgatctcttgacctcatgatctacctgcctcagcctcccaaagtgctgggattacaggtgtgagctaccaygcctggccattttttttttttttttttttttgagacagagtctcactctgtcacccaggctggagtgcagtggcatgatcttggctcactgcaacctccg

SEQ ID NO: 303191 - DNA, 201 bp, Homo sapiens
gaatacagagtagagaagggtcaccttgtcatgttggtattggaagatactgcccagatgaggagcttcgcctgcaacagttagggaggtgttttgcgaayatttgaattaaatacatggtaaagatgttagtttgtaatatgtttttagtatatttttctccatctattagatttaaaaaacagattagaaattaaatgt

SEQ ID NO: 303192 - DNA, 201 bp, Homo sapiens
ggtcacagcccatgtggcaagaccccccatgatgccttgcacaaggtcagcctcctgggcccagagcaggtgagggaagggcagtggatatgtcgggaggrtggagtgggcaggtggtgaataactggcactcgggttatcttttcttgaggttaggattgctctccagttttataggtgaggaagctgagctcaagtggt

SEQ ID NO: 303193 - DNA, 201 bp, Homo sapiens
tgactttggacatgttccttaactttctttatcttggtcttctcatctctgtaaaattgggatcataatggcaccaacttatagttttttttttttttttwtttcttttgagtcaggatctcaccctgttgcccagactggagtgcagtggtgtgatcttggctcagcccttgggctcaaacgatccccccacctcagcct

SEQ ID NO: 303194 - DNA, 201 bp, Homo sapiens
aaagcaaggcagatacaaagatcatcctgttggcagatacagacagggagggacagagaggttaattaagcaagctacctgcccgcagttacatggccagmagcagtggcactgaacgacttccttcaggcggtctgagtccaggtctcagctcttagccatcactccatggttctgtgctgagacaagggatgtagaaag

SEQ ID NO: 303195 - DNA, 201 bp, Homo sapiens
aaaaaaaaaaaaaaaaaaagaaaacaggaagtagggaggggcaaggaggcatctggtgcagtgatctgactagtttcagttctttgttactccctgaaggycctttcctgagaaaggaactcagataaaacaaatacaagtttcaggctttaatagcagaagggtaaatttctatgtttattcaaaaacaacttgtctatg

SEQ ID NO: 303196 - DNA, 201 bp, Homo sapiens
tgaacattagagcatgcagtttgctgagatgtcttgtacttagaaaatccaatttataaaaaacctcaaatagaacagtaaatttagggaattttttttttctgatgataaaattagataactctgttgcatggattctgtaaaacacagctccctcctgttacgccatgaattgggttcaatttacaacacccctttagg

SEQ ID NO: 303197 - DNA, 201 bp, Homo sapiens
tcaaccaatttgtggagagtccattttgcaaagccttagcacagtgccaagcacaagctacacacccgggatgctgctgaatgcagatgagagcatgccarctctgctgaagttgggggctgggggcagtggatggctgtgagtggtgtgaagccccgggccacagtgaagaccctggaatggctgagagactgggattcc

SEQ ID NO: 303198 - DNA, 201 bp, Homo sapiens
tttcaccattacaagtggtgcaaggaccaatatcttcatgaatacagcattttctgtaaagcagaaattctttcttcaggattaatttccagatatctttytggtattagacacataccacttgcctaataacgttccaaaaggaattcattgtttacattgctattagaacatatgagattgcctgtttcattatgtccg

SEQ ID NO: 303199 - DNA, 201 bp, Homo sapiens
cattttgaaaacgaggcagtgtcagctcccacagaaggtctaattttaaacatgcaaataattttcagttccacttttccttcttcctgttagagggaagytgtcccctgttgccatttctgaaacttgggcggacaatgtcgttattgtgttacaaacgatttgcgtctccagggcaggagttgggtgatatttttctgg

SEQ ID NO: 303200 - DNA, 201 bp, Homo sapiens
atgtttgttcacagagccattcaaagtgcagtggatacattataaattgtacaattatttgtaattaaaaaaagaacaacagcaaaaaacccaaagtgcartggatgcaaagaccaatggattttcatgtaacagaatatgaaaagttcaccgacacagtttcacattccacgatgcagagaagtttttaataactgccat

SEQ ID NO: 303201 - DNA, 201 bp, Homo sapiens
tacgtagtgtgacctctagtcagcaaatggccacttggctgtattttaaatttaggtacactttgctgcttggggtccatcttgaggggattgcctttttyaggttcatgtttgttcacagagccattcaaagtgcagtggatacattataaattgtacaattatttgtaattaaaaaaagaacaacagcaaaaaacccaa

SEQ ID NO: 303202 - DNA, 201 bp, Homo sapiens
cttttccattaaagtgtggatggtgtactgtaaacaaagactagctctcttgagctgccacgtttctataacttatagaaacagaagctgttttttttttctaaagatccaaactcatgttgccacacaaacaacaaaataaaccagtgtgttccaaaaacaagcatttgctctacccacacgcacagttggaaagatgca

SEQ ID NO: 303203 - DNA, 201 bp, Homo sapiens
caatggcgtgatctcagctcactgcaacctctgcctcccgggttcaagcaattctcctgcctcagcctcccgagtagctagaacacaggtgcccgccaccacatccggctaattttttgtatttttagtagaggtggggtttcatcatgttggccaggctggtctggaactcctgacctcaggtgatccacctgccttggc

SEQ ID NO: 303204 - DNA, 201 bp, Homo sapiens
caaaaataaacataaaaataaacactttatgtacacaatctcacatcactttcacagtcttggaaggcagatatttctgttatcctcattttacagctgaygcctatctaaggcttgtataaaagtcagtcactgtccaggctcacacagccaatgctggagggctgtgtggcacccagagagcacagttgctgcttggaa

SEQ ID NO: 303205 - DNA, 201 bp, Homo sapiens
ttaaatttaggtctgtcttgttctgcagtccatataccatataactttgccaaatacaacactatggtgtgtgtgtgtgtgtgtgtgtgtgtgtgtgtgtgtatgcacatgtgtggcctttattgaacactgtggtgtgtgtgtatgcacgtgtgtggcctttattgacttattgaattgatcctgaatcttccctactcc

SEQ ID NO: 303206 - DNA, 201 bp, Homo sapiens
tccgtgagtccacgtgtgcccttgtctctgcttgctgtgcctttctctttcctccacgttgctaaattccgtccatttttcaaggctcagttcagatcatycttctttgctttatcattttacatactgtgtatggtttggcctcttggtctgctgctctctgtgtctgttgtatggagcgcttttctatctggtattacg

SEQ ID NO: 303207 - DNA, 201 bp, Homo sapiens
ccatgtccctacaaaggacctgaactcatccttttatggctgcatagtattccatggtgaatgtgtgccacatttttcttagtccagtctatcattgatgkgcatttcggttggttccaagtctttgctattgtgaatagtgctgcaataaacatacatgtgcatgtgtctttatagcagcatgatttataatcctttggg

SEQ ID NO: 303208 - DNA, 201 bp, Homo sapiens
cctggccagcatggcgaaacaccatctctactagaaatacaaaatttagccgggcatggtggtgtgtgcctgtaatcccagctactaggggagctgaggcwggaggatcgcttgaacctgggaggtggaggttgcagtgagccgagattgtgccactgcactgcagcctgggcaacagagcgagactctgtctcaaaaata

SEQ ID NO: 303209 - DNA, 201 bp, Homo sapiens
gtcagtactagacttagcattgttatgttattttgtccagaggagggtgaggtagtacaatcagagacggggaaactgaggtggtgctgcttctggctcakcctgacacttgcagttctaaggttattatttcatctcttaagttgggcaagtttgtgtgtatgcttttgagatgacaataatatttataaaacataattc

SEQ ID NO: 303210 - DNA, 201 bp, Homo sapiens
ttggcagaaggaggaaaggcacagatcaagaggaggcctttcagctgggcgcggtgggtcacctgaggtcaggagttcgagaccagcctggccagcatggsgaaacaccatctctactagaaatacaaaatttagccgggcatggtggtgtgtgcctgtaatcccagctactaggggagctgaggcaggaggatcgcttga

SEQ ID NO: 303211 - DNA, 201 bp, Homo sapiens
agctgctcaggaggctgaggcgggagaattgtttgaacctggcaggtggaggtgcagtgagcagagatcatgccactgcactctggcctgggcaacagagygagactctgtctccaaaaaaaaaaaaaaaaaaaaaaaaaaaaaaaaatcttcagtgcagggcctgtctgctctccagggaaggctgcagtattgtcaggt

SEQ ID NO: 303212 - DNA, 201 bp, Homo sapiens
attggaagccatgaggagttgactcaagactcaagacttcaggtcaatatctcgggcctgaagccaggggttcaatacaacatcaacccgtatcttctacmatcaaataagacaaagggagaccccttgggcacagaaggtggcttgggtgagttacaaagggtaccttccgtctcccttactggttcttactttcagtaa

SEQ ID NO: 303213 - DNA, 201 bp, Homo sapiens
ttaatagagatggggtttcaccgtgttagccaggatggtcttgatctcctgaccttgtcatccgcatgcctcggcctcccaaagtgctgggattacaggcrtgagccaccgcgcccggcccggaatacccttaaaatatagccagaaagggctgaggatgggtaagaacccaggatatagagtcttcccataaaagggagg

SEQ ID NO: 303214 - DNA, 201 bp, Homo sapiens
aaagtccactggctttcgtctctctctgccgtgacacatatcggaatctactgtatatatatatatatatatatatatatatatatatatatatatatatrcactaagctctcaaaaacagtcattcctatgaattgaggtgtacaaagtttgaatttgtatcaaagatgtaattattatttttaaaaccttttcactata

SEQ ID NO: 303215 - DNA, 201 bp, Homo sapiens
actcctctgctcacctctaaccaaagagccacctaattgttctgcatggtgaccattgcctgttagattcttggtgaatagattcctagcctcatcttttkttatttttatttttttaataaatggtagaatgaggatgcaggaaacttggaaaagcagagtcaaagttcaactagcacaggagcagaaggtaaattctgt

SEQ ID NO: 303216 - DNA, 201 bp, Homo sapiens
cacatcagtaagatggggaatgacaacccttatgggactgcagtgaggcttagccaagttggtgctgtggaaggccctactggattccaaagcatgatacrgatgatgaatactttatgtggctgaggtgcttccagcaggcacgtgggaagcatccatgtaagattggggtcatgcaaaatggggtgggatcacatcgcg

SEQ ID NO: 303217 - DNA, 201 bp, Homo sapiens
ttggggtcatgcaaaatggggtgggatcacatcgcgggatgaagcacttggatgcaaaggcctgtgtggtccagcctgagtctggctcaacacacagggtyggatcctggctgcgctccttactgctgtatgtacagatttggctcagagggaatgcaggattggcaacatgcatctagtctttcttgtggtctcctggtg

SEQ ID NO: 303218 - DNA, 201 bp, Homo sapiens
tgtgatggtaggtggtacccacaatgatggcccttcaggggatttgaagattgtgaaggaggaccaagaggagctgtttggaccacctgtgatccaaggcrggaactaggaagacacctaccggaagtctttgtggatcttttgggattggattggattagcagatacagagcgtttgacctatagtaaccagctgactgt

SEQ ID NO: 303219 - DNA, 201 bp, Homo sapiens
gtgctctgtgcacctgggatagagcaggagcaagacacatcattcctgccctcacagggttatggtctcctaggtgacaaggtagtgcacacttccatagstcttactctgggacaagtactgtgccaaatgcttcctcccagccgcctgatgaggtagctactgttagttatcaagtctgatttacaggtgaggcaaaga

SEQ ID NO: 303220 - DNA, 201 bp, Homo sapiens
tcctggccagaccacggtgttcccgacaccactgacctgctcatcaacttccggtacctcgttcgtgactacatgaagcagagtcctcccgaatcgccgaytctggtgcattgcaggtacgcagatggcacgtcacgtgtgacagatttcaaatgtcattatatatttatgagcactttacaaaagcaaagcctaagaggg

SEQ ID NO: 303221 - DNA, 201 bp, Homo sapiens
agctgtttggaccacctgtgatccaaggcgggaactaggaagacacctaccggaagtctttgtggatcttttgggattggattggattagcagatacagarcgtttgacctatagtaaccagctgactgttcagcaaacgcttcacttcctaaaaggcttcttctttccaaggcaaactggggcatgtgaggaacaggaac

SEQ ID NO: 303222 - DNA, 201 bp, Homo sapiens
ttaaaggatacctctattccccaggtcctttattgattcatcttatttttatttgtataataaatcattagaatagtgcctggtgctctattgcactcacktgcatatactgtataaagctttgtacatattacttgtttagtcctcacagcagccctaggaggtaggtactattattttgctcattttgcaggcaagaaa

SEQ ID NO: 303223 - DNA, 201 bp, Homo sapiens
ggtcatcccatttccatctgaaaggcccccttgttcatgaagcctctcatggtccttccccctaccccagccaggtatactttctctcctcttggaattaycctataggaagaacatggtggcttgacctgggttccagtctcacccatctgtttacctggggagtgatcttgagtgggtcaatttatgttctcagtgcct

SEQ ID NO: 303224 - DNA, 201 bp, Homo sapiens
ttttgcacattcattgttgtattagagtttgtttttttgtcttaccttgttttaataaattataatcttatgggagatgacactgtcttttctttgtttcrtatataaaaagtgttttgctgatatacgtagaatcaagttggtctggagttactctggataagggatgaaatcagggagctcttgtgttcaaaggggcct

SEQ ID NO: 303225 - DNA, 201 bp, Homo sapiens
tttctcctcattttttagcttccatttttacttcctttagtattgagaaagtaccaggctcacttcaaagagttgacttcaaagctcccaccagctcagamatacttgccactgaagcctgtaggaattggcatcaatggaagaccctgtggcggttgcatttaagattttttttgggacttctatttttataattctttt

SEQ ID NO: 303226 - DNA, 201 bp, Homo sapiens
attttttagcttccatttttacttcctttagtattgagaaagtaccaggctcacttcaaagagttgacttcaaagctcccaccagctcagacatacttgcsactgaagcctgtaggaattggcatcaatggaagaccctgtggcggttgcatttaagattttttttgggacttctatttttataattcttttaaatggtaa

SEQ ID NO: 303227 - DNA, 201 bp, Homo sapiens
aaaccccgtctctactaaaatacaaaagaattagctgggtgtagtggtgcatgcctataatcccagctactcaggagacagaggcaggagaatcgcttgamtccgggaggaggaggttgcagtgagccgagattgtgctatagcactccattctgggcgacaagagcgaaactctgtctcaaaacaaaacaaaacaaaact

SEQ ID NO: 303228 - DNA, 201 bp, Homo sapiens
gaagcctgtaggaattggcatcaatggaagaccctgtggcggttgcatttaagattttttttgggacttctatttttataattcttttaaatggtaaaggrggagggttacaaaatatctgcgcctttaagatatcaaacataagccagtgaagttccaaaaaaaaaaaaaaagatgtcttagagaaatgaaaaggatttt

SEQ ID NO: 303229 - DNA, 201 bp, Homo sapiens
gaacaactcttttttctttttctttttctttttttgtttttgagatggagtttcgctcttgttgtacaggctggagtgcaatggcgccatctcagctcacygcaacctccacctccccagttcaagtgattctcctgcctcagcctcccgagtagctgggattacaggcacgggccactatgcccggctaattttgtattt

SEQ ID NO: 303230 - DNA, 201 bp, Homo sapiens
ttcaatacaacatcaacccgtatcttctaccatcaaataagacaaagggagaccccttgggcacagaaggtggcttgggtgagttacaaagggtaccttcygtctcccttactggttcttactttcagtaactaaatgttctaaaaaataaattgctcttccatgtgtatggagatttagaatttataaagggcttttcct

SEQ ID NO: 303231 - DNA, 201 bp, Homo sapiens
aagttattctggtttgcagactgggagacaggtttaatgacacagtcatgtcagagagaggggaagaggagaatacgtagggggtctgttttgatgtgtawgtacatgtaggattttcatgtagaggagttggggaaaattttagaagttttaggtgtaaatgcagctggtaagatccttatgacttagtttctttttttt

SEQ ID NO: 303232 - DNA, 201 bp, Homo sapiens
atgtaaatgatgagttaatgggtgcagcacaccaacatggcacatgtatacatatgtaacaaacctgcacgttgtgcacatgtaccctagaacttaaagtrtaataaaaacatatatatatatataaaagaaatgggacagattccttgaaacacacatgaaatgagttacgcttttgagattctccttgaagaagcttct

SEQ ID NO: 303233 - DNA, 201 bp, Homo sapiens
gagttactgagtatcaagtggtggggctggaacccggagtctaactctagaccactgtggtgcagtgatgttcataacagctatccacagtcaccgagctrggaatttattggttctgcattacttaataaaacaaaaagacgcatgactgacctgatttagaactctttgcatgagagacatgtgctgtgaagaatcatc

SEQ ID NO: 303234 - DNA, 201 bp, Homo sapiens
gaggattgcttggcccaacagttgcagactagcaccagcctgggagaccctgtctcaaaaaaaaatttttttttatagaaacagtttaaattattaaattrtttctaggcctacaggagaaacttctgggaaatcctagagagtaatgttcattattgttgttttaaaattttgaaataattgttttttggaaaggttgaa

SEQ ID NO: 303235 - DNA, 201 bp, Homo sapiens
ttctaggtcacacagctaatggatggagcaggtctttaatcccagatctgggttccaagaccagtccttttctctttacgctgctctgtccctgctatctktatgtcagaaaaccactgagcttccttctagatgtcagggtttggcaaaaaagttatcatgtgcttctgcgtcatgcagcgttttctgagaatggggaga

SEQ ID NO: 303236 - DNA, 201 bp, Homo sapiens
aggaaatgcatactttgatagaaaatggacaaaaaagttgtattggtagaattaaatgaactaatgcatgtcaagcactgagcactttgactcaatagtamtaataataataataacacaatgtatcattatgatagtgttatatctctttagcaatcttgatagttgacttgtataattcacagtacagaagcttattct

SEQ ID NO: 303237 - DNA, 201 bp, Homo sapiens
aatagaggcagtgccatgaagcagcattggtatctgttgatgggtgtgtgcattggcataactctctgctgtttatatcacaggcctaaacattaggcatrtgctggcttgaagtctgagactatcctaaggaaataatctgaaatgcaaccaaaggcttattcagaaagacgagtctcagcattatttataatagaggaa

SEQ ID NO: 303238 - DNA, 201 bp, Homo sapiens
ccaggctggtctcgaactcctgacctcaggtgatccacccgtctcagcctcccaaagtgctgggattgcgggctgggattgcgggcatgagccaccatgcycaacaacagatttattataagcaaaagctctttggggtcctcaataattttaagagcataaaggagaccaaaaagtttaagatgtgctggtcaagacaga

SEQ ID NO: 303239 - DNA, 201 bp, Homo sapiens
tgttggccaggctggtgtcgaactcctgacctcaagtgatctgatctgcctgcctcagcctcccaaagtgctgggattacaggcatgagccagtgtgcctrgcttcctgcagtttttttattgattggatgaatgtttgtatatcccatgagccagatgaggcacactgtccatgcacatagcaagatggtaacacttaca

SEQ ID NO: 303240 - DNA, 201 bp, Homo sapiens
ggggtctcctagattctttcaaggtatttctgggtattgttttcataatactactaacatgttatttggcttctttactctcattgtatcatgagtgtacrgtggagtcttgcagattctatatgatttgggatgacactgtcactcttacagctaatggaatgtatgctttcatattgtttaaaaaactttatctttttt

SEQ ID NO: 303241 - DNA, 201 bp, Homo sapiens
gtgtgatcttggttcactgcaaactctgcctcctgggttcaagtgattctcctgcctcagcttcccgagtagctgggatcacaggtggctgccaccatgcscaattaatttttgtatttttggtagagacggggtttcaccatgttggccaggctggtgtcgaactcctgacctcaagtgatctgatctgcctgcctcagc

SEQ ID NO: 303242 - DNA, 201 bp, Homo sapiens
gctgaagggctagaggaggacagggtgtttctggagcccagtgagagctggggcagtggtggacacagctgtgtcaggacaggaggcccagagcaggaggygatggaggaaggcactgactcctttctcctgtggcccttcaggggcctgcccattggctcatagtggaacccggtcacagcccatgtggcaagacccccc

SEQ ID NO: 303243 - DNA, 201 bp, Homo sapiens
tgaagggactaattctaggtcacacagctaatggatggagcaggtctttaatcccagatctgggttccaagaccagtccttttctctttacgctgctctgyccctgctatctttatgtcagaaaaccactgagcttccttctagatgtcagggtttggcaaaaaagttatcatgtgcttctgcgtcatgcagcgttttctg

SEQ ID NO: 303244 - DNA, 201 bp, Homo sapiens
aaacctggagagctttgtcacttgctgaaatccaagctgccctgtgaatttatccccaaacactgctccttttgagaaacttgtacaagctgccttaattyagtcaattcaaatgggttgatgggggctgttcccaaggcccaggacaggcaggggtttgtgacctgcagccctggaactgcctttgggtttcatggtctc

SEQ ID NO: 303245 - DNA, 201 bp, Homo sapiens
ttgaggttaggattgctctccagttttataggtgaggaagctgagctcaagtggttttcctgtggcccacctgggtgtcatagcagagtgagccctggaayccaggcctgcctcgtcctgacttctgtgatctcgggcgatcacatagatcgcagtgttcgctcttgcatcatgtgtgtttgacaacttttctgggtgccc

SEQ ID NO: 303246 - DNA, 201 bp, Homo sapiens
gtgtggacagatgatgctggtcagcaggcaggaaaacgatctgccaggcgctgggggtggggcagaggattgttcttcctgaccttggtatgaaaaccgtrtggagttcttagtgaggaaaatcactcttagcccaaattcctgcgaaggccgatgggattgtttttaagatttgttggattgctggatttgttgaaggga

SEQ ID NO: 303247 - DNA, 201 bp, Homo sapiens
tataagaaggaggaagggcagaaggttgtgccccacccttaaaggacacttcctagaagtcacccagtacctctgctcatgcttcgttgagcaaaacttaktcacattgcaacatctagctccatgggagctgggaaatgtggtctttgtttccaacaggtatgcacacacagggctaaaaatctgggtgggtatgatgaa

SEQ ID NO: 303248 - DNA, 201 bp, Homo sapiens
gggttaaacagcccatgagtgatgcagtgaccagagctttctctgtgcccactgaggcatgtgagtaatgcagacacacgcctgtcttctcactgcagccyatgctgtgtactcagacagagaaggagggtgaggtatttgcctgatggttgacaaactttctggaaagggccagattgccaatattttaagctttgcagg

SEQ ID NO: 303249 - DNA, 201 bp, Homo sapiens
agggtgaggtatttgcctgatggttgacaaactttctggaaagggccagattgccaatattttaagctttgcaggtggtatagagtctgttgcaagcattygactctgccattgtagtgtgcaagcagtcacagaagatacagaaggaatgagtgggaccattcccactagatgttatttaccatggcaggtggatttggt

SEQ ID NO: 303250 - DNA, 201 bp, Homo sapiens
aaatacatggtaaagatgttagtttgtaatatgtttttagtatatttttctccatctattagatttaaaaaacagattagaaattaaatgttaaaaatatrtttgaaataaacttgaagtattaaaagaagcctaaattaaacttcttttgagacttaatctgtataattattttcttgatgtgtttttgggaagttttcc

SEQ ID NO: 303251 - DNA, 201 bp, Homo sapiens
ggaattggatcaccctggaacctagctggggctaggatggttgttgcatgtgattttcagcaggactctaagggatctccaaagctggttggctggctagygaggttgggcgagggaataactcatttgcttaacttttcatatgtaacaactgggttttgggtttcacaagagacaaggtaggcaggcaggctcaggtgg

SEQ ID NO: 303252 - DNA, 201 bp, Homo sapiens
tgagcctcccgagtagctgggactacagctgtgtaccactatgtctggctaattttttgtatttttagtagagatggggttttgccatgttgcccatgctrgtcttgaactcccggcctcaagagatcctcttgtctccaaatcgcttcgcagaagtgctgggattacaggtatgagccaccatgcccagccaagttagtt

SEQ ID NO: 303253 - DNA, 201 bp, Homo sapiens
cagagtcattggaagggccgctgtattagtttgccagggctgctgtaataagatcaaggtcttgggggttaggacttcaacatatgaatttgggggtggcrgagcacaagtcagctcataacagctggggaggaggctttaggcctggccctgagaaattactcccagactaaggctgcagaactgaccccctagagagtc

SEQ ID NO: 303254 - DNA, 201 bp, Homo sapiens
gagggtgggctccttaccctcttgttgaatcaggagaataggctgtaatagaaataaaagcgtttttaaaatgaatgctgataggctgggtgcagtggctyacagctgtaatcccagcactttggaaggccatggtgggcagaccacctgaggtcaggagtttgagaccagcctggccaacatggcgaaacccatctctac

SEQ ID NO: 303255 - DNA, 201 bp, Homo sapiens
gaggaggctttaggcctggccctgagaaattactcccagactaaggctgcagaactgaccccctagagagtcaccaccttggtcatagacagcaagcagaragggaggaatcaggaagtccctgctgtagttgctggatccagcggtgaatgttctgagctgtgatcctgggatcaggaagctgcagccactgccacagtg

SEQ ID NO: 303256 - DNA, 201 bp, Homo sapiens
tttcctgaaagcacacaaagcaaagcacggctctgcagtgtgacccaccgtgtgctgtgtggacagatgatgctggtcagcaggcaggaaaacgatctgcyaggcgctgggggtggggcagaggattgttcttcctgaccttggtatgaaaaccgtgtggagttcttagtgaggaaaatcactcttagcccaaattcctgc

SEQ ID NO: 303257 - DNA, 201 bp, Homo sapiens
ccacctcggcctctgaaagtgctgggattataggcatgagccaccatgccctgcctcaagcatctattttgtgcaagagcttgcagaagttctttcctgcyacagccgtggttggccacattgctcccccatgaatatgtggaaactgacacttcaggagaattggtggctcacccatggcattcagctagtgggttatgg

SEQ ID NO: 303258 - DNA, 201 bp, Homo sapiens
tgtcatttttcctgattggcacattttgaccatgaccatctggaagtttttgctagctctgttttctgcaaggaatctatgttttattagtctcctgaagytggcttccttgtcatgttctactcttctaccaataaatacggatttcttgattaaaaaaacgtcaaataggttatcaagatccaggggagagaagaactt

SEQ ID NO: 303259 - DNA, 201 bp, Homo sapiens
gggggttgcagtgagccgacatcgcgccactgcactccagcctgggccacagagcaagatttcatctcaaaaaaaaaaaaaaaaaaaaaaagaaaaagaawaaaagaaatgcaggtaggtgcttctagctactgctgtgggatagcaaggtagttaccaaactgataagggtagcatcttacttactgctgaaaaattcag

SEQ ID NO: 303260 - DNA, 201 bp, Homo sapiens
taaaaataaaaaactggagagaaaagagccaaagaaatgggagtcacgggcaccctgacaaaactcctggagctcctcagagcactattttaggggggaamacctgccataaaggtttgctctgttacattgtgaaagagagggaaaggagagcacagagagatgacagaagagaagagaatgagagaaaagagcatagaa

SEQ ID NO: 303261 - DNA, 201 bp, Homo sapiens
gatttagaatttataaagggcttttcctccacattttagtttgatcccccacctgcatgaggaaggaaggaaacgtgttctgattttacaggggaacacaytggggctgagaacagcaataggaattgaaactttttagagtctggcacccaggaaagttagaggcccctttagctttctatctaacagctgtgtcaaccc

SEQ ID NO: 303262 - DNA, 201 bp, Homo sapiens
acagagcaagattctgtctcaaaaaaaaaaaaaaaaaaaaaaaaaaaaaaaaagcaagctcatacctccagcctgggttttgagagcctgtctgaaaaaaacaaaacaaaaccctcaagtaaacaacctaatgtagcacgttaaggaactagaaaaataagaacaaactaatcttcaaattagtaaaaggaacaaaataat

SEQ ID NO: 303263 - DNA, 201 bp, Homo sapiens; identical to SEQ ID NO: 63179

SEQ ID NO: 303264 - DNA, 201 bp, Homo sapiens
gttcagagatctctaggggtctcctagattctttcaaggtatttctgggtattgttttcataatactactaacatgttatttggcttctttactctcattktatcatgagtgtacagtggagtcttgcagattctatatgatttgggatgacactgtcactcttacagctaatggaatgtatgctttcatattgtttaaaa

SEQ ID NO: 303265 - DNA, 201 bp, Homo sapiens
agtaggggcgacagggcccctggagcataggactgagaagagcattgagagggagaggatttccaggtctggtggtgggtgagctagcatgctgctgccarttttgcagcaaggacctggggatggaccttctctggccagctacagggtatagagctggtgggaaatgcaggagcctgtgctagcagttgaccattaaca

SEQ ID NO: 303266 - DNA, 201 bp, Homo sapiens
ccttccttaaggacctgaaggtctcttctcctaagggctaggttggttcagaaagtgagaagggctggaccttttgtggggagaggatacagcagggtccraacagctgggctgacaccgggcagcagcccagcagcagtcggagctgcagggtcagctcaccatgggctgaacttgggcattgcctgtttaggcagagtc

SEQ ID NO: 303267 - DNA, 201 bp, Homo sapiens
tgaaggtctcttctcctaagggctaggttggttcagaaagtgagaagggctggaccttttgtggggagaggatacagcagggtccgaacagctgggctgayaccgggcagcagcccagcagcagtcggagctgcagggtcagctcaccatgggctgaacttgggcattgcctgtttaggcagagtctgcccgagcctttcc

SEQ ID NO: 303268 - DNA, 201 bp, Homo sapiens
tgcaggccaagtcaagtgaccaaagctaaaggggaaggaagggctggctggacttagcagtgaccacagacagagttgaagccttcacggttggcgttggycttgttcactgctgtgtgccaagctgctgacagcatctggctatcgcaggttcgtaataagtgtttgctgagtgaatgaaagaatattggtgttggggat

SEQ ID NO: 303269 - DNA, 201 bp, Homo sapiens
tatcccacagggcttgtgtggctggcttcaccaacattaccttccaccctcaaaacaaggggctcattgatggggctgagagctatgtgtccttcagtcgytactcagatgctgtttccttgccccaggatccaggtagggagaagacaacagtcctggcactggttcagtggcattttgctccacgtgtccatagaaggc

SEQ ID NO: 303270 - DNA, 201 bp, Homo sapiens
tactgaaacagattgtagaactttgtaaactggctgcctttctactcctctgctcacctctaaccaaagagccacctaattgttctgcatggtgaccattrcctgttagattcttggtgaatagattcctagcctcatcttttgttatttttatttttttaataaatggtagaatgaggatgcaggaaacttggaaaagca

SEQ ID NO: 303271 - DNA, 201 bp, Homo sapiens
tcttattgggaagcctttaggctgagactcaggtcagtactagacttagcattgttatgttattttgtccagaggagggtgaggtagtacaatcagagacrgggaaactgaggtggtgctgcttctggctcagcctgacacttgcagttctaaggttattatttcatctcttaagttgggcaagtttgtgtgtatgctttt

SEQ ID NO: 303272 - DNA, 201 bp, Homo sapiens
gacgggaaaactcggctttgtactaggtctgtctgtctcagtaagggaaaaggccagagtctgtgttcttaacccctctgtctcacaactatttatttcarttctataattctggaatgaaagtgagcagagggagacggggagtcacactctctgtgtccagacacatgggctgagtgaattccacagctaagtatgact

SEQ ID NO: 303273 - DNA, 201 bp, Homo sapiens
tttgtatcaggctatcgtcctgtaccgatttagaactctatgaatatgtgctgtgtttttgagtctagcagggaatgttctagatgcctgggtacattgcrtgctctggggtgagcttggtggttgttgtggaaagagtgaaattcaactcctgtgttggtcaaaagagagattttcttttttctgctataattatataaa

SEQ ID NO: 303274 - DNA, 201 bp, Homo sapiens
ttatcatagctacagaagggtggctgaccagcggagaaaaggaacacttaatatctatggtatagtttctgtactactgctggatttggttttacccaaamtgttactgagaagtgtttttgaggcatgttttcaacagaacatattgcaaagttgctttcctcaaaggggtgaatgttccttgaccaggatgagagcaga

SEQ ID NO: 303275 - DNA, 201 bp, Homo sapiens
agcaatttatcctcacccagacttgtacattttaaagactatcaattatcatagctacagaagggtggctgaccagcggagaaaaggaacacttaatatcyatggtatagtttctgtactactgctggatttggttttacccaaactgttactgagaagtgtttttgaggcatgttttcaacagaacatattgcaaagttg

SEQ ID NO: 303276 - DNA, 201 bp, Homo sapiens
actcataaaactggtattttccagtctttgtttctaagaaggtctgaccatctttaaaataagctaatgaaacaaactcatcaaacattaatgatgtgacrtatcataatgctgcttaaatgttaatacagcaatttatcctcacccagacttgtacattttaaagactatcaattatcatagctacagaagggtggctga

SEQ ID NO: 303277 - DNA, 201 bp, Homo sapiens
caggctggtcttgaactcctgacctcaagtgatccacccgccttggcctcctaaagtgttgggattacccacgtgagccactgcgcctggtcgtcttttarcccacatctgttggtggcttactgtgtgctatggtgagggatactatggtgagtaggggcgacagggcccctggagcataggactgagaagagcattgag

SEQ ID NO: 303278 - DNA, 201 bp, Homo sapiens
gggcaccttatataacatcaccatctctccagaagtggaccacgtctggggggaccccaactccactgcacagtacacacgtaagtctcttaggatgcccytctaaggaacagcctctctaactgtctcttggaggaggcactggttaaatgatggccagtgtgcttctgggatccaggttgactctgaaactgctgaagt

SEQ ID NO: 303279 - DNA, 201 bp, Homo sapiens
agaagtatatttttaatctagttgtttactttctttgcatagcccctgttccagtttctgacttccgagtgacagtggtcagcacgacggagatcggcttrgcatggagcagccatgatgcagaatcatttcagatgcatatcacacaggagggagctggcaattctcgggtagaaataaccaccaaccaaagtattatca

SEQ ID NO: 303280 - DNA, 201 bp, Homo sapiens; identical to SEQ ID NO: 63190

SEQ ID NO: 303281 - DNA, 201 bp, Homo sapiens
gagttcctcataagagtctttttgagaaaatagttccattgctaaaaatacccaatggaaacttctggcctgggatttccaagttcaccctcggctgtgcrtctcaaagtccacacagcctcaccaaaatagcccttctgggtacttttttctgtgtgttcttggaggaggccatcgtgcctccagctccctaaggcggaa

SEQ ID NO: 303282 - DNA, 201 bp, Homo sapiens
tgggtgcccttggtctccagcttccagtgggccagtctggcgagagaccctagctggagatgaggggaggtagccttggcctctctccttgcccttcctcrctgctgctaccccaggattcttgcccatcccttactggttttccttaaccccaccctcacccttgaaaacagactctttaaaactctcctcactcaccct

SEQ ID NO: 303283 - DNA, 201 bp, Homo sapiens
atgtttactgtctggcctattacagaagacgtttgctgacccctgatttagggcattcatgaggcttgatgagatgttgaaaatcagctgtctcctcccgycactctcttctgattgtgggtaggctctggtgcaccagctctccagtgatctcctatctgatgctcagagttctttttccattgcatggatgtcaaataa

SEQ ID NO: 303284 - DNA, 201 bp, Homo sapiens
gtgtagaccaaccagggtgaatgagtgtatgactggaaatgcaaagacgggcaggatcaagggacagtttagagcaggggtgtccaatcttttggtttccytgggccacactggaagaagaattgtcttgggccccacataaaatacaccaacactaacaatagctgatgagctaaaaaaaaaaaaatcacaaaaaatctc

SEQ ID NO: 303285 - DNA, 201 bp, Homo sapiens
aatgttttaagaaagtttatgaatttgtgttggtctgcattcaaagccatggtgggctgcatgcgggccatgggttggccaagcttggtttagaggcggaygcagtacgggagagttttcccttctcttctgatgtaactccatgtcttggtggcggtgttctagatgtaggcatctttaggcaggggagtgtgcgtggaa

SEQ ID NO: 303286 - DNA, 201 bp, Homo sapiens
atgggcatctcagatgctgtgagtctgagggcagatgcccatcagtccaggacagttcctggggacaaaagcctcttctcacctttagagaaattaagtcwtattggtagaaaatattttagagaggttctggtctaagcctctcattttgcagatgagaaaccacccaaggcccaagatggatggatttatcaaagccgg

SEQ ID NO: 303287 - DNA, 201 bp, Homo sapiens
gtagaaaatattttagagaggttctggtctaagcctctcattttgcagatgagaaaccacccaaggcccaagatggatggatttatcaaagccggttggtrctggaacttggatttaatttcaggtcttttattattactatggaacaaatcttaactttttcaagtgcataccatgtgcccggctatgtgctggatgtag

SEQ ID NO: 303288 - DNA, 201 bp, Homo sapiens
gctacttgggaggctgaggcaggagaatggcgtgaacccaggaggcggagcttgcagtgagctgagatcatgccactgcactccagcctgggcgacagagygagactccatctcaaaaaaaaaaccaaaaaaaacagtgcttgttgttcttttgttgttattgttaaaggatcattatctcattatcaacaacattggcag

SEQ ID NO: 303289 - DNA, 201 bp, Homo sapiens
cgcgctgtcatccccggactccgctccagcaccttctacaacatcacagtgtgtcctgtcctaggtgacatcgagggcacgccgggcttcctccaagtgcrcacccgtgagttcatgcctggctctcaccaccctttcctgctgtcctgctccgtgccaggcccagacacaggatgcatgatgtagtaatggtgactgttg

SEQ ID NO: 303290 - DNA, 201 bp, Homo sapiens
atcttgagtgggtcaatttatgttctcagtgccttacaaaatggggcagaggatacctaacccccaggagctggtgtggctggggtaccttacacagggcctgactgtagtagcttctctccaagcattggtgtcttacctcttctgtttctctaatggtgttttgcacattcattgttgtattagagtttgtttttttgt

SEQ ID NO: 303291 - DNA, 201 bp, Homo sapiens
catatacagaacattccatccaacagctgtagaatacacacttttcaactgcacctggaacattctccaggtagatcatatgttagaccacaaaacaagtsttaacagatttaagaagtgtgaaatcatatcaagtatcttttctgatgatggcatcaaactagaaataaataacaggaggaacttaagaaaattcacaga

SEQ ID NO: 303292 - DNA, 201 bp, Homo sapiens
cagagtggaccactgatgtcatagctgcaggtttggctgaattgggatggtgcagaaagccgtgttaaccatttctttttctctgaggcctggaggaggakccttgtgactggaaccacagttgggactggcagtggtttttcctgctggcaaggaaaaaaaaaaagagaaaagaaagagttcgacttatcagcacaaaga

SEQ ID NO: 303293 - DNA, 201 bp, Homo sapiens
cgttccgcaccttctaccatgtctccttttccagcctcattccctgagatgtagccggagttccagttcagccaacctgcccgttgttttctctcctggarctgggtgtttgagcctcctgcatggagtgttcttccttcccagctaaagtcctggtcatcccatttccatctgaaaggcccccttgttcatgaagcctct

SEQ ID NO: 303294 - DNA, 201 bp, Homo sapiens
ggggcccgctaccacgcccagctaatttttgtattttgagcatgttggccaggctggtcttgaactcctgaccttgtgatccccctgcctcggcctcccaragtgctgggattacaggtgtgagccactgtgcctggccttatttatttatttttgagacagggtctcactctatcacccaggctggagtgcagtggtgca

SEQ ID NO: 303295 - DNA, 201 bp, Homo sapiens
ggtactctccatgtggccagaaatggcagtttctgaggggctcatgttgtaggtgatgatacaaagaagagaaagagagggatcagtttttccaagtgtgsatttcatttcagtgtaaatattttgtgaggtggggcatccctgtctcctggagaaatatatttttaatctaattgtttactttctttgcatagcccctag

SEQ ID NO: 303296 - DNA, 201 bp, Homo sapiens; identical to SEQ ID NO: 63184

SEQ ID NO: 303297 - DNA, 201 bp, Homo sapiens
gcctccccacctcccacccaggtgaatcagagctggcgcaaagaacgcttcctggatgtgcccttatgcaaagaggactgtcagcgctggtgggaggattktcacacctcccacacgtgcaagagcaactggcacagaggatgggactggacctcaggtgagggtgattgagttggggttaggaaaaaggagattgaggta

SEQ ID NO: 303298 - DNA, 201 bp, Homo sapiens
gaggaagctaggggggcgttgcagcggaccccgtctgggagctccccgctgggcgtccggcccgcggaggcgcgagtttgctgactcggagggagccgctrgggcgggggcgagtgctaataatacccgttcgttccgcagccgcgctttacagtttacacagctgtcaccttcgtttctccttaattaataataaaaata

SEQ ID NO: 303299 - DNA, 201 bp, Homo sapiens
ggtctggaaatggatgccacttctgctgcttctggtctgtgtagccaccatgtgcagtgcccaggacaggactgatctcctcaatgtctgtatggatgccragcaccacaagacaaagccaggtcctgaggacaagctgcatgaccaagtacggctggagtgtgcctctgctaaggagggggcttgttctaacagggagga

SEQ ID NO: 303300 - DNA, 201 bp, Homo sapiens
tggtgctgctgcggagacagcgggactcccaggaggactggaccaccttcacgcacgaccgcagtgagccagggccagacctgggaggggtgggcagggcrgagcccctggcctaggggcacaggcccatgtgaccggtcctccatgccctagtccgccagctcattaagtcccagcgtgtccagaacaagctgggtgttg

SEQ ID NO: 303301 - DNA, 201 bp, Homo sapiens
ccgcgctctggctccaccagcatttctgcccccactgggcccagcagtcccctgccagctcctgagactcccacagctccagctgctgagaggtgagaccsccatcccatccactgaacaggagaccctttctcctctgagaactatttccctaccaaaggtggggaggccttctaagaccccaccagggacccccacccc

SEQ ID NO: 303302 - DNA, 201 bp, Homo sapiens; identical to SEQ ID NO: 63270

SEQ ID NO: 303303 - DNA, 201 bp, Homo sapiens
ctctggctccaccagcatttctgcccccactgggcccagcagtcccctgccagctcctgagactcccacagctccagctgctgagaggtgagacccccatsccatccactgaacaggagaccctttctcctctgagaactatttccctaccaaaggtggggaggccttctaagaccccaccagggacccccaccccacctc

SEQ ID NO: 303304 - DNA, 201 bp, Homo sapiens
tagagggtgagcgagagccggacccaccggatgaccgggatgcctcaggtacttcccagtgtgcaggtcccctccctgcccctgtcccttggctctacctkcctcttcccatccccccttctcaaccccacctctcctgtaaccccctttcccttggccatgatgccggggccctttaaccctctttccatggaagtcact

SEQ ID NO: 303305 - DNA, 201 bp, Homo sapiens
gggaggatgagaagcccccgctgcccccgcgctctggctccaccagcatttctgcccccactgggcccagcagtcccctgccagctcctgagactcccacrgctccagctgctgagaggtgagacccccatcccatccactgaacaggagaccctttctcctctgagaactatttccctaccaaaggtggggaggccttct

SEQ ID NO: 303306 - DNA, 201 bp, Homo sapiens
ccaggaggactggaccaccttcacgcacgaccgcagtgagccagggccagacctgggaggggtgggcagggcggagcccctggcctaggggcacaggcccrtgtgaccggtcctccatgccctagtccgccagctcattaagtcccagcgtgtccagaacaagctgggtgttgtgtttgagaaggagaaggaccggactca

SEQ ID NO: 303307 - DNA, 201 bp, Homo sapiens
cccaggaggactggaccaccttcacgcacgaccgcagtgagccagggccagacctgggaggggtgggcagggcggagcccctggcctaggggcacaggccyatgtgaccggtcctccatgccctagtccgccagctcattaagtcccagcgtgtccagaacaagctgggtgttgtgtttgagaaggagaaggaccggactc

SEQ ID NO: 303308 - DNA, 201 bp, Homo sapiens
agggtgctgcctactccaaggtcttgtcagcagcctccccacctggcctacaggtgaagctagatgtgaccctgggtgacctgaccaagattgggaagtcrcagaagttcacgctgagcgtggatgtggagggtgggcggctggtgctgctgcggagacagcgggactcccaggaggactggaccaccttcacgcacgacc

SEQ ID NO: 303309 - DNA, 201 bp, Homo sapiens
aaggtgtttgaccagcagagctcgcccatggtgacccgccttttgcagcagcaggtagattgtagggagacctctgggaggtgcgttcgtgttctggagcygggtgggaggctctgcttaggtgactcatgtacaagcctggttcttcctccccccagaacctgccacagacaggggagcaggaactagagagcctggtgc

SEQ ID NO: 303310 - DNA, 201 bp, Homo sapiens
tacaaggtcagcaactacagccgagggagcggccgctgcatccagatgtggtttgattcagcccagggcaaccccaacgaggaagtggcgaggttctatgmtgcagccatgcatgtgaatgctggtgagatgcttcatgggactgggggtctcctgctcagtctggccctgatgctgcaactctggctccttggctgagtt

SEQ ID NO: 303311 - DNA, 201 bp, Homo sapiens; identical to SEQ ID NO: 63261

SEQ ID NO: 303312 - DNA, 201 bp, Homo sapiens
gggaggctctgcttaggtgactcatgtacaagcctggttcttcctccccccagaacctgccacagacaggggagcaggaactagagagcctggtgctgaakctgtcagtgctaaaggacttcctgtcaggcatccagaagaaggtggcatgatctctgacccttgacccccgattcactggccactgtcattggcctagca

SEQ ID NO: 303313 - DNA, 201 bp, Homo sapiens
gggggcagcgcgtaggaggggcaggaggaagtggcggggctttgttcctcactgggcctccctgcttcccagctcaaaccaattctggctgatatcgagtmcctgcaggaccagcacctcctgctcacagtcaagtccatggatggctatgaatcctatggtgaggggtgaggggtgctgaggggaacaggaagccagaca

SEQ ID NO: 303314 - DNA, 201 bp, Homo sapiens
ggagtcactcatacaaggtcagcaactacagccgagggagcggccgctgcatccagatgtggtttgattcagcccagggcaaccccaacgaggaagtggckaggttctatgctgcagccatgcatgtgaatgctggtgagatgcttcatgggactgggggtctcctgctcagtctggccctgatgctgcaactctggctcc

SEQ ID NO: 303315 - DNA, 201 bp, Homo sapiens
aatttgctggtttgtcccatctgctcctcaggggagtgtgtggttgcactcaaatccatgatcggcagcacggcccaacagttcctgaccttcctatcccmccgtggcgaggagacaggcaatatcagaggctccatgaaggtgcgggtgcccacggagcgcctgggcacccgtgagcggctctacggtggggactccact

SEQ ID NO: 303316 - DNA, 201 bp, Homo sapiens
tggagcccgcctgcaagcgccacttcatccaggacacctgtctctatgagtgctcacccaacctggggccctggatccagcaggtagggtgtctccccccsacccaccccagcagactgccatccccctcagtcacttcaaggcgatggctgccagcatccctggctgagaggagccctgcctccccacctcccacccagg

SEQ ID NO: 303317 - DNA, 201 bp, Homo sapiens
gaggatgggaggcaagagggtgcagtcagccccctacttagggggaaaggaagctgagaggtggtgctcagttgggtgtctcccacccccaccccagaatmcaagaagagctttgagaatgatgcccagagcagtgacaacatcaacttcctcaaagtgcagtggtcttcacgccagctgcccacggtgaggctgtgggca

SEQ ID NO: 303318 - DNA, 201 bp, Homo sapiens; identical to SEQ ID NO: 63265

SEQ ID NO: 303319 - DNA, 201 bp, Homo sapiens
ttcctcaaagtgcagtggtcttcacgccagctgcccacggtgaggctgtgggcagggcccctgcttatgggtgagggcacagagaggggtacataagagtktattggagagcctgcctgggagggagtgtggggccagcagagagagagagagagagtgtgtgtgtgtgtgtgtgtgtgtgtgtgtgtatgggcatgggca

SEQ ID NO: 303320 - DNA, 201 bp, Homo sapiens
gctatgaatcctatggtgaggggtgaggggtgctgaggggaacaggaagccagacagggccctagattagcttggtaatttgctggtttgtcccatctgcycctcaggggagtgtgtggttgcactcaaatccatgatcggcagcacggcccaacagttcctgaccttcctatcccaccgtggcgaggagacaggcaatat

SEQ ID NO: 303321 - DNA, 201 bp, Homo sapiens
ccccaccccagaatacaagaagagctttgagaatgatgcccagagcagtgacaacatcaacttcctcaaagtgcagtggtcttcacgccagctgcccacgstgaggctgtgggcagggcccctgcttatgggtgagggcacagagaggggtacataagagtttattggagagcctgcctgggagggagtgtggggccagca

SEQ ID NO: 303322 - DNA, 201 bp, Homo sapiens
attcttatggtcagagcctcccggacagagtgatgggagatctggggtggtcaccatctggactctgccctaaccttgggaggtgggagccgagggtgggyatattccccctgagtccccattcctatcccctctccccaggttgcactgatgacatcgtcaccagcgaccattcccccgtgtttgggacatttgaggttg

SEQ ID NO: 303323 - DNA, 201 bp, Homo sapiens
  misc_feature (1)...(201): n = A,T,C or G
cccacctaccgctatgagcggggttcccgggacacatatgcctggcacaagcagaagccaactggggtgagccaagaaaacggcatgggccttgggggacngcaggcctgcgatgaatcaagaatttgggtcaagggtatgggcctctgcagcttccactccagcctccatggcccctctgaggcctttgggtgatcctgg

SEQ ID NO: 303324 - DNA, 201 bp, Homo sapiens
tcaattcgctctgataaccgagttattccgatctggcccctcagccccgcccccagcgaggtcccatcccggcggagactgcggaggcggcccaggaaggrggatggagaccgggaagagacggagcctgggatggggacagggaagggacgtggatagacagaggaaacagagaccgggagagaaaggggcagaaacagt

SEQ ID NO: 303325 - DNA, 201 bp, Homo sapiens
tgggagacacatgtatcagcccagcccttcccttccttttccccagagcatgcagcagaatgtgactgcaggtgtttctatggggggcactcagctccccstgacatgccctgtttccttaggctccgtgcctgcagggcgggcgggccagcgggctgggcgaggcaggcatgagtgcctggctgcgggccatcggcttgg

SEQ ID NO: 303326 - DNA, 201 bp, Homo sapiens
gcccctgcttatgggtgagggcacagagaggggtacataagagtttattggagagcctgcctgggagggagtgtggggccagcagagagagagagagagaktgtgtgtgtgtgtgtgtgtgtgtgtgtgtgtatgggcatgggcatgagtgaggataaaggcgtttgctttattttgggagtgtggaaccttgttgcagtt

SEQ ID NO: 303327 - DNA, 201 bp, Homo sapiens
agaaagtctaggaccaggggactttctgactcccgtctagttctccttccactgcttccactgccttagacctgggttcctggatcctggcttagtcgttytgcttccacacccaggttgaagccagagggagctcctgaaccagaaggggtggcggcccccccacccaagaacagcttcaataaccctgcctactacgtc

SEQ ID NO: 303328 - DNA, 201 bp, Homo sapiens
tcagctcactgcaacctctgcctcccaggttcaagcgattctcctgcctcagactcccaagtagctgggattacaggcgtgggccaccatgcccagctaattttttttttttttgtatttttaatggagatggggtttcaccatgttggttaggctggtcttgaactcttgacctcaagtgatccacccgccttggcctcc

SEQ ID NO: 303329 - DNA, 201 bp, Homo sapiens
ttcagctgttgtcagtcaccccggttttatccctaggcttgaataagacccacctgaatctctgagaaagattctgcagcggattgactgtgggtgcctcragaggctttccaaacctggcctctcattggaggcttcttgccctgtcttctggcacctctattctgacccatttagcttgggtttcacagctacagataa

SEQ ID NO: 303330 - DNA, 201 bp, Homo sapiens
gccttatgcctgtggccagccaggccacccttagctgtggctctgagtcaaagggagcagtcagcctttcctctcaattctgcctttaaaaatggaatgcraaattgtttctaagacagctccctccatgtaaacagacctagcttgagccttctatttggaggaggcacatggctcggcctgggatttcccagggtacct

SEQ ID NO: 303331 - DNA, 201 bp, Homo sapiens
cagtgggtatgcagtggagaaccagacagaccctctcctcatggacatgagccaactggcagggtatccctgtggacggggggcttcctggatgcctaccygcccctgagtggctgctgttcccccagaagcgggaggccttctgccagctgttgcagctcatgaagaacaagcactccaagcaggacgagcccgacatga

SEQ ID NO: 303332 - DNA, 201 bp, Homo sapiens
gtcagagcctcccggacagagtgatgggagatctggggtggtcaccatctggactctgccctaaccttgggaggtgggagccgagggtgggaatattcccyctgagtccccattcctatcccctctccccaggttgcactgatgacatcgtcaccagcgaccattcccccgtgtttgggacatttgaggttggagttacct

SEQ ID NO: 303333 - DNA, 201 bp, Homo sapiens
ccctgatttcctgtcccagggccctgtttctctgtcccattcctcctgtgatcctctcagtcctcctgtttgttctcctccctttctcctcagggctctcraagacttcagaccaggcctacattgagtttgagagcatcgaggccattgtgaagacagccagccgcaccaagttcttcatcgagttctactctacctgcc

SEQ ID NO: 303334 - DNA, 201 bp, Homo sapiens
ctcccacccttgctggcccacagacctcgcagggtgtgcctgtgcgccgcttccagaccctgggtgagctcatcggcctgtacgcccagcccaaccagggmcttgtgtgcgccctgcttcttcctgtagagggtgagcgagagccggacccaccggatgaccgggatgcctcaggtacttcccagtgtgcaggtcccctcc

SEQ ID NO: 303335 - DNA, 201 bp, Homo sapiens
tgtgtgtatttatttttttgtagcagtttctttgaaaaaaaaaggaaaataaaatatatctgtgtttttcctcccttttctcatttgattcagtgtggagktgaaaacatcagaagagctgagtctcttaatggaaatccattgttctctaaggtatctacagtgttacaatcgttttagtagaacataccagagagtaat

SEQ ID NO: 303336 - DNA, 201 bp, Homo sapiens
gccctatgttaagactgaggaagaggctgtgtgttagacttggtttcataggattcaggtgtgaccccaatgctaactcccctagacaggaaaaagttacrttgggttgacaccatctgccttcctttaggctttgagttttcatgatttccatctctctcttagaaatataagtttattagattacttataaggatttgg

SEQ ID NO: 303337 - DNA, 201 bp, Homo sapiens
attaatagactttattttttaaattaagagaaatgtctacttcatttgtcttatatcctagttctcgttaggtgtgggatcaaaatgtgttacgctagtasctagcgcacatccaggtttctctgcatgggtgttgtgtgtcctgaatcttcaggtgtgctgctggaacagcttgtggagcacagctgggtattcctcaga

SEQ ID NO: 303338 - DNA, 201 bp, Homo sapiens
aactgcatcatatggctgtaacttaatttgtttaatccatgcttcatggtggacaattagtttgtttacagtgttgcagtgaacattcttgtgcatacatstttgctcctatatgcaagtgtatctataagattaatagactttattttttaaattaagagaaatgtctacttcatttgtcttatatcctagttctcgtta

SEQ ID NO: 303339 - DNA, 201 bp, Homo sapiens
aagatttttaaagatatatttgtacttgtcacttaacggctgattaacactcagggaagcaatgattattattcatttgtactataaatatggattgttgmtgcccttcttttcctttcatccttctttcccttcttccttctctcctttttctttcaaaatagatttctattatgaaaaattagtacatgcatgggataa

SEQ ID NO: 303340 - DNA, 201 bp, Homo sapiens; identical to SEQ ID NO: 63309

SEQ ID NO: 303341 - DNA, 201 bp, Homo sapiens
tttgttcagagaacccattaaaatgcctgagttctaagataccctcaagagtttgaattatcatttctttctttttttttttttttctgagatggtatctygctctgtcattgcaacctccatctcccgggttcaagtgattctcctgcctcagcctcctgagtagctgggattgcaggcatgtgccaccacgctcggcta

SEQ ID NO: 303342 - DNA, 201 bp, Homo sapiens
gtcccttgaattattggccacttggctggtaattacaaatggtgtgggtggtaggcagtggctgtcagtgttcagtgctttaatgccattgtgtaatggawcagtaatgaaccttaaggctctttctgggtttgtgtgataaacctttttatggctacccagattttcttactgatgtagcaaagattgtaactgttctca

SEQ ID NO: 303343 - DNA, 201 bp, Homo sapiens
tgtcccttgaattattggccacttggctggtaattacaaatggtgtgggtggtaggcagtggctgtcagtgttcagtgctttaatgccattgtgtaatggwtcagtaatgaaccttaaggctctttctgggtttgtgtgataaacctttttatggctacccagattttcttactgatgtagcaaagattgtaactgttctc

SEQ ID NO: 303344 - DNA, 201 bp, Homo sapiens
taaaaaaagaatggtaaacagatttaaattgcttgagaatttcatcaagtgtaaccacaaaaaggatttgcaaacaaaccacctttaggaaggtaatgggraaggggaaggacataagaattgaggaataatttatgataacagaatcaacatacagccctgccccatgagtatttttcattaatgagcagtctgcgaaca

SEQ ID NO: 303345 - DNA, 201 bp, Homo sapiens
tttattttatgagttataaaatggttagatttggctcttacacatggtcaggctcttccataacctgattgctcaccatgggcagaaagaactctgcaagygagtaagatagaaggggaaatcaagtgactcgtggagctccattggtttaatattttacctttagctgcaatgacagaaactgttatttatttatattga

SEQ ID NO: 303346 - DNA, 201 bp, Homo sapiens
cccaggaacagcctcccacgtttctgatgcaaaccgtgaataggttgtgaccacaggatgagctgatgggactgtggatctcacacacctggctgggacascatttccaactgtgacaccttgaacaaggcacctaacctcgccagagctttggtaaatgtacattgaaatcctaattttttttttaaggcttgccttgaa

SEQ ID NO: 303347 - DNA, 201 bp, Homo sapiens
gtgctgaggttgaaaaaccccggttgaaggcattgatgtgaaaagggaccttagttaatctttataatggggtctaaatgagaaaatccctgatctcattrtaatgccatatttctccttccccaggaattgattcgtattctgaaaaagtaggttgagaattcagatttttacctcatccacttatacaacaggtttgat

SEQ ID NO: 303348 - DNA, 201 bp, Homo sapiens
ccagcctggccaacatggtgaaaccccatctctactaaaatacaaaacttagctaagcgtggtggtacgtgcctgtaatcccagctacttgggagcctgasgcaggaaaatcacttgaatctgggaggtggaggttgcaatgagttgagatcgcactactgcactccagcctgggcaacagactgagactgcctctcaaaa

SEQ ID NO: 303349 - DNA, 201 bp, Homo sapiens
ccaggaacagcctcccacgtttctgatgcaaaccgtgaataggttgtgaccacaggatgagctgatgggactgtggatctcacacacctggctgggacagmatttccaactgtgacaccttgaacaaggcacctaacctcgccagagctttggtaaatgtacattgaaatcctaattttttttttaaggcttgccttgaac

SEQ ID NO: 303350 - DNA, 201 bp, Homo sapiens
tcccatcatgacttgttttaaaaggaaattttttctgcaactaactaatgtatcattcagaaatattgtttactgtatttgtttgcatgtacggtgtcctcattctcctgaataatacttcatctgagtaataatctcaacacattgagttaattccatgcagtgggaggggaaacctgtgctttccttaaaccaggtgcc

SEQ ID NO: 303351 - DNA, 201 bp, Homo sapiens
ctgggcagctggaggagggggcatggcagacgagcagaccctgtgcttctcatgcgtctttgcctcttgtctatcttccaggccctggccgacttggtgcmttcacacatccagtcaaacgagctgtgttccaagcagctgaccctgagctgtccgctctgtgtcaatcctgtctgcagggagactaaatccttcttcacc

SEQ ID NO: 303352 - DNA, 201 bp, Homo sapiens
caggaacagcctcccacgtttctgatgcaaaccgtgaataggttgtgaccacaggatgagctgatgggactgtggatctcacacacctggctgggacagcrtttccaactgtgacaccttgaacaaggcacctaacctcgccagagctttggtaaatgtacattgaaatcctaattttttttttaaggcttgccttgaaca

SEQ ID NO: 303353 - DNA, 201 bp, Homo sapiens
taaagagacaggagcagatgcaagagtggggatgggctggtattagactgtggaggtttaaaattttgggggaaccctgctctgtgtagagtagaacttascatgtgccagcacgtgctaagtgactgaagatgttacccactgaattctcaaaacagcattttgagtaggtggtgggtgctatgttttccagatgaggaa

SEQ ID NO: 303354 - DNA, 201 bp, Homo sapiens
ttcccatcatgacttgttttaaaaggaaattttttctgcaactaactaatgtatcattcagaaatattgtttactgtatttgtttgcatgtacggtgtcctcattctcctgaataatacttcatctgagtaataatctcaacacattgagttaattccatgcagtgggaggggaaacctgtgctttccttaaaccaggtgc

SEQ ID NO: 303355 - DNA, 201 bp, Homo sapiens; identical to SEQ ID NO: 63315

SEQ ID NO: 303356 - DNA, 201 bp, Homo sapiens
tttaaattaagagaaatgtctacttcatttgtcttatatcctagttctcgttaggtgtgggatcaaaatgtgttacgctagtagctagcgcacatccaggkttctctgcatgggtgttgtgtgtcctgaatcttcaggtgtgctgctggaacagcttgtggagcacagctgggtattcctcagagagggtatagctttagc

SEQ ID NO: 303357 - DNA, 201 bp, Homo sapiens
tttcccatcatgacttgttttaaaaggaaattttttctgcaactaactaatgtatcattcagaaatattgtttactgtatttgtttgcatgtacggtgtcctcattctcctgaataatacttcatctgagtaataatctcaacacattgagttaattccatgcagtgggaggggaaacctgtgctttccttaaaccaggtg

SEQ ID NO: 303358 - DNA, 201 bp, Homo sapiens
tttttcccatcatgacttgttttaaaaggaaattttttctgcaactaactaatgtatcattcagaaatattgtttactgtatttgtttgcatgtacggtgtcctcattctcctgaataatacttcatctgagtaataatctcaacacattgagttaattccatgcagtgggaggggaaacctgtgctttccttaaaccagg

SEQ ID NO: 303359 - DNA, 201 bp, Homo sapiens
ctttttcccatcatgacttgttttaaaaggaaattttttctgcaactaactaatgtatcattcagaaatattgtttactgtatttgtttgcatgtacggtgtcctcattctcctgaataatacttcatctgagtaataatctcaacacattgagttaattccatgcagtgggaggggaaacctgtgctttccttaaaccag

SEQ ID NO: 303360 - DNA, 201 bp, Homo sapiens
gaaggattgcttgagcccaggagttaaagccctggtagagttgtcagacttgaaaaagcaatacagacaggagggcatccttcccgccacctcctgtctcyggtgaggctgctggggtacctcttcatctccttctcattcctcttcccttctgatcctttctttcctatatagttgtaaagtttacttttgaactatgtc

SEQ ID NO: 303361 - DNA, 201 bp, Homo sapiens
agggtacgtaagctaggccagtgagtgatgtgttttgggctcactctggccagatctgcccacgagatgtggcactggttaacatcggagaggctccttcycatccctgcatccttccagggacagccagctgcattgtgaaacccaccctgatggacacgggtccttcatgaacactgtttgttggttcctcaggatatg

SEQ ID NO: 303362 - DNA, 201 bp, Homo sapiens
ggccagatctgcccacgagatgtggcactggttaacatcggagaggctccttctcatccctgcatccttccagggacagccagctgcattgtgaaacccaycctgatggacacgggtccttcatgaacactgtttgttggttcctcaggatatgcccagttggagagtaccttgctgctttttctccaatatgtgtttaca

SEQ ID NO: 303363 - DNA, 201 bp, Homo sapiens; identical to SEQ ID NO: 63297

SEQ ID NO: 303364 - DNA, 201 bp, Homo sapiens
atatgtgtttacaggttgtctttagaaagcatttagaaaacattatcagttctttccagggtattttactctgtctcactttaaaatgtggccacctgccsttgtctttatctgcaagggcagcctttctacctcttagtatgcatgatttgaggaactcccagaccctaggcatttagaccgtaaccttcagatactgga

SEQ ID NO: 303365 - DNA, 201 bp, Homo sapiens
ttatataggaagccgaaaactggaatattaatgctaaacatgggaggccctgaaactcttggagatgttcacgacttccttctgagactcttcttggaccragacctcatgacacttcctattcagaagtgagatatatataaacacctcgattataaccttggcactacattgacatgtgtctctcaattctgtagtttc

SEQ ID NO: 303366 - DNA, 201 bp, Homo sapiens
gctgcttgacctaaaacttgttatggagctctgctttctttttgcttcttcctgcttattcaggggttgattctgtagcctgggactaatttgaatgttarcaccggttcttgcaggaattatctacacagtgaatttacatgcaggatggagaggagaagtttatcataacaggagccatggatgaaggaatagagggag

SEQ ID NO: 303367 - DNA, 201 bp, Homo sapiens
cacatgtgcttcctaatagcccctcacaaatactatattggatttcggtacgtccatcctttaacagaagaagcaattgaagagatggagagagatggcckagaaagggctattgctttcacacagtatccacagtacagctgctccaccacaggtaagggcatctctctgacagtggaaaggtagatacggtgctggcaa

SEQ ID NO: 303368 - DNA, 201 bp, Homo sapiens
cctttttcccatcatgacttgttttaaaaggaaattttttctgcaactaactaatgtatcattcagaaatattgtttactgtatttgtttgcatgtacggtgtcctcattctcctgaataatacttcatctgagtaataatctcaacacattgagttaattccatgcagtgggaggggaaacctgtgctttccttaaacca

SEQ ID NO: 303369 - DNA, 201 bp, Homo sapiens
gcctttttcccatcatgacttgttttaaaaggaaattttttctgcaactaactaatgtatcattcagaaatattgtttactgtatttgtttgcatgtacggtgtcctcattctcctgaataatacttcatctgagtaataatctcaacacattgagttaattccatgcagtgggaggggaaacctgtgctttccttaaacc

SEQ ID NO: 303370 - DNA, 201 bp, Homo sapiens
ataatttgtcagtatatatatataattttttgttttcgagatggagtcttgctctgtcacccaggctggagtgcactggtgcaatctcggctcactgcagsttccgcctcctgagttcaagtgattcttctgcctcagcctcctgagtagctggaattataggtgtgcgccaccacaccaggctcatttttgtatttttag

SEQ ID NO: 303371 - DNA, 201 bp, Homo sapiens
tcaagttgggatctggctgttccttagttcatcatattacactaggctattcatccagatgctacaatctgtgccatagctgttgtattgttggaaacaasaatgatcaagctagtgtactgtatgatatatagaagcgcttggaataagcaaccagtttcatctgctcagaactagcattctatcctaaaaccagtgctt

SEQ ID NO: 303372 - DNA, 201 bp, Homo sapiens
tctcagacttggtgctaactagcctcacttcttaaaacctcgtaacaatgaattcaaattataatgttgtaaatagatcttttcctcttttctttttttttgaaacagagtcttgctgtgtcacccaggctggagtgcaatggtgcagtctcggctcactgcaacctccacctcatgggctcaagcagttctcttgcctca

SEQ ID NO: 303373 - DNA, 201 bp, Homo sapiens
ccacctcctgggttcaagcgattctcctacctcagcctcctgagtagctgggattacaggtgcaccaccatgcctggctaattttgtattttttagtagasatagggtttctccacgttggtcaggctggtgtcaaactcccaacctcaggtgatccaccagccttggcctcccaaagtgctgggattacaggcgtgagcc

SEQ ID NO: 303374 - DNA, 201 bp, Homo sapiens
ttctacctcttagtatgcatgatttgaggaactcccagaccctaggcatttagaccgtaaccttcagatactggacaggtgaaaagaaaatgcgagaagcyggttgacctgcagcactggggatgtcattctgatcatcgtattgtttcaaagtagaatcgaaagcagtttctacttgcttgctaaacctcagctcaaatc

SEQ ID NO: 303375 - DNA, 201 bp, Homo sapiens
ctccacctcctgggttcaagcgattctcctacctcagcctcctgagtagctgggattacaggtgcaccaccatgcctggctaattttgtattttttagtasagatagggtttctccacgttggtcaggctggtgtcaaactcccaacctcaggtgatccaccagccttggcctcccaaagtgctgggattacaggcgtgag

SEQ ID NO: 303376 - DNA, 201 bp, Homo sapiens
accttcagatactggacaggtgaaaagaaaatgcgagaagccggttgacctgcagcactggggatgtcattctgatcatcgtattgtttcaaagtagaatygaaagcagtttctacttgcttgctaaacctcagctcaaatcaccaagagttgcttcaagggatttgatggtattgtaatagttggcggtttttagcacaa

SEQ ID NO: 303377 - DNA, 201 bp, Homo sapiens
tttttttttttttttgtgacggagtttcgctcttgttgcccaggctggagtgcaatggcacgatctcagctcaccataacctccacctcctgggttcaagygattctcctacctcagcctcctgagtagctgggattacaggtgcaccaccatgcctggctaattttgtattttttagtagagatagggtttctccacgtt

SEQ ID NO: 303378 - DNA, 201 bp, Homo sapiens
tggctgtcagtgttcagtgctttaatgccattgtgtaatggatcagtaatgaaccttaaggctctttctgggtttgtgtgataaacctttttatggctacmcagattttcttactgatgtagcaaagattgtaactgttctcattttgaaagcaaagatgcccatacaacatgggaaatactgatattttgttgctgttgt

SEQ ID NO: 303379 - DNA, 201 bp, Homo sapiens
tgtgatttaagatatgctctctcctgactaccattttcaactggaaacctaactaatagttcttatagttagagagcccagtggatcggtgatggaaagcrtggaaatgttttgggacttgccctatgttaagactgaggaagaggctgtgtgttagacttggtttcataggattcaggtgtgaccccaatgctaactccc

SEQ ID NO: 303380 - DNA, 201 bp, Homo sapiens
atgattgcaaacagataaacatgtttcatgctgtcgttttttagggaagtggttgttgcttggtagccagtgtggacgttttgagacttgcactggtttcmtagaattgaccagttaactaagacagtgagttatatcaggaaatggtttcatgtagttacattgcattgcagaaatgtagagaatagatacagaaataga

SEQ ID NO: 303381 - DNA, 201 bp, Homo sapiens
gcgggcgtcctgctccgcgatccgcgtaagtgggtctgtcgcggcggccgccagggccaggatccctgagaaggcgtgggcagagcgggcagctggcgccygggccctcgcgcccgggggattcggggagcggccttgggggtgctgcgagcaaccgggcgaggggcgtcgcggagaagggagggctgagggcagcactca

SEQ ID NO: 303382 - DNA, 201 bp, Homo sapiens
ctaatagcccctcacaaatactatattggatttcggtacgtccatcctttaacagaagaagcaattgaagagatggagagagatggcctagaaagggctaytgctttcacacagtatccacagtacagctgctccaccacaggtaagggcatctctctgacagtggaaaggtagatacggtgctggcaaaaataaccaagg

SEQ ID NO: 303383 - DNA, 201 bp, Homo sapiens
ggcaggtgccatcacaccctgctaatttttaaaaatgttgtggagattaggtctttccatgttgctcaggctagtcttgaacttctgggctccagcagtcrtccaaccttggcctcccaaagtgctgggattactggcgtgagccactgcgtctggcctattgatgtgttattaacatgtatatcccacttgctttatcat

SEQ ID NO: 303384 - DNA, 201 bp, Homo sapiens
ttctgaaaaagtaggttgagaattcagatttttacctcatccacttatacaacaggtttgatcaagaaaacagtttctacctgtttacatttgacataccctgctgccttacgttattgccaaatgttgttaataattgtttaaaaattgcccattaagatgtcaccataagcctggggcaatggctcacacctgtaatct

SEQ ID NO: 303385 - DNA, 201 bp, Homo sapiens
ggtctttccatgttgctcaggctagtcttgaacttctgggctccagcagtcgtccaaccttggcctcccaaagtgctgggattactggcgtgagccactgygtctggcctattgatgtgttattaacatgtatatcccacttgctttatcatttacacgccccgtgtgtgtgtatgtatgtgtgtgtgtctgtgtttgtat

SEQ ID NO: 303386 - DNA, 201 bp, Homo sapiens
gtatgactattaaatattcactctgtatgtatttagcaagatgtgaccgtactgtacatcatatatttataatgccctctttttatttactttatcatcawaaatacttgtctatattattttagtaactgaagagtattttattaagtcataaactaccttgaccaacattctgggacacgtaggtgatttctagttttt

SEQ ID NO: 303387 - DNA, 201 bp, Homo sapiens
gagtgtattaacgaacctgagtggaaagggtcccttggcagcgacatcattctcctctctgagaatctggtgaaccatggagaaaataattttgtaagtargacatggtaatagttaagcagcttgaaaagctactagctcccaaatttattaggaaatcctcatctactagttggaaaatctagtccctccccaccgctt

SEQ ID NO: 303388 - DNA, 201 bp, Homo sapiens
atgacctagtgatagaggattgggtgatttcattttctaaatgtgtaaaatgggtccagcttccattatgtcctaagcccagtgcaagaatgaattctcaratctcagacttggtgctaactagcctcacttcttaaaacctcgtaacaatgaattcaaattataatgttgtaaatagatcttttcctcttttcttttttt

SEQ ID NO: 303389 - DNA, 201 bp, Homo sapiens
acccagctcctcttttctttaaaatgataacttgaagatatatataagactttctaataagtgggacagttaagagaaggctgcttttgcctgccctgtcrgcagagctcagcttgatgtttctgtgtgttgagtgggggggtctccattcagacaagcgctctcaatcccatgcttttgtcctcaggacttgttaggcag

SEQ ID NO: 303390 - DNA, 201 bp, Homo sapiens
gaaggatgagctcttgaactctctgagttcctgcagaagtgtagaggcctttggagagttgcctctgactgacatgctttcctgcttctcttcttgccgcyggctctttctggccttgtggggagcctcacagacagcctggatggactctctggtcttcatgcccagttccactcttgcccctgcaaacagctatctatc

SEQ ID NO: 303391 - DNA, 201 bp, Homo sapiens
tgggcagtgcgtgtgcccaggggggcaaacaggggtactacagaccgtcaggaggcatagtccacttacgcattcgtctatctttcgcataggttggtccdatgccctggttgggtcctcaaacagacgaatctatcaaagggctttgtgagagggggaggaagaatatcctcttggttccgatagcatttaccagtgacc

SEQ ID NO: 303392 - DNA, 201 bp, Homo sapiens; identical to SEQ ID NO: 63300

SEQ ID NO: 303393 - DNA, 201 bp, Homo sapiens; identical to SEQ ID NO: 63301

SEQ ID NO: 303394 - DNA, 201 bp, Homo sapiens
tgatcaatctgattattgaaataacaaataccatctttggtgtcttgtaatatgagatagatgtgaattgtcattcagggaggagaaaaactattgttcayctatgtcctggcttttgagagccagcctaaaacctattccaatatatagctttatttttatgggaagtgtggaagcgttgggacccaagaaaccctttcc

SEQ ID NO: 303395 - DNA, 201 bp, Homo sapiens
cacagtggcatccagcagctggagggtctgtcagccatggaggtggaagtcaggtgcagctgcagcggccgtcaccacagaaacagcccagcatgcccagkgtgcaaaacctcaagttcaaccgcagaagaggtatgagtctaacatcaggtacaaataagaatttctctttatcgatgcagacaccaatagacacaagct

SEQ ID NO: 303396 - DNA, 201 bp, Homo sapiens
tgctgggattacaggcgtgagccaccgtgcctggccgacatactttgaattgtaagacttggtccctgtaaatatgactgcttatatttcataactttacrgccatcttgtttttcactagaactgacatcaataatctttgaaagtccattgaaattgattgctttttagtgatcttcatttgcagggtagttaaatcta

SEQ ID NO: 303397 - DNA, 201 bp, Homo sapiens
agctgcttgacctaaaacttgttatggagctctgctttctttttgcttcttcctgcttattcaggggttgattctgtagcctgggactaatttgaatgttrgcaccggttcttgcaggaattatctacacagtgaatttacatgcaggatggagaggagaagtttatcataacaggagccatggatgaaggaatagaggga

SEQ ID NO: 303398 - DNA, 201 bp, Homo sapiens; identical to SEQ ID NO: 63308

SEQ ID NO: 303399 - DNA, 201 bp, Homo sapiens
tgactccggagcttgatctggattttaggtttacatttttgcatagcactttgtttttttaagtttccagaagctgcttgacctaaaacttgttatggagstctgctttctttttgcttcttcctgcttattcaggggttgattctgtagcctgggactaatttgaatgttagcaccggttcttgcaggaattatctacac

SEQ ID NO: 303400 - DNA, 201 bp, Homo sapiens
ttgactccggagcttgatctggattttaggtttacatttttgcatagcactttgtttttttaagtttccagaagctgcttgacctaaaacttgttatggasctctgctttctttttgcttcttcctgcttattcaggggttgattctgtagcctgggactaatttgaatgttagcaccggttcttgcaggaattatctaca

SEQ ID NO: 303401 - DNA, 201 bp, Homo sapiens
tgcctcttgtctatcttccaggccctggccgacttggtgcattcacacatccagtcaaacgagctgtgttccaagcagctgaccctgagctgtccgctctvtgtcaatcctgtctgcagggagactaaatccttcttcaccagccagcagctgtgacccccgccggtggaccccgtggcgttaggcaaatgcccaacctcc

SEQ ID NO: 303402 - DNA, 201 bp, Homo sapiens
tgaccttaggtgatccacccgcccaggcctcccaaagtactgggatttcaggtgtgagccaccacacccagctcctcttttctttaaaatgataacttgawgatatatataagactttctaataagtgggacagttaagagaaggctgcttttgcctgccctgtcagcagagctcagcttgatgtttctgtgtgttgagtg

SEQ ID NO: 303403 - DNA, 201 bp, Homo sapiens
ctgaccttaggtgatccacccgcccaggcctcccaaagtactgggatttcaggtgtgagccaccacacccagctcctcttttctttaaaatgataacttgwagatatatataagactttctaataagtgggacagttaagagaaggctgcttttgcctgccctgtcagcagagctcagcttgatgtttctgtgtgttgagt

SEQ ID NO: 303404 - DNA, 201 bp, Homo sapiens
ctaaaaatgatctagttttacttccttcttcttttttgcagtacccaaccagagaatactgagtccgaccagcctttctgtgcacacatgtgcttctctcscctaatggcattctgcttctcccttgggaatgtgttcccctggctcttagctctctgggtcaagttaggaggaatgtcgtccttgtatatatctaggtat

SEQ ID NO: 303405 - DNA, 201 bp, Homo sapiens
ctgagtaaaaccagacacaatcatgaacattttatgctgagtaaaaccagacacaatcatgtgattccatttctatgaagtgtcctgaataggcaaatctmtagacccagaaagtagattactggttgccaggggtgagaggggagggaacagggagtggctttaatggatacaaagattctttgtggggtaaagatgtcc

SEQ ID NO: 303406 - DNA, 201 bp, Homo sapiens
ggaaaatcatttctgccatgggatctctttaaattttaaagtcaggaattatgctctgaggacctcttcagaagaaattactttctagctagatttcatgygagcactttaattttgtcacagtggcatccagcagctggagggtctgtcagccatggaggtggaagtcaggtgcagctgcagcggccgtcaccacagaaa

SEQ ID NO: 303407 - DNA, 201 bp, Homo sapiens
gctaaaaatgatctagttttacttccttcttcttttttgcagtacccaaccagagaatactgagtccgaccagcctttctgtgcacacatgtgcttctctsgcctaatggcattctgcttctcccttgggaatgtgttcccctggctcttagctctctgggtcaagttaggaggaatgtcgtccttgtatatatctaggta

SEQ ID NO: 303408 - DNA, 201 bp, Homo sapiens
agcagtttctacttgcttgctaaacctcagctcaaatcaccaagagttgcttcaagggatttgatggtattgtaatagttggcggtttttagcacaaagcrcataatctttgaacaatcagtcatttggagtttgcttatgggatcatgtcctgtgatatgttttaactgctagtgaccattttatgcaaggcagcacgaa

SEQ ID NO: 303409 - DNA, 201 bp, Homo sapiens
aattaaatgaaagtctttaaattctactaagtaactttagatcatatttatataaaataaatgggatcattttagagaatacggataggcaacaaaaaaaaccttaaaacattatgaataatcttaccacccaatattttgtctctctctgtcttcttaaaaaaaaaatagagacgaggtcttactgtgttgctcaggctt

SEQ ID NO: 303410 - DNA, 201 bp, Homo sapiens
attattaaaattaaatgaaagtctttaaattctactaagtaactttagatcatatttatataaaataaatgggatcattttagagaatacggataggcaamaaaaaaaaccttaaaacattatgaataatcttaccacccaatattttgtctctctctgtcttcttaaaaaaaaaatagagacgaggtcttactgtgttgc

SEQ ID NO: 303411 - DNA, 201 bp, Homo sapiens
acgagtgctttccgaagaaggcttggaggcagaaaggagaactgcagctatttggaaactggcccactcgccactcccgaaatcggcggcttttcacttttctgcagccccttctccttccacaggagcagcacgctactgtcagtcatgttggtctcgtgcaggggttcttgtgagggattgtatcaaaatctgcagccg

SEQ ID NO: 303412 - DNA, 201 bp, Homo sapiens
taggaacctggttaaatcccacgatgaagttcagaattaaacttatgtaaaaaaggagatgtgagttggtttgagccttggaattgaatttttttttttttaaaacaccaactcaaaccagatggaattgaacttctttatggaatctttgcacttccactttgagttggtaaagattattcagcataagctgacatgatt

SEQ ID NO: 303413 - DNA, 201 bp, Homo sapiens
ctccataagaatatatttcaggccagacttggtggctcacacctgtaatcccagcactttgggaggctgaggcgggtggatcgtttgaggtcaggagttcragaccagcctggccaacatggtgaaaccttgccactaccaaaaatacaaaaattagctgggcatggtggtgcatgcctgtaatctcagctacttgagagg

SEQ ID NO: 303414 - DNA, 201 bp, Homo sapiens
ttgggaccagaggtgttttggacagattttttttaggttttggaatatacttacttacagattgagcattccaaatctgaaaatctaaaattcaaaatgcwccaatgagcattttctttgagtgtcatgtcagtgctcaaaaagtttcaggttttggagcattttggattttggattttcacatttgggatgctaaacttg

SEQ ID NO: 303415 - DNA, 201 bp, Homo sapiens
caggaaaggaagatgctgtagaatttggttcaaagggctcaccactcggatgaaaagaaaccccaagccagagcgctgacctgggcagctggaggaggggrcatggcagacgagcagaccctgtgcttctcatgcgtctttgcctcttgtctatcttccaggccctggccgacttggtgcattcacacatccagtcaaacg

SEQ ID NO: 303416 - DNA, 201 bp, Homo sapiens
ttttagtagagatgggtttcactgtgttagccaggatgatctctatctcctgacctgtgatctgcccgcctcggcctcccaaagtgctaggattacaggcrtgagccactgtgcccggtgaagtttcgttttcttatgtcatcttctgttttgctgcttatctgtcggtttgatcatttttattgtttgtaggccttcttt

SEQ ID NO: 303417 - DNA, 201 bp, Homo sapiens; identical to SEQ ID NO: 63321

SEQ ID NO: 303418 - DNA, 201 bp, Homo sapiens
cccggctaatttttttgtgtttttagtagagatgggtttcactgtgttagccaggatgatctctatctcctgacctgtgatctgcccgcctcggcctcccraagtgctaggattacaggcgtgagccactgtgcccggtgaagtttcgttttcttatgtcatcttctgttttgctgcttatctgtcggtttgatcattttt

SEQ ID NO: 303419 - DNA, 201 bp, Homo sapiens
gaagtattgaactaatcttttctttcactgacctttcctgtggcaaataaagtctgacaggtcctagatttgaggtcgtggaacaatatgtgaaactttamattatttgtagtctaggttaaaagtggaaagattcagaaacgctagcagaagtagatttggagtcttatttgtgttacagactttgatttgaaggcatag

SEQ ID NO: 303420 - DNA, 201 bp, Homo sapiens; identical to SEQ ID NO: 63303

SEQ ID NO: 303421 - DNA, 201 bp, Homo sapiens
ggctctcggggccttcccagtgttaatggctgaacacccattgtgtctctgctgcaggtggtcaacagaggcgacccatatcctcaggaggtaagcgccaytgtccaaaaagtcatggaaaggctggagtactgcaacccctaccgactggtgtggcaatccaaggtaagtggcttccacactggcgggcggccagctctt

SEQ ID NO: 303422 - DNA, 201 bp, Homo sapiens
gggctcaccactcggatgaaaagaaaccccaagccagagcgctgacctgggcagctggaggagggggcatggcagacgagcagaccctgtgcttctcatgsgtctttgcctcttgtctatcttccaggccctggccgacttggtgcattcacacatccagtcaaacgagctgtgttccaagcagctgaccctgagctgtcc

SEQ ID NO: 303423 - DNA, 201 bp, Homo sapiens
agggctcaccactcggatgaaaagaaaccccaagccagagcgctgacctgggcagctggaggagggggcatggcagacgagcagaccctgtgcttctcatscgtctttgcctcttgtctatcttccaggccctggccgacttggtgcattcacacatccagtcaaacgagctgtgttccaagcagctgaccctgagctgtc

SEQ ID NO: 303424 - DNA, 201 bp, Homo sapiens; identical to SEQ ID NO: 63305

SEQ ID NO: 303425 - DNA, 201 bp, Homo sapiens
taaaaattgcccattaagatgtcaccataagcctggggcaatggctcacacctgtaatctcagcactttgggagcctgagccaggagtttgagaccagtckgggccacatggcgagactctgtctatataaaaaattttaaaagtagccaggcatggaggcatgtgcctgtggtcccagctactcaggaggccgaagcggg

SEQ ID NO: 303426 - DNA, 201 bp, Homo sapiens
tatgaagtgtcctgaataggcaaatctatagacccagaaagtagattactggttgccaggggtgagaggggagggaacagggagtggctttaatggatacraagattctttgtggggtaaagatgtcctggagttagatagtcgtgatggtttcctgcctttccttatgtattagaaacctctgaattgttcagattatgg

SEQ ID NO: 303427 - DNA, 201 bp, Homo sapiens
tgaaactcttggagatgttcacgacttccttctgagactcttcttggaccgagacctcatgacacttcctattcagaagtgagatatatataaacacctcrattataaccttggcactacattgacatgtgtctctcaattctgtagtttcaaaccagtaaatagttttaatgcgtatctggtaatggttaaacagcagca

SEQ ID NO: 303428 - DNA, 201 bp, Homo sapiens
gaacataccagagagtaatcctctgagaaactcttgcagaatattggtttttctcacatattagaacatttggagttccaattaattacaaaaataaaatmgaattccttatctgctcagtcttttttccttcagatagccccaattttctgatttctacccacctataactatgtctgatttaaaacctgctttccagag

SEQ ID NO: 303429 - DNA, 201 bp, Homo sapiens
tgtaatcatgtgatggaaagtctaaatctcaaatatgctttgcaaattatagtttaactgtttagcttgtaactgcttttagtgaagctataagtaagggmtgctcatgaaataattctgttctttcccggatgcagcgtggataggcgtatgggttcctttctctgatggtgttggcttccctgctctggttcaggcagt

SEQ ID NO: 303430 - DNA, 201 bp, Homo sapiens
tagaacatttggagttccaattaattacaaaaataaaatcgaattccttatctgctcagtcttttttccttcagatagccccaattttctgatttctaccyacctataactatgtctgatttaaaacctgctttccagagaaaaggcctagtgggtagggtaagaggttttcatctcctgaaatctctgttttaactttct

SEQ ID NO: 303431 - DNA, 201 bp, Homo sapiens
gacagggaagggacagggaaagaacatgaggatatacagcaggcatgggccatttaggtaccaagaacaatggctttcaatcccatgtggcacctccaaaktaagcactgttttatatgtgtaatgaggagaatcattttaatcatttgttatcaatgaatttttttacgtatgcaagagctcttgcatttttttatataa

SEQ ID NO: 303432 - DNA, 201 bp, Homo sapiens
tgaatttttttacgtatgcaagagctcttgcatttttttatataaacgaggtggcctgggggttcggggaactgggtaataggagcagggtgaggtggggrgcctgggaggagtgagaagcatgggttgggagacccaggctctaattccagctcgaccacctgcaaggtatgactttgggtagttcagttaaccttcaga

SEQ ID NO: 303433 - DNA, 201 bp, Homo sapiens
ctgggggttcggggaactgggtaataggagcagggtgaggtggggggcctgggaggagtgagaagcatgggttgggagacccaggctctaattccagctcraccacctgcaaggtatgactttgggtagttcagttaaccttcagagtctctgtttccttatctggaaaatcaggtttaaatgattaaaaaaataatgccc

SEQ ID NO: 303434 - DNA, 201 bp, Homo sapiens
ggtggctcacccctgtaatcccagcactttgggaggcccaggcgggcagatcacctgaggttgggagtttgagaccagcctgaccaacatggagaaacccygtctctactaaaagtaaaaaattagccaggcgtagtggcatatacctgtaatcccagctacttgggaggctgaggcaggagaatcacttgaacccaagag

SEQ ID NO: 303435 - DNA, 201 bp, Homo sapiens
gaatttctctttatcgatgcagacaccaatagacacaagctgcctgggaggaaaggtgctgggaaaagccagtgtggaaggagctattttcttggcttcckttcaatagctgttaaaccatagattttacaccctccttccccactggatccttccctgcaacagggctattgttaaaagacacagagttgagtacaaaca

SEQ ID NO: 303436 - DNA, 201 bp, Homo sapiens
agctaacaaactgggaaatatgttctgtcctcctatgttgacaaatagaccttgatcacaacctggaaggatgagctcttgaactctctgagttcctgcasaagtgtagaggcctttggagagttgcctctgactgacatgctttcctgcttctcttcttgccgccggctctttctggccttgtggggagcctcacagaca

SEQ ID NO: 303437 - DNA, 201 bp, Homo sapiens
cctgctctggttcaggcagtttacttacttaactaagcctcagctagaaaatggggatggtaacagaactcaactcttagatccttgtgaaaattaaatgvgataatcctgagaggcattaacatgacaaaagttcaatatacgtgagctttttaattcatcattggcacagggttcatgatctgatacaaagtaagcatt

SEQ ID NO: 303438 - DNA, 201 bp, Homo sapiens
tatagtttaactgtttagcttgtaactgcttttagtgaagctataagtaagggctgctcatgaaataattctgttctttcccggatgcagcgtggataggmgtatgggttcctttctctgatggtgttggcttccctgctctggttcaggcagtttacttacttaactaagcctcagctagaaaatggggatggtaacaga

SEQ ID NO: 303439 - DNA, 201 bp, Homo sapiens
gtttcaccatgttgcccagtctggtctcgacctcctgggcccaggtgatccacccacctcagcctcccaaagcgctgagattgtaggtgtgaggcgccacrccccaccacacgttgatatttctgaggagtcatttttaggatgtcagttgttttctggtgcgtccctccatctgggttcgtctgaagttttctcatgatt

SEQ ID NO: 303440 - DNA, 201 bp, Homo sapiens
cacttgaatagtcttccattatttgaaaactattattcaacttatccaagtgaagtattggcatacaaagaagttgtttcatatttgcattgctcatgaaygtaaacaaaatgtcgatatgtgtgaactatacttgttgatcaattgcaaccataggttggctgcagatgcgagagcttggtaaacatcaacaaaagcatt

SEQ ID NO: 303441 - DNA, 201 bp, Homo sapiens
cccgaaactgttatgatccattttgatgataaaccaatgctgagaggctggactgtttgcaattttttaaaaaagagagttcggatttttgagggttgctstgagatttttggtgtaggcttcattttaaaattattttctttttccttccatttctttcttcccttcctctttatcctcctttcttgttactcactcagt

SEQ ID NO: 303442 - DNA, 201 bp, Homo sapiens
gtgtgccctgtccttcccgaggggaagcagatccacagcgcgcatttgcagtgagccattagcgagctttagaagtttcccagcaaattccctaggccccygaaactgttatgatccattttgatgataaaccaatgctgagaggctggactgtttgcaattttttaaaaaagagagttcggatttttgagggttgctctg

SEQ ID NO: 303443 - DNA, 201 bp, Homo sapiens
ttggttcaaagggctcaccactcggatgaaaagaaaccccaagccagagcgctgacctgggcagctggaggagggggcatggcagacgagcagaccctgtscttctcatgcgtctttgcctcttgtctatcttccaggccctggccgacttggtgcattcacacatccagtcaaacgagctgtgttccaagcagctgaccc

SEQ ID NO: 303444 - DNA, 201 bp, Homo sapiens
aagtccattgaaattgattgctttttagtgatcttcatttgcagggtagttaaatctatatgcattttagagtattgaaatgattgtaattagactgattsagtaaagaagcagttacctgctttgaacttatatatactacctttacgagtctgttttttattttcaccataatcaaaatgcatctactaagtggtctct

SEQ ID NO: 303445 - DNA, 201 bp, Homo sapiens
agcaaaagagaataaaaaaagaatggtaaacagatttaaattgcttgagaatttcatcaagtgtaaccacaaaaaggatttgcaaacaaaccacctttagraaggtaatggggaaggggaaggacataagaattgaggaataatttatgataacagaatcaacatacagccctgccccatgagtatttttcattaatgagc

SEQ ID NO: 303446 - DNA, 201 bp, Homo sapiens
aaagtccattgaaattgattgctttttagtgatcttcatttgcagggtagttaaatctatatgcattttagagtattgaaatgattgtaattagactgatwcagtaaagaagcagttacctgctttgaacttatatatactacctttacgagtctgttttttattttcaccataatcaaaatgcatctactaagtggtctc

SEQ ID NO: 303447 - DNA, 201 bp, Homo sapiens
gagagatggcctagaaagggctattgctttcacacagtatccacagtacagctgctccaccacaggtaagggcatctctctgacagtggaaaggtagatasggtgctggcaaaaataaccaaggagtctaagtactgaagggaaggatgaattatttgcaatttgaatggcaaattcaacctgtcttctttaaacacgaga

SEQ ID NO: 303448 - DNA, 201 bp, Homo sapiens
tcactcagtgctttgcagatcatattctaaaggaactggaccattttccacttgagaagagaagcgaggtggtcattctgttttctgctcactcactgccsatgtctgtaagtaagaacattttctgggatgacctagtgatagaggattgggtgatttcattttctaaatgtgtaaaatgggtccagcttccattatgtc

SEQ ID NO: 303449 - DNA, 201 bp, Homo sapiens
caagggtatacttgaaggcacatatatggtatgtgggatatagcaagctaacaaactgggaaatatgttctgtcctcctatgttgacaaatagaccttgawcacaacctggaaggatgagctcttgaactctctgagttcctgcagaagtgtagaggcctttggagagttgcctctgactgacatgctttcctgcttctct

SEQ ID NO: 303450 - DNA, 201 bp, Homo sapiens
acaagggtatacttgaaggcacatatatggtatgtgggatatagcaagctaacaaactgggaaatatgttctgtcctcctatgttgacaaatagaccttgwtcacaacctggaaggatgagctcttgaactctctgagttcctgcagaagtgtagaggcctttggagagttgcctctgactgacatgctttcctgcttctc

SEQ ID NO: 303451 - DNA, 201 bp, Homo sapiens
tcctcagggcacctttgcctcttaggaggaggagggcagaaggagactgatcgcaagctggtttctaaccggctggtttgagaatggggaagaggtcatgkgcatagcaccaggcaccacagtaaccaccgtctcacatggccatcttcagtacttcctatatggcttcagtttcatttcactggctgtttaaggaccagt

SEQ ID NO: 303452 - DNA, 201 bp, Homo sapiens
atgggtgttgtgtgtcctgaatcttcaggtgtgctgctggaacagcttgtggagcacagctgggtattcctcagagagggtatagctttagctccttattstacaacaagagagctggctattgtcaatgacctcaagcttctgttttaaaggcttaatcttgttaggctctctaaaattttgctttttttcttttttatt

SEQ ID NO: 303453 - DNA, 201 bp, Homo sapiens
tgtcaatgacctcaagcttctgttttaaaggcttaatcttgttaggctctctaaaattttgctttttttcttttttattgagtagaaaacatttctcaggytgctaagctggaataaaatccacttacctgtatgttaaatgatttagtaagctggcaccattcatcgccaaacgccgaacccccaagattcaagagcagt

SEQ ID NO: 303454 - DNA, 201 bp, Homo sapiens
acagtgagttatatcaggaaatggtttcatgtagttacattgcattgcagaaatgtagagaatagatacagaaatagatgagaagtgtaatcatgtgatgraaagtctaaatctcaaatatgctttgcaaattatagtttaactgtttagcttgtaactgcttttagtgaagctataagtaagggctgctcatgaaataat

SEQ ID NO: 303455 - DNA, 201 bp, Homo sapiens
aatggagtccctttgaattcttctgattcactgtattctactcaccaaaattgaacctgtttatctttttggaagttgagtcttagtctgagagtatatgygatttaagatatgctctctcctgactaccattttcaactggaaacctaactaatagttcttatagttagagagcccagtggatcggtgatggaaagcatg

SEQ ID NO: 303456 - DNA, 201 bp, Homo sapiens
tctggtggacagagatttggagggggaggcaggaaccatgttctttcccaagttccacagatgtgactgaatgggcccctaagtttaccacatctttcccsgctctgtgaatttaatgggtgtgtatcacctgtcatctgttgttgtgaaggtttttataaaaattgacttgatggggatatgaggctcagaagaaactgt

SEQ ID NO: 303457 - DNA, 201 bp, Homo sapiens
cagcacctatcgacgtgaatcaaagtgccggctagacgaagggagctccctggtctggtggacagagatttggagggggaggcaggaaccatgttctttcycaagttccacagatgtgactgaatgggcccctaagtttaccacatctttccccgctctgtgaatttaatgggtgtgtatcacctgtcatctgttgttgtg

SEQ ID NO: 303458 - DNA, 201 bp, Homo sapiens
aaatccaattttaagtaaaaactgaaaagaaggagcttacccttaggggtgggtgtagttgtggtctctgtgtgcaccattgatggctgtgttgctgggtycagccagtactgcctgaagcaccagcagcctgggttttgctttgggaggcctgcgattggaaaggaggggggtttcaggtcagcattgacatgtggtagc

SEQ ID NO: 303459 - DNA, 201 bp, Homo sapiens
gacttcttacattacaagtaaaaaaaagctaaggatttgggacatgagtttcaaaaggaagttcgagatgtttgttaaattgctagagtataaggcataarcaacataccatgaaagaaagatgcatatatcattacactggaaagaaatctttgggaaatggattgaggctgctgctattattgccttttctttctggtt

SEQ ID NO: 303460 - DNA, 201 bp, Homo sapiens
ttgtttaaagatgccttctgtatctcactatgagcttggctaattgtgaacttgctaaaacttcagtgaaaatatagtttataccaatatgtttggaaatsaatttttttattttaaatttattatgattttataaatttgcttagagatgaaatctggctctgtcaaccaggctggggtgcagtggcacaatcatagctc

SEQ ID NO: 303461 - DNA, 201 bp, Homo sapiens
tcagggctattattacatggcttcttgttgagtgtcaaggcatataggagtcattgtcatttaaaagaagagcgtgaaatgaacatggaagcaatgtgtgrtgtgatttccttgacctcttttatgcactcacttaattagctgtttgctgttatgttgtgatcaatctgattattgaaataacaaataccatctttggtg

SEQ ID NO: 303462 - DNA, 201 bp, Homo sapiens
atccaaggtaagtggcttccacactggcgggcggccagctcttattggtaaaatttattttatgagttataaaatggttagatttggctcttacacatggwcaggctcttccataacctgattgctcaccatgggcagaaagaactctgcaagcgagtaagatagaaggggaaatcaagtgactcgtggagctccattggt

SEQ ID NO: 303463 - DNA, 201 bp, Homo sapiens
ggttgcagtgagccgagattgcgccactgcactccagcctgggtgacagagcaagactccatctcaaaaaaaaaaaaaagaaaaaagaatatattttaaamcccaactctgaattggttccagtgtaggtccaatacatattttatagtcgataagttaatttacctcattttggcacttgggatcaaaacaagtatgaaa

SEQ ID NO: 303464 - DNA, 201 bp, Homo sapiens
cttccaagcagggagagggcatggtgaagctgctggatgaattgtcccccaacacaggtatggtgtttcttcattaacatgtaactagattagttctttcraagtagttatgaaattcaaaagagtagtagatgctaaatgcttcatatgtactggcaactcaatttgtggtgtttctacataatacatggtcacttaatt

SEQ ID NO: 303465 - DNA, 201 bp, Homo sapiens
ctattgatttatttctattaagaaaaattctctttaggccagaaaatgtgatgattgcaaacagataaacatgtttcatgctgtcgttttttagggaagtrgttgttgcttggtagccagtgtggacgttttgagacttgcactggtttcatagaattgaccagttaactaagacagtgagttatatcaggaaatggtttc

SEQ ID NO: 303466 - DNA, 201 bp, Homo sapiens
ctcctcagggcacctttgcctcttaggaggaggagggcagaaggagactgatcgcaagctggtttctaaccggctggtttgagaatggggaagaggtcatktgcatagcaccaggcaccacagtaaccaccgtctcacatggccatcttcagtacttcctatatggcttcagtttcatttcactggctgtttaaggaccag

SEQ ID NO: 303467 - DNA, 201 bp, Homo sapiens
tgcagcatgattaggaacctggttaaatcccacgatgaagttcagaattaaacttatgtaaaaaaggagatgtgagttggtttgagccttggaattgaatktttttttttttaaaacaccaactcaaaccagatggaattgaacttctttatggaatctttgcacttccactttgagttggtaaagattattcagcataag

SEQ ID NO: 303468 - DNA, 201 bp, Homo sapiens
gagaggagtgttttggatgagtccttgaagggtgagtgtattaacgaacctgagtggaaagggtcccttggcagcgacatcattctcctctctgagaatcyggtgaaccatggagaaaataattttgtaagtaagacatggtaatagttaagcagcttgaaaagctactagctcccaaatttattaggaaatcctcatcta

SEQ ID NO: 303469 - DNA, 201 bp, Homo sapiens
cccagtgttaatggctgaacacccattgtgtctctgctgcaggtggtcaacagaggcgacccatatcctcaggaggtaagcgccactgtccaaaaagtcawggaaaggctggagtactgcaacccctaccgactggtgtggcaatccaaggtaagtggcttccacactggcgggcggccagctcttattggtaaaatttat

SEQ ID NO: 303470 - DNA, 201 bp, Homo sapiens
aggattgtgcacatctgagaacctctatccagaataatagtgtgcagaatgaaccactaaatgcatggatgaagtaaaaatgctgtattaaacacatcgamgacacaattcattgcaggacaccctgtttttgtataatactaagatacaaaagcactaccggttaattttaagacaacatctattgtagactgaactgat

SEQ ID NO: 303471 - DNA, 201 bp, Homo sapiens
ggtaattacaaatggtgtgggtggtaggcagtggctgtcagtgttcagtgctttaatgccattgtgtaatggatcagtaatgaaccttaaggctctttctrggtttgtgtgataaacctttttatggctacccagattttcttactgatgtagcaaagattgtaactgttctcattttgaaagcaaagatgcccatacaac

SEQ ID NO: 303472 - DNA, 201 bp, Homo sapiens
ttgtcgttttctgtatatttaactggagctggggaataattggtgtttggcaatctctgtatcattcattgtaggcaaagctgctactgtcacccacagayacatttgtttgcattccattgcaaggattgaagtcagcacattcttagtcccaaattgcttttggatattaatgtttatcacttctataaccataaggag

SEQ ID NO: 303473 - DNA, 201 bp, Homo sapiens; identical to SEQ ID NO: 63298

SEQ ID NO: 303474 - DNA, 201 bp, Homo sapiens
ggttaacacttgggttgaaatccaattttaagtaaaaactgaaaagaaggagcttacccttaggggtgggtgtagttgtggtctctgtgtgcaccattgayggctgtgttgctgggtccagccagtactgcctgaagcaccagcagcctgggttttgctttgggaggcctgcgattggaaaggaggggggtttcaggtcag

SEQ ID NO: 303475 - DNA, 201 bp, Homo sapiens
aattgtgtgtttgggattaaataaaagtattatattcttgatttattatgaaaagagaaaatacatttaaagattaaaatgactagactcttctttcttcrgattaatgctattagtcccaaaccataacaaaacgatattttgagttttgtgtttcctatgaccagaagagcattaaagattgtgcatggtgtttcagct

SEQ ID NO: 303476 - DNA, 201 bp, Homo sapiens
cggtaagctgagatcgcgccactgcactccagcctgggcaacaagagcaaaactccatctcacaaacaaacaatagttacaaagcttttatcataacatgsaaaatatttatttcataatattaagtaaagatgctcaaaatactcagcatgcagaattgcatatgtattaaaaattacaactttgtaaaacaaaacatct

SEQ ID NO: 303477 - DNA, 201 bp, Homo sapiens
atgtacttctcactaattccaaaggaaaacattttattgttttataatttcttttctttgcctaatcatgacctttactcagggctattattacatggctycttgttgagtgtcaaggcatataggagtcattgtcatttaaaagaagagcgtgaaatgaacatggaagcaatgtgtggtgtgatttccttgacctctttt

SEQ ID NO: 303478 - DNA, 201 bp, Homo sapiens
agttataaaatggttagatttggctcttacacatggtcaggctcttccataacctgattgctcaccatgggcagaaagaactctgcaagcgagtaagatasaaggggaaatcaagtgactcgtggagctccattggtttaatattttacctttagctgcaatgacagaaactgttatttatttatattgaggcaacttcta

SEQ ID NO: 303479 - DNA, 201 bp, Homo sapiens
gcgggcggccagctcttattggtaaaatttattttatgagttataaaatggttagatttggctcttacacatggtcaggctcttccataacctgattgctsaccatgggcagaaagaactctgcaagcgagtaagatagaaggggaaatcaagtgactcgtggagctccattggtttaatattttacctttagctgcaatg

SEQ ID NO: 303480 - DNA, 201 bp, Homo sapiens
tctcaaactcctgggcccaagcagttctcccgcctcggcctcccaaagtgctggaattacaggcgtgagcccccatgcccggcctgtttgtaggccttctraaggtagatcagttatccatgtaaggaggaggggcagaattacttggtcttagttcataaatgggcaagtctatactattggatattcttcacccctttg

SEQ ID NO: 303481 - DNA, 201 bp, Homo sapiens
acgccacgcaatgctgcccgtgccatcagattctcttcagctgtgagctgagtcttttccagagtctcagttggccctttgaatgtttactttaaactccyttagcctggacgaatgctaattgtttggtaggagacgcttttcatttttctagaatcttcagatcattaggggagaggagtgttttggatgagtccttga

SEQ ID NO: 303482 - DNA, 201 bp, Homo sapiens
gggacaaatttggcaatggctggagacatttttggttgtcacactggggtggggtgtgtgctattattgtgtacaggtagaggccaggtatgctgccaagsctcctgcattgcacagggccgtcctctacaacaaaggactctccagccccaaacgtcagtagtgctgaggttgaaaaaccccggttgaaggcattgatgt

SEQ ID NO: 303483 - DNA, 201 bp, Homo sapiens
tactctctacgccacgcaatgctgcccgtgccatcagattctcttcagctgtgagctgagtcttttccagagtctcagttggccctttgaatgtttacttwaaactcctttagcctggacgaatgctaattgtttggtaggagacgcttttcatttttctagaatcttcagatcattaggggagaggagtgttttggatga

SEQ ID NO: 303484 - DNA, 201 bp, Homo sapiens
catagttcactgcagccttgaaatcctgggatcaagtgatcctcccgcctcagcctccctggtagctgggattacaggcatgatctagtgtgcctggcccyccaaacattttttttcactgagcatatattgtcttatgtaattagaaaaacaattctaggataataaaagagttgtagggtttacataagagacattaga

SEQ ID NO: 303485 - DNA, 201 bp, Homo sapiens
aaatttaacccacgccagccattgattttgtactggtgagacttggcacctttatgccttgtcactaatcatcagcgtttgcctgggagggaccagaagcycccttatctctacccagcaggagggcccagcaccctggatggaggggatgactttctccagggcctcccagaggggacaagaagagccttcatagctcag

SEQ ID NO: 303486 - DNA, 201 bp, Homo sapiens
gaggattgtgcacatctgagaacctctatccagaataatagtgtgcagaatgaaccactaaatgcatggatgaagtaaaaatgctgtattaaacacatcgmagacacaattcattgcaggacaccctgtttttgtataatactaagatacaaaagcactaccggttaattttaagacaacatctattgtagactgaactga

SEQ ID NO: 303487 - DNA, 201 bp, Homo sapiens
ttaatagactttattttttaaattaagagaaatgtctacttcatttgtcttatatcctagttctcgttaggtgtgggatcaaaatgtgttacgctagtagstagcgcacatccaggtttctctgcatgggtgttgtgtgtcctgaatcttcaggtgtgctgctggaacagcttgtggagcacagctgggtattcctcagag

SEQ ID NO: 303488 - DNA, 201 bp, Homo sapiens
aaattaagaagattgttatttacatgacagaagattgactatggtttttatttcagggctggctctaccaagtgacagtgtatgcaaaacttcactgtatkcttagtttttcttgaatgtatctcatgtaaggacaggtacatccgtctatccaagttgtggaaggctttgcgaagtacgttaattcttcgaggccactca

SEQ ID NO: 303489 - DNA, 201 bp, Homo sapiens; identical to SEQ ID NO: 63307

SEQ ID NO: 303490 - DNA, 201 bp, Homo sapiens
cactgtattctactcaccaaaattgaacctgtttatctttttggaagttgagtcttagtctgagagtatatgtgatttaagatatgctctctcctgactamcattttcaactggaaacctaactaatagttcttatagttagagagcccagtggatcggtgatggaaagcatggaaatgttttgggacttgccctatgtta

SEQ ID NO: 303491 - DNA, 201 bp, Homo sapiens
gcggtaagctgagatcgcgccactgcactccagcctgggcaacaagagcaaaactccatctcacaaacaaacaatagttacaaagcttttatcataacatsgaaaatatttatttcataatattaagtaaagatgctcaaaatactcagcatgcagaattgcatatgtattaaaaattacaactttgtaaaacaaaacatc

SEQ ID NO: 303492 - DNA, 201 bp, Homo sapiens
tctcacaattagataaattaagaagattgttatttacatgacagaagattgactatggtttttatttcagggctggctctaccaagtgacagtgtatgcaraacttcactgtattcttagtttttcttgaatgtatctcatgtaaggacaggtacatccgtctatccaagttgtggaaggctttgcgaagtacgttaattc

SEQ ID NO: 303493 - DNA, 201 bp, Homo sapiens
tctttcgcataggttggtccgatgccctggttgggtcctcaaacagacgaatctatcaaagggctttgtgagagggggaggaagaatatcctcttggttcygatagcatttaccagtgaccatattgaaacgctgtatgagctggacatcgagtactctcaagttttagccaaggaggtaaatgcacccatctgccttttt

SEQ ID NO: 303494 - DNA, 201 bp, Homo sapiens
tattgagcacctgctatattccaggcactgtttccagccatatcataggatatgggaatgaagaaaacagagaaaaatctttgtttgcagagagtagggakaaaagataataaacataatacatatgaaaatggtatggtagattagcaggcaatatatgttatagaagaaaataaagccaggtgagggctagggagtcag

SEQ ID NO: 303495 - DNA, 201 bp, Homo sapiens
tgtggctgtggggtttcctcagcatcctccaatctgtgacagtcctgatacttggcttgtctttcatcagcttgactttttttttttttttttttttttgrgacagggtctcactctgtcactcaggctggtgtgctgtggtgcagtcacgactcactgcagcctcgacctaccagacttgggtgagcctctcacctcagc

SEQ ID NO: 303496 - DNA, 201 bp, Homo sapiens
agtgaacgtaattataaaagaagtaacaggatttatcatctattaaagaagtgaagtacacgtttcatacctcacctcttctgttgctggtggctggcagyaggcatggcattgttgcaagggtcctctttagtaacaggagtcacaaccgctcccaagtcttcctctgtacagaggcaacagaagactctataaagggaa

SEQ ID NO: 303497 - DNA, 201 bp, Homo sapiens
ctgggaaaagccagtgtggaaggagctattttcttggcttcctttcaatagctgttaaaccatagattttacaccctccttccccactggatccttccctrcaacagggctattgttaaaagacacagagttgagtacaaacagtctgcaaattgtgttaagaatttggttctggaatatgtcacataacacaaattatat

SEQ ID NO: 303498 - DNA, 201 bp, Homo sapiens
gcattgctcttggggctggacatatttttcccctcttatcttcacagcagccctgcagaagtagccttatcactattttgcagatgagaaaagtgagactygcagcatctcagtgagtggcccaggcccagccatacagcctcttggtcccgtgtgggatttctgctcagatctctctggtttccgaacacgtactctcta

SEQ ID NO: 303499 - DNA, 201 bp, Homo sapiens
gcctcccaaagtgctgagattacaggcgtgagccaccgtttttattttgaggagtgtagctctgtcacccaggctggagtgcggtggtgtgatcatggctyactgcatccttgaactcctgggcttaagtgatcctcctgtctcagcctcccaagtagctaggactacaggtgcacaccaccacacccagctaattaaaac

SEQ ID NO: 303500 - DNA, 201 bp, Homo sapiens
ttgctgccgaggctggttttgaactcttggcttccagcagttctgccatggcttcccaaagtgctggtattacaggcatgagccatgagccacgagccacygtgcctggccagaaccaaaattttcttattgtgtgtttattgttttttgctatatgatcatgggtatgatgactgagtgctgtgtaacctgaggttagtt

SEQ ID NO: 303501 - DNA, 201 bp, Homo sapiens
caagattcaagagcagtaccgcaggattggaggcggatcccccatcaagatatggacttccaagcagggagagggcatggtgaagctgctggatgaattgycccccaacacaggtatggtgtttcttcattaacatgtaactagattagttctttcgaagtagttatgaaattcaaaagagtagtagatgctaaatgcttc

SEQ ID NO: 303502 - DNA, 201 bp, Homo sapiens
aaaattttcttattgtgtgtttattgttttttgctatatgatcatgggtatgatgactgagtgctgtgtaacctgaggttagttggggatgggcattagakaccttcttcatctggcagcctgccaagcagggcccattccatttctccttgcccctcccagcccctctccccacctcagccatatgcactgagggttggg

SEQ ID NO: 303503 - DNA, 201 bp, Homo sapiens
ttgttactcactcagtgctttgcagatcatattctaaaggaactggaccattttccacttgagaagagaagcgaggtggtcattctgttttctgctcactyactgccgatgtctgtaagtaagaacattttctgggatgacctagtgatagaggattgggtgatttcattttctaaatgtgtaaaatgggtccagcttcca

SEQ ID NO: 303504 - DNA, 201 bp, Homo sapiens
ctacactaggccaggggttgacattagttctgtaaagggttaggtagtaaatttttcaggctttgtaggccaaactctgtcttttgctgctattcaactcygctgttgtagtgtgagagcagccatagatattacataaacaatgaggggagctgtgttccagtaaaactttatttacaaaaacaggcagtaggggtgtat

SEQ ID NO: 303505 - DNA, 201 bp, Homo sapiens
ctcagtgctttgcagatcatattctaaaggaactggaccattttccacttgagaagagaagcgaggtggtcattctgttttctgctcactcactgccgatrtctgtaagtaagaacattttctgggatgacctagtgatagaggattgggtgatttcattttctaaatgtgtaaaatgggtccagcttccattatgtccta

SEQ ID NO: 303506 - DNA, 201 bp, Homo sapiens
agatttagtgcatgggctatagttcaccaaattctgttctagaggcatcatagacccacaggccaatcatgtcttagaggtttaatgaagagctgggatcrtattactttttcttgaggctgaccatatagagtagaatagaattattgtttattaattgacaagcttaagtttctgttacgtacatttaatatttcacgg

SEQ ID NO: 303507 - DNA, 201 bp, Homo sapiens
aggtggtcaacagaggcgacccatatcctcaggaggtaagcgccactgtccaaaaagtcatggaaaggctggagtactgcaacccctaccgactggtgtgrcaatccaaggtaagtggcttccacactggcgggcggccagctcttattggtaaaatttattttatgagttataaaatggttagatttggctcttacacat

SEQ ID NO: 303508 - DNA, 201 bp, Homo sapiens
tctttatcattctctaggctggtaggagtgctttagaaggttgtgaagcctttgaaatcacatgcaaaatgttggtatatagatatatatatatatatatwttttttttttttttctggagaatgtatcttgtgcttttaaaaagaggttcatcccctcccccaaaacagtgatttaaaacttcttaatgtggaaggcgag

SEQ ID NO: 303509 - DNA, 201 bp, Homo sapiens
tctctttatcattctctaggctggtaggagtgctttagaaggttgtgaagcctttgaaatcacatgcaaaatgttggtatatagatatatatatatatatwtattttttttttttttctggagaatgtatcttgtgcttttaaaaagaggttcatcccctcccccaaaacagtgatttaaaacttcttaatgtggaaggcg

SEQ ID NO: 303510 - DNA, 201 bp, Homo sapiens
attcgctgagttaacagagtcagccttaggacagtgcctgttctgtaccacccagtaagcgtaagtgagtttctttttctttcttttttttttttttttttgagacggagtctcgctctgtcgcctacggagtgcagtggcatgatctcagatctcggctcactgcaacctccgcctcctggattcaagcgattctcctgc

SEQ ID NO: 303511 - DNA, 201 bp, Homo sapiens
ctgcttcttgggttgcctgcagattcgctgagttaacagagtcagccttaggacagtgcctgttctgtaccacccagtaagcgtaagtgagtttctttttytttcttttttttttttttttttgagacggagtctcgctctgtcgcctacggagtgcagtggcatgatctcagatctcggctcactgcaacctccgcctcc

SEQ ID NO: 303512 - DNA, 201 bp, Homo sapiens
attaagtggttaatggaagaacatataacaaagttttgccaccttagatcgtagctaagttctcttttttcactttgacttgatcttttatatataaaggmgcaaacaagaaattgctactcagtggagaagaggggagtccacagctaatttgcaaagttgggaattggtagcattgttggcattttatggacagcttcc

SEQ ID NO: 303513 - DNA, 201 bp, Homo sapiens
atgttcagagaatttcttattagaatttgagcctgtttttattgttttttttttttttttttttttgagacggagtttcgctcttgttgcgcaggctggartgcagtggtgcgatctccactcaccacaacctctgcctcccaggttcaagcgattctcctgagtagctgggactataggcgtgcgccaccatgcctggct

SEQ ID NO: 303514 - DNA, 201 bp, Homo sapiens
catgcccagctaattttttattatttgtagagatggcgtctccctatgttgcccgggctggtctcaaactccttggctcaagcagtcctcccaccccagcyttccaaagtattgggattacaggcgtgagccactgcatctggctcaagtttccaagactatgctaggccctctttcctgtgcatttaaccattacttaca

SEQ ID NO: 303515 - DNA, 201 bp, Homo sapiens
cagtttggttttttggttttttttttttaaagagatggaggtattgctgtgttgactgggctggtctcaaactcctggcctcgagcagtcctctcacctcrgcctcccgagtgttgagattataggcatgagccacactgtgcccagcctatgaattcagtttatgatgtataatgacaaaattttgtattgagaacttgc

SEQ ID NO: 303516 - DNA, 201 bp, Homo sapiens
ccactcatctcctgttacctctcggcgtctccgaggacgcaagggctccagagcctggagcttgaaaacaggtgtgctaggtgattgctacctccatttcmcttcttcattaaacaaatctatgagtcttctccagttctctcaatccatttttactgggacgagagttgtcagttttaacttctgtgttaactttaattt

SEQ ID NO: 303517 - DNA, 201 bp, Homo sapiens
cctcatttgcttcagagctagacaaaacgggccactgagaaaaatactgagctgtgtctagtcacagcttggggctggcttttgtttttgttttttttttkattttccttcatcaaacagcatggtgcttgagatatgctgtaaagggagacagatcttttatgcttcattaaataactgagttttaagaatatgtttatt

SEQ ID NO: 303518 - DNA, 201 bp, Homo sapiens
aaaacgggccactgagaaaaatactgagctgtgtctagtcacagcttggggctggcttttgtttttgttttttttttgattttccttcatcaaacagcatrgtgcttgagatatgctgtaaagggagacagatcttttatgcttcattaaataactgagttttaagaatatgtttatttctttttgaaagaaattattctt

SEQ ID NO: 303519 - DNA, 201 bp, Homo sapiens; identical to SEQ ID NO: 63332

SEQ ID NO: 303520 - DNA, 201 bp, Homo sapiens
ccccactccctattactggtatacggatcaggtaaaaccaattttttaagtactcaacatttttttccactgtaatcgttctgtatatattgaaatttttraaaggggagaattcagggtagtactttggtatttgaatgagctatattcagtttgcaggttataatgtggtgtgtgaatattgccagctttgttttggcc

SEQ ID NO: 303521 - DNA, 201 bp, Homo sapiens
gatctgcccacctcagcctcccaaagtgctgggattataggcgtgagccaccgcttctggccaagtgtgagtttctaagctgccttcatgtctcatgcttkgcctcttccctcttccttcattgttcttccttggccacagcttataagctctctttatcattctctaggctggtaggagtgctttagaaggttgtgaagc

SEQ ID NO: 303522 - DNA, 201 bp, Homo sapiens
tcgtgtgacttgccaagaacttaatttcaaacactaggttccaaagagaattttcagaaaagggaaagtaaggaatgcatacagatatgtgactttaagawtgttagatgatcaaagtctaaacttactttttaacattttgaaaaaaggtctcttctttcttaccacatggcattgcttcttggaatttttctctccatt

SEQ ID NO: 303523 - DNA, 201 bp, Homo sapiens
ggaggctgaggtaggagaatcgcttgaacccaggaggcggaggttgctgtgagccaagattgcgtcactgcactccagcctgggcgacagagtgagactcygtctcaaaaaaaaaaaaaaaagatatttgtgtgtatgtgagtgtgtatttatccagaaagaacattggtaaaaatatcaatataaaactaaactaaagct

SEQ ID NO: 303524 - DNA, 201 bp, Homo sapiens
attaccagtgggtacttcaggggcagggagccatgtgggaggtctgaacttgaatgtttaaccttggagtttcctttagataagattaagtcatggctgggtgcagtggctcacacctgtaatatcagcgctttgggaggctgaggtaggaggattgcttgagcccaggagcttgagaccagtctgggcaactcagtgaga

SEQ ID NO: 303525 - DNA, 201 bp, Homo sapiens; identical to SEQ ID NO: 63333

SEQ ID NO: 303526 - DNA, 201 bp, Homo sapiens
ctggctaatttttgtatttttagtagagatggggtttcaccgtgttggccagactagtctcaaactcctgacctcaggtgatctgccctccttagcctccyaaagtgctgggattacaggcttgagccaccacgcccagccagatttccagtagttcttattgctgatgaatttttgtattatttccttagtgatggagct

SEQ ID NO: 303527 - DNA, 201 bp, Homo sapiens
ttttttatttcttaattttaaattttaatttatttattttgagacagggtcttgctctgttgctcaggctggagtgcagtggtgcagtttctgctcactgyaacctctgcctcctgggctctaacgatcctcccaagtaggggggaccacaggcatgcaccaccacacctggctaacttttatttatttttaatttttgta

SEQ ID NO: 303528 - DNA, 201 bp, Homo sapiens
tgacttgccaagaacttaatttcaaacactaggttccaaagagaattttcagaaaagggaaagtaaggaatgcatacagatatgtgactttaagattgttrgatgatcaaagtctaaacttactttttaacattttgaaaaaaggtctcttctttcttaccacatggcattgcttcttggaatttttctctccattgagtc

SEQ ID NO: 303529 - DNA, 201 bp, Homo sapiens
ctgttttctgtggtggccctgctctcagctgtgcttgggatctgcagtccatagccctctgttacctctccaggaaccaaacatctagttagctttagggktttggggggagcagtcactccactgcagggtgggaatctaggcaatctgctgctttaacagactctttttttaattttattttattgattttatttattt

SEQ ID NO: 303530 - DNA, 201 bp, Homo sapiens
tttcaccgtgttagccaggatggtcttgatctcccgatctcgtgatctgcccacctcgacctcccaaagtgctgggattacaggcgtgagccactgcgccyggcctactttccttttattttttatttcttaattttaaattttaatttatttattttgagacagggtcttgctctgttgctcaggctggagtgcagtggt

SEQ ID NO: 303531 - DNA, 201 bp, Homo sapiens; identical to SEQ ID NO: 63323

SEQ ID NO: 303532 - DNA, 201 bp, Homo sapiens
aaagtgctaggattataggcgtgagccaccacgcccagcccttgaatgttttcaaaagatccagattccttccttctctatttttttttttttttttttttgagacggagtcttgctcttgtcacccaggctggagtgcagtggtgcgatctcggctcactgcaagctccgcctcccaggttcacgccattctcctgcctc

SEQ ID NO: 303533 - DNA, 201 bp, Homo sapiens
caaagtgctaggattataggcgtgagccaccacgcccagcccttgaatgttttcaaaagatccagattccttccttctctatttttttttttttttttttttgagacggagtcttgctcttgtcacccaggctggagtgcagtggtgcgatctcggctcactgcaagctccgcctcccaggttcacgccattctcctgcct

SEQ ID NO: 303534 - DNA, 201 bp, Homo sapiens
ccaaagtgctaggattataggcgtgagccaccacgcccagcccttgaatgttttcaaaagatccagattccttccttctctatttttttttttttttttttttgagacggagtcttgctcttgtcacccaggctggagtgcagtggtgcgatctcggctcactgcaagctccgcctcccaggttcacgccattctcctgcc

SEQ ID NO: 303535 - DNA, 201 bp, Homo sapiens
cccaaagtgctaggattataggcgtgagccaccacgcccagcccttgaatgttttcaaaagatccagattccttccttctctatttttttttttttttttttttgagacggagtcttgctcttgtcacccaggctggagtgcagtggtgcgatctcggctcactgcaagctccgcctcccaggttcacgccattctcctgc

SEQ ID NO: 303536 - DNA, 201 bp, Homo sapiens
ccagcgtatgtctgatcaacttcaaagcccatgttttatttttgggtgcccaattagatagaataaatatcacaaattaaaatgatcagagttcattttgraaacctggattattaactaatgtttttatgagatggatgttattgaaatggagtggggaaataactaggatattaattacttatggacctcaatttttat

SEQ ID NO: 303537 - DNA, 201 bp, Homo sapiens
atccgcccacctcggcctcccaaagtgctaggattataggcgtgagccaccacgcccagcccttgaatgttttcaaaagatccagattccttccttctctatttttttttttttttttttttgagacggagtcttgctcttgtcacccaggctggagtgcagtggtgcgatctcggctcactgcaagctccgcctcccagg

SEQ ID NO: 303538 - DNA, 201 bp, Homo sapiens; identical to SEQ ID NO: 63327

SEQ ID NO: 303539 - DNA, 201 bp, Homo sapiens; identical to SEQ ID NO: 63325

SEQ ID NO: 303540 - DNA, 201 bp, Homo sapiens; identical to SEQ ID NO: 63328

SEQ ID NO: 303541 - DNA, 201 bp, Homo sapiens
ttgtttccaaggtgggattgggctccaattctcttcttctggttaatgaactagtaacatgggtggcatctgcctgtcctcaaataaatggtaacagcagracctgcttcttgggttgcctgcagattcgctgagttaacagagtcagccttaggacagtgcctgttctgtaccacccagtaagcgtaagtgagtttcttt

SEQ ID NO: 303542 - DNA, 201 bp, Homo sapiens
  misc_feature (1)...(201): n = A,T,C or G
aatgatcagagttcattttgaaaacctggattattaactaatgtttttatgagatggatgttattgaaatggagtggggaaataactaggatattaattanttatggacctcaatttttattaatcgatgcttgttctgtttacaaagataaggaatgaataaagtagtaaggtgactaatagttaatggccagaccataa

SEQ ID NO: 303543 - DNA, 201 bp, Homo sapiens
  misc_feature (1)...(201): n = A,T,C or G
gatggaaccaaggagaaaccatttaaaacaggtctaaaggtagagtctcttctcattaggaaaatgagactgcatttattaatgagttatgtcaattttcntgtgacttgccaagaacttaatttcaaacactaggttccaaagagaattttcagaaaagggaaagtaaggaatgcatacagatatgtgactttaagattg

SEQ ID NO: 303544 - DNA, 201 bp, Homo sapiens
  misc_feature (1)...(201): n = A,T,C or G
tttgttaaattagagaaatgtaaacatttgaatattacatgatcatagtggctcctttagcccttggagcttaattgtaattttcatttaaactctagggnagtgctgtgtctgatcgcttgatagtaattgtgtatcttctttcacttatatttaaaggtcgacgtgttgatgcccaatgttggtgagattgtgggaggc

SEQ ID NO: 303545 - DNA, 201 bp, Homo sapiens
aatatcacaaattaaaatgatcagagttcattttgaaaacctggattattaactaatgtttttatgagatggatgttattgaaatggagtggggaaataamtaggatattaattacttatggacctcaatttttattaatcgatgcttgttctgtttacaaagataaggaatgaataaagtagtaaggtgactaatagtta

SEQ ID NO: 303546 - DNA, 201 bp, Homo sapiens
tggcctttgctgggcccgggacttgaagggccaggccgggcttccccgagtccgtcgttcccccgggctgcgatggcggtggctccgggcccttcccctgscccgctgcgaaacctcccgattgcgctgagactcaggcgctgggacgggttcagacacagggtagcccctactcctgcagttcttcaaagtgatcgtcag

SEQ ID NO: 303547 - DNA, 201 bp, Homo sapiens
ctctgctccagtcgggtttcggcgctttccttagtgcctaccagagtgggcgccccgcgaatgtttggggaccgattgcagggagggagggagggagggtsctggcctttgctgggcccgggacttgaagggccaggccgggcttccccgagtccgtcgttcccccgggctgcgatggcggtggctccgggcccttcccct

SEQ ID NO: 303548 - DNA, 201 bp, Homo sapiens
tgaacacaggaggcagaggttgcagtgagccaagatcacgccactgcactccaccctgggcaacagagcaagactccgtctcaaaaaaaaaaaaaaaaaaagagaagaatagagaaaaaaggaaaaaaaagaatcgtgtcctgtcagtttctcaaagttggcttctgctgttggcaggttgggtacttaacagtgacagtg

SEQ ID NO: 303549 - DNA, 201 bp, Homo sapiens
ggttataaaagggaagggattgaccccactccctattactggtatacggatcaggtaaaaccaattttttaagtactcaacatttttttccactgtaatcrttctgtatatattgaaatttttaaaaggggagaattcagggtagtactttggtatttgaatgagctatattcagtttgcaggttataatgtggtgtgtga

SEQ ID NO: 303550 - DNA, 201 bp, Homo sapiens
acatgtattcttacaatgtctagttgttaaaaggatgaactattgaatgttttcttttttttcttttttttttttttgaaaaggagtctcacactgtcacycaggctggagtgcagtggtgcaatctcagctcactgcaacctctgcctcccggattcaagagattcttctgcctcagcctcccgagtagctgggaccaca

SEQ ID NO: 303551 - DNA, 201 bp, Homo sapiens
tgcctcccggattcaagagattcttctgcctcagcctcccgagtagctgggaccacaggcgtgtgccaccacacctggccaatttttgtatttttagtagagacagggtttcatcatattggccaggctggtctcgaactcctgacctcatgatccgcccacctcggcctcccaaagtgctaggattataggcgtgagcca

SEQ ID NO: 303552 - DNA, 201 bp, Homo sapiens
tgcgatctcggctcactgcaagctccgcctcccaggttcacgccattctcctgcctcagcctcctgagtagctgggactacaggtgcccgccaccacaccyggctaattttttgtatttttagcggagacggggtttcaccatgttagccaggatggtctcgatctcctgacctcgtgatccgcccacctcggcctcacaa

SEQ ID NO: 303553 - DNA, 201 bp, Homo sapiens
tctgtgtccttggaggtgaccagggccactgcaggcatggtgctaggtgggtgagactcagtgtatggcgcggtgttccctgcctggggcaggaactctgytccagtcgggtttcggcgctttccttagtgcctaccagagtgggcgccccgcgaatgtttggggaccgattgcagggagggagggagggagggtgctggc

SEQ ID NO: 303554 - DNA, 201 bp, Homo sapiens; identical to SEQ ID NO: 63324

SEQ ID NO: 303555 - DNA, 201 bp, Homo sapiens
aagtctaaacttactttttaacattttgaaaaaaggtctcttctttcttaccacatggcattgcttcttggaatttttctctccattgagtcagattgctrggttttcaattcttgtaaagataaaagttacctttcctcagttacagtgagctcatgaccagggggctcctgagagggcttttggtgaatttaccacaat

SEQ ID NO: 303556 - DNA, 201 bp, Homo sapiens
ccctgattgaagttgacatgctttgttaaattagagaaatgtaaacatttgaatattacatgatcatagtggctcctttagcccttggagcttaattgtarttttcatttaaactctagggcagtgctgtgtctgatcgcttgatagtaattgtgtatcttctttcacttatatttaaaggtcgacgtgttgatgcccaat

SEQ ID NO: 303557 - DNA, 201 bp, Homo sapiens
accactcttaaggggaaatctttcatttctggattatcgggtgcctcgttttgcagctcctgaaaactgacaacaccgtttagatgaacgtttgcagaatrtcactgttaacaacagaatgtcactgttaacaaaagtgtagcattctgatttgggaactgatagtttggctctttcaatttcaatgatacaaaaggaggg

SEQ ID NO: 303558 - DNA, 201 bp, Homo sapiens
ccagccagatttccagtagttcttattgctgatgaatttttgtattatttccttagtgatggagctggggttttttggccacatgcaacagccccttcctstactcatctcctctctccttcatcccccaaacaaaagctagccttttaagtaccatgttctggaaggtattgaagaactgtggggtcatggaaaaggctt

SEQ ID NO: 303559 - DNA, 201 bp, Homo sapiens
tctcaggttcaagcaattctcctgcctcagcctcctgagtagctgttatcacaggtacctgccaccacacctggctgatttttgtaattttagtagagacrgtgtttcaccatgttggcccgtctgctctggaactcctggcctcaggtgatccactgtcttggcctcccaaagtgctgggattacaggtatgagccgctg

SEQ ID NO: 303560 - DNA, 201 bp, Homo sapiens
aaatttgttcttgtttaaaatgactattgaaagtataaaaatttttaaatgctcttttaatggttagcaattatagtgatgaagatgcgtccagtaaatayttgtcaagttgagttttaattatttagtgaaaatcaagggatgttactataggaggttgacatctgagtctgaaacttggccatagttttgactcttata

SEQ ID NO: 303561 - DNA, 201 bp, Homo sapiens
ttgaaaataaaatattttacaaatactgagtagtggtattaccagtgggtacttcaggggcagggagccatgtgggaggtctgaacttgaatgtttaaccktggagtttcctttagataagattaagtcatggctgggtgcagtggctcacacctgtaatatcagcgctttgggaggctgaggtaggaggattgcttgagc

SEQ ID NO: 303562 - DNA, 201 bp, Homo sapiens
tgcgtttagtgatatgactttgaaattttctttataactctgctgctctctttgcattctctcttcttttgcaacccgccccctctccccacccattactrtgtatttcttgggaaaaccctggtggattgtcctgtggaacttctcacattatggatttggttgtttgcatccttgtggtgtcctttagcatgttcttct

SEQ ID NO: 303563 - DNA, 201 bp, Homo sapiens; identical to SEQ ID NO: 63329

SEQ ID NO: 303564 - DNA, 201 bp, Homo sapiens
aatatcagcttttggctgttggggtctttatgcttagattgttccagttgccttatacttgagatgttattttgattttaagtattgtacaatgttcaagractgtcttttctctcctccctacccaaggctttgatgacagtagggaaagaaccatttcctaccatttacgtagattcacaaaaagaaaatgagaggtgg

SEQ ID NO: 303565 - DNA, 201 bp, Homo sapiens; identical to SEQ ID NO: 63330

SEQ ID NO: 303566 - DNA, 201 bp, Homo sapiens; identical to SEQ ID NO: 63331

SEQ ID NO: 303567 - DNA, 201 bp, Homo sapiens; identical to SEQ ID NO: 63336

SEQ ID NO: 303568 - DNA, 201 bp, Homo sapiens; identical to SEQ ID NO: 63335

SEQ ID NO: 303569 - DNA, 201 bp, Homo sapiens
gtcccagctactcaggaggctgaggcaggagaattgcttgaacacaggaggcagaggttgcagtgagccaagatcacgccactgcactccaccctgggcamcagagcaagactccgtctcaaaaaaaaaaaaaaaaaaagagaagaatagagaaaaaaggaaaaaaaagaatcgtgtcctgtcagtttctcaaagttggct

SEQ ID NO: 303570 - DNA, 201 bp, Homo sapiens
tggagcttaattgtaattttcatttaaactctagggcagtgctgtgtctgatcgcttgatagtaattgtgtatcttctttcacttatatttaaaggtcgaygtgttgatgcccaatgttggtgagattgtgggaggctcaatgcgtatctttgatagtgaagaaatactggcaggttataaaagggaagggattgacccca

SEQ ID NO: 303571 - DNA, 201 bp, Homo sapiens
gattacaggcgtgagccaccgcgcccagccaaccagtgtgcttcttaaatgttcaaccagtcactgtgccaatatcagcttttggctgttggggtctttaygcttagattgttccagttgccttatacttgagatgttattttgattttaagtattgtacaatgttcaagaactgtcttttctctcctccctacccaaggc

SEQ ID NO: 303572 - DNA, 201 bp, Homo sapiens
tccttggaggtgaccagggccactgcaggcatggtgctaggtgggtgagactcagtgtatggcgcggtgttccctgcctggggcaggaactctgctccagycgggtttcggcgctttccttagtgcctaccagagtgggcgccccgcgaatgtttggggaccgattgcagggagggagggagggagggtgctggcctttgc

SEQ ID NO: 303573 - DNA, 201 bp, Homo sapiens
ataagctcagaaaggttaagtaaattctccagagtcaccctgccttttaaggtacaaaatccaacattccagcgtatgtctgatcaacttcaaagcccatrttttatttttgggtgcccaattagatagaataaatatcacaaattaaaatgatcagagttcattttgaaaacctggattattaactaatgtttttatgag

SEQ ID NO: 303574 - DNA, 201 bp, Homo sapiens
aaagacgttgggttttttcaccctcccctgattgaagttgacatgctttgttaaattagagaaatgtaaacatttgaatattacatgatcatagtggctcytttagcccttggagcttaattgtaattttcatttaaactctagggcagtgctgtgtctgatcgcttgatagtaattgtgtatcttctttcacttatattt

SEQ ID NO: 303575 - DNA, 201 bp, Homo sapiens
ttctcttatttatgcctgaaaattagatgttttcagtagattcctttattgttttgtatacatttatttaaaacatttattatgtcgacagtgaatgtcartgaatcaaaacatcacattgtataccataaacatgcaatttttatttgtttattataccttaataaggctagagggagaaaacttttgtggaaaatttcc

SEQ ID NO: 303576 - DNA, 201 bp, Homo sapiens
ccaccatgcctggcctactttcctttcagaagggacatagagaaataatgttttagagttatgaggctagttctttaggggttcattttattacacagttragtaaatgcatgttgaatgaattctgtcccaactgaatgccagcagatgggggacccaggcctggctacgcttcatgatgttggtcaagtgatttaaccc

SEQ ID NO: 303577 - DNA, 201 bp, Homo sapiens
aagcaagtgctccacttatgacaaaggaattcatttattaattaattttatctagcaatatctgaaattcttctgggtgtttctcattatcagttttacaytaagaaagaagacttggatttttttttgttttgttttaaaccatgccaatacagtgaaatgcgtttggttctgagctgcagtagaggggctgtctccagt

SEQ ID NO: 303578 - DNA, 201 bp, Homo sapiens
gttgcgatccaagttgtaaatgttaatgaagtcttgtttgacctcaggatatcccagaagctcctgagagactgatgacagacaccattaatgaaccaatyttgctgtgtcgatttcctgtggagatcaagtccttctacatgcagcgatgtcctgaggattcccgtcttactgaatctgtcagtttctgtttcaaagagt

SEQ ID NO: 303579 - DNA, 201 bp, Homo sapiens
tttatcattctctaggctggtaggagtgctttagaaggttgtgaagcctttgaaatcacatgcaaaatgttggtatatagatatatatatatatatatatwttttttttttttctggagaatgtatcttgtgcttttaaaaagaggttcatcccctcccccaaaacagtgatttaaaacttcttaatgtggaaggcgagaa

SEQ ID NO: 303580 - DNA, 201 bp, Homo sapiens
gtgtgtgtgaataactgggtgtattctatacatatggctttataacttacctattaacttaaggtcattaatgcaatgtcatcaaatactcttcggatcayctagattgttgcacattatcctataatatgagatgccacaatttatttacacagtcgacaattgtaacccagcttgcttttggcttttactgttttacat

SEQ ID NO: 303581 - DNA, 201 bp, Homo sapiens
ttcccttcacagcagtacctagattagtgcttgattgagtaaatgggagaaagtgaatgtacagcactgggatgggaaccttgaggccattgcagactccygcctgcacagaggtcatgtgagagcagaatgtggaaggcttggaagccttcacttcacctggaggttctgagttaatgatcagagagcttgtttcaggag

SEQ ID NO: 303582 - DNA, 201 bp, Homo sapiens
gatgctgaggtaggaagattccttgagcccaagagttcaatgctgcaatgagctatgattgtcctactacaccctagcctgagtgacagagtgaaaccctyctctcaaaaaaaaaaaaaaaaaaaaaactaataaaactttatactagaagaaaacatagggaaaatgttttaggacattggtctaggcaaagattttatg

SEQ ID NO: 303583 - DNA, 201 bp, Homo sapiens
agactccatctcaaaaaataaagcagcaaggttcaggaactcaggcttattttaaaaaaaagaaaatgaagaagaagaaagaaggaaaaggggctggatayggtagctcatgcctgtaatcccagtattttgtgaggccaaggagggaggattgcttgacctcaggagttcaagagcatcctgagcaaactagcaagacct

SEQ ID NO: 303584 - DNA, 201 bp, Homo sapiens; identical to SEQ ID NO: 63353

SEQ ID NO: 303585 - DNA, 201 bp, Homo sapiens
tgatattcttcctgcacagggcctttgtccctgctcttttctctgccaggggcattccttacgtaggtatctatctgctcccctttcactacaaaggcctytactcagacaacaccttattaccctgacctttcctgactcattctgtttctgaccacttctccttcctggagatcttcatatctccttaccttgctttgc

SEQ ID NO: 303586 - DNA, 201 bp, Homo sapiens
gggcaacatgctcattttagagaatttgctttcaagtcatgtaatttatgattgaaccttgggtaagaatctcttgctcatggaaacctaactcagctggkggttttcttcctgctactttgcagcccaagttcagaagtagatttttaatgatagaagtcaccataggaagacactctcctttgcactaactgggggttc

SEQ ID NO: 303587 - DNA, 201 bp, Homo sapiens; identical to SEQ ID NO: 63354

SEQ ID NO: 303588 - DNA, 201 bp, Homo sapiens
tccactccgcccgtaccttctgcacctcagcccacctccctgggcttctgccactctggccccttgatattcttcctgcacagggcctttgtccctgctcytttctctgccaggggcattccttacgtaggtatctatctgctcccctttcactacaaaggcctttactcagacaacaccttattaccctgacctttcctg

SEQ ID NO: 303589 - DNA, 201 bp, Homo sapiens
ataaattaactattctttgcattggtggatttatttttttaaataaaacagatctttgcaaatgaaactcttagaaccctatgcctttgctacaaggaaaytgaagaaaaagaatttacagaatggaataaaaagtttatggctgccagtgtggcctccaccaaccgggacgaagctctggataaagtatatgaggagatt

SEQ ID NO: 303590 - DNA, 201 bp, Homo sapiens; identical to SEQ ID NO: 63358

SEQ ID NO: 303591 - DNA, 201 bp, Homo sapiens
atcgcagcaatcaaatagactttcaaagcgttatgatagtgctgtttttatttgacatatattatttttcagactactaaattctcaatcatatgaagtaytgagtaaggttaattagcatctaggaaatgcaagaggttggaaatccatcttcagaatgcatttaaatgttttctgtcttctagatctttgttgttctta

SEQ ID NO: 303592 - DNA, 201 bp, Homo sapiens
gagagataattttgggaacaaaaccttaccttctatgggagatgtaggatacatcagtcaatcgcagcaatcaaatagactttcaaagcgttatgatagtrctgtttttatttgacatatattatttttcagactactaaattctcaatcatatgaagtattgagtaaggttaattagcatctaggaaatgcaagaggttg

SEQ ID NO: 303593 - DNA, 201 bp, Homo sapiens
caagaacaaaactccatctcaaaaaaaaaaaaagaaaaaaaaagttaagacgagacttctcccttgccactcctaccccctcacccccagttaaatatgaytttcacaaaagatttagagcaactcttttttaggtatcataatacaaaacttccttggtgtccagttaagtttgcaatgagataatttcaggagccactg

SEQ ID NO: 303594 - DNA, 201 bp, Homo sapiens
tttggaaaagctattttaaatattaaagcattttaaacatttaacttataaaataaaatcagtttatttactacaggacttctcacagcctttaatgtacmagcaaatccaccgaacttccaagagagggttgcaaggtgctgtcttctgcaagtgtgtctgtccatggagctctgttttcatattttcatggtatctcat

SEQ ID NO: 303595 - DNA, 201 bp, Homo sapiens
tcctgttcttttttgctttccattggcatggaatatcttcttcaatcccttcattttcagtccaggtggagtgtctgttgtaggcaacagatcactgggtyttttttttttttaaatctattcagccactctatatcttttgattgacagtttagcccatttacattcgatgttatattgataagtaaggacttactcttg

SEQ ID NO: 303596 - DNA, 201 bp, Homo sapiens
cagatttctaaaattgagtaaaaacgtgtttgcggttcaattgcagacaaagacatactggttactttctccaggctccccacagtattggcagaagtgtraaattaagagatcaaggtcatttctggtaacccctcactgcacctactcgaggtctgatgccaccctctctgtctgaatcatccaaatcaaaattggcca

SEQ ID NO: 303597 - DNA, 201 bp, Homo sapiens
tggccttttctgtcttcttgagaaatcttgtctgtttttcttctcagccttcctgaaatgcgtaacagtggttctgaacagtgttctagaaccctggtggyggggatgtgtcacaagtcatctgtgtgctaaagtaaaccattaaaagcacatgcatttgcaaattaccaccaaatagaatggattcaagagtaccttatg

SEQ ID NO: 303598 - DNA, 201 bp, Homo sapiens
aattaccaccaaatagaatggattcaagagtaccttatgtaaggtcttatctacctactttgagaacgcctttttgagtggaatgagctgttctgattgcmtatgtgattacagtgcttatgagtggctttatatttccatttttattttcccttttgataagattgcacttgagctacaaagataccaggaacattttca

SEQ ID NO: 303599 - DNA, 201 bp, Homo sapiens
gccatgcacataagtggcccccataaactcttccttacatgacctagatgaaaagaatgtatcaaagtcattcatcattgcttccttcagaggtcaatacrattttcatgcccccctttaatatgtttacatccattaaagagcaaaattttagcattttctctgtgacttgcatattttccagaatctataacatccaga

SEQ ID NO: 303600 - DNA, 201 bp, Homo sapiens
tcggtgttatttgtgtgttttgttttggacaggctgacattctcctgctgtctagctctgagcctaacagcctctgctatgtggaaacagcagaactggaygggtaagtgtgtctcgatgggtctgatttaaagctggcctttgaaggcacattcattccactgaaatcggggcattgtggaccagacggcttgatatctg

SEQ ID NO: 303601 - DNA, 201 bp, Homo sapiens
tttacaggaacactattttggagaaacacaagttttcctttggatgctgataaaattttgttacgtggctgtgtaattaggaacaccgatttctgccacgkcttagtcatttttgcaggtacgttcagagtttcttgggaaattaatcagctatgatctttaaagacttagaggggattgcttttctgtcctttgtccatc

SEQ ID NO: 303602 - DNA, 201 bp, Homo sapiens
cttcaaggatttgaatataagacaccaccttctctttggagagataattttgggaacaaaaccttaccttctatgggagatgtaggatacatcagtcaatygcagcaatcaaatagactttcaaagcgttatgatagtgctgtttttatttgacatatattatttttcagactactaaattctcaatcatatgaagtattg

SEQ ID NO: 303603 - DNA, 201 bp, Homo sapiens
atatgtgtctgagccctttatcaactgctgagcagcgtccagacagatatgaataatatcgaggttattatctgtgtcagagaaaggaacagatttttaargtctttaccaataggcaatttatttatttatttttgagacagagtctcactctgtcgcccaggctggagtgtagtggtgctatctcagctcactgcaacc

SEQ ID NO: 303604 - DNA, 201 bp, Homo sapiens
aaagacttaattgtgagttttagccttaataactttttctttgatattctaagcagaattgaaatttttattaagttttattgaatatttgatctcatgcytaagagataattgtaacttcagcatttgacactggcacaatggaagaaggttatttcttttattcaccaaaataggagcagaacagaagttgccattatg

SEQ ID NO: 303605 - DNA, 201 bp, Homo sapiens
acataagatcctaacatgccctgccagaacagaatggtgaggttgagaatgaacttccctagggaaaattcctgagtattcgtgaatcctatataaagccktcagtcgtgagacggcagcctcacccttgagagcacctgccccggcctgcccttgtgcccacccacgaccttaccttgcactatggtggggcagttggga

SEQ ID NO: 303606 - DNA, 201 bp, Homo sapiens; identical to SEQ ID NO: 63362

SEQ ID NO: 303607 - DNA, 201 bp, Homo sapiens
ctgaagttccaaggtgaacagagtttgaaaatagaaacagctaattatttaggcttcatgtccaggtatggctaatgtaactttggatgattaacttccaytttgaactcaaaaatttgttcatttaattcattttttccccattcctttagagaaaccaatttaaaatttaagatgtcacttgaaatcacagaccagtac

SEQ ID NO: 303608 - DNA, 201 bp, Homo sapiens
tgttgggtgcaatattaacaattttaaatgcaaatttctttggataaattatttctatattctgtaaatctgagatttaatgtatattttgtttaaaaaaatgatttagtaaaatctttgaaaagtatgatcttctaaagtatttaaattggcttttgttgttgttgttatttttaagaatagggtatgtgacagaagaat

SEQ ID NO: 303609 - DNA, 201 bp, Homo sapiens
caattcctattgattaaaaccagaaagacttttgtatgtgattaattatgtgaatcttatatttttaaaaggttttattgaatgtgaagaacccaataacmgactagataagtttacaggaacactattttggagaaacacaagttttcctttggatgctgataaaattttgttacgtggctgtgtaattaggaacaccga

SEQ ID NO: 303610 - DNA, 201 bp, Homo sapiens
agctactggagaggctgaagtgggaggattgcttgacctgggacgttgaggctacagtgagtcgtgatggcactgctgtactctagcccaggtgacagagsgggaccctgtctcaaaaaaaaaacaaaaaaaacaaagcacaacaaaacaaatatatacaaattattattgctagtgaaaattaatgtcttgtctggaaat

SEQ ID NO: 303611 - DNA, 201 bp, Homo sapiens
gcattttgggaggccgaggcaagtggattgcttgagcccagcagttcaagaccagcctggacaacatggctaaaccccatctctacaaaaaatacaaaaaaattagccaggcatggtggcacatgcctgtagttctagctactggagaggctgaagtgggaggattgcttgacctgggacgttgaggctacagtgagtcgt

SEQ ID NO: 303612 - DNA, 201 bp, Homo sapiens
atgtatattcagcttgatagaaacaatttcagatacagacattttaaaaggcactggagggaatgataaaatgtcaacacctgttgtttctcctgtggatrgtgggattatgggaattttccctcattctccaccaatgtttcttttttagtttatattactgtttataagtcaagataaaacaaagaagttttaatcttg

SEQ ID NO: 303613 - DNA, 201 bp, Homo sapiens
gtggctcacgcctataatcccagcactttgggaggccgaggtgggcgggtcacctgaggtcaagagttggagaccaacctggccaacatggtgaaaccccrtctcaacaaaatacacaaaaattagccagacatggtggcgtgtgcctgtaatcccagctacttgggaggctgaggcagaagaatcacttgaacctgggag

SEQ ID NO: 303614 - DNA, 201 bp, Homo sapiens
cgggaggctgaggcaggagaatcgcttgaacctgggaggcagaggttgtggtgagccgagactgcgctattgcactccaacctgggcaagactttgtctcaaaaaaaaaaaaaaaaaggaggggatttgcttgtatgtttttatctttatctttggttattttttcatgttgacattaagagtagcgataacagggctggg

SEQ ID NO: 303615 - DNA, 201 bp, Homo sapiens
tgctgaaaatataggatttgcttgtgaacttctgactgaagacaccaccatctgctatggggaggatattaagtgagtaaaagcctgcagtatgaaattaygtaatagctcatctttgcaaatgcaagactgtctgtagaagatagcagatatgaagaaataggggttacgatgtgtcacttggggcagtttcctcatgtt

SEQ ID NO: 303616 - DNA, 201 bp, Homo sapiens
gcttgaacccaggaggcagaggttgcagtgagccaagactgcgccattgcactgcagcctgggtgacagagtgagacttcatctcaaaaaaaaaaaaaaaagagagagaaagaaatataactatttcttacctcaagaatttagaccttaaaattctagacacaaaataactgacttctaattccagaatatcaagagaga

SEQ ID NO: 303617 - DNA, 201 bp, Homo sapiens
aaggattacttgagcctgagaagttgagactacagtgagccatgtttgtgccactgcactccaccctgggtgacagagcaagaccctttctccaacaacamaaaagaacacacacacacacacacacacacacacacacacacacacacaaagaaattgttggtcataaagtagtcgagtgaaattattcaagtgtcaaaa

SEQ ID NO: 303618 - DNA, 201 bp, Homo sapiens
agtagtattagtgcctttatgtactttgtaaaagctgtcatttcttccaaccacatcaataacaatatacagaaagtttagccaagtatggggcacacacyggtagtcccagctacgtgggaggctgagacggaaggattacttgagcctgagaagttgagactacagtgagccatgtttgtgccactgcactccaccctg

SEQ ID NO: 303619 - DNA, 201 bp, Homo sapiens
atgttcttttttttattttattttttatttttgagacagagttttgctttatcacccaggctggagtgcggtggcacaatttcggctcactgcaacttccrccttccgggttcaagcaattctgctgtctcctgagtagctgggactacaggtgcacaccaccatgcccggctgattttttgtattttagtagagacgggg

SEQ ID NO: 303620 - DNA, 201 bp, Homo sapiens
agaccctttctccaacaacaaaaaagaacacacacacacacacacacacacacacacacacacacacacaaagaaattgttggtcataaagtagtcgagtraaattattcaagtgtcaaaaaataatctgagcatttgctaacattcacgtttagcagtgtagtctggaagaagtgaaggaatcatgacccaccatgtttc

SEQ ID NO: 303621 - DNA, 201 bp, Homo sapiens
ctttctgctggtcttgccatcggccatgcttattgggaagcacaggtgggcaattcctcttggtacctctatgatggagaagacgatacaccctcctaccrtggattcctcattttctggggctatatcattgttctcaacaccatggtacccatctctctctatgtcaggtaaggctgtcctctctggcattttgcttta

SEQ ID NO: 303622 - DNA, 201 bp, Homo sapiens
atagtgggaaaaccagatttaaaagaactaaaattgattacttgatgaactacatggtttacacggtatttatttttcatctcagtagatctctcatctarattgctgtcttttgcactaatattatcgtatgtttttctaatacaaaatcttacctctttaggtggaatagaaaaattattgggcactccaagcttcaaa

SEQ ID NO: 303623 - DNA, 201 bp, Homo sapiens
ctgggaaatcctccaaacatctaagttaccagataccagcccagggcgaaccttgcaagccggccttcggaggaagcagtctcagacctgctatgtttgcycttttctgcccacgtggtgaccccaaatattaagcactccttctatttcccaatgaaaaattttttcaagtatttagttcaatttgaatgcatacttcta

SEQ ID NO: 303624 - DNA, 201 bp, Homo sapiens
agtctcagacctgctatgtttgcccttttctgcccacgtggtgaccccaaatattaagcactccttctatttcccaatgaaaaattttttcaagtatttarttcaatttgaatgcatacttctaatacttattctttgattgcatatacatgtttaaaatcacataaaaataataatttaagaaacattttcccctgcttt

SEQ ID NO: 303625 - DNA, 201 bp, Homo sapiens
ttttctgcccacgtggtgaccccaaatattaagcactccttctatttcccaatgaaaaattttttcaagtatttagttcaatttgaatgcatacttctaawacttattctttgattgcatatacatgtttaaaatcacataaaaataataatttaagaaacattttcccctgctttctcatttcatgaaaattgtatttga

SEQ ID NO: 303626 - DNA, 201 bp, Homo sapiens
ttccacgacaaagttgtgagatatagcacttttggactccatgtccagaaatttaaatttgtctctggaaattttattcccacttgcgaatctccaagtaycactaggatggttgactttttattccttccataaatatatgctcataacttctacgacataatacttatcatattgcttcttaagtgatcttattttaca

SEQ ID NO: 303627 - DNA, 201 bp, Homo sapiens
atttgtctctggaaattttattcccacttgcgaatctccaagtatcactaggatggttgactttttattccttccataaatatatgctcataacttctacracataatacttatcatattgcttcttaagtgatcttattttacaatgtcatgcaatacttatgacattacaccttaaggaataatcgcccaaatataggt

SEQ ID NO: 303628 - DNA, 201 bp, Homo sapiens
cttaagtgatcttattttacaatgtcatgcaatacttatgacattacaccttaaggaataatcgcccaaatataggtgaaattttcttgccctgaaaaaawaattctggctgggcgagggccacctgtaatcccagcagtttgggagactgaggcatgcagatcacttgaggacaagagttcgagaccagcctggccaaca

SEQ ID NO: 303629 - DNA, 201 bp, Homo sapiens
agcacattttctatttcttgcctgagtcaaggatggtttagtttctggtccagtattcaagccacatcatgcctaacttgctgaattctgttttcaggatkgttagatcctttatttcttgctaactccccaaaatgagtgctctgtttttctctggtttcccaacagattggcttggatacttcttattggacttttgtg

SEQ ID NO: 303630 - DNA, 201 bp, Homo sapiens
ttttacaatgtcatgcaatacttatgacattacaccttaaggaataatcgcccaaatataggtgaaattttcttgccctgaaaaaataattctggctgggygagggccacctgtaatcccagcagtttgggagactgaggcatgcagatcacttgaggacaagagttcgagaccagcctggccaacatggtgaaactcgtc

SEQ ID NO: 303631 - DNA, 201 bp, Homo sapiens
ttttgctttaatggaagaatgttgtaccttctcccaacatagtgccttcatttctagtgatcactgtttcaaaggtcacaaagaacaggtaagaaaatcaygttcatttcagaattgagggtaagagaggaaaaggaaattaacatttgagtatccactctgtgccaggcaccttttatctcatcctgtttgcagataagg

SEQ ID NO: 303632 - DNA, 201 bp, Homo sapiens
gatgcggacccaaagtaaaaggaggctagaagctaagaaagagcagcggcagaaaaactttgtggacctggcctgcgagtgcagcgcagtcatctgctgccgcgtcacccccaagcagaaggccatggtggtggacctggtgaagaggtacaagaaagccatcacgctggccatcggagatggggccaatgacgtgaacat

SEQ ID NO: 303633 - DNA, 201 bp, Homo sapiens
tgccactgcattccagcctggcaacagagtgagactccatctcaaaaaaaaaaaaaaaaaaaatatatatatatatatatgtgtgtgtgtgtgtgtgtgtrtatacatacacacactaaacactgtgtacatcacacgccacatatatatacatgttttggttataaaatcaaatttatttgtcaaatataatcagtgaca

SEQ ID NO: 303634 - DNA, 201 bp, Homo sapiens
tcagcccacctccctgggcttctgccactctggccccttgatattcttcctgcacagggcctttgtccctgctcttttctctgccaggggcattccttacrtaggtatctatctgctcccctttcactacaaaggcctttactcagacaacaccttattaccctgacctttcctgactcattctgtttctgaccacttctc

SEQ ID NO: 303635 - DNA, 201 bp, Homo sapiens
cttgaacctggaaggcagaggttacagtgagccgagatcgtgccactgcattccagcctggcaacagagtgagactccatctcaaaaaaaaaaaaaaaaawaatatatatatatatatatgtgtgtgtgtgtgtgtgtgtatatacatacacacactaaacactgtgtacatcacacgccacatatatatacatgttttgg

SEQ ID NO: 303636 - DNA, 201 bp, Homo sapiens
tgcttgaacctggaaggcagaggttacagtgagccgagatcgtgccactgcattccagcctggcaacagagtgagactccatctcaaaaaaaaaaaaaaawaaaatatatatatatatatatgtgtgtgtgtgtgtgtgtgtatatacatacacacactaaacactgtgtacatcacacgccacatatatatacatgtttt

SEQ ID NO: 303637 - DNA, 201 bp, Homo sapiens
tctccagcctgggtgacagagtgagaccctctctcaaaaaaattataatgaaaataaaataaagaaacaaaaataggtaagatggtaaactttgtttttttgtcacaattttttttaagtcaaagttatctcagagtcaagggcctatttagggtcttacactttaaacactgaaatttggtttcccctagttctcttctt

SEQ ID NO: 303638 - DNA, 201 bp, Homo sapiens
agaccatcctggccaacatggtgaaaccctgtctctactaaaaatacaaaaattagctgggcatggtggtgcccgtctgtagtcccagctacttgggaggmtgaggtggaagaatagcttgaacctaggaggtggatgttgcagtgagctgagataacaccactgcactccagcctggtgacagagcgagactctgcctca

SEQ ID NO: 303639 - DNA, 201 bp, Homo sapiens
gggggctgaggcgggtggatcatgaagtcaagagattgagaccatcctggccaacatggtgaaaccctgtctctactaaaaatacaaaaattagctgggcrtggtggtgcccgtctgtagtcccagctacttgggaggctgaggtggaagaatagcttgaacctaggaggtggatgttgcagtgagctgagataacaccac

SEQ ID NO: 303640 - DNA, 201 bp, Homo sapiens
gtggtggctcatgcctgtaatcccagcactgtggggggctgaggcgggtggatcatgaagtcaagagattgagaccatcctggccaacatggtgaaacccygtctctactaaaaatacaaaaattagctgggcatggtggtgcccgtctgtagtcccagctacttgggaggctgaggtggaagaatagcttgaacctagga

SEQ ID NO: 303641 - DNA, 201 bp, Homo sapiens
atgtagtgggtggaaactctcatcccctgtttttttacaactctgcctgcccattctggtggttaggatcctttcctgatcattcagtttgcaggtcataygttttgtagatttctaccctcggtatatgggcattaaaagagctcagtcttggccgggtgcggtgactcatgcctgtaatcccagcactttgggaggcca

SEQ ID NO: 303642 - DNA, 201 bp, Homo sapiens
tacctttatagagagaggaatcatcttcccaggtggctcttaaattgatgattcctataaaatgatttgaatagaaggtatcttcattttttttctcttaacggcctttcaatgatttgtcttagtcactcacttttaacttgaaaatgagaattaaattgatgtggaaaagggatactagatacttaatcctctagtgca

SEQ ID NO: 303643 - DNA, 201 bp, Homo sapiens
gcatggtggcatgtgcctggaatcccagctactcgggagactgaggcaggagaattgcttgaacctgggaggcagaggttgcagtgagccaagatagtgcyactacactcctgcctgggtgacagagcaagactccgtctcaaaaaaaaaaagtagcaacagacaaataaatgcttaatgcttaatgagtttactttagta

SEQ ID NO: 303644 - DNA, 201 bp, Homo sapiens
agctctctacggaaaataatcttctgtcttcctagcgtggaagtgattcgtcttggacagagtcacttcatcaactgggacctgcaaatgtactatgctgmgaaggacacacccgcaaaagctagaaccaccacactcaatgaacagctcgggcagatccattatatcttctctgataagacggggacactcacacaaaat

SEQ ID NO: 303645 - DNA, 201 bp, Homo sapiens
ttaactatcatcctgactgttgctgtgtgcttactacccgtcgttgccattcgattcctgtcaatgaccatctggccatcagaaagtgataaggtataaakaatatagtcctttcccaactctgtccctcacagaaaccaaagcgtttcccaacagcacgtttcctgcaaaattctaagctcatgggaagtttggtaagaa

SEQ ID NO: 303646 - DNA, 201 bp, Homo sapiens
gcccggagtttgagaccagcctgaggaacatagggagagcctatctcttttaaaaaaaaaagaaagaaaagaaagaaaaaaaaagccaggcatggtggctygtgcttctagtcctagttactagggaggctggggagcagggtaggaggattgctggagccctcagatttgagagtgtagtgagctaggatcatgccactg

SEQ ID NO: 303647 - DNA, 201 bp, Homo sapiens
acagccactggtatttgaatatctagaccaggggtcatctaacgttttctgtaaagtgccagataaatattttagcctgtccaggccgtatatggtcttaycaccatcactatataagcaaagccaggtaaggaggggcctctggacataggtgtagaatcaatttgttttgtcctgtttgtttctcaggggaccatcggg

SEQ ID NO: 303648 - DNA, 201 bp, Homo sapiens
tatattttacaacaataaaaaatgtttccatatagtaccttcacagtcaccttgatacatatatatataacaaggctgtagtaaccaaaacataatatggrctaaaaacagacacataaaccaatggaacagaatagggaacccagaaataaatccccacatgctaaagaatgaaactgggcccctgtctctcaccataca

SEQ ID NO: 303649 - DNA, 201 bp, Homo sapiens
ggaggtggaggttgcagagaactgagatcaagccactgcactccagcccgggtgacagagtgagacccatatatggtcatatatgtttccaaaaaaaaaargggggggagctttttatttaagacagttgtgagcctcttgacatttaagaatgtgctaaaatcctaaggtggtttttgcataattgaaaccttgcctttg

SEQ ID NO: 303650 - DNA, 201 bp, Homo sapiens
ttaatgataaaaatatcaaggtgtttgctctagatatgagtgtcttacttgtgggaactttaccactttttattattttgttccttttctctgctggaaaygcgtttgctgtcaatattatgccatatatcgctgtgccaacttaagttgccgaagggaaaggctttgttctcaccgctgctgatttgtctctggttaaat

SEQ ID NO: 303651 - DNA, 201 bp, Homo sapiens
tttgtagcagtcttttattttaaacaacacatgctcttttattttttgagcacctctgagtgctctcttctgtacttgatggcagggaagggaggactcascaggaaaagatttctgagaaaagcaaagctatgcttatgaatcaaaatcatatctgcaatgcaggcacataacagaccaccaagtgaagatgaaaatcac

SEQ ID NO: 303652 - DNA, 201 bp, Homo sapiens
tgaacccaggaggcagaggttgcagtgagccaagatcacgccactgtactccagcctaggtgacaagagtgaaactctgtctcattaaaaaaaaaaaaaaactcggttcacctactaaaaaatccgtaaaaagcctgtaatatcgctagcaaattaatatgaattatagtcctattttgctttttctaggaacttttactt

SEQ ID NO: 303653 - DNA, 201 bp, Homo sapiens
ctcatactcttccatatccaccaattgttaacataatgaaatttcatttacatatctctatatatagatctaatatatatctaattatatatatgtaattycattatatatacctatatatatacacacatatatatgtacacacacatacatacaggttattgttttctgaaccatttgagagtaaattgcattagaagg

SEQ ID NO: 303654 - DNA, 201 bp, Homo sapiens
tcacttggggcagtttcctcatgtttaaatgaggcaagacaacaacaggcagttccaagtaatcaaggtgcagcctaaatttgagcagattttacttttakggaaacttggggcccttcagaggccatttttctccattccttctcagctcaggccaggcgcagtggctcatgcctgtaatcccagccctttgggaggccg

SEQ ID NO: 303655 - DNA, 201 bp, Homo sapiens
aactaccaggcagcctctcccgatgaaggtgccctggtaaacgctgccaggaactttggctttgccttcctcgccaggacccagaacaccatcaccatcartgaactgggcactgaaaggacttacaatgttcttgccattttggacttcaacagtgaccggaagcgaatgtctatcattggtaagtccccctcagagtct

SEQ ID NO: 303656 - DNA, 201 bp, Homo sapiens
gatggcttcagcctggaaggcagaggttgcagtgagccgggattgcatcactgcatcccagcctggatgataaagccagaccttgtctcaaaaaaaaaaaagtgacatttaatcccctctctaaagtgtatttgtacagaatctgtcatgtttaatgatctctttttaaattctgttagtatattacttcaaagtaaaatt

SEQ ID NO: 303657 - DNA, 201 bp, Homo sapiens
aggtcagctcaactaccaggcagcctctcccgatgaaggtgccctggtaaacgctgccaggaactttggctttgccttcctcgccaggacccagaacaccrtcaccatcagtgaactgggcactgaaaggacttacaatgttcttgccattttggacttcaacagtgaccggaagcgaatgtctatcattggtaagtcccc

SEQ ID NO: 303658 - DNA, 201 bp, Homo sapiens
ttgggagggtgaggtggcagatcacgaggttaacagatcgagaccatcctggccaacatggtgaaaccccgtctctaccaaaaatacaaagattagccagrtgcagtggcacccgcctgtaatcccagctactcaggaggctgaggcaggagaatggcgtgaaccagggaggcagaggttgcagtgaaccgagatcgcacc

SEQ ID NO: 303659 - DNA, 201 bp, Homo sapiens
tatctacaagccttctccactatgattgaatttttaaccaataaaaatatacaggtttaactattacaccctccttaggcacacttactgaacgctttctstgtcccttacacagatctagactgattatcatgcttgccatctaccttgatttaaaatctggttaacagtgagggatgtattacaattattgcattaatc

SEQ ID NO: 303660 - DNA, 201 bp, Homo sapiens
tatgtgacaggatgacagagctgactataggtcacatcttgtctagccaagatggcagaagcggttcaactgattgagtatttggtgtctcatgcctgtartcccagcactttgggaggccaaggcgggtgtatcacctgaggtcaggagttcaagaccagcctggccaacgtggtgaaaccccgtctccactaaaaatac

SEQ ID NO: 303661 - DNA, 201 bp, Homo sapiens
ggtcaggctggtctccaactgccgacctcaggtgactggcccgccttggcctcccagagtgctgggattacaggcgtgagccaccctgcctagccagaagktatatattattggtttgtctcattaatggggatgttaactttgatcacttggttaaggtggtatctacaagccttctccactatgattgaatttttaacc

SEQ ID NO: 303662 - DNA, 201 bp, Homo sapiens
cctgacctcatgatctacctgcctcagcctcccaaattgctgggattacaggcgtgagccactgcacccagcctgtgtggtttttttttctttttttttttaataaggagaatatagctatggtaaagaaaaaatagcctgggcaacatggtgagatcctgtctctacaaaaaatacaaacattagctgggcgtggtgatg

SEQ ID NO: 303663 - DNA, 201 bp, Homo sapiens
aaaaaaaaagagaaaagaggatttctgtgactgggttgaattcattggcacacatatttgttatgttccttttagacagtaagagcttactatgaagatamctgaaggcagggcatggtggatcatgcctgtaatcccagcactttaggaggctgaggcaggcaaattgcttcaggtcaggagtttgagaccagccctggc

SEQ ID NO: 303664 - DNA, 201 bp, Homo sapiens
gctcactgcaacctccaccttctgggttcaagtgattctcctgcctcagcctcccgagtagctggaactataggcacgtgccaccatgcctggctaattttctgtgtttttagtagagacagagtttcactgtgttagccaggatggtctccatctcctgacctcatgatctacctgcctcagcctcccaaattgctggga

SEQ ID NO: 303665 - DNA, 201 bp, Homo sapiens
ttatttaacttttaaacattaagatatcggatagtgatcaaactaaggttggttggtttgtttcaacttttctttctttctttttttttttttttttttttgaaatggagtctcggtctgtcaccagggtggagtgcagtggcgagatctcggctcactgcaacctccaccttctgggttcaagtgattctcctgcctcag

SEQ ID NO: 303666 - DNA, 201 bp, Homo sapiens
acctggcctgcgagtgcagcgcagtcatctgctgccgcgtcacccccaagcagaaggccatggtggtggacctggtgaagaggtacaagaaagccatcackctggccatcggagatggggccaatgacgtgaacatgatcaaaagtgagtcatgcacccacggccagtgaggcccaacgtgctagagaggagaaatggctg

SEQ ID NO: 303667 - DNA, 201 bp, Homo sapiens
gtcatgtcgagtgactattcctttgctcagttccgatatctgcagaggctactgctggtgcatggccgatggtcttacataaggatgtgcaagttcctacratacttcttttacaaaaactttgcctttactttggttcatttctggtactccttcttcaatggctactctgcgcaggtaatgtaatgttgttattattgt

SEQ ID NO: 303668 - DNA, 201 bp, Homo sapiens
aacatatttttgactcaaaaatgcttattacctttggaatgtgataaagaatgcttaaagattaaatgcgaaatacaaaaattagcctggagtggtggcaygtgcccacagtctcagctacttgggaggctgagccaagagaatcgcttgagcccaggaggcagaggtttcagtgagctgaaattgtgccattgcactcca

SEQ ID NO: 303669 - DNA, 201 bp, Homo sapiens
cgccaccatgcctggctaattttttttgtatttttagtagagacggggtttcaccatgttagccaggacgaaaggtcagcctgctgcgttggctgggaatygaagtcgggtcaattgcttggaaggcagctatgctcaccactataccatcaacaccacactcttttcttttctcttctttttttttttttgagatagaat

SEQ ID NO: 303670 - DNA, 201 bp, Homo sapiens
acaagaaaagtactttcctgactacgaataacacaggttagctctgtcagttttttggcttatttcagtggaatcatgtagcatatgtactcttttgtgtrtctggctgtgagatttattcctcttcttattggttttttcttttttcctaaaagagactgcatcttgctctgtcagccaggctggagtgcagtggaatat

SEQ ID NO: 303671 - DNA, 201 bp, Homo sapiens
ccagcatggagcaagtgatgggtcactgagaaggaacacagcagggaggcaagttggacataagcaaaaacaaaagggggtggcaagtatttccctgccaygcacataagtggcccccataaactcttccttacatgacctagatgaaaagaatgtatcaaagtcattcatcattgcttccttcagaggtcaatacgattt

SEQ ID NO: 303672 - DNA, 201 bp, Homo sapiens
ttttggacaggctgacattctcctgctgtctagctctgagcctaacagcctctgctatgtggaaacagcagaactggacgggtaagtgtgtctcgatgggyctgatttaaagctggcctttgaaggcacattcattccactgaaatcggggcattgtggaccagacggcttgatatctggccttgcctctgccacctgctg

SEQ ID NO: 303673 - DNA, 201 bp, Homo sapiens
tcgggacattgctccctctgctcctcgcgcctcacgctccagatgtgcatacactgctttacagagagcggaaatcatgagactgaaaactagggctgtcwttgcttcatagatcaggcaattgactgttggaaatctatcacacttttttttttttttttggcggaaaaaaatacttaaagccaattaaccacttcttaa

SEQ ID NO: 303674 - DNA, 201 bp, Homo sapiens
ctttttatatttatttcactattacattcaatgtagataatgacttaccagttttgttgaaggcaacacttttctagaggaactgatggttttaagctaayagtgaattatgagatagtaacatttcaaattaactttataaatgtagttttctattaaaaaatcaaacttagctgggtgtggtaactcacatctgtaatc

SEQ ID NO: 303675 - DNA, 201 bp, Homo sapiens
tatgaacggttacatcgaatgaatcctactaagcaagaaacacaggatgccctggatgtaagtttcacttttattctttctgcaagggattctgaacttaytctctgatgctgtctgttaagtttgcatgaaagctgtatgttaactgctgaccctccctttgctttgcaatagttggggtggaaagagcagtaaagtagg

SEQ ID NO: 303676 - DNA, 201 bp, Homo sapiens
gccactgacttcctgggatatcaccatggtgccctctcccagcatgtgggtcttcaaggtctataggactgaggcaggggaatggcttagctctcttccartggccttgagcaagctacataaccatactaggttgtagtcttactatgtgtgtggtccccaagacctccactaacttcaagttgtagtgcaaaggaagga

SEQ ID NO: 303677 - DNA, 201 bp, Homo sapiens
atctggccaaattactctccataaaggctacctcagagtgtctgtttctctgctctcttttgaacctagaatgtcatcccaagcattaccatgtgccaatrttttgctattataggataaaaactactatctcagtgaagaattgcatttctcttttaggaacccaaatatcttctcacaggtttaagagccatttgaggc

SEQ ID NO: 303678 - DNA, 201 bp, Homo sapiens
gagtgagacttcatctcaaaaaaaaaaaaaagaaaaagaaaaagaaaaaaaaagaaaatgtttgaatcgttcatcatgggaaaattgccagatactctttyccattaaaagctttgacctcagctttaacaatggcttgtgtattttagaattggtttgagggaataatgcttagtggagagttcataggtgattggactt

SEQ ID NO: 303679 - DNA, 201 bp, Homo sapiens
aaatgctctttctgtccaaagtcatctggccacggaaatgcttttccttctattttgagacaaaataactagagtagaaaaatagaagatcttgggtaggsagagtattttttaaactttttattgaagtacaacatgtgtatacagagatatgtacgtatcataagtatataactcaatgaattttcacaaaccaatact

SEQ ID NO: 303680 - DNA, 201 bp, Homo sapiens
atcatgggaaaattgccagatactcttttccattaaaagctttgacctcagctttaacaatggcttgtgtattttagaattggtttgagggaataatgctyagtggagagttcataggtgattggacttgtatcacagtttgttggaacaagttataaagttgtcaggttcgtgcttatgtcattacaccccaaggcagct

SEQ ID NO: 303681 - DNA, 201 bp, Homo sapiens
accccagagcaccaaccattccaagtgaggctggcggataaacagctgctcatgcatctgtggccttcatcctggtcaaagtattttggaaaactaaatgytctttctgtccaaagtcatctggccacggaaatgcttttccttctattttgagacaaaataactagagtagaaaaatagaagatcttgggtaggcagagt

SEQ ID NO: 303682 - DNA, 201 bp, Homo sapiens
attgccagatactcttttccattaaaagctttgacctcagctttaacaatggcttgtgtattttagaattggtttgagggaataatgcttagtggagagtycataggtgattggacttgtatcacagtttgttggaacaagttataaagttgtcaggttcgtgcttatgtcattacaccccaaggcagctcccttggtctg

SEQ ID NO: 303683 - DNA, 201 bp, Homo sapiens
ggttgatgagaactgagaggtgggatttgtggtttgagcatctttctttgattacatcaatttcatgagccacaaattagtgtgtgaaagaaaaagaaggwctttctggttgcctctaaatgtgccataaataaagagttttcttaggaaggttgctttgtttttgtttgtttttttagtttgtttttacaccttcaattt

SEQ ID NO: 303684 - DNA, 201 bp, Homo sapiens
aaatacacaagaaaagtgtatttttaacatccttgattttgtacttgcatttttgtcttggtaaattaaatagttcatcctttagggaaaaagtttttagstgtgttggtttgcagtaattgtgaaacatggcagccttccctgttaacactggccattggccccaggagagcagcaaccaggatgtataattagcccttc

SEQ ID NO: 303685 - DNA, 201 bp, Homo sapiens
attatttaacttttaaacattaagatatcggatagtgatcaaactaaggttggttggtttgtttcaacttttctttctttctttttttttttttttttttttgaaatggagtctcggtctgtcaccagggtggagtgcagtggcgagatctcggctcactgcaacctccaccttctgggttcaagtgattctcctgcctca

SEQ ID NO: 303686 - DNA, 201 bp, Homo sapiens
cccaagatgacctcctcagacttttcatcctgtacaaacactgtttctttggacggaagatgctttttctgagaaaccctcctctgtttttccagcacatycttctgcatcctttcctgatccccctcagtagcagtttcttccttataatttagctcctggccatgtcttgctgattataattggtcttatctctccagc

SEQ ID NO: 303687 - DNA, 201 bp, Homo sapiens
cattatttaacttttaaacattaagatatcggatagtgatcaaactaaggttggttggtttgtttcaacttttctttctttctttttttttttttttttttttgaaatggagtctcggtctgtcaccagggtggagtgcagtggcgagatctcggctcactgcaacctccaccttctgggttcaagtgattctcctgcctc

SEQ ID NO: 303688 - DNA, 201 bp, Homo sapiens; identical to SEQ ID NO: 63370

SEQ ID NO: 303689 - DNA, 201 bp, Homo sapiens
ccattatttaacttttaaacattaagatatcggatagtgatcaaactaaggttggttggtttgtttcaacttttctttctttctttttttttttttttttttttgaaatggagtctcggtctgtcaccagggtggagtgcagtggcgagatctcggctcactgcaacctccaccttctgggttcaagtgattctcctgcct

SEQ ID NO: 303690 - DNA, 201 bp, Homo sapiens
tccattatttaacttttaaacattaagatatcggatagtgatcaaactaaggttggttggtttgtttcaacttttctttctttctttttttttttttttttttttgaaatggagtctcggtctgtcaccagggtggagtgcagtggcgagatctcggctcactgcaacctccaccttctgggttcaagtgattctcctgcc

SEQ ID NO: 303691 - DNA, 201 bp, Homo sapiens
actgcaacctctgcctcccgggtttatgcgattctcctgcctcagcctcccaagtagctgggattacaggtgcataccaccacacgtggctaattttttayatttttagtagagacggggtttcactatgttggccaggccggtctcaaactcctgaccttgtgatccacccgcctcagcctcccaaagtgctgggattac

SEQ ID NO: 303692 - DNA, 201 bp, Homo sapiens
ctctccccactcttctctccccactcttctctccccccattctctccctccattctctccctcctccccacccctctctccccactactttatttctctgycccttagaaatcttcaggaagaaatatatctatttcggccaggcacagttgttcatgtgtgtaatcctagcactttgggaggccaaggcaggtggatcac

SEQ ID NO: 303693 - DNA, 201 bp, Homo sapiens
ggagcttagagaagaaattgctttcggcttttaaccataaagtaccaggaaaggatcccttgaaagggaccttggggactacaccttcaagttttgttttktgtttttgagacagtcttgctcttgtcacccaggctggagtgcaatggcatgatctcggctcactgcaacctccacctcccaggttcaagcaattctcgt

SEQ ID NO: 303694 - DNA, 201 bp, Homo sapiens
cccagtctgggtccctctctgagaaccaccttcctcggtgttgtagtaagaaggttggatgtacaaagttccttccagcagggctgggcgcggtggcttayacctgtaatcccagcactttgggaggccgaggcgggcagatcatgaggtcaggagttcaaaaccagcctggccaacatggtgaaaccccatctctactaa

SEQ ID NO: 303695 - DNA, 201 bp, Homo sapiens
ctcactgcaacccctccgcctcccaggttcacatgattctcctccctcagcttcctgggtagctgggattacaggcacacaccaccatgcctggctaattkttgttgttgttgttgttgcttttttgtagagatggggtttcaccatgttgaccagactggtatcgaacccctgacctcaagtgatccatctgcctcagcc

SEQ ID NO: 303696 - DNA, 201 bp, Homo sapiens
ctgggcgtggtggtggatgcctctagtcccagctattcaggaggctgaggcaggagaatcgcttgaacccgggaggtggaggttgcagtgagcaaaattgygtgtgcctgtagttccagttacttgagaggctgaggtaggatcacctgagcctgggtacgtcgaggctgttgtgggctgggtttgcaccactgcactcca

SEQ ID NO: 303697 - DNA, 201 bp, Homo sapiens
ttttaaaaaatttggctccatttaataaaaaataattttaaaatagtataaaccatgaaagtatacgtactgccaggaaagtataaatataaccggggaaktataagtataaccaatgaaagtataagtactgccagtgttaccaggggtccttgctccgagagctcccaagatggtggtgggccacttccaaaatggcgg

SEQ ID NO: 303698 - DNA, 201 bp, Homo sapiens
tccttaccttgctttgctttgatttttgtttgtttgtttgttgtttgtttgttttgttttgagacagagtcttgctctgtttcccaggctggagtgcagtmgcgcgatctcagctcactgcaacctccacctgctgggttcaagtgagtcccctgcctcagcctccttagtggctggaattacaagtacatgccactatgc

SEQ ID NO: 303699 - DNA, 201 bp, Homo sapiens
taagattgcctttcttctgttgctgtgtatacattttcaactgtatcttcctttgactgtctttgaaaaatgatgaattacatggtacccccatggtggaygaatcgagacatagtaaaattacatgtcgctcagttaaaaaaaaaaaaaaaaaagggctggccaggcgtggtggctcatgcctgtaatcccagcactgtg

SEQ ID NO: 303700 - DNA, 201 bp, Homo sapiens
ccttttctctgctggaaatgcgtttgctgtcaatattatgccatatatcgctgtgccaacttaagttgccgaagggaaaggctttgttctcaccgctgctsatttgtctctggttaaatagtttgccctctagcatttgtatatgattgctagatggccggatttaggaagtgcgtttatagcttctagtgaatgactttc

SEQ ID NO: 303701 - DNA, 201 bp, Homo sapiens
ttttttttctttatttaagaaaaatgtcaccttctgtagcaggatcctttgagctacaaggaacagaaagctgtgactcaaaacatctctacagtagtgcrtcatcattaatcattagtaggcttcaggcccagttgattgagcaatttaatgttgtcaagaaaggattgggctggttcttgccatctcttctctcagaaa

SEQ ID NO: 303702 - DNA, 201 bp, Homo sapiens
cccacctcaatactgttgaattggggattgggtttcaacatatgaatttggagggggattctaacattcagaccatagcagtaaataagcagcttgctctygtctgtacaatgagaataaaatctctactacttgccactcgtatccgagctctctacggaaaataatcttctgtcttcctagcgtggaagtgattcgtct

SEQ ID NO: 303703 - DNA, 201 bp, Homo sapiens
tctgtaaagtgccagataaatattttagcctgtccaggccgtatatggtcttatcaccatcactatataagcaaagccaggtaaggaggggcctctggacrtaggtgtagaatcaatttgttttgtcctgtttgtttctcaggggaccatcgggatgcctctcaacacaaccacaacaaaatagaggtaagacctttaagc

SEQ ID NO: 303704 - DNA, 201 bp, Homo sapiens
gatctctttaaggtgcctttttccatttaaaggagcataattaatgtgaatttcatgggaacaagccagaatggcttgtaggttcctttgcagaatccttygatgcagtttgtgccagctttgtcacagcaagtttgtcctgtatcaaggaaagctagtcattttatcacaaatggtcataatgataaattatatagacac

SEQ ID NO: 303705 - DNA, 201 bp, Homo sapiens
tgtaggttcctttgcagaatcctttgatgcagtttgtgccagctttgtcacagcaagtttgtcctgtatcaaggaaagctagtcattttatcacaaatggwcataatgataaattatatagacacacatgcactttatagaaagagcaaaaggagttcttttggtgtttctgtaataaagcgtagtctgccttcacttcat

SEQ ID NO: 303706 - DNA, 201 bp, Homo sapiens
agttcttttggtgtttctgtaataaagcgtagtctgccttcacttcattccctcacttcatccacttcactacatcttccactttttacttcagtcagtgmggcatacataagtccctctcttttctcaaccttaatgtttcatatgtagcaggtatgaaatttccagagaaggaatatgcataaaaactaaatgtgtagg

SEQ ID NO: 303707 - DNA, 201 bp, Homo sapiens
aattcctcccgtgtgtgtctgcgtttcacacacatgcacactgcagagaagttgagttgaggacatttcttcactctcagcggagagctccctgctcctgstttctcactgagactgtgcagattgtgtgggtggcgagttggttgtgcaaggccttgcttgctttgagtcacggacatgtgggttgtcaaatccattcct

SEQ ID NO: 303708 - DNA, 201 bp, Homo sapiens
gagactgaggcaggagaattgcttgaacctgggaggcagaggttgcagtgagccaagatagtgctactacactcctgcctgggtgacagagcaagactccrtctcaaaaaaaaaaagtagcaacagacaaataaatgcttaatgcttaatgagtttactttagtagttttgggcttcaagtaatctgattaattactatat

SEQ ID NO: 303709 - DNA, 201 bp, Homo sapiens
agtgtctttttccacgttcacgtgtggttgcagcaggattcagttctctgtggttgtagaactgaagtccccatttctttattctttatcaactgggttgycctccactcctagagactgtcctcattccctgccagctggtccacttcaccttcaaagccagcggtggagaatctcccttaaattgaacctttttcatgc

SEQ ID NO: 303710 - DNA, 201 bp, Homo sapiens
gttcatttctggtactccttcttcaatggctactctgcgcaggtaatgtaatgttgttattattgttatttactaagtagagctcttaaatgaataaaaawctagttctgaaaagacaatttatttcttctatatttgtagttttggggctgtgtctccttacagttggggcataattaagaatgatcatgacttctctaa

SEQ ID NO: 303711 - DNA, 201 bp, Homo sapiens
ggcatgcgccaccacacctggctaattttgtatttttagtagagacggcatttctctatgttggtcaggctggtctcgaacttccaacctcaggtgatccrcccacctcggcctcccaaagtgttgggattacaagcatgagctaccgtgcctggcgcagttatcttctcttaaggtcagcaatccaaattagggtaacag

SEQ ID NO: 303712 - DNA, 201 bp, Homo sapiens
atttccttatttgtaacatgaagagattggacaagatatttaaggtcccttccactccaaaatttcatgactcatttttctatcacatgaaagtgttacaygtagccttgtcacatatatcattttaacacaaacatttaatttgttgatataaagcactgagaatttctcaaacacagatatagttttgtttatatgaaa

SEQ ID NO: 303713 - DNA, 201 bp, Homo sapiens
tagtagagacagagtttcactgtgttagccaggatggtctccatctcctgacctcatgatctacctgcctcagcctcccaaattgctgggattacaggcgkgagccactgcacccagcctgtgtggtttttttttctttttttttttaataaggagaatatagctatggtaaagaaaaaatagcctgggcaacatggtgag

SEQ ID NO: 303714 - DNA, 201 bp, Homo sapiens
tgtttggtggcttggcagcgagttgcgtagtcccagctacttgggggctgtgggtggtgctgagatgggcagatcacttgaatcctggaggttgaggctgyagtgagcagagattgtgccactgcactccagcctaggcagtgggagtgagatgctgtctcaaaaaacaaaataaaataaaataaaaacagcaggaatgac

SEQ ID NO: 303715 - DNA, 201 bp, Homo sapiens
agtagagacagagtttcactgtgttagccaggatggtctccatctcctgacctcatgatctacctgcctcagcctcccaaattgctgggattacaggcgtragccactgcacccagcctgtgtggtttttttttctttttttttttaataaggagaatatagctatggtaaagaaaaaatagcctgggcaacatggtgaga

SEQ ID NO: 303716 - DNA, 201 bp, Homo sapiens
cctcccaggttcaagctattctcctgcctcagcctcctgagtagctgggattacaggcatgcgccaccacacctggctaattttgtatttttagtagagayggcatttctctatgttggtcaggctggtctcgaacttccaacctcaggtgatccgcccacctcggcctcccaaagtgttgggattacaagcatgagctac

SEQ ID NO: 303717 - DNA, 201 bp, Homo sapiens
atgcccggctgattttttgtattttagtagagacggggtttcaccatgttgcccaggctggtctcgaactcctgagctctggcaatccacccaccttggcytctcaaagtgttaggattacaggcatgagccaccacacctggcgaaatattaactatgttcttaggaaaaaagaaccacagtgatgcatttgccatgttc

SEQ ID NO: 303718 - DNA, 201 bp, Homo sapiens
gcagtgagccaagatcacgccactgtactccagcctaggtgacaagagtgaaactctgtctcattaaaaaaaaaaaaaaactcggttcacctactaaaaawtccgtaaaaagcctgtaatatcgctagcaaattaatatgaattatagtcctattttgctttttctaggaacttttacttttgaaagggaaatagaagaaa

SEQ ID NO: 303719 - DNA, 201 bp, Homo sapiens
gcaggcgaatcacttgagtccaggagtttgagaccagcctgagcaacatggtgaaaccccgtctctacaaaaaatacaaaaaattagccaggtgtggtggygtgtaccagtaatcccagctacatgggaagatgaggtaggaggatcactgagcctggggagattgaggcttcagtgagccatgatcgtgccactgcactg

SEQ ID NO: 303720 - DNA, 201 bp, Homo sapiens
ggacgggtttgctttggagatttatcaactgattatgtgacttagacttgaaacattttgttcctctgagttcaccaatacataatgagagggattgcacmaagtcaatgtagataatcttagaggggcttgtttttcttaagttgtcttaaaatttttattaagcactgttatatgccaggtgcatttaaaaaaaaaaca

SEQ ID NO: 303721 - DNA, 201 bp, Homo sapiens
cattttgggaggccgaggcaagtggattgcttgagcccagcagttcaagaccagcctggacaacatggctaaaccccatctctacaaaaaatacaaaaaarttagccaggcatggtggcacatgcctgtagttctagctactggagaggctgaagtgggaggattgcttgacctgggacgttgaggctacagtgagtcgtg

SEQ ID NO: 303722 - DNA, 201 bp, Homo sapiens
gaatttgccagaccttgtgttctgtaactagggcaggatttttgaagcttctttttagttggaacgccgcagcattgcagccacttttcagggtctgagcmatgataggttgtgttctccaacatatcttttctaaatgatcttgtctatcttcacattcgttacttttaagacccagacaaaactaatcattctctaatt

SEQ ID NO: 303723 - DNA, 201 bp, Homo sapiens
gtgcagtggcaccatcttggctcactgcaacctcctcctccttctcttgggttcaagcgattctcctgcctcagccccctgagtagctgggatcacagttrccagccaccacgcccagctaatttttgtatttttagtagagacagggtttcaccatgttgaccaggctggtctcaaactcctgaattcaggtgatccacc

SEQ ID NO: 303724 - DNA, 201 bp, Homo sapiens
agttatttttgtgaactgtttttacattttaaaaggcctacttaaaaattttttttcctaattgtggcaaagcatccagttatccagagagcatgagtttwgctgtgcaagaactgttgctgtaaccgagggaactctacacacactagttagcgccagaatcaacctttagtgtctgccgtgcggattacatagcttaag

SEQ ID NO: 303725 - DNA, 201 bp, Homo sapiens
ggaggtggaggttgtagtgagccacaatggcaccactgcactccagcctgggtgatacagtgagacgctgtctaaaaaaaaaaaaaaaaaaaaaaaaaaaatctgttgaatatcttctataagcattccagttttccagttcagccttgttggaagttgtttcatgctaagtaagatatcttccccaaacagtatgttatt

SEQ ID NO: 303726 - DNA, 201 bp, Homo sapiens
acctatgtaacaaacctgcatgttctgcacatgtatcctagaacttaaagtaaaataaaataaagacttagtagggaaatttagatttaacatggtgatgycaatttagtggaaaagatgacttttaaaaaatttggctccatttaataaaaaataattttaaaatagtataaaccatgaaagtatacgtactgccaggaa

SEQ ID NO: 303727 - DNA, 201 bp, Homo sapiens
gggaggtggaggttgtagtgagccacaatggcaccactgcactccagcctgggtgatacagtgagacgctgtctaaaaaaaaaaaaaaaaaaaaaaaaaaaatctgttgaatatcttctataagcattccagttttccagttcagccttgttggaagttgtttcatgctaagtaagatatcttccccaaacagtatgttat

SEQ ID NO: 303728 - DNA, 201 bp, Homo sapiens
agggaggtggaggttgtagtgagccacaatggcaccactgcactccagcctgggtgatacagtgagacgctgtctaaaaaaaaaaaaaaaaaaaaaaaaaaaatctgttgaatatcttctataagcattccagttttccagttcagccttgttggaagttgtttcatgctaagtaagatatcttccccaaacagtatgtta

SEQ ID NO: 303729 - DNA, 201 bp, Homo sapiens
gcgtgcctgtaatcccagctactcaggaggctgaagcataagaattgtttgaaccagggaggtggaggttgtagtgagccacaatggcaccactgcactcyagcctgggtgatacagtgagacgctgtctaaaaaaaaaaaaaaaaaaaaaaaaaaaatctgttgaatatcttctataagcattccagttttccagttcag

SEQ ID NO: 303730 - DNA, 201 bp, Homo sapiens
acagagagcggaaatcatgagactgaaaactagggctgtcattgcttcatagatcaggcaattgactgttggaaatctatcacacttttttttttttttttggcggaaaaaaatacttaaagccaattaaccacttcttaattgtacaggctaattggttaaaaaccaattaaccacttcttaattgtaaaggcttaactg

SEQ ID NO: 303731 - DNA, 201 bp, Homo sapiens
tttccaaggatgaatctaatattgcaatgaagcaaggtaacagagttcagattagggtggatacatggaagggtttatcagcagatgatgtggggaaggayagaaaggggcgataccaggtcctgaatcatggaagcagaggtctaagtctatttgactcaccaagccaattttacccaggcaataagcataaagtatgat

SEQ ID NO: 303732 - DNA, 201 bp, Homo sapiens
tacagagagcggaaatcatgagactgaaaactagggctgtcattgcttcatagatcaggcaattgactgttggaaatctatcacacttttttttttttttttggcggaaaaaaatacttaaagccaattaaccacttcttaattgtacaggctaattggttaaaaaccaattaaccacttcttaattgtaaaggcttaact

SEQ ID NO: 303733 - DNA, 201 bp, Homo sapiens
ttacagagagcggaaatcatgagactgaaaactagggctgtcattgcttcatagatcaggcaattgactgttggaaatctatcacacttttttttttttttttggcggaaaaaaatacttaaagccaattaaccacttcttaattgtacaggctaattggttaaaaaccaattaaccacttcttaattgtaaaggcttaac

SEQ ID NO: 303734 - DNA, 201 bp, Homo sapiens
gaggctgaggcaggagaattgcttgaatctgggaggcggaggttgcagtgagccgagattgggccattgcactccagcctgggcgacaagaacaaaactcyatctcaaaaaaaaaaaaagaaaaaaaaagttaagacgagacttctcccttgccactcctaccccctcacccccagttaaatatgactttcacaaaagatt

SEQ ID NO: 303735 - DNA, 201 bp, Homo sapiens
ccaggttcaagctattctcctgcctcagcctcctgagtagctgggattacaggcatgcgccaccacacctggctaattttgtatttttagtagagacggcrtttctctatgttggtcaggctggtctcgaacttccaacctcaggtgatccgcccacctcggcctcccaaagtgttgggattacaagcatgagctaccgtg

SEQ ID NO: 303736 - DNA, 201 bp, Homo sapiens
ggaagaggagtttcacatattcactgtgatgtgggaagaaggatctttttgtcttctaactgcaccccagttatcttctctctctcttttttttttttttttgagatggagtttcgctcctgttatcaaggctggagtgcaatggcgtgatctcagctcaccaaaacctctgcctcccaggttcaagctattctcctgcct

SEQ ID NO: 303737 - DNA, 201 bp, Homo sapiens
ttcctatatactctgcaggatgtagacttatgtgatgacggtgatgagacttggaattagcaagcttagaattagcaataagttacctgtaagcttgataygccttcatggacacacacataagcccttttattcttttaggcagttcctcaaatctctaccctggcttggtacaccacactagtgcccctgcttgtggtg

SEQ ID NO: 303738 - DNA, 201 bp, Homo sapiens
tgactataggtcacatcttgtctagccaagatggcagaagcggttcaactgattgagtatttggtgtctcatgcctgtaatcccagcactttgggaggccmaggcgggtgtatcacctgaggtcaggagttcaagaccagcctggccaacgtggtgaaaccccgtctccactaaaaatacaaaaaaattaactgggtgtgg

SEQ ID NO: 303739 - DNA, 201 bp, Homo sapiens
ctgtttttccagcacatccttctgcatcctttcctgatccccctcagtagcagtttcttccttataatttagctcctggccatgtcttgctgattataatyggtcttatctctccagccagacgtgggttcccgtcctgaaagggccatccctcttgtccctctgtccttccagtgctttgacatttggtgggcacagagt

SEQ ID NO: 303740 - DNA, 201 bp, Homo sapiens
agtgctttgacatttggtgggcacagagtagaacaatacaaagtactgaacaataactttggttttcttgccaattttattgcttggcaataaaattgtayacctaaggaaagaacgattttaattttttaactttagaactcaacaagcacttgtttggtattgatactttactttgtaagccttccacaagaaatcaaa

SEQ ID NO: 303741 - DNA, 201 bp, Homo sapiens
aatgagcctggcaaacatgacaaaaccccatctctagaaaaaacacaaattgtttggtggcttggcagcgagttgcgtagtcccagctacttgggggctgygggtggtgctgagatgggcagatcacttgaatcctggaggttgaggctgcagtgagcagagattgtgccactgcactccagcctaggcagtgggagtgag

SEQ ID NO: 303742 - DNA, 201 bp, Homo sapiens
gcagcgagttgcgtagtcccagctacttgggggctgtgggtggtgctgagatgggcagatcacttgaatcctggaggttgaggctgcagtgagcagagatygtgccactgcactccagcctaggcagtgggagtgagatgctgtctcaaaaaacaaaataaaataaaataaaaacagcaggaatgacatttgacttaattt

SEQ ID NO: 303743 - DNA, 201 bp, Homo sapiens
tttcctcatgtttaaatgaggcaagacaacaacaggcagttccaagtaatcaaggtgcagcctaaatttgagcagattttacttttagggaaacttggggmccttcagaggccatttttctccattccttctcagctcaggccaggcgcagtggctcatgcctgtaatcccagccctttgggaggccgaggcgggtggatc

SEQ ID NO: 303744 - DNA, 201 bp, Homo sapiens; identical to SEQ ID NO: 63366

SEQ ID NO: 303745 - DNA, 201 bp, Homo sapiens
gcataacatgatgggaggaagacaaattaaaatagctttacaatagcgctgtacgtgtgttgaattagataacttaagacttaaaaggctggataaaagcytattctttctttcccataaaacctaatactggggctagatgtggtagctcacgcctgtaatcccagcactttgggaggccaatatgggtggatcacttga

SEQ ID NO: 303746 - DNA, 201 bp, Homo sapiens
tattgcttgctcggagttagatctatctctttcctccatagccagccagctctagtttattttccattacgtacctttaacgtaactagccgtgccaaaakgacaagtcaaacatgatttttattcagttataaagtagccttctagataatgggaggggacgggtttgctttggagatttatcaactgattatgtgactt

SEQ ID NO: 303747 - DNA, 201 bp, Homo sapiens
ttccgccttccgggttcaagcaattctgctgtctcctgagtagctgggactacaggtgcacaccaccatgcccggctgattttttgtattttagtagagayggggtttcaccatgttgcccaggctggtctcgaactcctgagctctggcaatccacccaccttggcctctcaaagtgttaggattacaggcatgagccac

SEQ ID NO: 303748 - DNA, 201 bp, Homo sapiens
aaccacatgaagtcccggtgactaggtcgcttataaatcctcatgtgggtcatggccacacgtgccaaagatgatcggtctattttgcgtggtctaggagrgaatcttctctgatctcttcttaggatgcgactgacagaatggtggatgggcttggacaagtacccattgtccttagtaagaagggctgggagagcatat

SEQ ID NO: 303749 - DNA, 201 bp, Homo sapiens
cttaggaaaaaagaaccacagtgatgcatttgccatgttctttacaggcacagcttcaaacgctctgagacagccatacatttggttaactatcatcctgrctgttgctgtgtgcttactacccgtcgttgccattcgattcctgtcaatgaccatctggccatcagaaagtgataaggtataaagaatatagtcctttcc

SEQ ID NO: 303750 - DNA, 201 bp, Homo sapiens
cactccagcctgggtgacagagggagactctatctcaaaaaaagaaaaaaaagaaattcaactccactaacacccacaatgcaaataaacgtgtgaatgtrtacaactattttatcaagcagtacttattatatgtgctgtaatctgatattttatagcctgtttcattttattttaatgttgattgttacccactaaatt

SEQ ID NO: 303751 - DNA, 201 bp, Homo sapiens
tcatgccattgcactccagcctgggtgacagagggagactctatctcaaaaaaagaaaaaaaagaaattcaactccactaacacccacaatgcaaataaaygtgtgaatgtatacaactattttatcaagcagtacttattatatgtgctgtaatctgatattttatagcctgtttcattttattttaatgttgattgtta

SEQ ID NO: 303752 - DNA, 201 bp, Homo sapiens
atgatggtgggcgcctgtaaccccagctactcaggagagtgaggcaggagaatctcttgaacccaggagacggaagttgcagtgagctgagatcgcatcaytggactccagcctcagcgagaacagcattgaatttccctttgtatgaactgtcttttcatgtcctttagccattctctcttcaattgtttctatggtttt

SEQ ID NO: 303753 - DNA, 201 bp, Homo sapiens
cctagaaatacatgacgaatcgttggcagaaaaatgagcaaagaggagtgagtgaggaagtgagtggcaaacctggggtttgaggccgtgggagtctgacsaggctgtgggagtctgaccaggctgtgggacagacagctcttggacgcaagggaagctgtgaccccactaagaaggttctctctgcgtcgagatgggaga

SEQ ID NO: 303754 - DNA, 201 bp, Homo sapiens
gaaaataaaaatataaaaaagagaataaattgcaggcctaatgtccctttcccctaaatactgtactatataccatagtaggtatttcctaagaacagaarcactcacttatatatacagtgcaatgttcagaaccagaaaatttaacacagtacaatattatctaatcaatagactttatcagattttaccagggaggtt

SEQ ID NO: 303755 - DNA, 201 bp, Homo sapiens
gaaagaaaaaagaaagaaagaaagagaaagaaagaaagaaagaaagaaagaaagaaggaaggaaggaaggaaggaaggaaggaaggaaggaaggaaggaargaaggaaggaaggaaggaaggaaggaaagaaagaaagaaagaaagagaaagatcaagagcaagacaaagcaccctttaattttccttctgcttttctcaa

SEQ ID NO: 303756 - DNA, 201 bp, Homo sapiens
atgtaatttcattatatatacctatatatatacacacatatatatgtacacacacatacatacaggttattgttttctgaaccatttgagagtaaattgcrttagaaggagcaagattacatgataaaaaaagaaaataaaaatataaaaaagagaataaattgcaggcctaatgtccctttcccctaaatactgtactat

SEQ ID NO: 303757 - DNA, 201 bp, Homo sapiens
aagaggtacaagaaagccatcacgctggccatcggagatggggccaatgacgtgaacatgatcaaaagtgagtcatgcacccacggccagtgaggcccaaygtgctagagaggagaaatggctggaatgtgtagggggtggattttctttttttagattttacagcttaggttttcatagagcagatgtttcataaagtca

SEQ ID NO: 303758 - DNA, 201 bp, Homo sapiens
agcaagactctatctctgaaaagaaagaaagagagagagagaaagaaaaaagaaagaaagaaagagaaagaaagaaagaaagaaagaaagaaagaaggaargaaggaaggaaggaaggaaggaaggaaggaaggaaggaaggaaggaaggaaggaaggaaggaaggaaagaaagaaagaaagaaagagaaagatcaagagc

SEQ ID NO: 303759 - DNA, 201 bp, Homo sapiens; identical to SEQ ID NO: 63371

SEQ ID NO: 303760 - DNA, 201 bp, Homo sapiens
aaatagcaagactctatctctgaaaagaaagaaagagagagagagaaagaaaaaagaaagaaagaaagagaaagaaagaaagaaagaaagaaagaaagaargaaggaaggaaggaaggaaggaaggaaggaaggaaggaaggaaggaaggaaggaaggaaggaaggaaggaaagaaagaaagaaagaaagagaaagatcaa

SEQ ID NO: 303761 - DNA, 201 bp, Homo sapiens
ttccttatgtcatttagggcttcaaacaagtgatttctccctgtttttttttctttggtacactaaaatgacagagccaaattcctcccgtgtgtgtctgygtttcacacacatgcacactgcagagaagttgagttgaggacatttcttcactctcagcggagagctccctgctcctgctttctcactgagactgtgcag

SEQ ID NO: 303762 - DNA, 201 bp, Homo sapiens
cctaaaatttaacagcaggctgcaactttttgtgagatattaattataacatatctctgactgctttgacctgatgaataaaataccatcattttgttttmtccttaaggatgtgagtgacaaactgagcctccgattccctgggttatacatagtgggacaaagagacttactattcaactataagagattctttgtaag

SEQ ID NO: 303763 - DNA, 201 bp, Homo sapiens
aatcttatatttttaaaaggttttattgaatgtgaagaacccaataaccgactagataagtttacaggaacactattttggagaaacacaagttttccttyggatgctgataaaattttgttacgtggctgtgtaattaggaacaccgatttctgccacggcttagtcatttttgcaggtacgttcagagtttcttgggaa

SEQ ID NO: 303764 - DNA, 201 bp, Homo sapiens
gatttctccctgtttttttttctttggtacactaaaatgacagagccaaattcctcccgtgtgtgtctgcgtttcacacacatgcacactgcagagaagtygagttgaggacatttcttcactctcagcggagagctccctgctcctgctttctcactgagactgtgcagattgtgtgggtggcgagttggttgtgcaagg

SEQ ID NO: 303765 - DNA, 201 bp, Homo sapiens
agttctgatagttttttggtggagtctttaggtttttccaaatatgagatcatatcatccgcaaacaaggataatttgacttattcctttccaatttggaygccgtttatttctttctcttgtccgattgctctagctaggacttctggtgaaagtaggcatccttgacatgttccagatctaagaggaaaggcttttagt

SEQ ID NO: 303766 - DNA, 201 bp, Homo sapiens
accagttcctccttgtacctctggtagaattcggctgtgaatccatctggtcctggactctttttggttggtaaactattgattattgccacaatttcagmtcctgttattggtctattcagagattcaacttcttcctggtttagtcttgggagagtgtatgtgtccaggaatttatccatttcttctagattttctagt

SEQ ID NO: 303767 - DNA, 201 bp, Homo sapiens
atctctaccaaatgtagatatctgatggggtggcaggagaattggctccatggggtccagggtcaactttgctcttggtgcttggtggcacgccatcagaygtgtagtccgagacacagcaaagggaccgggattgggtgcctgcagaaatgtcagagacgcatgtagtgggtggaaactctcatcccctgtttttttaca

SEQ ID NO: 303768 - DNA, 201 bp, Homo sapiens
attgctggagccctcagatttgagagtgtagtgagctaggatcatgccactgcactgcagcctcggtggcagagtgaaaccatgtctcaggaaacaaacartggtttgtgtcatctgagatgcaaaaaaataataacaataataagagaaagaaaaccaaccaacaaacaaaaagttaaaattctccaatggtacagcttt

SEQ ID NO: 303769 - DNA, 201 bp, Homo sapiens
ttttctagatatacaatcatgtcatctgcaaacagagacaatttgacttcctcttttcctaactgaataccctttatttccttctcctgcctaattgccckggccagaacttccaacactatgttgaataggagtggtgagagagggcatccctgacttgtgccagttttcaaagggaatgcttccagtttttccccattc

SEQ ID NO: 303770 - DNA, 201 bp, Homo sapiens
gtgagctaggatcatgccactgcactgcagcctcggtggcagagtgaaaccatgtctcaggaaacaaacaatggtttgtgtcatctgagatgcaaaaaaawaataacaataataagagaaagaaaaccaaccaacaaacaaaaagttaaaattctccaatggtacagctttaagaaattaaaaaaaaataaaagtagggag

SEQ ID NO: 303771 - DNA, 201 bp, Homo sapiens
agccactcgggagcctgaggcaggagagtcactggaacccaggaggcagaggttgcattgagccaagatcgcaccactgcactccagcctgggcgacagaraaagactccatctcaaaaaaaaaaaggcaagagggattattgctgtagcgaggaaatattctttttgttaaggaatgataaaagaatgtctaccagtgag

SEQ ID NO: 303772 - DNA, 201 bp, Homo sapiens
ttaaacactgaaatttggtttcccctagttctcttcttcatgcaaggatggaaaaccagaggaatagaggtggcgtctacgcaaagtttgcacctcctgtrcaggaatctttttttccacccggtggaaaccgtgccttaatcatcactggttcttggttggtacgtatcattagtgtatctgtgcctttaactcaaaaga

SEQ ID NO: 303773 - DNA, 201 bp, Homo sapiens
gccactcgggagcctgaggcaggagagtcactggaacccaggaggcagaggttgcattgagccaagatcgcaccactgcactccagcctgggcgacagaamaagactccatctcaaaaaaaaaaaggcaagagggattattgctgtagcgaggaaatattctttttgttaaggaatgataaaagaatgtctaccagtgagg

SEQ ID NO: 303774 - DNA, 201 bp, Homo sapiens
cagtttcagtttcctacatatggctagccagttttcccagcaccatttattaaatagggaatcctttccccattgcttgtttttctcaggtttgtcaaagrtcagatagttctaggtatgcggcattatttctgagggctctgttctgttccattgatctatatttctgttttggtaccagtaccatgctgttttggttac

SEQ ID NO: 303775 - DNA, 201 bp, Homo sapiens
aaggatggtttagtttctggtccagtattcaagccacatcatgcctaacttgctgaattctgttttcaggattgttagatcctttatttcttgctaactcyccaaaatgagtgctctgtttttctctggtttcccaacagattggcttggatacttcttattggacttttgtgaatgctttttcaatttttggaagcattg

SEQ ID NO: 303776 - DNA, 201 bp, Homo sapiens
tgacagttcctcaagatttttccctacagagcttctctcaggccagcatgaggtcagattaaactgttaacatacacatttgccaggtgtgataaagtgaygagggaattgatggtcaatattagtcttatttctaatgatggtgataaagcattttctagttgttctagtatattaggtattccgtcaaattagacaaaa

SEQ ID NO: 303777 - DNA, 201 bp, Homo sapiens
ccctcatctctatgtctgaattctgttcctttttcctccctctgtcactataagggagtatcttgtattaaaaatactcaaactaatgacctggatattcrtcctcatcctattgccaaaatccggtgtcaccttgggcttatgctcaggtttcagttttctcatcggaaaagaaaataatccctaatgtcacctccagct

SEQ ID NO: 303778 - DNA, 201 bp, Homo sapiens
acctttatagagagaggaatcatcttcccaggtggctcttaaattgatgattcctataaaatgatttgaatagaaggtatcttcattttttttctcttaayggcctttcaatgatttgtcttagtcactcacttttaacttgaaaatgagaattaaattgatgtggaaaagggatactagatacttaatcctctagtgcag

SEQ ID NO: 303779 - DNA, 201 bp, Homo sapiens
tgggcttctcttgtagctcttctccatgagcaagctgagacttttctctctggaccccagatttgatatcaggctgaaaatatttcctccatggtgttccstaaaattctagccgaacaaccttagcatcacattcacagaaatcatcatagtgttctggtttcagcgctccagacacgcctccctgcagccttagtcaga

SEQ ID NO: 303780 - DNA, 201 bp, Homo sapiens
ataactgagtcctcattctagttttcctatcaacctgcagcaggcaaatcacatcaccttcctctggcttgatttccttatttgtaacatgaagagattgracaagatatttaaggtcccttccactccaaaatttcatgactcatttttctatcacatgaaagtgttacacgtagccttgtcacatatatcattttaaca

SEQ ID NO: 303781 - DNA, 201 bp, Homo sapiens
caccaggaaccccgtgtctgtctgtctctctccccttctctctccctttcctccttcttcccctccttctctctctcccctccctcccttctctccccacycttctctccccactcttctctccccccattctctccctccattctctccctcctccccacccctctctccccactactttatttctctgccccttagaaa

SEQ ID NO: 303782 - DNA, 201 bp, Homo sapiens
tctctccctttcctccttcttcccctccttctctctctcccctccctcccttctctccccactcttctctccccactcttctctccccccattctctcccyccattctctccctcctccccacccctctctccccactactttatttctctgccccttagaaatcttcaggaagaaatatatctatttcggccaggcacag

SEQ ID NO: 303783 - DNA, 201 bp, Homo sapiens
acctttgtgtgttgttgatgaaatatataaaatggtgcagccactatgcaaaacagtatggtgatgtttcaaaaaatttcaaaaaggattaccatatgatkcaacaatcccacttctgggtatatccacaaaataattgaaagcaggatctcaaagagatacatgcacacccatgttcacagcaacactgttcacagcagc

SEQ ID NO: 303784 - DNA, 201 bp, Homo sapiens
ctacaaaaaatacaaaaattagccaggcgtgatagcgtgtgcctatagtcccagcaactcaggaggctgaggcaggagaatcacttgaggctgggaggtcraggctgcagtgatccatgatcatgccactgctctccagcctgggtgacagagtgagaccctctctcaaaaaaattataatgaaaataaaataaagaaaca

SEQ ID NO: 303785 - DNA, 201 bp, Homo sapiens
agagttcaatgctgcaatgagctatgattgtcctactacaccctagcctgagtgacagagtgaaaccctcctctcaaaaaaaaaaaaaaaaaaaaaactartaaaactttatactagaagaaaacatagggaaaatgttttaggacattggtctaggcaaagattttatggctaagacctcaaaagcacaggcaacaacaa

SEQ ID NO: 303786 - DNA, 201 bp, Homo sapiens; identical to SEQ ID NO: 63365

SEQ ID NO: 303787 - DNA, 201 bp, Homo sapiens
cacctcagcctcccaagtagctgggactacaggcatgagccaccatgcccagctaatttttgtattttttgtagagttgggaatttgccatgttgctcagsctggtcttgaactcctgggctcaatcagtctgcctgcctcagtctcccaaagtgctaggattacaggcatgagccacctcacctggccccaggtactttt

SEQ ID NO: 303788 - DNA, 201 bp, Homo sapiens
cccggagtttgagaccagcctgaggaacatagggagagcctatctcttttaaaaaaaaaagaaagaaaagaaagaaaaaaaaagccaggcatggtggctcrtgcttctagtcctagttactagggaggctggggagcagggtaggaggattgctggagccctcagatttgagagtgtagtgagctaggatcatgccactgc

SEQ ID NO: 303789 - DNA, 201 bp, Homo sapiens
tgtaatcccagccactcgggagcctgaggcaggagagtcactggaacccaggaggcagaggttgcattgagccaagatcgcaccactgcactccagcctgrgcgacagaaaaagactccatctcaaaaaaaaaaaggcaagagggattattgctgtagcgaggaaatattctttttgttaaggaatgataaaagaatgtct

SEQ ID NO: 303790 - DNA, 201 bp, Homo sapiens
aataggcatggtggcatgcactggtagtcccagttacttgggatgctgaggtaggaagattccttgagcccaagagttcaatgctgcaatgagctatgatygtcctactacaccctagcctgagtgacagagtgaaaccctcctctcaaaaaaaaaaaaaaaaaaaaaactaataaaactttatactagaagaaaacatag

SEQ ID NO: 303791 - DNA, 201 bp, Homo sapiens
ctttccactattctgccctttccacaggctcaggggcctctccccatgtccaccaccaccacaggcctatgaggagtgctgccaggttactgctgatgttyggtaaaggcctatggcctcttcagtcagcttgtggtaaatcctttcagtcacccttcagggcagtgagctcccctctggcaaaaagcaagtccagagatg

SEQ ID NO: 303792 - DNA, 201 bp, Homo sapiens
tttttctgtaaagggccagcaagtaaacattttaggctttgtggaccacgtggtctctgccaatgttgagtgtaagtgaccgcagacagtacatcactgarggcagtagaacatggcttgcttttaccatgatgccttttcttttgtggcttttctatttcatctcctgctggttctcccaccctggcaaacagatgtggg

SEQ ID NO: 303793 - DNA, 201 bp, Homo sapiens
gttttgatttgcatttctctgatggccagtgatgatgagcattttttcatgtgttttttggctgcataaatgtcttcttttgattagtgtctgttcatgtscttcgcccactttttgatggggttgtttgtttttttcttgtaaatttgtttgagttcattgtagattctggatattagccctttgtcagatgagtaggtt

SEQ ID NO: 303794 - DNA, 201 bp, Homo sapiens
tgcattcatattgtgtatgaattctatgcatcacacagctgaaagcacaagatggtagatacccttctgcttttgtctcttaacagtgtaatttggaggtmattcctaccatatttatggggtcacctcattctttttttgctgactgcataggctatcattgtaatcgtgtttaactggctgttcccagtaggcatttgg

SEQ ID NO: 303795 - DNA, 201 bp, Homo sapiens
tagcattaggtatatctcccaatgctatccctcccccctccccccaccccaccacagtccccagagtgtgatattccccttcctgtgtccatgtgatctcrttgttcaattcccacctatgagtgagaatatgcggtgtttggttttttgttcttgcgatagtttactgagaatgatgatttccaatttcatccatgtccc

SEQ ID NO: 303796 - DNA, 201 bp, Homo sapiens
agtgtcctggagagtttcccaagtggtttttttgttgttgttgtttgtttttgtttgaggcagagtcttgctctgtcaccaggctgaagtgcagtggcacratcttggctcactgcaacctcaacttcttgagttcaagcaattcccttgcctcagcctcccgagtagctgggactacaggtatgtaccaccatgctcggc

SEQ ID NO: 303797 - DNA, 201 bp, Homo sapiens
acctggtctctactaaaaatacaaaaattttccgggtgtggtggcaggcacctgtaatcccagctactcgggaggctgaggcaggagaatcgcttgaaccygggaggcagaggttgtggtgagccgagactgcgctattgcactccaacctgggcaagactttgtctcaaaaaaaaaaaaaaaaaggaggggatttgcttg

SEQ ID NO: 303798 - DNA, 201 bp, Homo sapiens
ctaccctcggtatatgggcattaaaagagctcagtcttggccgggtgcggtgactcatgcctgtaatcccagcactttgggaggccaaggaagttgaatcrcctgaggtcaggagttcgagaccagcctggccaacatagtgaaaccccatctctattaaaaatacaaaaattagcccggcatggtggtgcacacctataa

SEQ ID NO: 303799 - DNA, 201 bp, Homo sapiens
tatatatacccttgtttaaaaataaaaggtttgcagctccatattttttaaaaaaatcttacccaagcatttaatcagtactgaatggttttgttcttgtyttcatgtcaagttgaatttgggggtactattccagaatatttacatgttagacaatgttctgtaaaaggggcattgtagcagcatgcaggcagtattcaa

SEQ ID NO: 303800 - DNA, 201 bp, Homo sapiens
caacatgttaatttgctacttacgaacttttctcccttttttttaaagaatgtacatggcaagtcaaagcaaacgatcgcaagtaccacgaacaacctcastttatgaacacaaaattcttgtgtattaaggagagtaaatatgcggtgagttgttaactttctgaattgttttcattaaaatgcagttttttccagtagc

SEQ ID NO: 303801 - DNA, 201 bp, Homo sapiens
cctggtctctactaaaaatacaaaaattttccgggtgtggtggcaggcacctgtaatcccagctactcgggaggctgaggcaggagaatcgcttgaacctrggaggcagaggttgtggtgagccgagactgcgctattgcactccaacctgggcaagactttgtctcaaaaaaaaaaaaaaaaaggaggggatttgcttgt

SEQ ID NO: 303802 - DNA, 201 bp, Homo sapiens
tactttttaaatatatgtttatgccccagttcccctaatgaatttagtatacaattcttaactccagcattaaaaaaaaaatttggcttatctttcaattracgaaattgtagatgttttacatttcagtatttctgaaattttaaaatagaaatttgcatgtaagtccgaaatgacaaatggataggccagcaccttctt

SEQ ID NO: 303803 - DNA, 201 bp, Homo sapiens
aggagttcgagaccagccagaccaacatggtgaaaccccctctctactaaaaatacaaaaattagccaggcgtggtggcaagtgcctgtagtcccagctayttgggaggctgaggcaggagaatcactagaacccggcaggcagaggtggcagtgagctgagatggtgccattgcactccagcctgggcaacaagagtgaa

SEQ ID NO: 303804 - DNA, 201 bp, Homo sapiens; identical to SEQ ID NO: 63352

SEQ ID NO: 303805 - DNA, 201 bp, Homo sapiens
caaaattaaagtgaaattcctgccgggcacagtggctcatgcctgcaatcccagcactttgggagactgaggtgggtggatcacctgaggtcaggagttcragaccagccagaccaacatggtgaaaccccctctctactaaaaatacaaaaattagccaggcgtggtggcaagtgcctgtagtcccagctacttgggagg

SEQ ID NO: 303806 - DNA, 201 bp, Homo sapiens
aaggtactaaactcatgatacttgaccaaaattaaagtgaaattcctgccgggcacagtggctcatgcctgcaatcccagcactttgggagactgaggtgrgtggatcacctgaggtcaggagttcgagaccagccagaccaacatggtgaaaccccctctctactaaaaatacaaaaattagccaggcgtggtggcaagt

SEQ ID NO: 303807 - DNA, 201 bp, Homo sapiens
gtttcagcgctccagacacgcctccctgcagccttagtcagagaagcctcggattttagctggttttcccgaggtctctgttactgccattctgcccttgmaggctttctagaagcctctttttcccccatgccaaaccccccctctagtttctctttcttgggttctgctatctggatgagctatttttttctaataatt

SEQ ID NO: 303808 - DNA, 201 bp, Homo sapiens
atcagtcttagatgttaactattagtattgttaaattggcggtatgagttatataaataaccatccttgtgtatgtgtgtgtgtgtgtatatatatatatrtatatggtctgcccagggtcaggccagcatcagaggcagggtctagaccaaggccagcaaactttttctgtaaagggccagcaagtaaacattttaggct

SEQ ID NO: 303809 - DNA, 201 bp, Homo sapiens
tccgggttcaagcaattctgctgtctcctgagtagctgggactacaggtgcacaccaccatgcccggctgattttttgtattttagtagagacggggtttyaccatgttgcccaggctggtctcgaactcctgagctctggcaatccacccaccttggcctctcaaagtgttaggattacaggcatgagccaccacacctg

SEQ ID NO: 303810 - DNA, 201 bp, Homo sapiens
aggattgagcttaagtgccttctgccttgaatcagaaggtactaaactcatgatacttgaccaaaattaaagtgaaattcctgccgggcacagtggctcaygcctgcaatcccagcactttgggagactgaggtgggtggatcacctgaggtcaggagttcgagaccagccagaccaacatggtgaaaccccctctctact

SEQ ID NO: 303811 - DNA, 201 bp, Homo sapiens
accccccctctagtttctctttcttgggttctgctatctggatgagctatttttttctaataattttaacctgtagaagatgtgatatgcatgaaatcccrtttctgcaatgattcttcctgttctggtcacagaatctgcctgtggggagattctcagtgtggggagtgcatgcaccccgggagccccatctcacccaaa

SEQ ID NO: 303812 - DNA, 201 bp, Homo sapiens
gtgatatgcatgaaatcccgtttctgcaatgattcttcctgttctggtcacagaatctgcctgtggggagattctcagtgtggggagtgcatgcaccccgsgagccccatctcacccaaatgtggggaggccattgactcctgtatgttgtgtgtccgctacctttccatagcaaacatttagatggattacctcttagag

SEQ ID NO: 303813 - DNA, 201 bp, Homo sapiens
tagaaacggggtttcactgtgttagccaggatggtctcgatctcctgacctcgtgatccgcccacctcggcctcccaaagtgctgggattacaggtgtgarccaccgtgcgtggctgccttaaatttttaataatcattgtgcaaattatttagcactccagtgttttgatttttctcctctgctgggtaggaataacaat

SEQ ID NO: 303814 - DNA, 201 bp, Homo sapiens
atacaggggactaggtactttcaaaagctctggatggtctacagaagcagggtctaggctgggtcacttaccagaagagcttctactcttctggtaagtgrtaagaggttcctctaaagagcttccaaattaagaagcctttatagttgcctgtcaacatccaggtagctggaaagtagatatgagctctgctgcagaaat

SEQ ID NO: 303815 - DNA, 201 bp, Homo sapiens
ttgggaggctgaggcaggtggatcgcctgaagtcgggagtttgagatcagtctggccgacatggtgaaacctggtctctactaaaaatacaaaaattttcmgggtgtggtggcaggcacctgtaatcccagctactcgggaggctgaggcaggagaatcgcttgaacctgggaggcagaggttgtggtgagccgagactgc

SEQ ID NO: 303816 - DNA, 201 bp, Homo sapiens
gtatatagggtggcatgcacatccacctgactcccactgcacctgtgccacttacaaaatataaatgctattttcatctcttataccaagcacattttctrtttcttgcctgagtcaaggatggtttagtttctggtccagtattcaagccacatcatgcctaacttgctgaattctgttttcaggattgttagatccttt

SEQ ID NO: 303817 - DNA, 201 bp, Homo sapiens
gatgacttttaaaaaatttggctccatttaataaaaaataattttaaaatagtataaaccatgaaagtatacgtactgccaggaaagtataaatataaccrgggaagtataagtataaccaatgaaagtataagtactgccagtgttaccaggggtccttgctccgagagctcccaagatggtggtgggccacttccaaaa

SEQ ID NO: 303818 - DNA, 201 bp, Homo sapiens
aaaccccatctctacaaaaaatacaaaaaaattagccaggcatggtggcacatgcctgtagttctagctactggagaggctgaagtgggaggattgcttgmcctgggacgttgaggctacagtgagtcgtgatggcactgctgtactctagcccaggtgacagagcgggaccctgtctcaaaaaaaaaacaaaaaaaacaa

SEQ ID NO: 303819 - DNA, 201 bp, Homo sapiens
aaatggggcaggtgtcaggggagttcatcagtgttcatttctgtcaaccgtctggccaggcctcctccctggtgtggatcttattttcatccctccccatytctcccccttgcagatccagaagcatcgcaagcggttgaaggcggaggagcagtggcagcgacggcagcaggtgttccgccggggcgtgtcaacgcggcg

SEQ ID NO: 303820 - DNA, 201 bp, Homo sapiens
gggaccacacctataatcctagcactttgggagcccaagcctggaggatcacttgacccaggaattcaagaccagtctggacaatgcagtgagatcccatygctacaaaaaaaaaaaaaaaataggcatggtggcatgcactggtagtcccagttacttgggatgctgaggtaggaagattccttgagcccaagagttcaa

SEQ ID NO: 303821 - DNA, 201 bp, Homo sapiens
tagtacaaaaatagagcatagacctctccttgtgaagcagttgtttttgccttacatttttttttttttttttttgagatggagtctcgctctgtcgcccrggctggagtgcagtggcgcaatctcggctcactgcaagctccgcctcctgggttcacgccattctcctgcctcagcctcccgagcagctgggactacagg

SEQ ID NO: 303822 - DNA, 201 bp, Homo sapiens
tataatttttgaaatatttactataaagttttgttcccacttacacaggattaggttaattgggagagcaacaggattaacagtggcacatggtatccacytgggccttagagtggcctctacacccaacaaggacaagagatgtttcctgggaggaggtagttgcccaaagcgacagaaaagaagtattacaatcaggaa

SEQ ID NO: 303823 - DNA, 201 bp, Homo sapiens
aaaaacaaaaaacaaaaaacaaaaagaagatgtaatggtgaggtaaaaattattatttgaaagagaggtgactaattctggggatcttaaaataaaataaaaatcattaggaacaaaataattcagtcgatatctagtttaaaaatggacatataaaaatcaacaggtttgctatagacaaggggtctgaaaactatggcc

SEQ ID NO: 303824 - DNA, 201 bp, Homo sapiens
aaaaaacaaaaaacaaaaaacaaaaagaagatgtaatggtgaggtaaaaattattatttgaaagagaggtgactaattctggggatcttaaaataaaataaaaatcattaggaacaaaataattcagtcgatatctagtttaaaaatggacatataaaaatcaacaggtttgctatagacaaggggtctgaaaactatggc

SEQ ID NO: 303825 - DNA, 201 bp, Homo sapiens
aaaaaaaacaaaaaacaaaaaacaaaaagaagatgtaatggtgaggtaaaaattattatttgaaagagaggtgactaattctggggatcttaaaataaaataaaaatcattaggaacaaaataattcagtcgatatctagtttaaaaatggacatataaaaatcaacaggtttgctatagacaaggggtctgaaaactatg

SEQ ID NO: 303826 - DNA, 201 bp, Homo sapiens
atctggaccgggattggcaaggtcttcccgctggcctgcgccgaggccggctgtagagataggtccagggtcttcctctggggcggggatggcagtgggayggggaaggggaagaggggtccctcacctcaaaattatcaaaccccaccctcgccttctgaaggacacaggactagctactggactctgggagctacatgt

SEQ ID NO: 303827 - DNA, 201 bp, Homo sapiens
agtcaaccatgagggtgatcagaggccagtgaaggcttatgggcaggggatgcagagaaaatggctcatgggaagaaggggcctccaattttcctttgccmtcccgggctctgtgtctagccatgtaaggaagtggagacagattcctgtctctaatccagacctgagaatgcttgaattctcaaagtcctcctagctggg

SEQ ID NO: 303828 - DNA, 201 bp, Homo sapiens
cagtgagatcctcagaccctgcacagccctgagtggcttcacatctcttggtcagtgtcttcattctccccagtcagggacctgggatgtttgttacttcyagaagcccttcctcaccctcataatggaccttagccccttgctggtcccactcacatcccgtctccattgctgtctgagttccaagactgagtttcttca

SEQ ID NO: 303829 - DNA, 201 bp, Homo sapiens
tcataatggaccttagccccttgctggtcccactcacatcccgtctccattgctgtctgagttccaagactgagtttcttcaagcatccacttgtgctacyaggctgagaagttctgaggatgtgaccccatctgggcatcatttaaccaataaaatttctcgaatggaccataaccttgatcaggtaaagcctctgtgtc

SEQ ID NO: 303830 - DNA, 201 bp, Homo sapiens
agcagcttgccgtagccccggcgctggtagggaggcagggttaggatgcaggccacattgtagtcttccgttgattctttctcctggagaagggggacagrtgagtgtcagggaagggatctggctcaggacagggcacagggacagcttgggcaggcactgaccttggagaagtagcccacgatgtggaagcccttacag

SEQ ID NO: 303831 - DNA, 201 bp, Homo sapiens
ctggaccgggattggcaaggtcttcccgctggcctgcgccgaggccggctgtagagataggtccagggtcttcctctggggcggggatggcagtgggatgsggaaggggaagaggggtccctcacctcaaaattatcaaaccccaccctcgccttctgaaggacacaggactagctactggactctgggagctacatgtgc

SEQ ID NO: 303832 - DNA, 201 bp, Homo sapiens
ctgccctacgggcggctccattctgccgagatagtaggaaaagaagggatggctgtgaaatgagcctgaaaaaagccaccagagagtagaagagaggaagrgaacaagagatggtttggggaactcacctggggaaaaaccgaggccggggctgtctcgctgggcactggagttgctggtgaaaccacctccaccttccgt

SEQ ID NO: 303833 - DNA, 201 bp, Homo sapiens
ggttcagggtcaaccaggagcttcactgttcgtgctatgccccaggctgctaggtgatgagtgttcttccctggctgggcctgacccactccaccagcccrcagcttaggcagggctgctcctcagtgttgaaaagcctgtgtgccagatgtgtgatggtgtctgagtgcctccctgctcagtcaggcaagtttcccgcct

SEQ ID NO: 303834 - DNA, 201 bp, Homo sapiens; identical to SEQ ID NO: 63407

SEQ ID NO: 303835 - DNA, 201 bp, Homo sapiens
tgggcaggttgaagcggagtgtgatctggaccgggattggcaaggtcttcccgctggcctgcgccgaggccggctgtagagataggtccagggtcttcctytggggcggggatggcagtgggatggggaaggggaagaggggtccctcacctcaaaattatcaaaccccaccctcgccttctgaaggacacaggactagct

SEQ ID NO: 303836 - DNA, 201 bp, Homo sapiens
ctagctactggactctgggagctacatgtgcaatttggcccccatcctttgcaagatgaagtcagggtgagagggagccgcctcctgcccatccaggagcycctaatgccaacagacaagagaaataggaggcaggagagaaaaggtgaagtgggggacctactcaccacctctctctctggagagccaggacgggaccca

SEQ ID NO: 303837 - DNA, 201 bp, Homo sapiens
ctgccaacttcagccgcttcaccctgtggggtctggagaccatccctggcccggatgccaaagtgcgtggggccttaacttggcccagccttgcggcagckgtgagtagacgaggagttccgtcttgcccccgggtggatgggctggggagcacaattgcgcagacggagcctggaggattctactgggtagtgtgtggga

SEQ ID NO: 303838 - DNA, 201 bp, Homo sapiens
gactccacccttccacgacctgaactccacccccaggccggatccctaagctccagcacttaggtctctcctaagcctccttcagtcacaagtgccacccmtttccaggccccgccctgtacctctcggagcagctaagagccacgccccttcatcaaagtatctgcgcctcgcccgccccataattccagacgcccctcc

SEQ ID NO: 303839 - DNA, 201 bp, Homo sapiens
gccccagtcctgctgccgtcttggcactgcagtgggcagtgtctggtcaccacttccccctcttgctccagtccttgggagtgaagtgcagacacttggaktcgatccgcaggagccgcttgagcatggcccgctcatggccatccacgatgtcctctgacagtgtgaggatgtactggccctgggcagaggagatgggtt

SEQ ID NO: 303840 - DNA, 201 bp, Homo sapiens
tgcaccctgagatcaagggccagctggtgaagctgctgtcggtgcgcctgtgccccccagtgtctgggcaggccgccatggacattgtcgtgaacccccckgtggcaggagaggagtcctttgagcaattcagccgagtgagtccactgtgatgcgtctgcacccctgtggccggggtcacgagagttcctgctgggccag

SEQ ID NO: 303841 - DNA, 201 bp, Homo sapiens
tgatgggcaaacatgaggtgggccccaggggaaaggagctgatctggactctgtgaatgctgctgctcccaagggcggtgcccaggtgagatgcctgcggrggaagcagcaggagctaccacctccacccagccactgcattctggagcagcgcttcccaaacttcagtgtgtgcaccgatcacctagggccttttttttt

SEQ ID NO: 303842 - DNA, 201 bp, Homo sapiens
cacatacacacacaccacagagacgtacaccacacatagacacatactacaaacactgcacacagacacccacacatgcacgtgtgtgcacacacacacaccaccacacctacacaaataccacatagacacacaccccaccacacctacacacacaccaaatacagacacacacaccccaccacacctgcacacacatta

SEQ ID NO: 303843 - DNA, 201 bp, Homo sapiens
actactcgggaggctgaggcaggagaatcacttgaacccaggaggcggaggttgcagtgggctgagattgcgccatggcactccagcctggatgacagagcaagactccgtttaaaaacaaaaaaagtagagtcatgtcttatttgtctttttgtgactggcttattttccttatcatgatgtcctccaggtccatctgtg

SEQ ID NO: 303844 - DNA, 201 bp, Homo sapiens
ctccaggcaggctgacctctggtgggtggtttaagtttgggagatgtccgggtgtgaattgtaagattgttggagctctaagcctggacacatctcatacktacatggagtgaggcctgggcctgggcccccactgctaggaggttaggggaaagaggaggaagccacagagactgaggagagaccagtgggtttgcagca

SEQ ID NO: 303845 - DNA, 201 bp, Homo sapiens
tcatccgagccaacatcggggacgcccaggctatggggcagcagccaatcaccttcctccggcaggtgagccgcccccaggagcagaggctgcaggagggyagggccctgggctgggcgggccgtcataggggccgtcctctgccccctcgatgtccaggccctcccagcctgataccctctggctgtctcccttagcctc

SEQ ID NO: 303846 - DNA, 201 bp, Homo sapiens
tgggtctcaagggaacacagggcactgagtgattctggatgggcttctgacctggggacaatttaaacagcattacaaccgacattttggttttcttgggkattttataggccaggtacaaagcagaaagtgcatagaagatgtgatccactttgcctgggaagagaagctctttctcctggctgatgaggtaagaatgtc

SEQ ID NO: 303847 - DNA, 201 bp, Homo sapiens
tcctgggcttgggagaccggtggagcctgcagtcctgtgtttgggggactggtggagcctgcagtcctgggcttggggaagtggtggactacagtccttgmggtggactggtggagcctgcagtcccggtgggggactggtggagcctgcagtcctgtgtttgggggactggtggggcctgcagtcctgagcttgggagac

SEQ ID NO: 303848 - DNA, 201 bp, Homo sapiens
catcttccccatacatgttgctctcagaggtctcctgcggcagatgctaaaaaaaagaaatggcatgagctgttagcacccggagccaagtcttgacttargcaaggttgtgggttgtgtcccctgatggacaaaccttgtccggttggccttcccacccctggtcaggctcatctcggtggttgatggcttgatgagaaa

SEQ ID NO: 303849 - DNA, 201 bp, Homo sapiens
tatctgtagtcccagccacttgggaggctgaggcatgagaaatgcttgaacccgggaggtggaggttgcagtgaaccgagatcacaccattgcactccagyctgggtgacagagggaaaccctgtctcaaaaaaaaaacaacaaaaaaaagggtctcactctgatgcccaggctggagagtagtgacgtaatcatagctca

SEQ ID NO: 303850 - DNA, 201 bp, Homo sapiens
actcctaacttcaaatgatccgcctgcctcggcctcccaaagtgctgcgattacaggcgtgagccaccatacctggcctgttttatttatatttatatacwtatatatatatatatacgtatatatatacacatatatatacacacacatatatatgtgtatatatatacacacacatatatatgtgtatatatatacaca

SEQ ID NO: 303851 - DNA, 201 bp, Homo sapiens
aatcttggctcactgcaacctccacctcccgggttcaagtgattctcctttctcagtctcctgagtagctgggattacaggcacctgccaccatacctggytgattttttttagagatggggtttcaccatgttggccaggctggtctcgaactcctgacctcaggtgatctgcctgcctcaacctcccaaagtgctggga

SEQ ID NO: 303852 - DNA, 201 bp, Homo sapiens; identical to SEQ ID NO: 63412

SEQ ID NO: 303853 - DNA, 201 bp, Homo sapiens
tttttgggtgtttttttcccctgttcttcatttgcaaagacttgcctccttgagattatttactcacaaacttaccgttaatcataggcctcattttaccrtcactcttccttatttttctgaactggatttgagaatgctggtgtgtgtgttggtttttctttgatacagcactgctgtgtacctttaaggcctgagagg

SEQ ID NO: 303854 - DNA, 201 bp, Homo sapiens
tgtgttgcccaggctggtctcgaactcttggcctcaagcgatttggctgcctcagtctcccaaagtgctaggattttagacgtgagccaccgtgcccagcmtaagtactgagtcattaactacacgttctgcactgtgctgagaactttagaatgttgtattttgcttactcctcgcagctgccctcattttacagatgag

SEQ ID NO: 303855 - DNA, 201 bp, Homo sapiens
tgggaactggagatgctgggggatgagtgcacagcaagggtcggagttaccaggcgtgggctggcaaggcagctggcaccagtacagggccttagaggccrtgctgaggatttgggtcattgtgctaagaacaacagggagccactgaagggtttgaaggagaaggaggtggagcagttagatttctgttcctaagtttta

SEQ ID NO: 303856 - DNA, 201 bp, Homo sapiens
gttgtccaggctggtctcagactgctagccttgggtgatcctcccacctcagcctcccaaagcgccaggattacctgtgtgagccactgtgcttggcctaratgctactttaaaacttgtagtgcaggcttccaataggatgaaccctccgcctacccagcctgcccaagtcagtcaccacacatacgctgggctctgcct

SEQ ID NO: 303857 - DNA, 201 bp, Homo sapiens
atctccaaaatagatggggaattaacctcaaaggccagggtgggtgtctgccagctgtgagtgctggactcgggactggaaagaaccaaacgggtataaaygctgctctggcagggaaaagtgggtggaagaacacaatgattccactcgagtggggggttaagtgttgcaaaggaaacccaacagggttagctcttcaaa

SEQ ID NO: 303858 - DNA, 201 bp, Homo sapiens
tccgtgggccgcctttttgttgattgtttcctttgctgtgccttgttagaatatccatccgcccctgaccctcatgctggtgcgaggcctgtgggttgggraggacagttattctccctgctaacaccctatgaaatatgccgtccctagagctggggggttggtgccctcccctgatccctgcttgagccaaagcggcgg

SEQ ID NO: 303859 - DNA, 201 bp, Homo sapiens
cctccagcatttgtccttgtcttacaaacaatccaattatatatactcttttagctttttttttttcaatgtacaattattattgactatagtcaccctgktgtggtgtcaaatactagataattccttctactttttggtacccattaaccatccccacttctccccacccacccctactgcccttcccagactctggga

SEQ ID NO: 303860 - DNA, 201 bp, Homo sapiens
cctgttccctgccttgttctctggggcagagggctggggaggggctgggagggctcagcccacagcccctgagggagttgtcacagggcagtgagggagargagctgaggctggccctggtctgaggggcgctcactgggcctccctcccacagccactgctgctgacccttggagcaggccagcagccctggatgttaga

SEQ ID NO: 303861 - DNA, 201 bp, Homo sapiens
ggggattgggtggggacgagtgtgagagaaatcaagtgagctcctgagctgtctcagcatccagcctgaggccttgcctccttgcttattccagaaagttycttcaggcacacttggctcatccctggaatggcacaggaggctgggccggctgggcctcatggcccacagcacctgtgccctcccttgccttggccacac

SEQ ID NO: 303862 - DNA, 201 bp, Homo sapiens
agcctcccaaagcgccaggattacctgtgtgagccactgtgcttggcctagatgctactttaaaacttgtagtgcaggcttccaataggatgaaccctccrcctacccagcctgcccaagtcagtcaccacacatacgctgggctctgcctttgtgtgctatgggccttagacaagtcattcagccttggtttactcttct

SEQ ID NO: 303863 - DNA, 201 bp, Homo sapiens
ggatttccgcaagtgctgcaggaaagatcagtggctggagtgaatctttatccagagatactgactgctgtgctgtttccatctctcatcaggagaaggartcggtcctgggtaatctggccaaaaaagcaaagctgacggaagacctgtttaaccaagtcccaggaattcactgcaaccccttgcagggggccatgtacg

SEQ ID NO: 303864 - DNA, 201 bp, Homo sapiens
gggaggccgaggtgggaggatcactcgaggccaggagtttgagatcagcctggataatatagcaagaccccttctctacaaaaaaatgttttaaaactcasccaggtttggtggtgcgcgcttccagctactcaggaggctgagatgggaggatcgcttaagcccaggagttccaggctgcggtgagctgatgacgccact

SEQ ID NO: 303865 - DNA, 201 bp, Homo sapiens
ggaacagatgcagatcaacctgtggctgttttcccgtctaggttctcacaggtatctcctgacagaggtacttaacaatggctctgctggaaatttctatraataaaatgtccaaaatggtgactgcgtttaactttcattgtagtttgaatgtaaacattgaggacattactaactttacaccttcactctttgtaattt

SEQ ID NO: 303866 - DNA, 201 bp, Homo sapiens; identical to SEQ ID NO: 63414

SEQ ID NO: 303867 - DNA, 201 bp, Homo sapiens
cagagttcaggggcctacaccctgtcttccctgcctcagtgatctggcagctcagccctggaggctcttgcctgcactctcagtcacagacgtgtgtagcygcagctccggtttcttctggtttcacttgtctttctgttttgggaccagatcttgtgctgagcctcagctgtgaaatggacctgttttctgggactgtgg

SEQ ID NO: 303868 - DNA, 201 bp, Homo sapiens
gcctggccaacacgttgaaatcctgtctctactaaatacaaaaattagccgggtgtggtggtgcacgtctgtaatcccagctactcgggaggctgaggcaygagaattgcttgaacccaggaggtagaggttgcagtgagctgagatggcactactgtactccatcttgggcaagagagcaagcctctgtctcaaaaaaat

SEQ ID NO: 303869 - DNA, 201 bp, Homo sapiens
aaattagccgggcatggtggtgcatgcctgtaatcccagctacttgggagcttgaggcaggagaatcgcttgaacccaggaagtggaggttgcactgagcygaggtagcgccattgcactccagcctgcaacaagagcgatactccgtctcaaaaaaaataagaaaaagaaatttgaattaggcctcctgggccagttagc
